United States Patent Application Publication US 2017/0114356 A1 - sequence listing, part 52

SEQ ID NO: 70016 - DNA, 1160 bp, Zea Mays
atgacgagggaatgcccatccgagcttgtatttgttttcttatttggccttgaagtaatcccaaactcttcttggtacaggtggaatttagatctactgagtagtggaaattttttatttcaatgcccgaccaaagcatcattcaataatcaatatacatgggcatgtgttgaacctggccatctagcaacaaaaaatgaccctcttctcaagactgttgaaggcactgatcatacaattatacttatgcttctggaaaccatcattcggcagcttaccaccaggaaaggacaggtcagagcgcatgtgcttcaagcaatggttcaaatggatgtccttgttcctactggagatatgactgctgtcagaagaaccgctcaatttttccttaatagctttcaagagcgcctaacagcacaaaggaaggagagagaaatgacaaccgcagaactgggattcaaaaagcaattaactaaggaggagaagtttgaaaggaggaagcagagacttgctgcaatcggagaggatcttttggcgattgctgctgatcaaccatttcgcttccttgccacatttacatttgtggtcagagcattctcagttctagatggtattgggaaaggccttgatcctaggtttcatattacagagattgctaagtcatatgccaaggaattgctaaggtttaatgacgctggtgttgaaatagttgtgaaggcaagtttcaacatttggtgtgtgaagagacatgtgtattcctcctatgatgaattcctcaggctccatgaaggatattaatggtatacatcaacaattcattctattttaattgcttgcaaaacttttttggcccttcagatgagttccacgcatcaagaagtcaagaatccaggaggcctaaaataggagaggagggcgcagtttgattcaatccatgtcaagtcagaggctgctgcgaggtttgcacatgcaagtagaatttagatggtgatgttttgtctttgttcccatttttataacgactaggtgtttgaattcctaagattaaagtttatgtagattcttctttgtaattagatctctgttaggcatctaactgaataaatgatctccattatggactggttatattattttttgtgcgatcggatgggttaaag

SEQ ID NO: 70017 - DNA, 1806 bp, Zea Mays
acctcccaccgccccaccaatccgcctctgctcgctcgcccgctcgcgggctcgtcgtccgccagacgccccagaccgccgcctccaaaagtcccagcaccgtgccaccgtctgctcgcgcgctcctcctccgtgcgcaaccgcatcacgcggcggcatggttgactgcccgcggctgcttctgccggcccctcgcgtcgctgccgctcaatacacgcgctgcgccgctggatgttggtcgaaccagggacgcgctcccttctccgtttctttcagccacctccgccgctggtggagctacgtttctgtgcgatcctcgtcctctggggccggaagccagtcaagcgttgcggatgaaccagaggctgcagaatgggccttgcaggatttctacattttgcggaaggatgttgagttggctcttgagcgtgtcaatgaagtcaggcagtctgccggtttgcaacagctcgaggaggatatcgcttcgcttgagaacaagtccagtgatagttccttatgggatgatccttccaaggcacaggggatacttgtttctctgacagaggtcaaagacaaagtgaagcttctcaacgatttcaagttacaggtctgagcaattgaagaagcagagactattgtgaagcttacagaagaattagattctatagatactggtcttcttgaggaggcctcaaagattataaaggcattaaataaggcattagacaactttgagatgacacagcttctttctggaccatatgataaggaaggtgctgtaattaatatttctgctggcgctggtggcactgacgctcaggattgggctgacatgttactaaggatgtatgtaagatggggagagaagcagcgttataagacacgagtagttgagaaatcacctggtgaagaggccggtataaaatcagcaactgttgaactagagggaagatatgcttatggctatctctctggcgagaaagggacacacaggattgtccgtcaatcaccatttaatgctaaagggcttcggcagacaagctttgctggtgttgaggttatgcctcttctaccagaggaatccatggctgtggacatacctgaagaggacctggagataagcttcacaagagctggaggtaaaggaggccagaacgtgaacaaggtggaaacggctgttcgcatggttcatattccaactggaattgcagttcgttgctcagaggagaggagccagctggccaacaaaataaaggccctcagccggctcaaagcgaagctgctggtgatcgccctggagcagcgtgcatcagaaatcaagcagatccgtggagacattgtgaaggcagagtgggggcagcagatacgcaactacgtcttccacccctacaagctcgtcaaggatgtcaggacagggtgtgagacgtcggacatcactggcgtaatggatggagagctagatccctttatcagagcataccttaagtacaagctaactgcggcagctaccagctgattttgttggggagcatagcgatgagtgatacttacatccattgtattatgttgtagtatgagtttttcatctctctctctctcttgatttagtataatttcatagcactagcaatctagcattgtatttattgatctaggaatcgaagtggaaacatgggttttgcttcgagttctacaataagagtttgatcgaattgcatgacttgataaagacctcttgctagttccataaattgtattgaaatgaatatacgggttcttgttggtatgagatgtttgttatgttcc

SEQ ID NO: 70018 - DNA, 2073 bp, Zea Mays
acctcccaccgccccaccaatccgcctctgctcgctcgcccgctcgcgggctcgtcgtccgccagacgccccagaccgccgcctccaaaagtcccagcaccgtgccaccgtctgctcgcgcgctcctcctccgtgcgcaaccgcatcacgcggcggcatggttgactgcccgcggctgcttctgccggcccctcgcgtcgctgccgctcaatacacgcgctgcgccgctggatgttggtcgaaccagggacgcgctcccttctccgtttctttcagccacctccgccgctggtggagctacgtttctgacttgggtcaacacagtgcgatcctcgtcctctggggccggaagccagtcaagcgttgcggatgaaccagaggctgcagaatgggccttgcaggatttctacattttgcggaaggatgttgagttggctcttgagcgtgtcaatgaagtcaggcagtctgccggtttgcaacagctcgaggaggatatcgcttcgcttgagaacaagtccagtgatagttccttatgggatgatccttccaaggcacaggggatacttgtttctctgacagaggtcaaagacaaagtgaagcttctcaacgatttcaagttacaggtctgagcagtgagcactcatggcattgccagtgaactgaatgtactatttcacagtttgtatgataacaacatggcatatttgcacagcttgtggtagctaattaacaacaacaacaaaaagaatctactgcaaatattcttgcaacagtttggaattatacatgctatcgaggaagaagagtgacatatgtcaacaatttggcatgagagctactgcactactagttcttagttgtgctgtttcttttctacttgtagattgaagaagcagagactattgtgaagcttacagaagaattagattctatagatactggtcttcttgaggaggcctcaaagattataaaggcattaaataaggcattagacaactttgagatgacacagcttctttctggaccatatgataaggaaggtgctgtaattaatatttctgctggcgctggtggcactgacgctcaggattgggctgacatgttactaaggatgtatgtaagatggggagagaagcagcgttataagacacgagtagttgagaaatcacctggtgaagaggccggtataaaatcagcaactgttgaactagagggaagatatgcttatggctatctctctggcgagaaagggacacacaggattgtccgtcaatcaccatttaatgctaaagggcttcggcagacaagctttgctggtgttgaggttatgcctcttctaccagaggaatccatggctgtggacatacctgaagaggacctggagataagcttcacaagagctggaggtaaaggaggccagaacgtgaacaaggtggaaacggctgttcgcatggttcatattccaactggaattgcagttcgttgctcagaggagaggagccagctggccaacaaaataaaggccctcagccggctcaaagcgaagctgctggtgatcgccctggagcagcgtgcatcagaaatcaagcagatccgtggagacattgtgaaggcagagtgggggcagcagatacgcaactacgtcttccacccctacaagctcgtcaaggatgtcaggacagggtgtgagacgtcggacatcactggcgtaatggatggagagctagatccctttatcagagcataccttaagtacaagctaactgcggcagctaccagctgattttgttggggagcatagcgatgagtgatacttacatccattgtattatgttgtagtatgagtttttcatctctctctctctcttgatttagtataatttcatagcactagcaatctagcattgtatttattgatctaggaatcgaagtggaaacatgggttttgcttcgagttctacaataagagtttgatcgaattgcatgacttgataaagacctcttgctagttccataaattgtattgaaatgaatatacgggttcttgttggtatgagatgtttgttatgttcc

SEQ ID NO: 70019 - DNA, 2057 bp, Zea Mays
acctcccaccgccccaccaatccgcctctgctcgctcgcccgctcgcgggctcgtcgtccgccagacgccccagaccgccgcctccaaaagtcccagcaccgtgccaccgtctgctcgcgcgctcctcctccgtgcgcaaccgcatcacgcggcggcatggttgactgcccgcggctgcttctgccggcccctcgcgtcgctgccgctcaatacacgcgctgcgccgctggatgttggtcgaaccagggacgcgctcccttctccgtttctttcagccacctccgccgctggtggagctacgtttctgtgcgatcctcgtcctctggggccggaagccagtcaagcgttgcggatgaaccagaggctgcagaatgggccttgcaggatttctacattttgcggaaggatgttgagttggctcttgagcgtgtcaatgaagtcaggcagtctgccggtttgcaacagctcgaggaggatatcgcttcgcttgagaacaagtccagtgatagttccttatgggatgatccttccaaggcacaggggatacttgtttctctgacagaggtcaaagacaaagtgaagcttctcaacgatttcaagttacaggtctgagcagtgagcactcatggcattgccagtgaactgaatgtactatttcacagtttgtatgataacaacatggcatatttgcacagcttgtggtagctaattaacaacaacaacaaaaagaatctactgcaaatattcttgcaacagtttggaattatacatgctatcgaggaagaagagtgacatatgtcaacaatttggcatgagagctactgcactactagttcttagttgtgctgtttcttttctacttgtagattgaagaagcagagactattgtgaagcttacagaagaattagattctatagatactggtcttcttgaggaggcctcaaagattataaaggcattaaataaggcattagacaactttgagatgacacagcttctttctggaccatatgataaggaaggtgctgtaattaatatttctgctggcgctggtggcactgacgctcaggattgggctgacatgttactaaggatgtatgtaagatggggagagaagcagcgttataagacacgagtagttgagaaatcacctggtgaagaggccggtataaaatcagcaactgttgaactagagggaagatatgcttatggctatctctctggcgagaaagggacacacaggattgtccgtcaatcaccatttaatgctaaagggcttcggcagacaagctttgctggtgttgaggttatgcctcttctaccagaggaatccatggctgtggacatacctgaagaggacctggagataagcttcacaagagctggaggtaaaggaggccagaacgtgaacaaggtggaaacggctgttcgcatggttcatattccaactggaattgcagttcgttgctcagaggagaggagccagctggccaacaaaataaaggccctcagccggctcaaagcgaagctgctggtgatcgccctggagcagcgtgcatcagaaatcaagcagatccgtggagacattgtgaaggcagagtgggggcagcagatacgcaactacgtcttccacccctacaagctcgtcaaggatgtcaggacagggtgtgagacgtcggacatcactggcgtaatggatggagagctagatccctttatcagagcataccttaagtacaagctaactgcggcagctaccagctgattttgttggggagcatagcgatgagtgatacttacatccattgtattatgttgtagtatgagtttttcatctctctctctctcttgatttagtataatttcatagcactagcaatctagcattgtatttattgatctaggaatcgaagtggaaacatgggttttgcttcgagttctacaataagagtttgatcgaattgcatgacttgataaagacctcttgctagttccataaattgtattgaaatgaatatacgggttcttgttggtatgagatgtttgttatgttcc

SEQ ID NO: 70020 - DNA, 2203 bp, Zea Mays
acctcccaccgccccaccaatccgcctctgctcgctcgcccgctcgcgggctcgtcgtccgccagacgccccagaccgccgcctccaaaagtcccagcaccgtgccaccgtctgctcgcgcgctcctcctccgtgcgcaaccgcatcacgcggcggcatggttgactgcccgcggctgcttctgccggcccctcgcgtcgctgccgctcaatacacgcgctgcgccgctggatgttggtcgaaccagggacgcgctcccttctccgtttctttcagccacctccgccgctggtggagctacgtttctgacttgggtcaacacagtgcgatcctcgtcctctggggccggaagccagtcaagcgttgcggatgaaccagaggctgcagaatgggccttgcaggatttctacattttgcggaaggatgttgagttggctcttgagcgtgtcaatgaagtcaggcagtctgccggtttgcaacagctcgaggaggatatcgcttcgcttgagaacaagtccagtgatagttccttatgggatgatccttccaaggcacaggggatacttgtttctctgacagaggtcaaagacaaagtgaagcttctcaacgatttcaagttacagattgaagaagcagagactattgtgaagcttacagaagaattagattctatagatactggtcttcttgaggaggcctcaaagattataaaggcattaaataaggcattagacaactttgagatgacacagcttctttctggaccatatgataaggaaggtgctgtaattaatatttctgctggcgctggtggcactgacgctcaggattgggctgacatgttactaaggatgtatgtaagatggggagagaagcagcgttataagacacgagtagttgagaaatcacctggtgaagaggccggtataaaatcagcaactgttgaactagagggaagatatgcttatggctatctctctggcgagaaagggacacacaggattgtccgtcaatcaccatttaatgctaaagggcttcggcagacaagctttgctggtgttgaggttatgcctcttctaccagaggaatccatggctgtggacatacctgaagaggacctggagataagcttcacaagagctggaggtaaaggaggccagaacgtgaacaaggtggaaacggctgttcgcatggttcatattccaactggaattgcagttcgttgctcaggtataatttcacaccagtttgcatttgtattgtgctgaacaaaaacatactcagtcttctctatgtacattgggtcttaggcaatcgattataaaaaaaagcaaaaaaaaaagtagtaaatgaattggtggtaagcaaaagatgtgaaaaactaattgatgccctcctgaaagtaccagaacttcctacccctgaattgtgaccatagttgataggtaaaatcttctcagcttttaccaatgctggattgccactcttgcagaaaagctatttcaactttgtgtagccaggatgtctgaaatatctttgaaaattgaaatcaagaagtcaaagtaactgcagttaatacgagataaatctggcatttgtttttaatgtccaactttgcagaggagaggagccagctggccaacaaaataaaggccctcagccggctcaaagcgaagctgctggtgatcgccctggagcagcgtgcatcagaaatcaagcagatccgtggagacattgtgaaggcagagtgggggcagcagatacgcaactacgtcttccacccctacaagctcgtcaaggatgtcaggacagggtgtgagacgtcggacatcactggcgtaatggatggagagctagatccctttatcagagcataccttaagtacaagctaactgcggcagctaccagctgattttgttggggagcatagcgatgagtgatacttacatccattgtattatgttgtagtatgagtttttcatctctctctctctcttgatttagtataatttcatagcactagcaatctagcattgtatttattgatctaggaatcgaagtggaaacatgggttttgcttcgagttctacaataagagtttgatcgaattgcatgacttgataaagacctcttgctagttccataaattgtattgaaatgaatatacgggttcttgttggtatgagatgtttgttatgttcc

SEQ ID NO: 70021 - DNA, 1839 bp, Zea Mays
cttatcgctctgattcctcctcgttcacctcccaccgccccaccaatccgcctctgctcgctcgcccgctcgcgggctcgtcgtccgccagacgccccagaccgccgcctccaaaagtcccagcaccgtgccaccgtctgctcgcgcgctcctcctccgtgcgcaaccgcatcacgcggcggcatggttgactgcccgcggctgcttctgccggcccctcgcgtcgctgccgctcaatacacgcgctgcgccgctggatgttggtcgaaccagggacgcgctcccttctccgtttctttcagccacctccgccgctggtggagctacgtttctgacttgggtcaacacagtgcgatcctcgtcctctggggccggaagccagtcaagcgttgcggatgaaccagaggctgcagaatgggccttgcaggatttctacattttgcggaaggatgttgagttggctcttgagcgtgtcaatgaagtcaggcagtctgccggtttgcaacagctcgaggaggatatcgcttcgcttgagaacaagtccagtgatagttccttatgggatgatccttccaaggcacaggggatacttgtttctctgacagaggtcaaagacaaagtgaagcttctcaacgatttcaagttacagattgaagaagcagagactattgtgaagcttacagaagaattagattctatagatactggtcttcttgaggaggcctcaaagattataaaggcattaaataaggcattagacaactttgagatgacacagcttctttctggaccatatgataaggaaggtgctgtaattaatatttctgctggcgctggtggcactgacgctcaggattgggctgacatgttactaaggatgtatgtaagatggggagagaagcagcgttataagacacgagtagttgagaaatcacctggtgaagaggccggtataaaatcagcaactgttgaactagagggaagatatgcttatggctatctctctggcgagaaagggacacacaggattgtccgtcaatcaccatttaatgctaaagggcttcggcagacaagctttgctggtgttgaggttatgcctcttctaccagaggaatccatggctgtggacatacctgaagaggacctggagataagcttcacaagagctggaggtaaaggaggccagaacgtgaacaaggtggaaacggctgttcgcatggttcatattccaactggaattgcagttcgttgctcagaggagaggagccagctggccaacaaaataaaggccctcagccggctcaaagcgaagctgctggtgatcgccctggagcagcgtgcatcagaaatcaagcagatccgtggagacattgtgaaggcagagtgggggcagcagatacgcaactacgtcttccacccctacaagctcgtcaaggatgtcaggacagggtgtgagacgtcggacatcactggcgtaatggatggagagctagatccctttatcagagcataccttaagtacaagctaactgcggcagctaccagctgattttgttggggagcatagcgatgagtgatacttacatccattgtattatgttgtagtatgagtttttcatctctctctctctcttgatttagtataatttcatagcactagcaatctagcattgtatttattgatctaggaatcgaagtggaaacatgggttttgcttcgagttctacaataagagtttgatcgaattgcatgacttgataaagacctcttgctagttccataaattgtattgaaatgaatatacgggttcttgttggtatgagatgtttgttatgttcc

SEQ ID NO: 70022 - DNA, 1056 bp, Zea Mays
acctcccaccgccccaccaatccgcctctgctcgctcgcccgctcgcgggctcgtcgtccgccagacgccccagaccgccgcctccaaaagtcccagcaccgtgccaccgtctgctcgcgcgctcctcctccgtgcgcaaccgcatcacgcggcggcatggttgactgcccgcggctgcttctgccggcccctcgcgtcgctgccgctcaatacacgcgctgcgccgctggatgttggtcgaaccagggacgcgctcccttctccgtttctttcagccacctccgccgctggtggagctacgtttctgacttgggtcaacacagtgcgatcctcgtcctctggggccggaagccagtcaagcgttgcggatgaaccagaggctgcagaatgggccttgcaggatttctacattttgcggaaggatgttgagttggctcttgagcgtgtcaatgaagtcaggcagtctgccggtttgcaacagctcgaggaggatatcgcttcgcttgagaacaagtccagtgatagttccttatgggatgatccttccaaggcacaggggatacttgtttctctgacagaggtcaaagacaaagtgaagcttctcaacgatttcaagttacagattgaagaagcagagactattgtgaagcttacagaagaattagattctatagatactggtcttcttgaggaggcctcaaagattataaaggcattaaataaggcattagacaactttgagatgacacagcttctttctggaccatatgataaggaaggtgctgtaattaatatttctgctggcgctggtggcactgacgctcaggattgggctgacatgttactaaggatgtatgtaagatggggagagaagcagcgttataagacacgagtagttgagaaatcacctggtgaagaggccggtataaaatcagcaactgttgaactagagggaagatatgcttatggctatctctctggcgagaaagggacacacaggattgtccgtcaatcaccatttaatgctaaagggcttcggcagttttctcctatat

SEQ ID NO: 70023 - DNA, 2246 bp, Zea Mays
agaatgggtaaataccgcaaaaaccagataagcccggtgcgccgtctccttccttctcggcgctctctcgcccgcgcctccatcactcgctagtcgctccctccgcctccgtccaccatgcccgcctcactccttcctccgaccttcctcccccaccacctgcgccgcctcgctcccgccggttgcactacctcttccgtcacctcctcctcggtctccatcccagcgagccgctacgacttcgagcccctcttggcctacctctcgtccccctccgtatcggcctccctcacctcgccatccccaccggcatccgttccggcgcccgagcaccgcctcgccgcgtcttactcggctgtcccgtcgcacgagtggcatgcgttgctgcgtgacctcgccgctagtgacgcgtccctgccgctggccttcgcgttgctacctttcctccaccgccaccgtctctgcttcccgctcgacctcctcctctcgtctcttctgcactcgctctccgtgtccggccgccttctcccgcactccctccttctctccttcccgccgtcgctctccgacccgccgtccccactgctgctcaactccctcctcgctgcgtccgccgcggcctcgcgccccgccgtggccctccggttgctctcgctgctccgcgagcacgatttcctcccggacctcgcgtcctactcgcatctcctcgcttcgctgctcaacacgcgggacccgcccgacgccgcactgctcgagcgcctcctcggtgacctcagggagtcgcggctcgagcccgatgctccgctcttctcggacctcatctctgctttcgcgcgggcggcgctcccggacgctgcgctggagctcctcgcctccgcgcaggccattgggctcacgccgcggtctaacgcggtcaccgctctcatctccgccctaggcactgcagggcgcgtcgccgaggcggaggcgctgttcctcgagttcttcctcgctggggagatcaagccgcggacgcgtgcttacaacgcgctgctcaaaggttatgtcaggattgcttcgctcaagaacgcagagcaagttcttgacgaaatgtcacaatgcggagttgcgccagatgaggccacttacagcctgcttgtggacgcgtacacaagagctgggaggtgggaaagtgcgaggatactgctgaaggagatggaggccgatggagttaaaccaagctcgtacgtgttcagtcggatccttgcaggattccgtgacaggggggattggcaaaaagcttttgcagtgctccgagagatgcaagctagtggagtaaggccagatcggcatttctacaacgtcatgatcgatacatttgggaagtacaactgccttgggcatgctatggatgcctttaacaaaatgcgagaagaagggattgagccggatgttgtcacatggaatactctcattgatgcacattgtaaaggagggcggcatgaccgtgctgcggagctgtttgaggagatgcgtgaaagcaattgcccaccaggcacaaccacatacaacatcatgataaatttactcggagagcaagaacactgggagggtgtggaagcaatgctatcagagatgaaggagcagggactggtacccaacattatcacatatactactctcgtggatgtgtatggaaggtccggtaggtacaaggaggcaattgattgcattgaagcaatgaaagctgatggtctcaagccatcgcctactatgtaccatgccttagtcaatgcatatgctcaaaggggtttagcagatcatgcgttaaatgtggtcaaggctatgaaagcagatggcctggaggttagcatcttagtgttgaattcgttgattaatgcttttggtgaagatagaagggttgttgaagccttctctgtgctgcagttcatgagggagaatggtttgaggcctgacgttataacatacacgacattgatgaaagctttaatacgtgttgagcagtttgataaggttcctgttatctatgaagaaatgatcacatcaggatgtgcccctgatagaaaagctagagcaatgctgcggtcaggtttgaaatacataaaacacatgagggttgcataggaaactaaacacaattactgatagcatctgatggaatcatataccttctcctgatcttatagaacatttcaacagaaggtcaaggatatgtactacaagataaggagcatgatggaagccgc

SEQ ID NO: 70024 - DNA, 1333 bp, Zea Mays
ccgtcctccttgtcggcgtcggcggattcttcctctggaagaagcttttcagaaacaaagctgggaggttccagagcgcgcagaggttcagctcgtttgactccagcgtccctcttaccccggtccaactccaagacaggagcaaggaggacgaagccggtcagagcagcgacctgaacgtcacgctctttgacatggacgccatcgctctctccactgacaacttcgcggcgtggaacaagctcggggaaggcggcttcggcgcggtgtacaaggggcaactggaaggagggcaggcggtggcggtgaagcggctgtccaagtactcgacgcagggactgggcgagttcaagaacgaggtgatgctcatcgccaagctgcagcacgtgaacctggtcaggctcctgggctgctgcgtccatggagaggagaggatgctggtgtacgagtacatggagaacaagagcctcgacaacttcatctttgacaagaaccgatccgcgcagctgcactggtccaagaggttcgacatcatcctgggcatcgcacgcgggctcctgtacctgcaccaggactcccggtacaaggtgatccaccgggatctcaaggccggcaacatcctcttggacaaggacatgaaccccaagatctccgacttcggcgtggccaggatcttcggcgacgacaccgactcgcacaccaggaaagtcgtcggaacatacgggtacatgtccccggagtacgccatggacggcgtcttctcggtgaagtccgacgtgttcagcttcggcgtgctggtgctggagatcgtcagcggcaggaagaaccggggcatgtacagcagcggcgagcagacgagcctcctcagccaggcgtggaggctgtggagggaaggcaacgcgctggcgctgctggacgaggcggtggtccgcgccggcacgcaccggagctccgaggtgctgcgctgcgtgcaggtggcgctgctgtgcgtgcaggagcggcccgacgaccggccgcacatggcggcggtgttcctggcgctgggcaacccgagcgcggtgctcccgcagcccaggcacccgggctactgcaccgaccggggctccgcctccaccgacggcgagtggtcgtccacatgcaccgtcaacgacgtcaccgtcaccatcgtggaaggacggtgacgccacgtggcggctctctcagccctgagccgtgctagctgccgggatactgccgcgccttcggtgatttgtgaatagcttgactgatatatgggcaggggttgacaaccccccaaagcgcaaagctgtgtgtgtgtgtgtgtgattgtgat

SEQ ID NO: 70025 - DNA, 2573 bp, Zea Mays
gtcatagttgggtcgagggtcgtgtgcatagcttgtgctggccgagtagtcccgagagccatggcggccgcgggtgcgcgactaccattagctctgctgcttcccctgttcgttactttcttcgcctcccccgcctccgcgactgacaccatcaccgccaactcttccctcagcgatggccagacgctcgtttcagcgggcggggtgttccagctgggcttcttcaccccggccagctcgacggcgaggttcttgggcatctggtacatgggcctcgctccccagaccgttgtctgggtcgccaaccgggaagccccgatcaccggcaccacggcgagcctggccatcaacgccaccggcagcctggtgctcgccgacccctctgggcgggtgttctggtcgtcgccgcagtccaacatgagcagcactggctcccctgtcggggcgcagctgctggacagcggcaacttcgtgcttcaaggagggggtggcgccgtcctgtggcagagcttcgattacccttccgacaccctgctcccgggcatgaagctcgggtgggacctgaccacggggctcgaccggcacctgacgacgtggcggagcaccggcgacccgtcgccgggcgactacacgttcgggttcgacctccgcggcgtccccgaggggttcatacggcgcgacggcacggtgcccgtgtaccggaacgggccgtggaacgggctgcagttcagcggcgagccggagatggagcccaacaacagcaacttccagttcgagttcgtcgacaacgccagcgacgtgtactacacgttcctggtggacggcggcggcggcagcggcaacggcggtgtcgtgtcgcggttcgtgctgaaccagtcgagcgtgcagcgctacgtgtggccgccgggcgggcaggggtggagcctctactggtcgctgccgcgggaccagtgcgacaactacgcgcactgcggcgccttcggcgcctgcgacaccagcggcggctcggcggcgtgcgcctgcgtgcacgggttcacgccggcgtcgccgcgggactgggagctcagggacagctccgctgggtgcaggcgcctcacgcggctcaactgcaccggggacggcttcctgccgctgcgcggcgtgaagctgccggacacgacgaacgcgacggaggatgcgaccatcactgtcgaccagtgcaggcagaggtgcctcgccaactgctcctgcctggcctacgccgcttccagcatcaagggaggcgatagtggctgcatcatctggagctcgccgctcattgacatcaggcatttcccttccggtggccaggatctgttcgttcgcctggcggcatctgacctgctccaactccaagacaggagcaaggaggacgaagccggtcagagcagcgacctgaacgtcacgctctttgacatggacgccatcgctctctccactgacaacttcgcggcgtggaacaagctcggggaaggcggcttcggcgcggtgtacaaggggcaactggaaggagggcaggcggtggcggtgaagcggctgtccaagtactcgacgcagggactgggcgagttcaagaacgaggtgatgctcatcgccaagctgcagcacgtgaacctggtcaggctcctgggctgctgcgtccatggagaggagaggatgctggtgtacgagtacatggagaacaagagcctcgacaacttcatctttgacaagaaccgatccgcgcagctgcactggtccaagaggttcgacatcatcctgggcatcgcacgcgggctcctgtacctgcaccaggactcccggtacaaggtgatccaccgggatctcaaggccggcaacatcctcttggacaaggacatgaaccccaagatctccgacttcggcgtggccaggatcttcggcgacgacaccgactcgcacaccaggaaagtcgtcggaacatacgggtacatgtccccggagtacgccatggacggcgtcttctcggtgaagtccgacgtgttcagcttcggcgtgctggtgctggagatcgtcagcggcaggaagaaccggggcatgtacagcagcggcgagcagacgagcctcctcagccaggcgtggaggctgtggagggaaggcaacgcgctggcgctgctggacgaggcggtggtccgcgccggcacgcaccggagctccgaggtgctgcgctgcgtgcaggtggcgctgctgtgcgtgcaggagcggcccgacgaccggccgcacatggcggcggtgttcctggcgctgggcaacccgagcgcggtgctcccgcagcccaggcacccgggctactgcaccgaccggggctccgcctccaccgacggcgagtggtcgtccacatgcaccgtcaacgacgtcaccgtcaccatcgtggaaggacggtgacgccacgtggcggctctctcagccctgagccgtgctagctgccgggatactgccgcgccttcggtgatttgtgaatagcttgactgatatatgggcaggggttgacaaccccccaaagcgcaaagctgtgtgtgtgtgtgtgtgattgtgat

SEQ ID NO: 70026 - DNA, 3016 bp, Zea Mays
ctctccttcgctcctttctgtttctctctccagagtggagtggttggtgctctcagtcccaggacccagggtggccgtggcctctgccaatagggccgggccggggctccaccgcacaccgggagggagagatggtgggaacgagcccagggggaggagtgttctgtttctcctccatggtctcctctcctcggctcctcttcctgctcctcgccggcgcctcgctatgctgtgtggcggcgcagaagacggacacgctgcggcagggggagtcgctgtccggggcggcgacgctggtgtcctcgccggagggggtgttcgaggcgggcttcttcgcgccggaccccaagcagccttctcgccagtacctcggcatctggtaccacagcatctcgccgcggaccgtcgtctgggtcgccaaccgcgtcgcgccggccacctcggcctcgccgtcgctcacgctcaccgtcaccggcgagctccgcgtcctcgacggcacggcggccaacggcaccgccgacgcgccgctgctctggtcctccaacaccacctcgcgcgcgggcccgcggggcggctactcggcggtgctccaggacactggcagcctcgaggtgcgcagcgaggatggggtgctctgggacagcttctggcacccgacggacaccatcctgtccgggatgcgcatcaccttgcaggcgccagggaggggccctaaggagcggatgctgttcacgtcctgggccagcgagacggacccttcgccggggcgatacgcgctcggcctcgacccgggcaactccggtcaggcctacatctggaaagatggcaacgttacgtactggaggtcgggacagtggaatggggtgaattttataggcattccatggaggccactctacaggagtgggttcacaccggcaattgatccagtgcttggaaattattacacatacactgcaacaaacacttctttgcagaggtttgttgttttgccaaatggcacagacatctgctacatggttagaaaatcttcacaagattgggagcttgtctggtaccaaccatcaaatgagtgtgaatactatgctacatgtggtccaaatgcaaaatgcactgcatcgcaagatggcaaggcaaaatgcacctgcctaaaaggttttcatccgaagttgcaggagcagtggaatgcaggaaattggagtcaaggttgcatcaggagcccacctctgggttgtgagaccaatcagtctggggatggatttcttccaatgggaaacataaagtggcctgatttctcatattgggtatctacagtgggagatgagcctggatgcagaactgtctgccttaacaactgctcatgcggtgcttatgtttacacagctacaacagggtgcctagcctggggtaacgaactaattgacatgcatgagttgcaaacaggggcatatactctaaacctgaagcttcctgcttctgaattggaggacatcacccaatttggaaaatagccacgataatatcagccatagtgttatttgttttggctgcttgccttcttctgtggtggaagcatggtagaaatattaaagatgcagtgcacggaagttggagatcaaggcattcgtctacccaatcccagcagaatagtgctatgctggacatctcgcagtcaattcgttttgatgatgatgtggaggatggaaaaagtcatgaactcaaagtgtactcgctggaccgtataagaactgctacaagtaattttagtgactctaacaagcttggagaaggaggatttggtcctgtctatatgggaactttacctgggggagaagaagtagctgtgaagaggctttgtaggaattcaggtcaaggccttgaagaattcaagaatgaggtcatacttattgcaaagttgcagcaccgcaatcttgtaagactactagggtgctgcatacagagggaagagaagatcctggtgtatgagtacatgcctaacaaaagtctagatgcattcctctttaatcctgaaaagcaacggcttctagactggaagaaacggtttgatataatcgaaggcattgctagagggctgctatatctccaccgggattcgaggctgcgagttgttcaccgtgatctcaaggccagcaacattctcctggacgcggacatgaaacccaagatatcagattttggaatggcaaggatgtttggaggggaccaaaaccaattcaacacgaatcgggtcgtcggtacatttggctacatgtctcctgaatacgcaatggaaggcattttttcagtcaagtctgacgtctatggcttcggagtcctgatcttggagatcatcacaggaaagagggctgtgagcttccactgtcacgaggactccttgaacatcgctggatatgcgtggcggcaatggaacgaagacaatgctgcggagctgatcgatccagtgataagagcatcgtgctcagttcggcaggtgctgagatgcatccatattgcgttgctgtgcgtgcaagatcacgcagatgagcgacctgacatccccactgtcatccttatgctgagcaacgacagctcgagccttcctaatccgaggccgcctacgctgatgcttcgaggccgtgagatcgaatccagcaagtcaagcgagaaggaccggagccactccattggcactgtgacaatgacacagttgcatggaagatgaagtataacacgaaaaatatactgaatttgtgatatatttggttttttttgttctcccttcctgatgttgataatttgccatttgtcgcggattagtttcctctttttctccttttcatgacggcgaccgcgaagttgtatgaaaatcacattagcgtcatacattaagtgacaattaattttgcaaaggtgagatatttaccatgtggttcttcgtaactttaggtgttgttcggttatttcaattccatatggattgaaagtgtattaggatgtattttgatttgctatggat

SEQ ID NO: 70027 - DNA, 2986 bp, Zea Mays
cacagccttgagctaaaccgaaagcaaaaccatatgcttcaccacactaattaatctcactatctctcccacctgcagtgacacgtcctgcactaaacaaatccaacacggcgtgctctctcgccattaaaggcacggtctttctctctccttcgctcctttctgtttctctctccagagtggagtggttggtgctctcagtcccaggacccagggtggccgtggcctctgccaatagggccgggccggggctccaccgcacaccgggagggagagatggtgggaacgagcccagggggaggagtgttctgtttctcctccatggtctcctctcctcggctcctcttcctgctcctcgccggcgcctcgctatgctgtgtggcggcgcagaagacggacacgctgcggcagggggagtcgctgtccggggcggcgacgctggtgtcctcgccggagggggtgttcgaggcgggcttcttcgcgccggaccccaagcagccttctcgccagtacctcggcatctggtaccacagcatctcgccgcggaccgtcgtctgggtcgccaaccgcgtcgcgccggccacctcggcctcgccgtcgctcacgctcaccgtcaccggcgagctccgcgtcctcgacggcacggcggccaacggcaccgccgacgcgccgctgctctggtcctccaacaccacctcgcgcgcgggcccgcggggcggctactcggcggtgctccaggacactggcagcctcgaggtgcgcagcgaggatggggtgctctgggacagcttctggcacccgacggacaccatcctgtccgggatgcgcatcaccttgcaggcgccagggaggggccctaaggagcggatgctgttcacgtcctgggccagcgagacggacccttcgccggggcgatacgcgctcggcctcgacccgggcaactccggtcaggcctacatctggaaagatggcaacgttacgtactggaggtcgggacagtggaatggggtgaattttataggcattccatggaggccactctacaggagtgggttcacaccggcaattgatccagtgcttggaaattattacacatacactgcaacaaacacttctttgcagaggttttcatccgaagttgcaggagcagtggaatgcaggaaattggagtcaaggttgcatcaggagcccacctctgggttgtgagaccaatcagtctggggatggatttcttccaatgggaaacataaagtggcctgatttctcatattgggtatctacagtgggagatgagcctggatgcagaactgtctgccttaacaactgctcatgcggtgcttatgtttacacagctacaacagggtgcctagcctggggtaacgaactaattgacatgcatgagttgcaaacaggggcatatactctaaacctgaagcttcctgcttctgaattgcgaggacatcacccaatttggaaaatagccacgataatatcagccatagtgttatttgttttggctgcttgccttcttctgtggtggaagcatggtagaaatattaaagatgcagtgcacggaagttggagatcaaggcattcgtctacccaatcccagcagaatagtgctatgctggacatctcgcagtcaattcgttttgatgatgatgtggaggatggaaaaagtcatgaactcaaagtgtactcgctggaccgtataagaactgctacaagtaattttagtgactctaacaagcttggagaaggaggatttggtcctgtctatatgggaactttacctgggggagaagaagtagctgtgaagaggctttgtaggaattcaggtcaaggccttgaagaattcaagaatgaggtcatacttattgcaaagttgcagcaccgcaatcttgtaagactactagggtgctgcatacagagggaagagaagatcctggtgtatgagtacatgcctaacaaaagtctagatgcattcctctttaatcctgaaaagcaacggcttctagactggaagaaacggtttgatataatcgaaggcattgctagagggctgctatatctccaccgggattcgaggctgcgagttgttcaccgtgatctcaaggccagcaacattctcctggacgcggacatgaaacccaagatatcagattttggaatggcaaggatgtttggaggggaccaaaaccaattcaacacgaatcgggtcgtcggtacatttggctacatgtctcctgaatacgcaatggaaggcattttttcagtcaagtctgacgtctatggcttcggagtcctgatcttggagatcatcacaggaaagagggctgtgagcttccactgtcacgaggactccttgaacatcgctggatatgcgtggcggcaatggaacgaagacaatgctgcggagctgatcgatccagtgataagagcatcgtgctcagttcggcaggtgctgagatgcatccatattgcgttgctgtgcgtgcaagatcacgcagatgagcgacctgacatccccactgtcatccttatgctgagcaacgacagctcgagccttcctaatccgaggccgcctacgctgatgcttcgaggccgtgagatcgaatccagcaagtcaagcgagaaggaccggagccactccattggcactgtgacaatgacacagttgcatggaagatgaagtataacacgaaaaatatactgaatttgtgatatatttggttttttttgttctcccttcctgatgttgataatttgccatttgtcgcggattagtttcctctttttctccttttcatgacggcgaccgcgaagttgtatgaaaatcacattagcgtcatacattaagtgacaattaattttgcaaaggtgagatatttaccatgtggttcttcgtaactttaggtgttgttcggttatttcaattccatatggattgaaagtgtattaggatgtattttgatttgctatggat

SEQ ID NO: 70028 - DNA, 2292 bp, Zea Mays
ggcaaactaggcaaagggtcctcgtggcctcctcctctccagactccagagtccagaccgtgacaagttcatcatccagccccgcttgcgcttgaccccttcaagtccaagcattccattccatccagtaccttccttgtcaccttgaccttccccctcccttcctagtcccctactcgccagtccacaggacctcgaccccgctaagcaagctccaagagcgatcgccgcagaagatcccgcgatgcaggccccgccggcgccctcctccgtcgacctgccgctggcggtggcgccgccgccggtgaaggcgccgaccccgcggcccccgccgccggcctcgctgcagcccgagtccccgggggtcttcttctccgccgccgccgccgccgcgcccctgggcaccgcccaccgccgcatcgccatcgccgtcgacctctccgacgagtccgcctacgccgtgcgctgggccgtcgccaactacctccgccccggggacgccgtcatcctgctccacgtgcgccccacctccgtgctctacggcgccgactggggcgccgtcgacgtctccctccccaaccctagcgccaccgccgcctccgaggacggcgacggcgactgcgagaccgccgctgccgcgcgcaggatggaggacgactacgacgccttcacggccaccaaggccgacgacttcgccagcccgctcaaggacgccggcatcccctacaagatccacatcgtcagggaccacgacatgaaggagcgcctctgcctcgaggtcgagcgcctctcgctcagcgccgtcatcatggggagcaagggcttcggcgccgcgcggaggaccagcaagggcaggctcggcagcgtcagcgactactgcgtgcaccactgtgtctgccccgttgtggtggtgcgcttccctgatgacggctctgccgagggtggggaggccgctggtttgtccgccgcggttggtgctgaggatgtgctgcaccccgtgccggaggaagaaggcgagtaccatgacgctgcggaggagcacaagggtttttgttaataaatcaatgtgagggaactagggaaggcgctaggcgctctctggcctccaccttgagtttatatgtgccttggcatgtgccatacacttaacaagagatcagtgggcctaccggcctagcattggacagaaaggcctgtcaaagcagcccaagcccaagtctgaatggccagtccttattcttatgctcccaccttatccaattgctgattgatgctctcccctcccctgttcggtggccccagttccaatccagccatgctcgtcaccactgatgttcccgcctccctgccttggtggatctgcatgtggaggccactgaggacatcatgtctgctggccttcggcatgatgcttgacctcgttgatgcattgtgaagtcctcttggattcagcatgtagaggttctagcattcgactgttggctgggtgctaagctgggatttgtacttgagtgcatgtgatgtttatgaactcccattaccggtgtctatccgtgctttcgctttgtttgtatcctccgttacctttgttcatgtagcttgtctgacttccactgcgtggtggatatatgtctgaacatttgtagctactttgcgttgcactgtgtttctgatgaaagttacaggttactggtcacttctatagaacccaaaaaaaacaaggatgcaaattcgtcctgatttttattttctttattttagtataaagtagaagggcaggcatgatgtcggtgtgtcgagtaagccaaaagatcccgagttcgacgcagtattgtaatgcttgcctcggttatttcttctctagacttagaagccattttagtttaaggtaactagtagatttgtgagccgtccgatgtgctcatgccgatatcctgtcccgaggaaagttccactgtttttccacttaacttcaaatacaggtaccttttcttttttctttaccagtgcctggcatggtgtagttgtgccatgttccccgaggcccttttgccgctgtggttggattcatcttccattaggagctggaagcgacgcaacggagtattcttctcttattcagaatacttttctggttcatggaaatgagtggcagtaaccatctcaatgtgctgggattgattctgtgcctttcctcgtcgcaatggttttttgccaacactggcattggggttctctagtcttgaaaattttggctggtttggactttttggttcgtgaagtggatggtct

SEQ ID NO: 70029 - DNA, 2036 bp, Zea Mays
ggcaaactaggcaaagggtcctcgtggcctcctcctctccagactccagagtccagaccgtgacaagttcatcatccagccccgcttgcgcttgaccccttcaagtccaagcattccattccatccagtaccttccttgtcaccttgaccttccccctcccttcctagtcccctactcgccagtccacaggacctcgaccccgctaagcaagctccaagagcgatcgccgcagaagatcccgcgatgcaggccccgccggcgccctcctccgtcgacctgccgctggcggtggcgccgccgccggtgaaggcgccgaccccgcggcccccgccgccggcctcgctgcagcccgagtccccgggggtcttcttctccgccgccgccgccgccgcgcccctgggcaccgcccaccgccgcatcgccatcgccgtcgacctctccgacgagtccgcctacgccgtgcgctgggccgtcgccaactacctccgccccggggacgccgtcatcctgctccacgtgcgccccacctccgtgctctacggcgccgactggggcgccgtcgacgtctccctccccaaccctagcgccaccgccgcctccgaggacggcgacggcgactgcgagaccgccgctgccgcgcgcaggatggaggacgactacgacgccttcacggccaccaaggccgacgacttcgccagcccgctcaaggacgccggcatcccctacaagatccacatcgtcagggaccacgacatgaaggagcgcctctgcctcgaggtcgagcgcctctcgctcagcgccgtcatcatggggagcaagggcttcggcgccgcgcggaggaccagcaagggcaggctcggcagcgtcagcgactactgcgtgcaccactgtgtctgccccgttgtggtggtgcgcttccctgatgacggctctgccgagggtggggaggccgctggtttgtccgccgcggttggtgctgaggatgtgctgcaccccgtgccggaggaagaaggcgagtaccatgacgctgcggaggagcacaaggttccaatccagccatgctcgtcaccactgatgttcccgcctccctgccttggtggatctgcatgtggaggccactgaggacatcatgtctgctggccttcggcatgatgcttgacctcgttgatgcattgtgaagtcctcttggattcagcatgtagaggttctagcattcgactgttggctgggtgctaagctgggatttgtacttgagtgcatgtgatgtttatgaactcccattaccggtgtctatccgtgctttcgctttgtttgtatcctccgttacctttgttcatgtagcttgtctgacttccactgcgtggtggatatatgtctgaacatttgtagctactttgcgttgcactgtgtttctgatgaaagttacaggttactggtcacttctatagaacccaaaaaaaacaaggatgcaaattcgtcctgatttttattttctttattttagtataaagtagaagggcaggcatgatgtcggtgtgtcgagtaagccaaaagatcccgagttcgacgcagtattgtaatgcttgcctcggttatttcttctctagacttagaagccattttagtttaaggtaactagtagatttgtgagccgtccgatgtgctcatgccgatatcctgtcccgaggaaagttccactgtttttccacttaacttcaaatacaggtaccttttcttttttctttaccagtgcctggcatggtgtagttgtgccatgttccccgaggcccttttgccgctgtggttggattcatcttccattaggagctggaagcgacgcaacggagtattcttctcttattcagaatacttttctggttcatggaaatgagtggcagtaaccatctcaatgtgctgggattgattctgtgcctttcctcgtcgcaatggttttttgccaacactggcattggggttctctagtcttgaaaattttggctggtttggactttttggttcgtgaagtggatggtct

SEQ ID NO: 70030 - DNA, 3136 bp, Zea Mays
cgtccccttccctctgcccatcccaacccaacggcgatggccgacggcgacgagcgagcgaccctaccagcgccgatggcggggcggcgatgtcgtgcctcagtcgctcgccccgcggccccgtttccagcttccgctgcacagcccagagctccccccatccgacccgcctccgctgcttgcagcaactcgtcgcacgggtcgccggggagcgctgggctgccgttccgtcttcttggcgcgtcccgctagatttgtcgcgttgccacttctctgatgtctagatctgcggcgtgatgagttgtggctgagagctgagatgcccagtgcgcattgtgcaatcagagtctgctatgtgcctaactgaagatttcatcatgtggactccaatgcattatacgttgttgaccttgctgagattgattgcaatcatcctattcttcatatggcgtatccggcatccgcatgccgacggaatgtggctctggtggatatccattgtcggagatttctggtttggtgtcacttggttgctaaaccaagttgcgaagctcaaccctaccaagcgtgtcccagacctttccctcttgagacaacagttcgatctccctgatggcaactctaatctccctaggcttgatgtttttatcaacaccgtcgatcccataaacgagcctatgatatacaccatgaactctatcctgtccattcttgccgtagactacccaatcgataggactgctacctacctctcggatgatggagggtccataatccattacgagggcttgcttgagacagcaaatttcgcgacactctgggttccattttgccgaaaacatagcattgagccgagagcccctgagagctattttgctgtgaagtcgcgcccatacactggaaatgtaccagatgagtttgctgatgatcatagacgcatgtctaaggagtatgatgagttcaaggtgcgtttggatgcactttttactaaaatccctgaacgctcagatgcacacaatgcagaggccaaggaaggtgtaaaggcaacctggatggcagacggaacacagtggccaggaacatggtttgaccctgctgaaaaccacaagaaagggcaacatgctggaattgttaaggttatgttgaatcacccgggcgatgaacctcggtttggtggaccagcaagtgctgaaacccctctggacttcagtgccgttgacgtgcggctcccaatgctcgtctatatctcccgtgagaagagtccaagccatgaccaccaaaagaaagcaggcgccatgaacgtgcagctgcggatctctgcgcttctgaccaacgctcccttcatcatcaattttgatggtgaccactacgtcaacaactcacaggccttccgagctgcgatgtgcttcatgctggaccggcgggatggcgagaacaccgcttttgttcagttcccgcaacgctttgacgatgtcgacccaacagacaggtactgcaatcacaaccgtgtcttctttgatgccaccttgctcggcctaaatggcatccagggaccctcctatgttggcaccggttgcatgttccgccggatcgctgtctatggtattgatccacctcgttggagaactgatgccttcaagcttgtggacaaccccagcaagtttggcagctcaatgctcttcatcaactccataccatcggctgcgaaccaagaatggtccatggcgtcaccaccggcacatgaggagtcggtcatggaagagctgaataatgtcatgaagtgcgcatatgaagagggcactgagttcggaaaggaaatcggctgggtgtacaacattgctacggaggacgtggtgaccggcttccgagtacaccggacagggtggcgatctatgtactgccgcatggagccggatgccttccgtggcactgcaccaatcaacctcacggagcgcctctgccagatcctgcgctggtcgggcggctcccttgaaatgttcttctcacactgcccgctccttgctggccgtcgactgaacttgatgcaacggatcgcctacaccaacatgacagcctacccaatctcatcggtcttccttgtgttctacctcctcttccccgtcatatggatcttccgtggcgagttctacatccagaagccgttcccgacatacgtgctgtacctcgtcgtcatcatagcaatgacagagctgatcggcatggtggagatcaagtgggcaggcctcacgctgctggactggatccgcaacgagcagttctacatcatcggggcgacagccgtgtacccgttagcgacgctgcacatcgtgctgaagctagtccttcgcgggaacggcgtttcgttcaagctgacggcgaagcaggctacgagcgccgtgaacgagaagtacgctgagatgtacgtggtgcagtggacgccactgctgatccccacaatagcggtgatcgccgtgaacgtcggcgcgatcggggcggcgatcggcaaggcggtcgtcggggggtggtcgctcctgcagatggccgacgcgtcccttggactggtgttcaacgcgtggatcctgctgctgatctacccgttcgcgctcggggtgatggggcggtggagcaagaggccctatatcctgttcgtcctgttcatgattgggttcgctgtagtggcggcggtggttgttgccatccatgctgcgcgcactggttctgttcggttccattccggacattcaggcggtgctagcttccctacaagctgggggttttagatcgcgttcatcattggttagtggcattggttgcaggttgttccattagctgagagcttcttcgctgtggagttcctacttgatgtaaatcgtgcattgattgtacatgtttgttcagtggatggtttgtaaggaacaaaaaatggtggtaaagtgaaagcacatttctgcctcgattttgacatgtaccggtacgtgagtgcaacgtggcactggtttcctggacctggaacttggatctggggtactcgtaagaaactgtctgaatgtcagtggttgtgattgctgacagcccccggttactcgcgtgcgttttctgctcctgcacaggtattcgtacctggtgaggagagccg

SEQ ID NO: 70031 - DNA, 1330 bp, Zea Mays
tttggtctttttaattggcttgttgtgaacctttgacacctgtataacttatacactagagcaaactagttagtccaattgtttgtgttgggcaattcaaccaccaaaattatttaggaactaggtgtaagcctaattccctttcaatctccccctttttggtgattgatgccaacacaaaccaaagcaaatatagaagtgcataattgaactagtttgcataatgtaagtgtaaaggttgcttggaattgagccaatataaatacttacaggataggcgtggattgtttctttatttttaacattttggaccacgcttgcaccacagatttgtttttgcaaattcttttgtaaatccttttcaaagttcttttgcaaatagtcaaaggaaaatgagtaagatttttgcgaagcatttttcaagtttgaaattttctccttttgtttcaaatgtttttcctttgactaaacaaaactccccctcaaataaattctcctcttagtgttcaagagggttttaagatatcaagttttgaaaatattacttgctccccctttagaacacaaagagataccaatttgaaatttaccaattgaaaatcattaattttaaaaaatagggtgatggtgcggtccttttgctttgggccaatactttctccccctttggcatgaatcgccaaaaacggatacttggaatgaaatataggccctttcccaactactttctcccctttggcaaataaaaacatatgagtgaagattataccaaagatggagagtgatgcggagcgacggcgaaggatgagtaatagagtggagtggaagcctttgtcttcgccgaagactccaattccctttcaatatacctatgacttggtttcaaatatacttgaaaacacattagtcatagcatatatcaaagagacatgatcaaaggtatatttatgagctatgtgtgcaaattagcaaaagaaattcctagaatcaagaatattgagctcatgcctaagtgtggtaaaagattgttcatcaagtggcttggtaaaggtatcggctaattgatctttagtgttaatgtatgcaatctcgatatcccccttttgttggtgatccctaagaaaatgataccgaatggctatgtgtttagtgcggctatgctcaacgggattatccgccatgcggattgcactctcattatcacatagaagaggaactttggttaatttgtaaccatagtcccgcagggtttgcctcatccaaagcaattgcgcgcaacaatggcctgcgacaatatactcggcttcggcggtagaaagagcgaccgaat

SEQ ID NO: 70032 - DNA, 1028 bp, Zea Mays
cccttttcccccttctaatacggtgcggatttgggagcgaagctgcccatgctaccggtttggtaagaacatgcggagagccaatctcggatcttgcttccttcagggaatggtttactgcattctgttggctgctgtcctaatcagcctaattgccttttctgtaacaaggcatcatatatatttatatatgggaatcggctctgtcctcttgatagccatctatactggttatttccggagaagaatcaggaagcaattcaacattcggggtactgagagcagtctggacgattgtgttctccatctcatatgtccttgctgtacgctgtgccaggaggctagaactttggagatgaataatgtccagtgtggtgtctggcatggccgaggtgataccatttgtttagggagcaacggtgcaggaaacaaggctttcgctgccctgaacaaggcctctctcgtgcctgtaaagtccccggggctgtgtggcatggatagatcgtcaagcgcagctgacgagcagcagccgcttgtcccaccggaccaactggagcaggtttaggtattctctgtcgccacgacctctgcactttcctagaagggcttggacagcgccgacggaaaaaaaaaatcgtcctctgccggattattaggcgcctgcatctgcatccattggtcccgagaactggactttgcagctaccgtacatgggtgatgggcgcagtcgacctgctgctggctgctgctgttgtaaaattcagtgatagattttctcttgcagtcgaattgtttaggtcgaagactgtatcttcataatgtcacgacacgtgctcaggccttttgcctgaatccaactgtaaatttcagatccaatctagcagttcgagttacatagacaggaatgagatggtaatgttcttttcaccggccgtgcttgctccctgtatctttcatacgctgccccttgtcgttcctgttctcaggagcttgattaacactgttttctttacgaaacgtcattttcc

SEQ ID NO: 70033 - DNA, 1946 bp, Zea Mays
ggcaaacaaacgcgtacctggtcctcgtcatggacccacccgtcggtgggtgaggccgtatggaagctgatgcgtcatgtatgtcgaagcgcaccccaagatttaccgatccaaatgtgcgcttccctccctctcgtaatcgaaggcgattttattagacgttaaaaacccgacgcgatacggaacccctgcaactaagcggaaagcttcaaagggagggagggagggagggacagggagagccagagaggagggagaagaaaatggtcgcggcggcggcggaggtgtcgacggcggcgacggctagcagtagccccccggcggaggagggggagcggcgggacgagagcgagagcgacggggagatggcggggctggcggccgtgctggacttcgacatgctgtgcgcgtccgtggcgctgtcggcggagaggaggaaggccggcgcggcgctggcgggcgcggccggcgactgcggcggtggaggcggaggggtgcagaggatgtgggagggcgacgtcgtgctggattgcctagacgaccggcgaatcgcgctcgagacgtcctgctgcccatgctaccggtttggtaagaacatgcggagagccaatctcggatcttgcttccttcagggaatggtttactgcattctgttggctgctgtcctaatcagcctaattgccttttctgtaacaaggcatcatatatatttatatatgggaatcggctctgtcctcttgatagccatctatactggttatttccggagaagaatcaggaagcaattcaacattcgggcaagtatttcttgggatagctagttttcagatatagtattcagaaagtttcctgtttactgcaagagtcaagatgtagcgtttattgcagttgctccagtgcccatcttttctagaattgtaccatccttgacgcccttgtgcaaattgttgcaccattttgcaaagctaaaagtctaaaatgaaagtaactgaaacttggaggtatatcgatggttaggtacaatcaaggccgtacctatcaacataagtatgctgccaacatgggagtaatattagtgtactttaattctagaactgcaggcatgaaattctagggagatgccattcacattggcagggagtcttcattctgataaagctgacgattcacccttttgtacttgttacagggtactgagagcagtctggacgattgtgttctccatctcatatgtccttgctgtacgctgtgccaggaggctagaactttggagatgaataatgtccagtgtggtgtctggcatggccgaggtgataccatttgtttagggagcaacggtgcaggaaacaaggctttcgctgccctgaacaaggcctctctcgtgcctgtaaagtccccggggctgtgtggcatggatagatcgtcaagcgcagctgacgagcagcagccgcttgtcccaccggaccaactggagcaggtttaggtattctctgtcgccacgacctctgcactttcctagaagggcttggacagcgccgacggaaaaaaaaaatcgtcctctgccggattattaggcgcctgcatctgcatccattggtcccgagaactggactttgcagctaccgtacatgggtgatgggcgcagtcgacctgctgctggctgctgctgttgtaaaattcagtgatagattttctcttgcagtcgaattgtttaggtcgaagactgtatcttcataatgtcacgacacgtgctcaggccttttgcctgaatccaactgtaaatttcagatccaatctagcagttcgagttacatagacaggaatgagatggtaatgttcttttcaccggccgtgcttgctccctgtatctttcatacgctgccccttgtcgttcctgttctcaggagcttgattaacactgttttctttacgaaacgtcattttcc

SEQ ID NO: 70034 - DNA, 2802 bp, Zea Mays
gcacacccgtccctacctgttttactaatactaactgatacatgggcccggcaaacaaacgcgtacctggtcctcgtcatggacccacccgtcggtgggtgaggccgtatggaagctgatgcgtcatgtatgtcgaagcgcaccccaagatttaccgatccaaatgtgcgcttccctccctctcgtaatcgaaggcgattttattagacgttaaaaacccgacgcgatacggaacccctgcaactaagcggaaagcttcaaagggagggagggagggagggacagggagagccagagaggagggagaagaaaatggtcgcggcggcggcggaggtgtcgacggcggcgacggctagcagtagccccccggcggaggagggggagcggcgggacgagagcgagagcgacggggagatggcggggctggcggccgtgctggacttcgacatgctgtgcgcgtccgtggcgctgtcggcggagaggaggaaggccggcgcggcgctggcgggcgcggccggcgactgcggcggtggaggcggaggggtgcagaggatgtgggagggcgacgtcgtgctggattgcctagacgaccggcgaatcgcgctcgagacgtcctgctgcccatgctaccggtttggtaagaacatgcggagagccaatctcggatcttgcttccttcaggtacagataacctattataacctattcaccagagaacgagcgtatttagtgcattttctgctgttactttagtgtccaaaagttgtagtcttattgctgtacaggtatgttgtgtaagcttcaagtgactacgtttcttgttgccttcctaataaggcgtgaaatgcaagcagccaccatgttatttggacagcctaggaaagctgctattttcagccttgtgcagttgtgcctataccatgtagtgcttggtgtgtagcttgtttgagttgacctggcattttgaacagcattttggataatcccttattcctgtggtatgtcttagacctggtctaacttagtgacctgtcttttttatttgacgctgcatagagtgtatgttcgagtaaaatgtgcgcctgtcattcgaaatattctatgttggaggaatcagactgcacgttggacttgctggacagattggtgccagtatattttactcactttaactactctgccagccttgaaagaccaacttgattttatctttagctcagtcagtgcttctttcacaaaagtgttgttggagtttctcatttcatctgattcaacatcaattgtatgcaatactatattgaattatatggtcaatttgttatgcttaacaaagtgatgaaaggagcttatagtcttcttcaacatgtctcctttcatatatattaagggtgctgatgaatctccgttctcgcctaaactggatggttctaacctctctgtctgctatatacaaccatagttgtggtgttatgacaatattgttaccaatgattttaagggcctgtttggatgcttgtggcaaacagtttgccggctaattttagcaccttaccttcaaacaagccggctaacaaattgactaattgttagccggagggctggcaaactgtttgcccattagccatttgaccttgctaatgggtctaatagatcgtataaagagaaaaagacatctattagccaagtctccaaacataccctggttaatttttgctagctaattattagccactggcaaacaataagccagcaggatacaaacagggcataagttttctctgtttatcacaggtttatttgagtgtagctccctactatgttgttaattttaatgtcttactcttattcaccctgctgatgctacatgaaatttctttcagggaatggtttactgcattctgttggctgctgtcctaatcagcctaattgccttttctgtaacaaggcatcatatatatttatatatgggaatcggctctgtcctcttgatagccatctatactggttatttccggagaagaatcaggaagcaattcaacattcggggtactgagagcagtctggacgattgtgttctccatctcatatgtccttgctgtacgctgtgccaggaggctagaactttggagatgaataatgtccagtgtggtgtctggcatggccgaggtgataccatttgtttagggagcaacggtgcaggaaacaaggctttcgctgccctgaacaaggcctctctcgtgcctgtaaagtccccggggctgtgtggcatggatagatcgtcaagcgcagctgacgagcagcagccgcttgtcccaccggaccaactggagcaggtttaggtattctctgtcgccacgacctctgcactttcctagaagggcttggacagcgccgacggaaaaaaaaaatcgtcctctgccggattattaggcgcctgcatctgcatccattggtcccgagaactggactttgcagctaccgtacatgggtgatgggcgcagtcgacctgctgctggctgctgctgttgtaaaattcagtgatagattttctcttgcagtcgaattgtttaggtcgaagactgtatcttcataatgtcacgacacgtgctcaggccttttgcctgaatccaactgtaaatttcagatccaatctagcagttcgagttacatagacaggaatgagatggtaatgttcttttcaccggccgtgcttgctccctgtatctttcatacgctgccccttgtcgttcctgttctcaggagcttgattaacactgttttctttacgaaacgtcattttcc

SEQ ID NO: 70035 - DNA, 2057 bp, Zea Mays
ccccttgctattaaaggccgtctcccaaccagacaaagctagtactagcagtagcactgcgccgcagcaatggtggtttccctcgccgaataaatctcaccggtcgcgcttcttggcgtgttcctccgctcgcctgggcttcgatctccagccctcgcgtgagcgcgggtgcggccgcggcgccgtggtcatggcgacggaggagtgggagctgcgggaggaggacgcctacgcctacgagttcgagttcgacctcgagaaccccttcaccagccccgccgacgagccgatcgccagtctcctcgacgccgagggccaccacgcgccctctatctccgccgcggcctcggccacccgccgcgccgccgccgccttcatctccaaggtgcgtttcggcggcgagctcgccgtgcacccgcgcgtcgcctacctcgcgctcaactacgtggatcgcttcctctccaagaggcaattggcgtgcgagcagcagccgtgggcgccgcgcctgctcgccatcagctgcctctccctcgccgccaagatgcagcgcgtcgcaacattctccaccgccgacattcagagggacgaagacttcatgttcgacgcggtgaccatccgtcgcatggagcgggtggtgcttggcgcgcttgagtggcgcgcgcgctccgtcacgccgctcgccttcctcggcttcttcctctccgcatgctatccgccgccgcagcaccccccacaggtagccgctgtcaaggcgcgcgccgtcgacctccttctccacgctcagcctgaggtgaagatggcggagttctcaccctccgtggtggcggcggcagcgctgctggccgccgccggagaggtcgccgccgcgaacctccacgcgttccaagccagcttggccgcctgtccctttgtaaatagcgtgagcatgagctttaaaccacgcggttttttttatttccattataagccgctttaaccgtcactaattgacgtaattacccgtgccacgtcaaacggacaagattgtccaggtcctttgggactggccgcttctggtgttccagttattatactaccgctcttcatcttttttaaacctgttttcctcggggtgtggagctaatgtggcaaattgaccgcccagtaaaaccttgctgcttttctcgctttcggcattaacaatgtgatcatcgtaatctacctcatcattttgacaaattgcacccctcatgattacctgtactgtaatgcgagatctgcagcaacaggtagttctcgtgctaactgtatgccgttgcgcaggagaagctgcgggagtgcggtgaggtgctggcagcggcgggcggcgtcgggcgggggcgagccgctccgagcgcggacacgcctgtgacggtgctcggtcaccagcgcagcgccagctccgcctcggagaccgactggattaacggcggcgacgcgaagaaacgctgcatgggcccaccatcgcaatgggggtaggcggcaggccgcaggccgagtcaagcgggtattgtcgcagctggatcgaagagtcggagattttactgcagccctgctcctttttttccaaattgtttttaccctttttcttttcccaattctttccttctactttaatgctctcgaggtaaagtgacgaggagtggtggtggtggctgtcatttactagtattcctttttcctagcatgtctttattttagcctagttatggtaatttttgcggcggtgctttggaaggtgaggacggtggatgaacatactgggatggaagagggggatgatgtgaaatggtaaaaaaaataaaaccaaaaggctggcatgttgctttgtcacctctgccgatctggtttctcttgcgtctgctttcgatgatgatttctcattatgcggtcgaatttctggcatgatatttctgttttgccattttcttgccgtgtttctatttcatagcccactgtagtaaaagttttaaccgttctaaaaacaattctttcaaaaccacaacgactgtagctggacctaaaaaaggagaaaaaac

SEQ ID NO: 70036 - DNA, 2437 bp, Zea Mays
tagtacatacgtatttccgctgcgcatctcagactctcggttacgtaatctttataaaaaactcctaacaaatcatagttgtatctatggttagatcgtaatctaatgaaccagatcttttgtttgcacgctttcaaataagcactgcatagcagtcgttgccgtcggtcccgccacacacccccatgccgcttctccacctctcgctcccgtcgcaccgcctcctcgtcggcggccgaggtcggctgttcttcccgtcgtctccccgtcgtatctgcctatctgtcagggcggctggggatgcggcggtgtcagttgcggcgggggcttacggactccccttccggccggagggagccgctcaccaccgcgagctctccgcggcagtggccgtcgtcgagcgcgcctgctgcctctgcgttgacgtgaagagatcactgttttcacgtcgcagcagtattcttgagaagaatgaccaaagtcctgttacagttgcagatttcggagtgcaggcccttattagtttggagctccagagattgttcccatcgatacctctggtggccgaagaggattcagcttctctaagatcatccaaagctgatgataatagcagtgatatacttgttgagtcgatttttagcgcagttgtagacaaagtgagtaataacggttcacatttaactcaagatgatgtcttgagagcaattgatagaggaggcaaggacgctgtctcatttgattcaaaccctgctacttattgggtgcttgatccaattgatggcaccaaaggtttcttgagagggaatgatgctctgtatgtggtgggtctggcacttgtggtgaatggaaaggtaacagttggagtgatgggatgtccaaattggaccaacgatgacatagtcaacaagaaagatgatagcgttgctgcatgtaatggtcgtggtattcttatggtctcccatattggctgtggcacatggtctaggcgtctgtctgctgatattggtcagttgaatacagctcaggatatttggaaaagatgttttgtggacacttgttcgatcgcacacatggcacactattgcattccagatagccaaacatgggatatgataccgttatctgctacctacgattcaacaacagatgcaactgatcctagaaatgagaatgaaatccttctcctgtccgttttttgtggcaggtttgttgcactctccaatctccattaatggtttgatacttgcacattaattcacgccactagtcagttgatatatgatgctaacaatgattgattttctccaacatatggcattcacggttagcaaaaggcatttaaagcaacgattgatatattctccccatccacaagttagctctggatactagtttgtttgctgtaagactttttcagcattatctgaaacgttaaatgtctttctatattcttgtgctgtcttgctatcatactgtttgtggatttcctacaaaaaaatatctggctgaggttgataatgagtactatctcgaatatttgtcgtccaatagttcatctttgaactaaaacgcgacaaataaaaaagaacggagggagtatattacagccattagtgattaccgattggtcttccgcacatgagttcatgatgatgtgctcttgttgctattctatagcttgtgcaagtatctcacaattgcttccgggagagcctcggtttttgtccttcaagcacggccgacaactcagatcaagtcttgggatcacgctgttggggtgatctgcgtgcaggaggccggtggtcagaccagtgactggagtggagaaccgttggatcttgcagctgacctaacatcgcgcagaatcatctaccctcggggcggtgttctggtgacaaatggtgcgctgcatgacaagcttgtcgaaatgatctcagcaagttacaagtagctgcatagcttcacaggccaacacaccttgtctttttgaatttgaatcattttaccttatctattcgatcttcagtgaaattgtatttgatcttcggtgaaattgtattcgatctgcacattcagtatagaaaccacaagcatgttcacttgttcagatggcttccattgccacaggagttattatacgaatgaaaacacactgtttccttgttgtaccgtgatgaactattgcttaagcaacttcattcagaagcaatacatgcaagggaaggtcgttttccaaatttttttcacaaaactccagaacctttttttttttggcttcccaatgtgtgaatttgttgcgcagccctgatgctctactctcatggtcgtacgacgcccacgcacgcacacctgaatcctgcaaaaaagaaaaaaaaaaacaaaagcgtgatgtttggtcaccaattcagactgatgaaaaagacgcggaaaggac

SEQ ID NO: 70037 - DNA, 2400 bp, Zea Mays
tagtacatacgtatttccgctgcgcatctcagactctcggttacgtaatctttataaaaaactcctaacaaatcatagttgtatctatggttagatcgtaatctaatgaaccagatcttttgtttgcacgctttcaaataagcactgcatagcagtcgttgccgtcggtcccgccacacacccccatgccgcttctccacctctcgctcccgtcgcaccgcctcctcgtcggcggccgaggtcggctgttcttcccgtcgtctccccgtcgtatctgcctatctgtcagggcggctggggatgcggcggtgtcagttgcggcgggggcttacggactccccttccggccggagggagccgctcaccaccgcgagctctccgcggcagtggccgtcgtcgagcgcgcctgctgcctctgcgttgacgtgaagagatcactgttttcacgtcgcagcagtattcttgagaagaatgaccaaagtcctgttacagttgcagatttcggagtgcaggcccttattagtttggagctccagagattgttcccatcgatacctctggtggccgaagaggattcagcttctctaagatcatccaaagctgatgataatagcagtgatatacttgttgagtcgatttttagcgcagttgtagacaaagtgagtaataacggttcacatttaactcaagatgatgtcttgagagcaattgatagaggaggcaaggacgctgtctcatttgattcaaaccctgctacttattgggtgcttgatccaattgatggcaccaaaggtttcttgagagggaatgatgctctgtatgtggtgggtctggcacttgtggtgaatggaaaggtaacagttggagtgatgggatgtccaaattggaccaacgatgacatagtcaacaagaaagatgatagcgttgctgcatgtaatggtcgtggtattcttatggtctcccatattggctgtggcacatggtctaggcgtctgtctgctgatattggtcagttgaatacagctcaggatatttggaaaagatgttttgtggacacttgttcgatcgcacacatggcacactattgcattccagatagccaaacatgggatatgataccgttatctgctacctacgattcaacaacagatgcaactgatcctagaaatgagaatgaaatccttctcctgtccgttttttgtggcaggtttgttgcactctccaatctccattaatggtttgatacttgcacattaattcacgccactagtcagttgatatatgatgctaacaatgattgattttctccaacatatggcattcacggttagcaaaaggcatttaaagcaacgattgatatattctccccatccacaagttagctctggatactagtttgtttgctgtaagactttttcagcattatctgaaacgttaaatgtctttctatattcttgtgctgtcttgctatcatactgtttgtggatttcctacaaaaaaatatctggctgaggttgataatgagtactatctcgaatatttgtcgtccaatagttcatctttgaactaaaacgcgacaaataaaaaagaacggagggagtatattacagccattagtgattaccgattggtcttccgcacatgagttcatgatgatgtgctcttgttgctattctatagcttgtgcaagtatctcacaattgcttccgggagagcctcggtttttgtccttcaagcacggccgacaactcagatcaagtcttgggatcacgctgttggggtgatctgcgtgcaggaggccggtggtcagctgacctaacatcgcgcagaatcatctaccctcggggcggtgttctggtgacaaatggtgcgctgcatgacaagcttgtcgaaatgatctcagcaagttacaagtagctgcatagcttcacaggccaacacaccttgtctttttgaatttgaatcattttaccttatctattcgatcttcagtgaaattgtatttgatcttcggtgaaattgtattcgatctgcacattcagtatagaaaccacaagcatgttcacttgttcagatggcttccattgccacaggagttattatacgaatgaaaacacactgtttccttgttgtaccgtgatgaactattgcttaagcaacttcattcagaagcaatacatgcaagggaaggtcgttttccaaatttttttcacaaaactccagaacctttttttttttggcttcccaatgtgtgaatttgttgcgcagccctgatgctctactctcatggtcgtacgacgcccacgcacgcacacctgaatcctgcaaaaaagaaaaaaaaaaacaaaagcgtgatgtttggtcaccaattcagactgatgaaaaagacgcggaaaggac

SEQ ID NO: 70038 - DNA, 1971 bp, Zea Mays
tagtacatacgtatttccgctgcgcatctcagactctcggttacgtaatctttataaaaaactcctaacaaatcatagttgtatctatggttagatcgtaatctaatgaaccagatcttttgtttgcacgctttcaaataagcactgcatagcagtcgttgccgtcggtcccgccacacacccccatgccgcttctccacctctcgctcccgtcgcaccgcctcctcgtcggcggccgaggtcggctgttcttcccgtcgtctccccgtcgtatctgcctatctgtcagggcggctggggatgcggcggtgtcagttgcggcgggggcttacggactccccttccggccggagggagccgctcaccaccgcgagctctccgcggcagtggccgtcgtcgagcgcgcctgctgcctctgcgttgacgtgaagagatcactgttttcacgtcgcagcagtattcttgagaagaatgaccaaagtcctgttacagttgcagatttcggagtgcaggcccttattagtttggagctccagagattgttcccatcgatacctctggtggccgaagaggattcagcttctctaagatcatccaaagctgatgataatagcagtgatatacttgttgagtcgatttttagcgcagttgtagacaaagtgagtaataacggttcacatttaactcaagatgatgtcttgagagcaattgatagaggaggcaaggacgctgtctcatttgattcaaaccctgctacttattgggtaagaagtgcttgatccaattgatggcaccaaaggtttcttgagagggaatgatgctctgtatgtggtgggtctggcacttgtggtgaatggaaaggtaacagttggagtgatgggatgtccaaattggaccaacgatgacatagtcaacaagaaagatgatagcgttgctgcatgtaatggtcgtggtattcttatggtctcccatattggctgtggcacatggtctaggcgtctgtctgctgatattggtcagttgaatacagctcaggatatttggaaaagatgttttgtggacacttgttcgatcgcacacatggcacactattgcattccagatagccaaacatgggatatgataccgttatctgctacctacgattcaacaacagatgcaactgatcctagaaatgagaatgaaatccttctcctgtccgttttttgtggcagcttgtgcaagtatctcacaattgcttccgggagagcctcggtttttgtccttcaagcacggccgacaactcagatcaagtcttgggatcacgctgttggggtgatctgcgtgcaggaggccggtggtcagaccagtgactggagtggagaaccgttggatcttgcagctgacctaacatcgcgcagaatcatctaccctcggggcggtgttctggtgacaaatggtgcgctgcatgacaagcttgtcgaaatgatctcagcaagttacaagtagctgcatagcttcacaggccaacacaccttgtctttttgaatttgaatcattttaccttatctattcgatcttcagtgaaattgtatttgatcttcggtgaaattgtattcgatctgcacattcagtatagaaaccacaagcatgttcacttgttcagatggcttccattgccacaggagttattatacgaatgaaaacacactgtttccttgttgtaccgtgatgaactattgcttaagcaacttcattcagaagcaatacatgcaagggaaggtcgttttccaaatttttttcacaaaactccagaacctttttttttttggcttcccaatgtgtgaatttgttgcgcagccctgatgctctactctcatggtcgtacgacgcccacgcacgcacacctgaatcctgcaaaaaagaaaaaaaaaaacaaaagcgtgatgtttggtcaccaattcagactgatgaaaaagacgcggaaaggac

SEQ ID NO: 70039 - DNA, 3265 bp, Zea Mays
tagtacatacgtatttccgctgcgcatctcagactctcggttacgtaatctttataaaaaactcctaacaaatcatagttgtatctatggttagatcgtaatctaatgaaccagatcttttgtttgcacgctttcaaataagcactgcatagcagtcgttgccgtcggtcccgccacacacccccatgccgcttctccacctctcgctcccgtcgcaccgcctcctcgtcggcggccgaggtcggctgttcttcccgtcgtctccccgtcgtatctgcctatctgtcagggcggctggggatgcggcggtgtcagttgcggcgggggcttacggactccccttccggccggagggagccgctcaccaccgcgagctctccgcggcagtggccgtcgtcgagcgcgcctgctgcctctgcgttgacgtgaagagatcactgttttcacgtcgcagcagtattcttgagaagaatgaccaaagtcctgttacagttgcagatttcggagtgcaggcccttattagtttggagctccagagattgttcccatcgatacctctggtggccgaagaggattcagcttctctaagatcatccaaagctgatgataatagcagtgatatacttgttgagtcgatttttagcgcagttgtagacaaagtgagtaataacggttcacatttaactcaagatgatgtcttgagagcaattgatagaggaggcaaggacgctgtctcatttgattcaaaccctgctacttattgggtgcttgatccaattgatggcaccaaaggtttcttgagagggaatgatgctctgtatgtggtatgattatctattctgatattgtccttacatactatattactgttgatcaaggaccgatatgctttattcaggaatttttacaagatgttctttaattgcacaaatatttatttgctgcgtgttttgacactttaaaaaagtcattccacaagcatggtgtgtcttgtactttttagtgccacatttatgccagacatgtccactatcttggggattttttatattgatatcatcaaccttgttttatcttgtacttcttagtgccacatttatgccagacattccattttttatattgttctctactattaatttatctcaaaattgtgaaattccaatgtatgtgatttgaggatttccagaaagactctcattgctgcagaacattcataaagttgtccgcaacaaatcgtgtaaaataggagatttgcacggtagattacattgtttgcagagtgaagtttgaaatatgggatgagctaccttatctcatcccttgtctcatcactatctcaaacttcactctacaaacagtataatctacagtgtaaatcccctattttacacgatctgccgcggacagccttatgaggcaccttttgtccttagttcatgaacctttatgatgcaccttctgcagcactttgttctttggtagcaaaattcatgcatctgaatgccaagcttgtttgcccctatatggttgtcattcagcatggactggttaatccatgatcagcaaattacatattattgacctcagttgcctattttcatgatccttttcttataagttctagcctacattttttgtccatttttaaggtgggtctggcacttgtggtgaatggaaaggtaacagttggagtgatgggatgtccaaattggaccaacgatgacatagtcaacaagaaagatgatagcgttgctgcatgtaatggtcgtggtattcttatggtctcccatattggctgtggcacatggtctaggcgtctgtctgctgatattggtcagttgaatacagctcaggatatttggaaaagatgttttgtggacacttgttcgatcgcacacatggcacactattgcattccagatagccaaacatgggatatgataccgttatctgctacctacgattcaacaacagatgcaactgatcctagaaatgagaatgaaatccttctcctgtccgttttttgtggcaggtttgttgcactctccaatctccattaatggtttgatacttgcacattaattcacgccactagtcagttgatatatgatgctaacaatgattgattttctccaacatatggcattcacggttagcaaaaggcatttaaagcaacgattgatatattctccccatccacaagttagctctggatactagtttgtttgctgtaagactttttcagcattatctgaaacgttaaatgtctttctatattcttgtgctgtcttgctatcatactgtttgtggatttcctacaaaaaaatatctggctgaggttgataatgagtactatctcgaatatttgtcgtccaatagttcatctttgaactaaaacgcgacaaataaaaaagaacggagggagtatattacagccattagtgattaccgattggtcttccgcacatgagttcatgatgatgtgctcttgttgctattctatagcttgtgcaagtatctcacaattgcttccgggagagcctcggtttttgtccttcaagcacggccgacaactcagatcaagtcttgggatcacgctgttggggtgatctgcgtgcaggaggccggtggtcagaccagtgactggagtggagaaccgttggatcttgcagctgacctaacatcgcgcagaatcatctaccctcggggcggtgttctggtgacaaatggtgcgctgcatgacaagcttgtcgaaatgatctcagcaagttacaagtagctgcatagcttcacaggccaacacaccttgtctttttgaatttgaatcattttaccttatctattcgatcttcagtgaaattgtatttgatcttcggtgaaattgtattcgatctgcacattcagtatagaaaccacaagcatgttcacttgttcagatggcttccattgccacaggagttattatacgaatgaaaacacactgtttccttgttgtaccgtgatgaactattgcttaagcaacttcattcagaagcaatacatgcaagggaaggtcgttttccaaatttttttcacaaaactccagaacctttttttttttggcttcccaatgtgtgaatttgttgcgcagccctgatgctctactctcatggtcgtacgacgcccacgcacgcacacctgaatcctgcaaaaaagaaaaaaaaaaacaaaagcgtgatgtttggtcaccaattcagactgatgaaaaagacgcggaaaggac

SEQ ID NO: 70040 - DNA, 2612 bp, Zea Mays
tagtacatacgtatttccgctgcgcatctcagactctcggttacgtaatctttataaaaaactcctaacaaatcatagttgtatctatggttagatcgtaatctaatgaaccagatcttttgtttgcacgctttcaaataagcactgcatagcagtcgttgccgtcggtcccgccacacacccccatgccgcttctccacctctcgctcccgtcgcaccgcctcctcgtcggcggccgaggtcggctgttcttcccgtcgtctccccgtcgtatctgcctatctgtcagggcggctggggatgcggcggtgtcagttgcggcgggggcttacggactccccttccggccggagggagccgctcaccaccgcgagctctccgcggcagtggccgtcgtcgagcgcgcctgctgcctctgcgttgacgtgaagagatcactgttttcacgtcgcagcagtattcttgagaagaatgaccaaagtcctgttacagttgcagatttcggagtgcaggcccttattagtttgggtaatccatagcaaaatttcaaagttcagatttgtgactttgtctaatgccatattttgccatgttgctattgaaagagctccagagattgttcccatcgatacctctggtggccgaagaggattcagcttctctaagatcatccaaagctgatgataatagcagtgatatacttgttgagtcgatttttagcgcagttgtagacaaagtgagtaataacggttcacatttaactcaagatgatgtcttgagagcaattgatagaggaggcaaggacgctgtctcatttgattcaaaccctgctacttattgggtgcttgatccaattgatggcaccaaaggtttcttgagagggaatgatgctctgtgggtctggcacttgtggtgaatggaaaggtaacagttggagtgatgggatgtccaaattggaccaacgatgacatagtcaacaagaaagatgatagcgttgctgcatgtaatggtcgtggtattcttatggtctcccatattggctgtggcacatggtctaggcgtctgtctgctgatattggtcagttgaatacagctcaggatatttggaaaagatgttttgtggacacttgttcgatcgcacacatggcacactattgcattccagatagccaaacatgggatatgataccgttatctgctacctacgattcaacaacagatgcaactgatcctagaaatgagaatgaaatccttctcctgtccgttttttgtggcaggtttgttgcactctccaatctccattaatggtttgatacttgcacattaattcacgccactagtcagttgatatatgatgctaacaatgattgattttctccaacatatggcattcacggttagcaaaaggcatttaaagcaacgattgatatattctccccatccacaagttagctctggatactagtttgtttgctgtaagactttttcagcattatctgaaacgttaaatgtctttctatattcttgtgctgtcttgctatcatactgtttgtggatttcctacaaaaaaatatctggctgaggttgataatgagtactatctcgaatatttgtcgtccaatagttcatctttgaactaaaacgcgacaaataaaaaagaacggagggagtatattacagccattagtgattaccgattggtcttccgcacatgagttcatgatgatgtgctcttgttgctattctatagcttgtgcaagtatctcacaattgcttccgggagagcctcggtttttgtccttcaagcacggccgacaactcagatcaagtcttgggatcacgctgttggggtgatctgcgtgcaggaggccggtggtcaggtatttaccttgcttgctaaaacagacaaactccaactctgttccatcagttcatctctcttagcactatagcacggtgatcttctaactctctgaaaccgacagaccagtgactggagtggagaaccgttggatcttgcagctgacctaacatcgcgcagaatcatctaccctcggggcggtgttctggtgacaaatggtgcgctgcatgacaagcttgtcgaaatgatctcagcaagttacaagtagctgcatagcttcacaggccaacacaccttgtctttttgaatttgaatcattttaccttatctattcgatcttcagtgaaattgtatttgatcttcggtgaaattgtattcgatctgcacattcagtatagaaaccacaagcatgttcacttgttcagatggcttccattgccacaggagttattatacgaatgaaaacacactgtttccttgttgtaccgtgatgaactattgcttaagcaacttcattcagaagcaatacatgcaagggaaggtcgttttccaaatttttttcacaaaactccagaacctttttttttttggcttcccaatgtgtgaatttgttgcgcagccctgatgctctactctcatggtcgtacgacgcccacgcacgcacacctgaatcctgcaaaaaagaaaaaaaaaaacaaaagcgtgatgtttggtcaccaattcagactgatgaaaaagacgcggaaaggac

SEQ ID NO: 70041 - DNA, 700 bp, Zea Mays
aatcttgaaatctcatttgacctagacatggtctggtctgcccttctacccagtacagcacgctttgcgctgcactaaacgtcagtaaaagaagtgtggatagggaccttgatgtttaccgcaacatactctcaaagttggttcaagccaaggaacttctcaaggaatacgtggatagggaaaagaagaagagagaagaaagatcggaagccccgaagccgaacgaagctgtcacaaaatttgatggaaacctttattccacaaggcattagaatcagccctttgcagaggagagtttcccaggataacagaattaacagtaacatctggaccgtgttgagaaaccaccaaatgttcccctttcatcacagacgtctttggctgctcgtcttgtgatgtagcattctgccgtacaaaaggatccagattattcttactactggacagatatttgtattttctcatatgtcttgaaatcaaatgtatacattttctgtgtgtaggggtcaatgttactcaagcagagaaatatagttttctcttttgtatttaaattcaggtaatttgggaggccgtgttcacttatatataatatagtgtggcaaccatgaaaacaattggtgaagttctttatgtgagtttgtatgtaccgggctcagcactgaaaaatatctgaggttgaaaagtcttaacagccggc

SEQ ID NO: 70042 - DNA, 1176 bp, Zea Mays
atattgtcctgtgtgttttgattagaatcctctggatgcctggattcaatatgtcccacccactgtcgcagaaacaaaactgaacttccttaagtcatacaaacgcccaatcccaagcatttacagtgcagtcttacaagaacttttggtgcagcaacacctgatgagatacaaaaaaacctatcagtatgatgctgtgtttgctcttggcttcgtcactgtctatgatcagctcatggaagggtaccccagcaatgaggacagggattccatcttcaaggcatatataacagcattaaatgaagatcctgatcaatacagagctgatgcactaaagatggaagagtgggcacgttcccagaacggtagttccttagttgatttttcttccagagatggagaaatcgaggctattctgaaagatatatcagaaagggccaagggtaagggaaacttcagctacagccgattctttgcagttggcttgttccgtttgcttgagctctcaaatgcaacggagccaacaatactagacaagctttgcgctgcactaaacgtcagtaaaagaagtgtggatagggaccttgatgtttaccgcaacatactctcaaagttggttcaagccaaggaacttctcaaggaatacgtggatagggaaaagaagaagagagaagaaagatcggaagccccgaagccgaacgaagctgtcacaaaatttgatggaaacctttattccacaaggcattagaatcagccctttgcagaggagagtttcccaggataacagaattaacagtaacatctggaccgtgttgagaaaccaccaaatgttcccctttcatcacagacgtctttggctgctcgtcttgtgatgtagcattctgccgtacaaaaggatccagattattcttactactggacagatatttgtattttctcatatgtcttgaaatcaaatgtatacattttctgtgtgtaggggtcaatgttactcaagcagagaaatatagttttctcttttgtatttaaattcaggtaatttgggaggccgtgttcacttatatataatatagtgtggcaaccatgaaaacaattggtgaagttctttatgtgagtttgtatgtaccgggctcagcactgaaaaatatctgaggttgaaaagtcttaacagccggc

SEQ ID NO: 70043 - DNA, 1272 bp, Zea Mays
atccatacatttttttggtgaaatctgattcagaatcattagtccctttcttgaataggtttctgggatcaccatcttcgcatataattttttatggaacataatttgttttgatgcttaggaggcaaactggtgtacaataacagatgtcccacccactgtcgcagaaacaaaactgaacttccttaagtcatacaaacgcccaatcccaagcatttacagtgcagtcttacaagaacttttggtgcagcaacacctgatgagatacaaaaaaacctatcagtatgatgctgtgtttgctcttggcttcgtcactgtctatgatcagctcatggaagggtaccccagcaatgaggacagggattccatcttcaaggcatatataacagcattaaatgaagatcctgatcaatacagagctgatgcactaaagatggaagagtgggcacgttcccagaacggtagttccttagttgatttttcttccagagatggagaaatcgaggctattctgaaagatatatcagaaagggccaagggtaagggaaacttcagctacagccgattctttgcagttggcttgttccgtttgcttgagctctcaaatgcaacggagccaacaatactagacaagctttgcgctgcactaaacgtcagtaaaagaagtgtggatagggaccttgatgtttaccgcaacatactctcaaagttggttcaagccaaggaacttctcaaggaatacgtggatagggaaaagaagaagagagaagaaagatcggaagccccgaagccgaacgaagctgtcacaaaatttgatggaaacctttattccacaaggcattagaatcagccctttgcagaggagagtttcccaggataacagaattaacagtaacatctggaccgtgttgagaaaccaccaaatgttcccctttcatcacagacgtctttggctgctcgtcttgtgatgtagcattctgccgtacaaaaggatccagattattcttactactggacagatatttgtattttctcatatgtcttgaaatcaaatgtatacattttctgtgtgtaggggtcaatgttactcaagcagagaaatatagttttctcttttgtatttaaattcaggtaatttgggaggccgtgttcacttatatataatatagtgtggcaaccatgaaaacaattggtgaagttctttatgtgagtttgtatgtaccgggctcagcactgaaaaatatctgaggttgaaaagtcttaacagccggc

SEQ ID NO: 70044 - DNA, 1314 bp, Zea Mays
ctcaaactaagtgaatcggagtcaccatgccaaacctgtgcggttcaccgcaaaagacctcctcctcctcatcctaaattcgccaagcaatgtgcgatgccggcttcgccaactgtgattccttatgccgccgaatcccatcacctcgaaatcctccgtagtagtctttgcggtgacctcttttgttgatgtcccacccactgtcgcagaaacaaaactgaacttccttaagtcatacaaacgcccaatcccaagcatttacagtgcagtcttacaagaacttttggtgcagcaacacctgatgagatacaaaaaaacctatcagtatgatgctgtgtttgctcttggcttcgtcactgtctatgatcagctcatggaagggtaccccagcaatgaggacagggattccatcttcaaggcatatataacagcattaaatgaagatcctgatcaatacagagctgatgcactaaagatggaagagtgggcacgttcccagaacggtagttccttagttgatttttcttccagagatggagaaatcgaggctattctgaaagatatatcagaaagggccaagggtaagggaaacttcagctacagccgattctttgcagttggcttgttccgtttgcttgagctctcaaatgcaacggagccaacaatactagacaagctttgcgctgcactaaacgtcagtaaaagaagtgtggatagggaccttgatgtttaccgcaacatactctcaaagttggttcaagccaaggaacttctcaaggaatacgtggatagggaaaagaagaagagagaagaaagatcggaagccccgaagccgaacgaagctgtcacaaaatttgatggaaacctttattccacaaggcattagaatcagccctttgcagaggagagtttcccaggataacagaattaacagtaacatctggaccgtgttgagaaaccaccaaatgttcccctttcatcacagacgtctttggctgctcgtcttgtgatgtagcattctgccgtacaaaaggatccagattattcttactactggacagatatttgtattttctcatatgtcttgaaatcaaatgtatacattttctgtgtgtaggggtcaatgttactcaagcagagaaatatagttttctcttttgtatttaaattcaggtaatttgggaggccgtgttcacttatatataatatagtgtggcaaccatgaaaacaattggtgaagttctttatgtgagtttgtatgtaccgggctcagcactgaaaaatatctgaggttgaaaagtcttaacagccggc

SEQ ID NO: 70045 - DNA, 1446 bp, Zea Mays
aacaaaaatgtcaaaacaaaattaaatctccaatcaaaagaactccatgccacgtggcaacgtggtattggccaagaaaccttcgtaggcctactggataagaaagatcccatccctccgctacccagacgaacaaggaacaatagcctttcctctcactcgcccctctgcatttaccactttgccctcgtcggcggcgctgaccacccgccgccgagtccggcgaaacaaccgcctgtagttccagagtagtacctcatggcggccatatcgtcacttcccttcgcggcgctgcgcggagccgccgagtggaggccttcgtcgacggcggcggccgtctccggcgccgtcgtgctcagcgcgaggtctcgccggggctcgcgctcggtggtgcgatgtgtcgccacgacgggtgatgtcccacccactgtcgcagaaacaaaactgaacttccttaagtcatacaaacgcccaatcccaagcatttacagtgcagtcttacaagaacttttggtgcagcaacacctgatgagatacaaaaaaacctatcagtatgatgctgtgtttgctcttggcttcgtcactgtctatgatcagctcatggaagggtaccccagcaatgaggacagggattccatcttcaaggcatatataacagcattaaatgaagatcctgatcaatacagagctgatgcactaaagatggaagagtgggcacgttcccagaacggtagttccttagttgatttttcttccagagatggagaaatcgaggctattctgaaagatatatcagaaagggccaaggctttgcgctgcactaaacgtcagtaaaagaagtgtggatagggaccttgatgtttaccgcaacatactctcaaagttggttcaagccaaggaacttctcaaggaatacgtggatagggaaaagaagaagagagaagaaagatcggaagccccgaagccgaacgaagctgtcacaaaatttgatggaaacctttattccacaaggcattagaatcagccctttgcagaggagagtttcccaggataacagaattaacagtaacatctggaccgtgttgagaaaccaccaaatgttcccctttcatcacagacgtctttggctgctcgtcttgtgatgtagcattctgccgtacaaaaggatccagattattcttactactggacagatatttgtattttctcatatgtcttgaaatcaaatgtatacattttctgtgtgtaggggtcaatgttactcaagcagagaaatatagttttctcttttgtatttaaattcaggtaatttgggaggccgtgttcacttatatataatatagtgtggcaaccatgaaaacaattggtgaagttctttatgtgagtttgtatgtaccgggctcagcactgaaaaatatctgaggttgaaaagtcttaacagccggc

SEQ ID NO: 70046 - DNA, 1705 bp, Zea Mays
attttcactgataactgaaacaacaattacttcattatattcattcaaggacaagcaccacacaatcaacatcatgtttaaactcaaatcaagacgtgttgagtaaaccatccttttacatgttaccaggagtctaagaaactatagtttgggttgttccagatttgagtgtcatacctaaatttgggtacttgtaagtccagattaaatgcaatgtttcctttctcggtttttggacatcttacaatcataaattatccttttacattaacttgcagcctttcaaaaacatatgttttcccaatattatttattaaatgcttttagtattgtatcttcattttagagtgagaaatccgctactcaattcacatcaggatattagttgtcaaatattttagtactaatattgagggggatggcggagggcattgcgctgcggggttacatcgccgtcaccttcgacatgcgcgacataggtgggtccacagggcgggtgtcgctcacgtgctccatcaagaacatcgagtgaggtggtgtgctgctgctctaaagaagggaggagaggaagtagcgacaatgtcgccaagaccacctggcgcgatgtctcctaccagatcaccaagatcaacatgtacaaggatggtcggcatgtacaagatatgcttaaggaatgagccacaaaatctgagagaacttatgctcttggtgctgctgacaacacaactgttgctattagaaagggatttgccattggttcaggtgctcttgtgtccctggtgctgtttggtgccttcgttagcagagctggagtgaagagtgttggaagtgtcgccctaaagatggtggaggaggttcgcaggcagttcaacaccattcttgggttgatggagtgaacaagcaagcctgactatgcaacctatgtgaagatttgcactgatgcttcttccatcaaggagatgattccttggggtgctctggtcatgctgactccctcattgatggaacctctttggcatcgagactctctctggcgtttttgctggtgccctggtttttggagtgcaggtgcgcactttgccttctactctctctgtgcacttcaatgtgtttgcttgttctagggtttatggagatttctgctttggacaaattgccatctctacttccaacactgtgctgcataggataacgcaagaagtatattaagaacaaggccatctcagataaaagtagatgtagctttcataggacttaattccagcaaagcaaaggttggcagtgcaccaaacaatagcgtttatacttcattcttatggattggagaagcctatgcaacatgtcaagccagatgacatgcagatgagaaggttctgcatcaatagaaaccagagaaaaatctgtatgtgtctgtatgacatctcagataaagcctgatgatcagcatgatgaaaggtggggagttctatagctggtttaagctggagctagcttctgaagtccggtcaggtgtctgtatgtgttgcccctttttatttcatttcatgagaaaagattgttatttgttccttgaactgtacttggtcgtacttgtgaataaatattttagcatggttgttcgacttctcataatgtttattcgacatcagttcatgatattagtgttacgtgatattttatcatatgaattttgaatatcatagtg

SEQ ID NO: 70047 - DNA, 2417 bp, Zea Mays
cctccctccatagttgtcgccccaaacgttgcagcattgatggcagcgagctcgttctccactctccagcatgtcgatccagcgggagcaccttcgacctcaccggtgaaactagaagaacgtatgaagctagacttgttgcaatttatagacatgtaagagaggatggagttgagggacaacctatttctgtttcaacagaacaatttgcagtaagtcaaatcacctcttgtactataatcttgcaattgtttctttctctctcttttctaagaataactattgcattagcatattttactaacttgtataaattgttattttcaagagattttatgtaccgtttctttacaaacaatgctaatgccacatccacaatcttgcagaactttgaatggcaaccagttatctggatctttgcctgatgagattggttaccagatgaactttaacagattagaaataaaatataacaacatatcaggcccatacctaacacttttgccaacttaacaagaattaaacatctgttagtgtcgagtatctttattttctgcccatccctgatgcttctgatttgtaaaattagtaaataattctggttccaattttaccttttagtcacatgaataataactcattacaaatcccatctgagttgtccaacttgccttaactccttcatttgtaagtagacctcaactttttctaatattttctattttgcaagttgcagatgacttgtaagttgacatgtcttgtgctgtgaacttgcagccttgttgataacaataattgatctgggcctcttccaccagaattagtagatacacgtagtcttcttgctatcttgactgctgataataacaacttcagtggaagctccatcctgctgaatacaacaacatacaaacacttctaaagctgtgggtccacagggcgggtgtcgctcacgtgctccatcaagaacatcgagtgaggtggtgtgctgctgctctaaagaagggaggagaggaagtagcgacaatgtcgccaagaccacctggcgcgatgtctcctaccagatcaccaagatcaacatgtacaaggtgatccagtccgagccctctccctgcatgcttccattgattttttatttcattccaatcgatttgccgtgatatatgcaatgcaggatggtcggcatgtacaagatatgcttaaggtgaggttgtaattcaggatgtgcatatatttcttgggcttgaatttgtttaatctaaatagattattttttatccaatccaaatttccaatgacttgccatatcattagcatcagaggctccataaagcagctctgctagaattaactgattcactgtcaaggtcaaacatcactatgatattgctgagatggtccaatcagtgacaatgctggtggtattgttgagatggcaggaatgagccacaaaatctgagagaacttatgctcttggtgctgctgacaacacaactgttgctattagaaagggatttgccattggttcaggtgctcttgtgtccctggtgctgtttggtgccttcgttagcagagctggagtgaaggttgtcgatgttctctcctgaaggttttcattggtttgattgttggagacatgtttttgtactggttctctgtcatgaccatgaagagtgttggaagtgtcgccctaaagatggtggaggaggttcgcaggcagttcaacaccattcttgggttgatggagtgaacaagcaagcctgactatgcaacctatgtgaagatttgcactgatgcttcttccatcaaggagatgattccttggggtgctctggtcatgctgactccctcattgatggaacctctttggcatcgagactctctctggcgtttttgctggtgccctggtttttggagtgcagaacaaggccatctcagataaaagtagatgtagctttcataggacttaattccagcaaagcaaaggttggcagtgcaccaaacaatagcgtttatacttcattcttatggattggagaagcctatgcaacatgtcaagccagatgacatgcagatgagaaggttctgcatcaatagaaaccagagaaaaatctgtatgtgtctgtatgacatctcagataaagcctgatgatcagcatgatgaaaggtggggagttctatagctggtttaagctggagctagcttctgaagtccggtcaggtgtctgtatgtgttgcccctttttatttcatttcatgagaaaagattgttatttgttccttgaactgtacttggtcgtacttgtgaataaatattttagcatggttgttcgacttctcataatgtttattcgacatcagttcatgatattagtgttacgtgatattttatcatatgaattttgaatatcatagtg

SEQ ID NO: 70048 - DNA, 1935 bp, Zea Mays
cacagctgcagctgccccccgagcaaccctagctctcgctcctccctccatagttgtcgccccaaacgttgcagcattgatggcagcgagctcgttctccactctccagcatgtcgatccagcgggagcaccttcgacctcaccggtgaaactagaagaacgtatgaagctagacttgttgcaatttatagacatgtaagagaggatggagttgagggacaacctatttctgtttcaacagaacaatttgcattgcagatgacttgtaagttgacatgtcttgtgctgtgaacttgcagccttgttgataacaataattgatctgggcctcttccaccagaattagtagatacacgtagtcttcttgctatcttgacttcaggctgataataacaacttcagtggaagctccatcctgctgaatacaacaacatacaaacacttctaaagctgatattagttgtcaaatattttagtactaatattgagggggatggcggagggcattgcgctgcggggttacatcgccgtcaccttcgacatgcgcgacataggtgggtccacagggcgggtgtcgctcacgtgctccatcaagaacatcgagtgaggtggtgtgctgctgctctaaagaagggaggagaggaagtagcgacaatgtcgccaagaccacctggcgcgatgtctcctaccagatcaccaagatcaacatgtacaaggtgatccagtccgagccctctccctgcatgcttccattgattttttatttcattccaatcgatttgccgtgatatatgcaatgcaggatggtcggcatgtacaagatatgcttaagcatcagaggctccataaagcagctctgctagaattaactgattcactgtcaaggtcaaacatcactatgatattgctgagatggtccaatcagtgacaatgctggtggtattgttgagatggcaggaatgagccacaaaatctgagagaacttatgctcttggtgctgctgacaacacaactgttgctattagaaagggatttgccattggttcaggtgctcttgtgtccctggtgctgtttggtgccttcgttagcagagctggagtgaaggttgtcgatgttctctcctgaaggttttcattggtttgattgttggagacatgtttttgtactggttctctgtcatgaccatgaagagtgttggaagtgtcgccctaaagatggtggaggaggttcgcaggcagttcaacaccattcttgggttgatggagtgaacaagcaagcctgactatgcaacctatgtgaagatttgcactgatgcttcttccatcaaggagatgattccttggggtgctctggtcatgctgactccctcattgatggaacctctttggcatcgagactctctctggcgtttttgctggtgccctggtttttggagtgcagaacaaggccatctcagataaaagtagatgtagctttcataggacttaattccagcaaagcaaaggttggcagtgcaccaaacaatagcgtttatacttcattcttatggattggagaagcctatgcaacatgtcaagccagatgacatgcagatgagaaggttctgcatcaatagaaaccagagaaaaatctgtatgtgtctgtatgacatctcagataaagcctgatgatcagcatgatgaaaggtggggagttctatagctggtttaagctggagctagcttctgaagtccggtcaggtgtctgtatgtgttgcccctttttatttcatttcatgagaaaagattgttatttgttccttgaactgtacttggtcgtacttgtgaataaatattttagcatggttgttcgacttctcataatgtttattcgacatcagttcatgatattagtgttacgtgatattttatcatatgaattttgaatatcatagtg

SEQ ID NO: 70049 - DNA, 3650 bp, Zea Mays
gccgtcgccgcagacgcagccggccacccaccactcgcgcctcccccaccgcgtcgcgtgtgggccacagctacagctgcctcctcgagcaacccacactcctttcttcccctgcctgtcgtctctcttccaccttccaccacaagcgccgtcgcagccggtgcctgctccttcccgatccccgaggcaaagctgcgactccgcaactgccgccatggcgttcgagaagatcaaggtctccaacccaatcatcgagatggacggcgatgagatgaccagggtattctggcagtctatcaaggacaagcttatcttcccatttctggacctggacatcaagtactatgatttggggatactgcacggtgaagcaactgatgacaaggtcacagtggaggctgcagaggctactctcaagtacaatgtggctattaagtgtgcgaccattactccaggtgaaactagaagaacgtatgaagctagacttgttgcaatttatagacatgtaagagaggatggagttgagggacaacctatttctgtttcaacagaacaatttgcaccttgttgataacaataattgatctgggcctcttccaccagaattagtagatacacgtagtcttcttgctatcttgacttcaggctgataataacaacttcagtggaagctccatcctgctgaatacaacaacatacaaacacttctaaagctgtgagtgtaacaaccttttcgctcatgttctctcttttcagaatttgaggtagatgagggcaaaagaatttaacagctattacaacttctgttattgagaacaatcattaaaagcatgcttattaaaacgacgttaaaacgacgtttaaacgtcgtttaaactataaaacgctgacaggaagtgaaacgacaaaacgttttacgattcgtcgtaaaacgttgtttaacgtcgtttaaacgtcgcgttttgacgtttaaacgcggtatagagtgaaacgccgcgtttaatgcgtctgctgctagtaattggcccagcccaattagaaactcccgcccagcccacccagaccgccgctacaagccgcactttcaccagcccaattagtaactcgcgttctcaccagccgtcgcactccagggcgcgctccagcctccaggccgccgctgctccaaccctcctgcgccgcccgtccggcgccgccaggcccgcctctgcgtgccgctgctccaggccgccgccgctccagtcagctgctctccaggccgtcctccctccaggccgctgctctccaggccgctccaggccgctgctctcaaggccgtcctccagccccgcctcagagcctctgcgtgccaccgctccaggccgccgcgctccaggccgtcctccctcctgcgccgcctgtccggctgccagcccctccagccccgcctctgctgtcccactgcggcaggactacagagtacagagactgactgtcccactgtttggtatttgacttgatataattgcctgaaattatgatatattgaaatttccctatgttgtttaaaactacatttaaactttgtttaaaccgtttaaaagttaaaacttacccatgagcgtttcaacgtttcgtcgttttaataaccttgattaaaagtgtaggcattggtgagtacaaacctaaggttaaaagaagaatattttgaataaaagtgtttgtatttgccaaatggcttatgcttttagttgagataggtagtatatcaaagttcagggcatcacatagataagaacgaatttgctccgtgtgcaacaaaaagctcgtttttacactgactcctcttctattgcagcctatagctgccaaatagttggatgcaactggtccatttatctggaaatatttatatttaaaaaaatatcgaaaaacattacatttaaaattttataggtagtcttctttcattctgtggagatcattttcactgataactgaaacaacaattacttcattatattcattcaaggacaagcaccacacaatcaacatcatgtttaaactcaaatcaagacgtgttgagtaaaccatccttttacatgttaccaggagtctaagaaactatagtttgggttgttccagatttgagtgtcatacctaaatttgggtacttgtaagtccagattaaatgcaatgtttcctttctcggtttttggacatcttacaatcataaattatccttttacattaacttgcagcctttcaaaaacatatgttttcccaatattatttattaaatgcttttagtattgtatcttcattttagagtgagaaatccgctactcaattcacatcaggatattagttgtcaaatattttagtactaatattgagggggatggcggagggcattgcgctgcggggttacatcgccgtcaccttcgacatgcgcgacataggtgggtccacagggcgggtgtcgctcacgtgctccatcaagaacatcgagtgaggtggtgtgctgctgctctaaagaagggaggagaggaagtagcgacaatgtcgccaagaccacctggcgcgatgtctcctaccagatcaccaagatcaacatgtacaaggatggtcggcatgtacaagatatgcttaagcatcagaggctccataaagcagctctgctagaattaactgattcactgtcaaggtcaaacatcactatgatattgctgagatggtccaatcagtgacaatgctggtggtattgttgagatggcaggaatgagccacaaaatctgagagaacttatgctcttggtgctgctgacaacacaactgttgctattagaaagggatttgccattggttcaggtgctcttgtgtccctggtgctgtttggtgccttcgttagcagagctggagtgaagagtgttggaagtgtcgccctaaagatggtggaggaggttcgcaggcagttcaacaccattcttgggttgatggagtgaacaagcaagcctgactatgcaacctatgtgaagatttgcactgatgcttcttccatcaaggagatgattccttggggtgctctggtcatgctgactccctcattgatggaacctctttggcatcgagactctctctggcgtttttgctggtgccctggtttttggagtgcagaacaaggccatctcagataaaagtagatgtagctttcataggacttaattccagcaaagcaaaggttggcagtgcaccaaacaatagcgtttatacttcattcttatggattggagaagcctatgcaacatgtcaagccagatgacatgcagatgagaaggttctgcatcaatagaaaccagagaaaaatctgtatgtgtctgtatgacatctcagataaagcctgatgatcagcatgatgaaaggtggggagttctatagctggtttaagctggagctagcttctgaagtccggtcaggtgtctgtatgtgttgcccctttttatttcatttcatgagaaaagattgttatttgttccttgaactgtacttggtcgtacttgtgaataaatattttagcatggttgttcgacttctcataatgtttattcgacatcagttcatgatattagtgttacgtgatattttatcatatgaattttgaatatcatagtg

SEQ ID NO: 70050 - DNA, 2736 bp, Zea Mays
gccgtcgccgcagacgcagccggccacccaccactcgcgcctcccccaccgcgtcgcgtgtgggccacagctacagctgcctcctcgagcaacccacactcctttcttcccctgcctgtcgtctctcttccaccttccaccacaagcgccgtcgcagccggtgcctgctccttcccgatccccgaggcaaagctgcgactccgcaactgccgccatggcgttcgagaagatcaaggtctccaacccaatcatcgagatggacggcgatgagatgaccagggtattctggcagtctatcaaggacaagcttatcttcccatttctggacctggacatcaagtactatgatttggggatactgcacggtgaagcaactgatgacaaggtcacagtggaggctgcagaggctactctcaagtacaatgtggctattaagtgtgcgaccattactccaggtgaaactagaagaacgtatgaagctagacttgttgcaatttatagacatgtaagagaggatggagttgagggacaacctatttctgtttcaacagaacaatttgcagtaagtcaaatcacctcttgtactataatcttgcaattgtttctttctctctcttttctaagaataactattgcattagcatattttactaacttgtataaattgttattttcaagagattttatgtaccgtttctttacaaacaatgctaatgccacatccacaatcttgcagaactttgaatggcaaccagttatctggatctttgcctgatgagattggttaccagatgaactttaacagattagaaataaaatataacaacatatcaggcccatacctaacacttttgccaacttaacaagaattaaacatctgttagtgtcgagtatctttattttctgcccatccctgatgcttctgatttgtaaaattagtaaataattctggttccaattttaccttttagtcacatgaataataactcattacaaatcccatctgagttgtccaacttgccttaactccttcatttgtaagtagacctcaactttttctaatattttctattttgcaagttgcagatgacttgtaagttgacatgtcttgtgctgtgaacttgcagccttgttgataacaataattgatctgggcctcttccaccagaattagtagatacacgtagtcttcttgctatcttgacttcaggctgataataacaacttcagtggaagctccatcctgctgaatacaacaacatacaaacacttctaaagctggcattgcgctgcggggttacatcgccgtcaccttcgacatgcgcgacataggtgggtccacagggcgggtgtcgctcacgtgctccatcaagaacatcgagtgaggtggtgtgctgctgctctaaagaagggaggagaggaagtagcgacaatgtcgccaagaccacctggcgcgatgtctcctaccagatcaccaagatcaacatgtacaaggtgatccagtccgagccctctccctgcatgcttccattgattttttatttcattccaatcgatttgccgtgatatatgcaatgcaggatggtcggcatgtacaagatatgcttaagcatcagaggctccataaagcagctctgctagaattaactgattcactgtcaaggtcaaacatcactatgatattgctgagatggtccaatcagtgacaatgctggtggtattgttgagatggcaggaatgagccacaaaatctgagagaacttatgctcttggtgctgctgacaacacaactgttgctattagaaagggatttgccattggttcaggtgctcttgtgtccctggtgctgtttggtgccttcgttagcagagctggagtgaaggttgtcgatgttctctcctgaaggttttcattggtttgattgttggagacatgtttttgtactggttctctgtcatgaccatgaagagtgttggaagtgtcgccctaaagatggtggaggaggttcgcaggcagttcaacaccattcttgggttgatggagtgaacaagcaagcctgactatgcaacctatgtgaagatttgcactgatgcttcttccatcaaggagatgattccttggggtgctctggtcatgctgactccctcattgatggaacctctttggcatcgagactctctctggcgtttttgctggtgccctggtttttggagtgcaggataacgcaagaagtatattaagaacaaggccatctcagataaaagtagatgtagctttcataggacttaattccagcaaagcaaaggttggcagtgcaccaaacaatagcgtttatacttcattcttatggattggagaagcctatgcaacatgtcaagccagatgacatgcagatgagaaggttctgcatcaatagaaaccagagaaaaatctgtatgtgtctgtatgacatctcagataaagcctgatgatcagcatgatgaaaggtggggagttctatagctggtttaagctggagctagcttctgaagtccggtcaggtgtctgtatgtgttgcccctttttatttcatttcatgagaaaagattgttatttgttccttgaactgtacttggtcgtacttgtgaataaatattttagcatggttgttcgacttctcataatgtttattcgacatcagttcatgatattagtgttacgtgatattttatcatatgaattttgaatatcatagtg

SEQ ID NO: 70051 - DNA, 2636 bp, Zea Mays
ctgccttccgcccccgccgtcgccgcagacgcagccggccacccaccactcgcgcctcccccaccgcgtcgcgtgtgggccacagctacagctgcctcctcgagcaacccacactcctttcttcccctgcctgtcgtctctcttccaccttccaccacaagcgccgtcgcagccggtgcctgctccttcccgatccccgaggcaaagctgcgactccgcaactgccgccatggcgttcgagaagatcaaggtctccaacccaatcatcgagatggacggcgatgagatgaccagggtattctggcagtctatcaaggacaagcttatcttcccatttctggacctggacatcaagtactatgatttggggatactgcacggtgaagcaactgatgacaaggtcacagtggaggctgcagaggctactctcaagtacaatgtggctattaagtgtgcgaccattactccaggtgaaactagaagaacgtatgaagctagacttgttgcaatttatagacatgtaagagaggatggagttgagggacaacctatttctgtttcaacagaacaatttgcagtaagtcaaatcacctcttgtactataatcttgcaattgtttctttctctctcttttctaagaataactattgcattagcatattttactaacttgtataaattgttattttcaagagattttatgtaccgtttctttacaaacaatgctaatgccacatccacaatcttgcagaactttgaatggcaaccagttatctggatctttgcctgatgagattggttaccagatgaactttaacagattagaaataaaatataacaacatatcaggcccatacctaacacttttgccaacttaacaagaattaaacatctgttagtgtcgagtatctttattttctgcccatccctgatgcttctgatttgtaaaattagtaaataattctggttccaattttaccttttagtcacatgaataataactcattacaaatcccatctgagttgtccaacttgccttaactccttcatttccttgttgataacaataattgatctgggcctcttccaccagaattagtagatacacgtagtcttcttgctatcttgacttcaggctgataataacaacttcagtggaagctccatcctgctgaatacaacaacatacaaacacttctaaagctgtgggtccacagggcgggtgtcgctcacgtgctccatcaagaacatcgagtgaggtggtgtgctgctgctctaaagaagggaggagaggaagtagcgacaatgtcgccaagaccacctggcgcgatgtctcctaccagatcaccaagatcaacatgtacaaggatggtcggcatgtacaagatatgcttaagaggctccataaagcagctctgctagaattaactgattcactgtcaaggtcaaacatcactatgatattgctgagatggtccaatcagtgacaatgctggtggtattgttgagatggcaggaatgagccacaaaatctgagagaacttatgctcttggtgctgctgacaacacaactgttgctattagaaagggatttgccattggttcaggtgctcttgtgtccctggtgctgtttggtgccttcgttagcagagctggagtgaaggttgtcgatgttctctcctgaaggttttcattggtttgattgttggagacatgtttttgtactggttctctgtcatgaccatgaagagtgttggaagtgtcgccctaaagatggtggaggaggttcgcaggcagttcaacaccattcttgggttgatggagtgaacaagcaagcctgactatgcaacctatgtgaagatttgcactgatgcttcttccatcaaggagatgattccttggggtgctctggtcatgctgactccctcattgatggaacctctttggcatcgagactctctctggcgtttttgctggtgccctggtttttggagtgcaggtgcgcactttgccttctactctctctgtgcacttcaatgtgtttgcttgttctagggtttatggagatttctgctttggacaaattgccatctctacttccaacactgtgctgcataggataacgcaagaagtatattaagaacaaggccatctcagataaaagtagatgtagctttcataggacttaattccagcaaagcaaaggttggcagtgcaccaaacaatagcgtttatacttcattcttatggattggagaagcctatgcaacatgtcaagccagatgacatgcagatgagaaggttctgcatcaatagaaaccagagaaaaatctgtatgtgtctgtatgacatctcagataaagcctgatgatcagcatgatgaaaggtggggagttctatagctggtttaagctggagctagcttctgaagtccggtcaggtgtctgtatgtgttgcccctttttatttcatttcatgagaaaagattgttatttgttccttgaactgtacttggtcgtacttgtgaataaatattttagcatggttgttcgacttctcataatgtttattcgacatcagttcatgatattagtgttacgtgatattttatcatatgaattttgaatatcatagtg

SEQ ID NO: 70052 - DNA, 2075 bp, Zea Mays
cctccccctccgcgtcctacagccatcgtcgctctgccttccgcccccgccgtcgccgcagacgcagccggccacccaccactcgcgcctcccccaccgcgtcgcgtgtgggccacagctacagctgcctcctcgagcaacccacactcctttcttcccctgcctgtcgtctctcttccaccttccaccacaagcgccgtcgcagccggtgcctgctccttcccgatccccgaggcaaagctgcgactccgcaactgccgccatggcgttcgagaagatcaaggtctccaacccaatcatcgagatggacggcgatgagatgaccagggtattctggcagtctatcaaggacaagcttatcttcccatttctggacctggacatcaagtactatgatttggggatactgcacggtgaagcaactgatgacaaggtcacagtggaggctgcagaggctactctcaagtacaatgtggctattaagtgtgcgaccattactccaggtgaaactagaagaacgtatgaagctagacttgttgcaatttatagacatgtaagagaggatggagttgagggacaacctatttctgtttcaacagaacaatttgcaccttgttgataacaataattgatctgggcctcttccaccagaattagtagatacacgtagtcttcttgctatcttgacttcaggctgataataacaacttcagtggaagctccatcctgctgaatacaacaacatacaaacacttctaaagctgtgggtccacagggcgggtgtcgctcacgtgctccatcaagaacatcgagtgaggtggtgtgctgctgctctaaagaagggaggagaggaagtagcgacaatgtcgccaagaccacctggcgcgatgtctcctaccagatcaccaagatcaacatgtacaaggtgatccagtccgagccctctccctgcatgcttccattgattttttatttcattccaatcgatttgccgtgatatatgcaatgcaggatggtcggcatgtacaagatatgcttaaggaatgagccacaaaatctgagagaacttatgctcttggtgctgctgacaacacaactgttgctattagaaagggatttgccattggttcaggtgctcttgtgtccctggtgctgtttggtgccttcgttagcagagctggagtgaagagtgttggaagtgtcgccctaaagatggtggaggaggttcgcaggcagttcaacaccattcttgggttgatggagtgaacaagcaagcctgactatgcaacctatgtgaagatttgcactgatgcttcttccatcaaggagatgattccttggggtgctctggtcatgctgactccctcattgatggaacctctttggcatcgagactctctctggcgtttttgctggtgccctggtttttggagtgcaggtgcgcactttgccttctactctctctgtgcacttcaatgtgtttgcttgttctagggtttatggagatttctgctttggacaaattgccatctctacttccaacactgtgctgcataggataacgcaagaagtatattaagaacaaggccatctcagataaaagtagatgtagctttcataggacttaattccagcaaagcaaaggttggcagtgcaccaaacaatagcgtttatacttcattcttatggattggagaagcctatgcaacatgtcaagccagatgacatgcagatgagaaggttctgcatcaatagaaaccagagaaaaatctgtatgtgtctgtatgacatctcagataaagcctgatgatcagcatgatgaaaggtggggagttctatagctggtttaagctggagctagcttctgaagtccggtcaggtgtctgtatgtgttgcccctttttatttcatttcatgagaaaagattgttatttgttccttgaactgtacttggtcgtacttgtgaataaatattttagcatggttgttcgacttctcataatgtttattcgacatcagttcatgatattagtgttacgtgatattttatcatatgaattttgaatatcatagtg

SEQ ID NO: 70053 - DNA, 2840 bp, Zea Mays
ccctccccctccgcgtcctacagccatcgtcgctctgccttccgcccccgccgtcgccgcagacgcagccggccacccaccactcgcgcctcccccaccgcgtcgcgtgtgggccacagctacagctgcctcctcgagcaacccacactcctttcttcccctgcctgtcgtctctcttccaccttccaccacaagcgccgtcgcagccggtgcctgctccttcccgatccccgaggcaaagctgcgactccgcaactgccgccatggcgttcgagaagatcaaggtctccaacccaatcatcgagatggacggcgatgagatgaccagggtattctggcagtctatcaaggacaagcttatcttcccatttctggacctggacatcaagtactatgatttggggatactgcacggtgaagcaactgatgacaaggtcacagtggaggctgcagaggctactctcaagtacaatgtggctattaagtgtgcgaccattactccaggtgaaactagaagaacgtatgaagctagacttgttgcaatttatagacatgtaagagaggatggagttgagggacaacctatttctgtttcaacagaacaatttgcagtaagtcaaatcacctcttgtactataatcttgcaattgtttctttctctctcttttctaagaataactattgcattagcatattttactaacttgtataaattgttattttcaagagattttatgtaccgtttctttacaaacaatgctaatgccacatccacaatcttgcagaactttgaatggcaaccagttatctggatctttgcctgatgagattggttaccagatgaactttaacagattagaaataaaatataacaacatatcaggcccatacctaacacttttgccaacttaacaagaattaaacatctgttagtgtcgagtatctttattttctgcccatccctgatgcttctgatttgtaaaattagtaaataattctggttccaattttaccttttagtcacatgaataataactcattacaaatcccatctgagttgtccaacttgccttaactccttcatttgtaagtagacctcaactttttctaatattttctattttgcaagttgcagatgacttgtaagttgacatgtcttgtgctgtgaacttgcagccttgttgataacaataattgatctgggcctcttccaccagaattagtagatacacgtagtcttcttgctatcttgacttcaggctgataataacaacttcagtggaagctccatcctgctgaatacaacaacatacaaacacttctaaagctggcgggtgtcgctcacgtgctccatcaagaacatcgagtgaggtggtgtgctgctgctctaaagaagggaggagaggaagtagcgacaatgtcgccaagaccacctggcgcgatgtctcctaccagatcaccaagatcaacatgtacaaggtgatccagtccgagccctctccctgcatgcttccattgattttttatttcattccaatcgatttgccgtgatatatgcaatgcaggatggtcggcatgtacaagatatgcttaagcatcagaggctccataaagcagctctgctagaattaactgattcactgtcaaggtcaaacatcactatgatattgctgagatggtccaatcagtgacaatgctggtggtattgttgagatggcaggaatgagccacaaaatctgagagaacttatgctcttggtgctgctgacaacacaactgttgctattagaaagggatttgccattggttcaggtgctcttgtgtccctggtgctgtttggtgccttcgttagcagagctggagtgaaggttgtcgatgttctctcctgaaggttttcattggtttgattgttggagacatgtttttgtactggttctctgtcatgaccatgaagagtgttggaagtgtcgccctaaagatggtggaggaggttcgcaggcagttcaacaccattcttgggttgatggagtgaacaagcaagcctgactatgcaacctatgtgaagatttgcactgatgcttcttccatcaaggagatgattccttggggtgctctggtcatgctgactccctcattgatggaacctctttggcatcgagactctctctggcgtttttgctggtgccctggtttttggagtgcaggtgcgcactttgccttctactctctctgtgcacttcaatgtgtttgcttgttctagggtttatggagatttctgctttggacaaattgccatctctacttccaacactgtgctgcataggataacgcaagaagtatattaagaacaaggccatctcagataaaagtagatgtagctttcataggacttaattccagcaaagcaaaggttggcagtgcaccaaacaatagcgtttatacttcattcttatggattggagaagcctatgcaacatgtcaagccagatgacatgcagatgagaaggttctgcatcaatagaaaccagagaaaaatctgtatgtgtctgtatgacatctcagataaagcctgatgatcagcatgatgaaaggtggggagttctatagctggtttaagctggagctagcttctgaagtccggtcaggtgtctgtatgtgttgcccctttttatttcatttcatgagaaaagattgttatttgttccttgaactgtacttggtcgtacttgtgaataaatattttagcatggttgttcgacttctcataatgtttattcgacatcagttcatgatattagtgttacgtgatattttatcatatgaattttgaatatcatagtg

SEQ ID NO: 70054 - DNA, 2605 bp, Zea Mays
cccaagcaaccctagctctccctccccctccgcgtcctacagccatcgtcgctctgccttccgcccccgccgtcgccgcagacgcagccggccacccaccactcgcgcctcccccaccgcgtcgcgtgtgggccacagctacagctgcctcctcgagcaacccacactcctttcttcccctgcctgtcgtctctcttccaccttccaccacaagcgccgtcgcagccggtgcctgctccttcccgatccccgaggcaaagctgcgactccgcaactgccgccatggcgttcgagaagatcaaggtctccaacccaatcatcgagatggacggcgatgagatgaccagggtattctggcagtctatcaaggacaagcttatcttcccatttctggacctggacatcaagtactatgatttggggatactgcacggtgaagcaactgatgacaaggtcacagtggaggctgcagaggctactctcaagtacaatgtggctattaagtgtgcgaccattactccaggtgaaactagaagaacgtatgaagctagacttgttgcaatttatagacatgtaagagaggatggagttgagggacaacctatttctgtttcaacagaacaatttgcagtaagtcaaatcacctcttgtactataatcttgcaattgtttctttctctctcttttctaagaataactattgcattagcatattttactaacttgtataaattgttattttcaagagattttatgtaccgtttctttacaaacaatgctaatgccacatccacaatcttgcagaactttgaatggcaaccagttatctggatctttgcctgatgagattggttaccagatgaactttaacagattagaaataaaatataacaacatatcaggcccatacctaacacttttgccaacttaacaagaattaaacatctgttagtgtcgagtatctttattttctgcccatccctgatgcttctgatttgtaaaattagtaaataattctggttccaattttaccttttagtcacatgaataataactcattacaaatcccatctgagttgtccaacttgccttaactccttcatttccttgttgataacaataattgatctgggcctcttccaccagaattagtagatacacgtagtcttcttgctatcttgacttcaggctgataataacaacttcagtggaagctccatcctgctgaatacaacaacatacaaacacttctaaagctggcattgcgctgcggggttacatcgccgtcaccttcgacatgcgcgacataggtgggtccacagggcgggtgtcgctcacgtgctccatcaagaacatcgagtgaggtggtgtgctgctgctctaaagaagggaggagaggaagtagcgacaatgtcgccaagaccacctggcgcgatgtctcctaccagatcaccaagatcaacatgtacaaggatggtcggcatgtacaagatatgcttaagcatcagaggctccataaagcagctctgctagaattaactgattcactgtcaaggtcaaacatcactatgatattgctgagatggtccaatcagtgacaatgctggtggtattgttgagatggcaggaatgagccacaaaatctgagagaacttatgctcttggtgctgctgacaacacaactgttgctattagaaagggatttgccattggttcaggtgctcttgtgtccctggtgctgtttggtgccttcgttagcagagctggagtgaaggttgtcgatgttctctcctgaaggttttcattggtttgattgttggagacatgtttttgtactggttctctgtcatgaccatgaagagtgttggaagtgtcgccctaaagatggtggaggaggttcgcaggcagttcaacaccattcttgggttgatggagtgaacaagcaagcctgactatgcaacctatgtgaagatttgcactgatgcttcttccatcaaggagatgattccttggggtgctctggtcatgctgactccctcattgatggaacctctttggcatcgagactctctctggcgtttttgctggtgccctggtttttggagtgcagaacaaggccatctcagataaaagtagatgtagctttcataggacttaattccagcaaagcaaaggttggcagtgcaccaaacaatagcgtttatacttcattcttatggattggagaagcctatgcaacatgtcaagccagatgacatgcagatgagaaggttctgcatcaatagaaaccagagaaaaatctgtatgtgtctgtatgacatctcagataaagcctgatgatcagcatgatgaaaggtggggagttctatagctggtttaagctggagctagcttctgaagtccggtcaggtgtctgtatgtgttgcccctttttatttcatttcatgagaaaagattgttatttgttccttgaactgtacttggtcgtacttgtgaataaatattttagcatggttgttcgacttctcataatgtttattcgacatcagttcatgatattagtgttacgtgatattttatcatatgaattttgaatatcatagtg

SEQ ID NO: 70055 - DNA, 2411 bp, Zea Mays
cctgccccacaacccccaagcaaccctagctctccctccccctccgcgtcctacagccatcgtcgctctgccttccgcccccgccgtcgccgcagacgcagccggccacccaccactcgcgcctcccccaccgcgtcgcgtgtgggccacagctacagctgcctcctcgagcaacccacactcctttcttcccctgcctgtcgtctctcttccaccttccaccacaagcgccgtcgcagccggtgcctgctccttcccgatccccgaggcaaagctgcgactccgcaactgccgccatggcgttcgagaagatcaaggtctccaacccaatcatcgagatggacggcgatgagatgaccagggtattctggcagtctatcaaggacaagcttatcttcccatttctggacctggacatcaagtactatgatttggggatactgcacggtgaagcaactgatgacaaggtcacagtggaggctgcagaggctactctcaagtacaatgtggctattaagtgtgcgaccattactccaggtgaaactagaagaacgtatgaagctagacttgttgcaatttatagacatgtaagagaggatggagttgagggacaacctatttctgtttcaacagaacaatttgcaccttgttgataacaataattgatctgggcctcttccaccagaattagtagatacacgtagtcttcttgctatcttgacttcaggctgataataacaacttcagtggaagctccatcctgctgaatacaacaacatacaaacacttctaaagctgtgggtccacagggcgggtgtcgctcacgtgctccatcaagaacatcgagtgaggtggtgtgctgctgctctaaagaagggaggagaggaagtagcgacaatgtcgccaagaccacctggcgcgatgtctcctaccagatcaccaagatcaacatgtacaaggtgatccagtccgagccctctccctgcatgcttccattgattttttatttcattccaatcgatttgccgtgatatatgcaatgcaggatggtcggcatgtacaagatatgcttaaggtgaggttgtaattcaggatgtgcatatatttcttgggcttgaatttgtttaatctaaatagattattttttatccaatccaaatttccaatgacttgccatatcattagcatcagaggctccataaagcagctctgctagaattaactgattcactgtcaaggtcaaacatcactatgatattgctgagatggtccaatcagtgacaatgctggtggtattgttgagatggcaggaatgagccacaaaatctgagagaacttatgctcttggtgctgctgacaacacaactgttgctattagaaaggtgctcttgtgtccctggtgctgtttggtgccttcgttagcagagctggagtgaaggttgtcgatgttctctcctgaaggttttcattggtttgattgttggagacatgtttttgtactggttctctgtcatgaccatgaagagtgttggaagtgtcgccctaaagatggtggaggaggttcgcaggcagttcaacaccattcttgggttgatggagtgaacaagcaagcctgactatgcaacctatgtgaagatttgcactgatgcttcttccatcaaggagatgattccttggggtgctctggtcatgctgactccctcattgatggaacctctttggcatcgagactctctctggcgtttttgctggtgccctggtttttggagtgcaggtgcgcactttgccttctactctctctgtgcacttcaatgtgtttgcttgttctagggtttatggagatttctgctttggacaaattgccatctctacttccaacactgtgctgcataggataacgcaagaagtatattaagaacaaggccatctcagataaaagtagatgtagctttcataggacttaattccagcaaagcaaaggttggcagtgcaccaaacaatagcgtttatacttcattcttatggattggagaagcctatgcaacatgtcaagccagatgacatgcagatgagaaggttctgcatcaatagaaaccagagaaaaatctgtatgtgtctgtatgacatctcagataaagcctgatgatcagcatgatgaaaggtggggagttctatagctggtttaagctggagctagcttctgaagtccggtcaggtgtctgtatgtgttgcccctttttatttcatttcatgagaaaagattgttatttgttccttgaactgtacttggtcgtacttgtgaataaatattttagcatggttgttcgacttctcataatgtttattcgacatcagttcatgatattagtgttacgtgatattttatcatatgaattttgaatatcatagtg

SEQ ID NO: 70056 - DNA, 2483 bp, Zea Mays
ccctgccccacaacccccaagcaaccctagctctccctccccctccgcgtcctacagccatcgtcgctctgccttccgcccccgccgtcgccgcagacgcagccggccacccaccactcgcgcctcccccaccgcgtcgcgtgtgggccacagctacagctgcctcctcgagcaacccacactcctttcttcccctgcctgtcgtctctcttccaccttccaccacaagcgccgtcgcagccggtgcctgctccttcccgatccccgaggcaaagctgcgactccgcaactgccgccatggcgttcgagaagatcaaggtctccaacccaatcatcgagatggacggcgatgagatgaccagggtattctggcagtctatcaaggacaagcttatcttcccatttctggacctggacatcaagtactatgatttggggatactgcacggtgaagcaactgatgacaaggtcacagtggaggctgcagaggctactctcaagtacaatgtggctattaagtgtgcgaccattactccaggtgaaactagaagaacgtatgaagctagacttgttgcaatttatagacatgtaagagaggatggagttgagggacaacctatttctgtttcaacagaacaatttgcaccttgttgataacaataattgatctgggcctcttccaccagaattagtagatacacgtagtcttcttgctatcttgacttcaggctgataataacaacttcagtggaagctccatcctgctgaatacaacaacatacaaacacttctaaagctggcattgcgctgcggggttacatcgccgtcaccttcgacatgcgcgacataggtgggtccacagggcgggtgtcgctcacgtgctccatcaagaacatcgagtgaggtggtgtgctgctgctctaaagaagggaggagaggaagtagcgacaatgtcgccaagaccacctggcgcgatgtctcctaccagatcaccaagatcaacatgtacaaggtgatccagtccgagccctctccctgcatgcttccattgattttttatttcattccaatcgatttgccgtgatatatgcaatgcaggatggtcggcatgtacaagatatgcttaaggtgaggttgtaattcaggatgtgcatatatttcttgggcttgaatttgtttaatctaaatagattattttttatccaatccaaatttccaatgacttgccatatcattagcatcagaggctccataaagcagctctgctagaattaactgattcactgtcaaggtcaaacatcactatgatattgctgagatggtccaatcagtgacaatgctggtggtattgttgagatggcaggaatgagccacaaaatctgagagaacttatgctcttggtgctgctgacaacacaactgttgctattagaaagggatttgccattggttcaggtgctcttgtgtccctggtgctgtttggtgccttcgttagcagagctggagtgaaggttgtcgatgttctctcctgaaggttttcattggtttgattgttggagacatgtttttgtactggttctctgtcatgaccatgaagagtgttggaagtgtcgccctaaagatggtggaggaggttcgcaggcagttcaacaccattcttgggttgatggagtgaacaagcaagcctgactatgcaacctatgtgaagatttgcactgatgcttcttccatcaaggagatgattccttggggtgctctggtcatgctgactccctcattgatggaacctctttggcatcgagactctctctggcgtttttgctggtgccctggtttttggagtgcaggtgcgcactttgccttctactctctctgtgcacttcaatgtgtttgcttgttctagggtttatggagatttctgctttggacaaattgccatctctacttccaacactgtgctgcataggataacgcaagaagtatattaagaacaaggccatctcagataaaagtagatgtagctttcataggacttaattccagcaaagcaaaggttggcagtgcaccaaacaatagcgtttatacttcattcttatggattggagaagcctatgcaacatgtcaagccagatgacatgcagatgagaaggttctgcatcaatagaaaccagagaaaaatctgtatgtgtctgtatgacatctcagataaagcctgatgatcagcatgatgaaaggtggggagttctatagctggtttaagctggagctagcttctgaagtccggtcaggtgtctgtatgtgttgcccctttttatttcatttcatgagaaaagattgttatttgttccttgaactgtacttggtcgtacttgtgaataaatattttagcatggttgttcgacttctcataatgtttattcgacatcagttcatgatattagtgttacgtgatattttatcatatgaattttgaatatcatagtg

SEQ ID NO: 70057 - DNA, 3231 bp, Zea Mays
ccctgccccacaacccccaagcaaccctagctctccctccccctccgcgtcctacagccatcgtcgctctgccttccgcccccgccgtcgccgcagacgcagccggccacccaccactcgcgcctcccccaccgcgtcgcgtgtgggccacagctacagctgcctcctcgagcaacccacactcctttcttcccctgcctgtcgtctctcttccaccttccaccacaagcgccgtcgcagccggtgcctgctccttcccgatccccgaggcaaagctgcgactccgcaactgccgccatggcgttcgagaagatcaaggtctccaacccaatcatcgagatggacggcgatgagatgaccagggtattctggcagtctatcaaggacaagcttatcttcccatttctggacctggacatcaagtactatgatttggggatactgcacggtgaagcaactgatgacaaggtcacagtggaggctgcagaggctactctcaagtacaatgtggctattaagtgtgcgaccattactccaggtgaaactagaagaacgtatgaagctagacttgttgcaatttatagacatgtaagagaggatggagttgagggacaacctatttctgtttcaacagaacaatttgcaatgacttgtaagttgacatgtcttgtgctgtgaacttgcagccttgttgataacaataattgatctgggcctcttccaccagaattagtagatacacgtagtcttcttgctatcttgacttcaggctgataataacaacttcagtggaagctccatcctgctgaatacaacaacatacaaacacttctaaagctggcgcgctccagcctccaggccgccgctgctccaaccctcctgcgccgcccgtccggcgccgccaggcccgcctctgcgtgccgctgctccaggccgccgccgctccagtcagctgctctccaggccgtcctccctccaggccgctgctctccaggccgctccaggccgctgctctcaaggccgtcctccagccccgcctcagagcctctgcgtgccaccgctccaggccgccgcgctccaggccgtcctccctcctgcgccgcctgtccggctgccagcccctccagccccgcctctgctgtcccactgcggcaggactacagagtacagagactgactgtcccactgtttggtatttgacttgatataattgcctgaaattatgatatattgaaatttccctatgttgtttaaaactacatttaaactttgtttaaaccgtttaaaagttaaaacttacccatgagcgtttcaacgtttcgtcgttttaataaccttgattaaaagtgtaggcattggtgagtacaaacctaaggttaaaagaagaatattttgaataaaagtgtttgtatttgccaaatggcttatgcttttagttgagataggtagtatatcaaagttcagggcatcacatagataagaacgaatttgctccgtgtgcaacaaaaagctcgtttttacactgactcctcttctattgcagcctatagctgccaaatagttggatgcaactggtccatttatctggaaatatttatatttaaaaaaatatcgaaaaacattacatttaaaattttataggtagtcttctttcattctgtggagatcattttcactgataactgaaacaacaattacttcattatattcattcaaggacaagcaccacacaatcaacatcatgtttaaactcaaatcaagacgtgttgagtaaaccatccttttacatgttaccaggagtctaagaaactatagtttgggttgttccagatttgagtgtcatacctaaatttgggtacttgtaagtccagattaaatgcaatgtttcctttctcggtttttggacatcttacaatcataaattatccttttacattaacttgcagcctttcaaaaacatatgttttcccaatattatttattaaatgcttttagtattgtatcttcattttagagtgagaaatccgctactcaattcacatcaggatattagttgtcaaatattttagtactaatattgagggggatggcggagggcattgcgctgcggggttacatcgccgtcaccttcgacatgcgcgacataggtgggtccacagggcgggtgtcgctcacgtgctccatcaagaacatcgagtgaggtggtgtgctgctgctctaaagaagggaggagaggaagtagcgacaatgtcgccaagaccacctggcgcgatgtctcctaccagatcaccaagatcaacatgtacaaggatggtcggcatgtacaagatatgcttaaggaatgagccacaaaatctgagagaacttatgctcttggtgctgctgacaacacaactgttgctattagaaagggatttgccattggttcaggtgctcttgtgtccctggtgctgtttggtgccttcgttagcagagctggagtgaagagtgttggaagtgtcgccctaaagatggtggaggaggttcgcaggcagttcaacaccattcttgggttgatggagtgaacaagcaagcctgactatgcaacctatgtgaagatttgcactgatgcttcttccatcaaggagatgattccttggggtgctctggtcatgctgactccctcattgatggaacctctttggcatcgagactctctctggcgtttttgctggtgccctggtttttggagtgcagaacaaggccatctcagataaaagtagatgtagctttcataggacttaattccagcaaagcaaaggttggcagtgcaccaaacaatagcgtttatacttcattcttatggattggagaagcctatgcaacatgtcaagccagatgacatgcagatgagaaggttctgcatcaatagaaaccagagaaaaatctgtatgtgtctgtatgacatctcagataaagcctgatgatcagcatgatgaaaggtggggagttctatagctggtttaagctggagctagcttctgaagtccggtcaggtgtctgtatgtgttgcccctttttatttcatttcatgagaaaagattgttatttgttccttgaactgtacttggtcgtacttgtgaataaatattttagcatggttgttcgacttctcataatgtttattcgacatcagttcatgatattagtgttacgtgatattttatcatatgaattttgaatatcatagtg

SEQ ID NO: 70058 - DNA, 4451 bp, Zea Mays
aatcactccctgccccacaacccccaagcaaccctagctctccctccccctccgcgtcctacagccatcgtcgctctgccttccgcccccgccgtcgccgcagacgcagccggccacccaccactcgcgcctcccccaccgcgtcgcgtgtgggccacagctacagctgcctcctcgagcaacccacactcctttcttcccctgcctgtcgtctctcttccaccttccaccacaagcgccgtcgcagccggtgcctgctccttcccgatccccgaggcaaagctgcgactccgcaactgccgccatggcgttcgagaagatcaaggtctccaacccaatcatcgagatggacggcgatgagatgaccagggtattctggcagtctatcaaggacaagcttatcttcccatttctggacctggacatcaagtactatgatttggggatactgcacggtgaagcaactgatgacaaggtcacagtggaggctgcagaggctactctcaagtacaatgtggctattaagtgtgcgaccattactccaggtacatttgattcttgtgtagatgcaatatgtactcttaatctatactactatattaaggctgtaagggggtagcctgcctcctctggttctgcctcccgttaatctacgtcgtccacgcccgttaatctgcaccgttcgtcatgcgtacgttttcgacgtccgtcgcccgtgtgaatcaccccctgccccacaacccccaagcaaccctagctctccctcccccctccgcgttcgcagtcgtcgtcgctctgcctcctgcccccgccgtcgccgccgcgccacagacgcagccggctacccaccgctcgcgcctcccgcaccgtgtcgcgtgtgggccacagctgcagctgccccccgagcaaccctagctctcgctcctccctccatagttgtcgccccaaacgttgcagcattgatggcagcgagctcgttctccactctccagcatgtcgatccagcgggagcaccttcgacctcaccggtgaaactagaagaacgtatgaagctagacttgttgcaatttatagacatgtaagagaggatggagttgagggacaacctatttctgtttcaacagaacaatttgcaccttgttgataacaataattgatctgggcctcttccaccagaattagtagatacacgtagtcttcttgctatcttgacttcaggctgataataacaacttcagtggaagctccatcctgctgaatacaacaacatacaaacacttctaaagctgtgagtgtaacaaccttttcgctcatgttctctcttttcagaatttgaggtagatgagggcaaaagaatttaacagctattacaacttctgttattgagaacaatcattaaaagcatgcttattaaaacgacgttaaaacgacgtttaaacgtcgtttaaactataaaacgctgacaggaagtgaaacgacaaaacgttttacgattcgtcgtaaaacgttgtttaacgtcgtttaaacgtcgcgttttgacgtttaaacgcggtatagagtgaaacgccgcgtttaatgcgtctgctgctagtaattggcccagcccaattagaaactcccgcccagcccacccagaccgccgctacaagccgcactttcaccagcccaattagtaactcgcgttctcaccagccgtcgcactccagggcgcgctccagcctccaggccgccgctgctccaaccctcctgcgccgcccgtccggcgccgccaggcccgcctctgcgtgccgctgctccaggccgccgccgctccagtcagctgctctccaggccgtcctccctccaggccgctgctctccaggccgctccaggccgctgctctcaaggccgtcctccagccccgcctcagagcctctgcgtgccaccgctccaggccgccgcgctccaggccgtcctccctcctgcgccgcctgtccggctgccagcccctccagccccgcctctgctgtcccactgcggcaggactacagagtacagagactgactgtcccactgtttggtatttgacttgatataattgcctgaaattatgatatattgaaatttccctatgttgtttaaaactacatttaaactttgtttaaaccgtttaaaagttaaaacttacccatgagcgtttcaacgtttcgtcgttttaataaccttgattaaaagtgtaggcattggtgagtacaaacctaaggttaaaagaagaatattttgaataaaagtgtttgtatttgccaaatggcttatgcttttagttgagataggtagtatatcaaagttcagggcatcacatagataagaacgaatttgctccgtgtgcaacaaaaagctcgtttttacactgactcctcttctattgcagcctatagctgccaaatagttggatgcaactggtccatttatctggaaatatttatatttaaaaaaatatcgaaaaacattacatttaaaattttataggtagtcttctttcattctgtggagatcattttcactgataactgaaacaacaattacttcattatattcattcaaggacaagcaccacacaatcaacatcatgtttaaactcaaatcaagacgtgttgagtaaaccatccttttacatgttaccaggagtctaagaaactatagtttgggttgttccagatttgagtgtcatacctaaatttgggtacttgtaagtccagattaaatgcaatgtttcctttctcggtttttggacatcttacaatcataaattatccttttacattaacttgcagcctttcaaaaacatatgttttcccaatattatttattaaatgcttttagtattgtatcttcattttagagtgagaaatccgctactcaattcacatcaggatattagttgtcaaatattttagtactaatattgagggggatggcggagggcattgcgctgcggggttacatcgccgtcaccttcgacatgcgcgacataggtgggtccacagggcgggtgtcgctcacgtgctccatcaagaacatcgagtgaggtggtgtgctgctgctctaaagaagggaggagaggaagtagcgacaatgtcgccaagaccacctggcgcgatgtctcctaccagatcaccaagatcaacatgtacaaggatggtcggcatgtacaagatatgcttaagcatcagaggctccataaagcagctctgctagaattaactgattcactgtcaaggtcaaacatcactatgatattgctgagatggtccaatcagtgacaatgctggtggtattgttgagatggcaggaatgagccacaaaatctgagagaacttatgctcttggtgctgctgacaacacaactgttgctattagaaagggatttgccattggttcaggtgctcttgtgtccctggtgctgtttggtgccttcgttagcagagctggagtgaaggttgtcgatgttctctcctgaaggttttcattggtttgattgttggagacatgtttttgtactggttctctgtcatgaccatgaagagtgttggaagtgtcgccctaaagatggtggaggaggttcgcaggcagttcaacaccattcttgggttgatggagtgaacaagcaagcctgactatgcaacctatgtgaagatttgcactgatgcttcttccatcaaggagatgattccttggggtgctctggtcatgctgactccctcattgatggaacctctttggcatcgagactctctctggcgtttttgctggtgccctggtttttggagtgcaggtgcgcactttgccttctactctctctgtgcacttcaatgtgtttgcttgttctagggtttatggagatttctgctttggacaaattgccatctctacttccaacactgtgctgcataggataacgcaagaagtatattaagaacaaggccatctcagataaaagtagatgtagctttcataggacttaattccagcaaagcaaaggttggcagtgcaccaaacaatagcgtttatacttcattcttatggattggagaagcctatgcaacatgtcaagccagatgacatgcagatgagaaggttctgcatcaatagaaaccagagaaaaatctgtatgtgtctgtatgacatctcagataaagcctgatgatcagcatgatgaaaggtggggagttctatagctggtttaagctggagctagcttctgaagtccggtcaggtgtctgtatgtgttgcccctttttatttcatttcatgagaaaagattgttatttgttccttgaactgtacttggtcgtacttgtgaataaatattttagcatggttgttcgacttctcataatgtttattcgacatcagttcatgatattagtgttacgtgatattttatcatatgaattttgaatatcatagtg

SEQ ID NO: 70059 - DNA, 4088 bp, Zea Mays
aatcactccctgccccacaacccccaagcaaccctagctctccctccccctccgcgtcctacagccatcgtcgctctgccttccgcccccgccgtcgccgcagacgcagccggccacccaccactcgcgcctcccccaccgcgtcgcgtgtgggccacagctacagctgcctcctcgagcaacccacactcctttcttcccctgcctgtcgtctctcttccaccttccaccacaagcgccgtcgcagccggtgcctgctccttcccgatccccgaggcaaagctgcgactccgcaactgccgccatggcgttcgagaagatcaaggtctccaacccaatcatcgagatggacggcgatgagatgaccagggtattctggcagtctatcaaggacaagcttatcttcccatttctggacctggacatcaagtactatgatttggggatactgcacggtgaagcaactgatgacaaggtcacagtggaggctgcagaggctactctcaagtacaatgtggctattaagtgtgcgaccattactccaggtgaaactagaagaacgtatgaagctagacttgttgcaatttatagacatgtaagagaggatggagttgagggacaacctatttctgtttcaacagaacaatttgcatcacatgaataataactcattacaaatcccatctgagttgtccaacttgccttaactccttcatttccttgttgataacaataattgatctgggcctcttccaccagaattagtagatacacgtagtcttcttgctatcttgacttcaggctgataataacaacttcagtggaagctccatcctgctgaatacaacaacatacaaacacttctaaagctgtgagtgtaacaaccttttcgctcatgttctctcttttcagaatttgaggtagatgagggcaaaagaatttaacagctattacaacttctgttattgagaacaatcattaaaagcatgcttattaaaacgacgttaaaacgacgtttaaacgtcgtttaaactataaaacgctgacaggaagtgaaacgacaaaacgttttacgattcgtcgtaaaacgttgtttaacgtcgtttaaacgtcgcgttttgacgtttaaacgcggtatagagtgaaacgccgcgtttaatgcgtctgctgctagtaattggcccagcccaattagaaactcccgcccagcccacccagaccgccgctacaagccgcactttcaccagcccaattagtaactcgcgttctcaccagccgtcgcactccagggcgcgctccagcctccaggccgccgctgctccaaccctcctgcgccgcccgtccggcgccgccaggcccgcctctgcgtgccgctgctccaggccgccgccgctccagtcagctgctctccaggccgtcctccctccaggccgctgctctccaggccgctccaggccgctgctctcaaggccgtcctccagccccgcctcagagcctctgcgtgccaccgctccaggccgccgcgctccaggccgtcctccctcctgcgccgcctgtccggctgccagcccctccagccccgcctctgctgtcccactgcggcaggactacagagtacagagactgactgtcccactgtttggtatttgacttgatataattgcctgaaattatgatatattgaaatttccctatgttgtttaaaactacatttaaactttgtttaaaccgtttaaaagttaaaacttacccatgagcgtttcaacgtttcgtcgttttaataaccttgattaaaagtgtaggcattggtgagtacaaacctaaggttaaaagaagaatattttgaataaaagtgtttgtatttgccaaatggcttatgcttttagttgagataggtagtatatcaaagttcagggcatcacatagataagaacgaatttgctccgtgtgcaacaaaaagctcgtttttacactgactcctcttctattgcagcctatagctgccaaatagttggatgcaactggtccatttatctggaaatatttatatttaaaaaaatatcgaaaaacattacatttaaaattttataggtagtcttctttcattctgtggagatcattttcactgataactgaaacaacaattacttcattatattcattcaaggacaagcaccacacaatcaacatcatgtttaaactcaaatcaagacgtgttgagtaaaccatccttttacatgttaccaggagtctaagaaactatagtttgggttgttccagatttgagtgtcatacctaaatttgggtacttgtaagtccagattaaatgcaatgtttcctttctcggtttttggacatcttacaatcataaattatccttttacattaacttgcagcctttcaaaaacatatgttttcccaatattatttattaaatgcttttagtattgtatcttcattttagagtgagaaatccgctactcaattcacatcaggatattagttgtcaaatattttagtactaatattgagggggatggcggagggcattgcgctgcggggttacatcgccgtcaccttcgacatgcgcgacataggtgggtccacagggcgggtgtcgctcacgtgctccatcaagaacatcgagtgaggtggtgtgctgctgctctaaagaagggaggagaggaagtagcgacaatgtcgccaagaccacctggcgcgatgtctcctaccagatcaccaagatcaacatgtacaaggtgatccagtccgagccctctccctgcatgcttccattgattttttatttcattccaatcgatttgccgtgatatatgcaatgcaggatggtcggcatgtacaagatatgcttaaggtgaggttgtaattcaggatgtgcatatatttcttgggcttgaatttgtttaatctaaatagattattttttatccaatccaaatttccaatgacttgccatatcattagcatcagaggctccataaagcagctctgctagaattaactgattcactgtcaaggtcaaacatcactatgatattgctgagatggtccaatcagtgacaatgctggtggtattgttgagatggcaggaatgagccacaaaatctgagagaacttatgctcttggtgctgctgacaacacaactgttgctattagaaagggatttgccattggttcaggtgctcttgtgtccctggtgctgtttggtgccttcgttagcagagctggagtgaaggttgtcgatgttctctcctgaaggttttcattggtttgattgttggagacatgtttttgtactggttctctgtcatgaccatgaagagtgttggaagtgtcgccctaaagatggtggaggaggttcgcaggcagttcaacaccattcttgggttgatggagtgaacaagcaagcctgactatgcaacctatgtgaagatttgcactgatgcttcttccatcaaggagatgattccttggggtgctctggtcatgctgactccctcattgatggaacctctttggcatcgagactctctctggcgtttttgctggtgccctggtttttggagtgcagaacaaggccatctcagataaaagtagatgtagctttcataggacttaattccagcaaagcaaaggttggcagtgcaccaaacaatagcgtttatacttcattcttatggattggagaagcctatgcaacatgtcaagccagatgacatgcagatgagaaggttctgcatcaatagaaaccagagaaaaatctgtatgtgtctgtatgacatctcagataaagcctgatgatcagcatgatgaaaggtggggagttctatagctggtttaagctggagctagcttctgaagtccggtcaggtgtctgtatgtgttgcccctttttatttcatttcatgagaaaagattgttatttgttccttgaactgtacttggtcgtacttgtgaataaatattttagcatggttgttcgacttctcataatgtttattcgacatcagttcatgatattagtgttacgtgatattttatcatatgaattttgaatatcatagtg

SEQ ID NO: 70060 - DNA, 2688 bp, Zea Mays
aatcactccctgccccacaacccccaagcaaccctagctctccctccccctccgcgtcctacagccatcgtcgctctgccttccgcccccgccgtcgccgcagacgcagccggccacccaccactcgcgcctcccccaccgcgtcgcgtgtgggccacagctacagctgcctcctcgagcaacccacactcctttcttcccctgcctgtcgtctctcttccaccttccaccacaagcgccgtcgcagccggtgcctgctccttcccgatccccgaggcaaagctgcgactccgcaactgccgccatggcgttcgagaagatcaaggtctccaacccaatcatcgagatggacggcgatgagatgaccagggtattctggcagtctatcaaggacaagcttatcttcccatttctggacctggacatcaagtactatgatttggggatactgcacggtgaagcaactgatgacaaggtcacagtggaggctgcagaggctactctcaagtacaatgtggctattaagtgtgcgaccattactccaggtgaaactagaagaacgtatgaagctagacttgttgcaatttatagacatgtaagagaggatggagttgagggacaacctatttctgtttcaacagaacaatttgcagtaagtcaaatcacctcttgtactataatcttgcaattgtttctttctctctcttttctaagaataactattgcattagcatattttactaacttgtataaattgttattttcaagagattttatgtaccgtttctttacaaacaatgctaatgccacatccacaatcttgcagaactttgaatggcaaccagttatctggatctttgcctgatgagattggttaccagatgaactttaacagattagaaataaaatataacaacatatcaggcccatacctaacacttttgccaacttaacaagaattaaacatctgttagtgtcgagtatctttattttctgcccatccctgatgcttctgatttgtaaaattagtaaataattctggttccaattttaccttttagtcacatgaataataactcattacaaatcccatctgagttgtccaacttgccttaactccttcatttgtaagtagacctcaactttttctaatattttctattttgcaagttgcagatgacttgtaagttgacatgtcttgtgctgtgaacttgcagccttgttgataacaataattgatctgggcctcttccaccagaattagtagatacacgtagtcttcttgctatcttgacttcaggctgataataacaacttcagtggaagctccatcctgctgaatacaacaacatacaaacacttctaaagctgtgggtccacagggcgggtgtcgctcacgtgctccatcaagaacatcgagtgaggtggtgtgctgctgctctaaagaagggaggagaggaagtagcgacaatgtcgccaagaccacctggcgcgatgtctcctaccagatcaccaagatcaacatgtacaaggatggtcggcatgtacaagatatgcttaagcatcagaggctccataaagcagctctgctagaattaactgattcactgtcaaggtcaaacatcactatgatattgctgagatggtccaatcagtgacaatgctggtggtattgttgagatggcaggaatgagccacaaaatctgagagaacttatgctcttggtgctgctgacaacacaactgttgctattagaaagggatttgccattggttcaggtgctcttgtgtccctggtgctgtttggtgccttcgttagcagagctggagtgaaggttgtcgatgttctctcctgaaggttttcattggtttgattgttggagacatgtttttgtactggttctctgtcatgaccatgaagagtgttggaagtgtcgccctaaagatggtggaggaggttcgcaggcagttcaacaccattcttgggttgatggagtgaacaagcaagcctgactatgcaacctatgtgaagatttgcactgatgcttcttccatcaaggagatgattccttggggtgctctggtcatgctgactccctcattgatggaacctctttggcatcgagactctctctggcgtttttgctggtgccctggtttttggagtgcaggataacgcaagaagtatattaagaacaaggccatctcagataaaagtagatgtagctttcataggacttaattccagcaaagcaaaggttggcagtgcaccaaacaatagcgtttatacttcattcttatggattggagaagcctatgcaacatgtcaagccagatgacatgcagatgagaaggttctgcatcaatagaaaccagagaaaaatctgtatgtgtctgtatgacatctcagataaagcctgatgatcagcatgatgaaaggtggggagttctatagctggtttaagctggagctagcttctgaagtccggtcaggtgtctgtatgtgttgcccctttttatttcatttcatgagaaaagattgttatttgttccttgaactgtacttggtcgtacttgtgaataaatattttagcatggttgttcgacttctcataatgtttattcgacatcagttcatgatattagtgttacgtgatattttatcatatgaattttgaatatcatagtg

SEQ ID NO: 70061 - DNA, 3947 bp, Zea Mays
aatcactccctgccccacaacccccaagcaaccctagctctccctccccctccgcgtcctacagccatcgtcgctctgccttccgcccccgccgtcgccgcagacgcagccggccacccaccactcgcgcctcccccaccgcgtcgcgtgtgggccacagctacagctgcctcctcgagcaacccacactcctttcttcccctgcctgtcgtctctcttccaccttccaccacaagcgccgtcgcagccggtgcctgctccttcccgatccccgaggcaaagctgcgactccgcaactgccgccatggcgttcgagaagatcaaggtctccaacccaatcatcgagatggacggcgatgagatgaccagggtattctggcagtctatcaaggacaagcttatcttcccatttctggacctggacatcaagtactatgatttggggatactgcacggtgaagcaactgatgacaaggtcacagtggaggctgcagaggctactctcaagtacaatgtggctattaagtgtgcgaccattactccagccttgttgataacaataattgatctgggcctcttccaccagaattagtagatacacgtagtcttcttgctatcttgacttcaggctgataataacaacttcagtggaagctccatcctgctgaatacaacaacatacaaacacttctaaagctgtgagtgtaacaaccttttcgctcatgttctctcttttcagaatttgaggtagatgagggcaaaagaatttaacagctattacaacttctgttattgagaacaatcattaaaagcatgcttattaaaacgacgttaaaacgacgtttaaacgtcgtttaaactataaaacgctgacaggaagtgaaacgacaaaacgttttacgattcgtcgtaaaacgttgtttaacgtcgtttaaacgtcgcgttttgacgtttaaacgcggtatagagtgaaacgccgcgtttaatgcgtctgctgctagtaattggcccagcccaattagaaactcccgcccagcccacccagaccgccgctacaagccgcactttcaccagcccaattagtaactcgcgttctcaccagccgtcgcactccagggcgcgctccagcctccaggccgccgctgctccaaccctcctgcgccgcccgtccggcgccgccaggcccgcctctgcgtgccgctgctccaggccgccgccgctccagtcagctgctctccaggccgtcctccctccaggccgctgctctccaggccgctccaggccgctgctctcaaggccgtcctccagccccgcctcagagcctctgcgtgccaccgctccaggccgccgcgctccaggccgtcctccctcctgcgccgcctgtccggctgccagcccctccagccccgcctctgctgtcccactgcggcaggactacagagtacagagactgactgtcccactgtttggtatttgacttgatataattgcctgaaattatgatatattgaaatttccctatgttgtttaaaactacatttaaactttgtttaaaccgtttaaaagttaaaacttacccatgagcgtttcaacgtttcgtcgttttaataaccttgattaaaagtgtaggcattggtgagtacaaacctaaggttaaaagaagaatattttgaataaaagtgtttgtatttgccaaatggcttatgcttttagttgagataggtagtatatcaaagttcagggcatcacatagataagaacgaatttgctccgtgtgcaacaaaaagctcgtttttacactgactcctcttctattgcagcctatagctgccaaatagttggatgcaactggtccatttatctggaaatatttatatttaaaaaaatatcgaaaaacattacatttaaaattttataggtagtcttctttcattctgtggagatcattttcactgataactgaaacaacaattacttcattatattcattcaaggacaagcaccacacaatcaacatcatgtttaaactcaaatcaagacgtgttgagtaaaccatccttttacatgttaccaggagtctaagaaactatagtttgggttgttccagatttgagtgtcatacctaaatttgggtacttgtaagtccagattaaatgcaatgtttcctttctcggtttttggacatcttacaatcataaattatccttttacattaacttgcagcctttcaaaaacatatgttttcccaatattatttattaaatgcttttagtattgtatcttcattttagagtgagaaatccgctactcaattcacatcaggatattagttgtcaaatattttagtactaatattgagggggatggcggagggcattgcgctgcggggttacatcgccgtcaccttcgacatgcgcgacataggtgggtccacagggcgggtgtcgctcacgtgctccatcaagaacatcgagtgaggtggtgtgctgctgctctaaagaagggaggagaggaagtagcgacaatgtcgccaagaccacctggcgcgatgtctcctaccagatcaccaagatcaacatgtacaaggtgatccagtccgagccctctccctgcatgcttccattgattttttatttcattccaatcgatttgccgtgatatatgcaatgcaggatggtcggcatgtacaagatatgcttaagcatcagaggctccataaagcagctctgctagaattaactgattcactgtcaaggtcaaacatcactatgatattgctgagatggtccaatcagtgacaatgctggtggtattgttgagatggcaggaatgagccacaaaatctgagagaacttatgctcttggtgctgctgacaacacaactgttgctattagaaagggatttgccattggttcaggtgctcttgtgtccctggtgctgtttggtgccttcgttagcagagctggagtgaaggttgtcgatgttctctcctgaaggttttcattggtttgattgttggagacatgtttttgtactggttctctgtcatgaccatgaagagtgttggaagtgtcgccctaaagatggtggaggaggttcgcaggcagttcaacaccattcttgggttgatggagtgaacaagcaagcctgactatgcaacctatgtgaagatttgcactgatgcttcttccatcaaggagatgattccttggggtgctctggtcatgctgactccctcattgatggaacctctttggcatcgagactctctctggcgtttttgctggtgccctggtttttggagtgcaggtgcgcactttgccttctactctctctgtgcacttcaatgtgtttgcttgttctagggtttatggagatttctgctttggacaaattgccatctctacttccaacactgtgctgcataggataacgcaagaagtatattaagaacaaggccatctcagataaaagtagatgtagctttcataggacttaattccagcaaagcaaaggttggcagtgcaccaaacaatagcgtttatacttcattcttatggattggagaagcctatgcaacatgtcaagccagatgacatgcagatgagaaggttctgcatcaatagaaaccagagaaaaatctgtatgtgtctgtatgacatctcagataaagcctgatgatcagcatgatgaaaggtggggagttctatagctggtttaagctggagctagcttctgaagtccggtcaggtgtctgtatgtgttgcccctttttatttcatttcatgagaaaagattgttatttgttccttgaactgtacttggtcgtacttgtgaataaatattttagcatggttgttcgacttctcataatgtttattcgacatcagttcatgatattagtgttacgtgatattttatcatatgaattttgaatatcatagtg

SEQ ID NO: 70062 - DNA, 4584 bp, Zea Mays
gaatcactccctgccccacaacccccaagcaaccctagctctccctccccctccgcgtcctacagccatcgtcgctctgccttccgcccccgccgtcgccgcagacgcagccggccacccaccactcgcgcctcccccaccgcgtcgcgtgtgggccacagctacagctgcctcctcgagcaacccacactcctttcttcccctgcctgtcgtctctcttccaccttccaccacaagcgccgtcgcagccggtgcctgctccttcccgatccccgaggcaaagctgcgactccgcaactgccgccatggcgttcgagaagatcaaggtctccaacccaatcatcgagatggacggcgatgagatgaccagggtattctggcagtctatcaaggacaagcttatcttcccatttctggacctggacatcaagtactatgatttggggatactgcacggtgaagcaactgatgacaaggtcacagtggaggctgcagaggctactctcaagtacaatgtggctattaagtgtgcgaccattactccaggtgaaactagaagaacgtatgaagctagacttgttgcaatttatagacatgtaagagaggatggagttgagggacaacctatttctgtttcaacagaacaatttgcagtaagtcaaatcacctcttgtactataatcttgcaattgtttctttctctctcttttctaagaataactattgcattagcatattttactaacttgtataaattgttattttcaagagattttatgtaccgtttctttacaaacaatgctaatgccacatccacaatcttgcagaactttgaatggcaaccagttatctggatctttgcctgatgagattggttaccagatgaactttaacagattagaaataaaatataacaacatatcaggcccatacctaacacttttgccaacttaacaagaattaaacatctgttagtgtcgagtatctttattttctgcccatccctgatgcttctgatttgtaaaattagtaaataattctggttccaattttaccttttagtcacatgaataataactcattacaaatcccatctgagttgtccaacttgccttaactccttcatttgtaagtagacctcaactttttctaatattttctattttgcaagttgcagatgacttgtaagttgacatgtcttgtgctgtgaacttgcagccttgttgataacaataattgatctgggcctcttccaccagaattagtagatacacgtagtcttcttgctatcttgactgctgataataacaacttcagtggaagctccatcctgctgaatacaacaacatacaaacacttctaaagctgtgagtgtaacaaccttttcgctcatgttctctcttttcagaatttgaggtagatgagggcaaaagaatttaacagctattacaacttctgttattgagaacaatcattaaaagcatgcttattaaaacgacgttaaaacgacgtttaaacgtcgtttaaactataaaacgctgacaggaagtgaaacgacaaaacgttttacgattcgtcgtaaaacgttgtttaacgtcgtttaaacgtcgcgttttgacgtttaaacgcggtatagagtgaaacgccgcgtttaatgcgtctgctgctagtaattggcccagcccaattagaaactcccgcccagcccacccagaccgccgctacaagccgcactttcaccagcccaattagtaactcgcgttctcaccagccgtcgcactccagggcgcgctccagcctccaggccgccgctgctccaaccctcctgcgccgcccgtccggcgccgccaggcccgcctctgcgtgccgctgctccaggccgccgccgctccagtcagctgctctccaggccgtcctccctccaggccgctgctctccaggccgctccaggccgctgctctcaaggccgtcctccagccccgcctcagagcctctgcgtgccaccgctccaggccgccgcgctccaggccgtcctccctcctgcgccgcctgtccggctgccagcccctccagccccgcctctgctgtcccactgcggcaggactacagagtacagagactgactgtcccactgtttggtatttgacttgatataattgcctgaaattatgatatattgaaatttccctatgttgtttaaaactacatttaaactttgtttaaaccgtttaaaagttaaaacttacccatgagcgtttcaacgtttcgtcgttttaataaccttgattaaaagtgtaggcattggtgagtacaaacctaaggttaaaagaagaatattttgaataaaagtgtttgtatttgccaaatggcttatgcttttagttgagataggtagtatatcaaagttcagggcatcacatagataagaacgaatttgctccgtgtgcaacaaaaagctcgtttttacactgactcctcttctattgcagcctatagctgccaaatagttggatgcaactggtccatttatctggaaatatttatatttaaaaaaatatcgaaaaacattacatttaaaattttataggtagtcttctttcattctgtggagatcattttcactgataactgaaacaacaattacttcattatattcattcaaggacaagcaccacacaatcaacatcatgtttaaactcaaatcaagacgtgttgagtaaaccatccttttacatgttaccaggagtctaagaaactatagtttgggttgttccagatttgagtgtcatacctaaatttgggtacttgtaagtccagattaaatgcaatgtttcctttctcggtttttggacatcttacaatcataaattatccttttacattaacttgcagcctttcaaaaacatatgttttcccaatattatttattaaatgcttttagtattgtatcttcattttagagtgagaaatccgctactcaattcacatcaggatattagttgtcaaatattttagtactaatattgagggggatggcggagggcattgcgctgcggggttacatcgccgtcaccttcgacatgcgcgacataggtgggtccacagggcgggtgtcgctcacgtgctccatcaagaacatcgagtgaggtggtgtgctgctgctctaaagaagggaggagaggaagtagcgacaatgtcgccaagaccacctggcgcgatgtctcctaccagatcaccaagatcaacatgtacaaggtgatccagtccgagccctctccctgcatgcttccattgattttttatttcattccaatcgatttgccgtgatatatgcaatgcaggatggtcggcatgtacaagatatgcttaaggtgaggttgtaattcaggatgtgcatatatttcttgggcttgaatttgtttaatctaaatagattattttttatccaatccaaatttccaatgacttgccatatcattagcatcagaggctccataaagcagctctgctagaattaactgattcactgtcaaggtcaaacatcactatgatattgctgagatggtccaatcagtgacaatgctggtggtattgttgagatggcaggaatgagccacaaaatctgagagaacttatgctcttggtgctgctgacaacacaactgttgctattagaaagggatttgccattggttcaggtgctcttgtgtccctggtgctgtttggtgccttcgttagcagagctggagtgaaggttgtcgatgttctctcctgaaggttttcattggtttgattgttggagacatgtttttgtactggttctctgtcatgaccatgaagagtgttggaagtgtcgccctaaagatggtggaggaggttcgcaggcagttcaacaccattcttgggttgatggagtgaacaagcaagcctgactatgcaacctatgtgaagatttgcactgatgcttcttccatcaaggagatgattccttggggtgctctggtcatgctgactccctcattgatggaacctctttggcatcgagactctctctggcgtttttgctggtgccctggtttttggagtgcagaacaaggccatctcagataaaagtagatgtagctttcataggacttaattccagcaaagcaaaggttggcagtgcaccaaacaatagcgtttatacttcattcttatggattggagaagcctatgcaacatgtcaagccagatgacatgcagatgagaaggttctgcatcaatagaaaccagagaaaaatctgtatgtgtctgtatgacatctcagataaagcctgatgatcagcatgatgaaaggtggggagttctatagctggtttaagctggagctagcttctgaagtccggtcaggtgtctgtatgtgttgcccctttttatttcatttcatgagaaaagattgttatttgttccttgaactgtacttggtcgtacttgtgaataaatattttagcatggttgttcgacttctcataatgtttattcgacatcagttcatgatattagtgttacgtgatattttatcatatgaattttgaatatcatagtg

SEQ ID NO: 70063 - DNA, 4353 bp, Zea Mays
gaatcactccctgccccacaacccccaagcaaccctagctctccctccccctccgcgtcctacagccatcgtcgctctgccttccgcccccgccgtcgccgcagacgcagccggccacccaccactcgcgcctcccccaccgcgtcgcgtgtgggccacagctacagctgcctcctcgagcaacccacactcctttcttcccctgcctgtcgtctctcttccaccttccaccacaagcgccgtcgcagccggtgcctgctccttcccgatccccgaggcaaagctgcgactccgcaactgccgccatggcgttcgagaagatcaaggtctccaacccaatcatcgagatggacggcgatgagatgaccagggtattctggcagtctatcaaggacaagcttatcttcccatttctggacctggacatcaagtactatgatttggggatactgcacggtgaagcaactgatgacaaggtcacagtggaggctgcagaggctactctcaagtacaatgtggctattaagtgtgcgaccattactccaggtgaaactagaagaacgtatgaagctagacttgttgcaatttatagacatgtaagagaggatggagttgagggacaacctatttctgtttcaacagaacaatttgcagtaagtcaaatcacctcttgtactataatcttgcaattgtttctttctctctcttttctaagaataactattgcattagcatattttactaacttgtataaattgttattttcaagagattttatgtaccgtttctttacaaacaatgctaatgccacatccacaatcttgcagaactttgaatggcaaccagttatctggatctttgcctgatgagattggttaccagatgaactttaacagattagaaataaaatataacaacatatcaggcccatacctaacacttttgccaacttaacaagaattaaacatctgttagtgtcgagtatctttattttctgcccatccctgatgcttctgatttgtaaaattagtaaataattctggttccaattttaccttttagtcacatgaataataactcattacaaatcccatctgagttgtccaacttgccttaactccttcatttgtaagtagacctcaactttttctaatattttctattttgcaagttgcagatgacttgtaagttgacatgtcttgtgctgtgaacttgcagccttgttgataacaataattgatctgggcctcttccaccagaattagtagatacacgtagtcttcttgctatcttgacttcaggctgataataacaacttcagtggaagctccatcctgctgaatacaacaacatacaaacacttctaaagctgtgagtgtaacaaccttttcgctcatgttctctcttttcagaatttgaggtagatgagggcaaaagaatttaacagctattacaacttctgttattgagaacaatcattaaaagcatgcttattaaaacgacgttaaaacgacgtttaaacgtcgtttaaactataaaacgctgacaggaagtgaaacgacaaaacgttttacgattcgtcgtaaaacgttgtttaacgtcgtttaaacgtcgcgttttgacgtttaaacgcggtatagagtgaaacgccgcgtttaatgcgtctgctgctagtaattggcccagcccaattagaaactcccgcccagcccacccagaccgccgctacaagccgcactttcaccagcccaattagtaactcgcgttctcaccagccgtcgcactccagggcgcgctccagcctccaggccgccgctgctccaaccctcctgcgccgcccgtccggcgccgccaggcccgcctctgcgtgccgctgctccaggccgccgccgctccagtcagctgctctccaggccgtcctccctccaggccgctgctctccaggccgctccaggccgctgctctcaaggccgtcctccagccccgcctcagagcctctgcgtgccaccgctccaggccgccgcgctccaggccgtcctccctcctgcgccgcctgtccggctgccagcccctccagccccgcctctgctgtcccactgcggcaggactacagagtacagagactgactgtcccactgtttggtatttgacttgatataattgcctgaaattatgatatattgaaatttccctatgttgtttaaaactacatttaaactttgtttaaaccgtttaaaagttaaaacttacccatgagcgtttcaacgtttcgtcgttttaataaccttgattaaaagtgtaggcattggtgagtacaaacctaaggttaaaagaagaatattttgaataaaagtgtttgtatttgccaaatggcttatgcttttagttgagataggtagtatatcaaagttcagggcatcacatagataagaacgaatttgctccgtgtgcaacaaaaagctcgtttttacactgactcctcttctattgcagcctatagctgccaaatagttggatgcaactggtccatttatctggaaatatttatatttaaaaaaatatcgaaaaacattacatttaaaattttataggtagtcttctttcattctgtggagatcattttcactgataactgaaacaacaattacttcattatattcattcaaggacaagcaccacacaatcaacatcatgtttaaactcaaatcaagacgtgttgagtaaaccatccttttacatgttaccaggagtctaagaaactatagtttgggttgttccagatttgagtgtcatacctaaatttgggtacttgtaagtccagattaaatgcaatgtttcctttctcggtttttggacatcttacaatcataaattatccttttacattaacttgcagcctttcaaaaacatatgttttcccaatattatttattaaatgcttttagtattgtatcttcattttagagtgagaaatccgctactcaattcacatcaggatattagttgtcaaatattttagtactaatattgagggggatggcggagggcattgcgctgcggggttacatcgccgtcaccttcgacatgcgcgacataggtgggtccacagggcgggtgtcgctcacgtgctccatcaagaacatcgagtgaggtggtgtgctgctgctctaaagaagggaggagaggaagtagcgacaatgtcgccaagaccacctggcgcgatgtctcctaccagatcaccaagatcaacatgtacaaggtgatccagtccgagccctctccctgcatgcttccattgattttttatttcattccaatcgatttgccgtgatatatgcaatgcaggatggtcggcatgtacaagatatgcttaaggaatgagccacaaaatctgagagaacttatgctcttggtgctgctgacaacacaactgttgctattagaaagggatttgccattggttcaggtgctcttgtgtccctggtgctgtttggtgccttcgttagcagagctggagtgaaggttgtcgatgttctctcctgaaggttttcattggtttgattgttggagacatgtttttgtactggttctctgtcatgaccatgaagagtgttggaagtgtcgccctaaagatggtggaggaggttcgcaggcagttcaacaccattcttgggttgatggagtgaacaagcaagcctgactatgcaacctatgtgaagatttgcactgatgcttcttccatcaaggagatgattccttggggtgctctggtcatgctgactccctcattgatggaacctctttggcatcgagactctctctggcgtttttgctggtgccctggtttttggagtgcagaacaaggccatctcagataaaagtagatgtagctttcataggacttaattccagcaaagcaaaggttggcagtgcaccaaacaatagcgtttatacttcattcttatggattggagaagcctatgcaacatgtcaagccagatgacatgcagatgagaaggttctgcatcaatagaaaccagagaaaaatctgtatgtgtctgtatgacatctcagataaagcctgatgatcagcatgatgaaaggtggggagttctatagctggtttaagctggagctagcttctgaagtccggtcaggtgtctgtatgtgttgcccctttttatttcatttcatgagaaaagattgttatttgttccttgaactgtacttggtcgtacttgtgaataaatattttagcatggttgttcgacttctcataatgtttattcgacatcagttcatgatattagtgttacgtgatattttatcatatgaattttgaatatcatagtg

SEQ ID NO: 70064 - DNA, 3969 bp, Zea Mays
gaatcactccctgccccacaacccccaagcaaccctagctctccctccccctccgcgtcctacagccatcgtcgctctgccttccgcccccgccgtcgccgcagacgcagccggccacccaccactcgcgcctcccccaccgcgtcgcgtgtgggccacagctacagctgcctcctcgagcaacccacactcctttcttcccctgcctgtcgtctctcttccaccttccaccacaagcgccgtcgcagccggtgcctgctccttcccgatccccgaggcaaagctgcgactccgcaactgccgccatggcgttcgagaagatcaaggtctccaacccaatcatcgagatggacggcgatgagatgaccagggtattctggcagtctatcaaggacaagcttatcttcccatttctggacctggacatcaagtactatgatttggggatactgcacggtgaagcaactgatgacaaggtcacagtggaggctgcagaggctactctcaagtacaatgtggctattaagtgtgcgaccattactccaggtgaaactagaagaacgtatgaagctagacttgttgcaatttatagacatgtaagagaggatggagttgagggacaacctatttctgtttcaacagaacaatttgcaccttgttgataacaataattgatctgggcctcttccaccagaattagtagatacacgtagtcttcttgctatcttgacttcaggctgataataacaacttcagtggaagctccatcctgctgaatacaacaacatacaaacacttctaaagctgtgagtgtaacaaccttttcgctcatgttctctcttttcagaatttgaggtagatgagggcaaaagaatttaacagctattacaacttctgttattgagaacaatcattaaaagcatgcttattaaaacgacgttaaaacgacgtttaaacgtcgtttaaactataaaacgctgacaggaagtgaaacgacaaaacgttttacgattcgtcgtaaaacgttgtttaacgtcgtttaaacgtcgcgttttgacgtttaaacgcggtatagagtgaaacgccgcgtttaatgcgtctgctgctagtaattggcccagcccaattagaaactcccgcccagcccacccagaccgccgctacaagccgcactttcaccagcccaattagtaactcgcgttctcaccagccgtcgcactccagggcgcgctccagcctccaggccgccgctgctccaaccctcctgcgccgcccgtccggcgccgccaggcccgcctctgcgtgccgctgctccaggccgccgccgctccagtcagctgctctccaggccgtcctccctccaggccgctgctctccaggccgctccaggccgctgctctcaaggccgtcctccagccccgcctcagagcctctgcgtgccaccgctccaggccgccgcgctccaggccgtcctccctcctgcgccgcctgtccggctgccagcccctccagccccgcctctgctgtcccactgcggcaggactacagagtacagagactgactgtcccactgtttggtatttgacttgatataattgcctgaaattatgatatattgaaatttccctatgttgtttaaaactacatttaaactttgtttaaaccgtttaaaagttaaaacttacccatgagcgtttcaacgtttcgtcgttttaataaccttgattaaaagtgtaggcattggtgagtacaaacctaaggttaaaagaagaatattttgaataaaagtgtttgtatttgccaaatggcttatgcttttagttgagataggtagtatatcaaagttcagggcatcacatagataagaacgaatttgctccgtgtgcaacaaaaagctcgtttttacactgactcctcttctattgcagcctatagctgccaaatagttggatgcaactggtccatttatctggaaatatttatatttaaaaaaatatcgaaaaacattacatttaaaattttataggtagtcttctttcattctgtggagatcattttcactgataactgaaacaacaattacttcattatattcattcaaggacaagcaccacacaatcaacatcatgtttaaactcaaatcaagacgtgttgagtaaaccatccttttacatgttaccaggagtctaagaaactatagtttgggttgttccagatttgagtgtcatacctaaatttgggtacttgtaagtccagattaaatgcaatgtttcctttctcggtttttggacatcttacaatcataaattatccttttacattaacttgcagcctttcaaaaacatatgttttcccaatattatttattaaatgcttttagtattgtatcttcattttagagtgagaaatccgctactcaattcacatcaggatattagttgtcaaatattttagtactaatattgagggggatggcggagggcattgcgctgcggggttacatcgccgtcaccttcgacatgcgcgacataggtgggtccacagggcgggtgtcgctcacgtgctccatcaagaacatcgagtgaggtggtgtgctgctgctctaaagaagggaggagaggaagtagcgacaatgtcgccaagaccacctggcgcgatgtctcctaccagatcaccaagatcaacatgtacaaggatggtcggcatgtacaagatatgcttaagcatcagaggctccataaagcagctctgctagaattaactgattcactgtcaaggtcaaacatcactatgatattgctgagatggtccaatcagtgacaatgctggtggtattgttgagatggcaggaatgagccacaaaatctgagagaacttatgctcttggtgctgctgacaacacaactgttgctattagaaagggatttgccattggttcaggtgctcttgtgtccctggtgctgtttggtgccttcgttagcagagctggagtgaaggttgtcgatgttctctcctgaaggttttcattggtttgattgttggagacatgtttttgtactggttctctgtcatgaccatgaagagtgttggaagtgtcgccctaaagatggtggaggaggttcgcaggcagttcaacaccattcttgggttgatggagtgaacaagcaagcctgactatgcaacctatgtgaagatttgcactgatgcttcttccatcaaggagatgattccttggggtgctctggtcatgctgactccctcattgatggaacctctttggcatcgagactctctctggcgtttttgctggtgccctggtttttggagtgcaggtgcgcactttgccttctactctctctgtgcacttcaatgtgtttgcttgttctagggtttatggagatttctgctttggacaaattgccatctctacttccaacactgtgctgcataggataacgcaagaagtatattaagaacaaggccatctcagataaaagtagatgtagctttcataggacttaattccagcaaagcaaaggttggcagtgcaccaaacaatagcgtttatacttcattcttatggattggagaagcctatgcaacatgtcaagccagatgacatgcagatgagaaggttctgcatcaatagaaaccagagaaaaatctgtatgtgtctgtatgacatctcagataaagcctgatgatcagcatgatgaaaggtggggagttctatagctggtttaagctggagctagcttctgaagtccggtcaggtgtctgtatgtgttgcccctttttatttcatttcatgagaaaagattgttatttgttccttgaactgtacttggtcgtacttgtgaataaatattttagcatggttgttcgacttctcataatgtttattcgacatcagttcatgatattagtgttacgtgatattttatcatatgaattttgaatatcatagtg

SEQ ID NO: 70065 - DNA, 2103 bp, Zea Mays
gtgaatcactccctgccccacaacccccaagcaaccctagctctccctccccctccgcgtcctacagccatcgtcgctctgccttccgcccccgccgtcgccgcagacgcagccggccacccaccactcgcgcctcccccaccgcgtcgcgtgtgggccacagctacagctgcctcctcgagcaacccacactcctttcttcccctgcctgtcgtctctcttccaccttccaccacaagcgccgtcgcagccggtgcctgctccttcccgatccccgaggcaaagctgcgactccgcaactgccgccatggcgttcgagaagatcaaggtctccaacccaatcatcgagatggacggcgatgagatgaccagggtattctggcagtctatcaaggacaagcttatcttcccatttctggacctggacatcaagtactatgatttggggatactgcacggtgaagcaactgatgacaaggtcacagtggaggctgcagaggctactctcaagtacaatgtggctattaagtgtgcgaccattactccaggtgaaactagaagaacgtatgaagctagacttgttgcaatttatagacatgtaagagaggatggagttgagggacaacctatttctgtttcaacagaacaatttgcaccttgttgataacaataattgatctgggcctcttccaccagaattagtagatacacgtagtcttcttgctatcttgacttcaggctgataataacaacttcagtggaagctccatcctgctgaatacaacaacatacaaacacttctaaagctgtgggtccacagggcgggtgtcgctcacgtgctccatcaagaacatcgagtgaggtggtgtgctgctgctctaaagaagggaggagaggaagtagcgacaatgtcgccaagaccacctggcgcgatgtctcctaccagatcaccaagatcaacatgtacaaggatggtcggcatgtacaagatatgcttaagcatcagaggctccataaagcagctctgctagaattaactgattcactgtcaaggtcaaacatcactatgatattgctgagatggtccaatcagtgacaatgctggtggtattgttgagatggcaggaatgagccacaaaatctgagagaacttatgctcttggtgctgctgacaacacaactgttgctattagaaagggatttgccattggttcaggtgctcttgtgtccctggtgctgtttggtgccttcgttagcagagctggagtgaaggttgtcgatgttctctcctgaaggttttcattggtttgattgttggagacatgtttttgtactggttctctgtcatgaccatgaagagtgttggaagtgtcgccctaaagatggtggaggaggttcgcaggcagttcaacaccattcttgggttgatggagtgaacaagcaagcctgactatgcaacctatgtgaagatttgcactgatgcttcttccatcaaggagatgattccttggggtgctctggtcatgctgactccctcattgatggaacctctttggcatcgagactctctctggcgtttttgctggtgccctggtttttggagtgcagaacaaggccatctcagataaaagtagatgtagctttcataggacttaattccagcaaagcaaaggttggcagtgcaccaaacaatagcgtttatacttcattcttatggattggagaagcctatgcaacatgtcaagccagatgacatgcagatgagaaggttctgcatcaatagaaaccagagaaaaatctgtatgtgtctgtatgacatctcagataaagcctgatgatcagcatgatgaaaggtggggagttctatagctggtttaagctggagctagcttctgaagtccggtcaggtgtctgtatgtgttgcccctttttatttcatttcatgagaaaagattgttatttgttccttgaactgtacttggtcgtacttgtgaataaatattttagcatggttgttcgacttctcataatgtttattcgacatcagttcatgatattagtgttacgtgatattttatcatatgaattttgaatatcatagtg

SEQ ID NO: 70066 - DNA, 2876 bp, Zea Mays
cgtgaatcactccctgccccacaacccccaagcaaccctagctctccctccccctccgcgtcctacagccatcgtcgctctgccttccgcccccgccgtcgccgcagacgcagccggccacccaccactcgcgcctcccccaccgcgtcgcgtgtgggccacagctacagctgcctcctcgagcaacccacactcctttcttcccctgcctgtcgtctctcttccaccttccaccacaagcgccgtcgcagccggtgcctgctccttcccgatccccgaggcaaagctgcgactccgcaactgccgccatggcgttcgagaagatcaaggtctccaacccaatcatcgagatggacggcgatgagatgaccagggtattctggcagtctatcaaggacaagcttatcttcccatttctggacctggacatcaagtactatgatttggggatactgcacggtgaagcaactgatgacaaggtcacagtggaggctgcagaggctactctcaagtacaatgtggctattaagtgtgcgaccattactccaggtgaaactagaagaacgtatgaagctagacttgttgcaatttatagacatgtaagagaggatggagttgagggacaacctatttctgtttcaacagaacaatttgcagtaagtcaaatcacctcttgtactataatcttgcaattgtttctttctctctcttttctaagaataactattgcattagcatattttactaacttgtataaattgttattttcaagagattttatgtaccgtttctttacaaacaatgctaatgccacatccacaatcttgcagaactttgaatggcaaccagttatctggatctttgcctgatgagattggttaccagatgaactttaacagattagaaataaaatataacaacatatcaggcccatacctaacacttttgccaacttaacaagaattaaacatctgttagtgtcgagtatctttattttctgcccatccctgatgcttctgatttgtaaaattagtaaataattctggttccaattttaccttttagtcacatgaataataactcattacaaatcccatctgagttgtccaacttgccttaactccttcatttgtaagtagacctcaactttttctaatattttctattttgcaagttgcagatgacttgtaagttgacatgtcttgtgctgtgaacttgcagccttgttgataacaataattgatctgggcctcttccaccagaattagtagatacacgtagtcttcttgctatcttgactgctgataataacaacttcagtggaagctccatcctgctgaatacaacaacatacaaacacttctaaagctgatattagttgtcaaatattttagtactaatattgagggggatggcggagggcattgcgctgcggggttacatcgccgtcaccttcgacatgcgcgacataggtgggtccacagggcgggtgtcgctcacgtgctccatcaagaacatcgagtgaggtggtgtgctgctgctctaaagaagggaggagaggaagtagcgacaatgtcgccaagaccacctggcgcgatgtctcctaccagatcaccaagatcaacatgtacaaggtgatccagtccgagccctctccctgcatgcttccattgattttttatttcattccaatcgatttgccgtgatatatgcaatgcaggatggtcggcatgtacaagatatgcttaagcatcagaggctccataaagcagctctgctagaattaactgattcactgtcaaggtcaaacatcactatgatattgctgagatggtccaatcagtgacaatgctggtggtattgttgagatggcaggaatgagccacaaaatctgagagaacttatgctcttggtgctgctgacaacacaactgttgctattagaaagggatttgccattggttcaggtgctcttgtgtccctggtgctgtttggtgccttcgttagcagagctggagtgaaggttgtcgatgttctctcctgaaggttttcattggtttgattgttggagacatgtttttgtactggttctctgtcatgaccatgaagagtgttggaagtgtcgccctaaagatggtggaggaggttcgcaggcagttcaacaccattcttgggttgatggagtgaacaagcaagcctgactatgcaacctatgtgaagatttgcactgatgcttcttccatcaaggagatgattccttggggtgctctggtcatgctgactccctcattgatggaacctctttggcatcgagactctctctggcgtttttgctggtgccctggtttttggagtgcaggataacgcaagaagtatattaagaacaaggccatctcagataaaagtagatgtagctttcataggacttaattccagcaaagcaaaggttggcagtgcaccaaacaatagcgtttatacttcattcttatggattggagaagcctatgcaacatgtcaagccagatgacatgcagatgagaaggttctgcatcaatagaaaccagagaaaaatctgtatgtgtctgtatgacatctcagataaagcctgatgatcagcatgatgaaaggtggggagttctatagctggtttaagctggagctagcttctgaagtccggtcaggtgtctgtatgtgttgcccctttttatttcatttcatgagaaaagattgttatttgttccttgaactgtacttggtcgtacttgtgaataaatattttagcatggttgttcgacttctcataatgtttattcgacatcagttcatgatattagtgttacgtgatattttatcatatgaattttgaatatcatagtg

SEQ ID NO: 70067 - DNA, 2233 bp, Zea Mays
catgcgtacgttttcgaccgtcgcccccgtgaatcactccctgccccacaacccccaagcaaccctagctctccctccccctccgcgtcctacagccatcgtcgctctgccttccgcccccgccgtcgccgcagacgcagccggccacccaccactcgcgcctcccccaccgcgtcgcgtgtgggccacagctacagctgcctcctcgagcaacccacactcctttcttcccctgcctgtcgtctctcttccaccttccaccacaagcgccgtcgcagccggtgcctgctccttcccgatccccgaggcaaagctgcgactccgcaactgccgccatggcgttcgagaagatcaaggtctccaacccaatcatcgagatggacggcgatgagatgaccagggtattctggcagtctatcaaggacaagcttatcttcccatttctggacctggacatcaagtactatgatttggggatactgcacggtgaagcaactgatgacaaggtcacagtggaggctgcagaggctactctcaagtacaatgtggctattaagtgtgcgaccattactccaggtgaaactagaagaacgtatgaagctagacttgttgcaatttatagacatgtaagagaggatggagttgagggacaacctatttctgtttcaacagaacaatttgcaccttgttgataacaataattgatctgggcctcttccaccagaattagtagatacacgtagtcttcttgctatcttgacttcaggctgataataacaacttcagtggaagctccatcctgctgaatacaacaacatacaaacacttctaaagctgatattagttgtcaaatattttagtactaatattgagggggatggcggagggcattgcgctgcggggttacatcgccgtcaccttcgacatgcgcgacataggtgggtccacagggcgggtgtcgctcacgtgctccatcaagaacatcgagtgaggtggtgtgctgctgctctaaagaagggaggagaggaagtagcgacaatgtcgccaagaccacctggcgcgatgtctcctaccagatcaccaagatcaacatgtacaaggatggtcggcatgtacaagatatgcttaagcatcagaggctccataaagcagctctgctagaattaactgattcactgtcaaggtcaaacatcactatgatattgctgagatggtccaatcagtgacaatgctggtggtattgttgagatggcaggaatgagccacaaaatctgagagaacttatgctcttggtgctgctgacaacacaactgttgctattagaaagggatttgccattggttcaggtgctcttgtgtccctggtgctgtttggtgccttcgttagcagagctggagtgaaggttgtcgatgttctctcctgaaggttttcattggtttgattgttggagacatgtttttgtactggttctctgtcatgaccatgaagagtgttggaagtgtcgccctaaagatggtggaggaggttcgcaggcagttcaacaccattcttgggttgatggagtgaacaagcaagcctgactatgcaacctatgtgaagatttgcactgatgcttcttccatcaaggagatgattccttggggtgctctggtcatgctgactccctcattgatggaacctctttggcatcgagactctctctggcgtttttgctggtgccctggtttttggagtgcagaacaaggccatctcagataaaagtagatgtagctttcataggacttaattccagcaaagcaaaggttggcagtgcaccaaacaatagcgtttatacttcattcttatggattggagaagcctatgcaacatgtcaagccagatgacatgcagatgagaaggttctgcatcaatagaaaccagagaaaaatctgtatgtgtctgtatgacatctcagataaagcctgatgatcagcatgatgaaaggtggggagttctatagctggtttaagctggagctagcttctgaagtccggtcaggtgtctgtatgtgttgcccctttttatttcatttcatgagaaaagattgttatttgttccttgaactgtacttggtcgtacttgtgaataaatattttagcatggttgttcgacttctcataatgtttattcgacatcagttcatgatattagtgttacgtgatattttatcatatgaattttgaatatcatagtg

SEQ ID NO: 70068 - DNA, 3219 bp, Zea Mays
tgcctcctctggttctgcctcccgttaatctacgccgtccacgcgcgttaatctgcaccgtccgtcatgcgtacgttttcgaccgtcgcccccgtgaatcactccctgccccacaacccccaagcaaccctagctctccctccccctccgcgtcctacagccatcgtcgctctgccttccgcccccgccgtcgccgcagacgcagccggccacccaccactcgcgcctcccccaccgcgtcgcgtgtgggccacagctacagctgcctcctcgagcaacccacactcctttcttcccctgcctgtcgtctctcttccaccttccaccacaagcgccgtcgcagccggtgcctgctccttcccgatccccgaggcaaagctgcgactccgcaactgccgccatggcgttcgagaagatcaaggtctccaacccaatcatcgagatggacggcgatgagatgaccagggtattctggcagtctatcaaggacaagcttatcttcccatttctggacctggacatcaagtactatgatttggggatactgcacggtgaagcaactgatgacaaggtcacagtggaggctgcagaggctactctcaagtacaatgtggctattaagtgtgcgaccattactccaggtgaaactagaagaacgtatgaagctagacttgttgcaatttatagacatgtaagagaggatggagttgagggacaacctatttctgtttcaacagaacaatttgcagtaagtcaaatcacctcttgtactataatcttgcaattgtttctttctctctcttttctaagaataactattgcattagcatattttactaacttgtataaattgttattttcaagagattttatgtaccgtttctttacaaacaatgctaatgccacatccacaatcttgcagaactttgaatggcaaccagttatctggatctttgcctgatgagattggttaccagatgaactttaacagattagaaataaaatataacaacatatcaggcccatacctaacacttttgccaacttaacaagaattaaacatctgttagtgtcgagtatctttattttctgcccatccctgatgcttctgatttgtaaaattagtaaataattctggttccaattttaccttttagtcacatgaataataactcattacaaatcccatctgagttgtccaacttgccttaactccttcatttgtaagtagacctcaactttttctaatattttctattttgcaagttgcagatgacttgtaagttgacatgtcttgtgctgtgaacttgcagccttgttgataacaataattgatctgggcctcttccaccagaattagtagatacacgtagtcttcttgctatcttgactgtaagtacatttttctgcagcacaatgttaaggatttgtacttgttcatgatatcttgaggttcctctggctctagatgtttaagaaatttaagtaatatacaccaatttcatgagtacacttcacttgcttatgtaaatctaatggcatgctaaggagataatgatccaggcctttgtctttgattttttttgtttattctgtatagattagacttttttgttatctatgacaaatatttctcatatctatgtatctgtgtacttatagtcaggctgataataacaacttcagtggaagctccatcctgctgaatacaacaacatacaaacacttctaaagctgatattagttgtcaaatattttagtactaatattgagggggatggcggagggcattgcgctgcggggttacatcgccgtcaccttcgacatgcgcgacataggtgggtccacagggcgggtgtcgctcacgtgctccatcaagaacatcgagtgaggtggtgtgctgctgctctaaagaagggaggagaggaagtagcgacaatgtcgccaagaccacctggcgcgatgtctcctaccagatcaccaagatcaacatgtacaaggtgatccagtccgagccctctccctgcatgcttccattgattttttatttcattccaatcgatttgccgtgatatatgcaatgcaggatggtcggcatgtacaagatatgcttaagcatcagaggctccataaagcagctctgctagaattaactgattcactgtcaaggtcaaacatcactatgatattgctgagatggtccaatcagtgacaatgctggtggtattgttgagatggcaggaatgagccacaaaatctgagagaacttatgctcttggtgctgctgacaacacaactgttgctattagaaagggatttgccattggttcaggtgctcttgtgtccctggtgctgtttggtgccttcgttagcagagctggagtgaaggttgtcgatgttctctcctgaaggttttcattggtttgattgttggagacatgtttttgtactggttctctgtcatgaccatgaagagtgttggaagtgtcgccctaaagatggtggaggaggttcgcaggcagttcaacaccattcttgggttgatggagtgaacaagcaagcctgactatgcaacctatgtgaagatttgcactgatgcttcttccatcaaggagatgattccttggggtgctctggtcatgctgactccctcattgatggaacctctttggcatcgagactctctctggcgtttttgctggtgccctggtttttggagtgcagaacaaggccatctcagataaaagtagatgtagctttcataggacttaattccagcaaagcaaaggttggcagtgcaccaaacaatagcgtttatacttcattcttatggattggagaagcctatgcaacatgtcaagccagatgacatgcagatgagaaggttctgcatcaatagaaaccagagaaaaatctgtatgtgtctgtatgacatctcagataaagcctgatgatcagcatgatgaaaggtggggagttctatagctggtttaagctggagctagcttctgaagtccggtcaggtgtctgtatgtgttgcccctttttatttcatttcatgagaaaagattgttatttgttccttgaactgtacttggtcgtacttgtgaataaatattttagcatggttgttcgacttctcataatgtttattcgacatcagttcatgatattagtgttacgtgatattttatcatatgaattttgaatatcatagtg

SEQ ID NO: 70069 - DNA, 2713 bp, Zea Mays
gacatgtagctatactactatattaaggctctaagggtagcctgcctcctctggttctgcctcccgttaatctacgccgtccacgcgcgttaatctgcaccgtccgtcatgcgtacgttttcgaccgtcgcccccgtgaatcactccctgccccacaacccccaagcaaccctagctctccctccccctccgcgtcctacagccatcgtcgctctgccttccgcccccgccgtcgccgcagacgcagccggccacccaccactcgcgcctcccccaccgcgtcgcgtgtgggccacagctacagctgcctcctcgagcaacccacactcctttcttcccctgcctgtcgtctctcttccaccttccaccacaagcgccgtcgcagccggtgcctgctccttcccgatccccgaggcaaagctgcgactccgcaactgccgccatggcgttcgagaagatcaaggtctccaacccaatcatcgagatggacggcgatgagatgaccagggtattctggcagtctatcaaggacaagcttatcttcccatttctggacctggacatcaagtactatgatttggggatactgcacggtgaagcaactgatgacaaggtcacagtggaggctgcagaggctactctcaagtacaatgtggctattaagtgtgcgaccattactccaggtgaaactagaagaacgtatgaagctagacttgttgcaatttatagacatgtaagagaggatggagttgagggacaacctatttctgtttcaacagaacaatttgcagtaagtcaaatcacctcttgtactataatcttgcaattgtttctttctctctcttttctaagaataactattgcattagcatattttactaacttgtataaattgttattttcaagagattttatgtaccgtttctttacaaacaatgctaatgccacatccacaatcttgcagaactttgaatggcaaccagttatctggatctttgcctgatgagattggttaccagatgaactttaacagattagaaataaaatataacaacatatcaggcccatacctaacacttttgccaacttaacaagaattaaacatctgttagtgtcgagtatctttattttctgcccatccctgatgcttctgatttgtaaaattagtaaataattctggttccaattttaccttttagtcacatgaataataactcattacaaatcccatctgagttgtccaacttgccttaactccttcatttccttgttgataacaataattgatctgggcctcttccaccagaattagtagatacacgtagtcttcttgctatcttgacttcaggctgataataacaacttcagtggaagctccatcctgctgaatacaacaacatacaaacacttctaaagctgtgggtccacagggcgggtgtcgctcacgtgctccatcaagaacatcgagtgaggtggtgtgctgctgctctaaagaagggaggagaggaagtagcgacaatgtcgccaagaccacctggcgcgatgtctcctaccagatcaccaagatcaacatgtacaaggatggtcggcatgtacaagatatgcttaagcatcagaggctccataaagcagctctgctagaattaactgattcactgtcaaggtcaaacatcactatgatattgctgagatggtccaatcagtgacaatgctggtggtattgttgagatggcaggaatgagccacaaaatctgagagaacttatgctcttggtgctgctgacaacacaactgttgctattagaaagggatttgccattggttcaggtgctcttgtgtccctggtgctgtttggtgccttcgttagcagagctggagtgaaggttgtcgatgttctctcctgaaggttttcattggtttgattgttggagacatgtttttgtactggttctctgtcatgaccatgaagagtgttggaagtgtcgccctaaagatggtggaggaggttcgcaggcagttcaacaccattcttgggttgatggagtgaacaagcaagcctgactatgcaacctatgtgaagatttgcactgatgcttcttccatcaaggagatgattccttggggtgctctggtcatgctgactccctcattgatggaacctctttggcatcgagactctctctggcgtttttgctggtgccctggtttttggagtgcagaacaaggccatctcagataaaagtagatgtagctttcataggacttaattccagcaaagcaaaggttggcagtgcaccaaacaatagcgtttatacttcattcttatggattggagaagcctatgcaacatgtcaagccagatgacatgcagatgagaaggttctgcatcaatagaaaccagagaaaaatctgtatgtgtctgtatgacatctcagataaagcctgatgatcagcatgatgaaaggtggggagttctatagctggtttaagctggagctagcttctgaagtccggtcaggtgtctgtatgtgttgcccctttttatttcatttcatgagaaaagattgttatttgttccttgaactgtacttggtcgtacttgtgaataaatattttagcatggttgttcgacttctcataatgtttattcgacatcagttcatgatattagtgttacgtgatattttatcatatgaattttgaatatcatagtg

SEQ ID NO: 70070 - DNA, 3194 bp, Zea Mays
ttcggataaaaatatatatgcagatggaacgccacaaactacaaaggaagcgccatctactgacatgtagctatactactatattaaggctctaagggtagcctgcctcctctggttctgcctcccgttaatctacgccgtccacgcgcgttaatctgcaccgtccgtcatgcgtacgttttcgaccgtcgcccccgtgaatcactccctgccccacaacccccaagcaaccctagctctccctccccctccgcgtcctacagccatcgtcgctctgccttccgcccccgccgtcgccgcagacgcagccggccacccaccactcgcgcctcccccaccgcgtcgcgtgtgggccacagctacagctgcctcctcgagcaacccacactcctttcttcccctgcctgtcgtctctcttccaccttccaccacaagcgccgtcgcagccggtgcctgctccttcccgatccccgaggcaaagctgcgactccgcaactgccgccatggcgttcgagaagatcaaggtctccaacccaatcatcgagatggacggcgatgagatgaccagggtattctggcagtctatcaaggacaagcttatcttcccatttctggacctggacatcaagtactatgatttggggatactgcacggtgaagcaactgatgacaaggtcacagtggaggctgcagaggctactctcaagtacaatgtggctattaagtgtgcgaccattactccaggtgaaactagaagaacgtatgaagctagacttgttgcaatttatagacatgtaagagaggatggagttgagggacaacctatttctgtttcaacagaacaatttgcagtaagtcaaatcacctcttgtactataatcttgcaattgtttctttctctctcttttctaagaataactattgcattagcatattttactaacttgtataaattgttattttcaagagattttatgtaccgtttctttacaaacaatgctaatgccacatccacaatcttgcagaactttgaatggcaaccagttatctggatctttgcctgatgagattggttaccagatgaactttaacagattagaaataaaatataacaacatatcaggcccatacctaacacttttgccaacttaacaagaattaaacatctgttagtgtcgagtatctttattttctgcccatccctgatgcttctgatttgtaaaattagtaaataattctggttccaattttaccttttagtcacatgaataataactcattacaaatcccatctgagttgtccaacttgccttaactccttcatttgtaagtagacctcaactttttctaatattttctattttgcaagttgcagatgacttgtaagttgacatgtcttgtgctgtgaacttgcagccttgttgataacaataattgatctgggcctcttccaccagaattagtagatacacgtagtcttcttgctatcttgacttcaggctgataataacaacttcagtggaagctccatcctgctgaatacaacaacatacaaacacttctaaagctgatattagttgtcaaatattttagtactaatattgagggggatggcggagggcattgcgctgcggggttacatcgccgtcaccttcgacatgcgcgacataggtgggtccacagggcgggtgtcgctcacgtgctccatcaagaacatcgagtgaggtggtgtgctgctgctctaaagaagggaggagaggaagtagcgacaatgtcgccaagaccacctggcgcgatgtctcctaccagatcaccaagatcaacatgtacaaggtgatccagtccgagccctctccctgcatgcttccattgattttttatttcattccaatcgatttgccgtgatatatgcaatgcaggatggtcggcatgtacaagatatgcttaagcatcagaggctccataaagcagctctgctagaattaactgattcactgtcaaggtcaaacatcactatgatattgctgagatggtccaatcagtgacaatgctggtggtattgttgagatggcaggaatgagccacaaaatctgagagaacttatgctcttggtgctgctgacaacacaactgttgctattagaaagggatttgccattggttcaggtgctcttgtgtccctggtgctgtttggtgccttcgttagcagagctggagtgaaggttgtcgatgttctctcctgaaggttttcattggtttgattgttggagacatgtttttgtactggttctctgtcatgaccatgaagagtgttggaagtgtcgccctaaagatggtggaggaggttcgcaggcagttcaacaccattcttgggttgatggagtgaacaagcaagcctgactatgcaacctatgtgaagatttgcactgatgcttcttccatcaaggagatgattccttggggtgctctggtcatgctgactccctcattgatggaacctctttggcatcgagactctctctggcgtttttgctggtgccctggtttttggagtgcaggtgcgcactttgccttctactctctctgtgcacttcaatgtgtttgcttgttctagggtttatggagatttctgctttggacaaattgccatctctacttccaacactgtgctgcataggataacgcaagaagtatattaagaacaaggccatctcagataaaagtagatgtagctttcataggacttaattccagcaaagcaaaggttggcagtgcaccaaacaatagcgtttatacttcattcttatggattggagaagcctatgcaacatgtcaagccagatgacatgcagatgagaaggttctgcatcaatagaaaccagagaaaaatctgtatgtgtctgtatgacatctcagataaagcctgatgatcagcatgatgaaaggtggggagttctatagctggtttaagctggagctagcttctgaagtccggtcaggtgtctgtatgtgttgcccctttttatttcatttcatgagaaaagattgttatttgttccttgaactgtacttggtcgtacttgtgaataaatattttagcatggttgttcgacttctcataatgtttattcgacatcagttcatgatattagtgttacgtgatattttatcatatgaattttgaatatcatagtg

SEQ ID NO: 70071 - DNA, 2232 bp, Zea Mays
tacgactctgcctggactctcaagaacgtcagtgcgcatgcagctcggaaaacaggtggccgagcggaccactggttccgtcaaacagggagctcgtgcaggcaccgaatccatggcgatgagatgaccagggtattctggcagtctatcaaggacaagcttatcttcccatttctggacctggacatcaagtactatgatttggggatactgcacggtgaagcaactgatgacaaggtcacagtggaggctgcagaggctactctcaagtacaatgtggctattaagtgtgcgaccattactccaggtgaaactagaagaacgtatgaagctagacttgttgcaatttatagacatgtaagagaggatggagttgagggacaacctatttctgtttcaacagaacaatttgcaatgacttgtaagttgacatgtcttgtgctgtgaacttgcagccttgttgataacaataattgatctgggcctcttccaccagaattagtagatacacgtagtcttcttgctatcttgacttcaggctgataataacaacttcagtggaagctccatcctgctgaatacaacaacatacaaacacttctaaagctagtgagaaatccgctactcaattcacatcaggatattagttgtcaaatattttagtactaatattgagggggatggcggagggcattgcgctgcggggttacatcgccgtcaccttcgacatgcgcgacataggtgggtccacagggcgggtgtcgctcacgtgctccatcaagaacatcgagtgaggtggtgtgctgctgctctaaagaagggaggagaggaagtagcgacaatgtcgccaagaccacctggcgcgatgtctcctaccagatcaccaagatcaacatgtacaaggtgatccagtccgagccctctccctgcatgcttccattgattttttatttcattccaatcgatttgccgtgatatatgcaatgcaggatggtcggcatgtacaagatatgcttaaggtgaggttgtaattcaggatgtgcatatatttcttgggcttgaatttgtttaatctaaatagattattttttatccaatccaaatttccaatgacttgccatatcattagcatcagaggctccataaagcagctctgctagaattaactgattcactgtcaaggtcaaacatcactatgatattgctgagatggtccaatcagtgacaatgctggtggtattgttgagatggcaggaatgagccacaaaatctgagagaacttatgctcttggtgctgctgacaacacaactgttgctattagaaagggatttgccattggttcaggtgctcttgtgtccctggtgctgtttggtgccttcgttagcagagctggagtgaaggttgtcgatgttctctcctgaaggttttcattggtttgattgttggagacatgtttttgtactggttctctgtcatgaccatgaagagtgttggaagtgtcgccctaaagatggtggaggaggttcgcaggcagttcaacaccattcttgggttgatggagtgaacaagcaagcctgactatgcaacctatgtgaagatttgcactgatgcttcttccatcaaggagatgattccttggggtgctctggtcatgctgactccctcattgatggaacctctttggcatcgagactctctctggcgtttttgctggtgccctggtttttggagtgcagaacaaggccatctcagataaaagtagatgtagctttcataggacttaattccagcaaagcaaaggttggcagtgcaccaaacaatagcgtttatacttcattcttatggattggagaagcctatgcaacatgtcaagccagatgacatgcagatgagaaggttctgcatcaatagaaaccagagaaaaatctgtatgtgtctgtatgacatctcagataaagcctgatgatcagcatgatgaaaggtggggagttctatagctggtttaagctggagctagcttctgaagtccggtcaggtgtctgtatgtgttgcccctttttatttcatttcatgagaaaagattgttatttgttccttgaactgtacttggtcgtacttgtgaataaatattttagcatggttgttcgacttctcataatgtttattcgacatcagttcatgatattagtgttacgtgatattttatcatatgaattttgaatatcatagtg

SEQ ID NO: 70072 - DNA, 2463 bp, Zea Mays
ttcatccgttcgcctctgtgcctctttgagctcgcactcgctcgtgaacgctccccgacctccgtgttgtccagctcactttagcagttcagcctaggactctctgcgagtagcatagcagcagcttcttgcgaagcagaggcagagccttgtgttgcgttgcgtcttccttcctgcttgagcttattagttggctcgcgatggccggcggcgtggtggtgagctccggtgggggcaaggactaccccggcaagctcaccatgttcgtgctcttcgcctgcatcgtcgccgccaccggcggcctcatctttggatacgacatcggcatctctggtacggcgccaagcactgtccccgcccctctatctatctgatcgcgatgttttcggtttttgttttttacccatggctgctgtggttggaaagagagaagaaaaatggcagtcctcgtctgcaccgcatctctcgcacagacccacgcagccacgctgctctgttctcgcgttttgcgaatcaggcagggtattttctcgggcgcggttcacctaccgtccggtcgggagactgggcgcgcatggttcaagagcgtctttttgcgcatgcatacagaactgcgatattccccctcgttttcttattttcctcttgccagattcttgcaagcccgggaagaagaatctttccatgcatcacctcgtcatcttacagtttttgacactattagtggttgtttacgttaacgataaagaaaaaatatatatatatccaagaccattccaaaagaaaaaaaataactcttcaatcaagtaacaaagaagaaaataggttgctgttgctgacgtgtttgtgcaatgctgtgtggtcgagcaggtggcgtgacgtcgatgaacccgttcctgatgaagttcttcccgtcggtgtaccgcaaggagcaggaggcggagcggaaccagagcaaccagtactgcaagttcgacagccagctgctcaccatgttcacctcctcgctctacctggcggcgctcgtggcctccttcttcgccgccaccgtcacccgcgtggccggccgcaagtggtccatgttcggcggcggcgtcacgttcctggtcggcgccgcgctcaacggcgccgccaaggacgtgggcatgctcatcctcggccgcgtcctcctcggcgtcggcgtcggcttcgccaaccagtccgtgcccgtctacctctcggagatggcgccggcgcgcctccgcgggatgctcaacatcggcttccagctcatggtcaccatcggcatcctctgcgccaacctcatcaactacggcaccgccaagatcaggggcggctggggctggcgcgtcagcctcgcgctcgcggccgtgccggcggccatcatcgccgtgggcgcgctcttcctgcccgacacacccaactccctcatcgaccgcggctacaccgacgccgccaagcggatgctcaagcgcgtccggggcaccgacgacgtggaggaggagtacagcgacctggtggccgccagcgacgagtccaagctggtggcgcacccctggcgcaacatcctgctgccgcgctaccgcccgcagctcgtcatggccatcgccatccccatgttccagcagctcacgggcatcaacgtcatcatgttctacgccccggtcctcttcaagacgctgggcttcgcggacgacgcctccctcatgtccgccgtcatcacgggcctcgtcaacgtcttcgccaccttcgtgtccatcgtcaccgtcgaccgcctcggccgccgcaagctgttcctgcagggcggcacccagatgctcgcgtgccagatcgtcgtgggcagcctcatcggcgccaagttcggcttctccggcgtcgcggagatccccaaggggccttcctccccatgctctgccgcttcaagttcatcctcttcttcttcttcggcgcctgggtcgtcgtcatgaccatctttgtcgcgctcttcctgccggagaccaagaacgtgcccatcgaggagatggtgctcgtgtggaaggcgcactggtactggggccgcttcatccgcgacgaggacgtgcacgtcggcgccgacctcgagatgccctccgccaacgccaagctcggcggcatgcagtagccatggccgtccctcgctgctcatgttgttgggcaataatctacccatacagtattattcttggggctttaccgggaaatttgaaactcatcatcaatgtgtattataatcgtctcattaggtaggatgactggatgatgacaaatagtcaactagtcttcgtcccctgtctttttttttattctgtgcgggatactgaatgtggagtataattatgtttgcaacagatcaaaccaaatatgaatatcaattgcaagttgcactgcaaaagctctggattttccttgcatgggtgaatgctgaccgctggtattgactttcag

SEQ ID NO: 70073 - DNA, 2086 bp, Zea Mays
ccaccgtgcagttacagtcatcacactccacgcaccgcggctaccacctctgttctcttcctcgcttccttgctcaaccggatcgacgcgagcgtggcaagaatcgcggtgcgtgtgagccttgttcggagaagagctacccgatgcagctgaggctgtgagggcactgggcacggatgatgggagaagcaggggaggaagaatcggcggccgcgccggcggaggtgagccgacaagcggagctggatgagcagcgatgcctggcggaggcgctggacgccctcagttcgttggtctccgcttccttgtccgcgacgctgttcccgctcaagtggcagctcaccagggaccggctccacgcctgcctcgccgacaccaccgtccccgcgggggacgagagcggcgaggacaggcgcgacgcgttcgtgaacctcctgcgggacgtcgcggcgaccgctcgggaggcgcgagagctggtgccgcgtagccaggggcggcagtacggcggcggcaagctgcggctgcgcagcgacctcgacgtcctggccgcagccctcgacgcgcacgtggcgcggctggacgaggtgcacgcgtcgggcgcgctgacgcgggcgcgggcgctggtggtgccgcgccccggcgccggggccacccgcgacgacgtgcggttctacgtgcgcgacctcttcgcccggctcagggccggcggcgccgagatgcggagggaggccgcgaccgcgctcagcgaggtgctgcgcgacgacgagaagtgcgtccgcgtcgtggcgtccgacgtcgcggacggcgtcggcgtgctcgtcgcgctgctcgagtgccccgacgcccgcgtccgggaggacgtcctggaggcggtctcggtgatcgccgggtccgacgcgcacaggggagacctggtcgtcggcggcgtcatcgcgcctgtggtccgcgtcctcgacgccgccgccagcgccagcagcgaggcggccaaggagagggcggcgcgggtgctctgcaaactcacggagaactcggacaacgcgtgggccgtcgccgctcacggcggcgtcacggcgctgctcgacctgtgcacggaccacggagcgagcggcggcgagctcgtgtgcgcggcgtgccgggtgctgcggagcctcgcgggcgtcgacgagatcaggaagtacatggtggccgacgctggggccgtcccggtgctcgtgtctctctcgcagagggccacggacgacgcggcgcgaatccaggcaatggagctcgtcgtcgccatcggctctggggacagctcagccagggaggccgtggtccaggaaggtgccatcgaggtcctcgttcgcgcgctcgacgcctcctcctcctcgaaggtgcgggaggtggccctccgtgccatcgacgggctctgcctctcgccgcccacatccaccgaccgtctcctcgccgccgggttcctcgacagcgtcctctccctcctccgcaccggagacaccacgctgcagcactgcgccctgaaggcggcgcaccgtctgtgcccggtgtcggaggagatcaggaaggcgatgggcgacgccggattcatgctggagctggtgagcgtcctcggcgcgtcgtccaagtcccccgaggcgcgggagatggcggccgagtcgctctgcgccttggtgtccgtgcaccgcaaccggaagcggttcgtccaggaggaccgcgacgacgtggcgcgggtgctgcagctgctgggctccggcgacgaggagaagctcacgccggcgaagcggttcctgctgtccacggtgacgcgtctcgcggacagcagctccggccggaggaagatcctgacctcggagcacgtcaggaatctggagaagcttgcggagaccgatgtcccggacgccaaacggatcgtgaagaggcttggcgggagcaggctgaggagcattttccatggcatttggagcctgaatcaaaagcatgaaccacccagtgatttgtctcctacccgcatgtgtaaatcactcgtctctgtcaattaaaaagcgcaagtcttttttcaacaacggatccatccaaacatgcagtggcg

SEQ ID NO: 70074 - DNA, 1830 bp, Zea Mays
ctctaactaacttgaagacgccaaagcggtcggtcgccttccagttcagcaccaccgtgcagttacagtcatcacactccacgcaccgcggctaccacctctgttctcttcctcgcttccttgctcaaccggatcgacgcgagcgtggcaagaatcgcggtgcgtgtgagccttgttcggagaagagctacccgatgcagctgaggctgtgagggcactgtgcacgcgtcgggcgcgctgacgcgggcgcgggcgctggtggtgccgcgccccggcgccggggccacccgcgacgacgtgcggttctacgtgcgcgacctcttcgcccggctcagggccggcggcgccgagatgcggagggaggccgcgaccgcgctcagcgaggtgctgcgcgacgacgagaagtgcgtccgcgtcgtggcgtccgacgtcgcggacggcgtcggcgtgctcgtcgcgctgctcgagtgccccgacgcccgcgtccgggaggacgtcctggaggcggtctcggtgatcgccgggtccgacgcgcacaggggagacctggtcgtcggcggcgtcatcgcgcctgtggtccgcgtcctcgacgccgccgccagcgccagcagcgaggcggccaaggagagggcggcgcgggtgctctgcaaactcacggagaactcggacaacgcgtgggccgtcgccgctcacggcggcgtcacggcgctgctcgacctgtgcacggaccacggagcgagcggcggcgagctcgtgtgcgcggcgtgccgggtgctgcggagcctcgcgggcgtcgacgagatcaggaagtacatggtggccgacgctggggccgtcccggtgctcgtgtctctctcgcagagggccacggacgacgcggcgcgaatccaggcaatggagctcgtcgtcgccatcggctctggggacagctcagccagggaggccgtggtccaggaaggtgccatcgaggtcctcgttcgcgcgctcgacgcctcctcctcctcgaaggtgcgggaggtggccctccgtgccatcgacgggctctgcctctcgccgcccacatccaccgaccgtctcctcgccgccgggttcctcgacagcgtcctctccctcctccgcaccggagacaccacgctgcagcactgcgccctgaaggcggcgcaccgtctgtgcccggtgtcggaggagatcaggaaggcgatgggcgacgccggattcatgctggagctggtgagcgtcctcggcgcgtcgtccaagtcccccgaggcgcgggagatggcggccgagtcgctctgcgccttggtgtccgtgcaccgcaaccggaagcggttcgtccaggaggaccgcgacgacgtggcgcgggtgctgcagctgctgggctccggcgacgaggagaagctcacgccggcgaagcggttcctgctgtccacggtgacgcgtctcgcggacagcagctccggccggaggaagatcctgacctcggagcacgtcaggaatctggagaagcttgcggagaccgatgtcccggacgccaaacggatcgtgaagaggcttggcgggagcaggctgaggagcattttccatggcatttggagcctgtaatgtaatccttggagacaagcatgcactagctgccacttactagcaccatgtcgatctctggctaacacataactattgttccttgcatcttttgttactgtgaaggaatcaaaagcatgaaccacccagtgatttgtctcctacccgcatgtgtaaatcactcgtctctgtcaattaaaaagcgcaagtcttttttcaacaacggatccatccaaacatgcagtggcg

SEQ ID NO: 70075 - DNA, 1168 bp, Zea Mays
ggaggcgggagccggaccaccgccccttagaagccgaacgcagagccgtgaccgtgggggcgggggggctgacgtctcctgttctttttaggaagtggattactatctccaatcccatgcagataggcttcattgcaagatctccgattagttaagggcaacgcgaagaagggggtctcttgccagttgccaccagcttgagcttctcaaactgcaggagcagcacaaggatcatcgggaggaagagagtcgccgtctcgccgactccgggctcccggaccccgcactcgccatcacgcaccctgcgcaagcagcgaagcgtccgcttccacttccacatggacgacgccgtcaacctccttgagtcgctgccgctggatgtactgataaaaatcttgtgtaaggtgaactacagtgatctgaggcaccttctcctagtgtcaaaacaagtcaaggaagcaacaatttatgctagggagctgcatttcaagttttcgacgccgtcggcgaagcccgtttttagagacgaggaagccggcggtggcgacgacacttgcccttgcgcgcccaagcaacaccgggctgcaaagtcacgcttgcggggccagaacctagagagaatcgccgtcaacctgtcggcgtcgtacgagagcatgctccccgaggtctagatgtaaatatacgacatccacatgttttcagtttgtgatctattcgtgcttgtatctagtagtttcaggttacaagtttagtgccttttgtagcccacgtcatagagaggctcctagatagtgggaatagtatactcggatgcgtgattactagtcttaagtaattatagatatatggtcgtacgtagttcttcaatgttgtgattgaagaacacacgcgatgtcttctctaatcttatgcgtacttatatcttgtattttatttatcgtcaaagagatgtcaattctcttatgcgtacgcatgctgcaaaaagtttatatggactttgtattgtggacaagaaggtaaaactcttagccacatcgatgaattttgacccaggttaggagcaaaattggccattgccttagatgttctagatcaacctaagctggtcttagtgatttgatatgctgaagagatcgatctggatttgttaactactgcacaatttttt

SEQ ID NO: 70076 - DNA, 1339 bp, Zea Mays
gtagttttctggaaaggcccctgcgctgaggacccttgtagttctagataggttcggaggttccctgcagaggagccaacaggagcgttgctataaaaacggagaaggggaggtcaggtctttccaattttacctagaataggtttggtcctccaggctccagcaaacatcccaggtgttctgtctgatcacctgtcgagaggcgcatgaggagcttgggtttgacagcggaagaacaggaagtggattactatctccaatcccatgcagataggcttcattgcaagatctccgattagttaagaaggcaaaatggcaattggacagggcaacgcgaagaagggggtctcttgccagttgccaccagcttgagcttctcaaactgcaggagcagcacaaggatcatcgggaggaagagagtcgccgtctcgccgactccgggctcccggaccccgcactcgccatcacgcaccctgcgcaagcagcgaagcgtccgcttccacttccacatggacgacgccgtcaacctccttgagtcgctgccgctggatgtactgataaaaatcttgtgtaaggtgaactacagtgatctgaggcaccttctcctagtgtcaaaacaagtcaaggaagcaacaatttatgctagggagctgcatttcaagttttcgacgccgtcggcgaagcccgtttttagagacgaggaagccggcggtggcgacgacacttgcccttgcgcgcccaagcaacaccgggctgcaaagtcacgcttgcggggccagaacctagagagaatcgccgtcaacctgtcggcgtcgtacgagagcatgctccccgaggtctagatgtaaatatacgacatccacatgttttcagtttgtgatctattcgtgcttgtatctagtagtttcaggttacaagtttagtgccttttgtagcccacgtcatagagaggctcctagatagtgggaatagtatactcggatgcgtgattactagtcttaagtaattatagatatatggtcgtacgtagttcttcaatgttgtgattgaagaacacacgcgatgtcttctctaatcttatgcgtacttatatcttgtattttatttatcgtcaaagagatgtcaattctcttatgcgtacgcatgctgcaaaaagtttatatggactttgtattgtggacaagaaggtaaaactcttagccacatcgatgaattttgacccaggttaggagcaaaattggccattgccttagatgttctagatcaacctaagctggtcttagtgatttgatatgctgaagagatcgatctggatttgttaactactgcacaatttttt

SEQ ID NO: 70077 - DNA, 1255 bp, Zea Mays
gtagttttctggaaaggcccctgcgctgaggacccttgtagttctagataggttcggaggttccctgcagaggagccaacaggagcgttgctataaaaacggagaaggggaggtcaggtctttccaattttacctagaataggtttggtcctccaggctccagcaaacatcccaggtgttctgtctgatcacctgtcgagaggcgcatgaggagcttgggtttgacagcggaagaacaggaagtggattactatctccaatcccatgcagataggcttcattgcaagatctccgattagttaaggagcagcacaaggatcatcgggaggaagagagtcgccgtctcgccgactccgggctcccggaccccgcactcgccatcacgcaccctgcgcaagcagcgaagcgtccgcttccacttccacatggacgacgccgtcaacctccttgagtcgctgccgctggatgtactgataaaaatcttgtgtaaggtgaactacagtgatctgaggcaccttctcctagtgtcaaaacaagtcaaggaagcaacaatttatgctagggagctgcatttcaagttttcgacgccgtcggcgaagcccgtttttagagacgaggaagccggcggtggcgacgacacttgcccttgcgcgcccaagcaacaccgggctgcaaagtcacgcttgcggggccagaacctagagagaatcgccgtcaacctgtcggcgtcgtacgagagcatgctccccgaggtctagatgtaaatatacgacatccacatgttttcagtttgtgatctattcgtgcttgtatctagtagtttcaggttacaagtttagtgccttttgtagcccacgtcatagagaggctcctagatagtgggaatagtatactcggatgcgtgattactagtcttaagtaattatagatatatggtcgtacgtagttcttcaatgttgtgattgaagaacacacgcgatgtcttctctaatcttatgcgtacttatatcttgtattttatttatcgtcaaagagatgtcaattctcttatgcgtacgcatgctgcaaaaagtttatatggactttgtattgtggacaagaaggtaaaactcttagccacatcgatgaattttgacccaggttaggagcaaaattggccattgccttagatgttctagatcaacctaagctggtcttagtgatttgatatgctgaagagatcgatctggatttgttaactactgcacaatttttt

SEQ ID NO: 70078 - DNA, 4897 bp, Zea Mays
aaaaaatatcggttccgtttttgatttggaggggaggggagcggcggttcggagtgggcaggctcgctgttggttcttgcagcggcgcggcagagaggggtgtgcggtgcggccgtgctgttgaattatcctgttccttcagtgctcgcgtctcgatgcgttttctctgatgatggtttcatggccacctgcgtgtgctgctgctgctgctagtacgccagcgctttgattcggcagaggcgttgctttggtttcgggttctttcgcctttcctttcgccaaagattgcagctttcgcagccgcagccttttcttctccggccgattccaaccttggccagactacccccccttcaaaaatcgcgcaaggggtgggggttttacccggcccgtactgcgagcagcgccgaattttttcccctgggcgtgcgattgtcgcttagttgagcttcagagcctggttttttgagagatttctttttgaattttgagcctggtgtggaatttgggggtttgggtgtctgccagttttcaacccttggagagtcagaggctattgtctctgaagatatcgcctgttttgatgcgaaatggggaaatttctggtccctgtgctgttcggccattggatttggcgagttggtgtttgagccctggtatacatcacctgtctgtgctggtggccgtttgatttcacggtggtgatgctctctgcagcctccgtgatggcgccggcagcagccacacagaagagctcccttgaggtcttgcttgagacattaaagaagcgcgatgagcagcccaaggatgcacctccaacattgccagcccggccgacgtgccgtggccggctgcccaccaccagacggtcatcactgcctgctggctttatgctcgagaacggcatggcaacagttgctgccacagaagctgcagtggttgacaagaaggcagatgctaagatggagattgttgggctggaggccaaggaggaaaagctggtgaaaggctgcatctttgggactaagaggaagttccctaacacagaagtgctggaggagtcgccgtatgttggtaaatttcttgaggagaggaagggtacatcagtttgtaagaatcctccacatatttcctcggcaacgataaggatgaatgggaatgtagcatgtacagatatcttggactatattctccagaagaagctaagagtttggtgttcttcaccaaatgcaaagtgggaacttggacagatccaatcaatgtctggagatgatgctgaaatactcctggctaatggaaaagttttgatggtgtcaccagaacaactcttgcctgctaaccctgatatcctcgatggagtggatgatttgatccagatgagttacttgaatgaaccttcagttctttacaatctgcaattgcgatattctcgtgatcttatctatacaaaggcaggacctgttctgattgctgtcaatccattaaaagaagttgctctctatgggaagtcttcaatcatgcaatacaagcaaaaggccaacgatgacccacatgtgtatgcagttgctgatttggcatttaacgagatgctgcaagatggcataaaccaatctataataataagtggtgaaagtggatcaggaaaaaccgagacagctaaaattgcaatgcaatatttgtctgatcttgggggtgctagtggtacggagtctgaggttcttcagaccaatgttattctggaagcattggggaatgcaaaaacatcacgaaaccataactcaagccgatttggcaagcttattgaaatacacttctctgaatctggtaaaatgtgtggtgctaaaatccagaccttcctgcttgagaagtcgagggtggtccaaagggcacaaggagagagatcttaccacattttctatcaactgtgctctggagctcctccccttctcaaaaaaaaattgtttctgaaaagcgccaatgactacaattacttgaagcagagtaattgcttgaaaatcgatggtgttgatgattcaaaaaaattcacagtgctagtggatgcattggatacaattcaaatatctaaggaagaccaaatgaaattattttctatgcttgcagctgtcttgtggctggggaacatatcattctgtgtgattgataatgaaaaccatgtggaagttgtttcaaacgaaggattgtctactgctgcaaagctattaggctgcactgcaaatcaactagtgattgctttgtccacttgtaaaatccgagctggaaatgacagtattgttaaaaagctaacattaactcaggccattgacgcaagagatgcactagcgaagtcaatctatgccaatttatttgactggattgttgaccaaattaaccactcacttggaacagggaggcaatttacatggagatccataagtattttggatatttatgggtttgagtgtttcaataagaatggttttgagcaattttgtataaattatgccaatgagaggctgcagcagcacttcaacagacatcttctcaaactacaacaggaggaatacttggaagacggaattgattggacccccatggaatttgtggataacactaattgcttatctctctttgagaagaaacatctagggctattgtcattattggatgaagagtctactttcccaaaggcatccgatttttcctttgctaacaagcttaagcggcaattaagtggtaactcttgcttcaaaagtgaaaaagaaggcacatttaagatttgccattatgcaggggaggtgacatatgatacagctgggttcctggagaagaacagagacccattgcactctgagtcaatccaactactctcatcatgtacatgtgaactttcaaaacattttgcctctgtcatggttgctgattctcagaataaatcaagtctgtcatggcattcagtaaaggatacacataaacaaagtgttgtcatggaatttaaggctcaactgttcaagctgatgcagcagttggagagtacaaccccacattttatccaatgcattcaaccaaatagcaaacatcatcccaggttattcgagcatgatcttgttttgcaccagcttaaatgctgtggtgtgtttgaagttgttcggatatcaagaacatgctatccaactaggatcacccaccaacagtttgctgaaagatttcttctcttgcgttccattgcatctcaagatccacttagtgtttcaattgctgttttgcaaaagttcaacattccccctgaaatgtatcaagttggctacacaaaattatttttccgtacaggacaggttgctgcactggaaaatgctaaaagacagatgcttcttggaaccctccatattcaaacacagttccggggtttgcattctcggcggggatatcaacgactaaagaaaggggcgatgaatttgcaatcatttatacgtggtgaaagaacaagaatacactttgataatcttgtcaagagatggagggcagctgttctcatacagaaacacactaggcgtcgacttgcagctaacatgttcaatgatcaactgaatcatgtcattcttcttcagtccgtgacgcgtgggttcctggccagaaggaaatacaagtgtctgcagaatgaaaaggagtcaaaggccagtcacagcatagttcaagggaacacaaggaagaataactcagagtcaagaatatgccatgaaatgaatgggcattatcctcacgaaccagtcatcactgagcttcagggtcgtatcacgaaagctgaggctgcattgcggggtaaggaggaggaaaatgtaatgctcaaacagcaattggaacagtatgagaggaaatggtcagaatatgaagccaaaatgaaatgtatggaagaggcatggaagaggcagctctcttctctgcagctgagccttgttgtcgctaagaagagcctagctgctgatgatgcagccactagagcagctcggactgattgtactcctacacatgcgcagtatgactctgaagatacattatccaccgggactcgtacacctgaagtgatcgagtcgaaacacgacaaccacaaccctgaagctaaagtttcagcaggaaactcggataggcgagtgaatgctgtgaaccacctagcaaaggagtttgaagacagacgacaggtgttcgaagacgatgcgggcttcctagttgcagtcaggtccggtcagattggttcaaatatgaacccagatgaggaactccggaagctcaaggaccgctttgcgacatggaaaaaagactacaaatctcggttgaaggagactaaggtaaaccttagtaaggttggcacccatgatgagaaatcacggaaaagatggtggggaaagaagagctcgaagtgaaacgtgtaagagaatctccacaacattttgcaacgacactgggtcaaggaaagtggccaggaatgccagggcaggcgagaagaatctgcctctgatcccaaaagcttggtgagatgatgaactcccatgttggtggcagtgccgttactcatctgatgtcacgagtgtcgaaaagatcaaagtagacaataggtgaagccagagttctgtacatgtatattagtcagctctgagtcatcacttgacagtgtgtttatgtcatcgtgtatgtagagtgataaatccgaggcgtggaagggtaactaaatgcagattatccaccatgagcgaagagatgcgaaagcagagtactgtaatatgtgtacagtgagaacattgttgaaatgtgcaaggcattttactctgaaaactgtgattgcatcgccccatattttgcactatcttttgagacctttacacttacacatcagttttattttttt

SEQ ID NO: 70079 - DNA, 4200 bp, Zea Mays
gtctccccagcccgcgacgcccatccatgaaccagccctccatccgccgcggaaaacaccaccggccacgcggcgctattagcgagggggcgcgacgcgcgaggcctccgtgatggcgccggcagcagccacacagaagagctcccttgaggtcttgcttgagacattaaagaagcgcgatgagcagcccaaggatgcacctccaacattgccagcccggccgacgtgccgtggccggctgcccaccaccagacggtcatcactgcctgctggctttatgctcgagaacggcatggcaacagttgctgccacagaagctgcagtggttgacaagaaggcagatgctaagatggagattgttgggctggaggccaaggaggaaaagctggtgaaaggctgcatctttgggactaagaggaagttccctaacacagaagtgctggaggagtcgccgtatgttggtaaatttcttgaggagaggaagggtacatcagtttgtaagaatcctccacatatttcctcggcaacgataaggatgaatgggaatgtagcatgtacagatatcttggactatattctccagaagaagctaagagtttggtgttcttcaccaaatgcaaagtgggaacttggacagatccaatcaatgtctggagatgatgctgaaatactcctggctaatggaaaagttttgatggtgtcaccagaacaactcttgcctgctaaccctgatatcctcgatggagtggatgatttgatccagatgagttacttgaatgaaccttcagttctttacaatctgcaattgcgatattctcgtgatcttatctatacaaaggcaggacctgttctgattgctgtcaatccattaaaagaagttgctctctatgggaagtcttcaatcatgcaatacaagcaaaaggccaacgatgacccacatgtgtatgcagttgctgatttggcatttaacgagatgctgcaagatggcataaaccaatctataataataagtggtgaaagtggatcaggaaaaaccgagacagctaaaattgcaatgcaatatttgtctgatcttgggggtgctagtggtacggagtctgaggttcttcagaccaatgttattctggaagcattggggaatgcaaaaacatcacgaaaccataactcaagccgatttggcaagcttattgaaatacacttctctgaatctggtaaaatgtgtggtgctaaaatccagaccttcctgcttgagaagtcgagggtggtccaaagggcacaaggagagagatcttaccacattttctatcaactgtgctctggagctcctccccttctcaaaaaaaaattgtttctgaaaagcgccaatgactacaattacttgaagcagagtaattgcttgaaaatcgatggtgttgatgattcaaaaaaattcacagtgctagtggatgcattggatacaattcaaatatctaaggaagaccaaatgaaattattttctatgcttgcagctgtcttgtggctggggaacatatcattctgtgtgattgataatgaaaaccatgtggaagttgtttcaaacgaaggattgtctactgctgcaaagctattaggctgcactgcaaatcaactagtgattgctttgtccacttgtaaaatccgagctggaaatgacagtattgttaaaaagctaacattaactcaggccattgacgcaagagatgcactagcgaagtcaatctatgccaatttatttgactggattgttgaccaaattaaccactcacttggaacagggaggcaatttacatggagatccataagtattttggatatttatgggtttgagtgtttcaataagaatggttttgagcaattttgtataaattatgccaatgagaggctgcagcagcacttcaacagacatcttctcaaactacaacaggaggaatacttggaagacggaattgattggacccccatggaatttgtggataacactaattgcttatctctctttgagaagaaacatctagggctattgtcattattggatgaagagtctactttcccaaaggcatccgatttttcctttgctaacaagcttaagcggcaattaagtggtaactcttgcttcaaaagtgaaaaagaaggcacatttaagatttgccattatgcaggggaggtgacatatgatacagctgggttcctggagaagaacagagacccattgcactctgagtcaatccaactactctcatcatgtacatgtgaactttcaaaacattttgcctctgtcatggttgctgattctcagaataaatcaagtctgtcatggcattcagtaaaggatacacataaacaaagtgttgtcatggaatttaaggctcaactgttcaagctgatgcagcagttggagagtacaaccccacattttatccaatgcattcaaccaaatagcaaacatcatcccaggttattcgagcatgatcttgttttgcaccagcttaaatgctgtggtgtgtttgaagttgttcggatatcaagaacatgctatccaactaggatcacccaccaacagtttgctgaaagatacagatttcttctcttgcgttccattgcatctcaagatccacttagtgtttcaattgctgttttgcaaaagttcaacattccccctgaaatgtatcaagttggctacacaaaattatttttccgtacaggacaggttgctgcactggaaaatgctaaaagacagatgcttcttggaaccctccatattcaaacacagttccggggtttgcattctcggcggggatatcaacgactaaagaaaggggcgatgaatttgcaatcatttatacgtggtgaaagaacaagaatacactttgataatcttgtcaagagatggagggcagctgttctcatacagaaacacactaggcgtcgacttgcagctaacatgttcaatgatcaactgaatcatgtcattcttcttcagtccgtgacgcgtgggttcctggccagaaggaaatacaagtgtctgcagaatgaaaaggagtcaaaggccagtcacagcatagttcaagggaacacaaggaagaataactcagagtcaagaatatgccatgaaatgaatgggcattatcctcacgaaccagtcatcactgagcttcagggtcgtatcacgaaagctgaggctgcattgcggggtaaggaggaggaaaatgtaatgctcaaacagcaattggaacagtatgagaggaaatggtcagaatatgaagccaaaatgaaatgtatggaagaggcatggaagaggcagctctcttctctgcagtatgactctgaagatacattatccaccgggactcgtacacctgaagtgatcgagtcgaaacacgacaaccacaaccctgaagctaaagtttcagcaggaaactcggataggcgagtgaatgctgtgaaccacctagcaaaggagtttgaagacagacgacaggtgttcgaagacgatgcgggcttcctagttgcagtcaggtccggtcagattggttcaaatatgaacccagatgaggaactccggaagctcaaggaccgctttgcgacatggaaaaaagactacaaatctcggttgaaggagactaaggtaaaccttagtaaggttggcacccatgatgagaaatcacggaaaagatggtggggaaagaagagctcgaagtgaaacgtgtaagagaatctccacaacattttgcaacgacactgggtcaaggaaagtggccaggaatgccagggcaggcgagaagaatctgcctctgatcccaaaagcttggtgagatgatgaactcccatgttggtggcagtgccgttactcatctgatgtcacgagtgtcgaaaagatcaaagtagacaataggtgaagccagagttctgtacatgtatattagtcagctctgagtcatcacttgacagtgtgtttatgtcatcgtgtatgtagagtgataaatccgaggcgtggaagggtaactaaatgcagattatccaccatgagcgaagagatgcgaaagcagagtactgtaatatgtgtacagtgagaacattgttgaaatgtgcaaggcattttactctgaaaactgtgattgcatcgccccatattttgcactatcttttgagacctttacacttacacatcagttttattttttt

SEQ ID NO: 70080 - DNA, 665 bp, Zea Mays
gttgccattgtgctttgttgatttatagcttttcgatgggcacaacgaatcaagagctaccatatacgtaagggagaatctgttgaacaatgtcttgcatgccattcgtacatgtgttctgcatggaggagtggcttgtcgtactcccacgtgcgcttgttgcagcgttcgtcaaaaccgataaagatttctacgttgtggataaattccaagcaaatatggttgcataccaaaacttggttacaaagtcaatgtatgataaatacctttgcttatctcttcgctcgcaaaaagcgccacaaggctggagcttcagtgcatgccaggacccttggcccaaaaggttctgaccctcacaaggcggctgtcattggttacaccattggagatcctctcaaggacacgtctggcccctccctcaacattctcatcaagcttatggcggttgaatcccttgtcttcgccccctacttcgccgcccatggtggcattacatgtgtgttgtgtaatagcatctgtatagagaaacaatacactcagagctagaccactgacgacgaacctctgtgcaaactttgtcaaggactttgcaagtaacaactccttgtgtttcgaagtaaatcctgtttttattataaacaaataaaatttggtcacaataatat

SEQ ID NO: 70081 - DNA, 1441 bp, Zea Mays
caaagatgtcctgggtcttctcgttgcagaagccagcggatgccagggtcttctcgatgaactcgtgctgctcctgctcgcggttgctgtctcctttggtagaacactgcggaggagcctcttgggaagcgtcgtcccacgacaaggtcctcgcgatcgatcccccctgaacctacctcccgacgccctccgagtctccgacggatcaggatctgctgacgttgggtggcgtgagcggttccctccgacgaagacgatccctccgcctcgtggcgtgagcggttccctccgacgaagacgatccctccgcctcaacctctgctgccacgaccgtcgcgcccccacggcaccgaatgcctcggcgacctgctcgaccaggactagcttttcgatgggcacaacgaatcaagagctaccatatacattccaagcaaatatggttgcataccaaaacttggttacaaagtcaatgtatgataaatacctttgcttatctcttcgctcgcaaaaagcgccacaaggtattctcacatcttcacttccctgtatgctaaccaagttctcaaactttttttgtcattaacctctctgctagaccccatgctatctaattttataataagtacaaccaggttgctaacttggtatcctcctccattcctaaataaatcagttcttacagttgtattaggttaaacttttagatttttagtaaaatttatagaaaacaccacacatatattggtatcattatatactcaaaaatatatagcagttctcgttatggatctgtccaaggttattattattaagaaactacaaagggttctttagctccattttttctagaacacacaggagagctgcacattttttagatcaagagaagacaatgtcttatatgaagaccaagtacaaggcgctatataagcagccaaggaacttatacacaccaccactgctgacatgctcagcacctctgtcgtcgcggttgtcgtgcgcgcgcagcctagggacttctgcgtcatcaggcaggagtggactgtcgtgcgcatccagttcacctccttgcattcctggctggagcttcagtgcatgccaggacccttggcccaaaaggttctgaccctcacaaggcggctgtcattggttacaccattggagatcctctcaaggacacgtctggcccctccctcaacattctcatcaagcttatggcggttgaatcccttgtcttcgccccctacttcgccgcccatggtggcattacatgtgtgttgtgtaatagcatctgtatagagaaacaatacactcagagctagaccactgacgacgaacctctgtgcaaactttgtcaaggactttgcaagtaacaactccttgtgtttcgaagtaaatcctgtttttattataaacaaataaaatttggtcacaataatat

SEQ ID NO: 70082 - DNA, 883 bp, Zea Mays
caaagatgtcctgggtcttctcgttgcagaagccagcggatgccagggtcttctcgatgaactcgtgctgctcctgctcgcggttgctgtctcctttggtagaacactgcggaggagcctcttgggaagcgtcgtcccacgacaaggtcctcgcgatcgatcccccctgaacctacctcccgacgccctccgagtctccgacggatcaggatctgctgacgttgggtggcgtgagcggttccctccgacgaagacgatccctccgcctcgtggcgtgagcggttccctccgacgaagacgatccctccgcctcaacctctgctgccacgaccgtcgcgcccccacggcaccgaatgcctcggcgacctgctcgaccaggactagcttttcgatgggcacaacgaatcaagagctaccatatacattccaagcaaatatggttgcataccaaaacttggttacaaagtcaatgtatgataaatacctttgcttatctcttcgctcgcaaaaagcgccacaaggctggagcttcagtgcatgccaggacccttggcccaaaaggttctgaccctcacaaggcggctgtcattggttacaccattggagatcctctcaaggacacgtctggcccctccctcaacattctcatcaagcttatggcggttgaatcccttgtcttcgccccctacttcgccgcccatggtggcattacatgtgtgttgtgtaatagcatctgtatagagaaacaatacactcagagctagaccactgacgacgaacctctgtgcaaactttgtcaaggactttgcaagtaacaactccttgtgtttcgaagtaaatcctgtttttattataaacaaataaaatttggtcacaataatat

SEQ ID NO: 70083 - DNA, 945 bp, Zea Mays
caaagatgtcctgggtcttctcgttgcagaagccagcggatgccagggtcttctcgatgaactcgtgctgctcctgctcgcggttgctgtctcctttggtagaacactgcggaggagcctcttgggaagcgtcgtcccacgacaaggtcctcgcgatcgatcccccctgaacctacctcccgacgccctccgagtctccgacggatcaggatctgctgacgttgggtggcgtgagcggttccctccgacgaagacgatccctccgcctcgtggcgtgagcggttccctccgacgaagacgatccctccgcctcaacctctgctgccacgaccgtcgcgcccccacggcaccgaatgcctcggcgacctgctcgaccaggactagcttttcgatgggcacaacgaatcaagagctaccatatacgtaagggagaatctgttgaacaatgtcttgcatgccattcgtacatgtgttctgcatggaggagtggcttgtcgtactcccacgtgcgcttgttgcagcgttcgtcaaaaccgataaagatttctacgttgtggataagtatatttgacaatacctacgaaacaagtgtaatattttttagtgcttaggcagaaatgcagtgcacaggtgtatcatttgtcagtttctattttcctgtgggaggagaacatttgagagctttgtttatagtccagagtttcctttgttaattgcctttccaaacacactaatgatggatttctatctttctaaacagattccaagcaaatatggttgcataccaaaacttggttacaaagtcaatgtatgataaatacctttgcttatctcttcgctcgcaaaaagcgccacaaggcagtgctgcactcaagatggtggaggaagtccgccggcagttcaacaccatccctgggctcatggagggcaccacaaagcctgact

SEQ ID NO: 70084 - DNA, 1015 bp, Zea Mays
ctcaacctctgctgccacgaccgtcgcgcccccacggcaccgaatgcctcggcgacctgctcgaccaggactagcttttcgatgggcacaacgaatcaagagctaccatatacgtaagggagaatctgttgaacaatgtcttgcatgccattcgtacatgtgttctgcatggaggagtggcttgtcgtactcccacgtgcgcttgttgcagcgttcgtcaaaaccgataaagatttctacgttgtggataagtatatttgacaatacctacgaaacaagtgtaatattttttagtgcttaggcagaaatgcagtgcacaggtgtatcatttgtcagtttctattttcctgtgggaggagaacatttgagagctttgtttatagtccagagtttcctttgttaattgcctttccaaacacactaatgatggatttctatctttctaaacagattccaagcaaatatggttgcataccaaaacttggttacaaagtcaatgtatgataaatacctttgcttatctcttcgctcgcaaaaagcgccacaaggtattctcacatcttcacttccctgtatgctaaccaagttctcaaactttttttgtcattaacctctctgctagaccccatgctatctaattttataataagtacaaccaggttgctaacttggtatcctcctccattcctaaataaatcagttcttacagttgtattaggttaaacttttagatttttagtaaaatttatagaaaacaccacacatatattggtatcattatatactcaaaaatatatagcagttctcgttatggatctgtccaaggttattattattaagaaactacaaagggttctttagctccattttttctagaacacacaggagagctgcacattttttagatcaagagaagacaatgtcttatatgaagaccaagtacaaggcgctatataagcagccaaggaacttatacacaccaccactgctgacatgctcagcacctctgtcgtcg

SEQ ID NO: 70085 - DNA, 2097 bp, Zea Mays
aaattactctgctcataaacaatggaaaattgagagagcgagagagaggaagctagcgagaaggtcaagccgcgaagagaagagacgcacgtcacagatccctctccactgtctcaccctttctctctcctcgaccctcccgacgcggcaaagcaaaaacaaagggaggagaggagggagagaagggagaagacgaggccaaaaatcccctccccctccccaaatcctagcccaataatctctcaatcaggggattcttaggtctgatcaggtcggaggattcggcagggcgcagccatgaacgaaaaggcgtccgtctccaaggagctcaacgccaagcacaagaagatattggaaggtcttctacggcatcctgagaatagagaatgcgcagactgcaagtcaaagggtcctcgatgggcaagtgtgaatctagcaatgggaaacgaaaaagcaaatagctattgggaagcagagctgcctcctaactacgatagggttggaatagagaatttcatccgtgcaaatatgaggacaagagatgggtaccaaggaatggaacatcaaaatcttcgtccagtgttcgagatgagaagagccaagagtctccggctagtgctaataggagtggacatggtcatagatcttcatttgagcaaaaccgtgcttcaccagctcttccgagcaaagttgcacatgcagcttcaaggatatcctctcaggcatcacctcagcccccgaaggtagaaacaccagttccaaaggtggttttacctcctcagtcacagaaatcccccgccaaagttgatgcaacaccgcctaaagttgagaagccatcggttacaccacctcctaaagttgattatgccactgatctctttaacatgttgtcaatggatggaacaacagagaaagagtcagcgtcatcttcaaacgacgataatggctgggatggcttccagtctgcacaaccagtacctagttcagagaaaaaagattctgccaaaccagcagaaagcaagacccagtctacatctggaatggaagacttatttaaagactcaccagctgtgccattatcctcagctccagctgtttcccaagtaaacgctaagaatgatatcatgagtttgtttgagaagtccaatatggtatcacctttcgctgcccatcaacagcagctggcgctcatgtctcagcagcaagctcttctaatggctgctctcaaagctggaaatgcaccacaaatgatgattccagggactgccaatcagctaaatgctaacggaaccttgcctttccaaaactggacaaatctttatcaaaatcctgggtcgactccagcagcagcacagaatggtgccaccaaggttgctaacaacaatcaggacttctcttctggtaccttcggttttggcacacctggggtgtacaacattagcccaactgtcccagcaaatggggccacgacagcaggtgctatcaacaacggcactgcatcaactgcctcttctactctcccctcacaatctggcaaagactatgatttttcgtccttaactcaaggatttttcaccaaacgatgagcgcctagtgagcttgaaaaccaaacagaccacaggatcatgttggacgaggcatattgatttagggagcacaaggggcttacacatgcttatttcgaggcagattttcttctggtggatatattgttgtttcatgaccttgtagctgtcggacaataagagtggaaatatgccgcaaaatagctttgttgtttctaaaagcgaagaatacattgccggttatgtcaacggcttttactcgaggaccaccttgtcagttatacaagtctaatgcagtcttttcactatgttggtcttgatttatctacgacgtcgatactgattacagattgttttgtattgtattttacgacaattggattttatttgtttctacatttgtatattgtttgtgagatgggagaaacctcttcaaggcgttgaaccaaacgtacttttccaacatttcatatatatcttaaatagttacatttaccacttgtcaccattgaaaccatttttatcaggaatc

SEQ ID NO: 70086 - DNA, 2232 bp, Zea Mays
aaattactctgctcataaacaatggaaaattgagagagcgagagagaggaagctagcgagaaggtcaagccgcgaagagaagagacgcacgtcacagatccctctccactgtctcaccctttctctctcctcgaccctcccgacgcggcaaagcaaaaacaaagggaggagaggagggagagaagggagaagacgaggccaaaaatcccctccccctccccaaatcctagcccaataatctctcaatcaggggattcttaggtctgatcaggtcggaggattcggcagggcgcagccatgaacgaaaaggcgtccgtctccaaggagctcaacgccaagcacaagaagatattggaaggtcttctacggcatcctgagaatagagaatgcgcagactgcaagtcaaagggtcctcgatgggcaagtgtgaatctaggtatctttatatgcatgacatgttctggcattcatagaagcctgggggtgcacatatctaaggtaagatctgccaccctggatacatggctgccagagcaagttgcatttattcaatgtatggattactagctgcaatgggaaacgaaaaagcaaatagctattgggaagcagagctgcctcctaactacgatagggttggaatagagaatttcatccgtgcaaaatatgaggacaagagatgggtaccaaggaatggaacatcaaaatcttcgtccagtgttcgagatgagaagagccaagagtctccggctagtgctaataggagtggacatggtcatagatcttcatttgagcaaaaccgtgcttcaccagctcttccgagcaaagttgcacatgcagcttcaaggatatcctctcaggcatcacctcagcccccgaaggtagaaacaccagttccaaaggtggttttacctcctcagtcacagaaatcccccgccaaagttgatgcaacaccgcctaaagttgagaagccatcggttacaccacctcctaaagttgattatgccactgatctctttaacatgttgtcaatggatggaacaacagagaaagagtcagcgtcatcttcaaacgacgataatggctgggatggcttccagtctgcacaaccagtacctagttcagagaaaaaagattctgccaaaccagcagaaagcaagacccagtctacatctggaatggaagacttatttaaagactcaccagctgtgccattatcctcagctccagctgtttcccaagtaaacgctaagaatgatatcatgagtttgtttgagaagtccaatatggtatcacctttcgctgcccatcaacagcagctggcgctcatgtctcagcagcaagctcttctaatggctgctctcaaagctggaaatgcaccacaaatgatgattccagggactgccaatcagctaaatgctaacggaaccttgcctttccaaaactggacaaatctttatcaaaatcctgggtcgactccagcagcagcacagaatggtgccaccaaggttgctaacaacaatcaggacttctcttctggtaccttcggttttggcacacctggggtgtacaacattagcccaactgtcccagcaaatggggccacgacagcaggtgctatcaacaacggcactgcatcaactgcctcttctactctcccctcacaatctggcaaagactatgatttttcgtccttaactcaaggatttttcaccaaacgatgagcgcctagtgagcttgaaaaccaaacagaccacaggatcatgttggacgaggcatattgatttagggagcacaaggggcttacacatgcttatttcgaggcagattttcttctggtggatatattgttgtttcatgaccttgtagctgtcggacaataagagtggaaatatgccgcaaaatagctttgttgtttctaaaagcgaagaatacattgccggttatgtcaacggcttttactcgaggaccaccttgtcagttatacaagtctaatgcagtcttttcactatgttggtcttgatttatctacgacgtcgatactgattacagattgttttgtattgtattttacgacaattggattttatttgtttctacatttgtatattgtttgtgagatgggagaaacctcttcaaggcgttgaaccaaacgtacttttccaacatttcatatatatcttaaatagttacatttaccacttgtcaccattgaaaccatttttatcaggaatc

SEQ ID NO: 70087 - DNA, 2135 bp, Zea Mays
cgcaccatgaccatcgtcattgtcaaaccacagaaataaattactctgctcataaacaatggaaaattgagagagcgagagagaggaagctagcgagaaggtcaagccgcgaagagaagagacgcacgtcacagatccctctccactgtctcaccctttctctctcctcgaccctcccgacgcggcaaagcaaaaacaaagggaggagaggagggagagaagggagaagacgaggccaaaaatcccctccccctccccaaatcctagcccaataatctctcaatcaggggattcttaggtctgatcaggtcggaggattcggcagggcgcagccatgaacgaaaaggcgtccgtctccaaggagctcaacgccaagcacaagaagatattggaaggtcttctacggcatcctgagaatagagaatgcgcagactgcaagtcaaagggtcctcgatgggcaagtgtgaatctagcaatgggaaacgaaaaagcaaatagctattgggaagcagagctgcctcctaactacgatagggttggaatagagaatttcatccgtgcaaaatatgaggacaagagatgggtaccaaggaatggaacatcaaaatcttcgtccagtgttcgagatgagaagagccaagagtctccggctagtgctaataggagtggacatggtcatagatcttcatttgagcaaaaccgtgcttcaccagctcttccgagcaaagttgcacatgcagcttcaaggatatcctctcaggcatcacctcagcccccgaaggtagaaacaccagttccaaaggtggttttacctcctcagtcacagaaatcccccgccaaagttgatgcaacaccgcctaaagttgagaagccatcggttacaccacctcctaaagttgattatgccactgatctctttaacatgttgtcaatggatggaacaacagagaaagagtcagcgtcatcttcaaacgacgataatggctgggatggcttccagtctgcacaaccagtacctagttcagagaaaaaagattctgccaaaccagcagaaagcaagacccagtctacatctggaatggaagacttatttaaagactcaccagctgtgccattatcctcagctccagctgtttcccaagtaaacgctaagaatgatatcatgagtttgtttgagaagtccaatatggtatcacctttcgctgcccatcaacagcagctggcgctcatgtctcagcagcaagctcttctaatggctgctctcaaagctggaaatgcaccacaaatgatgattccagggactgccaatcagctaaatgctaacggaaccttgcctttccaaaactggacaaatctttatcaaaatcctgggtcgactccagcagcagcacagaatggtgccaccaaggttgctaacaacaatcaggacttctcttctggtaccttcggttttggcacacctggggtgtacaacattagcccaactgtcccagcaaatggggccacgacagcaggtgctatcaacaacggcactgcatcaactgcctcttctactctcccctcacaatctggcaaagactatgatttttcgtccttaactcaaggatttttcaccaaacgatgagcgcctagtgagcttgaaaaccaaacagaccacaggatcatgttggacgaggcatattgatttagggagcacaaggggcttacacatgcttatttcgaggcagattttcttctggtggatatattgttgtttcatgaccttgtagctgtcggacaataagagtggaaatatgccgcaaaatagctttgttgtttctaaaagcgaagaatacattgccggttatgtcaacggcttttactcgaggaccaccttgtcagttatacaagtctaatgcagtcttttcactatgttggtcttgatttatctacgacgtcgatactgattacagattgttttgtattgtattttacgacaattggattttatttgtttctacatttgtatattgtttgtgagatgggagaaacctcttcaaggcgttgaaccaaacgtacttttccaacatttcatatatatcttaaatagttacatttaccacttgtcaccattgaaaccatttttatcaggaatc

SEQ ID NO: 70088 - DNA, 2204 bp, Zea Mays
aaaccctcgcaccatgaccatcgtcattgtcaaaccacagaaataaattactctgctcataaacaatggaaaattgagagagcgagagagaggaagctagcgagaaggtcaagccgcgaagagaagagacgcacgtcacagatccctctccactgtctcaccctttctctctcctcgaccctcccgacgcggcaaagcaaaaacaaagggaggagaggagggagagaagggagaagacgaggccaaaaatcccctccccctccccaaatcctagcccaataatctctcaatcaggggattcttaggtctgatcaggtcggaggattcggcagggcgcagccatgaacgaaaaggcgtccgtctccaaggagctcaacgccaagcacaagaagatattggaaggtcttctacggcatcctgagaatagagaatgcgcagactgcaagtcaaagggtcctcgatgggcaagtgtgaatctaggtatctttatatgcatgacatgttctggcattcatagaagcctgggggtgcacatatctaagcaatgggaaacgaaaaagcaaatagctattgggaagcagagctgcctcctaactacgatagggttggaatagagaatttcatccgtgcaaaatatgaggacaagagatgggtaccaaggaatggaacatcaaaatcttcgtccagtgttcgagatgagaagagccaagagtctccggctagtgctaataggagtggacatggtcatagatcttcatttgagcaaaaccgtgcttcaccagctcttccgagcaaagttgcacatgcagcttcaaggatatcctctcaggcatcacctcagcccccgaaggtagaaacaccagttccaaaggtggttttacctcctcagtcacagaaatcccccgccaaagttgatgcaacaccgcctaaagttgagaagccatcggttacaccacctcctaaagttgattatgccactgatctctttaacatgttgtcaatggatggaacaacagagaaagagtcagcgtcatcttcaaacgacgataatggctgggatggcttccagtctgcacaaccagtacctagttcagagaaaaaagattctgccaaaccagcagaaagcaagacccagtctacatctggaatggaagacttatttaaagactcaccagctgtgccattatcctcagctccagctgtttcccaagtaaacgctaagaatgatatcatgagtttgtttgagaagtccaatatggtatcacctttcgctgcccatcaacagcagctggcgctcatgtctcagcagcaagctcttctaatggctgctctcaaagctggaaatgcaccacaaatgatgattccagggactgccaatcagctaaatgctaacggaaccttgcctttccaaaactggacaaatctttatcaaaatcctgggtcgactccagcagcagcacagaatggtgccaccaaggttgctaacaacaatcaggacttctcttctggtaccttcggttttggcacacctggggtgtacaacattagcccaactgtcccagcaaatggggccacgacagcaggtgctatcaacaacggcactgcatcaactgcctcttctactctcccctcacaatctggcaaagactatgatttttcgtccttaactcaaggatttttcaccaaacgatgagcgcctagtgagcttgaaaaccaaacagaccacaggatcatgttggacgaggcatattgatttagggagcacaaggggcttacacatgcttatttcgaggcagattttcttctggtggatatattgttgtttcatgaccttgtagctgtcggacaataagagtggaaatatgccgcaaaatagctttgttgtttctaaaagcgaagaatacattgccggttatgtcaacggcttttactcgaggaccaccttgtcagttatacaagtctaatgcagtcttttcactatgttggtcttgatttatctacgacgtcgatactgattacagattgttttgtattgtattttacgacaattggattttatttgtttctacatttgtatattgtttgtgagatgggagaaacctcttcaaggcgttgaaccaaacgtacttttccaacatttcatatatatcttaaatagttacatttaccacttgtcaccattgaaaccatttttatcaggaatc

SEQ ID NO: 70089 - DNA, 2200 bp, Zea Mays
agcaaaccctcgcaccatgaccatcgtcattgtcaaaccacagaaataaattactctgctcataaacaatggaaaattgagagagcgagagagaggaagctagcgagaaggtcaagccgcgaagagaagagacgcacgtcacagatccctctccactgtctcaccctttctctctcctcgaccctcccgacgcggcaaagcaaaaacaaagggaggagaggagggagagaagggagaagacgaggccaaaaatcccctccccctccccaaatcctagcccaataatctctcaatcaggggattcttaggtctgatcaggtcggaggattcggcagggcgcagccatgaacgaaaaggcgtccgtctccaaggagctcaacgccaagcacaagaagatattggaaggtcttctacggcatcctgagaatagagaatgcgcagactgcaagtcaaagggtcctcgatgggcaagtgtgaatctaggtaagatctgccaccctggatacatggctgccagagcaagttgcatttattcaatcaatgggaaacgaaaaagcaaatagctattgggaagcagagctgcctcctaactacgatagggttggaatagagaatttcatccgtgcaaaatatgaggacaagagatgggtaccaaggaatggaacatcaaaatcttcgtccagtgttcgagatgagaagagccaagagtctccggctagtgctaataggagtggacatggtcatagatcttcatttgagcaaaaccgtgcttcaccagctcttccgagcaaagttgcacatgcagcttcaaggatatcctctcaggcatcacctcagcccccgaaggtagaaacaccagttccaaaggtggttttacctcctcagtcacagaaatcccccgccaaagttgatgcaacaccgcctaaagttgagaagccatcggttacaccacctcctaaagttgattatgccactgatctctttaacatgttgtcaatggatggaacaacagagaaagagtcagcgtcatcttcaaacgacgataatggctgggatggcttccagtctgcacaaccagtacctagttcagagaaaaaagattctgccaaaccagcagaaagcaagacccagtctacatctggaatggaagacttatttaaagactcaccagctgtgccattatcctcagctccagctgtttcccaagtaaacgctaagaatgatatcatgagtttgtttgagaagtccaatatggtatcacctttcgctgcccatcaacagcagctggcgctcatgtctcagcagcaagctcttctaatggctgctctcaaagctggaaatgcaccacaaatgatgattccagggactgccaatcagctaaatgctaacggaaccttgcctttccaaaactggacaaatctttatcaaaatcctgggtcgactccagcagcagcacagaatggtgccaccaaggttgctaacaacaatcaggacttctcttctggtaccttcggttttggcacacctggggtgtacaacattagcccaactgtcccagcaaatggggccacgacagcaggtgctatcaacaacggcactgcatcaactgcctcttctactctcccctcacaatctggcaaagactatgatttttcgtccttaactcaaggatttttcaccaaacgatgagcgcctagtgagcttgaaaaccaaacagaccacaggatcatgttggacgaggcatattgatttagggagcacaaggggcttacacatgcttatttcgaggcagattttcttctggtggatatattgttgtttcatgaccttgtagctgtcggacaataagagtggaaatatgccgcaaaatagctttgttgtttctaaaagcgaagaatacattgccggttatgtcaacggcttttactcgaggaccaccttgtcagttatacaagtctaatgcagtcttttcactatgttggtcttgatttatctacgacgtcgatactgattacagattgttttgtattgtattttacgacaattggattttatttgtttctacatttgtatattgtttgtgagatgggagaaacctcttcaaggcgttgaaccaaacgtacttttccaacatttcatatatatcttaaatagttacatttaccacttgtcaccattgaaaccatttttatcaggaatc

SEQ ID NO: 70090 - DNA, 1038 bp, Zea Mays
atgttgcaatggacatgttttccatggttggtttgctgcctcttctggaatgtcatagcagttactacagcttggatcaagggggaaggcgttaagatctggttgttggcaataatctacttcatatctggtgttcctggtgcatatgttttgtggtatcgtcctctatataatgcaatgaggactgatagcgcattgaagtttggattgttcttcttgctttacgtattccacattcttttctgcgtattttctgctgtggctcctcctgttgtatttgaaggaaaatcattggcaggaattttgccagcaattgatcttattagcgtgaatgctttggttgggatattctactttgttggatttggactgttctgtctggaatcattgcttagcatctgggtcatccagcaagtgtacatgtacttccgtggaagtggaaaggctgcagagatgaagcgtgatgcgacgaggggtgcaatgagagccgcattttaagtgtggtgtggtattttttttgtgatgacagtcctaggcccaagcgcatacttccggtggataggttgtgcaccgaacaaaaagcagatgtttcttccttggttgctgactatgataccaaactgccagtaggttatcatgatgttacaagtgacattatatcactccccgtcctgatctaacaagaatggggaatgtgcagcttttacagctttacttaatcgttttgttcttgctagttgaaatgtggaatggattatgaatcaagtttagttaagttgtacagtgctgttaactatttgtactccttttgaacggctattggtacttcgttggaacaataatacagtggtgatattggcggaagcatttggcaaggcagcaaatgatcatgcgtgatcgtgtattgtttgaatgcggtgtttgaagcgtgtgcgtcttcaattgaaaaggaatggttttgcaaaattagatgcttagcttattttgatgtcatggagtggtatgaaaataagctagtttttagcttttaaaaaaaat

SEQ ID NO: 70091 - DNA, 1594 bp, Zea Mays
gtttggcccacgagcggttactgggtggacaggtggctccgcgtgtgcgcgttcacccgcctcatcctctccttcgcaagacggcaaagaggagtcgccatcgcccgccccatctagtcggtgtcggtgtggtgtgggggcggtgctgcgcgtgtgcgctcctctgttcggcaggactccttcaagcagaaggggcggagcagcatggcggggcgctacgacggcaaccccttcgaggaggaggacgtgaaccctttctcggaacaagcgcgcggcaaggctggcgggcagtccaacttcggcggtggtgcgttttacatgcctaacaccagaaacatgcctcctgcatccaattcgcgcctttcgccgcttcctcctgaaccagcagacttcagtgctacagtggacatacccctggactcgtcaaaggacctgaagagaagggagaaggagctgcaagcaagggaagcggaattgaacaagagggagaaggaactaaaacggagagaggaggctgcagcgagagctggcattgtcattgaggagaaaaattggcctccttttctgccactcatccatcatgatatcaccaatgagataccgagtcaccttcaaagaatgcaatatgttgcatttgcgtcgtttcttgggttggtttgctgcctcttctggaatgtcatagcagttactacagcttggatcaagggggaaggcgttaagatctggttgttggcaataatctacttcatatctggtgttcctggtgcatatgttttgtggtatcgtcctctatataatgcaatgaggactgatagcgcattgaagtttggattgttcttcttgctttacgtaaggaattttgccagcaattgatcttattagcgtgaatgctttggttgggatattctactttgttggatttggactgttctgtctggaatcattgcttagcatctgggtcatccagcaagtgtacatgtacttccgtggaagtggaaaggctgcagagatgaagcgtgatgcgacgaggggtgcaatgagagccgcattttaagtgtggtgtggtattttttttgtgatgacagtcctaggcccaagcgcatacttccggtggataggttgtgcaccgaacaaaaagcagatgtttcttccttggttgctgactatgataccaaactgccagtaggttatcatgatgttacaagtgacattatatcactccccgtcctgatctaacaagaatggggaatgtgcagcttttacagctttacttaatcgttttgttcttgctagttgaaatgtggaatggattatgaatcaagtttagttaagttgtacagtgctgttaactatttgtactccttttgaacggctattggtacttcgttggaacaataatacagtggtgatattggcggaagcatttggcaaggcagcaaatgatcatgcgtgatcgtgtattgtttgaatgcggtgtttgaagcgtgtgcgtcttcaattgaaaaggaatggttttgcaaaattagatgcttagcttattttgatgtcatggagtggtatgaaaataagctagtttttagcttttaaaaaaaat

SEQ ID NO: 70092 - DNA, 1654 bp, Zea Mays
gtttggcccacgagcggttactgggtggacaggtggctccgcgtgtgcgcgttcacccgcctcatcctctccttcgcaagacggcaaagaggagtcgccatcgcccgccccatctagtcggtgtcggtgtggtgtgggggcggtgctgcgcgtgtgcgctcctctgttcggcaggactccttcaagcagaaggggcggagcagcatggcggggcgctacgacggcaaccccttcgaggaggaggacgtgaaccctttctcggaacaagcgcgcggcaaggctggcgggcagtccaacttcggcggtggtgcgttttacatgcctaaacatgcctcctgcatccaattcgcgcctttcgccgcttcctcctgaaccagcagacttcagtgctacagtggacatacccctggactcgtcaaaggacctgaagagaagggagaaggagctgcaagcaagggaagcggaattgaacaagagggagaaggaactaaaacggagagaggaggctgcagcgagagctggcattgtcattgaggagaaaaattggcctccttttctgccactcatccatcatgatatcaccaatgagataccgagtcaccttcaaagaatgcaatatgttgcatttgcgtcgtttcttgggttggtttgctgcctcttctggaatgtcatagcagttactacagcttggatcaagggggaaggcgttaagatctggttgttggcaataatctacttcatatctggtgttcctggtgcatatgttttgtggtatcgtcctctatataatgcaatgaggactgatagcgcattgaagtttggattgttcttcttgctttacgtattccacattcttttctgcgtattttctgctgtggctcctcctgttgtatttgaaggaaaatcattggcaggaattttgccagcaattgatcttattagcgtgaatgctttggttgggatattctactttgttggatttggactgttctgtctggaatcattgcttagcatctgggtcatccagcaagtgtacatgtacttccgtggaagtggaaaggctgcagagatgaagcgtgatgcgacgaggggtgcaatgagagccgcattttaagtgtggtgtggtattttttttgtgatgacagtcctaggcccaagcgcatacttccggtggataggttgtgcaccgaacaaaaagcagatgtttcttccttggttgctgactatgataccaaactgccagtaggttatcatgatgttacaagtgacattatatcactccccgtcctgatctaacaagaatggggaatgtgcagcttttacagctttacttaatcgttttgttcttgctagttgaaatgtggaatggattatgaatcaagtttagttaagttgtacagtgctgttaactatttgtactccttttgaacggctattggtacttcgttggaacaataatacagtggtgatattggcggaagcatttggcaaggcagcaaatgatcatgcgtgatcgtgtattgtttgaatgcggtgtttgaagcgtgtgcgtcttcaattgaaaaggaatggttttgcaaaattagatgcttagcttattttgatgtcatggagtggtatgaaaataagctagtttttagcttttaaaaaaaat

SEQ ID NO: 70093 - DNA, 1635 bp, Zea Mays
gtttggcccacgagcggttactgggtggacaggtggctccgcgtgtgcgcgttcacccgcctcatcctctccttcgcaagacggcaaagaggagtcgccatcgcccgccccatctagtcggtgtcggtgtggtgtgggggcggtgctgcgcgtgtgcgctcctctgttcggcaggactccttcaagcagaaggggcggagcagcatggcggggcgctacgacggcaaccccttcgaggaggaggacgtgaaccctttctcggaacaagcgcgcggcaaggctggcgggcagtccaacttcggcggtggtgcgttttacatgcctaacaccagaaacatgcctcctgcatccaattcgcgcctttcgccgcttcctcctgaaccagcagacttcagtgctacagtggacatacccctggactcgtcaaaggacctgaagagaagggagaaggagctgcaagcaagggaagcggaattgaacaagagggagaaggaactaaaacggagagaggaggctgcagcgagagctggcattgtcattgaggagaaaaattggcctccttttctgccactcatccatcatgatatcaccaatgagataccgagtcaccttcaaagaatgcaatatgttgcatttgcgtcgtttcttgggttggtttgctgcctcttctggaatgtcatagcagttactacagcttggatcaagggggaaggcgttaagatctggttgttggcaataatctacttcatatctggtgttcctggtgcatatgttttgtggactgatagcgcattgaagtttggattgttcttcttgctttacgtattccacattcttttctgcgtattttctgctgtggctcctcctgttgtatttgaaggaaaatcattggcaggaattttgccagcaattgatcttattagcgtgaatgctttggttgggatattctactttgttggatttggactgttctgtctggaatcattgcttagcatctgggtcatccagcaagtgtacatgtacttccgtggaagtggaaaggctgcagagatgaagcgtgatgcgacgaggggtgcaatgagagccgcattttaagtgtggtgtggtattttttttgtgatgacagtcctaggcccaagcgcatacttccggtggataggttgtgcaccgaacaaaaagcagatgtttcttccttggttgctgactatgataccaaactgccagtaggttatcatgatgttacaagtgacattatatcactccccgtcctgatctaacaagaatggggaatgtgcagcttttacagctttacttaatcgttttgttcttgctagttgaaatgtggaatggattatgaatcaagtttagttaagttgtacagtgctgttaactatttgtactccttttgaacggctattggtacttcgttggaacaataatacagtggtgatattggcggaagcatttggcaaggcagcaaatgatcatgcgtgatcgtgtattgtttgaatgcggtgtttgaagcgtgtgcgtcttcaattgaaaaggaatggttttgcaaaattagatgcttagcttattttgatgtcatggagtggtatgaaaataagctagtttttagcttttaaaaaaaat

SEQ ID NO: 70094 - DNA, 1632 bp, Zea Mays
gtttggcccacgagcggttactgggtggacaggtggctccgcgtgtgcgcgttcacccgcctcatcctctccttcgcaagacggcaaagaggagtcgccatcgcccgccccatctagtcggtgtcggtgtggtgtgggggcggtgctgcgcgtgtgcgctcctctgttcggcaggactccttcaagcagaaggggcggagcagcatggcggggcgctacgacggcaaccccttcgaggaggaggacgtgaaccctttctcggaacaagcgcgcggcaaggctggcgggcagtccaacttcggcggtggtgcgttttacatgcctaacaccagaaacatgcctcctgcatccaattcgcgcctttcgccgcttcctcctgaaccagcagacttcagtgctacagtggacatacccctggactcgtcaaaggacctgaagagaagggagaaggagctgcaagcaagggaagcggaattgaacaagagggagaaggaactaaaacggagagaggaggctgcagcgagagctggcattgtcattgaggagaaaaattggcctccttttctgccactcatccatcatgatatcaccaatgagataccgagtcaccttcaaagaatgcaatatgttgcatttgcgtcgtttcttgggttggtttgctgcctcttctggaatgtcatagcagttactacagcttggatcaagggggaaggcgttaagatctggttgttggcaataatctacttcatatctggtgttcctggtgcatatgttttgtggtatcgtcctctatataatgcaatgagaggaattttgccagcaattgatcttattagcgtgaatgctttggttgggatattctactttgttggatttggactgttctgtctggaatcattgcttagcatctgggtcatccaggtcagttttctattatcaaccgttctaattttcctgaaccaacttcagtgtgacatacttgagccctttttggaccgcgtgcagcaagtgtacatgtacttccgtggaagtggaaaggctgcagagatgaagcgtgatgcgacgaggggtgcaatgagagccgcattttaagtgtggtgtggtattttttttgtgatgacagtcctaggcccaagcgcatacttccggtggataggttgtgcaccgaacaaaaagcagatgtttcttccttggttgctgactatgataccaaactgccagtaggttatcatgatgttacaagtgacattatatcactccccgtcctgatctaacaagaatggggaatgtgcagcttttacagctttacttaatcgttttgttcttgctagttgaaatgtggaatggattatgaatcaagtttagttaagttgtacagtgctgttaactatttgtactccttttgaacggctattggtacttcgttggaacaataatacagtggtgatattggcggaagcatttggcaaggcagcaaatgatcatgcgtgatcgtgtattgtttgaatgcggtgtttgaagcgtgtgcgtcttcaattgaaaaggaatggttttgcaaaattagatgcttagcttattttgatgtcatggagtggtatgaaaataagctagtttttagcttttaaaaaaaat

SEQ ID NO: 70095 - DNA, 5844 bp, Zea Mays
atggccggcgctgcaggtgggttcgtcacgcgggcgttcgaggccatgctcaaggagtgcgccgccaaccgcggcaagttcgccgcgctgcagcaatccatccagtcatacctcgatagcatcaagggggctacggcggagggcgcggtcatcacggaggcgctcgcgtcggctgggcgcgtgctcgacggaccgcaggccgagctggtgctgcagccgctccgcctcgccgtcgagaccaagcacgtcaagctcgtcgagcccgcgctcgactgcctccacaaacttattgcttatgaccatttagaaggcgatcctggtttagaaggtggtaaaaactccccaatatttacagacatcttgaacatggtatgtggttgcgttgataacacatcctctgacagtactgttctccaagtcttgaaagtgcttctcaatgctgttgcttcaaataggtttagagttcatggagagccattgcttggggtcattagagtatgctataacattgctcttaatagcaagagccctgtgaaccaggctacctcaaaggctatgttaacccagatgatcagcattgtattcaggagaatggaatctgagcaggtttctgtattgcctgcaagctctgtggttaaagatacaccttcatctatcacaaatgaatctgaaaatggagaaatatctaccgatggccaagatgaggaaaaagttactccgggagatgcattgtctatgaatcggccttctgaagcacctccaacatctgttgaagagcttcagaatcttgctggtggagcagatattaagtttacaggggctggaagctgttctagacaaggctgttgaacttgaagatgggaagaaagtgtcacgtggaattgacctggacactgtgaacataatacagcgggatgcactattgctctttcgaactctttgcaagatgagcatgaaagaagaaagtgatgaagttgctaccaagacaaggctgctatcacttgaactgctccagggattgctagagggagtcagcaacgcattcacaaaaaatttccacttcattgattcggttaaagcatatctttcatatgctcttctgcgagcatctgtcacttcatctccagttgtttttcagggggaaattggtgtcttctttcctctgatagttttaaggtctttggatagctctgatagctccctcagccagaaggctagtgttcttaggatgttggagaaagtttgcaaagatccccaaatgcttgcagatgtgtttgtgaactatgactgtgatcttgagggaccaaatctttttgaacgcacggttagtgcactctcaagaatagcacaagggtctcaaattgctgatactaactccattgtgtcatcccagacagtttctgtaaaaggctcgtctctccagtgtttggtgagtattctgaagtcattggctgtttgggagcaacttcgaagatattccttaaagcaagggagcattgttgaatctcatgaaggggatgcttcaaggagcgtgacaactgatgagatgaagagccaagaggatgttcggaatcagtttgagagagccaaagctcataagtcgacactggaggctgcaatctcagagtttaatcgtaaaccaactaaagggattgaatatttgttgtcaaataaattgatagaaaataaggcatcatctgtagctcagtttctcaagagcaacccgggcctggataaggttatgattggtgagtacttgggacagcatgaggagttccctcttgctgtgatgcatgcctatgttgactccatgaagttttcaggattgaagtttgatgctgcaattcgtgagttcctgaaaggatttcgccttcccggtgaggcacagaagatagatcgcataatggaaaagtttgctgagcggtactgtgctgataatcctgagcttttcaaaaatgcagatactgcttatgttcttgcttatgctgttataatgttgaatactgatgcacacaatccaatggtgtggcctaagatgtcaaaatcagattttgttcgtatgaacactgcgagtgatgcagaagaatgtgccccaaaggagctcttggaagaaatttatgattccattgtcaaggaagagataaagataaaagatgattctcatgatacttcaaaaaccacaaagagacctgaaacagaagaaacaggccgtcttgtcaatatcctcaatttagcccttccaagactgaagtcagctagcgatacaaaggctgagagtgaaaagatcatcaaacagacacaggcacttttcaggaaccagggacagaagaaaggtgtttttcacgttgcacagcaggtggagcttgttaggccaatgcttgaagctgtaggatggcctttgcttgcaacattttctgtgaccatggaggaaggtgacagtaagcctagggttgtatcatgcatggaagggtttcgtgctggtatccatcttactcgtgttcttgggatggacaccatgcgctatgctttcttgacgtccttagtgaggtttacatttttgcatgctcccaaggagatgcgtagtaaaaatgtcgaggcactgaagactcttcttggtttagctgacactgatatggatgctttacaagatacttggaatgctgttttagaatgtgtatcgagactcgaatatatcacttcaaatccttcaatttctgcaactgtaatgctgggatcaaatcaaatatcaagggattctgtagtccaatcgctgaaagagttggctgggaagcctgctgaacaaatctttgtaaacagtgtaaaactgccaagtgattcaattgttgaattcttcaccgccctttgtggcgtttctgctgaagagctaaaacaaacacctgctcgtgtctttagcttgcagaagcttgtagagataagctattataacatggctcgcatacggctggtgtgggctagaatctggtctgtgttggcccagcattttattgctgctggaagccaccacgaggagaaagttgcaatgtatgccattgattcgctaagacaacttggtatgaagtacttggagcgtgctgaattaaacaacttcacatttcagagcgacatactgaaaccctttgtcattttaatgaggaatagtcacaactcaaaaatccgaggtttaattgttgattgcattgttcagttgatcaagtcaaaagttggcagcataaagtcagggtggcgttgtgtattcatgatatttactgcagcggctgatgacgaggatgaatcaattgttgagagtgcttttgaaaatgtagaacaagttatcttggaacattttgatcaagtcgttggtgattgcttcatggattgtgtcaactgtcttattggttttgcaaataacaagtgcactcctcggattagtttgaaggctattgctctcctgcgtatatgtgaagatcgtttggcagagggattcattccaggcggtgctgttaaacctattgatgttgttccagaggccaattttgatgtgtctgagcattactggtttcctatgctagctggtttgtctgatttgactttggactctagaccagaagtcagacattgtgcactggaagtgttgtttgatttgttgaatgaaagaggacataagttctcttctcccttctgggagagtatttttcatcgtgtactatttccaatttttgatcatgtaaggcatgctgggagggatggactttcttcttctggggatgattggcttcgtgatactagcattcattcactgcagttaatctgcaaccttttcaatacattctataaggaggtatcctttatgcttccacctcttctcagtttgctgcttgaatgtgcgaaaaaaacagaccaaactgtcgtttcaattgctcttggcgctttagttcatctgattgaagttggtggtcaccagttcagtgatggtgattgggatacattattaaagagtattagggatgcatcatacacaacacagcctcttgaattgctcaattcattaagatttcagaaatcaaaacaccagcagttactttcaagagaagaaagcaatgcacaaggcaatagttaccttgacagccagggggaaccctccatcagtgacagtaataatggtgagcataatcatccagaggcaggtctgcaaactatcctggagaattcagaagggagaacacaacctgccgttttcccacgtggccaaagctttggacaaagaattatgggcaatatgatggataatattttggtcagaagtcttacgtccaaatcaaaaggtcgaacagatgatattgctccaccctcacctgtgaaggcccctgatgatgaggctgacaaggctgaagaggaagaaagccctatgatggaaactgtcaggagcaaatgtattacacagttactgctgcttggggcaattgagagcatacagaagaagtattggagcaggctaaaagctacacagcagatagcaataatggatatcttgctctcactcctagaatttgcttcttcatataactcaccttcaaatcttcggacgaggatgcaccatatacctccagaaagacctccactgaatcttctccggcaagaactagctggaacaacgatttatttagatatcctccataaatcaacagtggagcaggatgaaaaggactccattgaggaaacaaatggtttaaatgtggaatctgatgaccaggaaaagatcaagtacctagcagaagggaagctggtttctttttgcggacaggttttgaaagaggcgtctgatttacagcctagcactggggaggctgccagtgcagacatacatcgtgtattagacttacgggcacctgttattgtcaaggttttgaaaggaatgtgcatcatggatgctcagatcttcaaaaggcacctgaaagagttctatccattaattaccaaacttatctgttgtgatcagatggatgttcgtggagcccttggtgatctctttagcaaacagcttactccactcatgtcctgaagtatggcagtatttcctccgttgcatatatcttgttggaatatattcgtcatcagcatttttgtgcaaacatggagcaccgtgttttccctagcgacttggatgacacaagggatgatgcttccattatacagtagagtagtgttggtgacatgtacgcattgttcaggacattgtacttgaggcctgttgttattttatggcaatagtagattatttgcggcaagcctcgtttttgtgcgtctaataaagtgaggtcctgatgtatagccttgtctgacttgcagaattgcgttggcaaattccctttgtcctccaagttgctgtaatgttgacatgacggtgcatttatctgctggtactagtgtcttgtccgtattgggttcatgcattgtttgatattccgtagttgaaagcaatgcatatatcattattttctgtattttccattaaagcaggtgcatttatcgggtttccatattttcagtcacctgtggagaatccgataagtcaagcgaatccaaccattcatttgctgccacagcaggcgcattgcaaattgtttatttggtttcgtattttcaatcatctattgagaatccgagacggtcaaggtgaatgcagcatattgtgtattgaatattgatacttcatcttgtgtactagaattgatcgctgtagaacgaatcggcaagaccgataaatccacaatgaccaacaccaacccaagtgaacaggttgcgagactcgggtcactataatatggccagaatgtttgattgtac

SEQ ID NO: 70096 - DNA, 5962 bp, Zea Mays
agacaaccaggtccgatccgcccccgccgagccgaggacagcagcgggggctctcggtctcctcctccagatcttgcacccaatccagatctcgcgccctctccgttcctctcctatgtccattccccctcctcggatctaaccactccgtccctctccccgtccccgcgtccggagctgagatccgtggtcatggccggcgctgcaggtgggttcgtcacgcgggcgttcgaggccatgctcaaggagtgcgccgccaaccgcggcaagttcgccgcgctgcagcaatccatccagtcatacctcgatagcatcaagggggctacggcggagggcgcggtcatcacggaggcgctcgcgtcggctgggcgcgtgctcgacggaccgcaggccgagctggtgctgcagccgctccgcctcgccgtcgagaccaagcacgtcaagctcgtcgagcccgcgctcgactgcctccacttcatggagagccattgcttggggtcattagagtatgctataacattgctcttaatagcaagagccctgtgaaccaggctacctcaaaggctatgttaacccagatgatcagcattgtattcaggagaatggaatctgagcaggtttctgtattgcctgcaagctctgtggttaaagatacaccttcatctatcacaaatgaatctgaaaatggagaaatatctaccgatggccaagatgaggaaaaagttactccgggagatgcattgtctatgaatcggccttctgaagcacctccaacatctgttgaagagcttcagaatcttgctggtggagcagatattaaggtattgcattggttccatctaattacaagagatcttttacaggggctggaagctgttctagacaaggctgttgaacttgaagatgggaagaaagtgtcacgtggaattgacctggacactgtgaacataatacagcgggatgcactattgctctttcgaactctttgcaagatgagcatgaaagaagaaagtgatgaagttgctaccaagacaaggctgctatcacttgaactgctccagggattgctagagggagtcagcaacgcattcacaaaaaatttccacttcattgattcggttaaagcatatctttcatatgctcttctgcgagcatctgtcacttcatctccagttgtttttcagtatgcttgcggtatattttcagttctgttgctccgttttagagagagtctgaagggggaaattggtgtcttctttcctctgatagttttaaggtctttggatagctctgatagctccctcagccagaaggctagtgttcttaggatgttggagaaagtttgcaaagatccccaaatgcttgcagatgtgtttgtgaactatgactgtgatcttgagggaccaaatctttttgaacgcacggttagtgcactctcaagaatagcacaagggtctcaaattgctgatactaactccattgtgtcatcccagacagtttctgtaaaaggctcgtctctccagtgtttggtgagtattctgaagtcattggctgtttgggagcaacttcgaagatattccttaaagcaagggagcattgttgaatctcatgaaggggatgcttcaaggagcgtgacaactgatgagatgaagagccaagaggatgttcggaatcagtttgagagagccaaagctcataagtcgacactggaggctgcaatctcagagtttaatcgtaaaccaactaaagggattgaatatttgttgtcaaataaattgatagaaaataaggcatcatctgtagctcagtttctcaagagcaacccgggcctggataaggttatgattggtgagtacttgggacagcatgaggagttccctcttgctgtgatgcatgcctatgttgactccatgaagttttcaggattgaagtttgatgctgcaattcgtgagttcctgaaaggatttcgccttcccggtgaggcacagaagatagatcgcataatggaaaagtttgctgagcggtactgtgctgataatcctgagcttttcaaaaatgcagatactgcttatgttcttgcttatgctgttataatgttgaatactgatgcacacaatccaatggtgtggcctaagatgtcaaaatcagattttgttcgtatgaacactgcgagtgatgcagaagaatgtgccccaaaggagctcttggaagaaatttatgattccattgtcaaggaagagataaagataaaagatgattctcatgatacttcaaaaaccacaaagagacctgaaacagaagaaacaggccgtcttgtcaatatcctcaatttagcccttccaagactgaagtcagctagcgatacaaaggctgagagtgaaaagatcatcaaacagacacaggcacttttcaggaaccagggacagaagaaaggtgtttttcacgttgcacagcaggtggagcttgttaggccaatgcttgaagctgtaggatggcctttgcttgcaacattttctgtgaccatggaggaaggtgacagtaagcctagggttgtatcatgcatggaagggtttcgtgctggtatccatcttactcgtgttcttgggatggacaccatgcgctatgctttcttgacgtccttagtgaggtttacatttttgcatgctcccaaggagatgcgtagtaaaaatgtcgaggcactgaagactcttcttggtttagctgacactgatatggatgctttacaagatacttggaatgctgttttagaatgtgtatcgagactcgaatatatcacttcaaatccttcaatttctgcaactgtaatgctgggatcaaatcaaatatcaagggattctgtagtccaatcgctgaaagagttggctgggaagcctgctgaacaaatctttgtaaacagtgtaaaactgccaagtgattcaattgttgaattcttcaccgccctttgtggcgtttctgctgaagagctaaaacaaacacctgctcgtgtctttagcttgcagaagcttgtagagataagctattataacatggctcgcatacggctggtgtgggctagaatctggtctgtgttggcccagcattttattgctgctggaagccaccacgaggagaaagttgcaatgtatgccattgattcgctaagacaacttggtatgaagtacttggagcgtgctgaattaaacaacttcacatttcagagcgacatactgaaaccctttgtcattttaatgaggaatagtcacaactcaaaaatccgaggtttaattgttgattgcattgttcagttgatcaagtcaaaagttggcagcataaagtcagggtggcgttgtgtattcatgatatttactgcagcggctgatgacgaggatgaatcaattgttgagagtgcttttgaaaatgtagaacaagttatcttggaacattttgatcaagtcgttggtgattgcttcatggattgtgtcaactgtcttattggttttgcaaataacaagtgcactcctcggattagtttgaaggctattgctctcctgcgtatatgtgaagatcgtttggcagagggattcattccaggcggtgctgttaaacctattgatgttgttccagaggccaattttgatgtgtctgagcattactggtttcctatgctagctggtttgtctgatttgactttggactctagaccagaagtcagacattgtgcactggaagtgttgtttgatttgttgaatgaaagaggacataagttctcttctcccttctgggagagtatttttcatcgtgtactatttccaatttttgatcatgtaaggcatgctgggagggatggactttcttcttctggggatgattggcttcgtgatactagcattcattcactgcagttaatctgcaaccttttcaatacattctataaggaggtatcctttatgcttccacctcttctcagtttgctgcttgaatgtgcgaaaaaaacagaccaaactgtcgtttcaattgctcttggcgctttagttcatctgattgaagttggtggtcaccagttcagtgatggtgattgggatacattattaaagagtattagggatgcatcatacacaacacagcctcttgaattgctcaattcattaagatttcagaaatcaaaacaccagcagttactttcaagagaagaaagcaatgcacaaggcaatagttaccttgacagccagggggaaccctccatcagtgacagtaataatggtgagcataatcatccagaggcaggtctgcaaactatcctggagaattcagaagatttaccgtcaccatcagggagaacacaacctgccgttttcccacgtggccaaagctttggacaaagaattatgggcaatatgatggataatattttggtcagaagtcttacgtccaaatcaaaaggtcgaacagatgatattgctccaccctcacctgtgaaggcccctgatgatgaggctgacaaggctgaagaggaagaaagccctatgatggaaactgtcaggagcaaatgtattacacagttactgctgcttggggcaattgagagcatacagaagaagtattggagcaggctaaaagctacacagcagatagcaataatggatatcttgctctcactcctagaatttgcttcttcatataactcaccttcaaatcttcggacgaggatgcaccatatacctccagaaagacctccactgaatcttctccggcaagaactagctggaacaacgatttatttagatatcctccataaatcaacagtggagcaggatgaaaaggactccattgaggaaacaaatggtttaaatgtggaatctgatgaccaggaaaagatcaagtacctagcagaagggaagctggtttctttttgcggacaggttttgaaagaggcgtctgatttacagcctagcactggggaggctgccagtgcagacatacatcgtgtattagacttacgggcacctgttattgtcaaggttttgaaaggaatgtgcatcatggatgctcagatcttcaaaaggcacctgaaagagttctatccattaattaccaaacttatctgttgtgatcagatggatgttcgtggagcccttggtgatctctttagcaaacagcttactccactcatgtcctgaagtatggcagtatttcctccgttgcatatatcttgttggaatatattcgtcatcagcatttttgtgcaaacatggagcaccgtgttttccctagcgacttggatgacacaagggatgatgcttccattatacagtagagtagtgttggtgacatgtacgcattgttcaggacattgtacttgaggcctgttgttattttatggcaatagtagattatttgcggcaagcctcgtttttgtgcgtctaataaagtgaggtcctgatgtatagccttgtctgacttgcagaattgcgttggcaaattccctttgtcctccaagttgctgtaatgttgacatgacggtgcatttatctgctggtactagtgtcttgtccgtattgggttcatgcattgtttgatattccgtagttgaaagcaatgcatatatcattattttctgtattttccattaaagcaggtgcatttatcgggtttccatattttcagtcacctgtggagaatccgataagtcaagcgaatccaaccattcatttgctgccacagcaggcgcattgcaaattgtttatttggtttcgtattttcaatcatctattgagaatccgagacggtcaaggtgaatgcagcatattgtgtattgaatattgatacttcatcttgtgtactagaattgatcgctgtagaacgaatcggcaagaccgataaatccacaatgaccaacaccaacccaagtgaacaggttgcgagactcgggtcactataatatggccagaatgtttgattgtac

SEQ ID NO: 70097 - DNA, 6149 bp, Zea Mays
gtgaaagcttctgaagacaaatcagccgagcgagcgtgcgtgcgtgcgagacaaccaggtccgatccgcccccgccgagccgaggacagcagcgggggctctcggtctcctcctccagatcttgcacccaatccagatctcgcgccctctccgttcctctcctatgtccattccccctcctcggatctaaccactccgtccctctccccgtccccgcgtccggagctgagatccgtggtcatggccggcgctgcaggtgggttcgtcacgcgggcgttcgaggccatgctcaaggagtgcgccgccaaccgcggcaagttcgccgcgctgcagcaatccatccagtcatacctcgatagcatcaagggggctacggcggagggcgcggtcatcacggaggcgctcgcgtcggctgggcgcgtgctcgacggaccgcaggccgagctggtgctgcagccgctccgcctcgccgtcgagaccaagcacgtcaagctcgtcgagcccgcgctcgactgcctccacaaacttattgcttatgaccatttagaaggcgatcctggtttagaaggtggtaaaaactccccaatatttacagacatcttgaacatggtatgtggttgcgttgataacacatcctctgacagtactgttctccaagtcttgaaagtgcttctcaatgctgttgcttcaaataggtttagagttcatggagagccattgcttggggtcattagagtatgctataacattgctcttaatagcaagagccctgtgaaccaggctacctcaaaggctatgttaacccagatgatcagcattgtattcaggagaatggaatctgagcaggtttctgtattgcctgcaagctctgtggttaaagatacaccttcatctatcacaaatgaatctgaaaatggagaaatatctaccgatggccaagatgaggaaaaagttactccgggagatgcattgtctatgaatcggccttctgaagcacctccaacatctgttgaagagcttcagaatcttgctggtggagcagatattaaggggctggaagctgttctagacaaggctgttgaacttgaagatgggaagaaagtgtcacgtggaattgacctggacactgtgaacataatacagcgggatgcactattgctctttcgaactctttgcaagatgagcatgaaagaagaaagtgatgaagttgctaccaagacaaggctgctatcacttgaactgctccagggattgctagagggagtcagcaacgcattcacaaaaaatttccacttcattgattcggttaaagcatatctttcatatgctcttctgcgagcatctgtcacttcatctccagttgtttttcagtatgcttgcggtatattttcagttctgttgctccgttttagagagagtctgaagggggaaattggtgtcttctttcctctgatagttttaaggtctttggatagctctgatagctccctcagccagaaggctagtgttcttaggatgttggagaaagtttgcaaagatccccaaatgcttgcagatgtgtttgtgaactatgactgtgatcttgagggaccaaatctttttgaacgcacggttagtgcactctcaagaatagcacaagggtctcaaattgctgatactaactccattgtgtcatcccagacagtttctgtaaaaggctcgtctctccagtgtttggtgagtattctgaagtcattggctgtttgggagcaacttcgaagatattccttaaagcaagggagcattgttgaatctcatgaaggggatgcttcaaggagcgtgacaactgatgagatgaagagccaagaggatgttcggaatcagtttgagagagccaaagctcataagtcgacactggaggctgcaatctcagagtttaatcgtaaaccaactaaagggattgaatatttgttgtcaaataaattgatagaaaataaggcatcatctgtagctcagtttctcaagagcaacccgggcctggataaggttatgattggtgagtacttgggacagcatgaggagttccctcttgctgtgatgcatgcctatgttgactccatgaagttttcaggattgaagtttgatgctgcaattcgtgagttcctgaaaggatttcgccttcccggtgaggcacagaagatagatcgcataatggaaaagtttgctgagcggtactgtgctgataatcctgagcttttcaaaaatgcagatactgcttatgttcttgcttatgctgttataatgttgaatactgatgcacacaatccaatggtgtggcctaagatgtcaaaatcagattttgttcgtatgaacactgcgagtgatgcagaagaatgtgccccaaaggagctcttggaagaaatttatgattccattgtcaaggaagagataaagataaaagatgattctcatgatacttcaaaaaccacaaagagacctgaaacagaagaaacaggccgtcttgtcaatatcctcaatttagcccttccaagactgaagtcagctagcgatacaaaggctgagagtgaaaagatcatcaaacagacacaggcacttttcaggaaccagggacagaagaaaggtgtttttcacgttgcacagcaggtggagcttgttaggccaatgcttgaagctgtaggatggcctttgcttgcaacattttctgtgaccatggaggaaggtgacagtaagcctagggttgtatcatgcatggaagggtttcgtgctggtatccatcttactcgtgttcttgggatggacaccatgcgctatgctttcttgacgtccttagtgaggtttacatttttgcatgctcccaaggagatgcgtagtaaaaatgtcgaggcactgaagactcttcttggtttagctgacactgatatggatgctttacaagatacttggaatgctgttttagaatgtgtatcgagactcgaatatatcacttcaaatccttcaatttctgcaactgtaatgctgggatcaaatcaaatatcaagggattctgtagtccaatcgctgaaagagttggctgggaagcctgctgaacaaatctttgtaaacagtgtaaaactgccaagtgattcaattgttgaattcttcaccgccctttgtggcgtttctgctgaagagctaaaacaaacacctgctcgtgtctttagcttgcagaagcttgtagagataagctattataacatggctcgcatacggctggtgtgggctagaatctggtctgtgttggcccagcattttattgctgctggaagccaccacgaggagaaagttgcaatgtatgccattgattcgctaagacaacttggtatgaagtacttggagcgtgctgaattaaacaacttcacatttcagagcgacatactgaaaccctttgtcattttaatgaggaatagtcacaactcaaaaatccgaggtttaattgttgattgcattgttcagttgatcaagtcaaaagttggcagcataaagtcagggtggcgttgtgtattcatgatatttactgcagcggctgatgacgaggatgaatcaattgttgagagtgcttttgaaaatgtagaacaagttatcttggaacattttgatcaagtcgttggtgattgcttcatggattgtgtcaactgtcttattggttttgcaaataacaagtgcactcctcggattagtttgaaggctattgctctcctgcgtatatgtgaagatcgtttggcagagggattcattccaggcggtgctgttaaacctattgatgttgttccagaggccaattttgatgtgtctgagcattactggtttcctatgctagctggtttgtctgatttgactttggactctagaccagaagtcagacattgtgcactggaagtgttgtttgatttgttgaatgaaagaggacataagttctcttctcccttctgggagagtatttttcatcgtgtactatttccaatttttgatcatgtaaggcatgctgggagggatggactttcttcttctggggatgattggcttcgtgatactagcattcattcactgcagttaatctgcaaccttttcaatacattctataaggaggtatcctttatgcttccacctcttctcagtttgctgcttgaatgtgcgaaaaaaacagaccaaactgtcgtttcaattgctcttggcgctttagttcatctgattgaagttggtggtcaccagttcagtgatggtgattgggatacattattaaagagtattagggatgcatcatacacaacacagcctcttgaattgctcaattcattaagatttcagaaatcaaaacaccagcagttactttcaagagaagaaagcaatgcacaaggcaatagttaccttgacagccagggggaaccctccatcagtgacagtaataatggtgagcataatcatccagaggcaggtctgcaaactatcctggagaattcagaagatttaccgtcaccatcagggagaacacaacctgccgttttcccacgtggccaaagctttggacaaagaattatgggcaatatgatggataatattttggtcagaagtcttacgtccaaatcaaaaggtcgaacagatgatattgctccaccctcacctgtgaaggcccctgatgatgaggctgacaaggctgaagaggaagaaagccctatgatggaaactgtcaggagcaaatgtattacacagttactgctgcttggggcaattgagagcatacagaagaagtattggagcaggctaaaagctacacagcagatagcaataatggatatcttgctctcactcctagaatttgcttcttcatataactcaccttcaaatcttcggacgaggatgcaccatatacctccagaaagacctccactgaatcttctccggcaagaactagctggaacaacgatttatttagatatcctccataaatcaacagtggagcaggatgaaaaggactccattgaggaaacaaatggtttaaatgtggaatctgatgaccaggaaaagatcaagtacctagcagaagggaagctggtttctttttgcggacaggttttgaaagaggcgtctgatttacagcctagcactggggaggctgccagtgcagacatacatcgtgtattagacttacgggcacctgttattgtcaaggttttgaaaggaatgtgcatcatggatgctcagatcttcaaaaggcacctgaaagagttctatccattaattaccaaacttatctgttgtgatcagatggatgttcgtggagcccttggtgatctctttagcaaacagcttactccactcatgtcctgaagtatggcagtatttcctccgttgcatatatcttgttggaatatattcgtcatcagcatttttgtgcaaacatggagcaccgtgttttccctagcgacttggatgacacaagggatgatgcttccattatacagtagagtagtgttggtgacatgtacgcattgttcaggacattgtacttgaggcctgttgttattttatggcaatagtagattatttgcggcaagcctcgtttttgtgcgtctaataaagtgaggtcctgatgtatagccttgtctgacttgcagaattgcgttggcaaattccctttgtcctccaagttgctgtaatgttgacatgacggtgcatttatctgctggtactagtgtcttgtccgtattgggttcatgcattgtttgatattccgtagttgaaagcaatgcatatatcattattttctgtattttccattaaagcaggtgcatttatcgggtttccatattttcagtcacctgtggagaatccgataagtcaagcgaatccaaccattcatttgctgccacagcaggcgcattgcaaattgtttatttggtttcgtattttcaatcatctattgagaatccgagacggtcaaggtgaatgcagcatattgtgtattgaatattgatacttcatcttgtgtactagaattgatcgctgtagaacgaatcggcaagaccgataaatccacaatgaccaacaccaacccaagtgaacaggttgcgagactcgggtcactataatatggccagaatgtttgattgtac

SEQ ID NO: 70098 - DNA, 5806 bp, Zea Mays
aggcaagcatatgcctgcgtaaaaaaaaaacagaaaatcagagatggtcctggcgatctgcctgctgaaactgtgaaagcttctgaagacaaatcagccgagcgagcgtgcgtgcgtgcgagacaaccaggtccgatccgcccccgccgagccgaggacagcagcgggggctctcggtctcctcctccagatcttgcacccaatccagatctcgcgccctctccgttcctctcctatgtccattccccctcctcggatctaaccactccgtccctctccccgtccccgcgtccggagctgagatccgtggtcatggccggcgctgcaggtgggttcgtcacgcgggcgttcgaggccatgctcaaggagtgcgccgccaaccgcggcaagttcgccgcgctgcagcaatccatccagtcatacctcgatagcatcaagggggctacggcggagggcgcggtcatcacggaggcgctcgcgtcggctgggcgcgtgctcgacggaccgcaggccgagctggtgctgcagccgctccgcctcgccgtcgagaccaagcacgtcaagctcgtcgagcccgcgctcgactgcctccacaaacttattgcttatgaccatttagaaggcgatcctggtttagaaggtggtaaaaactccccaatatttacagacatcttgaacatggtatgtggttgcgttgataacacatcctctgacagtactgttctccaagtcttgaaagtgcttctcaatgctgttgcttcaaataggtttagagttcatggagagccattgcttggggtcattagagtatgctataacattgctcttaatagcaagagccctgtgaaccaggctacctcaaaggctatgttaacccagatgatcagcattgtattcaggagaatggaatctgagcaggtttctgtattgcctgcaagctctgtggttaaagatacaccttcatctatcacaaatgaatctgaaaatggagaaatatctaccgatggccaagatgaggaaaaagttactccgggagatgcattgtctatgaatcggccttctgaagcacctccaacatctgttgaagagcttcagaatcttgctggtggagcagatattaaggggctggaagctgttctagacaaggctgttgaacttgaagatgggaagaaagtgtcacgtggaattgacctggacactgtgaacataatacagcgggatgcactattgctctttcgaactctttgcaagatgagcatgaaagaagaaagtgatgaagttgctaccaagacaaggctgctatcacttgaactgctccagggattgctagagggagtcagcaacgcattcacaaaaaatttccacttcattgattcggttaaagcatatctttcatatgctcttctgcgagcatctgtcacttcatctccagttgtttttcagtatgcttgcggtatattttcagttctgttgctccgttttagagagagtctgaagggggaaattggtgtcttctttcctctgatagttttaaggtctttggatagctctgatagctccctcagccagaaggctagtgttcttaggatgttggagaaagtttgcaaagatccccaaatgcttgcagatgtgtttgtgaactatgactgtgatcttgagggaccaaatctttttgaacgcacggttagtgcactctcaagaatagcacaagggtctcaaattgctgatactaactccattgtgtcatcccagacagtttctgtaaaaggctcgtctctccagtgtttggtgagtattctgaagtcattggctgtttgggagcaacttcgaagatattccttaaagcaagggagcattgttgaatctcatgaaggggatgcttcaaggagcgtgacaactgatgagatgaagagccaagaggatgttcggaatcagtttgagagagccaaagctcataagtcgacactggaggctgcaatctcagagtttaatcgtaaaccaactaaagggattgaatatttgttgtcaaataaattgatagaaaataaggcatcatctgtagctcagtttctcaagagcaacccgggcctggataaggttatgattggtgagtacttgggacagcatgaggagttccctcttgctgtgatgcatgcctatgttgactccatgaagttttcaggattgaagtttgatgctgcaattcgtgagttcctgaaaggatttcgccttcccggtgaggcacagaagatagatcgcataatggaaaagtttgctgagcggtactgtgctgataatcctgagcttttcaaaaatgcagatactgcttatgttcttgcttatgctgttataatgttgaatactgatgcacacaatccaatggtgtggcctaagatgtcaaaatcagattttgttcgtatgaacactgcgagtgatgcagaagaatgtgccccaaaggagctcttggaagaaatttatgattccattgtcaaggaagagataaagataaaagatgattctcatgatacttcaaaaaccacaaagagacctgaaacagaagaaacaggccgtcttgtcaatatcctcaatttagcccttccaagactgaagtcagctagcgatacaaaggctgagagtgaaaagatcatcaaacagacacaggcacttttcaggaaccagggacagaagaaaggtgtttttcacgttgcacagcaggtggagcttgttaggccaatgcttgaagctgtaggatggcctttgcttgcaacattttctgtgaccatggaggaaggtgacagtaagcctagggttgtatcatgcatggaagggtttcgtgctggtatccatcttactcgtgttcttgggatggacaccatgcgctatgctttcttgacgtccttagtgaggtttacatttttgcatgctcccaaggagatgcgtagtaaaaatgtcgaggcactgaagactcttcttggtttagctgacactgatatggatgctttacaagatacttggaatgctgttttagaatgtgtatcgagactcgaatatatcacttcaaatccttcaatttctgcaactgtaatgctgggatcaaatcaaatatcaagggattctgtagtccaatcgctgaaagagttggctgggaagcctgctgaacaaatctttgtaaacagtgtaaaactgccaagtgattcaattgttgaattcttcaccgccctttgtggcgtttctgctgaagagctaaaacaaacacctgctcgtgtctttagcttgcagaagcttgtagagataagctattataacatggctcgcatacggctggtgtgggctagaatctggtctgtgttggcccagcattttattgctgctggaagccaccacgaggagaaagttgcaatgtatgccattgattcgctaagacaacttggtatgaagtacttggagcgtgctgaattaaacaacttcacatttcagagcgacatactgaaaccctttgtcattttaatgaggaatagtcacaactcaaaaatccgaggtttaattgttgattgcattgttcagttgatcaagtcaaaagttggcagcataaagtcagggtggcgttgtgtattcatgatatttactgcagcggctgatgacgaggatgaatcaattgttgagagtgcttttgaaaatgtagaacaagttatcttggaacattttgatcaagtcgttggtgattgcttcatggattgtgtcaactgtcttattggttttgcaaataacaagtgcactcctcggattagtttgaaggctattgctctcctgcgtatatgtgaagatcgtttggcagagggattcattccaggcggtgctgttaaacctattgatgttgttccagaggccaattttgatgtgtctgagcattactggtttcctatgctagctggtttgtctgatttgactttggactctagaccagaagtcagacattgtgcactggaagtgttgtttgatttgttgaatgaaagaggacataagttctcttctcccttctgggagagtatttttcatcgtgtactatttccaatttttgatcatgtaaggcatgctgggagggatggactttcttcttctggggatgattggcttcgtgatactagcattcattcactgcagttaatctgcaaccttttcaatacattctataaggaggtatcctttatgcttccacctcttctcagtttgctgcttgaatgtgcgaaaaaaacagaccaaactgtcgtttcaattgctcttggcgctttagttcatctgattgaagttggtggtcaccagttcagtgatggtgattgggatacattattaaagagtattagggatgcatcatacacaacacagcctcttgaattgctcaattcattaagatttcagaaatcaaaacaccagcagttactttcaagagaagaaagcaatgcacaaggcaatagttaccttgacagccagggggaaccctccatcagtgacagtaataatggtgagcataatcatccagaggcaggtctgcaaactatcctggagaattcagaagatttaccgtcaccatcagggagaacacaacctgccgttttcccacgtggccaaagctttggacaaagaattatgggcaatatgatggataatattttggtcagaagtcttacgtccaaatcaaaaggtcgaacagatgatattgctccaccctcacctgtgaaggcccctgatgatgaggctgacaaggctgaagaggaagaaagccctatgatggaaactgtcaggagcaaatgtattacacagttactgctgcttggggcaattgagagcatacagaagaagtattggagcaggctaaaagctacacagcagatagcaataatggatatcttgctctcactcctagaatttgcttcttcatataactcaccttcaaatcttcggacgaggatgcaccatatacctccagaaagacctccactgaatcttctccggcaagaactagctggaacaacgatttatttagatatcctccataaatcaacagtggagcaggatgaaaaggactccattgaggaaacaaatggtttaaatgtggaatctgatgaccaggaaaagatcaagtacctagcagaagggaagctggtttctttttgcggacaggttttgaaagaggcgtctgatttacagcctagcactggggaggctgccagtgcagacatacatcgtgtattagacttacgggcacctgttattgtcaaggttttgaaaggaatgtgcatcatggatgctcagatcttcaaaaggcacctgaaagagttctatccattaattaccaaacttatctgttgtgatcagatggatgttcgtggagcccttggtgatctctttagcaaacagcttactccactcatgtcctgaaaattgcgttggcaaattccctttgtcctccaagttgctgtaatgttgacatgacggtgcatttatctgctgtcacctgtggagaatccgataagtcaagcgaatccaaccattcatttgctgccacagcaggcgcattgcaaattgtttatttggtttcgtattttcaatcatctattgagaatccgagacggtcaaggtgaatgcagcatattgtgtattgaatattgatacttcatcttgtgtactagaattgatcgctgtagaacgaatcggcaagaccgataaatccacaatgaccaacaccaacccaagtgaacaggttgcgagactcgggtcactataatatggccagaatgtttgattgtac

SEQ ID NO: 70099 - DNA, 6224 bp, Zea Mays
aggcaagcatatgcctgcgtaaaaaaaaaacagaaaatcagagatggtcctggcgatctgcctgctgaaactgtgaaagcttctgaagacaaatcagccgagcgagcgtgcgtgcgtgcgagacaaccaggtccgatccgcccccgccgagccgaggacagcagcgggggctctcggtctcctcctccagatcttgcacccaatccagatctcgcgccctctccgttcctctcctatgtccattccccctcctcggatctaaccactccgtccctctccccgtccccgcgtccggagctgagatccgtggtcatggccggcgctgcaggtgggttcgtcacgcgggcgttcgaggccatgctcaaggagtgcgccgccaaccgcggcaagttcgccgcgctgcagcaatccatccagtcatacctcgatagcatcaagggggctacggcggagggcgcggtcatcacggaggcgctcgcgtcggctgggcgcgtgctcgacggaccgcaggccgagctggtgctgcagccgctccgcctcgccgtcgagaccaagcacgtcaagctcgtcgagcccgcgctcgactgcctccacaaacttattgcttatgaccatttagaaggcgatcctggtttagaaggtggtaaaaactccccaatatttacagacatcttgaacatggtatgtggttgcgttgataacacatcctctgacagtactgttctccaagtcttgaaagtgcttctcaatgctgttgcttcaaataggtttagagttcatggagagccattgcttggggtcattagagtatgctataacattgctcttaatagcaagagccctgtgaaccaggctacctcaaaggctatgttaacccagatgatcagcattgtattcaggagaatggaatctgagcaggtttctgtattgcctgcaagctctgtggttaaagatacaccttcatctatcacaaatgaatctgaaaatggagaaatatctaccgatggccaagatgaggaaaaagttactccgggagatgcattgtctatgaatcggccttctgaagcacctccaacatctgttgaagagcttcagaatcttgctggtggagcagatattaaggggctggaagctgttctagacaaggctgttgaacttgaagatgggaagaaagtgtcacggtttgttaagcttgtactaagtggaattgacctggacactgtgaacataatacagcgggatgcactattgctctttcgaactctttgcaagatgagcatgaaagaagaaagtgatgaagttgctaccaagacaaggctgctatcacttgaactgctccagggattgctagagggagtcagcaacgcattcacaaaaaatttccacttcattgattcggttaaagcatatctttcatatgctcttctgcgagcatctgtcacttcatctccagttgtttttcagtatgcttgcggtatattttcagttctgttgctccgttttagagagagtctgaagggggaaattggtgtcttctttcctctgatagttttaaggtctttggatagctctgatagctccctcagccagaaggctagtgttcttaggatgttggagaaagtttgcaaagatccccaaatgcttgcagatgtgtttgtgaactatgactgtgatcttgagggaccaaatctttttgaacgcacggttagtgcactctcaagaatagcacaagggtctcaaattgctgatactaactccattgtgtcatcccagacagtttctgtaaaaggctcgtctctccagtgtttggtgagtattctgaagtcattggctgtttgggagcaacttcgaagatattccttaaagcaagggagcattgttgaatctcatgaaggggatgcttcaaggagcgtgacaactgatgagatgaagagccaagaggatgttcggaatcagtttgagagagccaaagctcataagtcgacactggaggctgcaatctcagagtttaatcgtaaaccaactaaagggattgaatatttgttgtcaaataaattgatagaaaataaggcatcatctgtagctcagtttctcaagagcaacccgggcctggataaggttatgattggtgagtacttgggacagcatgaggagttccctcttgctgtgatgcatgcctatgttgactccatgaagttttcaggattgaagtttgatgctgcaattcgtgagttcctgaaaggatttcgccttcccggtgaggcacagaagatagatcgcataatggaaaagtttgctgagcggtactgtgctgataatcctgagcttttcaaaaatgcagatactgcttatgttcttgcttatgctgttataatgttgaatactgatgcacacaatccaatggtgtggcctaagatgtcaaaatcagattttgttcgtatgaacactgcgagtgatgcagaagaatgtgccccaaaggagctcttggaagaaatttatgattccattgtcaaggaagagataaagataaaagatgattctcatgatacttcaaaaaccacaaagagacctgaaacagaagaaacaggccgtcttgtcaatatcctcaatttagcccttccaagactgaagtcagctagcgatacaaaggctgagagtgaaaagatcatcaaacagacacaggcacttttcaggaaccagggacagaagaaaggtgtttttcacgttgcacagcaggtggagcttgttaggccaatgcttgaagctgtaggatggcctttgcttgcaacattttctgtgaccatggaggaaggtgacagtaagcctagggttgtatcatgcatggaagggtttcgtgctggtatccatcttactcgtgttcttgggatggacaccatgcgctatgctttcttgacgtccttagtgaggtttacatttttgcatgctcccaaggagatgcgtagtaaaaatgtcgaggcactgaagactcttcttggtttagctgacactgatatggatgctttacaagatacttggaatgctgttttagaatgtgtatcgagactcgaatatatcacttcaaatccttcaatttctgcaactgtaatgctgggatcaaatcaaatatcaagggattctgtagtccaatcgctgaaagagttggctgggaagcctgctgaacaaatctttgtaaacagtgtaaaactgccaagtgattcaattgttgaattcttcaccgccctttgtggcgtttctgctgaagagctaaaacaaacacctgctcgtgtctttagcttgcagaagcttgtagagataagctattataacatggctcgcatacggctggtgtgggctagaatctggtctgtgttggcccagcattttattgctgctggaagccaccacgaggagaaagttgcaatgtatgccattgattcgctaagacaacttggtatgaagtacttggagcgtgctgaattaaacaacttcacatttcagagcgacatactgaaaccctttgtcattttaatgaggaatagtcacaactcaaaaatccgaggtttaattgttgattgcattgttcagttgatcaagtcaaaagttggcagcataaagtcagggtggcgttgtgtattcatgatatttactgcagcggctgatgacgaggatgaatcaattgttgagagtgcttttgaaaatgtagaacaagttatcttggaacattttgatcaagtcgttggtgattgcttcatggattgtgtcaactgtcttattggttttgcaaataacaagtgcactcctcggattagtttgaaggctattgctctcctgcgtatatgtgaagatcgtttggcagagggattcattccaggcggtgctgttaaacctattgatgttgttccagaggccaattttgatgtgtctgagcattactggtttcctatgctagctggtttgtctgatttgactttggactctagaccagaagtcagacattgtgcactggaagtgttgtttgatttgttgaatgaaagaggacataagttctcttctcccttctgggagagtatttttcatcgtgtactatttccaatttttgatcatgtaaggcatgctgggagggatggactttcttcttctggggatgattggcttcgtgatactagcattcattcactgcagttaatctgcaaccttttcaatacattctataaggaggtatcctttatgcttccacctcttctcagtttgctgcttgaatgtgcgaaaaaaacagaccaaactgtcgtttcaattgctcttggcgctttagttcatctgattgaagttggtggtcaccagttcagtgatggtgattgggatacattattaaagagtattagggatgcatcatacacaacacagcctcttgaattgctcaattcattaagatttcagaaatcaaaacaccagcagttactttcaagagaagaaagcaatgcacaaggcaatagttaccttgacagccagggggaaccctccatcagtgacagtaataatggtgagcataatcatccagaggcaggtctgcaaactatcctggagaattcagaagggagaacacaacctgccgttttcccacgtggccaaagctttggacaaagaattatgggcaatatgatggataatattttggtcagaagtcttacgtccaaatcaaaaggtcgaacagatgatattgctccaccctcacctgtgaaggcccctgatgatgaggctgacaaggctgaagaggaagaaagccctatgatggaaactgtcaggagcaaatgtattacacagttactgctgcttggggcaattgagagcatacagaagaagtattggagcaggctaaaagctacacagcagatagcaataatggatatcttgctctcactcctagaatttgcttcttcatataactcaccttcaaatcttcggacgaggatgcaccatatacctccagaaagacctccactgaatcttctccggcaagaactagctggaacaacgatttatttagatatcctccataaatcaacagtggagcaggatgaaaaggactccattgaggaaacaaatggtttaaatgtggaatctgatgaccaggaaaagatcaagtacctagcagaagggaagctggtttctttttgcggacaggttttgaaagaggcgtctgatttacagcctagcactggggaggctgccagtgcagacatacatcgtgtattagacttacgggcacctgttattgtcaaggttttgaaaggaatgtgcatcatggatgctcagatcttcaaaaggcacctgaaagagttctatccattaattaccaaacttatctgttgtgatcagatggatgttcgtggagcccttggtgatctctttagcaaacagcttactccactcatgtcctgaagtatggcagtatttcctccgttgcatatatcttgttggaatatattcgtcatcagcatttttgtgcaaacatggagcaccgtgttttccctagcgacttggatgacacaagggatgatgcttccattatacagtagagtagtgttggtgacatgtacgcattgttcaggacattgtacttgaggcctgttgttattttatggcaatagtagattatttgcggcaagcctcgtttttgtgcgtctaataaagtgaggtcctgatgtatagccttgtctgacttgcagaattgcgttggcaaattccctttgtcctccaagttgctgtaatgttgacatgacggtgcatttatctgctggtactagtgtcttgtccgtattgggttcatgcattgtttgatattccgtagttgaaagcaatgcatatatcattattttctgtattttccattaaagcaggtgcatttatcgggtttccatattttcagtcacctgtggagaatccgataagtcaagcgaatccaaccattcatttgctgccacagcaggcgcattgcaaattgtttatttggtttcgtattttcaatcatctattgagaatccgagacggtcaaggtgaatgcagcatattgtgtattgaatattgatacttcatcttgtgtactagaattgatcgctgtagaacgaatcggcaagaccgataaatccacaatgaccaacaccaacccaagtgaacaggttgcgagactcgggtcactataatatggccagaatgtttgattgtac

SEQ ID NO: 70100 - DNA, 6063 bp, Zea Mays
ctttatcacagtaccgagtaccgactacccgagcacacgacagtacccagtacgccgcgacaaggcaagcatatgcctgcgtaaaaaaaaaacagaaaatcagagatggtcctggcgatctgcctgctgaaactgtgaaagcttctgaagacaaatcagccgagcgagcgtgcgtgcgtgcgagacaaccaggtccgatccgcccccgccgagccgaggacagcagcgggggctctcggtctcctcctccagatcttgcacccaatccagatctcgcgccctctccgttcctctcctatgtccattccccctcctcggatctaaccactccgtccctctccccgtccccgcgtccggagctgagatccgtggtcatggccggcgctgcaggtgggttcgtcacgcgggcgttcgaggccatgctcaaggagtgcgccgccaaccgcggcaagttcgccgcgctgcagcaatccatccagtcatacctcgatagcatcaagggggctacggcggagggcgcggtcatcacggaggcgctcgcgtcggctgggcgcgtgctcgacggaccgcaggccgagctggtgctgcagccgctccgcctcgccgtcgagaccaagcacgtcaagctcgtcgagcccgcgctcgactgcctccacaaacttattgcttatgaccatttagaaggcgatcctggtttagaaggtggtaaaaactccccaatatttacagacatcttgaacatggtatgtggttgcgttgataacacatcctctgacagtactgttctccaagtcttgaaagtgcttctcaatgctgttgcttcaaataggtttagagttcatggagagccattgcttggggtcattagagtatgctataacattgctcttaatagcaagagccctgtgaaccaggctacctcaaaggctatgttaacccagatgatcagcattgtattcaggagaatggaatctgagcaggtttctgtattgcctgcaagctctgtggttaaagatacaccttcatctatcacaaatgaatctgaaaatggagaaatatctaccgatggccaagatgaggaaaaagttactccgggagatgcattgtctatgaatcggccttctgaagcacctccaacatctgttgaagagcttcagaatcttgctggtggagcagatattaaggtattgcattggttccatctaattacaagagatcttttacaggggctggaagctgttctagacaaggctgttgaacttgaagatgggaagaaagtgtcacgtggaattgacctggacactgtgaacataatacagcgggatgcactattgctctttcgaactctttgcaagatgagcatgaaagaagaaagtgatgaagttgctaccaagacaaggctgctatcacttgaactgctccagggattgctagagggagtcagcaacgcattcacaaaaaatttccacttcattgattcggttaaagcatatctttcatatgctcttctgcgagcatctgtcacttcatctccagttgtttttcagtatgcttgcggtatattttcagttctgttgctccgttttagagagagtctgaagggggaaattggtgtcttctttcctctgatagttttaaggtctttggatagctctgatagctccctcagccagaaggctagtgttcttaggatgttggagaaagtttgcaaagatccccaaatgcttgcagatgtgtttgtgaactatgactgtgatcttgagggaccaaatctttttgaacgcacggttagtgcactctcaagaatagcacaagggtctcaaattgctgatactaactccattgtgtcatcccagacagtttctgtaaaaggctcgtctctccagtgtttggtgagtattctgaagtcattggctgtttgggagcaacttcgaagatattccttaaagcaagggagcattgttgaatctcatgaaggggatgcttcaaggagcgtgacaactgatgagatgaagagccaagaggatgttcggaatcagtttgagagagccaaagctcataagtcgacactggaggctgcaatctcagagtttaatcgtaaaccaactaaagggattgaatatttgttgtcaaataaattgatagaaaataaggcatcatctgtagctcagtttctcaagagcaacccgggcctggataaggttatgattggtgagtacttgggacagcatgaggagttccctcttgctgtgatgcatgcctatgttgactccatgaagttttcaggattgaagtttgatgctgcaattcgtgagttcctgaaaggatttcgccttcccggtgaggcacagaagatagatcgcataatggaaaagtttgctgagcggtactgtgctgataatcctgagcttttcaaaaatgcagatactgcttatgttcttgcttatgctgttataatgttgaatactgatgcacacaatccaatggtgtggcctaagatgtcaaaatcagattttgttcgtatgaacactgcgagtgatgcagaagaatgtgccccaaaggagctcttggaagaaatttatgattccattgtcaaggaagagataaagataaaagatgattctcatgatacttcaaaaaccacaaagagacctgaaacagaagaaacaggccgtcttgtcaatatcctcaatttagcccttccaagactgaagtcagctagcgatacaaaggctgagagtgaaaagatcatcaaacagacacaggcacttttcaggaaccagggacagaagaaaggtgtttttcacgttgcacagcaggtggagcttgttaggccaatgcttgaagctgtaggatggcctttgcttgcaacattttctgtgaccatggaggaaggtgacagtaagcctagggttgtatcatgcatggaagggtttcgtgctggtatccatcttactcgtgttcttgggatggacaccatgcgctatgctttcttgacgtccttagtgaggtttacatttttgcatgctcccaaggagatgcgtagtaaaaatgtcgaggcactgaagactcttcttggtttagctgacactgatatggatgctttacaagatacttggaatgctgttttagaatgtgtatcgagactcgaatatatcacttcaaatccttcaatttctgcaactgtaatgctgggatcaaatcaaatatcaagggattctgtagtccaatcgctgaaagagttggctgggaagcctgctgaacaaatctttgtaaacagtgtaaaactgccaagtgattcaattgttgaattcttcaccgccctttgtggcgtttctgctgaagagctaaaacaaacacctgctcgtgtctttagcttgcagaagcttgtagagataagctattataacatggctcgcatacggctggtgtgggctagaatctggtctgtgttggcccagcattttattgctgctggaagccaccacgaggagaaagttgcaatgtatgccattgattcgctaagacaacttggtatgaagtacttggagcgtgctgaattaaacaacttcacatttcagagcgacatactgaaaccctttgtcattttaatgaggaatagtcacaactcaaaaatccgaggtttaattgttgattgcattgttcagttgatcaagtcaaaagttggcagcataaagtcagggtggcgttgtgtattcatgatatttactgcagcggctgatgacgaggatgaatcaattgttgagagtgcttttgaaaatgtagaacaagttatcttggaacattttgatcaagtcgttggtgattgcttcatggattgtgtcaactgtcttattggttttgcaaataacaagtgcactcctcggattagtttgaaggctattgctctcctgcgtatatgtgaagatcgtttggcagagggattcattccaggcggtgctgttaaacctattgatgttgttccagaggccaattttgatgtgtctgagcattactggtttcctatgctagctggtttgtctgatttgactttggactctagaccagaagtcagacattgtgcactggaagtgttgtttgatttgttgaatgaaagaggacataagttctcttctcccttctgggagagtatttttcatcgtgtactatttccaatttttgatcatgtaaggcatgctgggagggatggactttcttcttctggggatgattggcttcgtgatactagcattcattcactgcagttaatctgcaaccttttcaatacattctataaggaggtatcctttatgcttccacctcttctcagtttgctgcttgaatgtgcgaaaaaaacagaccaaactgtcgtttcaattgctcttggcgctttagttcatctgattgaagttggtggtcaccagttcagtgatggtgattgggatacattattaaagagtattagggatgcatcatacacaacacagcctcttgaattgctcaattcattaagatttcagaaatcaaaacaccagcagttactttcaagagaagaaagcaatgcacaaggcaatagttaccttgacagccagggggaaccctccatcagtgacagtaataatggtgagcataatcatccagaggcaggtctgcaaactatcctggagaattcagaagatttaccgtcaccatcagggagaacacaacctgccgttttcccacgtggccaaagctttggacaaagaattatgggcaatatgatggataatattttggtcagaagtcttacgtccaaatcaaaaggtcgaacagatgatattgctccaccctcacctgtgaaggcccctgatgatgaggctgacaaggctgaagaggaagaaagccctatgatggaaactgtcaggagcaaatgtattacacagttactgctgcttggggcaattgagagcatacagaagaagtattggagcaggctaaaagctacacagcagatagcaataatggatatcttgctctcactcctagaatttgcttcttcatataactcaccttcaaatcttcggacgaggatgcaccatatacctccagaaagacctccactgaatcttctccggcaagaactagctggaacaacgatttatttagatatcctccataaatcaacagtggagcaggatgaaaaggactccattgaggaaacaaatggtttaaatgtggaatctgatgaccaggaaaagatcaagtacctagcagaagggaagctggtttctttttgcggacaggttttgaaagaggcgtctgatttacagcctagcactggggaggctgccagtgcagacatacatcgtgtattagacttacgggcacctgttattgtcaaggttttgaaaggaatgtgcatcatggatgctcagatcttcaaaaggcacctgaaagagttctatccattaattaccaaacttatctgttgtgatcagatggatgttcgtggagcccttggtgatctctttagcaaacagcttactccactcatgtcctgaagtatggcagtatttcctccgttgcatatatcttgttggaatatattcgtcatcagcatttttgtgcaaacatggagcaccgtgttttccctagcgacttggatgacacaagggatgatgcttccattatacagtagagtagtgttggtgacataattgcgttggcaaattccctttgtcctccaagttgctgtaatgttgacatgacggtgcatttatctgctgtcacctgtggagaatccgataagtcaagcgaatccaaccattcatttgctgccacagcaggcgcattgcaaattgtttatttggtttcgtattttcaatcatctattgagaatccgagacggtcaaggtgaatgcagcatattgtgtattgaatattgatacttcatcttgtgtactagaattgatcgctgtagaacgaatcggcaagaccgataaatccacaatgaccaacaccaacccaagtgaacaggttgcgagactcgggtcactataatatggccagaatgtttgattgtac

SEQ ID NO: 70101 - DNA, 4602 bp, Zea Mays
atggccggcgctgcaggtgggttcgtcacgcgggcgttcgaggccatgctcaaggagtgcgccgccaaccgcggcaagttcgccgcgctgcagcaatccatccagtcatacctcgatagcatcaagggggctacggcggagggcgcggtcatcacggaggcgctcgcgtcggctgggcgcgtgctcgacggaccgcaggccgagctggtgctgcagccgctccgcctcgccgtcgagaccaagcacgtcaagctcgtcgagcccgcgctcgactgcctccacaaacttattgcttatgaccatttagaaggcgatcctggtttagaaggtggtaaaaactccccaatatttacagacatcttgaacatggtatgtggttgcgttgataacacatcctctgacagtactgttctccaagtcttgaaagtgcttctcaatgctgttgcttcaaataggtttagagttcatggagagccattgcttggggtcattagagtatgctataacattgctcttaatagcaagagccctgtgaaccaggctacctcaaaggctatgttaacccagatgatcagcattgtattcaggagaatggaatctgagcaggtttctgtattgcctgcaagctctgtggttaaagatacaccttcatctatcacaaatgaatctgaaaatggagaaatatctaccgatggccaagatgaggaaaaagttactccgggagatgcattgtctatgaatcggccttctgaagcacctccaacatctgttgaagagcttcagaatcttgctggtggagcagatattaaggggctggaagctgttctagacaaggctgttgaacttgaagatgggaagaaagtgtcacgtggaattgacctggacactgtgaacataatacagcgggatgcactattgctctttcgaactctttgcaagatgagcatgaaagaagaaagtgatgaagttgctaccaagacaaggctgctatcacttgaactgctccagggattgctagagggagtcagcaacgcattcacaaaaaatttccacttcattgattcggttaaagcatatctttcatatgctcttctgcgagcatctgtcacttcatctccagttgtttttcagtatgcttgcggtatattttcagttctgttgctccgttttagagagagtctgaagggggaaattggtgtcttctttcctctgatagttttaaggtctttggatagctctgatagctccctcagccagaaggctagtgttcttaggatgttggagaaagtttgcaaagatccccaaatgcttgcagatgtgtttgtgaactatgactgtgatcttgagggaccaaatctttttgaacgcacggttagtgcactctcaagaatagcacaagggtctcaaattgctgatactaactccattgtgtcatcccagacagtttctgtaaaaggctcgtctctccagtgtttggtgagtattctgaagtcattggctgtttgggagcaacttcgaagatattccttaaagcaagggagcattgttgaatctcatgaaggggatgcttcaaggagcgtgacaactgatgagatgaagagccaagaggatgttcggaatcagtttgagagagccaaagctcataagtcgacactggaggctgcaatctcagagtttaatcgtaaaccaactaaagggattgaatatttgttgtcaaataaattgatagaaaataaggcatcatctgtagctcagtttctcaagagcaacccgggcctggataaggttatgattggtgagtacttgggacagcatgaggagttccctcttgctgtgatgcatgcctatgttgactccatgaagttttcaggattgaagtttgatgctgcaattcgtgagttcctgaaaggatttcgccttcccggtgaggcacagaagatagatcgcataatggaaaagtttgctgagcggtactgtgctgataatcctgagcttttcaaaaatgcagatactgcttatgttcttgcttatgctgttataatgttgaatactgatgcacacaatccaatggtgtggcctaagatgtcaaaatcagattttgttcgtatgaacactgcgagtgatgcagaagaatgtgccccaaaggagctcttggaagaaatttatgattccattgtcaaggaagagataaagataaaagatgattctcatgatacttcaaaaaccacaaagagacctgaaacagaagaaacaggccgtcttgtcaatatcctcaatttagcccttccaagactgaagtcagctagcgatacaaaggctgagagtgaaaagatcatcaaacagacacaggcacttttcaggaaccagggacagaagaaaggtgtttttcacgttgcacagcaggtggagcttgttaggccaatgcttgaagctgtaggatggcctttgcttgcaacattttctgtgaccatggaggaaggtgacagtaagcctagggttgtatcatgcatggaagggtttcgtgctggtatccatcttactcgtgttcttgggatggacaccatgcgctatgctttcttgacgtccttagtgaggtttacatttttgcatgctcccaaggagatgcgtagtaaaaatgtcgaggcactgaagactcttcttggtttagctgacactgatatggatgctttacaagatacttggaatgctgttttagaatgtgtatcgagactcgaatatatcacttcaaatccttcaatttctgcaactgtaatgctgggatcaaatcaaatatcaagggattctgtagtccaatcgctgaaagagttggctgggaagcctgctgaacaaatctttgtaaacagtgtaaaactgccaagtgattcaattgttgaattcttcaccgccctttgtggcgtttctgctgaagagctaaaacaaacacctgctcgtgtctttagcttgcagaagcttgtagagataagctattataacatggctcgcatacggctggtgtgggctagaatctggtctgtgttggcccagcattttattgctgctggaagccaccacgaggagaaagttgcaatgtatgccattgattcgctaagacaacttggtatgaagtacttggagcgtgctgaattaaacaacttcacatttcagagcgacatactgaaaccctttgtcattttaatgaggaatagtcacaactcaaaaatccgaggtttaattgttgattgcattgttcagttgatcaagtcaaaagttggcagcataaagtcagggtggcgttgtgtattcatgatatttactgcagcggctgatgacgaggatgaatcaattgttgagagtgcttttgaaaatgtagaacaagttatcttggaacattttgatcaagtcgttggtgattgcttcatggattgtgtcaactgtcttattggttttgcaaataacaagtgcactcctcggattagtttgaaggctattgctctcctgcgtatatgtgaagatcgtttggcagagggattcattccaggcggtgctgttaaacctattgatgttgttccagaggccaattttgatgtgtctgagcattactggtttcctatgctagctggtttgtctgatttgactttggactctagaccagaagtcagacattgtgcactggaagtgttgtttgatttgttgaatgaaagaggacataagttctcttctcccttctgggagagtatttttcatcgtgtactatttccaatttttgatcatgtaaggcatgctgggagggatggactttcttcttctggggatgattggcttcgtgatactagcattcattcactgcagttaatctgcaaccttttcaatacattctataaggaggtatcctttatgcttccacctcttctcagtttgctgcttgaatgtgcgaaaaaaacagaccaaactgtcgtttcaattgctcttggcgctttagttcatctgattgaagttggtggtcaccagttcagtgatggtgattgggatacattattaaagagtattagggatgcatcatacacaacacagcctcttgaattgctcaattcattaagatttcagaaatcaaaacaccagcagttactttcaagagaagaaagcaatgcacaaggcaatagttaccttgacagccagggggaaccctccatcagtgacagtaataatggtgagcataatcatccagaggcaggtctgcaaactatcctggagaattcagaagatttaccgtcaccatcagggagaacacaacctgccgttttcccacgtggccaaagctttggacaaagaattatgggcaatatgatggataatattttggtcagaagtcttacgtccaaatcaaaaggtcgaacagatgatattgctccaccctcacctgtgaaggcccctgatgatgaggctgacaaggctgaagaggaagaaagccctatgatggaaactgtcaggagcaaatgtattacacagttactgctgcttggggcaattgagagcatacagacagagtggagtttgaaataggaggtgggataggagagctgttggagatagcctaaggaattc

SEQ ID NO: 70102 - DNA, 2033 bp, Zea Mays
gtcgcgctgttcctctcgggctctcgttcctcttgctccctcccgcgggccgcggccgccttcgcccgtccccgtccccgtccccgtccccgtcccaatttccaccaacctttcccaatcgccctccaggctctggcactgcgagacgtttcattagccacttagccgttcccacgacacaatcagcaccaccggtgtcctcgctgccaaggcgcccgcccgctcgtgtgacgagtggcgttcgtccaccgcccattccgcgctcagctctgagggcctcccgcccgccgcggcatcatctccggctcctctcgtcaatggtaaggggggcgataggtgtcctaagatgaaactgcggttgcatctgttcgtcctgtgcgtgatcattatattcctggtgtacaacatggctaactttcaacataagcagacaacgttggaagcaaaatctcatccatttgatacagtgacggtgtctgacagagatgctgttaaggtgcctcaaaaggctgaggctaggattggttatttaccccatggtatagtggagtctaactctgacatggacttgaagccattgtggctgactacaagtgcacggtcaaagaagcctaaacaaaatgataattttttgattgctattgctgccggtataaatcagaaaaaaactgtggatgctattatgaagaagaaaattttacagctatattgttccattatgatgggaatgtcaatgggtggaatgatctaccatggagcaaaagtgtgatacatatagctgcctctaatcagactaaatggtggtttgcaaagaggttcctccatcctgctgttgtgtccatataccagtacatctttctttgggatgaagatctggaagtagataactttagcccgagaagatacttaaatatagttagatcagaagggttggagatatcacaaccaggtcttgactctaagctttctgaaattcatcaccggataactgttcgtaaaaaagcagggacctttcatagcgtgtattttgatagaagagttagccgggctaacaaaaagtgttcaagagaaggaccaccttgttctggatgggtcgagggcatggcaccagttttctcaaagtccgcttggcaatgtgtgtggcaccttatccagaatgatcttatccatggatggggcatcgattacaagtttgggtattgtgctcagggtgacaggacaaagaacattggcgtagttgatagtgaatttatagttcaccgaggagtgcagacattaggaggttctacaataacaaaggatggtattcgtggcaaaaatgccaagccactcggccagaaagcagctcaaatccaaagatcgagagggagggctccaggccttgatatgcgaacaaagatccggagaaaatcgcgatccgagctccgtgattttcagaagcgctgggaccgggctgcaagggaagacagaacatgggttgatccgtttgcccgctcccgaagaaagcggaagaatagaaacccacagtagatcagcataatcttcactgttacacttgcacataattccgtttgcaccttggatttagagtgtataataattgcataatcaacattgtataaattctcacagacgaaacgagaaccacacacgtgaaattttccgatgggagttgtgggttcttgtatcgaggggcaggtccaggatttaaaggatgggcattcggaattgtagttggcacaatttttttaacaacataaatttattattcatgggagcggataattatccattggacatagatgtggtataatttgttatccacatgtatgagtatgaatataataaggtattcattgatattttttttctgaacccaatgggtatcagacatgagtacaaatctatacctacgaacgtatatgagtatgagtatatattgaattttgtctcgtagttatagatttgtaaaccatatactcatgtcctaaccgtgattgctatctctagtcatacggtagggaaatgaaaag

SEQ ID NO: 70103 - DNA, 2044 bp, Zea Mays
gtcgcgctgttcctctcgggctctcgttcctcttgctccctcccgcgggccgcggccgccttcgcccgtccccgtccccgtccccgtccccgtcccaatttccaccaacctttcccaatcgccctccaggctctggcactgcgagacgtttcattagccacttagccgttcccacgacacaatcagcaccaccggtgtcctcgctgccaaggcgcccgcccgctcgtgtgacgagtggcgttcgtccaccgcccattccgcgctcagctctgagggcctcccgcccgccgcggcatcatctccggctcctctcgtcaatggtaaggggggcgataggtgtcctaagatgaaactgcggttgcatctgttcgtcctgtgcgtgatcattatattcctggtgtacaacatggctaactttcaacataagcagacaacgttggaagcaaaatctcatccatttgatacagtgacggtgtctgacagagatgctgttaaggtgcctcaaaaggctgaggctaggattggttatttaccccatggtatagtggagtctaactctgacatggacttgaagccattgtggctgactacaagtgcacggtcaaagtgttttgtcccagcagaagcctaaacaaaatgataattttttgattgctattgctgccggtataaatcagaaaaaaactgtggatgctattatgaagaagtttcttccagaaaattttacagctatattgttccattatgatgggaatgtcaatgggtggaatgatctaccatggagcaaaagtgtgatacatatagctgcctctaatcagactaaatggtggtttgcaaagaggttcctccatcctgctgttgtgtccatataccagtacatctttctttgggatgaagatctggaagtagataactttagcccgagaagatacttaaatatagttagatcagaagggttggagatatcacaaccaggtcttgactctaagctttctgaaattcatcaccggataactgttcgtaaaaaagcagggacctttcatagaagagttagccgggctaacaaaaagtgttcaagagaaggaccaccttgttctggatgggtcgagggcatggcaccagttttctcaaagtccgcttggcaatgtgtgtggcaccttatccagaatgatcttatccatggatggggcatcgattacaagtttgggtattgtgctcagggtgacaggacaaagaacattggcgtagttgatagtgaatttatagttcaccgaggagtgcagacattaggaggttctacaataacaaaggatggtattcgtggcaaaaatgccaagccactcggccagaaagcagctcaaatccaaagatcgagagggagggctccaggccttgatatgcgaacaaagatccggagaaaatcgcgatccgagctccgtgattttcagaagcgctgggaccgggctgcaagggaagacagaacatgggttgatccgtttgcccgctcccgaagaaagcggaagaatagaaacccacagtagatcagcataatcttcactgttacacttgcacataattccgtttgcaccttggatttagagtgtataataattgcataatcaacattgtataaattctcacagacgaaacgagaaccacacacgtgaaattttccgatgggagttgtgggttcttgtatcgaggggcaggtccaggatttaaaggatgggcattcggaattgtagttggcacaatttttttaacaacataaatttattattcatgggagcggataattatccattggacatagatgtggtataatttgttatccacatgtatgagtatgaatataataaggtattcattgatattttttttctgaacccaatgggtatcagacatgagtacaaatctatacctacgaacgtatatgagtatgagtatatattgaattttgtctcgtagttatagatttgtaaaccatatactcatgtcctaaccgtgattgctatctctagtcatacggtagggaaatgaaaag

SEQ ID NO: 70104 - DNA, 2381 bp, Zea Mays
gtcgcgctgttcctctcgggctctcgttcctcttgctccctcccgcgggccgcggccgccttcgcccgtccccgtccccgtccccgtccccgtcccaatttccaccaacctttcccaatcgccctccaggctctggcactgcgagacgtttcattagccacttagccgttcccacgacacaatcagcaccaccggtgtcctcgctgccaaggcgcccgcccgctcgtgtgacgagtggcgttcgtccaccgcccattccgcgctcagctctgagggcctcccgcccgccgcggcatcatctccggctcctctcgtcgccacgggtgtcacgaaatgatcctgacttgcttgagttgcttcttgacaccataagaagcgatccatctgtttccagttgtacacagaaaattagtgcctggaaaaataagaatggtaaggggggcgataggtgtcctaagatgaaactgcggttgcatctgttcgtcctgtgcgtgatcattatattcctggtgtacaacatggctaactttcaacataagcagacaacgttggaagcaaaatctcatccatttgatacagtgacggtgtctgacagagatgctgttaaggtgcctcaaaaggctgaggctaggattggttatttaccccatggtatagtggagtctaactctgacatggacttgaagccattgtggctgactacaagtgcacggtcaaagaagcctaaacaaaatgataattttttgattgctattgctgccggtataaatcagaaaaaaactgtggatgctattatgaagaagtttcttccagaaaattttacagctatattgttccattatgatgggaatgtcaatgggtggaatgatctaccatggagcaaaagtgtgatacatatagctgcctctaatcagactaaatggtggtttgcaaagaggttcctccatcctgctgttgtgtccatataccagtacatctttctttgggatgaagatctggaagtagataactttagcccgagaagatacttaaatatagttagatcagaagggttggagatatcacaaccaggtcttgactctaagctttctgaaattcatcaccggataactgttcgtaaaaaagcagggacctttcatagaagagttagccgggctaacaaaaagtgttcaagagaaggaccaccttgttctggatgggtcgagggcatggcaccagttttctcaaagtccgcttggcaatgtgtgtggcaccttatccagaatgatcttatccatggatggggcatcgattacaagtttgggtattgtgctcagggtgacaggacaaagaacattggcgtagttgatagtgaatttatagttcaccgaggagtgcagacattaggaggttctacaataacaaaggatggtattcgtggcaaaaatgccaagccactcggccagaaagcagctcaaatccaaagatcgagagggagggctccaggccttgatatgcgaacaaaggtgagctaacaaagcacttggtatacgtcgtttgaagtgtttaactcgaaaaatgttggtggaagctgaaaattcagagttcaaaaacctatcacttcgcttgtaaaactgctgttccgcttcagttgacagtaacagctcagtaatcaatagctacccagattatgcaatgcgtcggaatttacattccatcccatcgatcagccctcacggtttgctgcaatttttttcgatcttgcagatccggagaaaatcgcgatccgagctccgtgattttcagaagcgctgggaccgggctgcaagggaagacagaacatgggttgatccgtttgcccgctcccgaagaaagcggaagaatagaaacccacagtagatcagcataatcttcactgttacacttgcacataattccgtttgcaccttggatttagagtgtataataattgcataatcaacattgtataaattctcacagacgaaacgagaaccacacacgtgaaattttccgatgggagttgtgggttcttgtatcgaggggcaggtccaggatttaaaggatgggcattcggaattgtagttggcacaatttttttaacaacataaatttattattcatgggagcggataattatccattggacatagatgtggtataatttgttatccacatgtatgagtatgaatataataaggtattcattgatattttttttctgaacccaatgggtatcagacatgagtacaaatctatacctacgaacgtatatgagtatgagtatatattgaattttgtctcgtagttatagatttgtaaaccatatactcatgtcctaaccgtgattgctatctctagtcatacggtagggaaatgaaaag

SEQ ID NO: 70105 - DNA, 2140 bp, Zea Mays
gtcgcgctgttcctctcgggctctcgttcctcttgctccctcccgcgggccgcggccgccttcgcccgtccccgtccccgtccccgtccccgtcccaatttccaccaacctttcccaatcgccctccaggctctggcactgcgagacgtttcattagccacttagccgttcccacgacacaatcagcaccaccggtgtcctcgctgccaaggcgcccgcccgctcgtgtgacgagtggcgttcgtccaccgcccattccgcgctcagctctgagggcctcccgcccgccgcggcatcatctccggctcctctcgtcgccacgggtgtcacgaaatgatcctgacttgcttgagttgcttcttgacaccataagaagcgatccatctgtttccagttgtacacagaaaattagtgcctggaaaaataagaatggtaaggggggcgataggtgtcctaagatgaaactgcggttgcatctgttcgtcctgtgcgtgatcattatattcctggtgtacaacatggctaactttcaacataagcagacaacgttggaagcaaaatctcatccatttgatacagtgacggtgtctgacagagatgctgttaaggtgcctcaaaaggctgaggctaggattggttatttaccccatggtatagtggagtctaactctgacatggacttgaagccattgtggctgactacaagtgcacggtcaaagaagcctaaacaaaatgataattttttgattgctattgctgccggtataaatcagaaaaaaactgtggatgctattatgaagaagtttcttccagaaaattttacagctatattgttccattatgatgggaatgtcaatgggtggaatgatctaccatggagcaaaagtgtgatacatatagctgcctctaatcagactaaatggtggtttgcaaagaggttcctccatcctgctgttgtgtccatataccagtacatctttctttgggatgaagatctggaagtagataactttagcccgagaagatacttaaatatagttagatcagaagggttggagatatcacaaccaggtcttgactctaagctttctgaaattcatcaccggataactgttcgtaaaaaagcagggacctttcatagaagagttagccgggctaacaaaaagtgttcaagagaaggaccaccttgttctggatgggtcgagggcatggcaccagttttctcaaagtccgcttggcaatgtgtgtggcaccttatccagaatgatcttatccatggatggggcatcgattacaagtttgggtattgtgctcagggtgacaggacaaagaacattggcgtagttgatagtgaatttatagttcaccgaggagtgcagacattaggaggttctacaataacaaaggatggtattcgtggcaaaaatgccaagccactcggccagaaagcagctcaaatccaaagatcgagagggagggctccaggccttgatatgcgaacaaagatccggagaaaatcgcgatccgagctccgtgattttcagaagcgctgggaccgggctgcaagggaagacagaacatgggttgatccgtttgcccgctcccgaagaaagcggaagaatagaaacccacagtagatcagcataatcttcactgttacacttgcacataattccgtttgcaccttggatttagagtgtataataattgcataatcaacattgtataaattctcacagacgaaacgagaaccacacacgtgaaattttccgatgggagttgtgggttcttgtatcgaggggcaggtccaggatttaaaggatgggcattcggaattgtagttggcacaatttttttaacaacataaatttattattcatgggagcggataattatccattggacatagatgtggtataatttgttatccacatgtatgagtatgaatataataaggtattcattgatattttttttctgaacccaatgggtatcagacatgagtacaaatctatacctacgaacgtatatgagtatgagtatatattgaattttgtctcgtagttatagatttgtaaaccatatactcatgtcctaaccgtgattgctatctctagtcatacggtagggaaatgaaaag

SEQ ID NO: 70106 - DNA, 2043 bp, Zea Mays
gtcgcgctgttcctctcgggctctcgttcctcttgctccctcccgcgggccgcggccgccttcgcccgtccccgtccccgtccccgtccccgtcccaatttccaccaacctttcccaatcgccctccaggctctggcactgcgagacgtttcattagccacttagccgttcccacgacacaatcagcaccaccggtgtcctcgctgccaaggcgcccgcccgctcgtgtgacgagtggcgttcgtccaccgcccattccgcgctcagctctgagggcctcccgcccgccgcggcatcatctccggctcctctcgtcaatggtaaggggggcgataggtgtcctaagatgaaactgcggttgcatctgttcgtcctgtgcgtgatcattatattcctggtgtacaacatggctaactttcaacataagcagacaacgttggaagcaaaatctcatccatttgatacagtgacggtgtctgacagagatgctgttaaggtgcctcaaaaggctgaggctaggattggttatttaccccatggtatagtggagtctaactctgacatggacttgaagccattgtggctgactacaagtgcacggtcaaagaagcctaaacaaaatgataattttttgattgctattgctgccggtataaatcagaaaaaaactgtggatgctattatgaagaagtttcttccagaaaattttacagctatattgttccattatgatgggaatgtcaatgggtggaatgatctaccatggagcaaaagtgtgatacatatagctgcctctaatcagactaaatggtggtttgcaaagaggttcctccatcctgctgttgtgtccatataccagtacatctttctttgggatgaagatctggaagtagataactttagcccgagaagatacttaaatatagttagatcagaagggttggagatatcacaaccaggtcttgactctaagctttctgaaattcatcaccggataactgttcgtaaaaaagcagggacctttcatagcgtgtattttgatagaagagttagccgggctaacaaaaagtgttcaagagaaggaccaccttgttctggatgggtcgagggcatggcaccagttttctcaaagtccgcttggcaatgtgtgtggcaccttatccagaatgatcttatccatggatggggcatcgattacaagtttgggtattgtgctcagggtgacaggacaaagaacattggcgtagttgatagtgaatttatagttcaccgaggagtgcagacattaggaggttctacaataacaaaggatggtattcgtggcaaaaatgccaagccactcggccagaaagcagctcaaatccaaagatcgagagggagggctccaggccttgatatgcgaacaaagatccggagaaaatcgcgatccgagctccgtgattttcagaagcgctgggaccgggctgcaagggaagacagaacatgggttgatccgtttgcccgctcccgaagaaagcggaagaatagaaacccacagtagatcagcataatcttcactgttacacttgcacataattccgtttgcaccttggatttagagtgtataataattgcataatcaacattgtataaattctcacagacgaaacgagaaccacacacgtgaaattttccgatgggagttgtgggttcttgtatcgaggggcaggtccaggatttaaaggatgggcattcggaattgtagttggcacaatttttttaacaacataaatttattattcatgggagcggataattatccattggacatagatgtggtataatttgttatccacatgtatgagtatgaatataataaggtattcattgatattttttttctgaacccaatgggtatcagacatgagtacaaatctatacctacgaacgtatatgagtatgagtatatattgaattttgtctcgtagttatagatttgtaaaccatatactcatgtcctaaccgtgattgctatctctagtcatacggtagggaaatgaaaag

SEQ ID NO: 70107 - DNA, 2369 bp, Zea Mays
tgtggggtgcgcgctgcgagcactgacagggcagcgcggatggaatcgagcgaggcgccacccgtcgcgtttcctctgaggctctgacccgaccgtcgctgtcgcgctgttcctctcgggctctcgttcctcttgctccctcccgcgggccgcggccgccttcgcccgtccccgtccccgtccccgtccccgtcccaatttccaccaacctttcccaatcgccctccaggctctggcactgcgagacgtttcattagccacttagccgttcccacgacacaatcagcaccaccggtgtcctcgctgccaaggcgcccgcccgctcgtgtgacgagtggcgttcgtccaccgcccattccgcgctcagctctgagggcctcccgcccgccgcggcatcatctccggctcctctcgtcaatggtaaggggggcgataggtgtcctaagatgaaactgcggttgcatctgttcgtcctgtgcgtgatcattatattcctggtgtacaacatggctaactttcaacataagcagacaacgttggaagcaaaatctcatccatttgatacagtgacggtgtctgacagagatgctgttaaggtgcctcaaaaggctgaggctaggattggttatttaccccatggtatagtggagtctaactctgacatggacttgaagccattgtggctgactacaagtgcacggtcaaagaagcctaaacaaaatgataattttttgattgctattgctgccggtataaatcagaaaaaaactgtggatgctattatgaagaagtttcttccagaaaattttacagctatattgttccattatgatgggaatgtcaatgggtggaatgatctaccatggagcaaaagtgtgatacatatagctgcctctaatcagactaaatggtggtttgcaaagaggttcctccatcctgctgttgtgtccatataccagtacatctttctttgggatgaagatctggaagtagataactttagcccgagaagatacttaaatatagttagatcagaagggttggagatatcacaaccaggtcttgactctaagctttctgaaattcatcaccggataactgttcgtaaaaaagcagggacctttcatagaagagttagccgggctaacaaaaagtgttcaagagaaggaccaccttgttctggatgggtcgagggcatggcaccagttttctcaaagtccgcttggcaatgtgtgtggcaccttatccagaatgatcttatccatggatggggcatcgattacaagtttgggtattgtgctcagggtgacaggacaaagaacattggcgtagttgatagtgaatttatagttcaccgaggagtgcagacattaggaggttctacaataacaaaggatggtattcgtggcaaaaatgccaagccactcggccagaaagcagctcaaatccaaagatcgagagggagggctccaggccttgatatgcgaacaaaggtgagctaacaaagcacttggtatacgtcgtttgaagtgtttaactcgaaaaatgttggtggaagctgaaaattcagagttcaaaaacctatcacttcgcttgtaaaactgctgttccgcttcagttgacagtaacagctcagtaatcaatagctacccagattatgcaatgcgtcggaatttacattccatcccatcgatcagccctcacggtttgctgcaatttttttcgatcttgcagatccggagaaaatcgcgatccgagctccgtgattttcagaagcgctgggaccgggctgcaagggaagacagaacatgggttgatccgtttgcccgctcccgaagaaagcggaagaatagaaacccacagtagatcagcataatcttcactgttacacttgcacataattccgtttgcaccttggatttagagtgtataataattgcataatcaacattgtataaattctcacagacgaaacgagaaccacacacgtgaaattttccgatgggagttgtgggttcttgtatcgaggggcaggtccaggatttaaaggatgggcattcggaattgtagttggcacaatttttttaacaacataaatttattattcatgggagcggataattatccattggacatagatgtggtataatttgttatccacatgtatgagtatgaatataataaggtattcattgatattttttttctgaacccaatgggtatcagacatgagtacaaatctatacctacgaacgtatatgagtatgagtatatattgaattttgtctcgtagttatagatttgtaaaccatatactcatgtcctaaccgtgattgctatctctagtcatacggtagggaaatgaaaag

SEQ ID NO: 70108 - DNA, 2374 bp, Zea Mays
ctccgcgctcgtcgcccgagccgaggaggccgtgtagcgctgtggggtgcgcgctgcgagcactgacagggcagcgcggatggaatcgagcgaggcgccacccgtcgcgtttcctctgaggctctgacccgaccgtcgctgtcgcgctgttcctctcgggctctcgttcctcttgctccctcccgcgggccgcggccgccttcgcccgtccccgtccccgtccccgtccccgtcccaatttccaccaacctttcccaatcgccctccaggctctggcactgcgagacgtttcattagccacttagccgttcccacgacacaatcagcaccaccggtgtcctcgctgccaaggcgcccgcccgctcgtgtgacgagtggcgttcgtccaccgcccattccgcgctcagctctgagggcctcccgcccgccgcggcatcatctccggctcctctcgtcaatggtaaggggggcgataggtgtcctaagatgaaactgcggttgcatctgttcgtcctgtgcgtgatcattatattcctggtgtacaacatggctaactttcaacataagcagacaacgttggaagcaaaatctcatccatttgatacagtgacggtgtctgacagagatgctgttaaggtgcctcaaaaggctgaggctaggattggttatttaccccatggtatagtggagtctaactctgacatggacttgaagccattgtggctgactacaagtgcacggtcaaagaagcctaaacaaaatgataattttttgattgctattgctgccggtataaatcagaaaaaaactgtggatgctattatgaagaagaaaattttacagctatattgttccattatgatgggaatgtcaatgggtggaatgatctaccatggagcaaaagtgtgatacatatagctgcctctaatcagactaaatggtggtttgcaaagaggttcctccatcctgctgttgtgtccatataccagtacatctttctttgggatgaagatctggaagtagataactttagcccgagaagatacttaaatatagttagatcagaagggttggagatatcacaaccaggtcttgactctaagctttctgaaattcatcaccggataactgttcgtaaaaaagcagggacctttcatagaagagttagccgggctaacaaaaagtgttcaagagaaggaccaccttgttctggatgggtcgagggcatggcaccagttttctcaaagtccgcttggcaatgtgtgtggcaccttatccagaatgatcttatccatggatggggcatcgattacaagtttgggtattgtgctcagggtgacaggacaaagaacattggcgtagttgatagtgaatttatagttcaccgaggagtgcagacattaggaggttctacaataacaaaggatggtattcgtggcaaaaatgccaagccactcggccagaaagcagctcaaatccaaagatcgagagtacgttgtgtgcctgacaccttatttaaatgtttgctgcatactcccccttcccaaaacaagtgcacatcacgtttgtggacaagtcaaaatgtttttgattttgaccaagtatatagaaaataatatcaatatttatacctccaaacaaatttattttgaatatatatgttctctattttgttctatgaccatggcatctgttatgattagcaggggagggctccaggccttgatatgcgaacaaagatccggagaaaatcgcgatccgagctccgtgattttcagaagcgctgggaccgggctgcaagggaagacagaacatgggttgatccgtttgcccgctcccgaagaaagcggaagaatagaaacccacagtagatcagcataatcttcactgttacacttgcacataattccgtttgcaccttggatttagagtgtataataattgcataatcaacattgtataaattctcacagacgaaacgagaaccacacacgtgaaattttccgatgggagttgtgggttcttgtatcgaggggcaggtccaggatttaaaggatgggcattcggaattgtagttggcacaatttttttaacaacataaatttattattcatgggagcggataattatccattggacatagatgtggtataatttgttatccacatgtatgagtatgaatataataaggtattcattgatattttttttctgaacccaatgggtatcagacatgagtacaaatctatacctacgaacgtatatgagtatgagtatatattgaattttgtctcgtagttatagatttgtaaaccatatactcatgtcctaaccgtgattgctatctctagtcatacggtagggaaatgaaaag

SEQ ID NO: 70109 - DNA, 2406 bp, Zea Mays
gcgccgcctccgcgctcgtcgcccgagccgaggaggccgtgtagcgctgtggggtgcgcgctgcgagcactgacagggcagcgcggatggaatcgagcgaggcgccacccgtcgcgtttcctctgaggctctgacccgaccgtcgctgtcgcgctgttcctctcgggctctcgttcctcttgctccctcccgcgggccgcggccgccttcgcccgtccccgtccccgtccccgtccccgtcccaatttccaccaacctttcccaatcgccctccaggctctggcactgcgagacgtttcattagccacttagccgttcccacgacacaatcagcaccaccggtgtcctcgctgccaaggcgcccgcccgctcgtgtgacgagtggcgttcgtccaccgcccattccgcgctcagctctgagggcctcccgcccgccgcggcatcatctccggctcctctcgtcaatggtaaggggggcgataggtgtcctaagatgaaactgcggttgcatctgttcgtcctgtgcgtgatcattatattcctggtgtacaacatggctaactttcaacataagcagacaacgttggaagcaaaatctcatccatttgatacagtgacggtgtctgacagagatgctgttaaggtgcctcaaaaggctgaggctaggattggttatttaccccatggtatagtggagtctaactctgacatggacttgaagccattgtggctgactacaagtgcacggtcaaagaagcctaaacaaaatgataattttttgattgctattgctgccggtataaatcagaaaaaaactgtggatgctattatgaagaagaaaattttacagctatattgttccattatgatgggaatgtcaatgggtggaatgatctaccatggagcaaaagtgtgatacatatagctgcctctaatcagactaaatggtggtttgcaaagaggttcctccatcctgctgttgtgtccatataccagtacatctttctttgggatgaagatctggaagtagataactttagcccgagaagatacttaaatatagttagatcagaagggttggagatatcacaaccaggtcttgactctaagctttctgaaattcatcaccggataactgttcgtaaaaaagcagggacctttcatagaagagttagccgggctaacaaaaagtgttcaagagaaggaccaccttgttctggatgggtcgagggcatggcaccagttttctcaaagtccgcttggcaatgtgtgtggcaccttatccagaatgatcttatccatggatggggcatcgattacaagtttgggtattgtgctcagggtgacaggacaaagaacattggcgtagttgatagtgaatttatagttcaccgaggagtgcagacattaggaggttctacaataacaaaggatggtattcgtggcaaaaatgccaagccactcggccagaaagcagctcaaatccaaagatcgagagggagggctccaggccttgatatgcgaacaaaggtgagctaacaaagcacttggtatacgtcgtttgaagtgtttaactcgaaaaatgttggtggaagctgaaaattcagagttcaaaaacctatcacttcgcttgtaaaactgctgttccgcttcagttgacagtaacagctcagtaatcaatagctacccagattatgcaatgcgtcggaatttacattccatcccatcgatcagccctcacggtttgctgcaatttttttcgatcttgcagatccggagaaaatcgcgatccgagctccgtgattttcagaagcgctgggaccgggctgcaagggaagacagaacatgggttgatccgtttgcccgctcccgaagaaagcggaagaatagaaacccacagtagatcagcataatcttcactgttacacttgcacataattccgtttgcaccttggatttagagtgtataataattgcataatcaacattgtataaattctcacagacgaaacgagaaccacacacgtgaaattttccgatgggagttgtgggttcttgtatcgaggggcaggtccaggatttaaaggatgggcattcggaattgtagttggcacaatttttttaacaacataaatttattattcatgggagcggataattatccattggacatagatgtggtataatttgttatccacatgtatgagtatgaatataataaggtattcattgatattttttttctgaacccaatgggtatcagacatgagtacaaatctatacctacgaacgtatatgagtatgagtatatattgaattttgtctcgtagttatagatttgtaaaccatatactcatgtcctaaccgtgattgctatctctagtcatacggtagggaaatgaaaag

SEQ ID NO: 70110 - DNA, 2212 bp, Zea Mays
ggaaaacccggtcgcgggcgtggccggaacggcagctgcgccgcctccgcgctcgtcgcccgagccgaggaggccgtgtagcgctgtggggtgcgcgctgcgagcactgacagggcagcgcggatggaatcgagcgaggcgccacccgtcgcgtttcctctgaggctctgacccgaccgtcgctgtcgcgctgttcctctcgggctctcgttcctcttgctccctcccgcgggccgcggccgccttcgcccgtccccgtccccgtccccgtccccgtcccaatttccaccaacctttcccaatcgccctccaggctctggcactgcgagacgtttcattagccacttagccgttcccacgacacaatcagcaccaccggtgtcctcgctgccaaggcgcccgcccgctcgtgtgacgagtggcgttcgtccaccgcccattccgcgctcagctctgagggcctcccgcccgccgcggcatcatctccggctcctctcgtcaatggtaaggggggcgataggtgtcctaagatgaaactgcggttgcatctgttcgtcctgtgcgtgatcattatattcctggtgtacaacatggctaactttcaacataagcagacaacgttggaagcaaaatctcatccatttgatacagtgacggtgtctgacagagatgctgttaaggtgcctcaaaaggctgaggctaggattggttatttaccccatggtatagtggagtctaactctgacatggacttgaagccattgtggctgactacaagtgcacggtcaaagaagcctaaacaaaatgataattttttgattgctattgctgccggtataaatcagaaaaaaactgtggatgctattatgaagaagtttcttccagaaaattttacagctatattgttccattatgatgggaatgtcaatgggtggaatgatctaccatggagcaaaagtgtgatacatatagctgcctctaatcagactaaatggtggtttgcaaagaggttcctccatcctgctgttgtgtccatataccagtacatctttctttgggatgaagatctggaagtagataactttagcccgagaagatacttaaatatagttagatcagaagggttggagatatcacaaccaggtcttgactctaagctttctgaaattcatcaccggataactgttcgtaaaaaagcagggacctttcatagaagagttagccgggctaacaaaaagtgttcaagagaaggaccaccttgttctggatgggtcgagggcatggcaccagttttctcaaagtccgcttggcaatgtgtgtggcaccttatccagaatgatcttatccatggatggggcatcgattacaagtttgggtattgtgctcagggtgacaggacaaagaacattggcgtagttgatagtgaatttatagttcaccgaggagtgcagacattaggaggttctacaataacaaaggatggtattcgtggcaaaaatgccaagccactcggccagaaagcagctcaaatccaaagatcgagagggagggctccaggccttgatatgcgaacaaagatccggagaaaatcgcgatccgagctccgtgattttcagaagcgctgggaccgggctgcaagggaagacagaacatgggttgatccgtttgcccgctcccgaagaaagcggaagaatagaaacccacagtagatcagcataatcttcactgttacacttgcacataattccgtttgcaccttggatttagagtgtataataattgcataatcaacattgtataaattctcacagacgaaacgagaaccacacacgtgaaattttccgatgggagttgtgggttcttgtatcgaggggcaggtccaggatttaaaggatgggcattcggaattgtagttggcacaatttttttaacaacataaatttattattcatgggagcggataattatccattggacatagatgtggtataatttgttatccacatgtatgagtatgaatataataaggtattcattgatattttttttctgaacccaatgggtatcagacatgagtacaaatctatacctacgaacgtatatgagtatgagtatatattgaattttgtctcgtagttatagatttgtaaaccatatactcatgtcctaaccgtgattgctatctctagtcatacggtagggaaatgaaaag

SEQ ID NO: 70111 - DNA, 2214 bp, Zea Mays
aacaaaccgagcggaaaacccggtcgcgggcgtggccggaacggcagctgcgccgcctccgcgctcgtcgcccgagccgaggaggccgtgtagcgctgtggggtgcgcgctgcgagcactgacagggcagcgcggatggaatcgagcgaggcgccacccgtcgcgtttcctctgaggctctgacccgaccgtcgctgtcgcgctgttcctctcgggctctcgttcctcttgctccctcccgcgggccgcggccgccttcgcccgtccccgtccccgtccccgtccccgtcccaatttccaccaacctttcccaatcgccctccaggctctggcactgcgagacgtttcattagccacttagccgttcccacgacacaatcagcaccaccggtgtcctcgctgccaaggcgcccgcccgctcgtgtgacgagtggcgttcgtccaccgcccattccgcgctcagctctgagggcctcccgcccgccgcggcatcatctccggctcctctcgtcaatggtaaggggggcgataggtgtcctaagatgaaactgcggttgcatctgttcgtcctgtgcgtgatcattatattcctggtgtacaacatggctaactttcaacataagcagacaacgttggaagcaaaatctcatccatttgatacagtgacggtgtctgacagagatgctgttaaggtgcctcaaaaggctgaggctaggattggttatttaccccatggtatagtggagtctaactctgacatggacttgaagccattgtggctgactacaagtgcacggtcaaagaagcctaaacaaaatgataattttttgattgctattgctgccggtataaatcagaaaaaaactgtggatgctattatgaagaagaaaattttacagctatattgttccattatgatgggaatgtcaatgggtggaatgatctaccatggagcaaaagtgtgatacatatagctgcctctaatcagactaaatggtggtttgcaaagaggttcctccatcctgctgttgtgtccatataccagtacatctttctttgggatgaagatctggaagtagataactttagcccgagaagatacttaaatatagttagatcagaagggttggagatatcacaaccaggtcttgactctaagctttctgaaattcatcaccggataactgttcgtaaaaaagcagggacctttcatagaagagttagccgggctaacaaaaagtgttcaagagaaggaccaccttgttctggatgggtcgagggcatggcaccagttttctcaaagtccgcttggcaatgtgtgtggcaccttatccagaatgatcttatccatggatggggcatcgattacaagtttgggtattgtgctcagggtgacaggacaaagaacattggcgtagttgatagtgaatttatagttcaccgaggagtgcagacattaggaggttctacaataacaaaggatggtattcgtggcaaaaatgccaagccactcggccagaaagcagctcaaatccaaagatcgagagggagggctccaggccttgatatgcgaacaaagatccggagaaaatcgcgatccgagctccgtgattttcagaagcgctgggaccgggctgcaagggaagacagaacatgggttgatccgtttgcccgctcccgaagaaagcggaagaatagaaacccacagtagatcagcataatcttcactgttacacttgcacataattccgtttgcaccttggatttagagtgtataataattgcataatcaacattgtataaattctcacagacgaaacgagaaccacacacgtgaaattttccgatgggagttgtgggttcttgtatcgaggggcaggtccaggatttaaaggatgggcattcggaattgtagttggcacaatttttttaacaacataaatttattattcatgggagcggataattatccattggacatagatgtggtataatttgttatccacatgtatgagtatgaatataataaggtattcattgatattttttttctgaacccaatgggtatcagacatgagtacaaatctatacctacgaacgtatatgagtatgagtatatattgaattttgtctcgtagttatagatttgtaaaccatatactcatgtcctaaccgtgattgctatctctagtcatacggtagggaaatgaaaag

SEQ ID NO: 70112 - DNA, 4902 bp, Zea Mays
ctcgcctctgcggctgcgcctgcgcgcacaaagactcaacacaagcgcccccctcgtcgcagtcccgccgttacatggcccgctctgttcccctttccggcgcccgcgacggactgcgacgagcggatagatagatctgtgccccgtccctgtctcgccatcctcctttctcctcctccactccctatcgactatcgagcagagcgaatccttagcggggaagtctttccgagctcagggagtggggtttaaaacgcggctcgacgaaaggaaggccgcactcgctgctgctgctggtcgcttgctttcggtggcgagcgtctcggtaaagcggcgtcggcgtcggaggcggcggcagagactggacttgcttgctccttgctgcgcagtgtagtgctgtgctaccttggagacaggatcctgccgcagggactcataattgatcagtgtgccccaacataagagcgaaacgtgactgagtttgccagctcccccttcatccactgtggtcgctcgtctgctaatgcccgcatcggaggattgctcacggatatgcttctggtgatgggcaacccggggcgctcgcggcagttgtcagcgctggttgcttccgccgccatcttgctgtcactgtccgcgttgccaatttgtcggccctacacctacgagcaagatgtgtttgcgataaacggcttgtacacggcacttggagcaccacagctgcctaattggacttcaaatggtggtgacccctgcaatgaaggctggcaaggtgtttcatgtgtagcgtcaaatataacctccataattctcagcggtgcaaatttaggtggacagctgggcaacactttggggaattttacatcattaatcaccttggatctcagcaacaacaatattggagggaccataccagatggtctaccactcacaatgcagagatttttcctttcagctaaccaactaagtggtagccttccaagtacattgtcatcccttacacttttgacaagcatgtcactcaatagcaatcatttgactggagcgataccagatgtattttcagcactcactggacttgcaaatttacatattcagaacaatcaaatatctggaactcttaatgtgttgcaagatctccctttccaagatttgaacgttgaaaacaaccttttctctggtcccgtgcctgtgaaattactgaacttgccaaacttcaagaaggatgggaacccattcaatacaagcatagctccatctgcgcagcctcccatcgcgccaacaccattaccgtctatcccaccttcgtcagggcatgtcccctcaaaagaacctgcacattcttctagtgttccaggtgaaaaaaggtcgagagatgatatttatatgaaaaacaagataggaagggtacctcagaagcttggagagcctaaaatcaaggagccaccattaaaactcaagaatgatgctgagaaagctccgaatgttgtttctgatggaagagaggagcataagttaaaagtgccaacatcagaaacttcaaatgtggtttatgatccaagtccaagggatggggcagaacttagattcatcaccgacagctgtacctttggctgttacaatgaataaaaaagagcatgtgattgatatggaaaaggctgataattttgttgaggaccaactgcatcctccgcagccgatggcactgcggactgaaaaagtcactgtcaatcccagtgtacgtacaagaaggggaagagtaccttcagttgaaaaggtggaatcgacgactactgtcaagtccttttccattgcatcccttcaacaatataccaatagtttcagtgaggaaaatatcataagagacagcaggtttggtaaggtgtatctggcaaagcttcctgatggagagctactggaaattttgaagattgactcttctaactcaaaagtgccagtagatgcctttcttgagctagttgtgaggatttctgaactgaggcatcctaacatacttggtcttgttggatactgtgcggagtttgagcagcgattacttgtctatgagtactgtagcaagatgaccctacatgatgaacttcgtcatgtggatgactcaagcaagccattatcgtggaatgctcgcctccaagttgcttcagaggcagcaaaagcattgcaacatcttcatgacggttgccaaccaccagttgtacaccagaattttgaaccctctgttgttctgctcaacagcaccttagttgtgcatatttctgaatgtggccttgcatcactagcatcaaaatcagtttctcagttgtctggacacaccttattccattatgaagcacctgaagtgcatgaatctggatcagtaagcgatcgaagtgatgtttacagcttcggtgtagttatgttggagcttctaacaggacgtaaaccttatgacagttcgtatccacgagctgaacaacatctagtacgatgggccacttctcaactctatgatattgatgccataacgaagatggttgatccttccattcgaggacaatgttctgataaggcattatcccgttttgctgacattattagccgctgcattcagcatgaaccagaattcaggccaccaatgtctgaagttgtccaagacttaactcgcatggtaagtaatgtatcaagggcttccatgtaggctatcccttaaacaatggtaaaatgtggaggtccgtccttatagaaattagaattcgaggacgcacctcgttctggagcttcttgctagattcagttctctctggccatgattcaagatgcctttgacgaccattgatgcggtagtaggatattttggccaatgcaaaatgggtggaacacagtggcaggatgcagagactgcaccacgttttgtccactgccagaatgtgaagcaaaatttgcagagatacagttgcggtactccgcatgcaatgcttggtttgaagagcttcgtaagcagagagttgctgaactgaaaagggaattggagaagtcggaaaattctatcggatccctccaatctgtgattcaaaagcctcagcaatagcaaaacatgttgacgggagttctgaataccacaccagtcatactgaatcatgtcccccgctctgaaaatacagcagatactaatttcctcagggaaagaaacatccagggatagatcatcagctgctagtttcacagaggaggcaagcaacagtcagaaatctcagaaagtgcagcagtgtgatactgattcaattcaagctatcaatccatcaccagatgagtcatatccccaggcccaagttgaaaaggtcggtcccaaagatggcttgctttggggttctagaaaacaaagaggagggagagctagaaggacacttctgaaaggtggtgatagtagcggggatggtgagcctacatctacagcattcatacagagggagggttcgtctaaaggctgcatgaagaacttcataactccaaaagtagaaccagttgttatgaagaagggtgtgaaaattccaaaagtagaatctggtgtgatgaataaggatttgaaaacttcaaatgtaggatccggtataatgaagaagtgcttgaaaactcccaatgcacaagctgatatgctgaagaaggatgtgagaactcctaaagcagaatccgatgttataaagaaggggttaaaaattcccaaagtagaacctgatgttatgaagaagggcttgagatcttcaaaggcagaatgtggtcagcctgtgattgagagagttaaactgaagctggcagagattttaaatactatatcaactcaagatgactgcaaaatgttgcaatgccaacttgatacccagaggaaaagagctagatataagaagatgattcgccggcatatggacttccgaatgcttcactctaagatcaagagtggcgcaatctcttgcaccaaggagcttctgagagatgtgctcattttcatcaataatgtaataaccttctatccgaaggctacattggagcacatggctgcggttgagcttcgtgagtctgcatgcaaaactgtgaagcagagtgcaagcttgttcttgaaaagccatggagagatcggaacagctggtgcccccgtagtaaagaatactcgagtcctgcagcctcgatgccctggccccggtgatgcaaggccaagcaaggtttcttcaagggacgctactgccagggaaggagatggcaagcgccctagtgatcagctggctaatcaaaagactatacagagaaatgagccagccaagaagagaggtgtgggtcggcctccaaagagtgggcataggattgctggggcacaggaagatagccccataaaaggcaggaaaaggggcgctggggcacaggaaggtagccccatcaacggcaggaaaaggggcgctggggcacagctagatagccccggcaaaggcagaaagaggagtgcggcagcacaggagaataaccccagcaaaggcggcaagaagagccggcggtgaagctaccatcagctcaatgccggtgaaacagtgtacagcttaaccatatatcataggctggtcccttccaacgttgtttgcctgtcaaaaaagtttttgccccagtattcaaactgatgtaacaggaagggttagctgtttctgatgttgttttgtaaggagtatggacagttaggagggaaccctcattttcctgtagagattatccgagctaggctatacatgtctgactgtgtaatgcttaatagtttaatttatatcatgtgaactgatgcttgaacaccgacagttacctgtcagacgactgaaccagagatacgagaaacaacaggacttgaacagttcggctctatgtagcgag

SEQ ID NO: 70113 - DNA, 4690 bp, Zea Mays
ccctgcgccagcttttccgctcgcctcgcctctgcggctgcgcctgcgcgcacaaagactcaacacaagcgcccccctcgtcgcagtcccgccgttacatggcccgctctgttcccctttccggcgcccgcgacggactgcgacgagcggatagatagatctgtgccccgtccctgtctcgccatcctcctttctcctcctccactccctatcgactatcgagcagagcgaatccttagcggggaagtctttccgagctcagggagtggggtttaaaacgcggctcgacgaaaggaaggccgcactcgctgctgctgctggtcgcttgctttcggtggcgagcgtctcggtaaagcggcgtcggcgtcggaggcggcggcagagactggacttgcttgctccttgctgcgcagtgtagtgctgtgctaccttggagacaggatcctgccgcagggactcataattgatcagtgtgccccaacataagagcgaaacgtgactgagtttgccagctcccccttcatccactgtggtcgctcgtctgctaatgcccgcatcggaggattgctcacggatatgcttctggtgatgggcaacccggggcgctcgcggcagttgtcagcgctggttgcttccgccgccatcttgctgtcactgtccgcgttgccaatttgtcggccctacacctacgagcaagatgtgtttgcgataaacggcttgtacacggcacttggagcaccacagctgcctaattggacttcaaatggtggtgacccctgcaatgaaggctggcaaggtgtttcatgtgtagcgtcaaatataacctccataattctcagcggtgcaaatttaggtggacagctgggcaacactttggggaattttacatcattaatcaccttggatctcagcaacaacaatattggagggaccataccagatggtctaccactcacaatgcagagatttttcctttcagctaaccaactaagtggtagccttccaagtacattgtcatcccttacacttttgacaagcatgtcactcaatagcaatcatttgactggagcgataccagatgtattttcagcactcactggacttgcaaatttagatttttctgataacaatttgaccggtccgttgccaccttcaatgggaaatttgacatcattgactagcctacatattcagaacaatcaaatatctggaactcttaatgtgttgcaagatctccctttccaagatttgaacgttgaaaacaaccttttctctggtcccgtgcctgtgaaattactgaacttgccaaacttcaagaaggatgggaacccattcaatacaagcatagctccatctgcgcagcctcccatcgcgccaacaccattaccgtctatcccaccttcgtcagggcatgtcccctcaaaagaacctgcacattcttctagtgttccaggtggtagtacttcaggatcaggaaaacatactacactcaaattagttggatatattcttattggagtggtattagcagtagttcttgtgctaattgcaatgtactgtttatccaagtacaaagaaaaaaggtcgagagatgatatttatatgaaaaacaagataggaagggtacctcagaagcttggagagcctaaaatcaaggagccaccattaaaactcaagaatgatgctgagaaagctccgaatgttgtttctgatggaagagaggagcataagttaaaagtgccaacatcagaaacttcaaatgtggtttatgatccaagtccaagggatggggcagaacttagattcatcaccgacagtttcagtgaggaaaatatcataagagacagcaggtttggtaaggtgtatctggcaaagcttcctgatggagagctactggaaattttgaagattgactcttctaactcaaaagtgccagtagatgcctttcttgagctagttgtgaggatttctgaactgaggcatcctaacatacttggtcttgttggatactgtgcggagtttgagcagcgattacttgtctatgagtactgtagcaagatgaccctacatgatgaacttcgtcatgtggatgactcaagcaagccattatcgtggaatgctcgcctccaagttgcttcagaggcagcaaaagcattgcaacatcttcatgacggttgccaaccaccagttgtacaccagaattttgaaccctctgttgttctgctcaacagcaccttagttgtgcatatttctgaatgtggccttgcatcactagcatcaaaatcagtttctcagttgtctggacacaccttattccattatgaagcacctgaagtgcatgaatctggatcagtaagcgatcgaagtgatgtttacagcttcggtgtagttatgttggagcttctaacaggacgtaaaccttatgacagttcgtatccacgagctgaacaacatctagtacgatgggccacttctcaactctatgatattgatgccataacgaagatggttgatccttccattcgaggacaatgttctgataaggcattatcccgttttgctgacattattagccgctgcattcaggtaaaaacaattgatcctacatctgacaaaggtacgcagtgtgactaatcttcaaatttatgcagcatgaaccagaattcaggccaccaatgtctgaagttgtccaagacttaactcgcatggaatgtgaagcaaaatttgcagagatacagttgcggtactccgcatgcaatgcttggtttgaagagcttcgtaagcagagagttgctgaactgaaaagggaattggagaagtcggaaaattctatcggatccctccaatctgtgattcaaaagcctcagcaatagcaaaacatgttgacgggagttctgaataccacaccagtcatactgaatcatgtcccccgctctgaaaatacagcagatactaatttcctcagggaaagaaacatccagggatagatcatcagctgctagtttcacagaggaggcaagcaacagtcagaaatctcagaaagtgcagcagtgtgatactgattcaattcaagctatcaatccatcaccagatgagtcatatccccaggcccaagttgaaaaggtcggtcccaaagatggcttgctttggggttctagaaaacaaagaggagggagagctagaaggacacttctgaaaggtggtgatagtagcggggatggtgagcctacatctacagcattcatacagagggagggttcgtctaaaggctgcatgaagaacttcataactccaaaagtagaaccagttgttatgaagaagggtgtgaaaattccaaaagtagaatctggtgtgatgaataaggatttgaaaacttcaaatgtaggatccggtataatgaagaagtgcttgaaaactcccaatgcacaagctgatatgctgaagaaggatgtgagaactcctaaagcagaatccgatgttataaagaaggggttaaaaattcccaaagtagaacctgatgttatgaagaagggcttgagatcttcaaaggcagaatgtggtcagcctgtgattgagagagttaaactgaagctggcagagattttaaatactatatcaactcaagatgactgcaaaatgttgcaatgccaacttgatacccagaggaaaagagctagatataagaagatgattcgccggcatatggacttccgaatgcttcactctaagatcaagagtggcgcaatctcttgcaccaaggagcttctgagagatgtgctcattttcatcaataatgtaataaccttctatccgaaggctacattggagcacatggctgcggttgagcttcgtgagtctgcatgcaaaactgtgaagcagagtgcaagcttgttcttgaaaagccatggagagatcggaacagctggtgcccccgtagtaaagaatactcgagtcctgcagcctcgatgccctggccccggtgatgcaaggccaagcaaggtttcttcaagggacgctactgccagggaaggagatggcaagcgccctagtgatcagctggctaatcaaaagactatacagagaaatgagccagccaagaagagaggtgtgggtcggcctccaaagagtgggcataggattgctggggcacaggaagatagccccataaaaggcaggaaaaggggcgctggggcacaggaaggtagccccatcaacggcaggaaaaggggcgctggggcacagctagatagccccggcaaaggcagaaagaggagtgcggcagcacaggagaataaccccagcaaaggcggcaagaagagccggcggtgaagctaccatcagctcaatgccggtgaaacagtgtacagcttaaccatatatcataggctggtcccttccaacgttgtttgcctgtcaaaaaagtttttgccccagtattcaaactgatgtaacaggaagggttagctgtttctgatgttgttttgtaaggagtatggacagttaggagggaaccctcattttcctgtagagattatccgagctaggctatacatgtctgactgtgtaatgcttaatagtttaatttatatcatgtgaactgatgcttgaacaccgacagttacctgtcagacgactgaaccagagatacgagaaacaacaggacttgaacagttcggctctatgtagcgag

SEQ ID NO: 70114 - DNA, 5200 bp, Zea Mays
cagcacgcagcagcggtgaattcaaaagcggctcgcttcggtggggcttgtccttttcctgcctgccccacagcccctgcgcccctgcgccagcttttccgctcgcctcgcctctgcggctgcgcctgcgcgcacaaagactcaacacaagcgcccccctcgtcgcagtcccgccgttacatggcccgctctgttcccctttccggcgcccgcgacggactgcgacgagcggatagatagatctgtgccccgtccctgtctcgccatcctcctttctcctcctccactccctatcgactatcgagcagagcgaatccttagcggggaagtctttccgagctcagggagtggggtttaaaacgcggctcgacgaaaggaaggccgcactcgctgctgctgctggtcgcttgctttcggtggcgagcgtctcggtaaagcggcgtcggcgtcggaggcggcggcagagactggacttgcttgctccttgctgcgcagtgtagtgctgtgctaccttggagacaggatcctgccgcagggactcataattgatcagtgtgccccaacataagagcgaaacgtgactgagtttgccagctcccccttcatccactgtggtcgctcgtctgctaatgcccgcatcggaggattgctcacggatatgcttctggtgatgggcaacccggggcgctcgcggcagttgtcagcgctggttgcttccgccgccatcttgctgtcactgtccgcgttgccaatttgtcggccctacacctacgagcaagatgtgtttgcgataaacggcttgtacacggcacttggagcaccacagctgcctaattggacttcaaatggtggtgacccctgcaatgaaggctggcaaggtgtttcatgtgtagcgtcaaatataacctccataattctcagcggtgcaaatttaggtggacagctgggcaacactttggggaattttacatcattaatcaccttggatctcagcaacaacaatattggagggaccataccagatggtctaccactcacaatgcagagatttttcctttcagctaaccaactaagtggtagccttccaagtacattgtcatcccttacacttttgacaagcatgtcactcaatagcaatcatttgactggagcgataccagatgtattttcagcactcactggacttgcaaatttagatttttctgataacaatttgaccggtccgttgccaccttcaatgggaaatttgacatcattgactagcctacatattcagaacaatcaaatatctggaactcttaatgtgttgcaagatctccctttccaagatttgaacgttgaaaacaaccttttctctggtcccgtgcctgtgaaattactgaacttgccaaacttcaagaaggatgggaacccattcaatacaagcatagctccatctgcgcagcctcccatcgcgccaacaccattaccgtctatcccaccttcgtcagggcatgtcccctcaaaagaacctgcacattcttctagtgttccaggtggtagtacttcaggatcaggaaaacatactacactcaaattagttggatatattcttattggagtggtattagcagtagttcttgtgctaattgcaatgtactgtttatccaagtacaaagaaaaaaggtcgagagatgatatttatatgaaaaacaagataggaagggtacctcagaagcttggagagcctaaaatcaaggagccaccattaaaactcaagaatgatgctgagaaagctccgaatgttgtttctgatggaagagaggagcataagttaaaagtgccaacatcagaaacttcaaatgtggtttatgatccaagtccaagggatggggcagaacttagattcatcaccgacagctgtacctttggctgttacaatgaataaaaaagagcatgtgattgatatggaaaaggctgataattttgttgaggaccaactgcatcctccgcagccgatggcactgcggactgaaaaagtcactgtcaatcccagtgtacgtacaagaaggggaagagtaccttcagttgaaaaggtggaatcgacgactactgtcaagtccttttccattgcatcccttcaacaatataccaatagtttcagtgaggaaaatatcataagagacagcaggtttggtaaggtgtatctggcaaagcttcctgatggagagctactggaaattttgaagattgactcttctaactcaaaagtgccagtagatgcctttcttgagctagttgtgaggatttctgaactgaggcatcctaacatacttggtcttgttggatactgtgcggagtttgagcagcgattacttgtctatgagtactgtagcaagatgaccctacatgatgaacttcgtcatgtggatgactcaagcaagccattatcgtggaatgctcgcctccaagttgcttcagaggcagcaaaagcattgcaacatcttcatgacggttgccaaccaccagttgtacaccagaattttgaaccctctgttgttctgctcaacagcaccttagttgtgcatatttctgaatgtggccttgcatcactagcatcaaaatcagtttctcagttgtctggacacaccttattccattatgaagcacctgaagtgcatgaatctggatcagtaagcgatcgaagtgatgtttacagcttcggtgtagttatgttggagcttctaacaggacgtaaaccttatgacagttcgtatccacgagctgaacaacatctagtacgatgggccacttctcaactctatgatattgatgccataacgaagatggttgatccttccattcgaggacaatgttctgataaggcattatcccgttttgctgacattattagccgctgcattcagcatgaaccagaattcaggccaccaatgtctgaagttgtccaagacttaactcgcatggtaagtaatgtatcaagggcttccatgtaggctatcccttaaacaatggtaaaatgtggaggtccgtccttatagaaattagaattcgaggacgcacctcgttctggagcttcttgctagattcagttctctctggccatgattcaagatgcctttgacgaccattgatgcggtagtaggatattttggccaatgcaaaatgggtggaacacagtggcaggatgcagagactgcaccacgttttgtccactgccagaatgtgaagcaaaatttgcagagatacagttgcggtactccgcatgcaatgcttggtttgaagagcttcgtaagcagagagttgctgaactgaaaagggaattggagaagtcggaaaattctatcggatccctccaatctgtgattcaaaagcctcagcaatagcaaaacatgttgacgggagttctgaataccacaccagtcatactgaatcatgtcccccgctctgaaaatacagcagatactaatttcctcagggaaagaaacatccagggatagatcatcagctgctagtttcacagaggaggcaagcaacagtcagaaatctcagaaagtgcagcagtgtgatactgattcaattcaagctatcaatccatcaccagatgagtcatatccccaggcccaagttgaaaaggtcggtcccaaagatggcttgctttggggttctagaaaacaaagaggagggagagctagaaggacacttctgaaaggtggtgatagtagcggggatggtgagcctacatctacagcattcatacagagggagggttcgtctaaaggctgcatgaagaacttcataactccaaaagtagaaccagttgttatgaagaagggtgtgaaaattccaaaagtagaatctggtgtgatgaataaggatttgaaaacttcaaatgtaggatccggtataatgaagaagtgcttgaaaactcccaatgcacaagctgatatgctgaagaaggatgtgagaactcctaaagcagaatccgatgttataaagaaggggttaaaaattcccaaagtagaacctgatgttatgaagaagggcttgagatcttcaaaggcagaatgtggtcagcctgtgattgagagagttaaactgaagctggcagagattttaaatactatatcaactcaagatgactgcaaaatgttgcaatgccaacttgatacccagaggaaaagagctagatataagaagatgattcgccggcatatggacttccgaatgcttcactctaagatcaagagtggcgcaatctcttgcaccaaggagcttctgagagatgtgctcattttcatcaataatgtaataaccttctatccgaaggctacattggagcacatggctgcggttgagcttcgtgagtctgcatgcaaaactgtgaagcagagtgcaagcttgttcttgaaaagccatggagagatcggaacagctggtgcccccgtagtaaagaatactcgagtcctgcagcctcgatgccctggccccggtgatgcaaggccaagcaaggtttcttcaagggacgctactgccagggaaggagatggcaagcgccctagtgatcagctggctaatcaaaagactatacagagaaatgagccagccaagaagagaggtgtgggtcggcctccaaagagtgggcataggattgctggggcacaggaagatagccccataaaaggcaggaaaaggggcgctggggcacaggaaggtagccccatcaacggcaggaaaaggggcgctggggcacagctagatagccccggcaaaggcagaaagaggagtgcggcagcacaggagaataaccccagcaaaggcggcaagaagagccggcggtgaagctaccatcagctcaatgccggtgaaacagtgtacagcttaaccatatatcataggctggtcccttccaacgttgtttgcctgtcaaaaaagtttttgccccagtattcaaactgatgtaacaggaagggttagctgtttctgatgttgttttgtaaggagtatggacagttaggagggaaccctcattttcctgtagagattatccgagctaggctatacatgtctgactgtgtaatgcttaatagtttaatttatatcatgtgaactgatgcttgaacaccgacagttacctgtcagacgactgaaccagagatacgagaaacaacaggacttgaacagttcggctctatgtagcgag

SEQ ID NO: 70115 - DNA, 2828 bp, Zea Mays
ctcaacacaagcgcccccctcgtcgcagtcccgccgttacatggcccgctctgttcccctttccggcgcccgcgacggactgcgacgagcggatagatagatctgtgccccgtccctgtctcgccatcctcctttctcctcctccactccctatcgactatcgagcagagcgaatccttagcggggaagtctttccgagctcagggagtggggtttaaaacgcggctcgacgaaaggaaggccgcactcgctgctgctgctggtcgcttgctttcggtggcgagcgtctcggtaaagcggcgtcggcgtcggaggcggcggcagagactggacttgcttgctccttgctgcgcagtgtagtgctgtgctaccttggagacaggatcctgccgcagggactcataattgatcagtgtgccccaacataagagcgaaacgtgactgagtttgccagctcccccttcatccactgtggtcgctcgtctgctaatgcccgcatcggaggattgctcacggatatgcttctggtgatgggcaacccggggcgctcgcggcagttgtcagcgctggttgcttccgccgccatcttgctgtcactgtccgcgttgccaatttgtcggccctacacctacgagcaagatgtgtttgcgataaacggcttgtacacggcacttggagcaccacagctgcctaattggacttcaaatggtggtgacccctgcaatgaaggctggcaaggtgtttcatgtgtagcgtcaaatataacctccataattctcagcggtgcaaatttaggtggacagctgggcaacactttggggaattttacatcattaatcacctttttcctttcagctaaccaactaagtggtagccttccaagtacattgtcatcccttacacttttgacaagcatgtcactcaatagcaatcatttgactggagcgataccagatgtattttcagcactcactggacttgcaaatttacatattcagaacaatcaaatatctggaactcttaatgtgttgcaagatctccctttccaagatttgaacgttgaaaacaaccttttctctggtcccgtgcctgtgaaattactgaacttgccaaacttcaagaaggatgggaacccattcaatacaagcatagctccatctgcgcagcctcccatcgcgccaacaccattaccgtctatcccaccttcgtcagggcatgtcccctcaaaagaacctgcacattcttctagtgttccaggtggtagtacttcaggatcaggaaaacatactacactcaaattagttggatatattcttattggagtggtattagcagtagttcttgtgctaattgcaatgtactgtttatccaagtacaaagaaaaaaggtcgagagatgatatttatatgaaaaacaagataggaagggtacctcagaagcttggagagcctaaaatcaaggagccaccattaaaactcaagaatgatgctgagaaagctccgaatgttgtttctgatggaagagaggagcataagttaaaagtgccaacatcagaaacttcaaatgtggtttatgatccaagtccaagggatggggcagaacttagattcatcaccgacagtttcagtgaggaaaatatcataagagacagcaggtttggtaaggtgtatctggcaaagcttcctgatggagagctactggaaattttgaagattgactcttctaactcaaaagtgccagtagatgcctttcttgagctagttgtgaggatttctgaactgaggcatcctaacatacttggtcttgttggatactgtgcggagtttgagcagcgattacttgtctatgagtactgtagcaagatgaccctacatgatgaacttcgtcatgtggatgactcaagcaagccattatcgtggaatgctcgcctccaagttgcttcagaggcagcaaaagcattgcaacatcttcatgacggttgccaaccaccagttgtacaccagaattttgaaccctctgttgttctgctcaacagcaccttagttgtgcatatttctgaatgtggccttgcatcactagcatcaaaatcagtttctcagttgtctggacacaccttattccattatgaagcacctgaagtgcatgaatctggatcagtaagcgatcgaagtgatgtttacagcttcggtgtagttatgttggagcttctaacaggacgtaaaccttatgacagttcgtatccacgagctgaacaacatctagtacgatgggccacttctcaactctatgatattgatgccataacgaagatggttgatccttccattcgaggacaatgttctgataaggcattatcccgttttgctgacattattagccgctgcattcagcatgaaccagaattcaggccaccaatgtctgaagttgtccaagacttaactcgcatgatgcctttgacgaccattgatgcggtagtaggatattttggccaatgcaaaatgggtggaacacagtggcaggatgcagagactgcaccacgttttgtccactgccagtaatgctcctctgaatctctggtcaatttatagttcaaagctattgttgtaattctgtagtctgcactctgcacaatatatttcttagtgcccagttccagatcacgtggtgtgattatgcgtggttatctagaccatatgtaaataccaagaagttaaacaaatgtattatagcgtgcttgtttgaggaatgagaaagtacatcttcttactcctcactttattatttgatttgttaaatgaaatgagttggtccatcatatttcattcttt

SEQ ID NO: 70116 - DNA, 2682 bp, Zea Mays
caaagactcaacacaagcgcccccctcgtcgcagtcccgccgttacatggcccgctctgttcccctttccggcgcccgcgacggactgcgacgagcggatagatagatctgtgccccgtccctgtctcgccatcctcctttctcctcctccactccctatcgactatcgagcagagcgaatccttagcggggaagtctttccgagctcagggagtggggtttaaaacgcggctcgacgaaaggaaggccgcactcgctgctgctgctggtcgcttgctttcggtggcgagcgtctcggtaaagcggcgtcggcgtcggaggcggcggcagagactggacttgcttgctccttgctgcgcagtgtagtgctgtgctaccttggagacaggatcctgccgcagggactcataattgatcagtgtgccccaacataagagcgaaacgtgactgagtttgccagctcccccttcatccactgtggtcgctcgtctgctaatgcccgcatcggaggattgctcacggatatgcttctggtgatgggcaacccggggcgctcgcggcagttgtcagcgctggttgcttccgccgccatcttgctgtcactgtccgcgttgccaatttgtcggccctacacctacgagcaagatgtgtttgcgataaacggcttgtacacggcacttggagcaccacagctgcctaattggacttcaaatggtggtgacccctgcaatgaaggctggcaaggtgtttcatgtgtagcgtcaaatataacctccataattctcagcggtgcaaatttaggtggacagctgggcaacactttggggaattttacatcattaatcacctttttcctttcagctaaccaactaagtggtagtacttcaggatcaggaaaacatactacactcaaattagttggatatattcttattggagtggtattagcagtagttcttgtgctaattgcaatgtactgtttatccaagtacaaagaaaaaaggtcgagagatgatatttatatgaaaaacaagataggaagggtacctcagaagcttggagagcctaaaatcaaggagccaccattaaaactcaagaatgatgctgagaaagctccgaatgttgtttctgatggaagagaggagcataagttaaaagtgccaacatcagaaacttcaaatgtggtttatgatccaagtccaagggatggggcagaacttagattcatcaccgacagctgtacctttggctgttacaatgaataaaaaagagcatgtgattgatatggaaaaggctgataattttgttgaggaccaactgcatcctccgcagccgatggcactgcggactgaaaaagtcactgtcaatcccagtgtacgtacaagaaggggaagagtaccttcagttgaaaaggtggaatcgacgactactgtcaagtccttttccattgcatcccttcaacaatataccaatagtttcagtgaggaaaatatcataagagacagcaggtttggtaaggtgtatctggcaaagcttcctgatggagagctactggaaattttgaagattgactcttctaactcaaaagtgccagtagatgcctttcttgagctagttgtgaggatttctgaactgaggcatcctaacatacttggtcttgttggatactgtgcggagtttgagcagcgattacttgtctatgagtactgtagcaagatgaccctacatgatgaacttcgtcatgtggatgactcaagcaagccattatcgtggaatgctcgcctccaagttgcttcagaggcagcaaaagcattgcaacatcttcatgacggttgccaaccaccagttgtacaccagaattttgaaccctctgttgttctgctcaacagcaccttagttgtgcatatttctgaatgtggccttgcatcactagcatcaaaatcagtttctcagttgtctggacacaccttattccattatgaagcacctgaagtgcatgaatctggatcagtaagcgatcgaagtgatgtttacagcttcggtgtagttatgttggagcttctaacaggacgtaaaccttatgacagttcgtatccacgagctgaacaacatctagtacgatgggccacttctcaactctatgatattgatgccataacgaagatggttgatccttccattcgaggacaatgttctgataaggcattatcccgttttgctgacattattagccgctgcattcagcatgaaccagaattcaggccaccaatgtctgaagttgtccaagacttaactcgcatgatgcctttgacgaccattgatgcggtagtaggatattttggccaatgcaaaatgggtggaacacagtggcaggatgcagagactgcaccacgttttgtccactgccagtaatgctcctctgaatctctggtcaatttatagttcaaagctattgttgtaattctgtagtctgcactctgcacaatatatttcttagtgcccagttccagatcacgtggtgtgattatgcgtggttatctagaccatatgtaaataccaagaagttaaacaaatgtattatagcgtgcttgtttgaggaatgagaaagtacatcttcttactcctcactttattatttgatttgttaaatgaaatgagttggtccatcatatttcattcttt

SEQ ID NO: 70117 - DNA, 3183 bp, Zea Mays
caaagactcaacacaagcgcccccctcgtcgcagtcccgccgttacatggcccgctctgttcccctttccggcgcccgcgacggactgcgacgagcggatagatagatctgtgccccgtccctgtctcgccatcctcctttctcctcctccactccctatcgactatcgagcagagcgaatccttagcggggaagtctttccgagctcagggagtggggtttaaaacgcggctcgacgaaaggaaggccgcactcgctgctgctgctggtcgcttgctttcggtggcgagcgtctcggtaaagcggcgtcggcgtcggaggcggcggcagagactggacttgcttgctccttgctgcgcagtgtagtgctgtgctaccttggagacaggatcctgccgcagtgtgccccaacataagagcgaaacgtgactgagtttgccagctcccccttcatccactgtggtcgctcgtctgctaatgcccgcatcggaggattgctcacggatatgcttctggtgatgggcaacccggggcgctcgcggcagttgtcagcgctggttgcttccgccgccatcttgctgtcactgtccgcgttgccaatttgtcggccctacacctacgagcaagatgtgtttgcgataaacggcttgtacacggcacttggagcaccacagctgcctaattggacttcaaatggtggtgacccctgcaatgaaggctggcaaggtgtttcatgtgtagcgtcaaatataacctccatcggtgcaaatttaggtggacagctgggcaacactttggggaattttacatcattaatcaccttggatctcagcaacaacaatattggagggaccataccagatggtctaccactcacaatgcagagatttttcctttcagctaaccaactaagtggtagccttccaagtacattgtcatcccttacacttttgacaagcatgtcactcaatagcaatcatttgactggagcgataccagatgtattttcagcactcactggacttgcaaatttagatttttctgataacaatttgaccggtccgttgccaccttcaatgggaaatttgacatcattgactagcctacatattcagaacaatcaaatatctggaactcttaatgtgttgcaagatctccctttccaagatttgaacgttgaaaacaaccttttctctggtcccgtgcctgtgaaattactgaacttgccaaacttcaagaaggatgggaacccattcaatacaagcatagctccatctgcgcagcctcccatcgcgccaacaccattaccgtctatcccaccttcgtcagggcatgtcccctcaaaagaacctgcacattcttctagtgttccaggtggtagtacttcaggatcaggaaaacatactacactcaaattagttggatatattcttattggagtggtattagcagtagttcttgtgctaattgcaatgtactgtttatccaagtacaaagaaaaaaggtcgagagatgatatttatatgaaaaacaagataggaagggtacctcagaagcttggagagcctaaaatcaaggagccaccattaaaactcaagaatgatgctgagaaagctccgaatgttgtttctgatggaagagaggagcataagttaaaagtgccaacatcagaaacttcaaatgtggtttatgatccaagtccaagggatggggcagaacttagattcatcaccgacagctgtacctttggctgttacaatgaataaaaaagagcatgtgattgatatggaaaaggctgataattttgttgaggaccaactgcatcctccgcagccgatggcactgcggactgaaaaagtcactgtcaatcccagtgtacgtacaagaaggggaagagtaccttcagttgaaaaggtggaatcgacgactactgtcaagtccttttccattgcatcccttcaacaatataccaatagtttcagtgaggaaaatatcataagagacagcaggtttggtaaggtgtatctggcaaagcttcctgatggagagctactggaaattttgaagattgactcttctaactcaaaagtgccagtagatgcctttcttgagctagttgtgaggatttctgaactgaggcatcctaacatacttggtcttgttggatactgtgcggagtttgagcagcgattacttgtctatgagtactgtagcaagatgaccctacatgatgaacttcgtcatgtggatgactcaagcaagccattatcgtggaatgctcgcctccaagttgcttcagaggcagcaaaagcattgcaacatcttcatgacggttgccaaccaccagttgtacaccagaattttgaaccctctgttgttctgctcaacagcaccttagttgtgcatatttctgaatgtggccttgcatcactagcatcaaaatcagtttctcagttgtctggacacaccttattccattatgaagcacctgaagtgcatgaatctggatcagtaagcgatcgaagtgatgtttacagcttcggtgtagttatgttggagcttctaacaggacgtaaaccttatgacagttcgtatccacgagctgaacaacatctagtacgatgggccacttctcaactctatgatattgatgccataacgaagatggttgatccttccattcgaggacaatgttctgataaggcattatcccgttttgctgacattattagccgctgcattcagcatgaaccagaattcaggccaccaatgtctgaagttgtccaagacttaactcgcatgatgcctttgacgaccattgatgcggtagtaggatattttggccaatgcaaaatgggtggaacacagtggcaggatgcagagactgcaccacgttttgtccactgccagtaatgctcctctgaatctctggtcaatttatagttcaaagctattgttgtaattctgtagtctgcactctgcacaatatatttcttagtgcccagttccagatcacgtggtgtgattatgcgtggttatctagaccatatgtaaataccaagaagttaaacaaatgtattatagcgtgcttgtttgaggaatgagaaagtacatcttcttactcctcactttattatttgatttgttaaatgaaatgagttggtccatcatatttcattcttt

SEQ ID NO: 70118 - DNA, 3159 bp, Zea Mays
caaagactcaacacaagcgcccccctcgtcgcagtcccgccgttacatggcccgctctgttcccctttccggcgcccgcgacggactgcgacgagcggatagatagatctgtgccccgtccctgtctcgccatcctcctttctcctcctccactccctatcgactatcgagcagagcgaatccttagcggggaagtctttccgagctcagggagtggggtttaaaacgcggctcgacgaaaggaaggccgcactcgctgctgctgctggtcgcttgctttcggtggcgagcgtctcggtaaagcggcgtcggcgtcggaggcggcggcagagactggacttgcttgctccttgctgcgcagtgtagtgctgtgctaccttggagacaggatcctgccgcagggactcataattgatcagtgtgccccaacataagagcgaaacgtgactgagtttgccagctcccccttcatccactgtggtcgctcgtctgctaatgcccgcatcggaggattgctcacggatatgcttctggtgatgggcaacccggggcgctcgcggcagttgtcagcgctggttgcttccgccgccatcttgctgtcactgtccgcgttgccaatttgtcggccctacacctacgagcaagatgtgtttgcgataaacggcttgtacacggcacttggagcaccacagctgcctaattggacttcaaatggtggtgacccctgcaatgaaggctggcaaggtgtttcatgtgtagcgtcaaatataacctccataattctcagcggtgcaaatttaggtggacagctgggcaacactttggggaattttacatcattaatcacctttttcctttcagctaaccaactaagtggtagccttccaagtacattgtcatcccttacacttttgacaagcatgtcactcaatagcaatcatttgactggagcgataccagatgtattttcagcactcactggacttgcaaatttacatattcagaacaatcaaatatctggaactcttaatgtgttgcaagatctccctttccaagatttgaacgttgaaaacaaccttttctctggtcccgtgcctgtgaaattactgaacttgccaaacttcaagatgggaacccattcaatacaagcatagctccatctgcgcagcctcccatcgcgccaacaccattaccgtctatcccaccttcgtcagggcatgtcccctcaaaagaacctgcacattcttctagtgttccaggtggtagtacttcaggatcaggaaaacatactacactcaaattagttggatatattcttattggagtggtattagcagtagttcttgtgctaattgcaatgtactgtttatccaagtacaaagaaaaaaggtcgagagatgatatttatatgaaaaacaagataggaagggtacctcagaagcttggagagcctaaaatcaaggagccaccattaaaactcaagaatgatgctgagaaagaaacttcaaatgtggtttatgatccaagtccaagggatggggcagaacttagattcatcaccgacagctgtacctttggctgttacaatgaataaaaaagagcatgtgattgatatggaaaaggctgataattttgttgaggaccaactgcatcctccgcagccgatggcactgcggactgaaaaagtcactgtcaatcccagtgtacgtacaagaaggggaagagtaccttcagttgaaaaggtggaatcgacgactactgtcaagtccttttccattgcatcccttcaacaatataccaatagtttcagtgaggaaaatatcataagagacagcaggtttggtaaggtgtatctggcaaagcttcctgatggagagctactggaaattttgaagattgactcttctaactcaaaagtgccagtagatgcctttcttgagctagttgtgaggatttctgaactgaggcatcctaacatacttggtcttgttggatactgtgcggagtttgagcagcgattacttgtctatgagtactgtagcaagatgaccctacatgatgaacttcgtcatgtggatgactcaagcaagccattatcgtggaatgctcgcctccaagttgcttcagaggcagcaaaagcattgcaacatcttcatgacggttgccaaccaccagttgtacaccagaattttgaaccctctgttgttctgctcaacagcaccttagttgtgcatatttctgaatgtggccttgcatcactagcatcaaaatcagtttctcagttgtctggacacaccttattccattatgaagcacctgaagtgcatgaatctggatcagtaagcgatcgaagtgatgtttacagcttcggtgtagttatgttggagcttctaacaggacgtaaaccttatgacagttcgtatccacgagctgaacaacatctagtacgatgggccacttctcaactctatgatattgatgccataacgaagatggttgatccttccattcgaggacaatgttctgataaggcattatcccgttttgctgacattattagccgctgcattcagcatgaaccagaattcaggccaccaatgtctgaagttgtccaagacttaactcgcatggtaagtaatgtatcaagggcttccatgtaggctatcccttaaacaatggtaaaatgtggaggtccgtccttatagaaattagaattcgaggacgcacctcgttctggagcttcttgctagattcagttctctctggccatgattcaagatgcctttgacgaccattgatgcggtagtaggatattttggccaatgcaaaatgggtggaacacagtggcaggatgcagagactgcaccacgttttgtccactgccagtaatgctcctctgaatctctggtcaatttatagttcaaagctattgttgtaattctgtagtctgcactctgcacaatatatttcttagtgcccagttccagatcacgtggtgtgattatgcgtggttatctagaccatatgtaaataccaagaagttaaacaaatgtattatagcgtgcttgtttgaggaatgagaaagtacatcttcttactcctcactttattatttgatttgttaaatgaaatgagttggtccatcatatttcattcttt

SEQ ID NO: 70119 - DNA, 3085 bp, Zea Mays
cgcacaaagactcaacacaagcgcccccctcgtcgcagtcccgccgttacatggcccgctctgttcccctttccggcgcccgcgacggactgcgacgagcggatagatagatctgtgccccgtccctgtctcgccatcctcctttctcctcctccactccctatcgactatcgagcagagcgaatccttagcggggaagtctttccgagctcagggagtggggtttaaaacgcggctcgacgaaaggaaggccgcactcgctgctgctgctggtcgcttgctttcggtggcgagcgtctcggtaaagcggcgtcggcgtcggaggcggcggcagagactggacttgcttgctccttgctgcgcagtgtagtgctgtgctaccttggagacaggatcctgccgcagggactcataattgatcagtgtgccccaacataagagcgaaacgtgactgagtttgccagctcccccttcatccactgtggtcgctcgtctgctaatgcccgcatcggaggattgctcacggatatgcttctggtgatgggcaacccggggcgctcgcggcagttgtcagcgctggttgcttccgccgccatcttgctgtcactgtccgcgttgccaatttgtcggccctacacctacgagcaagatgtgtttgcgataaacggcttgtacacggcacttggagcaccacagctgcctaattggacttcaaatggtggtgacccctgcaatgaaggctggcaaggtgtttcatgtgtagcgtcaaatataacctccataattctcagcggtgcaaatttaggtggacagctgggcaacactttggggaattttacatcattaatcaccttggatctcagcaacaacaatattggagggaccataccagatggtctaccactcacaatgcagagatttttcctttcagctaaccaactaagtggtagccttccaagtacattgtcatcccttacacttttgacaagcatgtcactcaatagcaatcatttgactggagcgataccagatgtattttcagcactcactggacttgcaaatttacatattcagaacaatcaaatatctggaactcttaatgtgttgcaagatctccctttccaagatttgaacgttgaaaacaaccttttctctggtcccgtgcctgtgaaattactgaacttgccaaacttcaagaaggatgggaacccattcaatacaagcatagctccatctgcgcagcctcccatcgcgccaacaccattaccgtctatcccaccttcgtcagggcatgtcccctcaaaagaacctgcacattcttctagtgttccaggtggtagtacttcaggatcaggaaaacatactacactcaaattagttggatatattcttattggagtggtattagcagtagttcttgtgctaattgcaatgtactgtttatccaagtacaaagaaaaaaggtcgagagatgatatttatatgaaaaacaagataggaagggtacctcagaagcttggagagcctaaaatcaaggagccaccattaaaactcaagaatgatgctgagaaagaaacttcaaatgtggtttatgatccaagtccaagggatggggcagaacttagattcatcaccgacagctgtacctttggctgttacaatgaataaaaaagagcatgtgattgatatggaaaaggctgataattttgttgaggaccaactgcatcctccgcagccgatggcactgcggactgaaaaagtcactgtcaatcccagtgtacgtacaagaaggggaagagtaccttcagttgaaaaggtggaatcgacgactactgtcaagtccttttccattgcatcccttcaacaatataccaatagtttcagtgaggaaaatatcataagagacagcaggtttggtaaggtgtatctggcaaagcttcctgatggagagctactggaaattttgaagattgactcttctaactcaaaagtgccagtagatgcctttcttgagctagttgtgaggatttctgaactgaggcatcctaacatacttggtcttgttggatactgtgcggagtttgagcagcgattacttgtctatgagtactgtagcaagatgaccctacatgatgaacttcgtcatgtggatgactcaagcaagccattatcgtggaatgctcgcctccaagttgcttcagaggcagcaaaagcattgcaacatcttcatgacggttgccaaccaccagttgtacaccagaattttgaaccctctgttgttctgctcaacagcaccttagttgtgcatatttctgaatgtggccttgcatcactagcatcaaaatcagtttctcagttgtctggacacaccttattccattatgaagcacctgaagtgcatgaatctggatcagtaagcgatcgaagtgatgtttacagcttcggtgtagttatgttggagcttctaacaggacgtaaaccttatgacagttcgtatccacgagctgaacaacatctagtacgatgggccacttctcaactctatgatattgatgccataacgaagatggttgatccttccattcgaggacaatgttctgataaggcattatcccgttttgctgacattattagccgctgcattcagcatgaaccagaattcaggccaccaatgtctgaagttgtccaagacttaactcgcatgatgcctttgacgaccattgatgcggtagtaggatattttggccaatgcaaaatgggtggaacacagtggcaggatgcagagactgcaccacgttttgtccactgccagtaatgctcctctgaatctctggtcaatttatagttcaaagctattgttgtaattctgtagtctgcactctgcacaatatatttcttagtgcccagttccagatcacgtggtgtgattatgcgtggttatctagaccatatgtaaataccaagaagttaaacaaatgtattatagcgtgcttgtttgaggaatgagaaagtacatcttcttactcctcactttattatttgatttgttaaatgaaatgagttggtccatcatatttcattcttt

SEQ ID NO: 70120 - DNA, 2996 bp, Zea Mays
cgcacaaagactcaacacaagcgcccccctcgtcgcagtcccgccgttacatggcccgctctgttcccctttccggcgcccgcgacggactgcgacgagcggatagatagatctgtgccccgtccctgtctcgccatcctcctttctcctcctccactccctatcgactatcgagcagagcgaatccttagcggggaagtctttccgagctcagggagtggggtttaaaacgcggctcgacgaaaggaaggccgcactcgctgctgctgctggtcgcttgctttcggtggcgagcgtctcggtaaagcggcgtcggcgtcggaggcggcggcagagactggacttgcttgctccttgctgcgcagtgtagtgctgtgctaccttggagacaggatcctgccgcagggactcataattgatcagtgtgccccaacataagagcgaaacgtgactgagtttgccagctcccccttcatccactgtggtcgctcgtctgctaatgcccgcatcggaggattgctcacggatatgcttctggtgatgggcaacccggggcgctcgcggcagttgtcagcgctggttgcttccgccgccatcttgctgtcactgtccgcgttgccaatttgtcggccctacacctacgagcaagatgtgtttgcgataaacggcttgtacacggcacttggagcaccacagctgcctaattggacttcaaatggtggtgacccctgcaatgaaggctggcaaggtgtttcatgtgtagcgtcaaatataacctccataattctcagcggtgcaaatttaggtggacagctgggcaacactttggggaattttacatcattaatcaccttggatctcagcaacaacaatattggagggaccataccagatggtctaccactcacaatgcagagatttttcctttcagctaaccaactaagtggtagccttccaagtacattgtcatcccttacacttttgacaagcatgtcactcaatagcaatcatttgactggagcgataccagatgtattttcagcactcactggacttgcaaatttagatttttctgataacaatttgaccggtccgttgccaccttcaatgggaaatttgacatcattgactagcctacatattcagaacaatcaaatatctggaactcttaatgtgttgcaagatctccctttccaagatttgaacgttgaaaacaaccttttctctggtcccgtgcctgtgaaattactgaacttgccaaacttcaagaaggatgggaacccattcaatacaagcatagctccatctgcgcagcctcccatcgcgccaacaccattaccgtctatcccaccttcgtcagggcatgtcccctcaaaagaacctgcacattcttctagtgttccagaaaaaaggtcgagagatgatatttatatgaaaaacaagataggaagggtacctcagaagcttggagagcctaaaatcaaggagccaccattaaaactcaagaatgatgctgagaaagctccgaatgttgtttctgatggaagagaggagcataagttaaaagtgccaacatcagaaacttcaaatgtggtttatgatccaagtccaagggatggggcagaacttagattcatcaccgacagccgatggcactgcggactgaaaaagtcactgtcaatcccagtgtacgtacaagaaggggaagagtaccttcagttgaaaaggtggaatcgacgactactgtcaagtccttttccattgcatcccttcaacaatataccaatagtttcagtgaggaaaatatcataagagacagcaggtttggtaaggtgtatctggcaaagcttcctgatggagagctactggaaattttgaagattgactcttctaactcaaaagtgccagtagatgcctttcttgagctagttgtgaggatttctgaactgaggcatcctaacatacttggtcttgttggatactgtgcggagtttgagcagcgattacttgtctatgagtactgtagcaagatgaccctacatgatgaacttcgtcatgtggatgactcaagcaagccattatcgtggaatgctcgcctccaagttgcttcagaggcagcaaaagcattgcaacatcttcatgacggttgccaaccaccagttgtacaccagaattttgaaccctctgttgttctgctcaacagcaccttagttgtgcatatttctgaatgtggccttgcatcactagcatcaaaatcagtttctcagttgtctggacacaccttattccattatgaagcacctgaagtgcatgaatctggatcagtaagcgatcgaagtgatgtttacagcttcggtgtagttatgttggagcttctaacaggacgtaaaccttatgacagttcgtatccacgagctgaacaacatctagtacgatgggccacttctcaactctatgatattgatgccataacgaagatggttgatccttccattcgaggacaatgttctgataaggcattatcccgttttgctgacattattagccgctgcattcagcatgaaccagaattcaggccaccaatgtctgaagttgtccaagacttaactcgcatgatgcctttgacgaccattgatgcggtagtaggatattttggccaatgcaaaatgggtggaacacagtggcaggatgcagagactgcaccacgttttgtccactgccagtaatgctcctctgaatctctggtcaatttatagttcaaagctattgttgtaattctgtagtctgcactctgcacaatatatttcttagtgcccagttccagatcacgtggtgtgattatgcgtggttatctagaccatatgtaaataccaagaagttaaacaaatgtattatagcgtgcttgtttgaggaatgagaaagtacatcttcttactcctcactttattatttgatttgttaaatgaaatgagttggtccatcatatttcattcttt

SEQ ID NO: 70121 - DNA, 3314 bp, Zea Mays
ctcgcctcgcctctgcggctgcgcctgcgcgcacaaagactcaacacaagcgcccccctcgtcgcagtcccgccgttacatggcccgctctgttcccctttccggcgcccgcgacggactgcgacgagcggatagatagatctgtgccccgtccctgtctcgccatcctcctttctcctcctccactccctatcgactatcgagcagagcgaatccttagcggggaagtctttccgagctcagggagtggggtttaaaacgcggctcgacgaaaggaaggccgcactcgctgctgctgctggtcgcttgctttcggtggcgagcgtctcggtaaagcggcgtcggcgtcggaggcggcggcagagactggacttgcttgctccttgctgcgcagtgtagtgctgtgctaccttggagacaggatcctgccgcagggactcataattgatcagtgtgccccaacataagagcgaaacgtgactgagtttgccagctcccccttcatccactgtggtcgctcgtctgctaatgcccgcatcggaggattgctcacggatatgcttctggtgatgggcaacccggggcgctcgcggcagttgtcagcgctggttgcttccgccgccatcttgctgtcactgtccgcgttgccaatttgtcggccctacacctacgagcaagatgtgtttgcgataaacggcttgtacacggcacttggagcaccacagctgcctaattggacttcaaatggtggtgacccctgcaatgaaggctggcaaggtgtttcatgtgtagcgtcaaatataacctccataattctcagcggtgcaaatttaggtggacagctgggcaacactttggggaattttacatcattaatcaccttggatctcagcaacaacaatattggagggaccataccagatggtctaccactcacaatgcagagatttttcctttcagctaaccaactaagtggtagccttccaagtacattgtcatcccttacacttttgacaagcatgtcactcaatagcaatcatttgactggagcgataccagatgtattttcagcactcactggacttgcaaatttatttttctgataacaatttgaccggtccgttgccaccttcaatgggaaatttgacatcattgactagcctacatattcagaacaatcaaatatctggaactcttaatgtgttgcaagatctccctttccaagatttgaacgttgaaaacaaccttttctctggtcccgtgcctgtgaaattactgaacttgccaaacttcaagaaggatgggaacccattcaatacaagcatagctccatctgcgcagcctcccatcgcgccaacaccattaccgtctatcccaccttcgtcagggcatgtcccctcaaaagaacctgcacattcttctagtgttccaggtggtagtacttcaggatcaggaaaacatactacactcaaattagttggatatattcttattggagtggtattagcagtagttcttgtgctaattgcaatgtactgtttatccaagtacaaagaaaaaaggtcgagagatgatatttatatgaaaaacaagataggaagggtacctcagaagcttggagagcctaaaatcaaggagccaccattaaaactcaagaatgatgctgagaaagctccgaatgttgtttctgatggaagagaggagcataagttaaaagtgccaacatcagaaacttcaaatgtggtttatgatccaagtccaagggatggggcagaacttagattcatcaccgacagctgtacctttggctgttacaatgaataaaaaagagcatgtgattgatatggaaaaggctgataattttgttgaggaccaactgcatcctccgcagccgatggcactgcggactgaaaaagtcactgtcaatcccagtgtacgtacaagaaggggaagagtaccttcagttgaaaaggtggaatcgacgactactgtcaagtccttttccattgcatcccttcaacaatataccaatagtttcagtgaggaaaatatcataagagacagcaggtttggtaaggtgtatctggcaaagcttcctgatggagagctactggaaattttgaagattgactcttctaactcaaaagtgccagtagatgcctttcttgagctagttgtgaggatttctgaactgaggcatcctaacatacttggtcttgttggatactgtgcggagtttgagcagcgattacttgtctatgagtactgtagcaagatgaccctacatgatgaacttcgtcatgtggatgactcaagcaagccattatcgtggaatgctcgcctccaagttgcttcagaggcagcaaaagcattgcaacatcttcatgacggttgccaaccaccagttgtacaccagaattttgaaccctctgttgttctgctcaacagcaccttagttgtgcatatttctgaatgtggccttgcatcactagcatcaaaatcagtttctcagttgtctggacacaccttattccattatgaagcacctgaagtgcatgaatctggatcagtaagcgatcgaagtgatgtttacagcttcggtgtagttatgttggagcttctaacaggacgtaaaccttatgacagttcgtatccacgagctgaacaacatctagtacgatgggccacttctcaactctatgatattgatgccataacgaagatggttgatccttccattcgaggacaatgttctgataaggcattatcccgttttgctgacattattagccgctgcattcagcatgaaccagaattcaggccaccaatgtctgaagttgtccaagacttaactcgcatgaaattagaattcgaggacgcacctcgttctggagcttcttgctagattcagttctctctggccatgattcaagatgcctttgacgaccattgatgcggtagtaggatattttggccaatgcaaaatgggtggaacacagtggcaggatgcagagactgcaccacgttttgtccactgccagtaatgctcctctgaatctctggtcaatttatagttcaaagctattgttgtaattctgtagtctgcactctgcacaatatatttcttagtgcccagttccagatcacgtggtgtgattatgcgtggttatctagaccatatgtaaataccaagaagttaaacaaatgtattatagcgtgcttgtttgaggaatgagaaagtacatcttcttactcctcactttattatttgatttgttaaatgaaatgagttggtccatcatatttcattcttt

SEQ ID NO: 70122 - DNA, 3048 bp, Zea Mays
gccagcttttccgctcgcctcgcctctgcggctgcgcctgcgcgcacaaagactcaacacaagcgcccccctcgtcgcagtcccgccgttacatggcccgctctgttcccctttccggcgcccgcgacggactgcgacgagcggatagatagatctgtgccccgtccctgtctcgccatcctcctttctcctcctccactccctatcgactatcgagcagagcgaatccttagcggggaagtctttccgagctcagggagtggggtttaaaacgcggctcgacgaaaggaaggccgcactcgctgctgctgctggtcgcttgctttcggtggcgagcgtctcggtaaagcggcgtcggcgtcggaggcggcggcagagactggacttgcttgctccttgctgcgcagtgtagtgctgtgctaccttggagacaggatcctgccgcagggactcataattgatcagtgtgccccaacataagagcgaaacgtgactgagtttgccagctcccccttcatccactgtggtcgctcgtctgctaatgcccgcatcggaggattgctcacggatatgcttctggtgatgggcaacccggggcgctcgcggcagttgtcagcgctggttgcttccgccgccatcttgctgtcactgtccgcgttgccaatttgtcggccctacacctacgagcaagatgtgtttgcgataaacggcttgtacacggcacttggagcaccacagctgcctaattggacttcaaatggtggtgacccctgcaatgaaggctggcaaggtgtttcatgtgtagcgtcaaatataacctccataattctcagcggtgcaaatttaggtggacagctgggcaacactttggggaattttacatcattaatcaccttggatctcagcaacaacaatattggagggaccataccagatggtctaccactcacaatgcagagatttttcctttcagctaaccaactaagtggtagccttccaagtacattgtcatcccttacacttttgacaagcatgtcactcaatagcaatcatttgactggagcgataccagatgtattttcagcactcactggacttgcaaatttacatattcagaacaatcaaatatctggaactcttaatgtgttgcaagatctccctttccaagatttgaacgttgaaaacaaccttttctctggtcccgtgcctgtgaaattactgaacttgccaaacttcaagaaggatgggaacccattcaatacaagcatagctccatctgcgcagcctcccatcgcgccaacaccattaccgtctatcccaccttcgtcagggcatgtcccctcaaaagaacctgcacattcttctagtgttccaggtggtagtacttcaggatcaggaaaacatactacactcaaattagttggatatattcttattggagtggtattagcagtagttcttgtgctaattgcaatgtactgtttatccaagtacaaagaaaaaaggtcgagagatgatatttatatgaaaaacaagataggaagggtacctcagaagcttggagagcctaaaatcaaggagccaccattaaaactcaagaatgatgctgagaaagctccgaatgttgtttctgatggaagagaggagcataagttaaaagtgccaacatcagaaacttcaaatgtggtttatgatccaagtccaagggatggggcagaacttagattcatcaccgacagtgtacgtacaagaaggggaagagtaccttcagttgaaaaggtggaatcgacgactactgtcaagtccttttccattgcatcccttcaacaatataccaatagtttcagtgaggaaaatatcataagagacagcaggtttggtaaggtgtatctggcaaagcttcctgatggagagctactggaaattttgaagattgactcttctaactcaaaagtgccagtagatgcctttcttgagctagttgtgaggatttctgaactgaggcatcctaacatacttggtcttgttggatactgtgcggagtttgagcagcgattacttgtctatgagtactgtagcaagatgaccctacatgatgaacttcgtcatgtggatgactcaagcaagccattatcgtggaatgctcgcctccaagttgcttcagaggcagcaaaagcattgcaacatcttcatgacggttgccaaccaccagttgtacaccagaattttgaaccctctgttgttctgctcaacagcaccttagttgtgcatatttctgaatgtggccttgcatcactagcatcaaaatcagtttctcagttgtctggacacaccttattccattatgaagcacctgaagtgcatgaatctggatcagtaagcgatcgaagtgatgtttacagcttcggtgtagttatgttggagcttctaacaggacgtaaaccttatgacagttcgtatccacgagctgaacaacatctagtacgatgggccacttctcaactctatgatattgatgccataacgaagatggttgatccttccattcgaggacaatgttctgataaggcattatcccgttttgctgacattattagccgctgcattcagcatgaaccagaattcaggccaccaatgtctgaagttgtccaagacttaactcgcatgatgcctttgacgaccattgatgcggtagtaggatattttggccaatgcaaaatgggtggaacacagtggcaggatgcagagactgcaccacgttttgtccactgccagtaatgctcctctgaatctctggtcaatttatagttcaaagctattgttgtaattctgtagtctgcactctgcacaatatatttcttagtgcccagttccagatcacgtggtgtgattatgcgtggttatctagaccatatgtaaataccaagaagttaaacaaatgtattatagcgtgcttgtttgaggaatgagaaagtacatcttcttactcctcactttattatttgatttgttaaatgaaatgagttggtccatcatatttcattcttt

SEQ ID NO: 70123 - DNA, 2780 bp, Zea Mays
cgcccctgcgccagcttttccgctcgcctcgcctctgcggctgcgcctgcgcgcacaaagactcaacacaagcgcccccctcgtcgcagtcccgccgttacatggcccgctctgttcccctttccggcgcccgcgacggactgcgacgagcggatagatagatctgtgccccgtccctgtctcgccatcctcctttctcctcctccactccctatcgactatcgagcagagcgaatccttagcggggaagtctttccgagctcagggagtggggtttaaaacgcggctcgacgaaaggaaggccgcactcgctgctgctgctggtcgcttgctttcggtggcgagcgtctcggtaaagcggcgtcggcgtcggaggcggcggcagagactggacttgcttgctccttgctgcgcagtgtagtgctgtgctaccttggagacaggatcctgccgcagtgtttgcgataaacggcttgtacacggcacttggagcaccacagctgcctaattggacttcaaatggtggtgacccctgcaatgaaggctggcaaggtgtttcatgtgtagcgtcaaatataacctccataattctcagcggtgcaaatttaggtggacagctgggcaacactttggggaattttacatcattaatcaccttggatctcagcaacaacaatattggagggaccataccagatggtctaccactcacaatgcagagatttttcctttcagctaaccaactaagtggtagccttccaagtacattgtcatcccttacacttttgacaagcatgtcactcaatagcaatcatttgactggagcgataccagatgtattttcagcactcactggacttgcaaatttagatttttctgataacaatttgaccggtccgttgccaccttcaatgggaaatttgacatcattgactagcctacatattcagaacaatcaaatatctggaactcttaatgtgttgcaagatctccctttccaagatttgaacgttgaaaacaaccttttctctggtcccgtgcctgtgaaattactgaacttgccaaacttcaagaaggatgggaacccattcaatacaagcatagctccatctgcgcagcctcccatcgcgccaacaccattaccgtctatcccaccttcgtcagggcatgtcccctcaaaagaacctgcacattcttctagtgttccaggtggtagtacttcaggatcaggaaaacatactacactcaaattagttggatatattcttattggagtggtattagcagtagttcttgtgctaattgcaatgtactgtttatccaagtacaaagaaaaaaggtcgagagatgatatttatatgaaaaacaagataggaagggtacctcagaagcttggagagcctaaaatcaaggagccaccattaaaactcaagaatgatgctgagaaagctccgaatgttgtttctgatggaagagaggagcataagttaaaagtgccaacatcagaaacttcaaatgtggtttatgatccaagtccaagggatggggcagaacttagattcatcaccgacagtttcagtgaggaaaatatcataagagacagcaggtttggtaaggtgtatctggcaaagcttcctgatggagagctactggaaattttgaagattgactcttctaactcaaaagtgccagtagatgcctttcttgagctagttgtgaggatttctgaactgaggcatcctaacatacttggtcttgttggatactgtgcggagtttgagcagcgattacttgtctatgagtactgtagcaagatgaccctacatgatgaacttcgtcatgtggatgactcaagcaagccattatcgtggaatgctcgcctccaagttgcttcagaggcagcaaaagcattgcaacatcttcatgacggttgccaaccaccagttgtacaccagaattttgaaccctctgttgttctgctcaacagcaccttagttgtgcatatttctgaatgtggccttgcatcactagcatcaaaatcagtttctcagttgtctggacacaccttattccattatgaagcacctgaagtgcatgaatctggatcagtaagcgatcgaagtgatgtttacagcttcggtgtagttatgttggagcttctaacaggacgtaaaccttatgacagttcgtatccacgagctgaacaacatctagtacgatgggccacttctcaactctatgatattgatgccataacgaagatggttgatccttccattcgaggacaatgttctgataaggcattatcccgttttgctgacattattagccgctgcattcagcatgaaccagaattcaggccaccaatgtctgaagttgtccaagacttaactcgcatgatgcctttgacgaccattgatgcggtagtaggatattttggccaatgcaaaatgggtggaacacagtggcaggatgcagagactgcaccacgttttgtccactgccagtaatgctcctctgaatctctggtcaatttatagttcaaagctattgttgtaattctgtagtctgcactctgcacaatatatttcttagtgcccagttccagatcacgtggtgtgattatgcgtggttatctagaccatatgtaaataccaagaagttaaacaaatgtattatagcgtgcttgtttgaggaatgagaaagtacatcttcttactcctcactttattatttgatttgttaaatgaaatgagttggtccatcatatttcattcttt

SEQ ID NO: 70124 - DNA, 3199 bp, Zea Mays
cccctgcgcccctgcgccagcttttccgctcgcctcgcctctgcggctgcgcctgcgcgcacaaagactcaacacaagcgcccccctcgtcgcagtcccgccgttacatggcccgctctgttcccctttccggcgcccgcgacggactgcgacgagcggatagatagatctgtgccccgtccctgtctcgccatcctcctttctcctcctccactccctatcgactatcgagcagagcgaatccttagcggggaagtctttccgagctcagggagtggggtttaaaacgcggctcgacgaaaggaaggccgcactcgctgctgctgctggtcgcttgctttcggtggcgagcgtctcggtaaagcggcgtcggcgtcggaggcggcggcagagactggacttgcttgctccttgctgcgcagtgtagtgctgtgctaccttggagacaggatcctgccgcagggactcataattgatcagtgtgccccaacataagagcgaaacgtgactgagtttgccagctcccccttcatccactgtggtcgctcgtctgctaatgcccgcatcggaggattgctcacggatatgcttctggtgatgggcaacccggggcgctcgcggcagttgtcagcgctggttgcttccgccgccatcttgctgtcactgtccgcgttgccaatttgtcggccctacacctacgagcaagatgtgtttgcgataaacggcttgtacacggcacttggagcaccacagctgcctaattggacttcaaatggtggtgacccctgcaatgaaggctggcaaggtgtttcatgtgtagcgtcaaatataacctccataattctcagcggtgcaaatttaggtggacagctgggcaacactttggggaattttacatcattaatcaccttggatctcagcaacaacaatattggagggaccataccagatggtctaccactcacaatgcagagatttttcctttcagctaaccaactaagtggtagccttccaagtacattgtcatcccttacacttttgacaagcatgtcactcaatagcaatcatttgactggagcgataccagatgtattttcagcactcactggacttgcaaatttacatattcagaacaatcaaatatctggaactcttaatgtgttgcaagatctccctttccaagatttgaacgttgaaaacaaccttttctctggtcccgtgcctgtgaaattactgaacttgccaaacttcaagaaggatgggaacccattcaatacaagcatagctccatctgcgcagcctcccatcgcgccaacaccattaccgtctatcccaccttcgtcagggcatgtcccctcaaaagaacctgcacattcttctagtgttccaggtggtagtacttcaggatcaggaaaacatactacactcaaattagttggatatattcttattggagtggtattagcagtagttcttgtgctaattgcaatgtactgtttatccaagtacaaagaaaaaaggtcgagagatgatatttatatgaaaaacaagataggaagggtacctcagaagcttggagagcctaaaatcaaggagccaccattaaaactcaagaatgatgctgagaaagctccgaatgttgtttctgatggaagagaggagcataagttaaaagtgccaacatcagaaacttcaaatgtggtttatgatccaagtccaagggatggggcagaacttagattcatcaccgacagctgtacctttggctgttacaatgaataaaaaagagcatgtgattgatatggaaaaggctgataattttgttgaggaccaactgcatcctccgcagccgatggcactgcggactgaaaaagtcactgtcaatcccagtgtacgtacaagaaggggaagagtaccttcagttgaaaaggtggaatcgacgactactgtcaagtccttttccattgcatcccttcaacaatataccaatagtttcagtgaggaaaatatcataagagacagcaggtttggtaaggtgtatctggcaaagcttcctgatggagagctactggaaattttgaagattgactcttctaactcaaaagtgccagtagatgcctttcttgagctagttgtgaggatttctgaactgaggcatcctaacatacttggtcttgttggatactgtgcggagtttgagcagcgattacttgtctatgagtactgtagcaagatgaccctacatgatgaacttcgtcatgtggatgactcaagcaagccattatcgtggaatgctcgcctccaagttgcttcagaggcagcaaaagcattgcaacatcttcatgacggttgccaaccaccagttgtacaccagaattttgaaccctctgttgttctgctcaacagcaccttagttgtgcatatttctgaatgtggccttgcatcactagcatcaaaatcagtttctcagttgtctggacacaccttattccattatgaagcacctgaagtgcatgaatctggatcagtaagcgatcgaagtgatgtttacagcttcggtgtagttatgttggagcttctaacaggacgtaaaccttatgacagttcgtatccacgagctgaacaacatctagtacgatgggccacttctcaactctatgatattgatgccataacgaagatggttgatccttccattcgaggacaatgttctgataaggcattatcccgttttgctgacattattagccgctgcattcagcatgaaccagaattcaggccaccaatgtctgaagttgtccaagacttaactcgcatgatgcctttgacgaccattgatgcggtagtaggatattttggccaatgcaaaatgggtggaacacagtggcaggatgcagagactgcaccacgttttgtccactgccagtaatgctcctctgaatctctggtcaatttatagttcaaagctattgttgtaattctgtagtctgcactctgcacaatatatttcttagtgcccagttccagatcacgtggtgtgattatgcgtggttatctagaccatatgtaaataccaagaagttaaacaaatgtattatagcgtgcttgtttgaggaatgagaaagtacatcttcttactcctcactttattatttgatttgttaaatgaaatgagttggtccatcatatttcattcttt

SEQ ID NO: 70125 - DNA, 3214 bp, Zea Mays
cccctgcgcccctgcgccagcttttccgctcgcctcgcctctgcggctgcgcctgcgcgcacaaagactcaacacaagcgcccccctcgtcgcagtcccgccgttacatggcccgctctgttcccctttccggcgcccgcgacggactgcgacgagcggatagatagatctgtgccccgtccctgtctcgccatcctcctttctcctcctccactccctatcgactatcgagcagagcgaatccttagcggggaagtctttccgagctcagggagtggggtttaaaacgcggctcgacgaaaggaaggccgcactcgctgctgctgctggtcgcttgctttcggtggcgagcgtctcggtaaagcggcgtcggcgtcggaggcggcggcagagactggacttgcttgctccttgctgcgcagtgtagtgctgtgctaccttggagacaggatcctgccgcagggactcataattgatcagtgtgccccaacataagagcgaaacgtgactgagtttgccagctcccccttcatccactgtggtcgctcgtctgctaatgcccgcatcggaggattgctcacggatatgcttctggtgatgggcaacccggggcgctcgcggcagttgtcagcgctggttgcttccgccgccatcttgctgtcactgtccgcgttgccaatttgtcggccctacacctacgagcaagatgtgtttgcgataaacggcttgtacacggcacttggagcaccacagctgcctaattggacttcaaatggtggtgacccctgcaatgaaggctggcaaggtgtttcatgtgtagcgtcaaatataacctccataattctcagcggtgcaaatttaggtggacagctgggcaacactttggggaattttacatcattaatcaccttggatctcagcaacaacaatattggagggaccataccagatggtctaccactcacaatgcagagatttttcctttcagctaaccaactaagtggtagccttccaagtacattgtcatcccttacacttttgacaagcatgtcactcaatagcaatcatttgactggagcgataccagatgtattttcagcactcactggacttgcaaatttagatttttctgataacaatttgaccggtccgttgccaccttcaatgggaaatttgacatcattgactagcctacatattcagaacaatcaaatatctggaactcttaatgtgttgcaagatctccctttccaagatttgaacgttgaaaacaaccttttctctggtcccgtgcctgtgaaattactgaacttgccaaacttcaagaaggatgggaacccattcaatacaagcatagctccatctgcgcagcctcccatcgcgccaacaccattaccgtctatcccaccttcgtcagggcatgtcccctcaaaagaacctgcacattcttctagtgttccaggtggtagtacttcaggatcaggaaaacatactacactcaaattagttggatatattcttattggagtggtattagcagtagttcttgtgctaattgcaatgtactgtttatccaagtacaaagaaaaaaggtcgagagatgatatttatatgaaaaacaagataggaagggtacctcagaagcttggagagcctaaaatcaaggagccaccattaaaactcaagaatgatgctgagaaagaaacttcaaatgtggtttatgatccaagtccaagggatggggcagaacttagattcatcaccgacagctgtacctttggctgttacaatgaataaaaaagagcatgtgattgatatggaaaaggctgataattttgttgaggaccaactgcatcctccgcagccgatggcactgcggactgaaaaagtcactgtcaatcccagtgtacgtacaagaaggggaagagtaccttcagttgaaaaggtggaatcgacgactactgtcaagtccttttccattgcatcccttcaacaatataccaatagtttcagtgaggaaaatatcataagagacagcaggtttggtaaggtgtatctggcaaagcttcctgatggagagctactggaaattttgaagattgactcttctaactcaaaagtgccagtagatgcctttcttgagctagttgtgaggatttctgaactgaggcatcctaacatacttggtcttgttggatactgtgcggagtttgagcagcgattacttgtctatgagtactgtagcaagatgaccctacatgatgaacttcgtcatgtggatgactcaagcaagccattatcgtggaatgctcgcctccaagttgcttcagaggcagcaaaagcattgcaacatcttcatgacggttgccaaccaccagttgtacaccagaattttgaaccctctgttgttctgctcaacagcaccttagttgtgcatatttctgaatgtggccttgcatcactagcatcaaaatcagtttctcagttgtctggacacaccttattccattatgaagcacctgaagtgcatgaatctggatcagtaagcgatcgaagtgatgtttacagcttcggtgtagttatgttggagcttctaacaggacgtaaaccttatgacagttcgtatccacgagctgaacaacatctagtacgatgggccacttctcaactctatgatattgatgccataacgaagatggttgatccttccattcgaggacaatgttctgataaggcattatcccgttttgctgacattattagccgctgcattcagcatgaaccagaattcaggccaccaatgtctgaagttgtccaagacttaactcgcatgatgcctttgacgaccattgatgcggtagtaggatattttggccaatgcaaaatgggtggaacacagtggcaggatgcagagactgcaccacgttttgtccactgccagtaatgctcctctgaatctctggtcaatttatagttcaaagctattgttgtaattctgtagtctgcactctgcacaatatatttcttagtgcccagttccagatcacgtggtgtgattatgcgtggttatctagaccatatgtaaataccaagaagttaaacaaatgtattatagcgtgcttgtttgaggaatgagaaagtacatcttcttactcctcactttattatttgatttgttaaatgaaatgagttggtccatcatatttcattcttt

SEQ ID NO: 70126 - DNA, 3212 bp, Zea Mays
cccacagcccctgcgcccctgcgccagcttttccgctcgcctcgcctctgcggctgcgcctgcgcgcacaaagactcaacacaagcgcccccctcgtcgcagtcccgccgttacatggcccgctctgttcccctttccggcgcccgcgacggactgcgacgagcggatagatagatctgtgccccgtccctgtctcgccatcctcctttctcctcctccactccctatcgactatcgagcagagcgaatccttagcggggaagtctttccgagctcagggagtggggtttaaaacgcggctcgacgaaaggaaggccgcactcgctgctgctgctggtcgcttgctttcggtggcgagcgtctcggtaaagcggcgtcggcgtcggaggcggcggcagagactggacttgcttgctccttgctgcgcagtgtagtgctgtgctaccttggagacaggatcctgccgcagggactcataattgatcagtgtgccccaacataagagcgaaacgtgactgagtttgccagctcccccttcatccactgtggtcgctcgtctgctaatgcccgcatcggaggattgctcacggatatgcttctggtgatgggcaacccggggcgctcgcggcagttgtcagcgctggttgcttccgccgccatcttgctgtcactgtccgcgttgccaatttgtcggccctacacctacgagcaagatgtgtttgcgataaacggcttgtacacggcacttggagcaccacagctgcctaattggacttcaaatggtggtgacccctgcaatgaaggctggcaaggtgtttcatgtgtagcgtcaaatataacctccataattctcagcggtgcaaatttaggtggacagctgggcaacactttggggaattttacatcattaatcacctttttcctttcagctaaccaactaagtggtagccttccaagtacattgtcatcccttacacttttgacaagcatgtcactcaatagcaatcatttgactggagcgataccagatgtattttcagcactcactggacttgcaaatttagatttttctgataacaatttgaccggtccgttgccaccttcaatgggaaatttgacatcattgactagcctacatattcagaacaatcaaatatctggaactcttaatgtgttgcaagatctccctttccaagatttgaacgttgaaaacaaccttttctctggtcccgtgcctgtgaaattactgaacttgccaaacttcaagaaggatgggaacccattcaatacaagcatagctccatctgcgcagcctcccatcgcgccaacaccattaccgtctatcccaccttcgtcagggcatgtcccctcaaaagaacctgcacattcttctagtgttccaggtggtagtacttcaggatcaggaaaacatactacactcaaattagttggatatattcttattggagtggtattagcagtagttcttgtgctaattgcaatgtactgtttatccaagtacaaagaaaaaaggtcgagagatgatatttatatgaaaaacaagataggaagggtacctcagaagcttggagagcctaaaatcaaggagccaccattaaaactcaagaatgatgctgagaaagctccgaatgttgtttctgatggaagagaggagcataagttaaaagtgccaacatcagaaacttcaaatgtggtttatgatccaagtccaagggatggggcagaacttagattcatcaccgacagctgtacctttggctgttacaatgaataaaaaagagcatgtgattgatatggaaaaggctgataattttgttgaggaccaactgcatcctccgcagccgatggcactgcggactgaaaaagtcactgtcaatcccagtgtacgtacaagaaggggaagagtaccttcagttgaaaaggtggaatcgacgactactgtcaagtccttttccattgcatcccttcaacaatataccaatagtttcagtgaggaaaatatcataagagacagcaggtttggtaaggtgtatctggcaaagcttcctgatggagagctactggaaattttgaagattgactcttctaactcaaaagtgccagtagatgcctttcttgagctagttgtgaggatttctgaactgaggcatcctaacatacttggtcttgttggatactgtgcggagtttgagcagcgattacttgtctatgagtactgtagcaagatgaccctacatgatgaacttcgtcatgtggatgactcaagcaagccattatcgtggaatgctcgcctccaagttgcttcagaggcagcaaaagcattgcaacatcttcatgacggttgccaaccaccagttgtacaccagaattttgaaccctctgttgttctgctcaacagcaccttagttgtgcatatttctgaatgtggccttgcatcactagcatcaaaatcagtttctcagttgtctggacacaccttattccattatgaagcacctgaagtgcatgaatctggatcagtaagcgatcgaagtgatgtttacagcttcggtgtagttatgttggagcttctaacaggacgtaaaccttatgacagttcgtatccacgagctgaacaacatctagtacgatgggccacttctcaactctatgatattgatgccataacgaagatggttgatccttccattcgaggacaatgttctgataaggcattatcccgttttgctgacattattagccgctgcattcagcatgaaccagaattcaggccaccaatgtctgaagttgtccaagacttaactcgcatgatgcctttgacgaccattgatgcggtagtaggatattttggccaatgcaaaatgggtggaacacagtggcaggatgcagagactgcaccacgttttgtccactgccagtaatgctcctctgaatctctggtcaatttatagttcaaagctattgttgtaattctgtagtctgcactctgcacaatatatttcttagtgcccagttccagatcacgtggtgtgattatgcgtggttatctagaccatatgtaaataccaagaagttaaacaaatgtattatagcgtgcttgtttgaggaatgagaaagtacatcttcttactcctcactttattatttgatttgttaaatgaaatgagttggtccatcatatttcattcttt

SEQ ID NO: 70127 - DNA, 3159 bp, Zea Mays
ctgccccacagcccctgcgcccctgcgccagcttttccgctcgcctcgcctctgcggctgcgcctgcgcgcacaaagactcaacacaagcgcccccctcgtcgcagtcccgccgttacatggcccgctctgttcccctttccggcgcccgcgacggactgcgacgagcggatagatagatctgtgccccgtccctgtctcgccatcctcctttctcctcctccactccctatcgactatcgagcagagcgaatccttagcggggaagtctttccgagctcagggagtggggtttaaaacgcggctcgacgaaaggaaggccgcactcgctgctgctgctggtcgcttgctttcggtggcgagcgtctcggtaaagcggcgtcggcgtcggaggcggcggcagagactggacttgcttgctccttgctgcgcagtgtagtgctgtgctaccttggagacaggatcctgccgcagggactcataattgatcagtgtgccccaacataagagcgaaacgtgactgagtttgccagctcccccttcatccactgtggtcgctcgtctgctaatgcccgcatcggaggattgctcacggatatgcttctggtgatgggcaacccggggcgctcgcggcagttgtcagcgctggttgcttccgccgccatcttgctgtcactgtccgcgttgccaatttgtcggccctacacctacgagcaagatgtgtttgcgataaacggcttgtacacggcacttggagcaccacagctgcctaattggacttcaaatggtggtgacccctgcaatgaaggctggcaaggtgtttcatgtgtagcgtcaaatataacctccataattctcagcggtgcaaatttaggtggacagctgggcaacactttggggaattttacatcattaatcaccttggatctcagcaacaacaatattggagggaccataccagatggtctaccactcacaatgcagagatttttcctttcagctaaccaactaagtggtagccttccaagtacattgtcatcccttacacttttgacaagcatgtcactcaatagcaatcatttgactggagcgataccagatgtattttcagcactcactggacttgcaaatttagatttttctgataacaatttgaccggtccgttgccaccttcaatgggaaatttgacatcattgactagcctacatattcagaacaatcaaatatctggaactcttaatgtgttgcaagatctccctttccaagatttgaacgttgaaaacaaccttttctctggtcccgtgcctgtgaaattactgaacttgccaaacttcaagaaggatgggaacccattcaatacaagcatagctccatctgcgcagcctcccatcgcgccaacaccattaccgtctatcccaccttcgtcagggcatgtcccctcaaaagaacctgcacattcttctagtgttccagaaaaaaggtcgagagatgatatttatatgaaaaacaagataggaagggtacctcagaagcttggagagcctaaaatcaaggagccaccattaaaactcaagaatgatgctgagaaagctccgaatgttgtttctgatggaagagaggagcataagttaaaagtgccaacatcagaaacttcaaatgtggtttatgatccaagtccaagggatggggcagaacttagattcatcaccgacagctgtacctttggctgttacaatgaataaaaaagagcatgtgattgatatggaaaaggctgataattttgttgaggaccaactgcatcctccgcagccgatggcactgcggactgaaaaagtcactgtcaatcccagtgtacgtacaagaaggggaagagtaccttcagttgaaaaggtggaatcgacgactactgtcaagtccttttccattgcatcccttcaacaatataccaatagtttcagtgaggaaaatatcataagagacagcaggtttggtaaggtgtatctggcaaagcttcctgatggagagctactggaaattttgaagattgactcttctaactcaaaagtgccagtagatgcctttcttgagctagttgtgaggatttctgaactgaggcatcctaacatacttggtcttgttggatactgtgcggagtttgagcagcgattacttgtctatgagtactgtagcaagatgaccctacatgatgaacttcgtcatgtggatgactcaagcaagccattatcgtggaatgctcgcctccaagttgcttcagaggcagcaaaagcattgcaacatcttcatgacggttgccaaccaccagttgtacaccagaattttgaaccctctgttgttctgctcaacagcaccttagttgtgcatatttctgaatgtggccttgcatcactagcatcaaaatcagtttctcagttgtctggacacaccttattccattatgaagcacctgaagtgcatgaatctggatcagtaagcgatcgaagtgatgtttacagcttcggtgtagttatgttggagcttctaacaggacgtaaaccttatgacagttcgtatccacgagctgaacaacatctagtacgatgggccacttctcaactctatgatattgatgccataacgaagatggttgatccttccattcgaggacaatgttctgataaggcattatcccgttttgctgacattattagccgctgcattcagcatgaaccagaattcaggccaccaatgtctgaagttgtccaagacttaactcgcatgatgcctttgacgaccattgatgcggtagtaggatattttggccaatgcaaaatgggtggaacacagtggcaggatgcagagactgcaccacgttttgtccactgccagtaatgctcctctgaatctctggtcaatttatagttcaaagctattgttgtaattctgtagtctgcactctgcacaatatatttcttagtgcccagttccagatcacgtggtgtgattatgcgtggttatctagaccatatgtaaataccaagaagttaaacaaatgtattatagcgtgcttgtttgaggaatgagaaagtacatcttcttactcctcactttattatttgatttgttaaatgaaatgagttggtccatcatatttcattcttt

SEQ ID NO: 70128 - DNA, 3044 bp, Zea Mays
ctgccccacagcccctgcgcccctgcgccagcttttccgctcgcctcgcctctgcggctgcgcctgcgcgcacaaagactcaacacaagcgcccccctcgtcgcagtcccgccgttacatggcccgctctgttcccctttccggcgcccgcgacggactgcgacgagcggatagatagatctgtgccccgtccctgtctcgccatcctcctttctcctcctccactccctatcgactatcgagcagagcgaatccttagcggggaagtctttccgagctcagggagtggggtttaaaacgcggctcgacgaaaggaaggccgcactcgctgctgctgctggtcgcttgctttcggtggcgagcgtctcggtaaagcggcgtcggcgtcggaggcggcggcagagactggacttgcttgctccttgctgcgcagtgtagtgctgtgctaccttggagacaggatcctgccgcagggactcataattgatcagtgtgccccaacataagagcgaaacgtgactgagtttgccagctcccccttcatccactgtggtcgctcgtctgctaatgcccgcatcggaggattgctcacggatatgcttctggtgatgggcaacccggggcgctcgcggcagttgtcagcgctggttgcttccgccgccatcttgctgtcactgtccgcgttgccaatttgtcggccctacacctacgagcaagatgtgtttgcgataaacggcttgtacacggcacttggagcaccacagctgcctaattggacttcaaatggtggtgacccctgcaatgaaggctggcaaggtgtttcatgtgtagcgtcaaatataacctccataattctcagcggtgcaaatttaggtggacagctgggcaacactttggggaattttacatcattaatcaccttggatctcagcaacaacaatattggagggaccataccagatggtctaccactcacaatgcagagatttttcctttcagctaaccaactaagtggtagccttccaagtacattgtcatcccttacacttttgacaagcatgtcactcaatagcaatcatttgactggagcgataccagatgtattttcagcactcactggacttgcaaatttagatttttctgataacaatttgaccggtccgttgccaccttcaatgggaaatttgacatcattgactagcctacatattcagaacaatcaaatatctggaactcttaatgtgttgcaagatctccctttccaagatttgaacgttgaaaacaaccttttctctggtcccgtgcctgtgaaattactgaacttgccaaacttcaagaaggatgggaacccattcaatacaagcatagctccatctgcgcagcctcccatcgcgccaacaccattaccgtctatcccaccttcgtcagggcatgtcccctcaaaagaacctgcacattcttctagtgttccaggtggtagtacttcaggatcaggaaaacatactacactcaaattagttggatatattcttattggagtggtattagcagtagttcttgtgctaattgcaatgtactgtttatccaagtacaaagaaaaaaggtcgagagatgatatttatatgaaaaacaagataggaagggtacctcagaagcttggagagcctaaaatcaaggagccaccattaaaactcaagaatgatgctgagaaagctccgaatgttgtttctgatggaagagaggagcataagttaaaagtgccaacatcagaaacttcaaatgtggtttatgatccaagtccaagggatggggcagaacttagattcatcaccgacagtttcagtgaggaaaatatcataagagacagcaggtttggtaaggtgtatctggcaaagcttcctgatggagagctactggaaattttgaagattgactcttctaactcaaaagtgccagtagatgcctttcttgagctagttgtgaggatttctgaactgaggcatcctaacatacttggtcttgttggatactgtgcggagtttgagcagcgattacttgtctatgagtactgtagcaagatgaccctacatgatgaacttcgtcatgtggatgactcaagcaagccattatcgtggaatgctcgcctccaagttgcttcagaggcagcaaaagcattgcaacatcttcatgacggttgccaaccaccagttgtacaccagaattttgaaccctctgttgttctgctcaacagcaccttagttgtgcatatttctgaatgtggccttgcatcactagcatcaaaatcagtttctcagttgtctggacacaccttattccattatgaagcacctgaagtgcatgaatctggatcagtaagcgatcgaagtgatgtttacagcttcggtgtagttatgttggagcttctaacaggacgtaaaccttatgacagttcgtatccacgagctgaacaacatctagtacgatgggccacttctcaactctatgatattgatgccataacgaagatggttgatccttccattcgaggacaatgttctgataaggcattatcccgttttgctgacattattagccgctgcattcagcatgaaccagaattcaggccaccaatgtctgaagttgtccaagacttaactcgcatgatgcctttgacgaccattgatgcggtagtaggatattttggccaatgcaaaatgggtggaacacagtggcaggatgcagagactgcaccacgttttgtccactgccagtaatgctcctctgaatctctggtcaatttatagttcaaagctattgttgtaattctgtagtctgcactctgcacaatatatttcttagtgcccagttccagatcacgtggtgtgattatgcgtggttatctagaccatatgtaaataccaagaagttaaacaaatgtattatagcgtgcttgtttgaggaatgagaaagtacatcttcttactcctcactttattatttgatttgttaaatgaaatgagttggtccatcatatttcattcttt

SEQ ID NO: 70129 - DNA, 1916 bp, Zea Mays
cctgcgcccctgcgccagcttttccgctcgcctcgcctctgcggctgcgcctgcgcgcacaaagactcaacacaagcgcccccctcgtcgcagtcccgccgttacatggcccgctctgttcccctttccggcgcccgcgacggactgcgacgagcggatagatagatctgtgccccgtccctgtctcgccatcctcctttctcctcctccactccctatcgactatcgagcagagcgaatccttagcggggaagtctttccgagctcagggagtggggtttaaaacgcggctcgacgaaaggaaggccgcactcgctgctgctgctggtcgcttgctttcggtggcgagcgtctcggtaaagcggcgtcggcgtcggaggcggcggcagagactggacttgcttgctccttgctgcgcagtgtagtgctgtgctaccttggagacaggatcctgccgcagggactcataattgatcagtgtgccccaacataagagcgaaacgtgactgagtttgccagctcccccttcatccactgtggtcgctcgtctgctaatgcccgcatcggaggattgctcacggatatgcttctggtgatgggcaacccggggcgctcgcggcagttgtcagcgctggttgcttccgccgccatcttgctgtcactgtccgcgttgccaatttgtcggccctacacctacgagcaagatgtgtttgcgataaacggcttgtacacggcacttggagcaccacagctgcctaattggacttcaaatggtggtgacccctgcaatgaaggctggcaaggtgtttcatgtgtagcgtcaaatataacctccataattctcagcggtgcaaatttaggtggacagctgggcaacactttggggaattttacatcattaatcaccttggatctcagcaacaacaatattggagggaccataccagatggtctaccactcacaatgcagagatttttcctttcagctaaccaactaagtggtagccttccaagtacattgtcatcccttacacttttgacaagcatgtcactcaatagcaatcatttgactggagcgataccagatgtattttcagcactcactggacttgcaaatttagatttttctgataacaatttgaccggtccgttgccaccttcaatgggaaatttgacatcattgactagcctacatattcagaacaatcaaatatctggaactcttaatgtgttgcaagatctccctttccaagatttgaacgttgaaaacaaccttttctctggtcccgtgcctgtgaaattactgaacttgccaaacttcaagtaagaactcagaaccttcttgattggcctgttgactttttttgtggggggtgaacagtgctcatataatttaatgtattgctcaggaaggatgggaacccattcaatacaagcatagctccatctgcgcagcctcccatcgcgccaacaccattaccgtctatcccaccttcgtcagggcatgtcccctcaaaagaacctgcacattcttctagtgttccaggtggtagtacttcaggatcaggaaaacatactacactcaaattagttggatatattcttattggagtggtattagcagtagttcttgtgctaattgcaatgtactgtttatccaagtacaaagaaaaaaggtcgagagatgatatttatatgaaaaacaagataggaagggtacctcagaagcttggagagcctaaaatcaaggagccaccattaaaactcaagaatgatgctgagaaagctccgaatgttgtttctgatggaagagaggagcataagttaaaagtgccaacatcagaaacttcaaatgtggtttatgatccaagtccaagggatggggcagaacttagattcatcaccgacagttaaca

SEQ ID NO: 70130 - DNA, 658 bp, Zea Mays
catagatgctgttgttcaaatatgcacttgagttatactaggactgatgtaacattgttcagagagaccatatcgtataattattttagtgggcatgccaatgttgattactccaatttcacatatgcccatcatatacctgtctatcccaaaggcgtctcggttctgatgccagggcaagacatgccaacgttcatcgcgcatcccgcccctgcaccctgtcccccggagaggatccgatggccatcacaccagccccctcctttcgctggttcctcatcgaaccctagctaggccagggttgctgttgtcagccaaccaccaaaagtctgttatctgtagaggaggaggccggagcagccgtgtgccgatgatccacccactccgtctctccgagacaggctctcccctcctctctgtctgtatctgtactgtacaggtttaggtcttgttctgaagcaagttctacactgctgccctgccccccctgctgcattgtggcgggcgagcggcggctggtggatccgtggagctgatcccacttgctgcgtgtgttattagtagtagatgcctgatggagcatgaaatgtactggaaaactcgcttggcaaatgtggacctacagatgtttcatttcagcaagtcctttcttctgata

SEQ ID NO: 70131 - DNA, 2210 bp, Zea Mays
cgcctgcgcctccgtctccggccggctctcctcgatcgctacgatttcagggggggcccccggacgaaaccaccaaaaatcccagcgcagatcactcgccggcctcctgctccagcagatcctctcccaaccgacagcgtaacaaaaaccccgggctatcctcttcgctgtctgctctccttcacgctactgagcgcggctctgccaaactgcagggatccatcgtcccgcggggccggccagccggggtagtactacggtgatgaggtccatggagagcacggactcgtcgtccggtgagctaccaccaccgcagaagcagccgagctcggcgccggatctcccgccgggcttccggttccaccccacggacgaggagctggtcgtccactacctcaagaagaaggccgcgtccgtgccactccccgtcgccatcatcgcggaggtcgacctctacaagttcgatccgtgggagctacctggtacgtaaggtagcgcgcgccatatatgccgccatatacatatcctttccaacgtgattgatgaatataatatttattggcatggtgatctcatcttactcattctgctagtgattatactgtatatacagtctcgatcgtgtctattaaaatattattatttttagtcatgtgcatatcttttttcattgtaaataaagtagtactgtgtatatatgcgcatctactagctttgcatacatactgctagcttccatgcatgcatgtgccttactattctcacgcactgtgtggccgcctggacatgcatggttggatactctggatcagataaggcgacattcggcgagcaggagtggtacttcttcagcccgagggaccgcaagtaccccaacggagcgcggccgaacagggcggcgacgtccggctactggaaggcgactggcacagacaagcccatcatggcgtccggcggcaaccgcgagaaggtcggcgtcaagaaggctctcgtgttctaccgcgggaagccgccaaagggcctcaagaccaactggatcatgcacgagtaccgcctcgcggatgcggcgagctcaaccaccagccggccgccgccgccttgcaacgccggaggcaaggccacgtctctcaggctcgacgactgggtgttatgccgcatctacaagaagatcgacaaacttggagtcggcgatccgccgcggatcatggagtgcggcgaggactccgtggagaatgcggtggcagcctacccgacgcatgccgcggctgctgccatggccgtcgcagtcgcaggcggaggaggggcttaccataccggcaattacacttcgctgatccaccaccatcacgaggacagcttcctggtggatgggctgctcacagcagaggacgcgggcggcagctccctgagccagctagccgcggcagccagggcagctgctccaacagacaccaccaagcagctcctcgtcccgtcctccaccaccccgttcaactggctcgacgcgtcggcactcacgattcttccgccggcaaagaggttccatgggtacaacagagacaccactgacggcggcggcacgtccctcccgtcgccgtccgagaggaataacctgcaggcggctgtcggcgccgtcgatagtggcgccagcggtggcactagtgccgtcattccatcatttctcaatccgctcggcgtgcaaggtgcgacaagctatcaccaccacgccattttcggcacaccggtgacgccggaagccgccgcggccgccgcatgcagtttccagcacccctaccagctgtccggcgtgaactggaacccgtaaaaaatccttgataccgacgttgcattggtgcatatggctggcttttcaggtagatcacagcatcaccagcatgtagtagtacagttgttatagtggtagtatcattcagtgaaccacaggacaaattaattaaagcccatgcatattgccgcattgcctactacgagcacgtacctgtacggagctctaagcaaccgcgaaccagctggtagggcgcgatattgagacaaaaaatctagctaggcgagacttagcgatagatatgagatattaattagccatctagcctcttgcatcgtctctatatctacaaattgagccctgcataaaataatttagcctgcatgcacagttcatgacatgcccttcagaaaacaaaattaac

SEQ ID NO: 70132 - DNA, 864 bp, Zea Mays
taacagtgtatcagcttgcatgcctgccgaagcctcccatgatttgatctccttgtccttggggagcatgcccagcctccgctatcttccgccatcagctcaacgaaagcagactgctcgctgctggacttcgccaaggacgtggacgcgctcatggactgggtctgcctgcagctgccgccggagctgcggcaggaggcggtgcgggccgtggaggccgggcggcgcgcgggcgccggcggccgcgtccgggtccagccgtacctgctagctgccgtgctcgctctagtcgtgccactctcctaagcacgtctctatcgcgtgcatccttgtgtgggggggaaagaataagaaatagaacgacgagacctaactacctaagtctgtcgtaggctgatcatcgctttccctgtggccctagcataaccacatgtcacaatcctttggtgatggagcgccgccaacaccgtgggtagcaacatatcttgtggaagcaaacttcctggtggtagaaccttggtaagtttccaggaaagcaaggtatgtggttcaggtacctttctgttatttcattttcatagatcccttataataccgctggatcaggtatttatagattaattacaagtccattagggcccaagcaacaaccacctaatcaagcccaactattactcaattcttaatactgaatcactgctcacttatacctgagcaccttccacgtactgacatcacctctttgctagaaattgactgtccccaatcaatagcagatggaaaacacttcttaatcacctcataatcctcccaaatagaagcatcagcgggtaaatgggaccaaacaatacaaacttgaaccac

SEQ ID NO: 70133 - DNA, 420 bp, Zea Mays
ctgggagtctactgtttggggcgaatgggcgatgagcagcttcactcgacctgctggctggagcaggcggacgggcagccatctcagcataggatggtgaatgcgatgagaggatggcgccttttaaatccaccgccacgggcctagggaccttgccttgatgaagccggaacaagcaggagcgtggttttccaaaagccttggccctcttgattaggtcggctaaaacggagtccgatgagttaacttgaggacctctcccaaccttgctgtcccagccacacgaactggaagaagtgcaagtcgtccttgggaggatcgcacgcgactcttcgggagacgacagccccccagcattaactcccgaaattatctcgttaccacctgaagacactgatttgtgggtccagaatgggtgcg

SEQ ID NO: 70134 - DNA, 324 bp, Zea Mays
ctcttcctccctgagaagtttggtcaactggtcacgtgagtgagtcaagcagacaagctcagactcattcagatctcttgtttcagcttcagtatccaacgtgcagataatattttggaggtctgatttccttttcttataatccccatttgtttgggccgcccaacctcggaggaaccgccgtaatgcgctcagcttattattccatctttgcaccgagttacgacccttacatgaattagcccaaatttccttgatatggtcctgaaaaccttccctttgtagccaattcagttcaaacttgaatttcttcttacttccaac

SEQ ID NO: 70135 - DNA, 3488 bp, Zea Mays
gcagtagtgggttaggggaggtgaatggacagcatttgcacagccagtttcagaaggcgcagcgctgttccggaaggcttgtattggttgccatgacatgggaggaaacattctacagccaggagccactcttttcctgaaggacctcgagagaaacggagttgccacggaggaggaactgtataacatcacatactatgggaaaggaagaatgcccggttttggagagaaatgcaccccaagaggacagtgcaccttcggcccccggctatcggaagacgacatcaagatcctagcttcgtttgtcaagtcgcaagcccagaacgggtggccgaagattgagggggatggagattgatcaaactgaaaaaacgatgagaagacggtgcttgttagtcagatgaaaatggtgacgggaagatagtgtttgtatagtttaggaatctggtctttctgaacttgtaaccttttagtctctgtttctgaactgaacttgtaaccttctggtccgtgtttcagttttctgaacttctattccaggcagagtccacaccttttccagccagccgaacaaggctgacactgacagagttcagtgctcaggcagggtccccaacaagtcgcagtcgcagctcagctcctctgatcgagggttggtgagttcggttggtgacgccgcgcgaactgctaccaggcctggcgtggcgtcggcgtggtttaaacacgaagaaacccacgccctccgtcgcgcggctgctgctggtgcggaggggaggtggtggggaaggaaaacggcgtcgcaactcccccgcccgcctcgaaccgacatgttgccgcgcacgcactcccaccaggcgcggcggcgctccggcctgggcccgcagctctgcgccgcagcggccgcgctcctgctgctcctctccctcgccgtcctccactcgcgcctctcctcctcgtcctcctcccgcttccccacatccgcatcccgctcccgcccctccacgcccgcggccgactccaactcctccgctctcctcgccgacgaggaggacgaggacgtggccgccgcgctcgacccgctgctcaccgtcaccaccaccgccgccgagggcgattctctcgccaaccccgacgacgaccgcatcgatgagctcgacgtgttggacgaggacgccgcgggcgccaacgaggctgactccgcctccgcctctacggtgggggccgccacgcccctcgtatgggaccacgtcaccggcgccgctcgcctgccgttccgcctccccgcctccgtcgaatccctgcccgcggggctgccgcggcttgactccccgcgccggatcgccgccgcagccttcggatcggacgacgagctggtggatctggaactgcgggtcgagatctcgtccatcgccggtatcgaggacgcgcttctcctgaagcccgcctctggtaaggccgccgagacgcggctccgcgccgggtgggcacgctggctggaggggaaggccgactacctacggcgcgatcggatgctccgctccaacctggaatccctcaatccgcgcaaccacccgcttctccaggatccggacagccccggcctcacttctctcacccgcggcgaccgcatggtgcagcgaatgctactagccgagctcgacaagcccgcgtccaagagctttgagcggcgtaggcttctatcttacgagaacaagcagagcatgacaacaactgtgaaggagaagccgcagacgggaaggaggtggggatatttcccggggatcgatccacatttgggattctcagagttcatggagaggttcttcgagcatgggaagtgttccatgagagtgttcatggtgtggaacagcccgcagtgggcgtatgacatcaggcaccagaggggactggagagtctactcaagcagcacccagatgcctgtgtagtcatgctatcggagacactggaactagagtccttccaccaattcgtcaaggaaggatataaagttgctgttgcagtgccgaatcttgatgagcttttagaaagcactccaactcacgtatttgcatcagtgtggtatgaatggcggcagacaaaatattaccatttgcactacagtgaactagtacgccttgctgccctttacaaatatggtggaatataccttgactctgatgttattattcttaaacctttaacatcgctccggaattctattggtgccacaaatcatgtctctggaaattcccgttttggtggggctgtgttagcatttgaaaaacagagccctttattggaggagtgccttagggaattttattcgacatatgatgataccctcgtgcagtggaatggggctgaacttatgacaagagtgataagcaatatttctagcagagcagatgaaaacagggggcatcttgacattaagttggagccctttgttaaattttaccctataagctctactgatattatacgatatttctcagagcccgataacatggtccaaaaagcacatcatgatgcaatcttttctaggatcgtgaatgactctaccactttccatttttggaatggcatcacatctgctctagttcctgaacccggcagtcttgtttcgaaaatccttaaccgttactgtctccattgccttgatgttttatagttgcaacagtctgaagctcctgctaagagctttattttggtttagaacaggtacacagaagaaatctttcaatgaggtactcagaatggctagtattgctgaatcttgcaaaacattgtgatggggggaaaattaccggcagcactgtgtatatattcttttcactaaggtttgtgccggagctgcgcctgcaaagtccaagcatgttgacttgactagttattgtcgatagcaaaagtcttcctcctggcaatacagaatgcaacaactgaagacacttggaactagagagttttgactagttcggtaccccttctatatttgcacatatactgataattttcacaatttgatattttgaaaataacatgattcgtgtaagacagtagaaattgaaggaccatataccgaattcactgggtttatctagatgtttggtaaacttttatttctcagagcatgattttgtctgaattaacgacttgggaacgagaatgtcagcgttgtaagcatctgcataaaattatagtgcaggtcttggcatcctcgaagctgaattgtttgctatgtaatgtaaattatgcatttttcaaacgttaaactgaaaggccaaagagacgatgatgaggacaatatttttttttcgaaagcgtaggagaactgcacatcattttaattagagaagaaaaaaggtccaaaatggaccaaggtacaaagccctaagcaggcttactcaaaacaaaaacacacaccactccctagaccctgtgaaggttacgcgcaagctctaagccaaagctctgaagatgtttggct

SEQ ID NO: 70136 - DNA, 3839 bp, Zea Mays
acttgaaccactctgtagagcaatcgccaatcggcagcttcgtcatccctcgtcgtcggattgtacgctccagctctccaagatttgccttggcttgccgtgccctgcgggagccaagccaaggacggctagcgctcgccacgcgcgatgtccgggcttcctccggccgcgcgaccgctgctaccgtctccctgcgcctcttcctccgttgttcgggcgaaggcagcgtcggcatgctgctccagcctaaagcagtcgcgcccaggccgaagtgctgccgcccgttccaccgtcgccgcgcgtcaggccgcgccgctcttggctgcggcgctcgtccttgtagcggcaccccctggcctgcctgctgctatctcaccagcatttgcacagccagtttcagaaggcgcagcgctgttccggaaggcttgtattggttgccatgacatgggaggaaacattctacagccaggagccactcttttcctgaaggacctcgagagaaacggagttgccacggaggaggaactgtataacatcacatactatgggaaaggaagaatgcccgtcaggttttggagagaaatgcaccccaagaggacagtgcaccttcggcccccggctatcggaagacgacatcaagatcctagcttcgtttgtcaagtcgcaagcccagaacgggtggccgaagattgagggggatggagattgatcaaactgaaaaaacgatgagaagacggtgcttgttagtcagatgaaaatggtgacgggaagatagtgtttgtatagtttaggaatctggtctttctgaacttgtaaccttttagtctctgtttctgaactgaacttgtaaccttctggtccgtgtttcagttttctgaacttctattccaggcagagtccacaccttttccagccagccgaacaaggctgacactgacagagttcagtgctcaggcagggtccccaacaagtcgcagtcgcagctcagctcctctgatcgagggttggtgagttcggttggtgacgccgcgcgaactgctaccaggcctggcgtggcgtcggcgtggtttaaacacgaagaaacccacgccctccgtcgcgcggctgctgctggtgcggaggggaggtggtggggaaggaaaacggcgtcgcaactcccccgcccgcctcgaaccgacatgttgccgcgcacgcactcccaccaggcgcggcggcgctccggcctgggcccgcagctctgcgccgcagcggccgcgctcctgctgctcctctccctcgccgtcctccactcgcgcctctcctcctcgtcctcctcccgcttccccacatccgcatcccgctcccgcccctccacgcccgcggccgactccaactcctccgctctcctcgccgacgaggaggacgaggacgtggccgccgcgctcgacccgctgctcaccgtcaccaccaccgccgccgagggcgattctctcgccaaccccgacgacgaccgcatcgatgagctcgacgtgttggacgaggacgccgcgggcgccaacgaggctgactccgcctccgcctctacggtgggggccgccacgcccctcgtatgggaccacgtcaccggcgccgctcgcctgccgttccgcctccccgcctccgtcgaatccctgcccgcggggctgccgcggcttgactccccgcgccggatcgccgccgcagccttcggatcggacgacgagctggtggatctggaactgcgggtcgagatctcgtccatcgccggtatcgaggacgcgcttctcctgaagcccgcctctggtaaggccgccgagacgcggctccgcgccgggtgggcacgctggctggaggggaaggccgactacctacggcgcgatcggatgctccgctccaacctggaatccctcaatccgcgcaaccacccgcttctccaggatccggacagccccggcctcacttctctcacccgcggcgaccgcatggtgcagcgaatgctactagccgagctcgacaagcccgcgtccaagagctttgagcggcgtaggcttctatcttacgagaacaagcagagcatgacaacaactgtgaaggagaagccgcagacgggaaggaggtggggatatttcccggggatcgatccacatttgggattctcagagttcatggagaggttcttcgagcatgggaagtgttccatgagagtgttcatggtgtggaacagcccgcagtgggcgtatgacatcaggcaccagaggggactggagagtctactcaagcagcacccagatgcctgtgtagtcatgctatcggagacactggaactagagtccttccaccaattcgtcaaggaaggatataaagttgctgttgcagtgccgaatcttgatgagcttttagaaagcactccaactcacgtatttgcatcagtgtggtatgaatggcggcagacaaaatattaccatttgcactacagtgaactagtacgccttgctgccctttacaaatatggtggaatataccttgactctgatgttattattcttaaacctttaacatcgctccggaattctattggtgccacaaatcatgtctctggaaattcccgttttggtggggctgtgttagcatttgaaaaacagagccctttattggaggagtgccttagggaattttattcgacatatgatgataccctcgtgcagtggaatggggctgaacttatgacaagagtgataagcaatatttctagcagagcagatgaaaacagggggcatcttgacattaagttggagccctttgttaaattttaccctataagctctactgatattatacgatatttctcagagcccgataacatggtccaaaaagcacatcatgatgcaatcttttctaggatcgtgaatgactctaccactttccatttttggaatggcatcacatctgctctagttcctgaacccggcagtcttgtttcgaaaatccttaaccgttactgtctccattgccttgatgttttatagttgcaacagtctgaagctcctgctaagagctttattttggtttagaacaggtacacagaagaaatctttcaatgaggtactcagaatggctagtattgctgaatcttgcaaaacattgtgatggggggaaaattaccggcagcactgtgtatatattcttttcactaaggtttgtgccggagctgcgcctgcaaagtccaagcatgttgacttgactagttattgtcgatagcaaaagtcttcctcctggcaatacagaatgcaacaactgaagacacttggaactagagagttttgactagttcggtaccccttctatatttgcacatatactgataattttcacaatttgatattttgaaaataacatgattcgtgtaagacagtagaaattgaaggaccatataccgaattcactgggtttatctagatgtttggtaaacttttatttctcagagcatgattttgtctgaattaacgacttgggaacgagaatgtcagcgttgtaagcatctgcataaaattatagtgcaggtcttggcatcctcgaagctgaattgtttgctatgtaatgtaaattatgcatttttcaaacgttaaactgaaaggccaaagagacgatgatgaggacaatatttttttttcgaaagcgtaggagaactgcacatcattttaattagagaagaaaaaaggtccaaaatggaccaaggtacaaagccctaagcaggcttactcaaaacaaaaacacacaccactccctagaccctgtgaaggttacgcgcaagctctaagccaaagctctgaagatgtttggct

SEQ ID NO: 70137 - DNA, 3842 bp, Zea Mays
ggcgtccacttgaaccactctgtagagcaatcgccaatcggcagcttcgtcatccctcgtcgtcggattgtacgctccagctctccaagatttgccttggcttgccgtgccctgcgggagccaagccaaggacggctagcgctcgccacgcgcgatgtccgggcttcctccggccgcgcgaccgctgctaccgtctccctgcgcctcttcctccgttgttcgggcgaaggcagcgtcggcatgctgctccagcctaaagcagtcgcgcccaggccgaagtgctgccgcccgttccaccgtcgccgcgcgtcaggccgcgccgctcttggctgcggcgctcgtccttgtagcggcaccccctggcctgcctgctgctatctcaccagcatttgcacagccagtttcagaaggcgcagcgctgttccggaaggcttgtattggttgccatgacatgggaggaaacattctacagccaggagccactcttttcctgaaggacctcgagagaaacggagttgccacggaggaggaactgtataacatcacatactatgggaaaggaagaatgcccggttttggagagaaatgcaccccaagaggacagtgcaccttcggcccccggctatcggaagacgacatcaagatcctagcttcgtttgtcaagtcgcaagcccagaacgggtggccgaagattgagggggatggagattgatcaaactgaaaaaacgatgagaagacggtgcttgttagtcagatgaaaatggtgacgggaagatagtgtttgtatagtttaggaatctggtctttctgaacttgtaaccttttagtctctgtttctgaactgaacttgtaaccttctggtccgtgtttcagttttctgaacttctattccaggcagagtccacaccttttccagccagccgaacaaggctgacactgacagagttcagtgctcaggcagggtccccaacaagtcgcagtcgcagctcagctcctctgatcgagggttggtgagttcggttggtgacgccgcgcgaactgctaccaggcctggcgtggcgtcggcgtggtttaaacacgaagaaacccacgccctccgtcgcgcggctgctgctggtgcggaggggaggtggtggggaaggaaaacggcgtcgcaactcccccgcccgcctcgaaccgacatgttgccgcgcacgcactcccaccaggcgcggcggcgctccggcctgggcccgcagctctgcgccgcagcggccgcgctcctgctgctcctctccctcgccgtcctccactcgcgcctctcctcctcgtcctcctcccgcttccccacatccgcatcccgctcccgcccctccacgcccgcggccgactccaactcctccgctctcctcgccgacgaggaggacgaggacgtggccgccgcgctcgacccgctgctcaccgtcaccaccaccgccgccgagggcgattctctcgccaaccccgacgacgaccgcatcgatgagctcgacgtgttggacgaggacgccgcgggcgccaacgaggctgactccgcctccgcctctacggtgggggccgccacgcccctcgtatgggaccacgtcaccggcgccgctcgcctgccgttccgcctccccgcctccgtcgaatccctgcccgcggggctgccgcggcttgactccccgcgccggatcgccgccgcagccttcggatcggacgacgagctggtggatctggaactgcgggtcgagatctcgtccatcgccggtatcgaggacgcgcttctcctgaagcccgcctctggtaaggccgccgagacgcggctccgcgccgggtgggcacgctggctggaggggaaggccgactacctacggcgcgatcggatgctccgctccaacctggaatccctcaatccgcgcaaccacccgcttctccaggatccggacagccccggcctcacttctctcacccgcggcgaccgcatggtgcagcgaatgctactagccgagctcgacaagcccgcgtccaagagctttgagcggcgtaggcttctatcttacgagaacaagcagagcatgacaacaactgtgaaggagaagccgcagacgggaaggaggtggggatatttcccggggatcgatccacatttgggattctcagagttcatggagaggttcttcgagcatgggaagtgttccatgagagtgttcatggtgtggaacagcccgcagtgggcgtatgacatcaggcaccagaggggactggagagtctactcaagcagcacccagatgcctgtgtagtcatgctatcggagacactggaactagagtccttccaccaattcgtcaaggaaggatataaagttgctgttgcagtgccgaatcttgatgagcttttagaaagcactccaactcacgtatttgcatcagtgtggtatgaatggcggcagacaaaatattaccatttgcactacagtgaactagtacgccttgctgccctttacaaatatggtggaatataccttgactctgatgttattattcttaaacctttaacatcgctccggaattctattggtgccacaaatcatgtctctggaaattcccgttttggtggggctgtgttagcatttgaaaaacagagccctttattggaggagtgccttagggaattttattcgacatatgatgataccctcgtgcagtggaatggggctgaacttatgacaagagtgataagcaatatttctagcagagcagatgaaaacagggggcatcttgacattaagttggagccctttgttaaattttaccctataagctctactgatattatacgatatttctcagagcccgataacatggtccaaaaagcacatcatgatgcaatcttttctaggatcgtgaatgactctaccactttccatttttggaatggcatcacatctgctctagttcctgaacccggcagtcttgtttcgaaaatccttaaccgttactgtctccattgccttgatgttttatagttgcaacagtctgaagctcctgctaagagctttattttggtttagaacaggtacacagaagaaatctttcaatgaggtactcagaatggctagtattgctgaatcttgcaaaacattgtgatggggggaaaattaccggcagcactgtgtatatattcttttcactaaggtttgtgccggagctgcgcctgcaaagtccaagcatgttgacttgactagttattgtcgatagcaaaagtcttcctcctggcaatacagaatgcaacaactgaagacacttggaactagagagttttgactagttcggtaccccttctatatttgcacatatactgataattttcacaatttgatattttgaaaataacatgattcgtgtaagacagtagaaattgaaggaccatataccgaattcactgggtttatctagatgtttggtaaacttttatttctcagagcatgattttgtctgaattaacgacttgggaacgagaatgtcagcgttgtaagcatctgcataaaattatagtgcaggtcttggcatcctcgaagctgaattgtttgctatgtaatgtaaattatgcatttttcaaacgttaaactgaaaggccaaagagacgatgatgaggacaatatttttttttcgaaagcgtaggagaactgcacatcattttaattagagaagaaaaaaggtccaaaatggaccaaggtacaaagccctaagcaggcttactcaaaacaaaaacacacaccactccctagaccctgtgaaggttacgcgcaagctctaagccaaagctctgaagatgtttggct

SEQ ID NO: 70138 - DNA, 3938 bp, Zea Mays
ggcgtccacttgaaccactctgtagagcaatcgccaatcggcagcttcgtcatccctcgtcgtcggattgtacgctccagctctccaagatttgccttggcttgccgtgccctgcgggagccaagccaaggacggctagcgctcgccacgcgcgatgtccgggcttcctccggccgcgcgaccgctgctaccgtctccctgcgcctcttcctccgttgttcgggcgaaggcagcgtcggcatgctgctccagcctaaagcagtcgcgcccaggccgaagtgctgccgcccgttccaccgtcgccgcgcgtcaggccgcgccgctcttggctgcggcgctcgtccttgtagcggcaccccctggcctgcctgctgctatctcaccagcatttgcacagccagtttcagaaggcgcagcgctgttccggaaggcttgtattggttgccatgacatgggaggaaacattctacagccagtgagttgctgaaatccttgtgcgtagcgcaagcaaacgttacaagctctagccatagcttgttctaaccatcctgctcgaccgtgcccagggagccactcttttcctgaaggacctcgagagaaacggagttgccacggaggaggaactgtataacatcacatactatgggaaaggaagaatgcccgtcagggttttggagagaaatgcaccccaagaggacagtgcaccttcggcccccggctatcggaagacgacatcaagatcctagcttcgtttgtcaagtcgcaagcccagaacgggtggccgaagattgagggggatggagattgatcaaactgaaaaaacgatgagaagacggtgcttgttagtcagatgaaaatggtgacgggaagatagtgtttgtatagtttaggaatctggtctttctgaacttgtaaccttttagtctctgtttctgaactgaacttgtaaccttctggtccgtgtttcagttttctgaacttctattccaggcagagtccacaccttttccagccagccgaacaaggctgacactgacagagttcagtgctcaggcagggtccccaacaagtcgcagtcgcagctcagctcctctgatcgagggttggtgagttcggttggtgacgccgcgcgaactgctaccaggcctggcgtggcgtcggcgtggtttaaacacgaagaaacccacgccctccgtcgcgcggctgctgctggtgcggaggggaggtggtggggaaggaaaacggcgtcgcaactcccccgcccgcctcgaaccgacatgttgccgcgcacgcactcccaccaggcgcggcggcgctccggcctgggcccgcagctctgcgccgcagcggccgcgctcctgctgctcctctccctcgccgtcctccactcgcgcctctcctcctcgtcctcctcccgcttccccacatccgcatcccgctcccgcccctccacgcccgcggccgactccaactcctccgctctcctcgccgacgaggaggacgaggacgtggccgccgcgctcgacccgctgctcaccgtcaccaccaccgccgccgagggcgattctctcgccaaccccgacgacgaccgcatcgatgagctcgacgtgttggacgaggacgccgcgggcgccaacgaggctgactccgcctccgcctctacggtgggggccgccacgcccctcgtatgggaccacgtcaccggcgccgctcgcctgccgttccgcctccccgcctccgtcgaatccctgcccgcggggctgccgcggcttgactccccgcgccggatcgccgccgcagccttcggatcggacgacgagctggtggatctggaactgcgggtcgagatctcgtccatcgccggtatcgaggacgcgcttctcctgaagcccgcctctggtaaggccgccgagacgcggctccgcgccgggtgggcacgctggctggaggggaaggccgactacctacggcgcgatcggatgctccgctccaacctggaatccctcaatccgcgcaaccacccgcttctccaggatccggacagccccggcctcacttctctcacccgcggcgaccgcatggtgcagcgaatgctactagccgagctcgacaagcccgcgtccaagagctttgagcggcgtaggcttctatcttacgagaacaagcagagcatgacaacaactgtgaaggagaagccgcagacgggaaggaggtggggatatttcccggggatcgatccacatttgggattctcagagttcatggagaggttcttcgagcatgggaagtgttccatgagagtgttcatggtgtggaacagcccgcagtgggcgtatgacatcaggcaccagaggggactggagagtctactcaagcagcacccagatgcctgtgtagtcatgctatcggagacactggaactagagtccttccaccaattcgtcaaggaaggatataaagttgctgttgcagtgccgaatcttgatgagcttttagaaagcactccaactcacgtatttgcatcagtgtggtatgaatggcggcagacaaaatattaccatttgcactacagtgaactagtacgccttgctgccctttacaaatatggtggaatataccttgactctgatgttattattcttaaacctttaacatcgctccggaattctattggtgccacaaatcatgtctctggaaattcccgttttggtggggctgtgttagcatttgaaaaacagagccctttattggaggagtgccttagggaattttattcgacatatgatgataccctcgtgcagtggaatggggctgaacttatgacaagagtgataagcaatatttctagcagagcagatgaaaacagggggcatcttgacattaagttggagccctttgttaaattttaccctataagctctactgatattatacgatatttctcagagcccgataacatggtccaaaaagcacatcatgatgcaatcttttctaggatcgtgaatgactctaccactttccatttttggaatggcatcacatctgctctagttcctgaacccggcagtcttgtttcgaaaatccttaaccgttactgtctccattgccttgatgttttatagttgcaacagtctgaagctcctgctaagagctttattttggtttagaacaggtacacagaagaaatctttcaatgaggtactcagaatggctagtattgctgaatcttgcaaaacattgtgatggggggaaaattaccggcagcactgtgtatatattcttttcactaaggtttgtgccggagctgcgcctgcaaagtccaagcatgttgacttgactagttattgtcgatagcaaaagtcttcctcctggcaatacagaatgcaacaactgaagacacttggaactagagagttttgactagttcggtaccccttctatatttgcacatatactgataattttcacaatttgatattttgaaaataacatgattcgtgtaagacagtagaaattgaaggaccatataccgaattcactgggtttatctagatgtttggtaaacttttatttctcagagcatgattttgtctgaattaacgacttgggaacgagaatgtcagcgttgtaagcatctgcataaaattatagtgcaggtcttggcatcctcgaagctgaattgtttgctatgtaatgtaaattatgcatttttcaaacgttaaactgaaaggccaaagagacgatgatgaggacaatatttttttttcgaaagcgtaggagaactgcacatcattttaattagagaagaaaaaaggtccaaaatggaccaaggtacaaagccctaagcaggcttactcaaaacaaaaacacacaccactccctagaccctgtgaaggttacgcgcaagctctaagccaaagctctgaagatgtttggct

SEQ ID NO: 70139 - DNA, 4450 bp, Zea Mays
taataacctgtcatcttcacggccagcgttgtgtagccgccgggaaagaaactgacggccgacggcgggagctgtctgtgtctatacagtatgggacatccggaaccgtacaaggcgatggatgatgtttgccggaaccagtaaactgacaggaccagaccgcgtaacgtgaagacaacttcttctgcacagagcacagtatctatgacctgttcacctccctcccagctggggaactcaccacaccgaatctccagtttatcagcaggactgtcgactgcagatgatcatgtggccattttttctgactcaaagctgcagtatactaaatattcaaaatccaaagttgatttggtaattgatactggaggtaggagaacgaaaggaatgccgaagcctatacgattatatcacaaaaacaaactcacaagacgcctacacgagcagggcggcagcaagaagagaagacgaccagtccaccaaggatggctgcgaggctggcagcagacgggccagttgggccaaatgttgttaagcatggcccaacccaacgcaacccaatctgtttcaatctgtagaacaaccacgtggcgtccacttgaaccactctgtagagcaatcgccaatcggcagcttcgtcatccctcgtcgtcggattgtacgctccagctctccaagatttgccttggcttgccgtgccctgcgggagccaagccaaggacggctagcgctcgccacgcgcgatgtccgggcttcctccggccgcgcgaccgctgctaccgtctccctgcgcctcttcctccgttgttcgggcgaaggcagcgtcggcatgctgctccagcctaaagcagtcgcgcccaggccgaagtgctgccgcccgttccaccgtcgccgcgcgtcaggccgcgccgctcttggctgcggcgctcgtccttgtagcggcaccccctggcctgcctgctgctatctcaccagcatttgcacagccagtttcagaaggcgcagcgctgttccggaaggcttgtattggttgccatgacatgggaggaaacattctacagccagtgagttgctgaaatccttggagccactcttttcctgaaggacctcgagagaaacggagttgccacggaggaggaactgtataacatcacatactatgggaaaggaagaatgcccggttttggagagaaatgcaccccaagaggacagtgcaccttcggcccccggctatcggaagacgacatcaagatcctagcttcgtttgtcaagtcgcaagcccagaacgggtggccgaagattgagggggatggagattgatcaaactgaaaaaacgatgagaagacggtgcttgttagtcagatgaaaatggtgacgggaagatagtgtttgtatagtttaggaatctggtctttctgaacttgtaaccttttagtctctgtttctgaactgaacttgtaaccttctggtccgtgtttcagttttctgaacttctattccaggcagagtccacaccttttccagccagccgaacaaggctgacactgacagagttcagtgctcaggcagggtccccaacaagtcgcagtcgcagctcagctcctctgatcgagggttggtgagttcggttggtgacgccgcgcgaactgctaccaggcctggcgtggcgtcggcgtggtttaaacacgaagaaacccacgccctccgtcgcgcggctgctgctggtgcggaggggaggtggtggggaaggaaaacggcgtcgcaactcccccgcccgcctcgaaccgacatgttgccgcgcacgcactcccaccaggcgcggcggcgctccggcctgggcccgcagctctgcgccgcagcggccgcgctcctgctgctcctctccctcgccgtcctccactcgcgcctctcctcctcgtcctcctcccgcttccccacatccgcatcccgctcccgcccctccacgcccgcggccgactccaactcctccgctctcctcgccgacgaggaggacgaggacgtggccgccgcgctcgacccgctgctcaccgtcaccaccaccgccgccgagggcgattctctcgccaaccccgacgacgaccgcatcgatgagctcgacgtgttggacgaggacgccgcgggcgccaacgaggctgactccgcctccgcctctacggtgggggccgccacgcccctcgtatgggaccacgtcaccggcgccgctcgcctgccgttccgcctccccgcctccgtcgaatccctgcccgcggggctgccgcggcttgactccccgcgccggatcgccgccgcagccttcggatcggacgacgagctggtggatctggaactgcgggtcgagatctcgtccatcgccggtatcgaggacgcgcttctcctgaagcccgcctctggtaaggccgccgagacgcggctccgcgccgggtgggcacgctggctggaggggaaggccgactacctacggcgcgatcggatgctccgctccaacctggaatccctcaatccgcgcaaccacccgcttctccaggatccggacagccccggcctcacttctctcacccgcggcgaccgcatggtgcagcgaatgctactagccgagctcgacaagcccgcgtccaagagctttgagcggcgtaggcttctatcttacgagaacaagcagagcatgacaacaactgtgaaggagaagccgcagacgggaaggaggtggggatatttcccggggatcgatccacatttgggattctcagagttcatggagaggttcttcgagcatgggaagtgttccatgagagtgttcatggtgtggaacagcccgcagtgggcgtatgacatcaggcaccagaggggactggagagtctactcaagcagcacccagatgcctgtgtagtcatgctatcggagacactggaactagagtccttccaccaattcgtcaaggaaggatataaagttgctgttgcagtgccgaatcttgatgagcttttagaaagcactccaactcacgtatttgcatcagtgtggtatgaatggcggcagacaaaatattaccatttgcactacagtgaactagtacgccttgctgccctttacaaatatggtggaatataccttgactctgatgttattattcttaaacctttaacatcgctccggaattctattggtgccacaaatcatgtctctggaaattcccgttttggtggggctgtgttagcatttgaaaaacagagccctttattggaggagtgccttagggaattttattcgacatatgatgataccctcgtgcagtggaatggggctgaacttatgacaagagtgataagcaatatttctagcagagcagatgaaaacagggggcatcttgacattaagttggagccctttgttaaattttaccctataagctctactgatattatacgatatttctcagagcccgataacatggtccaaaaagcacatcatgatgcaatcttttctaggatcgtgaatgactctaccactttccatttttggaatggcatcacatctgctctagttcctgaacccggcagtcttgtttcgaaaatccttaaccgttactgtctccattgccttgatgttttatagttgcaacagtctgaagctcctgctaagagctttattttggtttagaacaggtacacagaagaaatctttcaatgaggtactcagaatggctagtattgctgaatcttgcaaaacattgtgatggggggaaaattaccggcagcactgtgtatatattcttttcactaaggtttgtgccggagctgcgcctgcaaagtccaagcatgttgacttgactagttattgtcgatagcaaaagtcttcctcctggcaatacagaatgcaacaactgaagacacttggaactagagagttttgactagttcggtaccccttctatatttgcacatatactgataattttcacaatttgatattttgaaaataacatgattcgtgtaagacagtagaaattgaaggaccatataccgaattcactgggtttatctagatgtttggtaaacttttatttctcagagcatgattttgtctgaattaacgacttgggaacgagaatgtcagcgttgtaagcatctgcataaaattatagtgcaggtcttggcatcctcgaagctgaattgtttgctatgtaatgtaaattatgcatttttcaaacgttaaactgaaaggccaaagagacgatgatgaggacaatatttttttttcgaaagcgtaggagaactgcacatcattttaattagagaagaaaaaaggtccaaaatggaccaaggtacaaagccctaagcaggcttactcaaaacaaaaacacacaccactccctagaccctgtgaaggttacgcgcaagctctaagccaaagctctgaagatgtttggct

SEQ ID NO: 70140 - DNA, 2314 bp, Zea Mays
gcagtagtgggttaggggaggtgaatggacagcatttgcacagccagtttcagaaggcgcagcgctgttccggaaggcttgtattggttgccatgacatgggaggaaacattctacagccaggagccactcttttcctgaaggacctcgagagaaacggagttgccacggaggaggaactgtataacatcacatactatgggaaaggaagaatgcccggttttggagagaaatgcaccccaagaggacagtgcaccttcggcccccggctatcggaagacgacatcaagatcctagcttcgtttgtcaagtcgcaagcccagaacgggtggccgaagattgagggggatggagattgatcaaactgaaaaaacgatgagaagacggtgcttgttagtcagatgaaaatggtgacgggaagatagtgtttgtatagtttaggaatctggtctttctgaacttgtaaccttttagtctctgtttctgaactgaacttgtaaccttctggtccgtgtttcagttttctgaacttctattccaggcagagtccacaccttttccagccagccgaacaaggctgacactgacagagttcagtgctcaggcagggtccccaacaagtcgcagtcgcagctcagctcctctgatcgagggttggtgagttcggttggtgacgccgcgcgaactgctaccaggcctggcgtggcgtcggcgtggtttaaacacgaagaaacccacgccctccgtcgcgcggctgctgctggtgcggaggggaggtggtggggaaggaaaacggcgtcgcaactcccccgcccgcctcgaaccgacatgttgccgcgcacgcactcccaccaggcgcggcggcgctccggcctgggcccgcagctctgcgccgcagcggccgcgctcctgctgctcctctccctcgccgtcctccactcgcgcctctcctcctcgtcctcctcccgcttccccacatccgcatcccgctcccgcccctccacgcccgcggccgactccaactcctccgctctcctcgccgacgaggaggacgaggacgtggccgccgcgctcgacccgctgctcaccgtcaccaccaccgccgccgagggcgattctctcgccaaccccgacgacgaccgcatcgatgagctcgacgtgttggacgaggacgccgcgggcgccaacgaggctgactccgcctccgcctctacggtgggggccgccacgcccctcgtatgggaccacgtcaccggcgccgctcgcctgccgttccgcctccccgcctccgtcgaatccctgcccgcggggctgccgcggcttgactccccgcgccggatcgccgccgcagccttcggatcggacgacgagctggtggatctggaactgcgggtcgagatctcgtccatcgccggtatcgaggacgcgcttctcctgaagcccgcctctggtaaggccgccgagacgcggctccgcgccgggtgggcacgctggctggaggggaaggccgactacctacggcgcgatcggatgctccgctccaacctggaatccctcaatccgcgcaaccacccgcttctccaggatccggacagccccggcctcacttctctcacccgcggcgaccgcatggtgcagcgaatgctactagccgagctcgacaagcccgcgtccaagagctttgagcggcgtaggcttctatcttacgagaacaagcagagcatgacaacaactgtgaaggagaagccgcagacgggaaggaggtggggatatttcccggggatcgatccacatttgggattctcagagttcatggagaggttcttcgagcatgggaagtgttccatgagagtgttcatggtgtggaacagcccgcagtgggcgtatgacatcaggcaccagaggggactggagagtctactcaagcagcacccagatgcctgtgtagtcatgctatcggagacactggaactagagtccttccaccaattcgtcaaggaaggatataaagttgctgttgcagtgccgaatcttgatgagcttttagaaagcactccaactcacgtatttgcatcagtgtggtatgaatggcggcagacaaaatattaccatttgcactacagtgaactagtacgccttgctgccctttacaaatatggtggaatataccttgactctgatgttattattcttaaacctttaacatcgctccggaattctattggtgccacaaatcatgtctctggaaattcccgttttggtggggctgtgttagcatttgaaaaacagaggtgtcagattggaacagctacatc

SEQ ID NO: 70141 - DNA, 4299 bp, Zea Mays
aaaaatttagctttgagctgacgtggggagaggcccccgtgtccgttcacctctccggctctccctcccagcctcgccctcccaccgtcccacgttgttcctcccgaccctcgccgtccctcccgccgcgacccgccctcctcctcccgaccacgccgcccagcccgtgtaccactccctcccagcctcgccctcccacgccgtccctcccgtcgtgacccttcctcctcctcccgacctcgccgcctagcccgtgtcgccgccgtcgcccgtgccactctgctgctgcgaccacgacaatggggatgtggaaggtggtgtgcgtcaccgacgcatcagcgtacatcgcgtcctggatcgttaggctcctcctcgaccgtggctacaccgtccgcgccaccgtgcgagacacaggtgcgcatcccggcccgtcctccccaatccccgtgcctttctttcccactgattccctgtggtagctagcggaattactgtgatgttttgtgagattggttaggttagactgggaattgattagttggcaggggactgcataacctaccttggtaaatttgggatgttaggttcggtactattttgcttctggatccacttgcctccggcaacccaaaatcttgattgcatctgtagactgaaaaatgctgctacagatgaacttggcttgtcagtttattaaggagcaatttgtatccccatacatatcagtacaccaagttccagaagggagagaaatagaaaatcaaccaaacggatagaaacagaaactattttttagaatgggtccctattataatcctaacaaggagaaaccttgaagtgcagcctatccttagctccatccaacgcagtcacttgcaatgttttctttgggtcagccgaaaagtgaaggtaacaacaatgaccgaatgccaaaggtaatattactaaagaattatggtaagaaatagaagacagtagtattattctgttgtatctccttgttaggatttgcaacacgtattctgcatttgcaacttttatttgttcttcgtgtggtcattctagcatgcttggattactctctgcatacatagatatgggaaaatagctccgatccattttttggtagccaacgatagctggcagaaaatttattctgtcagacaggcacttctggtctctagatctagattaattaacacactgcacataaatgaggtttccatccgggactatagcttatttctgcactagcgcatcgccacatgtatatgtatcaagcttgagtataagtatatatttccagcagttctacatatgtcaccacaatatatatgttatctttggccattaacttgtatatgtctgtatttatacttcttcgatacggaccctatactatatatctacgttgtcaagggctacgtttgacaatagtttaatttcctgcccccatggaaggaattctgctggagttcgcgtgtctatttcagatgctgttgcaactgaaccaacccagatgacctgcacgcttgtataagattttcatgtctcacttcattcactgatgatcaccatcaacatttcaatctccgcacatatttggtcacatatccacgcttgtttggtcacttaactagcttctgaatcttgcaaactctcatctacagagaggagtcaccaagccaattgtactctctataggcttctttcctctccccggaagataaaggattgtagctgtcttttcttaatagaatggagaaagatctgtactgtgagtatttgtgtacgttgttggtcgatggctcaaatcgtctgaccaaatcttttattcagcgagaatggcaagcaaaatatatttgatcttttgtgttgtgtttttagacatgtgtggattctcacagttcatttggttgcatttttacttgcctttaaacctgatccctgatgctggtcgtcaaatactcagcttgttggctgcaatctgtgtttatcttggtatatccttgaaagttgatagtacagaaccaaagcatattaaggcatactgctattatttatcattcatgtttcaaacacacttgatactgcatatctctacagtttgtttacatgctcagatgttgaactcgatctattccttgccatatttatttatgattgacgaaccaatatccattgaccatgacatcaatgttccctagagtaaatgcatcaaaagtcggaaggagtgatctttgagtagttctatttgttgctggtagtatactgaaagtttcgttagttctcatctctctgatgctttttctttcagttctccacaacctacattcacttaacaaggcactttttcttgagaataataaaaaatgtactcctttcagtgttgctatcatcataaagtgttgcttgtggacttcctttttgtaatattcgtctaatgttgatgagaatcaaccggttggtgatgtgaatgaccaaataacattgctaaacactttgttaatgtaacatacatgactggtataggggatccacgagagagaaagcactgggcgctcctactgatgcttttgaaagttttgtcctccttggtttagtggaaacaagttattattctactttaatgatgccttcttagaattttatataactagacaagtgaaaatatgggatatacattgtcttttgcacccatggatgtgtaagttgtaacctcatcaatgcagttatgctctggttttaaaaaaatagtgagcttacatatgcctgcacgcggactgctgatccatgtgttcccctttcttgagcccaatacacatgctaatagcagcatcaggttttagtgttgctgacttgctgtgtggggcaaaccaaaacaaggcaggcttcaaatctaaggaatttccctcttgcctagggctcttacagttgctattatttggccaaggtcaagattctcatacagattgtgtcctgtagtgtgggttggtgccttgttctgttttccatctcactcatccagcacaattctgcccctctaaacaaactttgtattcgctctgctatttaggtgttaaaaaggagaactaaatttagctgtcaaaaaaggagaactgtcctgtataatttctttggtcacacattcatagttcttctgtgacattattacaattaaccaaatatatgcaccacttttcccatgttttttcccttttcctgagctgatgtcactcttttttctggattgcgtgatctcactctccaaatatttggcccttcattatgtatctgtctgactgatgatttcatctcatctgttctcacctaaatgagttgttgatcatccaccttctggtacccaacttcatggcaccaaataatggagtggccgtctaatttgggatctactaccttggatccaactggttgatgagctgatacgtatgaaactgttttaatatataataactacttacagatggtactacatcgcaacttacacagcctttggaaatgtagagcccacctcagttgatctattcaagaacttccattatagcaaaaacaatggatttatcgagtttgtacagaaagcaattgatgatatggaaggcatcatgagtgaaccagtacaagatggacatgaaccaaagttagcaaatgaagctgtttctcaggttgtcaaaatcaactacttttcttcgtgttgcaggtgtttgttcggcctccaagagtacctctagaggcacaatatcgtcacaggtccaagatctttagattaccttgagaatgagaagcaataaacggcagaacttcgacaagagttggataacatgaagatggaatcagaaactttggtaaaacattctgaggaaatagaggatttaaagaagacaccataagaaatacatgccctccttcactagctgctaagcttcaatcaggatcagcacaatccagggccataaagttcctaagcccccaacagtgaactattgcaggacgtttctgttttgaaatttggttgttggttgaactatgtctaattgttttatcaataattggttgctagttgtttacaagtatgacttagtaggtccaagtttattgatttttgttactggtacctccaagttttgttgaacattgttgcttcttgcaagacgtattgtgatctatgaattggaactcatgtctgctataattttggttattggatgtgtaaattttgtgaaatatgttatgtgaacatctgtacgcttgaatgagattgctcaatgggctatagatttt

SEQ ID NO: 70142 - DNA, 1203 bp, Zea Mays
aaaaatttagctttgagctgacgtggggagaggcccccgtgtccgttcacctctccggctctccctcccagcctcgccctcccaccgtcccacgttgttcctcccgaccctcgccgtccctcccgccgcgacccgccctcctcctcccgaccacgccgcccagcccgtgtaccactccctcccagcctcgccctcccacgccgtccctcccgtcgtgacccttcctcctcctcccgacctcgccgcctagcccgtgtcgccgccgtcgcccgtgccactctgctgctgcgaccacgacaatggggatgtggaaggtggtgtgcgtcaccgacgcatcagcgtacatcgcgtcctggatcgttaggctcctcctcgaccgtggctacaccgtccgcgccaccgtgcgagacacagcctttggaaatgtagagcccacctcagttgatctattcaagaacttccattatagcaaaaacaatggatttatcgagtttgtacagaaagcaattgatgatatggaaggcatcatgagtgaaccagtacaagatggacatgaaccaaagttagcaaatgaagctgtttctcaggttgtcaaaatcaactacttttcttcgtgttgcaggtgtttgttcggcctccaagagtacctctagaggcacaatatcgtcacaggtccaagatctttagattaccttgagaatgagaagcaataaacggcagaacttcgacaagagttggataacatgaagatggaatcagaaactttggtaaaacattctgaggaaatagaggatttaaagaagacaccataagaaatacatgccctccttcactagctgctaagcttcaatcaggatcagcacaatccagggccataaagttcctaagcccccaacagtgaactattgcaggacgtttctgttttgaaatttggttgttggttgaactatgtctaattgttttatcaataattggttgctagttgtttacaagtatgacttagtaggtccaagtttattgatttttgttactggtacctccaagttttgttgaacattgttgcttcttgcaagacgtattgtgatctatgaattggaactcatgtctgctataattttggttattggatgtgtaaattttgtgaaatatgttatgtgaacatctgtacgcttgaatgagattgctcaatgggctatagatttt

SEQ ID NO: 70143 - DNA, 2703 bp, Zea Mays
ctcacctatcgcaggaccagggcacgcgaagccagaaaaccccatacacggtagccgtccggtcgctgccggtgggtggctacccgtaacggcactccactccacttccgctcccactccaccgccgcctccttcgtcctctcgtcattcgctcccggcacgctgtacgccgagaaatctctccttcccagcttctgtcctgtgggaggcttctgagatcgcgcggaggtgcggaatggagagcagcagcggggaggagctggaggaggagttcccgggccacgagtggatcaccccgcagtcctccatcaacgccgcctaccagtctcagaccgagaagggtatcaggaaaatttgctccgatttgttggagttgaaggatgctattgaaaacctgtctgcaaataggcagtcaaagttcctggcttttctcagaatttctgaggaggttgttgaagcagaacaagagttaattgagctacaaaagcatgtgtcttcccaaggaattcttgtgcaggatctaatgagtggtgtgtgtcgtgagctcgacatttggcacaaatctagcaaggaagaagatgcaacaaaaaaagactctgaaactgaacttgatgaaattttgtctgatgatacccaggatcccagaactatttttctagataagttagacgttttgcttgcagagcacaaaatggaggaggctgttcttgctttggaagctgaagagaagaaatatttagttgcagatgaatctggtaaagaatcaaatgcagataatactgcctttaagacagcactggttaaaaggaaaacaattcttgaggatcagcttgttaggtattgtggacagccatctttatctatgaatgaactaaggaagtgtttgtctggtttaattaagataggcaaaagttctttagcccatcaagtacttctaaaagcttatggttcacgcctgcagaaaagtgtcgaggcatttcttcctaactgttcaatctacacggagacatactctgcaactttgtcacagcttgttttctcagctattgcaaaagcagcaaaagaaactaatacgctacttggagatagccccatgaatacaaaccggattatccaatgggctgaatatgaaatcgaaacctttgcgcgtttggttaaagaaaattctcctttgcctgagagtgtttctgcccttcgctctgcctgtatatgcatcgaaactagtctctttcattgctcttgtctagaatcccaaggtctgaaattctcaaaattacttatggtactattgcgcccttatattgaagaagttcttgatttgaattttagaagggtgaggagaaagattgtggatggggcaaggaatgatgatattctgcttctcacccctcaagaaggatcaccgctctctggtgcagtttcaccaaatgttatgcttacaagcagtggaaaaaagttcatgtccattgtcaatgatgttttggatcagatcctcccaatgaccatagttcactttggtggagcaattctgaataaatttatccagctttttgatagatatgtagaaacactgatcaaagtcttgcctgggccttctgaagatgataatctactggagtcaaaagagcctattgaacttaaagctgaaagtgatgcgcaacaacttacactaattggaacagcatacactgtagcagatgagttattgccagctgctgtatccaagttctttgacatacaagctgagaagaaaggagctggtggatcaagcgaaggccttggccctgggtccatatatgccatggaatacaaagagtggaaacgtaatttgcagcattcattggacaaactgagggatcacttctgccgacagttattgcattttttcgcaaccatgcctaaggcctaagcacattttcattaagagggcactgtttggaagattgcaacagctagctagtgtcgctggtgacgttctactgggaaaagataagatacaaaaggttttactctcaaggctaactgaaacagttatcatgtggctctccaatgagcaagagttctgggatatctttgacgaccgatctgtccaactccagccttcggggctgcagcagcttattcttgatatgcacttcattgtcgagattgctgtgtgtggaaggtttccatatagaccagttcagcagcttgtgtccacaatcataaccagagcagttgcagctttctcagcaaggggtgttgatccacaaagtgttcttcctgaggacgggtggtttgtcgacaccgccaaggccgcaatccacaagctcatgctgggggtttctgggtccgagtccgagcccgagcctgatgcggaagaacatattgctctgcatggtgaggtctcagattctgaggagagctcaggtgcatcgacagtaggatcagaagactcattcgcttctgcgaagaacgatgatctagaaagccccgtttacttcactgaccctgagagttgagaacttctcaggtcgtcgttgtagattcagttatcgtttatttgaagttttgtcatcctgcatagttggcagatttcagaaccgtggaacatcgttgcactcaagatgaaaacaaagaacccagaaatgccgtttgtaattatggtcgttgctattgtaccttgttgcttattgttagcgccgatttggacatcaatcattg

SEQ ID NO: 70144 - DNA, 2552 bp, Zea Mays
gtgatgtcgtgtttgaccacctcctccctcgctcggctcggctcccaccttcctccgttgcctcctcttccgcggccccgtcgctgggcttggctttaccagtggcgggttcccacacgggggctagacgccgccaccgctgaccccgtctacaccgaatccccgcgcgatttaacccctcgcctcgctcgccgcctccgcttccatacaaccgcgcactccaaacgcgcacgcgctgttcgttcctcggccgctctgtccacccccgtccttctccgcccccaacagatctccgccggccgtgcggttccttaattcgccttctccgggactgtcggatctccgcggcggctggggatgggcaactgctgcgtgacgccgaaagcagccgacgacgccggcggcggcaagaagcccaaggagccgaagcagaagaagggtaagaagccgaaccccttctcgatcgagtacaaccgctcggggcaggcgagcgcgccaaagctggtggtgctgcgggatcccacggggcgggacatcgcggcgcggtacgagctcggcgcggagctcgggcgcggcgagttcggggttacctacctctgcacagaccgtgcctcaggggaggcgctggcctgcaagtctatctccaagaagaagctccgcaccgccgtcgacctcgaggacgtgcgccgggaggtggagatcatgcgccacctccccaagcaccccaacgtcgtcacgctcagggacacgtacgaggacgacaatgccgtgcacctcgtcatggagctctgcgagggcggtgagctcttcgaccgcatcgtggcgcggggacactacactgagcgtgctgccgccttggtcttacgcactatcgttgaggtcgtgcagatgtgccataagcatggagtgatgcacagggatctcaaaccagaaaattttttgtttgcaaacaagaaagaatcagcggcacttaaggccattgattttggcctgtctgtatttttcactccaggcgaacggttttctgagattgttggaagtccttattacatggctccagaggtgctaaagagaaactatggcccagaggttgatgtttggagtgcaggagtgattctgtacattcttctttgtggtgtccccccattctgggcagaaacggaacagggtgttgctcaggcaatcattcgatctgtcattgatttcaaaagagatccatggccaagggtgtctgataacgccaaagaccttgtcagaggaatgctgaatccggacccaaaacgacgattgacagctcaccaagtgcttggtcacccatggttgcagaacattaagaaggctccaaatgtcaatttgggtgaaactgttaaggccagactccaacaattctctgtgatgaacaagttcaagaagcatgcacttagggttatagctgagcatctttcggtagaagaggctgctgacataaaggatatgtttgagaagatggatcttaacaaggatcaaatgcttagtttcgaggagctgaagcttggtctgcataagtttggtcaccaaatgcctgatgcagatgttcaaacactaatggaagcggtgagtttacattctttttccccacaacagaaacttaatttgcaccactttaatattgtactggagtttcttttttgtttatgtcaaacacctttggatagtgttttatcaacccggtttaatgtttttccttctcattttaattgagcattctgtcacggaggtgatgtgttgggcgttttatagttactgttgtgcatgttgtaccaggcggatgctgatggaaatgggtccttgaattatggagaatttgttacattatttgttcatctaagaaagattggaaacgatgagcatctgcataaggcattcgcatacttcgaccggaaccagagtggttatattgaaattgatgaactccgtgagtcattagctgatgaccttggacaaaaccgtgaagagattatcaatgccatcatccgtgatgtagacaccgataaggatggcaagataagctacgatgagtttgcgacgatgatgaaggccggaacagactggaggaaagcatccagacagtactcgagagagcgattcacaagcctgagccttaagctgcaaaaggatggatcgctgcagatgacgagtacacggtagcccgataacaccacataggcaagttgtgaattacagatggaaaccatgtgtagatttttctggttgtttgttgacagctcttctgcttgtcctgatgttccattgctttgtattcttcgcttgcggcctgtttgaaggattaggggggattgtttatgctatgattgtatttagactgcatgatccatgcctcgctcgtttccaaagtgtactgtacaaaagaaagaggagaaagggattatgaggctctgctcatttcttaacttctgtggattcatttgtttgtgtgttgttcttaatatcctgaattcctgatgactagttcatgcatatggtgctgaatcgacaccggttgttggaacctg

SEQ ID NO: 70145 - DNA, 1414 bp, Zea Mays
aacaccaatctgttcctctgttggttcgccgccctacgctagtgtggtgggcgctggccaggcaccgcctccggcttctatttaagaaggcgcgcccccgccaccatcctacccaccacacaccaccaccaccaccaccgcacacccggcggcgccaagcccttcgaccaggtagctgaccagcatagcggcagatggtttcgcggccgctagagacttagcgtcgacgaagagggaggaagcggcgtgccacatgttgagtgagcagacggcggctagcactagcagcagcggcggcggcgtcgagcgtcaggacaggtggctgcagccggtggcggagaacgaggaggaggaggaggaggccgaggaggaggaggaggaggagctggaggagaccaacccgctggccatcgtgccggacagcaaccccatcccgtcgccgcgccggggcccgccgcccgccgccccgggcgccgacgcggcggcgctggtggccgccgacgggcacggaagccgcgaaggcgggggggtgtccgtggggcaggtcaggaaggaggaggtggagtccaagatcgccgcgtggcaggtcgccgaggtggccaaggtcaacaaccgcttcaagcgcgaggaggtcgtcatcaacggctgggagggcgaccaggtcgagaaggccagcgcgtggctcaagaagtacgaggtaattaatatccatgggtctatagcttcaaaacccagcaaaccccccctaatcatgtatctggattgcccagttctgatatcgtcagtgttgttatgttgtatggcacagaggaagcttgaggagaagcgtgccaaggcgatggagaaggcgcagaacgaggtggccaaggcgcggcggaaggcggaggagaagcgcgcgtccgcggaggccaagcggggcaccaaggtggcgcgagtgctggagctcgccaacttcatgagggccgtggggagggcgccctccaccaagcgctccttcttctgaacccaccggcctcttcttcaccagttcctctgtcttgccgccgccgcctgtgcagttcagttcagttcagttgtcctgtgggtcggaccgttcaccgcttcactccacgggatcaggcacagtgatcagtgccgtgctagctgtgtggaacgcttgttttagtgttgtatccacatgtacgatttgtaacgtttccttgcttctcccgtttcgtgttttcgtatggtatctatggtattgcaaagtccatggccacgatagacagggaaagcatatgtatacaccattagaaggatgtgctctgcgcctctgcccgagtcttgaggacaggagctgcatgtatttttcaccaatataatggttgtgtatgtcaattacgaaaagatatgaacaccattaccaccgcgtaaa

SEQ ID NO: 70146 - DNA, 776 bp, Zea Mays
ctaggattgcgtcgcacccgcaccgggcgaggccagccgacggaaatatctggcccactagagctacagctatcccatctccacgaaccatggcagtcgcccaggccgcaacggtggtggctgcggccgccgcgtgccggggcatttcgccgagcgggacgactggcgtgttcaggtggcgaccacgccggcgcgcgctggcacgggcacgcccggcgcggcgcgggagccgagccacgggccgcggccgggggctcgtcgtcgtggccgagttcggcgggacgtacgaggacggattcgaggacgtgcacaagaacatcatcaactacttcacttacaaggccacgcacacggtcctccatcagctgtacgagatgaatcccccagcctacacctggctctatagttacatttctgtcaacgatccattagatggcgattacttccttcgcttgctcgccaaggagaggcaagacctcgcagagagagtgatgatcacgcgcctccacctgtacggcaaatggatcaagagatgcgaccacgcgatgatgtacgaacggatctccaaagagaacctggatatcatgcgccaaagaagaaaaagaagaacaaggtctcgagggaacccccatgtttgtgttgccactgaagctgacagcaaacctgcctggggtcaggagcagcctcgcctagcgccagaaggtatcgagaagtactgccccattcaccggtcgagtacccacgacttgacggctagtcaaggtttagtgccctga

SEQ ID NO: 70147 - DNA, 2684 bp, Zea Mays
cgccggtgggtcgcccagtgccatcgcagcccccagccccatcgtcgcctcacagccagggaccgcgtccaccccgccgggagggccgcgtgcctcgctcgcgccgtcgggtgggggccgcggcgcgcccgctcgcgtcggggggccggtggggcagcgtgccgccatcggggctgaggccgggggccgcgttcgcgcaggggccgccctctctggtgccatgcaaggccgacatcctccccattgctccaggcgctgtggtcttggttagcaggcatggcgcgcagagcgcgtcgaggggaggggcgctgtggccgcgggcatcgcagggatgggggcggggcaggggcaggggcaggcatcgacgcacggggtggttgacgggggcgagggcacgatgcacagcgagtgggagcggtcgccgatagaagggcgcgaggggaggatgtcgggggcagggcatgcgcacgggcgcgggctgatgatggcggggcggcgatggatagtgcgatgatggtggggcggatggagggttcctgggattgcgcgaccaagagcggggcaaggggaggatgtcggaggcaggggcagggcagaaccgtgcgccacaccactgtggacgcctacggtatcttcttaagaatagtagagattacatctgatgttgtatttggtaaaaaaatatttttttcagagtttagagccaacaactaaactgccatcatctcttcaccaacagatgcacaagactcctagatgtattgtatgggggacaaggatagtctcacagaaaaagggttgctaatgatatcatgttgttgtagaagtaaatcaccatacaatatgaactatgaagtgagtgattgaaccaaaagggttttgcatggcatcctaccataaattgtgagaacacaaaaccataaggggagctgctcctcttaagcggctgacgatcgatctattgtattccagatggtccttaaaccgacaaaatatatatacactgccgcttggtgtatgcaaatagctaactgggcagtcagccaagcgcgtgcactgtagcatgatttagaaatatagtgtttcaaacataagaatgtttattttgttaccgaaagaatgatatttagatccccacaaaagtccatgtccattgtaacatgcccattcttaaaattgtgaattcaaatgcatgaacacagaatagcatgtcatgcccaaattacatgtgatggctggacaacaataattaccagtgaaacacatcaacaagatggctggcaatgttccaagcactgaaacaaagcatgaccacatgctcaaagatcacaagataatatgtcactaccccaccacagtaccacacgtaagtgactattttaccaatgtgttaccctccctagaggatcaccccatctttgtacaaacttgaagtgccacaataccaccttacatgcggttcaggccctcaacatctggttacacagacatccccattgatcaaaccacaaaatgctcatgaaggaaactcatgagatgcccatgtgatgggtaataaaacttaaatataatggaagacatgatttttgtttctcaaacatggagagttttgcaacattatattaataagaaaaaaggaaagataaaggctaacaaatcattcacacaataagcataaacaactatagaaagctgaaacgcatccaaaccttaaactgcgcgcgtagacatccaccaactgttttgcaattttaggtcaatctcccttgtttgcaagaagaatctggtaagaaaattacttgtagagatgtcacaaattagaaggtaaaaatcataatgtaaatcatatttctaatgattagaagccagtttggtagataattcagtaaaattcaatattaatgaagatgttgtctatggaatttctgaaacaataatggcacataatgtgcttttaataattacatattgcctggtacttggccctaagcccaacatgtggtctgaagagaaaagaatctacctcatctatcacgaccatctgcaaattgaaatagttcaatgagatcaaaaggaatataaattttatgtacaactttgcatgcaaaatataacataattagcaagagcctgagcacgggtgacctgaaacccaagcttgaatccaccaaacccctgcccactcatcataaattacccactaaaaactaaaatttagcaccccgccgagcaccagaggccaaaacactgtgagatcgagcagcactgagctcccaatttccctcctaaaaaatccctaaaccgaatcacgtcatatgttctccaaaagagtacccttctcctcttagtaatttcagcattccctgtcttatttgtacgtgattttgaaaaatctagtttcagatcttctctgaatttcagagcggaagcaccccacagatgatcgatttcagtaatggttcgacacttaggtgactctatcatattcataaggtgaattatctccaaatatgtttcactaagcgttgcaccataaatagacaaaagcaagaataggctatgcattcaactgtagcttcaagtaaacataagtaatgaaatcttactgtaggataggctgaatcttcatgatatcagctgggacaatcccatctatttcatcaccatattctgccaaacctgac

SEQ ID NO: 70148 - DNA, 2087 bp, Zea Mays
tccatgactgttctggaagctccaagcgttggcgaaaaaagtaagatatttctgcgaggcaaggaatccctcccccgcttctactctttcggttcgccggttcgccgtctcgcacacccacttcctacaccgccaccgagcactcgctcagtttcatacccatcctcgaagtcgcctctgtctagttcctgctcttccaccaccgcctgtgatgtatccccgaggcccggatgggggacgagatgcctcgtctcgccctatgcttgccactcccgccggcaacgacacgcgcgaggaggatgagatcaccaccgcggaggctcatgtggagaaagacgccgcgcggatggacgctgccctcctcatgcggactacgcccaagatggacgagtttcacaccgggggcgatctggactcaagtggaagtggaagcggcatctcggggccaagcgcctccaaaagacagctacaaagaaggggatcgtggcggcaacgagtcagcagagaagaatgtggtcgtggctgtaatgggtcagcaggtacaccatccacgctcatcatttcctttgtgtttctgtttgatctatttttttaaaatttctttatcagtttgattagcatccacttgcatccgctcatagtttgattcgtgttcgttggatgggcctcaaaattaccagttgcttcgactacactctctgaatttcgcagatcaagataaaacccgacacaaaggaatgaatagcacacaaaaaatcacagtattatttagtcatattggacacgaataagttaaatttcttaaattttagatccacatttttgtattttggtctagactatcaaaaaaatcctagaaatgtccctctgcctctcgcgcgtgaattctcctctgccgaagggaagacactcaaaggcgagctactgatcttcaactgcttttctggattctctttgcaatatgctttgttggggctagatctgaaatcaatgtttttaataatctagcacaaataggaaatgttgcatgtgttgccgacagaaccatctcactctctctttagtttctgcaattttttggacgaccgagaggtgctgccgtttatgagtaactttccagtgggaaaacagtatgccacaacatcatggtcagagtttggacattgcatgaagcacttgctggacaattgagaagaactcatgcctacttgcaggagggttgttgtacacgtgagtggaggtcgaacccttcttgtagggctcttaatgtatgaagtacgccatgctagctattgaatcaagttcaatgggattcgttaaaatataaggagggttgttgtacaagtgagacaaggtcagcccttcttgcagggctcttaatataagcctgtactacacgttcatccacgtcgagctcgtcggctcccaacgcaaccccttcttctctcacgagatcagtggtgaggacgacactggggatagagacctagggttctccaagtgggcctagaaactccatggcaacgtctcaggaaaaatgggcgcattgaagtcttgaaggactttcaggaatactaattttgagaattcgtggaaataaaaatagggttggctttatcaaactgcacaaaaaaatcagcagcacttctctttatcatgcaaggaaaatcaaacttaggagcatcttccaatttcgtcagcagctgagccgattgtgatctctgatcactatacaaccatggaaataaataatgcagctttgctctgcaaattttatacaatagttcttgaatcgatattgactactactatattcacaacgtcatccacaaacatcattctaagaaaactaacaacatatgatggtatgtaaagcatgtttagtgtcaaaaaatgatatgatatatgttaagtacattctataagtttttttttcttggaccatctcgcagtcacacgctaagatactacatatgactatctgcacaaatccttcaccacagttcaaactggccagatgtactccgcatggacatatgtttaggacaacgcattactgtttttctgtcattcaatgctattggccc

SEQ ID NO: 70149 - DNA, 2080 bp, Zea Mays
tccatgactgttctggaagctccaagcgttggcgaaaaaagtaagatatttctgcgaggcaaggaatccctcccccgcttctactctttcggttcgccggttcgccgtctcgcacacccacttcctacaccgccaccgagcactcgctcagtttcatacccatcctcgaagtcgcctctgtctagttcctgctcttccaccaccgcctgtgatgtatccccgaggcccggatgggggacgagatgcctcgtctcgccctatgcttgccactcccgccggcaacgacacgcgcgaggaggatgagatcaccaccgcggaggctcatgtggagaaagacgccgcgcggatggacgctgccctcctcatgcggactacgcccaagatggacgagtttcacaccgggggcgatctggactcaagtggaagtggaagcggcatctcggggccaagcgcctccaaaagacagctacaaagaaggggatcgtggcggcaacgagtcagcaggtccagcatccatgcttatccttttcctttgtgtttctatttgatctgtttttttgcccgcgccagcaacagagaagaatgtggtcgtggctgtaatgggtcagcaggtacaccatccacgctcatcatttcctttgtgtttctgtttgatctatttttttaaaatttctttatcagtttgattagcatccacttgcatccgctcatagtttgattcgtgttcgttggatgggcctcaaaattaccagttgcttcgactacactctctgaatttcgcagatcaagataaaacccgacacaaaggaatgaatagcacacaaaaaatcacagtattatttagtcatattggacacgaataagttaaatttcttaaattttagatccacatttttgtattttggtctagactatcaaaaaaatcctagaaatgtccctctgcctctcgcgcgtgaattctcctctgccgaagggaagacactcaaaggcgagctactgatcttcaactgcttttctggattctctttgcaatatgctttgttggggctagatctgaaatcaatgtttttaataatctagcacaaataggaaatgttgcatgtgttgccgacagaaccatctcactctctctttagtttctgcaattttttggacgaccgagaggtgctgccgtttatgagtaactttccagtgggaaaacagtatgccacaacatcatggtcagagtttggacattgcatgaagcacttgctggacaattgagaagaactcatgcctacttgcaggagggttgttgtacacgtgagtggaggtcgaacccttcttgtagggctcttaatgtatgaagtacgccatgctagctattgaatcaagctcagcctgtactacacgttcatccacgtcgagctcgtcggctcccaacgcaaccccttcttctctcacgagatcagtggtgaggacgacactggggatagagacctagggttctccaagtgggcctagaaactccatggcaacgtctcaggaaaaatgggcgcattgaagtcttgaaggactttcaggaatactaattttgagaattcgtggaaataaaaatagggttggctttatcaaactgcacaaaaaaatcagcagcacttctctttatcatgcaaggaaaatcaaacttaggagcatcttccaatttcgtcagcagctgagccgattgtgatctctgatcactatacaaccatggaaataaataatgcagctttgctctgcaaattttatacaatagttcttgaatcgatattgactactactatattcacaacgtcatccacaaacatcattctaagaaaactaacaacatatgatggtatgtaaagcatgtttagtgtcaaaaaatgatatgatatatgttaagtacattctataagtttttttttcttggaccatctcgcagtcacacgctaagatactacatatgactatctgcacaaatccttcaccacagttcaaactggccagatgtactccgcatggacatatgtttaggacaacgcattactgtttttctgtcattcaatgctattggccc

SEQ ID NO: 70150 - DNA, 1615 bp, Zea Mays
tccatgactgttctggaagctccaagcgttggcgaaaaaagtaagatatttctgcgaggcaaggaatccctcccccgcttctactctttcggttcgccggttcgccgtctcgcacacccacttcctacaccgccaccgagcactcgctcagtttcatacccatcctcgaagtcgcctctgtctagttcctgctcttccaccaccgcctgtgatgtatccccgaggcccggatgggggacgagatgcctcgtctcgccctatgcttgccactcccgccggcaacgacacgcgcgaggaggatgagatcaccaccgcggaggctcatgtggagaaagacgccgcgcggatggacgctgccctcctcatgcggactacgcccaagatggacgagtttcacaccgggggcgatctggactcaagtggaagtggaagcggcatctcggggccaagcgcctccaaaagacagctacaaagaaggggatcgtggcggcaacgagtcagcagcaacagagaagaatgtggtcgtggctgtaatgggtcagcaggaaatgttgcatgtgttgccgacagaaccatctcactctctctttagtttctgcaattttttggacgaccgagaggtgctgccgtttatgagtaactttccagtgggaaaacagtatgccacaacatcatggtcagagtttggacattgcatgaagcacttgctggacaattgagaagaactcatgcctacttgcaggagggttgttgtacacgtgagtggaggtcgaacccttcttgtagggctcttaatgtatgaagtacgccatgctagctattgaatcaagttcaatgggattcgttaaaatataaggagggttgttgtacaagtgagacaaggtcagcccttcttgcagggctcttaatataagcctgtactacacgttcatccacgtcgagctcgtcggctcccaacgcaaccccttcttctctcacgagatcagtggtgaggacgacactggggatagagacctagggttctccaagtgggcctagaaactccatggcaacgtctcaggaaaaatgggcgcattgaagtcttgaaggactttcaggaatactaattttgagaattcgtggaaataaaaatagggttggctttatcaaactgcacaaaaaaatcagcagcacttctctttatcatgcaaggaaaatcaaacttaggagcatcttccaatttcgtcagcagctgagccgattgtgatctctgatcactatacaaccatggaaataaataatgcagctttgctctgcaaattttatacaatagttcttgaatcgatattgactactactatattcacaacgtcatccacaaacatcattctaagaaaactaacaacatatgatggtatgtaaagcatgtttagtgtcaaaaaatgatatgatatatgttaagtacattctataagtttttttttcttggaccatctcgcagtcacacgctaagatactacatatgactatctgcacaaatccttcaccacagttcaaactggccagatgtactccgcatggacatatgtttaggacaacgcattactgtttttctgtcattcaatgctattggccc

SEQ ID NO: 70151 - DNA, 1722 bp, Zea Mays
tccatgactgttctggaagctccaagcgttggcgaaaaaagtaagatatttctgcgaggcaaggaatccctcccccgcttctactctttcggttcgccggttcgccgtctcgcacacccacttcctacaccgccaccgagcactcgctcagtttcatacccatcctcgaagtcgcctctgtctagttcctgctcttccaccaccgcctgtgatgtatccccgaggcccggatgggggacgagatgcctcgtctcgccctatgcttgccactcccgccggcaacgacacgcgcgaggaggatgagatcaccaccgcggaggctcatgtggagaaagacgccgcgcggatggacgctgccctcctcatgcggactacgcccaagatggacgagtttcacaccgggggcgatctggactcaagtggaagtggaagcggcatctcggggccaagcgcctccaaaagacagctacaaagaaggggatcgtggcggcaacgagtcagcaggtccagcatccatgcttatccttttcctttgtgtttctatttgatctgtttttttgcccgcgccagcaacagagaagaatgtggtcgtggctgtaatgggtcagcaggaaatgttgcatgtgttgccgacagaaccatctcactctctctttagtttctgcaattttttggacgaccgagaggtgctgccgtttatgagtaactttccagtgggaaaacagtatgccacaacatcatggtcagagtttggacattgcatgaagcacttgctggacaattgagaagaactcatgcctacttgcaggcatcatctcaaccatacaatgggattcattgaaatatcaggagggttgttgtacacgtgagtggaggtcgaacccttcttgtagggctcttaatgtatgaagtacgccatgctagctattgaatcaagttcaatgggattcgttaaaatataaggagggttgttgtacaagtgagacaaggtcagcccttcttgcagggctcttaatataagcctgtactacacgttcatccacgtcgagctcgtcggctcccaacgcaaccccttcttctctcacgagatcagtggtgaggacgacactggggatagagacctagggttctccaagtgggcctagaaactccatggcaacgtctcaggaaaaatgggcgcattgaagtcttgaaggactttcaggaatactaattttgagaattcgtggaaataaaaatagggttggctttatcaaactgcacaaaaaaatcagcagcacttctctttatcatgcaaggaaaatcaaacttaggagcatcttccaatttcgtcagcagctgagccgattgtgatctctgatcactatacaaccatggaaataaataatgcagctttgctctgcaaattttatacaatagttcttgaatcgatattgactactactatattcacaacgtcatccacaaacatcattctaagaaaactaacaacatatgatggtatgtaaagcatgtttagtgtcaaaaaatgatatgatatatgttaagtacattctataagtttttttttcttggaccatctcgcagtcacacgctaagatactacatatgactatctgcacaaatccttcaccacagttcaaactggccagatgtactccgcatggacatatgtttaggacaacgcattactgtttttctgtcattcaatgctattggccc

SEQ ID NO: 70152 - DNA, 1568 bp, Zea Mays
tccatgactgttctggaagctccaagcgttggcgaaaaaagtaagatatttctgcgaggcaaggaatccctcccccgcttctactctttcggttcgccggttcgccgtctcgcacacccacttcctacaccgccaccgagcactcgctcagtttcatacccatcctcgaagtcgcctctgtctagttcctgctcttccaccaccgcctgtgatgtatccccgaggcccggatgggggacgagatgcctcgtctcgccctatgcttgccactcccgccggcaacgacacgcgcgaggaggatgagatcaccaccgcggaggctcatgtggagaaagacgccgcgcggatggacgctgccctcctcatgcggactacgcccaagatggacgagtttcacaccgggggcgatctggactcaagtggaagtggaagcggcatctcggggccaagcgcctccaaaagacagctacaaagaaggggatcgtggcggcaacgagtcagcagcaacagagaagaatgtggtcgtggctgtaatgggtcagcagtttctgcaattttttggacgaccgagaggtgctgccgtttatgagtaactttccagtgggaaaacagtatgccacaacatcatggtcagagtttggacattgcatgaagcacttgctggacaattgagaagaactcatgcctacttgcaggagggttgttgtacacgtgagtggaggtcgaacccttcttgtagggctcttaatgtatgaagtacgccatgctagctattgaatcaagttcaatgggattcgttaaaatataaggagggttgttgtacaagtgagacaaggtcagcccttcttgcagggctcttaatataagcctgtactacacgttcatccacgtcgagctcgtcggctcccaacgcaaccccttcttctctcacgagatcagtggtgaggacgacactggggatagagacctagggttctccaagtgggcctagaaactccatggcaacgtctcaggaaaaatgggcgcattgaagtcttgaaggactttcaggaatactaattttgagaattcgtggaaataaaaatagggttggctttatcaaactgcacaaaaaaatcagcagcacttctctttatcatgcaaggaaaatcaaacttaggagcatcttccaatttcgtcagcagctgagccgattgtgatctctgatcactatacaaccatggaaataaataatgcagctttgctctgcaaattttatacaatagttcttgaatcgatattgactactactatattcacaacgtcatccacaaacatcattctaagaaaactaacaacatatgatggtatgtaaagcatgtttagtgtcaaaaaatgatatgatatatgttaagtacattctataagtttttttttcttggaccatctcgcagtcacacgctaagatactacatatgactatctgcacaaatccttcaccacagttcaaactggccagatgtactccgcatggacatatgtttaggacaacgcattactgtttttctgtcattcaatgctattggccc

SEQ ID NO: 70153 - DNA, 2165 bp, Zea Mays
cattctccatgactgttctggaagctccaagcgttggcgaaaaaagtaagatatttctgcgaggcaaggaatccctcccccgcttctactctttcggttcgccggttcgccgtctcgcacacccacttcctacaccgccaccgagcactcgctcagtttcatacccatcctcgaagtcgcctctgtctagttcctgctcttccaccaccgcctgtgatgtatccccgaggcccggatgggggacgagatgcctcgtctcgccctatgcttgccactcccgccggcaacgacacgcgcgaggaggatgagatcaccaccgcggaggctcatgtggagaaagacgccgcgcggatggacgctgccctcctcatgcggactacgcccaagatggacgagtttcacaccgggggcgatctggactcaagtggaagtggaagcggcatctcggggccaagcgcctccaaaagacagctacaaagaaggggatcgtggcggcaacgagtcagcaggtccagcatccatgcttatccttttcctttgtgtttctatttgatctgtttttttgcccgcgccagcaacagagaagaatgtggtcgtggctgtaatgggtcagcaggtacaccatccacgctcatcatttcctttgtgtttctgtttgatctatttttttaaaatttctttatcagtttgattagcatccacttgcatccgctcatagtttgattcgtgttcgttggatgggcctcaaaattaccagttgcttcgactacactctctgaatttcgcagatcaagataaaacccgacacaaaggaatgaatagcacacaaaaaatcacagtattatttagtcatattggacacgaataagttaaatttcttaaattttagatccacatttttgtattttggtctagactatcaaaaaaatcctagaaatgtccctctgcctctcgcgcgtgaattctcctctgccgaagggaagacactcaaaggcgagctactgatcttcaactgcttttctggattctctttgcaatatgctttgttggggctagatctgaaatcaatgtttttaataatctagcacaaataggaaatgttgcatgtgttgccgacagaaccatctcactctctctttagtttctgcaattttttggacgaccgagaggtgctgccgtttatgagtaactttccagtgggaaaacagtatgccacaacatcatggtcagagtttggacattgcatgaagcacttgctggacaattgagaagaactcatgcctacttgagggttgttgtacacgtgagtggaggtcgaacccttcttgtagggctcttaatgtatgaagtacgccatgctagctattgaatcaagttcaatgggattcgttaaaatataaggagggttgttgtacaagtgagacaaggtcagcccttcttgcagggctcttaatataagctcagcctgtactacacgttcatccacgtcgagctcgtcggctcccaacgcaaccccttcttctctcacgagatcagtggtgaggacgacactggggatagagacctagggttctccaagtgggcctagaaactccatggcaacgtctcaggaaaaatgggcgcattgaagtcttgaaggactttcaggaatactaattttgagaattcgtggaaataaaaatagggttggctttatcaaactgcacaaaaaaatcagcagcacttctctttatcatgcaaggaaaatcaaacttaggagcatcttccaatttcgtcagcagctgagccgattgtgatctctgatcactatacaaccatggaaataaataatgcagctttgctctgcaaattttatacaatagttcttgaatcgatattgactactactatattcacaacgtcatccacaaacatcattctaagaaaactaacaacatatgatggtatgtaaagcatgtttagtgtcaaaaaatgatatgatatatgttaagtacattctataagtttttttttcttggaccatctcgcagtcacacgctaagatactacatatgactatctgcacaaatccttcaccacagttcaaactggccagatgtactccgcatggacatatgtttaggacaacgcattactgtttttctgtcattcaatgctattggccc

SEQ ID NO: 70154 - DNA, 2121 bp, Zea Mays
cagtaacagacgcatcgctgctccattctccatgactgttctggaagctccaagcgttggcgaaaaaagtaagatatttctgcgaggcaaggaatccctcccccgcttctactctttcggttcgccggttcgccgtctcgcacacccacttcctacaccgccaccgagcactcgctcagtttcatacccatcctcgaagtcgcctctgtctagttcctgctcttccaccaccgcctgtgatgtatccccgaggcccggatgggggacgagatgcctcgtctcgccctatgcttgccactcccgccggcaacgacacgcgcgaggaggatgagatcaccaccgcggaggctcatgtggagaaagacgccgcgcggatggacgctgccctcctcatgcggactacgcccaagatggacgagtttcacaccgggggcgatctggactcaagtggaagtggaagcggcatctcggggccaagcgcctccaaaagacagctacaaagaaggggatcgtggcggcaacgagtcagcagcaacagagaagaatgtggtcgtggctgtaatgggtcagcaggtacaccatccacgctcatcatttcctttgtgtttctgtttgatctatttttttaaaatttctttatcagtttgattagcatccacttgcatccgctcatagtttgattcgtgttcgttggatgggcctcaaaattaccagttgcttcgactacactctctgaatttcgcagatcaagataaaacccgacacaaaggaatgaatagcacacaaaaaatcacagtattatttagtcatattggacacgaataagttaaatttcttaaattttagatccacatttttgtattttggtctagactatcaaaaaaatcctagaaatgtccctctgcctctcgcgcgtgaattctcctctgccgaagggaagacactcaaaggcgagctactgatcttcaactgcttttctggattctctttgcaatatgctttgttggggctagatctgaaatcaatgtttttaataatctagcacaaataggaaatgttgcatgtgttgccgacagaaccatctcactctctctttagtttctgcaattttttggacgaccgagaggtgctgccgtttatgagtaactttccagtgggaaaacagtatgccacaacatcatggtcagagtttggacattgcatgaagcacttgctggacaattgagaagaactcatgcctacttgcaggagggttgttgtacacgtgagtggaggtcgaacccttcttgtagggctcttaatgtatgaagtacgccatgctagctattgaatcaagttcaatgggattcgttaaaatataaggagggttgttgtacaagtgagacaaggtcagcccttcttgcagggctcttaatataagcctgtactacacgttcatccacgtcgagctcgtcggctcccaacgcaaccccttcttctctcacgagatcagtggtgaggacgacactggggatagagacctagggttctccaagtgggcctagaaactccatggcaacgtctcaggaaaaatgggcgcattgaagtcttgaaggactttcaggaatactaattttgagaattcgtggaaataaaaatagggttggctttatcaaactgcacaaaaaaatcagcagcacttctctttatcatgcaaggaaaatcaaacttaggagcatcttccaatttcgtcagcagctgagccgattgtgatctctgatcactatacaaccatggaaataaataatgcagctttgctctgcaaattttatacaatagttcttgaatcgatattgactactactatattcacaacgtcatccacaaacatcattctaagaaaactaacaacatatgatggtatgtaaagcatgtttagtgtcaaaaaatgatatgatatatgttaagtacattctataagtttttttttcttggaccatctcgcagtcacacgctaagatactacatatgactatctgcacaaatccttcaccacagttcaaactggccagatgtactccgcatggacatatgtttaggacaacgcattactgtttttctgtcattcaatgctattggccc

SEQ ID NO: 70155 - DNA, 5706 bp, Zea Mays
ttcctactgacgagtcttgaagccgtgtgccgtgaagcgaccggccagccgatctgatatctgactgacccgcgccgcctgtcgccgtctgcccccacccttcccctccaaatccaacagcgggagcaaagccaaaccaaaccagcttactgctccgctccgctttgttgccaatttccgctccaagcgtcgcggtcgtgaagtctcgttgcgatggattcgaggccccgcgagactgacgcccccggcgacccggccaacggcgccgcccctccgctggccgcggcggtgacggccgcgaccggggacgtcgagatcatcaggccccgcaacgacaagcgtgggtaccgccgcgtcgtgctccctaactcgctcgagtgcctgctcatcagcgaccccgacaccgataaggcggcggcgtcaatgaatgtttcggtggggtacttctgcgaccccgatgggctggaagggctcgcacacttcctcgagcatatgcttttctatgccagtgaaaaatatccagaagaagacagttactcaaagtacattgcagagcatggtggttcaacgaatgctttcacatcttctgaacacacaaacttctattttgatgtgaacagtgatagcctgcacgatgctttagataggtttgcccaattttttatcaagccattgatgtccccagatgctacacttagggaaataaaagctgttgactctgaaaatcagaaaaacctcttgtcagatccttggcgaatgagtcagcttcagaagcatctttgtgcagagaatcatccttatcataagtttagcactggaaattggaacacacttgaagttaaagcaaaggagaaaggattggacacaaggcttgagcttattaaattttatgattcacactactcagctaacttgatgcaactcgttgtgtatggaaaagatagccttgataacctgcagaaccttgttgaaaataagttttgcgatattagagatgttgggaggaagccattttcatttcctggtcatccatgtacacctgaacatctccaggtccttgtcaaagcagttcccattaaacaagggcacactttgagaatcttatttccaatcactcccaatatccgttgttacaaagaaggcccttgcaagtacattagccatctgattggtcatgaaggagaaggatctcttttttacgtacttaagaagttgggatgggctatgagtttggaagctggtgaaggggattggagtcatgatttttcattcttctgcgttgttattcagctcacagatgtaggccaggaacacatggaggatactctcggactattgttcagatatataaagttgctgcagaactctggaactcctaagtggatatttgatgagcttcaagctatctgtgagacaggattccactaccgagacaagagcccccctatcaattatgttgtaaatatttcttctaacatgcagatttttccaccaaaagattggttgattgcgtcatctgtgccatcaaagttttcaccagatgctattcagaatgttttaaatgaactgactcctgagactgtaagaatattctgggaatcgaaaaagtttgaagggaaaacaaaattagcagagccatggtatggtacatcatattctgtcgaagttgtccctccatcaatcatacagaaatgggtagggaaagcccctgaggaagatctacacctgccaaagcgtaacatcttcattccaagtgatctttcactgagaagtgtagaggaaaaggtaagttttcctgccatgctgaggaagacacaattttcgagactctggtacaagcccgatacaatgtttttcacacccaaggcttatatcaagatggattttcactgtccactatctcaaagctcacctgagtcggcagttcttactgatgtattcacaaggttgcttatggattatttgaatgattatgcttatgacgcccaagttgctggcctctattatgttgttaagccaaatgacactggttttcaggtaactatggttggcttcaatgacaaaatgagaacccttttggagactgttattggaaaaattgcagaatttgaagttaaggctgaccgtttttctgtgataaaggaagctatgacaaaggagtatgagaatttcaagtttcggcagccataccaacaagtcctatattattgttcgctaatactggaggaccaaacatggccatgggatgaggaattttctgcactttctcaccttgaagctagtgatctgggaatttttttgccccatttgctatcaaaaaccttcatcgagtgttattttgcaggtaatattgaacccaatgaagcaaacaatatcgttcaacatgttgaagatgtcttattcaatgcaccaattagtgcttgcaagccactatccccatcgcagcatcttgccaagaggattgtaaagcttgagaagggtttgagatactattatccagcaatgtgctcaaatcaccaagatgaaaattctgctcttctgcactatattcagactcatcaggataatgttaagcaaaatgttctacttcaactacttgctcttgttggcaagcagccagcttttcatcaattgcgatcagttgagcaacttggctacatagcgcttcttaggcaaagaaatgattcaggtgtccgtgggttgcaatttataatccagtcaacggtgaaggatcctgctaatctggatgccagagttgaaaattttctcaacatgtttgaaagcaatgtctacaatatgtctgatgcagagttcaagagtaatgtaagtgctcttattgatatgaaactggagaaatacaaaaacatacgcgaagaatcagctttcttctatggagagatttctgaaggaaccctcaaatttgatagaaaagaagcagaggttgctgcactgagggagctcaagaaggaagagttggtaggcttcttcaatgatcatgtcaaggtcaatgcaccacaaaagaagattcttagtatacaagtgaggtcgaggcctttatatggatcattcaggggaggcgttggtcagatgaagctatagttcaacattttctcatcattctgtaaaattctgaaaaagagtcatctttctgttcaactgcatctacactaaaaaggaaaaaaaaagaaatattcggttaatcaacctagcttggattaatatagacgacatgtgggtatataataagttttgactttttcctcgatgaagacctgaatttctaaagaaataacaaaacactagctatgccagtgccattgagctaaaaggaacgaaattagctatgccagtgccactgggtatttcctatatattaaagcggagtcgaaaactgtcacctggtgcgtccacgtcattctcttttatgccgtccatccgattgagtaacaacggctaaaaacacctgcagctgacagtaacagacgcatcgctgctccattctccatgactgttctggaagctccaagcgttggcgaaaaaagtaagatatttctgcgaggcaaggaatccctcccccgcttctactctttcggttcgccggttcgccgtctcgcacacccacttcctacaccgccaccgagcactcgctcagtttcatacccatcctcgaagtcgcctctgtctagttcctgctcttccaccaccgcctgtgatgtatccccgaggcccggatgggggacgagatgcctcgtctcgccctatgcttgccactcccgccggcaacgacacgcgcgaggaggatgagatcaccaccgcggaggctcatgtggagaaagacgccgcgcggatggacgctgccctcctcatgcggactacgcccaagatggacgagtttcacaccgggggcgatctggactcaagtggaagtggaagcggcatctcggggccaagcgcctccaaaagacagctacaaagaaggggatcgtggcggcaacgagtcagcaggtccagcatccatgcttatccttttcctttgtgtttctatttgatctgtttttttgcccgcgccagcaacagagaagaatgtggtcgtggctgtaatgggtcagcaggtacaccatccacgctcatcatttcctttgtgtttctgtttgatctatttttttaaaatttctttatcagtttgattagcatccacttgcatccgctcatagtttgattcgtgttcgttggatgggcctcaaaattaccagttgcttcgactacactctctgaatttcgcagatcaagataaaacccgacacaaaggaatgaatagcacacaaaaaatcacagtattatttagtcatattggacacgaataagttaaatttcttaaattttagatccacatttttgtattttggtctagactatcaaaaaaatcctagaaatgtccctctgcctctcgcgcgtgaattctcctctgccgaagggaagacactcaaaggcgagctactgatcttcaactgcttttctggattctctttgcaatatgctttgttggggctagatctgaaatcaatgtttttaataatctagcacaaataggaaatgttgcatgtgttgccgacagaaccatctcactctctctttagtttctgcaattttttggacgaccgagaggtgctgccgtttatgagtaactttccagtgggaaaacagtatgccacaacatcatggtcagagtttggacattgcatgaagcacttgctggacaattgagaagaactcatgcctacttgcaggcatcatctcaaccatacaatgggattcattgaaatatcaggagggttgttgtacacgtgagtggaggtcgaacccttcttgtagggctcttaatgtatgaagtacgccatgctagctattgaatcaagttcaatgggattcgttaaaatataaggagggttgttgtacaagtgagacaaggtcagcccttcttgcagggctcttaatataagctcagcctgtactacacgttcatccacgtcgagctcgtcggctcccaacgcaaccccttcttctctcacgagatcagtggtgaggacgacactggggatagagacctagggttctccaagtgggcctagaaactccatggcaacgtctcaggaaaaatgggcgcattgaagtcttgaaggactttcaggaatactaattttgagaattcgtggaaataaaaatagggttggctttatcaaactgcacaaaaaaatcagcagcacttctctttatcatgcaaggaaaatcaaacttaggagcatcttccaatttcgtcagcagctgagccgattgtgatctctgatcactatacaaccatggaaataaataatgcagctttgctctgcaaattttatacaatagttcttgaatcgatattgactactactatattcacaacgtcatccacaaacatcattctaagaaaactaacaacatatgatggtatgtaaagcatgtttagtgtcaaaaaatgatatgatatatgttaagtacattctataagtttttttttcttggaccatctcgcagtcacacgctaagatactacatatgactatctgcacaaatccttcaccacagttcaaactggccagatgtactccgcatggacatatgtttaggacaacgcattactgtttttctgtcattcaatgctattggccc

SEQ ID NO: 70156 - DNA, 1387 bp, Zea Mays
tccatgactgttctggaagctccaagcgttggcgaaaaaagtaagatatttctgcgaggcaaggaatccctcccccgcttctactctttcggttcgccggttcgccgtctcgcacacccacttcctacaccgccaccgagcactcgctcagtttcatacccatcctcgaagtcgcctctgtctagttcctgctcttccaccaccgcctgtgatgtatccccgaggcccggatgggggacgagatgcctcgtctcgccctatgcttgccactcccgccggcaacgacacgcgcgaggaggatgagatcaccaccgcggaggctcatgtggagaaagacgccgcgcggatggacgctgccctcctcatgcggactacgcccaagatggacgagtttcacaccgggggcgatctggactcaagtggaagtggaagcggcatctcggggccaagcgcctccaaaagacagctacaaagaaggggatcgtggcggcaacgagtcagcagcaacagagaagaatgtggtcgtggctgtaatgggtcagcaggaaatgttgcatgtgttgccgacagaaccatctcactctctctttagtttctgcaattttttggacgaccgagaggtgctgccgtttatgagtaactttccagtgggaaaacagtatgccacaacatcatggtcagagtttggacattgcatgaagcacttgctggacaattgagaagaactcatgcctacttgcaggcatcatctcaaccatacaatgggattcattgaaatatcaggagggttgttgtacacgtgagtggaggtcgaacccttcttgtagggctcttaatgtatgaagtacgccatgctagctattgaatcaagttcaatgggattcgttaaaatataaggagggttgttgtacaagtgagacaaggtcagcccttcttgcagggctcttaatataagctcagcctgtactacacgttcatccacgtcgagctcgtcggctcccaacgcaaccccttcttctctcacgagatcagtggtgaggacgacactggggatagagacctagggttctccaagtgggcctagaaactccatggcaacgtctcaggtttcatgcagttctctaaatttattttgctcgattgtaagggaactgtgtcctctataagctcgcgctcgtgctgtaccgggagtaccccttcttcctgcaagtctggttcaattaaaaaattttgttctgtcgtgttgtaaagtacttggcgagctatgatatgtcattaccttagtgagaagactgcttctaatatattagtaatttttagctgtgcagatcatgtcatcatataaatgttgcaaacattataaaatagaggatccatttgaactctt

SEQ ID NO: 70157 - DNA, 1365 bp, Zea Mays
tccatgactgttctggaagctccaagcgttggcgaaaaaagtaagatatttctgcgaggcaaggaatccctcccccgcttctactctttcggttcgccggttcgccgtctcgcacacccacttcctacaccgccaccgagcactcgctcagtttcatacccatcctcgaagtcgcctctgtctagttcctgctcttccaccaccgcctgtgatgtatccccgaggcccggatgggggacgagatgcctcgtctcgccctatgcttgccactcccgccggcaacgacacgcgcgaggaggatgagatcaccaccgcggaggctcatgtggagaaagacgccgcgcggatggacgctgccctcctcatgcggactacgcccaagatggacgagtttcacaccgggggcgatctggactcaagtggaagtggaagcggcatctcggggccaagcgcctccaaaagacagctacaaagaaggggatcgtggcggcaacgagtcagcaggtccagcatccatgcttatccttttcctttgtgtttctatttgatctgtttttttgcccgcgccagcaacagagaagaatgtggtcgtggctgtaatgggtcagcagtttctgcaattttttggacgaccgagaggtgctgccgtttatgagtaactttccagtgggaaaacagtatgccacaacatcatggtcagagtttggacattgcatgaagcacttgctggacaattgagaagaactcatgcctacttgcaggagggttgttgtacacgtgagtggaggtcgaacccttcttgtagggctcttaatgtatgaagtacgccatgctagctattgaatcaagttcaatgggattcgttaaaatataaggagggttgttgtacaagtgagacaaggtcagcccttcttgcagggctcttaatataagctcagcctgtactacacgttcatccacgtcgagctcgtcggctcccaacgcaaccccttcttctctcacgagatcagtggtgaggacgacactggggatagagacctagggttctccaagtgggcctagaaactccatggcaacgtctcaggtttcatgcagttctctaaatttattttgctcgattgtaagggaactgtgtcctctataagctcgcgctcgtgctgtaccgggagtaccccttcttcctgcaagtctggttcaattaaaaaattttgttctgtcgtgttgtaaagtacttggcgagctatgatatgtcattaccttagtgagaagactgcttctaatatattagtaatttttagctgtgcagatcatgtcatcatataaatgttgcaaacattataaaatagaggatccatttgaactctt

SEQ ID NO: 70158 - DNA, 1457 bp, Zea Mays
tccatgactgttctggaagctccaagcgttggcgaaaaaagtaagatatttctgcgaggcaaggaatccctcccccgcttctactctttcggttcgccggttcgccgtctcgcacacccacttcctacaccgccaccgagcactcgctcagtttcatacccatcctcgaagtcgcctctgtctagttcctgctcttccaccaccgcctgtgatgtatccccgaggcccggatgggggacgagatgcctcgtctcgccctatgcttgccactcccgccggcaacgacacgcgcgaggaggatgagatcaccaccgcggaggctcatgtggagaaagacgccgcgcggatggacgctgccctcctcatgcggactacgcccaagatggacgagtttcacaccgggggcgatctggactcaagtggaagtggaagcggcatctcggggccaagcgcctccaaaagacagctacaaagaaggggatcgtggcggcaacgagtcagcaggtccagcatccatgcttatccttttcctttgtgtttctatttgatctgtttttttgcccgcgccagcaacagagaagaatgtggtcgtggctgtaatgggtcagcagcacaaataggaaatgttgcatgtgttgccgacagaaccatctcactctctctttagtttctgcaattttttggacgaccgagaggtgctgccgtttatgagtaactttccagtgggaaaacagtatgccacaacatcatggtcagagtttggacattgcatgaagcacttgctggacaattgagaagaactcatgcctacttgcaggcatcatctcaaccatacaatgggattcattgaaatatcaggagggttgttgtacacgtgagtggaggtcgaacccttcttgtagggctcttaatgtatgaagtacgccatgctagctattgaatcaagttcaatgggattcgttaaaatataaggagggttgttgtacaagtgagacaaggtcagcccttcttgcagggctcttaatataagcctgtactacacgttcatccacgtcgagctcgtcggctcccaacgcaaccccttcttctctcacgagatcagtggtgaggacgacactggggatagagacctagggttctccaagtgggcctagaaactccatggcaacgtctcaggtttcatgcagttctctaaatttattttgctcgattgtaagggaactgtgtcctctataagctcgcgctcgtgctgtaccgggagtaccccttcttcctgcaagtctggttcaattaaaaaattttgttctgtcgtgttgtaaagtacttggcgagctatgatatgtcattaccttagtgagaagactgcttctaatatattagtaatttttagctgtgcagatcatgtcatcatataaatgttgcaaacattataaaatagaggatccatttgaactctt

SEQ ID NO: 70159 - DNA, 1395 bp, Zea Mays
tccatgactgttctggaagctccaagcgttggcgaaaaaagtaagatatttctgcgaggcaaggaatccctcccccgcttctactctttcggttcgccggttcgccgtctcgcacacccacttcctacaccgccaccgagcactcgctcagtttcatacccatcctcgaagtcgcctctgtctagttcctgctcttccaccaccgcctgtgatgtatccccgaggcccggatgggggacgagatgcctcgtctcgccctatgcttgccactcccgccggcaacgacacgcgcgaggaggatgagatcaccaccgcggaggctcatgtggagaaagacgccgcgcggatggacgctgccctcctcatgcggactacgcccaagatggacgagtttcacaccgggggcgatctggactcaagtggaagtggaagcggcatctcggggccaagcgcctccaaaagacagctacaaagaaggggatcgtggcggcaacgagtcagcaggtccagcatccatgcttatccttttcctttgtgtttctatttgatctgtttttttgcccgcgccagcaacagagaagaatgtggtcgtggctgtaatgggtcagcagtttctgcaattttttggacgaccgagaggtgctgccgtttatgagtaactttccagtatgccacaacatcatggtcagagtttggacattgcatgaagcacttgctggacaattgagaagaactcatgcctacttgcaggcatcatctcaaccatacaatgggattcattgaaatatcaggagggttgttgtacacgtgagtggaggtcgaacccttcttgtagggctcttaatgtatgaagtacgccatgctagctattgaatcaagttcaatgggattcgttaaaatataaggagggttgttgtacaagtgagacaaggtcagcccttcttgcagggctcttaatataagctcagcctgtactacacgttcatccacgtcgagctcgtcggctcccaacgcaaccccttcttctctcacgagatcagtggtgaggacgacactggggatagagacctagggttctccaagtgggcctagaaactccatggcaacgtctcaggtttcatgcagttctctaaatttattttgctcgattgtaagggaactgtgtcctctataagctcgcgctcgtgctgtaccgggagtaccccttcttcctgcaagtctggttcaattaaaaaattttgttctgtcgtgttgtaaagtacttggcgagctatgatatgtcattaccttagtgagaagactgcttctaatatattagtaatttttagctgtgcagatcatgtcatcatataaatgttgcaaacattataaaatagaggatccatttgaactctt

SEQ ID NO: 70160 - DNA, 1350 bp, Zea Mays
tccatgactgttctggaagctccaagcgttggcgaaaaaagtaagatatttctgcgaggcaaggaatccctcccccgcttctactctttcggttcgccggttcgccgtctcgcacacccacttcctacaccgccaccgagcactcgctcagtttcatacccatcctcgaagtcgcctctgtctagttcctgctcttccaccaccgcctgtgatgtatccccgaggcccggatgggggacgagatgcctcgtctcgccctatgcttgccactcccgccggcaacgacacgcgcgaggaggatgagatcaccaccgcggaggctcatgtggagaaagacgccgcgcggatggacgctgccctcctcatgcggactacgcccaagatggacgagtttcacaccgggggcgatctggactcaagtggaagtggaagcggcatctcggggccaagcgcctccaaaagacagctacaaagaaggggatcgtggcggcaacgagtcagcagcaacagagaagaatgtggtcgtggctgtaatgggtcagcagcacaaataggaaatgttgcatgtgttgccgacagaaccatctcactctctctttagtttctgcaattttttggacgaccgagaggtgctgccgtttatgagtaactttccagtgggaaaacagtatgccacaacatcatggtcagagtttggacattgcatgaagcacttgctggacaattgagaagaactcatgcctacttgcaggagggttgttgtacacgtgagtggaggtcgaacccttcttgtagggctcttaatgtatgaagtacgccatgctagctattgaatcaagttcaatgggattcgttaaaatataaggagggttgttgtacaagtgagacaaggtcagcccttcttgcagggctcttaatataagcctgtactacacgttcatccacgtcgagctcgtcggctcccaacgcaaccccttcttctctcacgagatcagtggtgaggacgacactggggatagagacctagggttctccaagtgggcctagaaactccatggcaacgtctcaggtttcatgcagttctctaaatttattttgctcgattgtaagggaactgtgtcctctataagctcgcgctcgtgctgtaccgggagtaccccttcttcctgcaagtctggttcaattaaaaaattttgttctgtcgtgttgtaaagtacttggcgagctatgatatgtcattaccttagtgagaagactgcttctaatatattagtaatttttagctgtgcagatcatgtcatcatataaatgttgcaaacattataaaatagaggatccatttgaactctt

SEQ ID NO: 70161 - DNA, 1448 bp, Zea Mays
tccatgactgttctggaagctccaagcgttggcgaaaaaagtaagatatttctgcgaggcaaggaatccctcccccgcttctactctttcggttcgccggttcgccgtctcgcacacccacttcctacaccgccaccgagcactcgctcagtttcatacccatcctcgaagtcgcctctgtctagttcctgctcttccaccaccgcctgtgatgtatccccgaggcccggatgggggacgagatgcctcgtctcgccctatgcttgccactcccgccggcaacgacacgcgcgaggaggatgagatcaccaccgcggaggctcatgtggagaaagacgccgcgcggatggacgctgccctcctcatgcggactacgcccaagatggacgagtttcacaccgggggcgatctggactcaagtggaagtggaagcggcatctcggggccaagcgcctccaaaagacagctacaaagaaggggatcgtggcggcaacgagtcagcaggtccagcatccatgcttatccttttcctttgtgtttctatttgatctgtttttttgcccgcgccagcaacagagaagaatgtggtcgtggctgtaatgggtcagcaggaaatgttgcatgtgttgccgacagaaccatctcactctctctttagtttctgcaattttttggacgaccgagaggtgctgccgtttatgagtaactttccagtgggaaaacagtatgccacaacatcatggtcagagtttggacattgcatgaagcacttgctggacaattgagaagaactcatgcctacttgcaggcatcatctcaaccatacaatgggattcattgaaatatcaggagggttgttgtacacgtgagtggaggtcgaacccttcttgtagggctcttaatgtatgaagtacgccatgctagctattgaatcaagttcaatgggattcgttaaaatataaggagggttgttgtacaagtgagacaaggtcagcccttcttgcagggctcttaatataagcctgtactacacgttcatccacgtcgagctcgtcggctcccaacgcaaccccttcttctctcacgagatcagtggtgaggacgacactggggatagagacctagggttctccaagtgggcctagaaactccatggcaacgtctcaggtttcatgcagttctctaaatttattttgctcgattgtaagggaactgtgtcctctataagctcgcgctcgtgctgtaccgggagtaccccttcttcctgcaagtctggttcaattaaaaaattttgttctgtcgtgttgtaaagtacttggcgagctatgatatgtcattaccttagtgagaagactgcttctaatatattagtaatttttagctgtgcagatcatgtcatcatataaatgttgcaaacattataaaatagaggatccatttgaactctt

SEQ ID NO: 70162 - DNA, 1871 bp, Zea Mays
ccattctccatgactgttctggaagctccaagcgttggcgaaaaaagtaagatatttctgcgaggcaaggaatccctcccccgcttctactctttcggttcgccggttcgccgtctcgcacacccacttcctacaccgccaccgagcactcgctcagtttcatacccatcctcgaagtcgcctctgtctagttcctgctcttccaccaccgcctgtgatgtatccccgaggcccggatgggggacgagatgcctcgtctcgccctatgcttgccactcccgccggcaacgacacgcgcgaggaggatgagatcaccaccgcggaggctcatgtggagaaagacgccgcgcggatggacgctgccctcctcatgcggactacgcccaagatggacgagtttcacaccgggggcgatctggactcaagtggaagtggaagcggcatctcggggccaagcgcctccaaaagacagctacaaagaaggggatcgtggcggcaacgagtcagcagcaacagagaagaatgtggtcgtggctgtaatgggtcagcaggtacaccatccacgctcatcatttcctttgtgtttctgtttgatctatttttttaaaatttctttatcagtttgattagcatccacttgcatccgctcatagtttgattcgtgttcgttggatgggcctcaaaattaccagttgcttcgactacactctctgaatttcgcagatcaagataaaacccgacacaaaggaatgaatagcacacaaaaaatcacagtattatttagtcatattggacacgaataagttaaatttcttaaattttagatccacatttttgtattttggtctagactatcaaaaaaatcctagaaatgtccctctgcctctcgcgcgtgaattctcctctgccgaagggaagacactcaaaggcgagctactgatcttcaactgcttttctggattctctttgcaatatgctttgttggggctagatctgaaatcaatgtttttaataatctagcacaaataggaaatgttgcatgtgttgccgacagaaccatctcactctctctttagtttctgcaattttttggacgaccgagaggtgctgccgtttatgagtaactttccagtgggaaaacagtatgccacaacatcatggtcagagtttggacattgcatgaagcacttgctggacaattgagaagaactcatgcctacttgcaggcatcatctcaaccatacaatgggattcattgaaatatcaggagggttgttgtacacgtgagtggaggtcgaacccttcttgtagggctcttaatgtatgaagtacgccatgctagctattgaatcaagttcaatgggattcgttaaaatataaggagggttgttgtacaagtgagacaaggtcagcccttcttgcagggctcttaatataagctcagcctgtactacacgttcatccacgtcgagctcgtcggctcccaacgcaaccccttcttctctcacgagatcagtggtgaggacgacactggggatagagacctagggttctccaagtgggcctagaaactccatggcaacgtctcaggtttcatgcagttctctaaatttattttgctcgattgtaagggaactgtgtcctctataagctcgcgctcgtgctgtaccgggagtaccccttcttcctgcaagtctggttcaattaaaaaattttgttctgtcgtgttgtaaagtacttggcgagctatgatatgtcattaccttagtgagaagactgcttctaatatattagtaatttttagctgtgcagatcatgtcatcatataaatgttgcaaacattataaaatagaggatccatttgaactctt

SEQ ID NO: 70163 - DNA, 1830 bp, Zea Mays
ccattctccatgactgttctggaagctccaagcgttggcgaaaaaagtaagatatttctgcgaggcaaggaatccctcccccgcttctactctttcggttcgccggttcgccgtctcgcacacccacttcctacaccgccaccgagcactcgctcagtttcatacccatcctcgaagtcgcctctgtctagttcctgctcttccaccaccgcctgtgatgtatccccgaggcccggatgggggacgagatgcctcgtctcgccctatgcttgccactcccgccggcaacgacacgcgcgaggaggatgagatcaccaccgcggaggctcatgtggagaaagacgccgcgcggatggacgctgccctcctcatgcggactacgcccaagatggacgagtttcacaccgggggcgatctggactcaagtggaagtggaagcggcatctcggggccaagcgcctccaaaagacagctacaaagaaggggatcgtggcggcaacgagtcagcagcaacagagaagaatgtggtcgtggctgtaatgggtcagcaggtacaccatccacgctcatcatttcctttgtgtttctgtttgatctatttttttaaaatttctttatcagtttgattagcatccacttgcatccgctcatagtttgattcgtgttcgttggatgggcctcaaaattaccagttgcttcgactacactctctgaatttcgcagatcaagataaaacccgacacaaaggaatgaatagcacacaaaaaatcacagtattatttagtcatattggacacgaataagttaaatttcttaaattttagatccacatttttgtattttggtctagactatcaaaaaaatcctagaaatgtccctctgcctctcgcgcgtgaattctcctctgccgaagggaagacactcaaaggcgagctactgatcttcaactgcttttctggattctctttgcaatatgctttgttggggctagatctgaaatcaatgtttttaataatctagcacaaataggaaatgttgcatgtgttgccgacagaaccatctcactctctctttagtttctgcaattttttggacgaccgagaggtgctgccgtttatgagtaactttccagtgggaaaacagtatgccacaacatcatggtcagagtttggacattgcatgaagcacttgctggacaattgagaagaactcatgcctacttgcaggagggttgttgtacacgtgagtggaggtcgaacccttcttgtagggctcttaatgtatgaagtacgccatgctagctattgaatcaagttcaatgggattcgttaaaatataaggagggttgttgtacaagtgagacaaggtcagcccttcttgcagggctcttaatataagctcagcctgtactacacgttcatccacgtcgagctcgtcggctcccaacgcaaccccttcttctctcacgagatcagtggtgaggacgacactggggatagagacctagggttctccaagtgggcctagaaactccatggcaacgtctcaggtttcatgcagttctctaaatttattttgctcgattgtaagggaactgtgtcctctataagctcgcgctcgtgctgtaccgggagtaccccttcttcctgcaagtctggttcaattaaaaaattttgttctgtcgtgttgtaaagtacttggcgagctatgatatgtcattaccttagtgagaagactgcttctaatatattagtaatttttagctgtgcagatcatgtcatcatataaatgttgcaaacattataaaatagaggatccatttgaactctt

SEQ ID NO: 70164 - DNA, 2214 bp, Zea Mays
ttcctactgacgagtcttgaagccgtgtgccgtgaagcgaccggccagccgatctgatatctgactgacccgcgccgcctgtcgccgtctgcccccacccttcccctccaaatccaacagcgggagcaaagccaaaccaaaccagcttactgctccgctccgctttgttgccaatttccgctccaagcgtcgcggtcgtgaagtctcgttgcgatggattcgaggccccgcgagactgacgcccccggcgacccggccaacggcgccgcccctccgctggccgcggcggtgacggccgcgaccggggacgtcgagatcatcaggccccgcaacgacaagcgtgggtaccgccgcgtcgtgctccctaactcgctcgagtgcctgctcatcagcgaccccgacaccgataaggcggcggcgtcaatgaatgtttcggtggggtacttctgcgaccccgatgggctggaagggctcgcacacttcctcgagcatatgcttttctatgccagtgaaaaatatccagaagaagacagttactcaaagtacattgcagagcatggtggttcaacgaatgctttcacatcttctgaacacacaaacttctattttgatgtgaacagtgatagcctgcacgatgctttagataggtttgcccaattttttatcaagccattgatgtccccagatgctacacttagggaaataaaagctgttgactctgaaaatcagaaaaacctcttgtcagatccttggcgaatgagtcagcttcagaagcatctttgtgcagagaatcatccttatcataagtttagcactggaaattggaacacacttgaagttaaagcaaaggagaaaggattggacacaaggcttgagcttattaaattttatgattcacactactcagctaacttgatgcaactcgttgtgtatggaaaagatagccttgataacctgcagaaccttgttgaaaataagttttgcgatattagagatgttgggaggaagccattttcatttcctggtcatccatgtacacctgaacatctccaggtccttgtcaaagcagttcccattaaacaagggcacactttgagaatcttatttccaatcactcccaatatccgttgttacaaagaaggcccttgcaagtacattagccatctgattggtcatgaaggagaaggatctcttttttacgtacttaagaagttgggatgggctatgagtttggaagctggtgaaggggattggagtcatgatttttcattcttctgcgttgttattcagctcacagatgtaggccaggaacacatggaggatactctcggactattgttcagatatataaagttgctgcagaactctggaactcctaagtggatatttgatgagcttcaagctatctgtgagacaggattccactaccgagacaagagcccccctatcaattatgttgtaaatatttcttctaacatgcagatttttccaccaaaagattggttgattgcgtcatctgtgccatcaaagttttcaccagatgctattcagaatgttttaaatgaactgactcctgagactgtaagaatattctgggaatcgaaaaagtttgaagggaaaacaaaattagcagagccatggtatggtacatcatattctgtcgaagttgtccctccatcaatcatacagaaatgggtagggaaagcccctgaggaagatctacacctgccaaagcgtaacatcttcattccaagtgatctttcactgagaagtgtagaggaaaaggtaagttttcctgccatgctgaggaagacacaattttcgagactctggtacaagcccgatacaatgtttttcacacccaaggcttatatcaagatggattttcactgtccactatctcaaagctcacctgagtcggcagttcttactgatgtattcacaaggttgcttatggattatttgaatgattatgcttatgacgcccaagttgctggcctctattatgttgttaagccaaatgacactggttttcaggtaactatggttggcttcaatgacaaaatgagaacccttttggagactgttattggaaaaattgcagaatttgaagttaaggctgaccgtttttctgtgataaagggttagggtttctgcttctatcagagaggcccatggcggtatcatactgtgctctcactatccatgacgcct

SEQ ID NO: 70165 - DNA, 1351 bp, Zea Mays
cgccgcctgtcgccgtctgcccccacccttcccctccaaatccaacagcgggagcaaagccaaaccaaaccagcttactgctccgctccgctttgttgccaatttccgctccaagcgtcgcggtcgtgaagtctcgttgcgatggattcgaggccccgcgagactgacgcccccggcgacccggccaacggcgccgcccctccgctggccgcggcggtgacggccgcgaccggggacgtcgagatcatcaggccccgcaacgacaagcgtgggtaccgccgcgtcgtgctccctaactcgctcgagtgcctgctcatcagcgaccccgacaccgataaggcggcggcgtcaatgaatgtttcggtggggtacttctgcgaccccgatgggctggaagggctcgcacacttcctcgagcatatgcttttctatgccagtgaaaaatatccagaagaagacagttactcaaagtacattgcagagcatggtggttcaacgaatgctttcacatcttctgaacacacaaacttctattttgatgtgaacagtgatagcctgcacgatgctttagataggtttgcccaattttttatcaagccattgatgtccccagatgctacacttagggaaataaaagctgttgactctgaaaatcagaaaaacctcttgtcagatccttggcgaatgagtcagcttcagaagcatctttgtgcagagaatcatccttatcataagtttagcactggaaattggaacacacttgaagttaaagcaaaggagaaaggattggacacaaggcttgagcttattaaattttatgattcacactactcagctaacttgatgcaactcgttgtgtatggaaaagatagccttgataacctgcagaaccttgttgaaaataagttttgcgatattagagatgttgggaggaagccattttcatttcctggtcatccatgtacacctgaacatctccaggtccttgtcaaagcagttcccattaaacaagggcacactttgagaatcttatttccaatcactcccaatatccgttgttacaaagaaggcccttgcaagtacattagccatctgattggtcatgaaggagaaggatctcttttttacgtacttaagaagttgggatgggctatgagtttggaagctggtgaaggggattggagtcatgatttttcattcttctgcgttgttattcagctcacagatgtaggccaggaacacatggaggatactctcggactattgttcagatatataaagttgctgcagaactctggaactcctaagtggatatttgatgagttagctgaacctacaagacagatctgat

SEQ ID NO: 70166 - DNA, 741 bp, Zea Mays
atcagatccaatctgattgcgattgactggtgttcacgtataacaagcagttccacaacgtgctggcggtgagcaaggcggactacaagaactgcatcgccaccaagccgacggccacctggtccacggggaacgattccgtcgtcctcaacaccacgggccaccactacttcctctgcggctacccgggccactgcgctgccggccagaaggtggacatccgcgtcgcctcctctgctgccccttccgccgcaccgtcgccgaccccctccggctccaagccctccggcggcgccacggccgcgccgtcgccgcaccctaacgccgcgccgaaggccctctccgccagctccgtagccgcggctgtcgccacgtccctgctctccctggccgcggccgtgctggcatgatcacttgatcaggatcgtgtagtgctggccaggggacggcgcctttgtgaattgtgagagctcgtactgtgtctgtgtgactgtctctgtggccgtatgagcatttagccctggatctgtgtttgttactctgtcttgctgactttgcttcgggaacatcgattatctcatctgccttctccatgcggtggtgactggcgactgcaagcagcgccatcggtaaagccttgcaggcgcactacgtgaagcctcgctgctgcatagtgatgaaaacagaaacggtaattttcggatgccggaaattgattttcgaagttttactgaaatttag

SEQ ID NO: 70167 - DNA, 737 bp, Zea Mays
ctttcgtgagaagatggcttcggcagtgttcacgtataacaagcagttccacaacgtgctggcggtgagcaaggcggactacaagaactgcatcgccaccaagccgacggccacctggtccacggggaacgattccgtcgtcctcaacaccacgggccaccactacttcctctgcggctacccgggccactgcgctgccggccagaaggtggacatccgcgtcgcctcctctgctgccccttccgccgcaccgtcgccgaccccctccggctccaagccctccggcggcgccacggccgcgccgtcgccgcaccctaacgccgcgccgaaggccctctccgccagctccgtagccgcggctgtcgccacgtccctgctctccctggccgcggccgtgctggcatgatcacttgatcaggatcgtgtagtgctggccaggggacggcgcctttgtgaattgtgagagctcgtactgtgtctgtgtgactgtctctgtggccgtatgagcatttagccctggatctgtgtttgttactctgtcttgctgactttgcttcgggaacatcgattatctcatctgccttctccatgcggtggtgactggcgactgcaagcagcgccatcggtaaagccttgcaggcgcactacgtgaagcctcgctgctgcatagtgatgaaaacagaaacggtaattttcggatgccggaaattgattttcgaagttttactgaaatttag

SEQ ID NO: 70168 - DNA, 738 bp, Zea Mays
taccgccaatgaaattaatgatctaagtgttcacgtataacaagcagttccacaacgtgctggcggtgagcaaggcggactacaagaactgcatcgccaccaagccgacggccacctggtccacggggaacgattccgtcgtcctcaacaccacgggccaccactacttcctctgcggctacccgggccactgcgctgccggccagaaggtggacatccgcgtcgcctcctctgctgccccttccgccgcaccgtcgccgaccccctccggctccaagccctccggcggcgccacggccgcgccgtcgccgcaccctaacgccgcgccgaaggccctctccgccagctccgtagccgcggctgtcgccacgtccctgctctccctggccgcggccgtgctggcatgatcacttgatcaggatcgtgtagtgctggccaggggacggcgcctttgtgaattgtgagagctcgtactgtgtctgtgtgactgtctctgtggccgtatgagcatttagccctggatctgtgtttgttactctgtcttgctgactttgcttcgggaacatcgattatctcatctgccttctccatgcggtggtgactggcgactgcaagcagcgccatcggtaaagccttgcaggcgcactacgtgaagcctcgctgctgcatagtgatgaaaacagaaacggtaattttcggatgccggaaattgattttcgaagttttactgaaatttag

SEQ ID NO: 70169 - DNA, 414 bp, Zea Mays
gaaggctggacgcaggggggcatttccgggaacctcgccgcgggcggggctggaaagccgcggagcttttgatttaaccggccggttggtcagccagccagccagccagccactcagtactgcacactgccatcgctctcctacggtactgctgcctaccgcgcgtctcgtcccttcgctgccgctctatctatctcggccggagccatgggcggcggtggcgcggcgctgctgctgctggtgatgtgggcgggcgtggcgtcggcggccgtgtacgaggtgggcggcacgattgggtggaccgtcatgggcaaccccgactacgccgcctgggccagctccaagcagatcgtcatcggcgacactgttggtatccggattcgtactgcgacattgaatacgtcgtctctaggc

SEQ ID NO: 70170 - DNA, 1983 bp, Zea Mays
ctgtgggtaggcttaaggctataaaggtcaatcgaaagccgaaaggcgccttgcgcttgcgcggttgcgcccttgcccttctctctctctctctccaagaacagtactcccatcccatgcctacagctacaggtcgagcagtggccaggggcccggaagagcacgggccaactagagaagtagagattggcattacacacataaagtatatatatatattggcacgatgcccgctcctctgcatcagggcgatcacgctattctccgcgcgaatgggtttgccgcggacccatataggctcatcgggagaaggcgagctgacgggccgagcggccgccacgccgaccgtcgccgaccagtcgtccaccggcaatcaccgaggccgtcgcgcccgccggccattcattcatagtctctcggtctctcttcctgctactttcttctcctgacggtacttactcgcggccgagatgatgaccccggtcagaacttcttctgcctcgcgttttggggtcgtggggttcttgcttctgcggctctgcctggcttctgcctcgcttcgcttgttcgcctacttggatcgggtgccctgcccatgcgctctgcattttctcgtcacatcgattccgctcgaaacgaagctggtggttcgttttacttcaatccaatgtcgcattccccctcctcctcctcctatccgattggtgtggtgctaacatgtcctttctcttgcgctttgcgaaagcactctcataaggaaaaaaaaaccaaccttgcagtgcagaattctctccgttagtctcaaatctcgctactagagcgctatcaaactctactttctttccaaaagatttcagataaatctttataaatgggggtactttactactctgattctgctgtacaagtagaaggcactaaacatgacctaacagtcaagctggtcgcgttgttttccggcttcaaggaatatgtggcgttaatcatggtgtaatccaaaaaaatccacgtgcaaaatgactgacagcctcttcacgccaccagtcttgctcacgagcctagtccatgctacagtcgagagctggtagaacggatatgcctcgtaattatcggcgtcaccatcgctgttgtcgctgtcccactgctgctagtgctagctactcctacgtacagcaggaagacagggcggggacagccgcgggccccacctagcaacaaagccgggccccacgccctgccagtggtgcatgagaatccaggcccaggcccaggcgggcccctctcgccgtggaggcgtggaggcgttagcgtccgtaattctcgcaggctgtccctgtcgacgggagatgtgtcacgtgtcgaacccctccgccgacgctccagtcgacctgtgtgtgcaatgttggtgtaggtggacggtggtggcggcggcggtacaggccgtggagcgagatcgtcggtgataggactcggtccaaaatgcaatgttgacgtaaaaattggacctaaaactacacgagtcagttttaattgttgcgccaactgctgctgcgtcgtgtacctccacgcggagcagtcggaggcgaagaacggcgcggaccacggaggagagcacttagccatgaacggcggcgcgtcgctagacggcacggaccacggaagcgagcactcagcgacgagcggtggctcagtacacggcggctggcggagacgcggcgctagatgccggcggagacgcgtaaaagtagacggcggctctcagacgagacgagtgaaccccaagccgcgactcgacgagctatggaaagtgtgggctgtagttgggccggaccagcaggcccgaatcgcgttaaaactgctggcggatgcgccgacgcgtccgattgtgagctcacggcacatatggcgtgactgttttgtaactgcatttgcacgtgaaattacacaacctacctagttccggtaggggcagagggtgtcttg

SEQ ID NO: 70171 - DNA, 5782 bp, Zea Mays
gacgacgctcagaccaaagagcgagaagggggcaagcggcacgctgccggaaaagagaggctggcgtggtgaagggcagggcggagccttgcaccgcagaagagaagcgaggggagcgccaagcagtagtagaaagagagatagggaggaagagcgacgagagccgaggagctctcctccgcctaatccttggccgcgctgctagattcgccagaattaccgaggcgctgcaccccggatctacagggcggcggcggcgctcgtcggaatccggcgaggcggcggtgatttgccggggatcggcgccgcatgtctcagatctgagatggacaggatccgggacggcaggaggagcggggtgtccggcggagccgggccgccgcctccgagaaggcgcctcaggagcaacggcggagggggccccagagactcgccgcgctccgagcgccgacgtggcgagcgcctcatgctcaacggcggcggcgccggcgccgggagggacgacgccgacgacacctccgacgacagcctcggcgacgacgacgaagacgccgaggaggagctcgcgccgcggtaccagcagcagcggcggtcgccgagcacggcgccgccaccgccctcgccgccgcagcccggcggtggccaccaccacagcagtagtagcagcggcggcggcggttaccacaaccaccaccacggccagcagcatcagatacagcggaagggcggcgtctcacatccgaaaagccccatggtggtcaaggctgttgacgagatgatcggcgtgcctgtcccgaggaaagcccgctctgcttctacgaaacgctcttcgcacgagtggcctgtccccggcggtggaaccagtggaggcagctccggcgtaggagatggctcgcagatccaacgaccttcgtcacggccgatctctccggcgcctgcctctactgccgctcctcggaagaagcttaaaacattgggtggcggtgtgagcagcggtggtctgggaccagcgccgaagcagcgaccgtcgatgtccccagcgccttcaacaaccccgccacaaccgccgccgtcgaagatttcgaagtctccatcttttatccaagaggagattgaggtcgctgaggtgctgttcgggctcaccaggcagttcccatgcccgcaaaagcaggagagcaaccacaaactcgagcctagggacgcgcccgaggccaagtctgggaactcttcgccggccccctcgtcttctggcgtccgaccgtcggattccacctccctttccaccatagctccaaagaggaagagaccacggctggtaaattacgacgaagatagccgtccggcgagaccagagttggcagagccgtcatcaaacccggagtcacctcctgtggcaagatcagaagcgaagacaacagcaacatcggcagcagcagaaagcggcaccagcaccacccctgcggctgcccaacctgagacttcacgagagtcagagaaggcggaggaccgtggtagaaacagagactcagagctccggcccaacgaatcagatcggcgagatcacaggttggagagccaggctgtgccgccgtcgccgttgccgttgccgttgccagagcctccagtcaagccggatgctgaagcaaagccggtgggctccgaggccaggaacggcgaagctactgccacgacaaagattgagctggcatcggatggcgctcggcatgacaagaggttttccattgatctcatggctccccctcctgggaagctatctgatgatatagatggctcctccgaccctgatgcagataagaagggattggattctgagatggacatgttggggagaggaaattcggaaaagaaggctagtgaaaggactcggagaggactggatattgatttggaggaccagaaggtgcgaagaattccagtcgatgagttcgcgccgaagaagctcacactgcagttggatttggagaagcccagtctcggtgatgaaaagtcgccatcagagagacggcagccgcagccgcagccacaacaattgcagcagcagaagccctcaaaggctgagataaagcacgagaaatctgctatgcctgctgctgttacaccacctatgcctatacctgttggaggctggcttgggaatttcccaccgtttggttatctcagtccagtcccaggcctatcagcagctggtcttcatcatcccatggacgtgaaaccagggtcatctagtggattacatcattctgcattgcttccaccgccaacacgctcaaagagatgtgctacacattgctacattgcacaatttatccagcaccagcagcgagttgcaaagatgaactctttctggccgccaactgctgctgctgcagccgccgccgccgccaatagaccaccggggccattctttggtgcaaggccattcagcatgggtgttgtgccacccacggatgccgcctctatgcttgtgaacccaatgcagggaagctaccctgttagggcgcacactccgatgcaagaagcaaaggctcctatggctacatcaccattccaggggagtctctcgaaggacaaaacactaggcaatgctgctggtgctgaatcaagccagaggaaacaaccaccttctcatgaaacactgcagtccactcccttgccaaacatgctgcaagccccggcattcatctttccattcaatcagcagcatgctatggtggcagctgcaaatgctgccaaccgagcaggggatgcaaaatcatctggtgccggcaatacattgccgccatctgccagtgctcacactttggcaacaaactctggtgccgcggccatgaacttgagctttgccaacatgcaaccggctgatgcccagtttttggcaatcttacagaatggatacccgttccaggttgctgcccatcctggagggcctccatatcgaggcatggcatcgccaggcccagctgttccattcttcaatggtcatgtgtattcctcccccatgctgcacccatcacagcagcaaggtgcgcagtcacaaagtcatcagaagacccaaatgccaaacttgcccagttcatcacagaagcatcagccacaacagtcccaaggcctgttgggatacgcaccaaatactaatgcagcagcagctgctagtaattcacagaattattcaagtggcaatcagcgccctgtcctgctacctggccttgtgcaccgacaggagagtgacaaaactggacaagattgtccatctagtgatgacaagccatctcactcccagaagagtgggtatgaacacaattttgccgttccagtccatctaccgaattttgcaatgatgccagccgctcaacctgctgtcagtcagagtgagaagaagttaagtgaccaccagcaccaccagcaacagcagcagccacaagtcagccgaggccagggtgtgaggattgatcttgcctcttctcagccttttgtgatgccctttggctccattggtcctcctggatctaccccaagtggtcttgacttttcggcattggcgcagaaccatgcagttttccagagccatcaagatgcagcaaggcatggttatccccagcttaattttgctgcagctcaacctgtgcaatccacgcagcagaagccccagcaccaaatgactggagaaacaaaaactgttgcgggggattcatcctcgactcccattgctggagacagtgagagaaagaaatcaacttctcacaagtattctagtgattcacaacagcattcgctgtccttcaccaggacggaaagcaagaattatgtgcctcctttccttactggcaacacaaatgaaacttcgtcccgcaccctgagccttatcggaacagaatcttcaaatgcattcatgggaagcaaacccacaaattccaacacccctgcctctaccgccgctgcagcttcggccagcatttctcagcagcagcagcagcaccttcagatgcaagcgcaacaaaagcaccagcagcatcagcagctaattcagcatcaccatctgaatcggcccagatctgctgcaccaagtacacagaacagtgcaggtgggtaccaagaccgtataaacatggctaattttcagaatatgatgtacccatcaagtgctgcccaagggagagttcaatccccccagttgaaggcatcctcagggagagggacaccttcatctactgctacgactacccctgccgccacaccccctaatttgattatgatgaagaacagtagcctccaccagcaacaagcaaaagtccctatgcaggctctctacactcctggtcaccaatcacagacttccttaagttcatcaaaggtaggaccttctctaacaaacctttctaccggaggaggggatctatctcgatcttcaaacgcccctgttgcttctggttcaccatccaattcggtgtccaaaagtaccggtggcagcccacccgccacaggaaatgcaaagggtgttcagcagcctgtccaactgccatcaccacagcagcagtcagccaagaactccgcgtcgacgtctggctccaggactactcccacgaatcatttcagtatggccatgccatccatccttggccagcagcctaatgcatcgcctggttccaatcctgggagcaagcagcactcacatacgcagccagcatcgatgaaacagcagccattcccgcaaggccatttcttcatatccaacacctacgctcctccggctccgggagccggaggtgctgctgccctaggcctctaccagaagcgaccaggcgacaagacgcagcagcagcagcagcagcaggcatcgcaccagcagagcgccatgtcagctgccggcggcaataacgtgaaagcactccatccttcatccggcgggtttatgcatctcgcagcccagtctgcaggtggcatggcgcacacccacgtgtcggcggggcaactgactttcggaacaatgccgacgcctttaaaaccgtcaagcgaccagaagcctgctgccggaaaataaacagtccagacgaccatgcatcggagtggtaaacctgaactggtttttgcctgttcagcggaagcccaaatggcagaatcgcaacaacagtagcagcggcagctcaaaagaacccgcatggaagctcaaatggcccgcttggttgctggtgatgaggaaggaaggaggggtgccgtgcaccagttcgttccgagcaagaagcagatgtctcgttaacttaaaacagagtattcagattccggaatggttgatgggggagtggtacttcttttgtgtagttggggctggttatcctcccatggtgtaaaggccgcggaggaggaggtgcatagaatttgtctcttagcccgttttttattttatgcatggatggatggcccaaaagctggtttctccccctctctctttcttgtagctttgctgtttccgttttcccccctttctttcttttgggtggttctaagctttaactaactggaggaagaaagattcagttagaacgcagatcaggtgacttcgttatgctgtctgttgatacacactctgcttggattgttttggcagctagatctaggaggagcaaaatatctatcccaagtagaataggtaggatcttccggccatgattggtgggtgacatgcttctgggtttgttgttgtaagtagctttgggaggggggtgggggaaaggaaatgaatgaatgaattgaaagtgactgatta

SEQ ID NO: 70172 - DNA, 5754 bp, Zea Mays
gacgacgctcagaccaaagagcgagaagggggcaagcggcacgctgccggaaaagagaggctggcgtggtgaagggcagggcggagccttgcaccgcagaagagaagcgaggggagcgccaagcagtagtagaaagagagatagggaggaagagcgacgagagccgaggagctctcctccgcctaatccttggccgcgctgctagattcgccagaattaccgaggcgctgcaccccggatctacagggcggcggcggcgctcgtcggaatccggcgaggcggcggtgatttgccggggatcggcgccgcatgtctcagatctgagatggacaggatccgggacggcaggaggagcggggtgtccggcggagccgggccgccgcctccgagaaggcgcctcaggagcaacggcggagggggccccagagactcgccgcgctccgagcgccgacgtggcgagcgcctcatgctcaacggcggcggcgccggcgccgggagggacgacgccgacgacacctccgacgacagcctcggcgacgacgacgaagacgccgaggaggagctcgcgccgcggtaccagcagcagcggcggtcgccgagcacggcgccgccaccgccctcgccgccgcagcccggcggtggccaccaccacagcagtagtagcagcggcggcggcggttaccacaaccaccaccacggccagcagcatcagatacagcggaagggcggcgtctcacatccgaaaagccccatggtggtcaaggctgttgacgagatgatcggcgtgcctgtcccgaggaaagcccgctctgcttctacgaaacgctcttcgcacgagtggcctgtccccggcggtggaaccagtggaggcagctccggcgtaggagatggctcgcagatccaacgaccttcgtcacggccgatctctccggcgcctgcctctactgccgctcctcggaagaagcttaaaacattgggtggcggtgtgagcagcggtggtctgggaccagcgccgaagcagcgaccgtcgatgtccccagcgccttcaacaaccccgccacaaccgccgccgtcgaagatttcgaagtctccatcttttatccaagaggagattgaggtcgctgaggtgctgttcgggctcaccaggcagttcccatgcccgcaaaagcaggagagcaaccacaaactcgagcctagggacgcgcccgaggccaagtctgggaactcttcgccggccccctcgtcttctggcgtccgaccgtcggattccacctccctttccaccatagctccaaagaggaagagaccacggctggtaaattacgacgaagatagccgtccggcgagaccagagttggcagagccgtcatcaaacccggagtcacctcctgtggcaagatcagaagcgaagacaacagcaacatcggcagcagcagaaagcggcaccagcaccacccctgcggctgcccaacctgagacttcacgagagtcagagaaggcggaggaccgtggtagaaacagagactcagagctccggcccaacgaatcagatcggcgagatcacaggttggagagccaggctgtgccgccgtcgccgttgccgttgccgttgccagagcctccagtcaagccggatgctgaagcaaagccggtgggctccgaggccaggaacggcgaagctactgccacgacaaagattgagctggcatcggatggcgctcggcatgacaagaggttttccattgatctcatggctccccctcctgggaagctatctgatgatatagatggctcctccgaccctgatgcagataagaagggattggattctgagatggacatgttggggagaggaaattcggaaaagaaggctagtgaaaggactcggagaggactggatattgatttggaggaccagaaggtgcgaagaattccagtcgatgagttcgcgccgaagaagctcacactgcagttggatttggagaagcccagtctcggtgatgaaaagtcgccatcagagagacggcagccgcagccgcagccacaacaattgcagcagcagaagccctcaaaggctgagataaagcacgagaaatctgctatgcctgctgctgttacaccacctatgcctatacctgttggaggctggcttgggaatttcccaccgtttggttatctcagtccagtcccaggcctatcagcagctggtcttcatcatcccatggacgtgaaaccagggtcatctagtggattacatcattctgcattgcttccaccgccaacacgctcaaagagatgtgctacacattgctacattgcacaatttatccagcaccagcagcgagttgcaaagatgaactctttctggccgccaactgctgctgctgcagccgccgccgccgccaatagaccaccggggccattctttggtgcaaggccattcagcatgggtgttgtgccacccacggatgccgcctctatgcttgtgaacccaatgcagggaagctaccctgttagggcgcacactccgatgcaagaagcaaaggctcctatggctacatcaccattccaggggagtctctcgaaggacaaaacactaggcaatgctgctggtgctgaatcaagccagaggaaacaaccaccttctcatgaaacactgcagtccactcccttgccaaacatgctgcaagccccggcattcatctttccattcaatcagcagcatgctatggtggcagctgcaaatgctgccaaccgagcaggggatgcaaaatcatctggtgccggcaatacattgccgccatctgccagtgctcacactttggcaacaaactctggtgccgcggccatgaacttgagctttgccaacatgcaaccggctgatgcccagtttttggcaatcttacagaatggatacccgttccaggttgctgcccatcctggagggcctccatatcgaggcatggcatcgccaggcccagctgttccattcttcaatggtcatgtgtattcctcccccatgctgcacccatcacagcagcaaggtgcgcagtcacaaagtcatcagaagacccaaatgccaaacttgcccagttcatcacagaagcatcagccacaacagtcccaaggcctgttgggatacgcaccaaatactaatgcagcagcagctgctagtaattcacagaattattcaagtggcaatcagcgccctgtcctgctacctggccttgtgcaccgacaggagagtgacaaaactggacaagattgtccatctagtgatgacaagccatctcactcccagaagagtgggtatgaacacaattttgccgttccagtccatctaccgaattttgcaatgatgccagccgctcaacctgctgtcagtcagagtgagaagaagttaagtgaccaccagcaccaccagcaacagcagcagccacaagtcagccgaggccagggtgtgaggattgatcttgcctcttctcagccttttgtgatgccctttggctccattggtcctcctggatctaccccaagtggtcttgacttttcggcattggcgcagaaccatgcagttttccagagccatcaagatgcagcaaggcatggttatccccagcttaattttgctgcagctcaacctgtgcaatccacgcagcagaagccccagcaccaaatgactggagaaacaaaaactgttgcgggggattcatcctcgactcccattgctggagacagtgagagaaagaaatcaacttctcacaagtattctagtgattcacaacagcattcgctgtccttcaccaggacggaaagcaagaattatgtgcctcctttccttactggcaacacaaatgaaacttcgtcccgcaccctgagccttatcggaacagaatcttcaaatgcattcatgggaagcaaacccacaaattccaacacccctgcctctaccgccgctgcagcttcggccagcatttctcagcagcagcagcagcaccttcagatgcaagcgcaacaaaagcaccagcagcatcagcagctaattcagcatcaccatctgaatcggcccagatctgctgcaccaagtacacagaacagtgcaggtgggtaccaagaccgtataaacatggctaattttcagaatatgatgtacccatcaagtgctgcccaagggagagttcaatccccccagttgaaggcatcctcagggagagggacaccttcatctactgctacgactacccctgccgccacaccccctaatttgattatgatgaagaacagtagcctccaccagcaacaagcaaaagtccctatgcaggctctctacactcctggtcaccaatcacagacttccttaagttcatcaaaggtaggaccttctctaacaaacctttctaccggaggaggggatctatctcgatcttcaaacgcccctgttgcttctggttcaccatccaattcggtgtccaaaagtaccggtggcagcccacccgccacaggaaatgcaaagggtgttcagcagcctgtccaactgccatcaccacagcagcagtcagccaagaactccgcgtcgacgtctggctccaggactactcccacgaatcatttcagtatggccatgccatccatccttggccagcagcctaatgcatcgcctggttccaatcctgggagcaagcagcactcacatacgcagccagcatcgatgaaacagcagccattcccgcaaggccatttcttcatatccaacacctacgctcctccggctccgggagccggaggtgctgctgccctaggcctctaccagaagcgaccaggcgacaagacgcagcagcagcagcagcagcaggcatcgcaccagcagagcgccatgtcagctgccggcggcaataacgtgaaagcactccatccttcatccggcgggtttatgcatctcgcagcccagtctgcaggtggcatggcgcacacccacgtgtcggcggggcaactgactttcggaacaatgccgacgcctttaaaaccgtcaagcgaccagaagcctgctgccggtacttgacttgccaccaaatgagtttgaacagagaagcggaagcccaaatggcagaatcgcaacaacagtagcagcggcagctcaaaagaacccgcatggaagctcaaatggcccgcttggttgctggtgatgaggaaggaaggaggggtgccgtgcaccagttcgttccgagcaagaagcagatgtctcgttaacttaaaacagagtattcagattccggaatggttgatgggggagtggtacttcttttgtgtagttggggctggttatcctcccatggtgtaaaggccgcggaggaggaggtgcatagaatttgtctcttagcccgttttttattttatgcatggatggatggcccaaaagctggtttctccccctctctctttcttgtagctttgctgtttccgttttcccccctttctttcttttgggtggttctaagctttaactaactggaggaagaaagattcagttagaacgcagatcaggtgacttcgttatgctgtctgttgatacacactctgcttggattgttttggcagctagatctaggaggagcaaaatatctatcccaagtagaataggtaggatcttccggccatgattggtgggtgacatgcttctgggtttgttgttgtaagtagctttgggaggggggtgggggaaaggaaatgaatgaatgaattgaaagtgactgatta

SEQ ID NO: 70173 - DNA, 1650 bp, Zea Mays
ctgatctagctgccgtggagctgcgaatgcgtgtctttgagagctccggaaaaaacatcgtgtggacctagagagactaacaattacatcgcgaccattcaagacattgtcattctttgtgttagccattgctcagaatttggaaagaacatgttcatctgttctgaaaaaaggttaccagttaaaaaccgcaatgcttttggttgttgctacttggcttctgctcatgttcactgatggcctgaatgaaaagcatctgcaggagctattttggtatgtcaggtttggattgtggtggattatactaggggttgcttcatccattggattaggttctggtttgcacactttcataatgtatttggctccccatgttgccctgttcactatcaaagcggttcagtgtggtagggttgatttgaaaagtgctccttatgacactattctccttgaaaggagaccatcctggttagagaaagactgtctgcaatttggacccccaatttatcatgaaacaattccattcagcaaaatactgcaagaagtttatcttgaagctattctttggggcattggaactgcacttggagagcttcctccatattttctctcaagaacagctagcatgtcaggccgcataattgatgaattagaagatttggatgcttccatttcagaaggctttctatcatcagctttacgtcaggccaaacgatggctcatgtctcattcacagtatttaagcttcactctaatattgctacttgcttcggtgccaaaccctctatttgatcttgccggtatcttgtgtggacaatttaacatccctttctggaagttttttctagcaactttgattggaaaggctattgttaaagtttgtatccagactacattggtgattactctctgcaataaccaacttcttgatttggtggagaaaaggcttatatgggcatttagcaatgttcctggagtggcatctgtccttccatcttttgtttccaaactgaagatggacaaaaataagtttttatcagcccatgttgctgcatcagcttctacttctgttaagggaaagaagtggaatctgtcattctctttggtctggaataccctggtgtggctcatggttgcaaacttcattatccagatagttacttctacagcacagggttatctcaggacacaacaggagcgagagatcagtaaaaagttggaaaccgagctttctgcctcttaacgttcttctgcgcaccaaaatgattcgccctgggaaagtccaatacattgtacataaccatgcatcaaccatcagctcaagactaaaggctctcctgcagtattgtggtgcactgactattggtctatttctttcgaaagagagagagaggaaagctattagctagtgctagaaatataatggtgccccacttacaattgtaagtttgtggccttgtacatagcaacaaatattattaggggacaaaaatatctaatgatacaagttaatacctgattttgtctccgcattggcaatgatcccttctcgtgtcgagaccggccctttctacattgatgtcgacgcgatgagatttctgttcctgtcaatgcacacactacctgccaggtggttaacggagaaagttt

SEQ ID NO: 70174 - DNA, 2525 bp, Zea Mays
cagtttcctgccctcatcggttacctttgtccccaacgcatgtatccgcgtttgcgttgcgtctgtgcctgacggggtaaatcgtgaaaccccgggcaaagcgcataaaaaacggaaagccgttctcatcttgccctcctttttagcttttagcttgcgccttgcgttcgcggaaaaggctcatcttttcaggtggaaggagcgattcgtctgtgcctgcgcctcgccgggctcgtgccgctgtaccctccttctccaggagacctgtacggtgaaggggcgttcccgcgccaaacgggaagcaaagctcgctcgcgccctttttttcggatcatataacgccggcgcctagctcaaacaccacagctcgctgcctagatctacgcggcagcggcggcggcagaggagagggacccggagctgcgccatgggtcctaccgccggctccggcgaggacaaggctatgtcagagctccggaaaaaacatcgtgtggacctagagagactaacaattacatcgcgaccattcaagacattgtcattctttgtgttagccattgctcagaatttggaaagaacatgttcatctgttctgaaaaaaggttaccagttaaaaaccgcaatgcttttggttgttgctacttggcttctgctcatgttcactgatggcctgaatgaaaagcatctgcaggagctattttggtatgtcaggtttggattgtggtggattatactaggggttgcttcatccattggattaggttctggtttgcacactttcataatgtatttggctccccatgttgccctgttcactatcaaagcggttcagtgtggtagggttgatttgaaaagtgctccttatgacactattctccttgaaaggagaccatcctggttagagaaagactgtctgcaatttggacccccaatttatcatgaaacaattccattcagcaaaatactgcaagaagtttatcttgaagctattctttggggcattggaactgcacttggagagcttcctccatattttctctcaagaacagcatgtcaggccgcataattgatgaattagaagatttggatgcttccatttcagaaggctttctatcatcagctttacgtcaggccaaacgatggctcatgtctcattcacagtatttaagcttcactctaatattgctacttgcttcggttagtttcattctgttgatatttcaaatttgtttgttcaagtcatatttcagtatgttgcatttcacctagttgtcgacttgccttgtagcaccttgctaattgaggatgttaaggtgaaggctcatttaaattgttgaagaaactcacattctttctttgctgacaaaggaaacattttaaaccatagatatgacatgccttattgttaaatattttgaatttatttattggtctcaccaaagttttatacttattggcatactattcctttccttatgaatgttaagaaactgtatgacaatttcttctgtcaggtgccaaaccctctatttgatcttgccggtatcttgtgtggacaatttaacatccctttctggaagttttttctagcaactttgattggaaaggctattgttaaagtttgtatccagactacattggtgattactctctgcaataaccaacttcttgatttggtggagaaaaggcttatatgggcatttagcaatgttcctggagtggcatctgtccttccatcttttgtttccaaactgaagatggacaaaaataagtttttatcagcccatgttgctgcatcagcttctacttctgttaagggaaagaagtggaatctgtcattctctttggtctggaataccctggtgtggctcatggttgcaaacttcattatccagatagttacttctacagcacagggttatctcaggacacaacaggagcgagagatcagtaaaaagttggaaaccgagctttctgcctcttaacgttcttctgcgcaccaaaatgattcgccctgggtaccgatctggtttcttcaatcttttacatacttatatcgagtttagagaggaatattaacatgaataatgtggtaactgactgggaaattcaaaccgtgttcaccaactatttgccgctactgttcttcaggaaagtccaatacattgtacataaccatgcatcaaccatcagctcaagactaaaggctctcctgcagtattgtggtgcactgactattggtctatttctttcgaaagagagagagaggaaagctattagctagtgctagaaatataatggtgccccacttacaattgtaagtttgtggccttgtacatagcaacaaatattattaggggacaaaaatatctaatgatacaagttaatacctgattttgtctccgcattggcaatgatcccttctcgtgtcgagaccggccctttctacattgatgtcgacgcgatgagatttctgttcctgtcaatgcacacactacctgccaggtggttaacggagaaagttt

SEQ ID NO: 70175 - DNA, 2430 bp, Zea Mays
cggaattgaagatcggatctctaaacaaccacgtcagtttcctgccctcatcggttacctttgtccccaacgcatgtatccgcgtttgcgttgcgtctgtgcctgacggggtaaatcgtgaaaccccgggcaaagcgcataaaaaacggaaagccgttctcatcttgccctcctttttagcttttagcttgcgccttgcgttcgcggaaaaggctcatcttttcaggtggaaggagcgattcgtctgtgcctgcgcctcgccgggctcgtgccgctgtaccctccttctccaggagacctgtacggtgaaggggcgttcccgcgccaaacgggaagcaaagctcgctcgcgccctttttttcggatcatataacgccggcgcctagctcaaacaccacagctcgctgcctagatctacgcggcagcggcggcggcagaggagagggacccggagctgcgccatgggtcctaccgccggctccggcgaggacaaggctatgtcagagctccggaaaaaacatcgtgtggacctagagagactaacaattacatcgcgaccattcaagacattgtcattctttgtgttagccattgctcagaatttggaaagaacatgttcatctgttctgaaaaaaggttaccagttaaaaaccgcaatgcttttggttgttgctacttggcttctgctcatgttcactgatggcctgaatgaaaagcatctgcaggagctattttggtatgtcaggtttggattgtggtggattatactaggggttgcttcatccattggattaggttctggtttgcacactttcataatgtatttggctccccatgttgccctgttcactatcaaagcggttcagtgtggtagggttgatttgaaaagtgctccttatgacactattctccttgaaaggagaccatcctggttagagaaagactgtctgcaatttggacccccaatttatcatgaaacaattccattcagcaaaatactgcaagaagtttatcttgaagctattctttggggcattggaactgcacttggagagcttcctccatattttctctcaagaacagctagcatgtcaggccgcataattgatgaattagaagatttggatgcttccatttcagaaggctttctatcatcagctttacgtcaggccaaacgatggctcatgtctcattcacagtatttaagcttcactctaatattgctacttgcttcggttagtttcattctgttgatatttcaaatttgtttgttcaagtcatatttcagtatgttgcatttcacctagttgtcgacttgccttgtagcaccttgctaattgaggatgttaaggtgaaggctcatttaaattgttgaagaaactcacattctttctttgctgacaaaggaaacattttaaaccatagatatgacatgccttattgttaaatattttgaatttatttattggtctcaccaaagttttatacttattggcatactattcctttccttatgaatgttaagaaactgtatgacaatttcttctgtcaggtgccaaaccctctatttgatcttgccggtatcttgtgtggacaatttaacatccctttctggaagttttttctagcaactttgattggaaaggctattgttaaagtttgtatccagactacattggtgattactctctgcaataaccaacttcttgatttggtggagaaaaggcttatatgggcatttagcaatgttcctggagtggcatctgtccttccatcttttgtttccaaactgaagatggacaaaaataagtttttatcagcccatgttgctgcatcagcttctacttctgttaagggaaagaagtggaatctgtcattctctttggtctggaataccctggtgtggctcatggttgcaaacttcattatccagatagttacttctacagcacagggttatctcaggacacaacaggagcgagagatcagtaaaaagttggaaaccgagctttctgcctcttaacgttcttctgcgcaccaaaatgattcgccctgggaaagtccaatacattgtacataaccatgcatcaaccatcagctcaagactaaaggctctcctgcagtattgtggtgcactgactattggtctatttctttcgaaagagagagagaggaaagctattagctagtgctagaaatataatggtgccccacttacaattgtaagtttgtggccttgtacatagcaacaaatattattaggggacaaaaatatctaatgatacaagttaatacctgattttgtctccgcattggcaatgatcccttctcgtgtcgagaccggccctttctacattgatgtcgacgcgatgagatttctgttcctgtcaatgcacacactacctgccaggtggttaacggagaaagttt

SEQ ID NO: 70176 - DNA, 1473 bp, Zea Mays
cgccgcagctgctaccggttccgaccccagcaacctcgacgccgcagctcagacggcggcggcgaaccctaaccctagctcctccgccgccgcctcctcctcggcgccctccgtcccgcccgccctcgcgccgaagaagaccgcgcaggaggaggcgctgctctccgaggagcgtcgcatcgacgagctcgacctcccacggcacgaggtggtgcggcgcctccgcgtgctgcgcgagcccgtcacgctgttcggggaggacgacgacgcccgcctcgcgcgcttcaagctcgtgctcaagtccggcgtcatcgacgacattgacgacatcgacatgaccgagggacagaccaacgacttcctccgcgacatgatcgagatgaccgagggacagaccaacgacttcctccgcgacatgatcgagatgcgcaagcggcagaagtccgggagggacacctacgccaagggcaagagcaagcgtgtaggtgggggtgatggtggcgacgggggtgccgctggagacagtgcagatgatggggatgccaaggggagcggcgatgatgctgacgcagacaaggactccaagaggatgaggaccaagtttgaggagctttgcaatgaagacaagattttggtgttcttcaagaagctgcttaatgagtggaaccaggaattggatgagatgactgagctagagaagcggacagcaaaggggaagtccatggttgcaacattcaagcagtgtgcacggtatctcagcccgctgtttgagttctgcagaaagaaggttcttcctgatgacatccgtcgagcattgcttgttattgtcgagtgttgcatgaagcgagattatttagcagcaatggaccaatatatcaagctggcaatcgggaatgcaccatggcccattggagttacaatggttggcatccacgagcgttctgcccgagaaaagatctacacaaacagcgtcgcccacatcatgaatgacgagaccactcgcaagtatcttcagtcaatcaagaggctcatgacgctttcccagcggcgttaccctgcactgccctcaaaatcagtggagttcaacagcctggcaaatgggagtgacctgcaggcgcttctatcggaagagaatggttcgggtaaagcttccgaggaaaggctccggttgatgccagcattgaaagagtgatgccttcgcagactagattggattacaagtagagcttgagatgcttgtgtaatatatacaatcaatcctgcctgtttttttttcttttcctgtttgtgctgaagagaaaagcaacagagttatgtatgctaattaaatcgctttaccgctacatctggtcaggcaaagtttttattaatatatctgccaattccggagaaccattttttactatttatcatcaagcagcagtcatgcttactgtattaatcaggtttggtgctatcctagttgtgtcagta

SEQ ID NO: 70177 - DNA, 1566 bp, Zea Mays
cgccgcagctgctaccggttccgaccccagcaacctcgacgccgcagctcagacggcggcggcgaaccctaaccctagctcctccgccgccgcctcctcctcggcgccctccgtcccgcccgccctcgcgccgaagaagaccgcgcaggaggaggcgctgctctccgaggagcgtcgcatcgacgagctcgacctcccacggcacgaggtggtgcggcgcctccgcgtgctgcgcgagcccgtcacgctgttcggggaggacgacgacgcccgcctcgcgcgcttcaagctcgtgctcaagtccggcgtcatcgacgacattgacgacatcgacatgaccgagggacagaccaacgacttcctccgcgacatgatcgagatgcgtaagcggcagaaggccgggagggacacctacgccaagggcaagagcaagcgtgtaggtgggggtgatggtggcgacgggggtgctgctggagacagtgcagatgatggggatgccaaggggagcggcgatgatgctgacgcagacaaggactccaagaggatgaggaccaagtttgaggagctttgcaatgaagacaagattttggtgttctttaagaagctgcttaatgagtggaaccaggaattggatgagatgactgagctagagaagcggacagcaaaggggaagtccatggttgcaacattcaagcagtgtgcacggtatctcagcccgctgtttgagttctgcagaaagaagctgcttaatgagtggaaccaggaattggatgagatgactgagctagagaagcggacagcaaaggggaagtccatggttgcaacattcaagcagtgtgcacggtatctcagcccgctgtttgagttctgcagaaagaaggttcttcctgatgacatccgtcgagcattgcttgttattgtcgagtgttgcatgaagcgagattatttagcagcaatggaccaatatatcaagctggcaatcgggaatgcaccatggcccattggagttacaatggttggcatccacgagcgttctgcccgagaaaagatctacacaaacagcgtcgcccacatcatgaatgacgagaccactcgcaagtatcttcagtcaatcaagaggctcatgacgctttcccagcggcgttaccctgcactgccctcaaaatcagtggagttcaacagcctggcaaatgggagtgacctgcaggcgcttctatcggaagagaatggttcgggtaaagcttccgaggaaaggctccggttgatgccagcattgaaagagtgatgccttcgcagactagattggattacaagtagagcttgagatgcttgtgtaatatatacaatcaatcctgcctgtttttttttcttttcctgtttgtgctgaagagaaaagcaacagagttatgtatgctaattaaatcgctttaccgctacatctggtcaggcaaagtttttattaatatatctgccaattccggagaaccattttttactatttatcatcaagcagcagtcatgcttactgtattaatcaggtttggtgctatcctagttgtgtcagta

SEQ ID NO: 70178 - DNA, 1309 bp, Zea Mays
cgccgcagctgctaccggttccgaccccagcaacctcgacgccgcagctcagacggcggcggcgaaccctaaccctagctcctccgccgccgcctcctcctcggcgccctccgtcccgcccgccctcgcgccgaagaagaccgcgcaggaggaggcgctgctctccgaggagcgtcgcatcgacgagctcgacctcccacggcacgaggtggtgcggcgcctccgcgtgctgcgcgagcccgtcacgctgttcggggaggacgacgacgcccgcctcgcgcgcttcaagctcgtgctcaagtccggcgtcatcgacgacattgacgacatcgacatgaccgagggacagaccaacgacttcctccgcgacatgatcgagatgcgggagcggcgatgatgctgacgcagacaaggactccaagaggatgaggaccaagtttgaggagctttgcaatgaagacaagattttggtgttcttcaagaagctgcttaatgagtggaaccaggaattggatgagatgactgagctagagaagcggacagcaaaggggaagtccatggttgcaacattcaagcagtgtgcacggtatctcagcccgctgtttgagttctgcagaaagaaggttcttcctgatgacatccgtcgagcattgcttgttattgtcgagtgttgcatgaagcgagattatttagcagcaatggaccaatatatcaagctggcaatcgggaatgcaccatggcccattggagttacaatggttggcatccacgagcgttctgcccgagaaaagatctacacaaacagcgtcgcccacatcatgaatgacgagaccactcgcaagtatcttcagtcaatcaagaggctcatgacgctttcccagcggcgttaccctgcactgccctcaaaatcagtggagttcaacagcctggcaaatgggagtgacctgcaggcgcttctatcggaagagaatggttcgggtaaagcttccgaggaaaggctccggttgatgccagcattgaaagagtgatgccttcgcagactagattggattacaagtagagcttgagatgcttgtgtaatatatacaatcaatcctgcctgtttttttttcttttcctgtttgtgctgaagagaaaagcaacagagttatgtatgctaattaaatcgctttaccgctacatctggtcaggcaaagtttttattaatatatctgccaattccggagaaccattttttactatttatcatcaagcagcagtcatgcttactgtattaatcaggtttggtgctatcctagttgtgtcagta

SEQ ID NO: 70179 - DNA, 1357 bp, Zea Mays
cgccgcagctgctaccggttccgaccccagcaacctcgacgccgcagctcagacggcggcggcgaaccctaaccctagctcctccgccgccgcctcctcctcggcgccctccgtcccgcccgccctcgcgccgaagaagaccgcgcaggaggaggcgctgctctccgaggagcgtcgcatcgacgagctcgacctcccacggcacgaggtggtgcggcgcctccgcgtgctgcgcgagcccgtcacgctgttcggggaggacgacgacgcccgcctcgcgcgcttcaagctcgtgctcaagtccggcgtcatcgacgacattgacgacatcgacatgaccgagggacagaccaacgacttcctccgcgacatgatcgagatgcgtaagcggcagaaggccgggagggacacctacgccaagggcaagagcaagcgtgtaggtgggggtgatggtggcgacgggggtgctgctggagacagtgcagatgatggggatgccaaggggagcggcgatgatgctgacgcagacaaggactccaagaggatgaggaccaagtttgaggagctttgcaatgaagacaagattttggtgttctttaagaagctgcttaatgagtggaaccaggaattggatgagatgactgagctagagaagcggacagcaaaggggaagtccatggttgcaacattcaagcagtgtgcacggtatctcagcccgctgtttgagttctgcagaaagaaggtacttcctgatgatatccgtcgagcgttgcttgttattgtcgagtgttgcatgaagcgagattatttagcagcaatggaccaatatatcaagttggcaatcgggaatgcaccatggcccattggagtgactatggttggcatccacgagcgttctgcccgagagaagatctacacaaacagcgtcgcccacatcatgaatgacgagaccactcgcaagtaccttcagtcaatcaagaggctcatgacgctttgccagcggcgttaccctgcactgccctcaaaatcagtggagttcaacagccttgcaaatgggagtgacctgcaggcgcttctatcggaagagaatggttcgggtaaagcttccgaggaaaggctccggttgatgccagcatcgaaagagtgatgccttcgcagactagattggattacaagtagagcttgagatgcttgtgtaatatatacaatacaatcaattctgtctgtttttttttcttttctgtttgtgctgaagagaaaagcaacagaattgtgtatgctaattaaatcgctttaccgctacatgtggtcgggcaaagtttttattaatatatcagtcaattctggagaaccattt

SEQ ID NO: 70180 - DNA, 2976 bp, Zea Mays
ttttttttttgtagtcgatctatccaacaagcccggccggaggtttaaacttatcaaatcacgtgaaaagatagctcgccgacgctgacgcagtccggaaacgcgtcgcccagacgcccacacatccatccacaacggtaaagccgccgcggcgatgtcttccgcacccccgcctccgccgtctctgaaccccgaagtgcccccgcgcatcgtccgcgcccccccgcgccggcctcctccgcgcgcgcccggtccgccgccttgggcggagcgtcggcctgccgtgtccgtcgacctcgaccgcggccgtcgctcggtccgcaccgaggtggacggcgtccgcgccgcgtcgctccctgcgcgacaccgcctccgcgtggagggcaaccggtggcagcgggactggaaggtgtccgaggtcgtcgcgcgcttgctcgcgctgcctcatgccgacgcggacgccgtcgacgccgtgctcaactgctgggccggtcgcttcgcacgccgcaacttcccgctgctcatcagagaaattgcaatttctggatccttgaaacatgctgtgcatgtgttccgctggatgaaaaatcaggagaactactgtgctcgcaatgacatttatggcatgatgattaggttacatgctagacacaacaaggttgatcaagcacgtggcctgttctttgagatgcaagaatggcggtgcaagcctaatactgatacatacaactctttgatccatgctcatgctcgagctggccagtggtgttgggccatcaacattatggatgatatgcaacgtgccgctatacctcctagccgaactacgtataataatgttataaatgcatgtggagctgctggtaactggaagaaagctttagaactttgtaagaagatgactgaaaatggtgtagggccagatttgatcacacacaacattgttttgtctgcttttaagaatggagctcagtactcaaaagccatagcttactttgaaattatgaaatcctctaaagttgcccctgatacatgcactatgaatattgtgatccattgccttgtaaagattgggctgtatggggaagctattgagttgtttaactcaatgagggaaagaagaacaacatgtcatccagatgtcgttacatatactagcataatgtattcttattctgtttgtgggcaagctgaaaattgcaaggcggtctttgatataatggttgctgaaggtgtcagacctaatattatctgcacagcctgagaaagctagggaggtctttaatgaaatgaggaagaatgcatgcaagccaaataaagtcagttacaatgcacttattgatgcttatggatctgctggaatgttgaaggaagcgattagtctgttgcatgaaatggagcaagatggcattcaaccggatgttatttcaataagtactctgttaacagcatgtggccgctgcaagcagctaactaaaattgacataattcttgcagcagctaagtctcgagggatccaactaaatacagttgcttacaactcaggcatcggaagttatttaagtttgggagattataagaaagctttggtgttatacacgtcaatgagggcaggcaatgtgaagccagatgctgtgacttacaatatactcattagtggatcttgtaaattgggaaggtatgtagagtctctgaaattttttgaagacatgctggacctgaatattcatttgaccaaggaagtctactcatccgtgatttgctcatatgtcaaacagggcaaattaactgaagcagcatctacttttaattctatgaaagaaactggttgcttccccgatgttttgacatatacgacattaattaaagcatatagtgatgatgggagctggaggagagcatgggacctattcaaagagatggaaaataatggcacacagccagatgctattgtctgttcatccctcatggaagcattgaataagggaggtcaacctgaaagggtccttcagttgatagaattcatgaagcaaaaaaagattcaattgaaccaaaaggcttattttgagataatatcttcatgcaccatgttacgagactggaaaacagcaagtcaaataattgaacatttggattcctctctctcatctatttcttttggcacactcaaccatattttaaattttcttggaaaatgtggcaggacagagagcatgatgaagctgttctataagatggtgacttcatgctctactgtgggcctttctacttatacgattctgctgagaaatctcttaattgtggggaaatggagaaagtatgttgaggttttgcagtggatggaagatgctggagtctgcccaacactctatatgtatcaaagcgtgcttccatatatctggagagacaacagtatggactatgttactctcatgcaagaaaaaataaatgcattgagagagaaggtaacatgagcttcagatatgcatttgctcgcttggtatgaactatgaagtactagaagtccataaccgaatactgaaggtagctttagaatgacactagcaggattcaggtaggacataattgtgagtctgcctgccctagtcgggattgaagcaacgaatccctcttcagaaaaaaaaatggatatggcacttcaagaacttaagaaacgacatgattctatagttgataaaaggctggtcagatacgcgcacgaggagtgtagctggtggagcaggccgcgtgcatacaaccttggtctggcatgtattcctagaacactttttattttgtttttccatcgtatattttaattgaaatgtatattttaattaaaatgttcaatcactaaaccaattttagatctgtgttcttgatatttttacgaacaaaactagactacacttgctatataaattttaaagatttatttatttatttattttatcccatctttattttggtgcggat

SEQ ID NO: 70181 - DNA, 3069 bp, Zea Mays
ttttttttttgtagtcgatctatccaacaagcccggccggaggtttaaacttatcaaatcacgtgaaaagatagctcgccgacgctgacgcagtccggaaacgcgtcgcccagacgcccacacatccatccacaacggtaaagccgccgcggcgatgtcttccgcacccccgcctccgccgtctctgaaccccgaagtgcccccgcgcatcgtccgcgcccccccgcgccggcctcctccgcgcgcgcccggtccgccgccttgggcggagcgtcggcctgccgtgtccgtcgacctcgaccgcggccgtcgctcggtccgcaccgaggtggacggcgtccgcgccgcgtcgctccctgcgcgacaccgcctccgcgtggagggcaaccggtggcagcgggactggaaggtgtccgaggtcgtcgcgcgcttgctcgcgctgcctcatgccgacgcggacgccgtcgacgccgtgctcaactgctgggccggtcgcttcgcacgccgcaacttcccgctgctcatcagagaaattgcaatttctggatccttgaaacatgctgtgcatgtgttccgctggatgaaaaatcaggagaactactgtgctcgcaatgacatttatggcatgatgattaggttacatgctagacacaacaaggttgatcaagcacgtggcctgttctttgagatgcaagaatggcggtgcaagcctaatactgatacatacaactctttgatccatgctcatgctcgagctggccagtggtgttgggccatcaacattatggatgatatgcaacgtgccgctatacctcctagccgaactacgtataataatgttataaatgcatgtggagctgctggtaactggaagaaagctttagaactttgtaagaagatgactgaaaatggtgtagggccagatttgatcacacacaacattgttttgtctgcttttaagaatggagctcagtactcaaaagccatagcttactttgaaattatgaaatcctctaaagttgcccctgatacatgcactatgaatattgtgatccattgccttgtaaagattgggctgtatggggaagctattgagttgtttaactcaatgagggaaagaagaacaacatgtcatccagatgtcgttacatatactagcataatgtattcttattctgtttgtgggcaagctgaaaattgcaaggcggtctttgatataatggttgctgaaggtgtcagacctaatattgtatcctacaatgcacttttgggtgcttacgcctcacatggtatgcacacagaggccttggagacttttaaattactgaagcaaaatgggttgagacctgatatagtttcctatacctccttacttaatgcttatggtagatctgcacagcctgagaaagctagggaggtctttaatgaaatgaggaagaatgcatgcaagccaaataaagtcagttacaatgcacttattgatgcttatggatctgctggaatgttgaaggaagcgattagtctgttgcatgaaatggagcaagatggcattcaaccggatgttatttcaataagtactctgttaacagcatgtggccgctgcaagcagctaactaaaattgacataattcttgcagcagctaagtctcgagggatccaactaaatacagttgcttacaactcaggcatcggaagttatttaagtttgggagattataagaaagctttggtgttatacacgtcaatgagggcaggcaatgtgaagccagatgctgtgacttacaatatactcattagtggatcttgtaaattgggaaggtatgtagagtctctgaaattttttgaagacatgctggacctgaatattcatttgaccaaggaagtctactcatccgtgatttgctcatatgtcaaacagggcaaattaactgaagcagcatctacttttaattctatgaaagaaactggttgcttccccgatgttttgacatatacgacattaattaaagcatatagtgatgatgggagctggaggagagcatgggacctattcaaagagatggaaaataatggcacacagccagatgctattgtctgttcatccctcatggaagcattgaataagggaggtcaacctgaaagggtccttcagttgatagaattcatgaagcaaaaaaagattcaattgaaccaaaaggcttattttgagataatatcttcatgcaccatgttacgagactggaaaacagcaagtcaaataattgaacatttggattcctctctctcatctatttcttttggcacactcaaccatattttaaattttcttggaaaatgtggcaggacagagagcatgatgaagctgttctataagatggtgacttcatgctctactgtgggcctttctacttatacgattctgctgagaaatctcttaattgtggggaaatggagaaagtatgttgaggttttgcagtggatggaagatgctggagtctgcccaacactctatatgtatcaaagcgtgcttccatatatctggagagacaacagtatggactatgttactctcatgcaagaaaaaataaatgcattgagagagaaggtaacatgagcttcagatatgcatttgctcgcttggtatgaactatgaagtactagaagtccataaccgaatactgaaggtagctttagaatgacactagcaggattcaggtaggacataattgtgagtctgcctgccctagtcgggattgaagcaacgaatccctcttcagaaaaaaaaatggatatggctggtcagatacgcgcacgaggagtgtagctggtggagcaggccgcgtgcatacaaccttggtctggcatgtattcctagaacactttttattttgtttttccatcgtatattttaattgaaatgtatattttaattaaaatgttcaatcactaaaccaattttagatctgtgttcttgatatttttacgaacaaaactagactacacttgctatataaattttaaagatttatttatttatttattttatcccatctttattttggtgcggat

SEQ ID NO: 70182 - DNA, 2949 bp, Zea Mays
ttttttttttgtagtcgatctatccaacaagcccggccggaggtttaaacttatcaaatcacgtgaaaagatagctcgccgacgctgacgcagtccggaaacgcgtcgcccagacgcccacacatccatccacaacggtaaagccgccgcggcgatgtcttccgcacccccgcctccgccgtctctgaaccccgaagtgcccccgcgcatcgtccgcgcccccccgcgccggcctcctccgcgcgcgcccggtccgccgccttgggcggagcgtcggcctgccgtgtccgtcgacctcgaccgcggccgtcgctcggtccgcaccgaggtggacggcgtccgcgccgcgtcgctccctgcgcgacaccgcctccgcgtggagggcaaccggtggcagcgggactggaaggtgtccgaggtcgtcgcgcgcttgctcgcgctgcctcatgccgacgcggacgccgtcgacgccgtgctcaactgctgggccggtcgcttcgcacgccgcaacttcccgctgctcatcagagaaattgcaatttctggatccttgaaacatgctgtgcatgtgttccgctggatgaaaaatcaggagaactactgtgctcgcaatgacatttatggcatgatgattaggttacatgctagacacaacaaggttgatcaagcacgtggcctgttctttgagatgcaagaatggcggtgcaagcctaatactgatacatacaactctttgatccatgctcatgctcgagctggccagtggtgttgggccatcaacattatggatgatatgcaacgtgccgctatacctcctagccgaactacgtataataatgttataaatgcatgtggagctgctggtaactggaagaaagctttagaactttgtaagaagatgactgaaaatggtgtagggccagatttgatcacacacaacattgttttgtctgcttttaagaatggagctcagtactcaaaagccatagcttactttgaaattatgaaatcctctaaagttgcccctgatacatgcactatgaatattgtgatccattgccttgtaaagattgggctgtatggggaagctattgagttgtttaactcaatgagggaaagaagaacaacatgtcatccagatgtcgttacatatactagcataatgtattcttattctgtttgtgggcaagctgaaaattgcaaggcggtctttgatataatggttgctgaaggtgtcagacctaatattgtatcctacaatgcacttttgggtgcttacgcctcacatggtatgcacacagaggccttggagacttttaaattactgaagcaaaatgggttgagacctgatatagtttcctatacctccttacttaatgcttatggtagatctgcacagcctgagaaagctagggaggtctttaatgaaatgaggaagaatgcatgcaagccaaataaagtcagttacaatgcacttattgatgcttatggatctgctggaatgttgaaggaagcgattagtctgttgcatgaaatggagcaagatggcattcaaccggatgttatttcaataagtactctgttaacagcatgtggccgctgcaagcagctaactaaaattgacataattcttgcagcagctaagtctcgagggatccaactaaatacagttgcttacaactcaggcatcggaagttatttaagtttgggagattataagaaagctttggtgttatacacgtcaatgagggcaggcaatgtgaagccagatgctgtgacttacaatatactcattagtggatcttgtaaattgggaaggtatgtagagtctctgaaattttttgaagacatgctggacctgaatattcatttgaccaaggaagtctactcatccgtgatttgctcatatgtcaaacagggcaaattaactgaagcagcatctacttttaattctatgaaagaaactggttgcttccccgatgttttgacatatacgacattaattaaagcatatagtgatgatgggagctggaggagagcatgggacctattcaaagagatggaaaataatggcacacagccagatgctattgtctgttcatccctcatggaagcattgaataagggaggtcaacctgaaagggtccttcagttgatagaattcatgaagcaaaaaaagattcaattgaaccaaaaggcttattttgagataatatcttcatgcaccatgttacgagactggaaaacagcaagtcaaataattgaacatttggattcctctctctcatctatttcttttggcacactcaaccatattttaaattttcttggaaaatgtggcaggacagagagcatgatgaagctgttctataagatggtgacttcatgctctactgtgggcctttctacttatacgattctgctgagaaatctcttaattgtggggaaatggagaaagtatgttgaggttttgcagtggatggaagatgctggagtctgcccaacactctatatgtatcaaagcgtgcttccatatatctggagagacaacagtatggactatgttactctcatgcaagaaaaaataaatgcattgagagagaaggtaacatgagcttcagatatgcatttgctcgcttggtatgaactatgaagtactagaagtccataaccgaatactgaaggtagctttagaatgacactagcaggattcaggtaggacataattgtgagtctgcctgccctagtcgggattgaagcaacgaatccctcttcagaaaaaaaaatggatatggagttgatgggtgaccaagatgactatgctaccgtgctacggatttactgactgcaaaggcctacttgagcgaattcaatagtaggggatatatcattgtgaaaccgtcctctaagtagaggtctcctaatgacctaatccttgataaaaaaaat

SEQ ID NO: 70183 - DNA, 3252 bp, Zea Mays
ttttttttttgtagtcgatctatccaacaagcccggccggaggtttaaacttatcaaatcacgtgaaaagatagctcgccgacgctgacgcagtccggaaacgcgtcgcccagacgcccacacatccatccacaacggtaaagccgccgcggcgatgtcttccgcacccccgcctccgccgtctctgaaccccgaagtgcccccgcgcatcgtccgcgcccccccgcgccggcctcctccgcgcgcgcccggtccgccgccttgggcggagcgtcggcctgccgtgtccgtcgacctcgaccgcggccgtcgctcggtccgcaccgaggtggacggcgtccgcgccgcgtcgctccctgcgcgacaccgcctccgcgtggagggcaaccggtggcagcgggactggaaggtgtccgaggtcgtcgcgcgcttgctcgcgctgcctcatgccgacgcggacgccgtcgacgccgtgctcaactgctgggccggtcgcttcgcacgccgcaacttcccgctgctcatcagagaaattgcaatttctggatccttgaaacatgctgtgcatgtgttccgctggatgaaaaatcaggagaactactgtgctcgcaatgacatttatggcatgatgattaggttacatgctagacacaacaaggttgatcaagcacgtggcctgttctttgagatgcaagaatggcggtgcaagcctaatactgatacatacaactctttgatccatgctcatgctcgagctggccagtggtgttgggccatcaacattatggatgatatgcaacgtgccgctatacctcctagccgaactacgtataataatgttataaatgcatgtggagctgctggtaactggaagaaagctttagaactttgtaagaagatgactgaaaatggtgtagggccagatttgatcacacacaacattgttttgtctgcttttaagaatggagctcagtactcaaaagccatagcttactttgaaattatgaaatcctctaaagttgcccctgatacatgcactatgaatattgtgatccattgccttgtaaagattgggctgtatggggaagctattgagttgtttaactcaatgagggaaagaagaacaacatgtcatccagatgtcgttacatatactagcataatgtattcttattctgtttgtgggcaagctgaaaattgcaaggcggtctttgatataatggttgctgaaggtgtcagacctaatattgtatcctacaatgcacttttgggtgcttacgcctcacatggtatgcacacagaggccttggagacttttaaattactgaagcaaaatgggttgagacctgatatagtttcctatacctccttacttaatgcttatggtagatctgcacagcctgagaaagctagggaggtctttaatgaaatgaggaagaatgcatgcaagccaaataaagtcagttacaatgcacttattgatgcttatggatctgctggaatgttgaaggaagcgattagtctgttgcatgaaatggagcaagatggcattcaaccggatgttatttcaataagtactctgttaacagcatgtggccgctgcaagcagctaactaaaattgacataattcttgcagcagctaagtctcgagggatccaactaaatacagttgcttacaactcaggcatcggaagttatttaagtttgggagattataagaaagctttggtgttatacacgtcaatgagggcaggcaatgtgaagccagatgctgtgacttacaatatactcattagtggatcttgtaaattgggaaggtatgtagagtctctgaaattttttgaagacatgctggacctgaatattcatttgaccaaggaagtctactcatccgtgatttgctcatatgtcaaacagggcaaattaactgaagcagcatctacttttaattctatgaaagaaactggttgcttccccgatgttttgacatatacgacattaattaaagcatatagtgatgatgggagctggaggagagcatgggacctattcaaagagatggaaaataatggcacacagccagatgctattgtctgttcatccctcatggaagcattgaataagggaggtcaacctgaaagggtccttcagttgatagaattcatgaagcaaaaaaagattcaattgaaccaaaaggcttattttgagataatatcttcatgcaccatgttacgagactggaaaacagcaagtcaaataattgaacatttggattcctctctctcatctatttcttttggcacactcaaccatattttaaattttcttggaaaatgtggcaggacagagagcatgatgaagctgttctataagatggtgacttcatgctctactgtgggcctttctacttatacgattctgctgagaaatctcttaattgtggggaaatggagaaagtatgttgaggttttgcagtggatggaagatgctggagtctgcccaacactctatatgtatcaaagcgtgcttccatatatctggagagacaacagtatggactatgttactctcatgcaagaaaaaataaatgcattgagagagaaggtaacatgagcttcagatatgcatttgctcgcttggtatgaactatgaagtactagaagtccataaccgaatactgaaggtagctttagaatgacactagcaggattcaggtaggacataattgtgagtctgcctgccctagtcgggattgaagcaacgaatccctcttcagaaaaaaaaatggatatggcacttcaagaacttaagaaacgacatgattctatagttgataaaaggtaagtcacatgtgaaaagaatgacctcatgagtcatttgctatggcttctaatgatcacagaaattgggccatttgttgctcgtatagcttggcttagaaaaaaccatgttactctcgtagttcgaactcatcttttttctacgacattctaatttatcaatgccttggaaataaacagctttcccatctagtgttatggggcgcgtttgtttgcccggacgtagtctgctcgaacaggaagggaaggtgactaggagttgatgggtgaccaagatgactatgctaccgtgctacggatttactgactgcaaaggcctacttgagcgaattcaatagtaggggatatatcattgtgaaaccgtcctctaagtagaggtctcctaatgacctaatccttgataaaaaaaat

SEQ ID NO: 70184 - DNA, 2978 bp, Zea Mays
ttttttttttgtagtcgatctatccaacaagcccggccggaggtttaaacttatcaaatcacgtgaaaagatagctcgccgacgctgacgcagtccggaaacgcgtcgcccagacgcccacacatccatccacaacggtaaagccgccgcggcgatgtcttccgcacccccgcctccgccgtctctgaaccccgaagtgcccccgcgcatcgtccgcgcccccccgcgccggcctcctccgcgcgcgcccggtccgccgccttgggcggagcgtcggcctgccgtgtccgtcgacctcgaccgcggccgtcgctcggtccgcaccgaggtggacggcgtccgcgccgcgtcgctccctgcgcgacaccgcctccgcgtggagggcaaccggtggcagcgggactggaaggtgtccgaggtcgtcgcgcgcttgctcgcgctgcctcatgccgacgcggacgccgtcgacgccgtgctcaactgctgggccggtcgcttcgcacgccgcaacttcccgctgctcatcagagaaattgcaatttctggatccttgaaacatgctgtgcatgtgttccgctggatgaaaaatcaggagaactactgtgctcgcaatgacatttatggcatgatgattaggttacatgctagacacaacaaggttgatcaagcacgtggcctgttctttgagatgcaagaatggcggtgcaagcctaatactgatacatacaactctttgatccatgctcatgctcgagctggccagtggtgttgggccatcaacattatggatgatatgcaacgtgccgctatacctcctagccgaactacgtataataatgttataaatgcatgtggagctgctggtaactggaagaaagctttagaactttgtaagaagatgactgaaaatggtgtagggccagatttgatcacacacaacattgttttgtctgcttttaagaatggagctcagtactcaaaagccatagcttactttgaaattatgaaatcctctaaagttgcccctgatacatgcactatgaatattgtgatccattgccttgtaaagattgggctgtatggggaagctattgagttgtttaactcaatgagggaaagaagaacaacatgtcatccagatgtcgttacatatactagcataatgtattcttattctgtttgtgggcaagctgaaaattgcaaggcggtctttgatataatggttgctgaaggtgtcagacctaatattgtatcctacaatgcacttttgggtgcttacgcctcacatggtatgcacacagaggccttggagacttttaaattactgaagcaaaatgggttgagacctgatatagtttcctatacctccttacttaatgcttatggtagatctgcacagcctgagaaagctagggaggtctttaatgaaatgaggaagaatgcatgcaagccaaataaagtcagttacaatgcacttattgatgcttatggatctgctggaatgttgaaggaagcgattagtctgttgcatgaaatggagcaagatggcattcaaccggatgttatttcaataagtactctgttaacagcatgtggccgctgcaagcagctaactaaaattgacataattcttgcagcagctaagtctcgagggatccaactaaatacagttgcttacaactcaggcatcggaagttatttaagtttgggagattataagaaagctttggtgttatacacgtcaatgagggcaggcaatgtgaagccagatgctgtgacttacaatatactcattagtggatcttgtaaattgggaaggtatgtagagtctctgaaattttttgaagacatgctggacctgaatattcatttgaccaaggaagtctactcatccgtgatttgctcatatgtcaaacagggcaaattaactgaagcagcatctacttttaattctatgaaagaaactggttgcttccccgatgttttgacatatacgacattaattaaagcatatagtgatgatgggagctggaggagagcatgggacctattcaaagagatggaaaataatggcacacagccagatgctattgtctgttcatccctcatggaagcattgaataagggaggtcaacctgaaagggtccttcagttgatagaattcatgaagcaaaaaaagattcaattgaaccaaaaggcttattttgagataatatcttcatgcaccatgttacgagactggaaaacagcaagtcaaataattgaacatttggattcctctctctcatctatttcttttggcacactcaaccatattttaaattttcttggaaaatgtggcaggacagagagcatgatgaagctgttctataagatggtgacttcatgctctactgtgggcctttctacttatacgattctgctgagaaatctcttaattgtggggaaatggagaaagttttgcagtggatggaagatgctggagtctgcccaacactctatatgtatcaaagcgtgcttccatatatctggagagacaacagtatggactatgttactctcatgcaagaaaaaataaatgcattgagagagaaggtaacatgagcttcagatatgcatttgctcgcttggtatgaactatgaagtactagaagtccataaccgaatactgaaggtagctttagaatgacactagcaggattcaggtaggacataattgtgagtctgcctgccctagtcgggattgaagcaacgaatccctcttcagaaaaaaaaatggatatggcacttcaagaacttaagaaacgacatgattctatagttgataaaaggtaagtcacatgtgaaaagaatgacctcatgagtcatttgctatggcttctaatgatcacagaaattgggccatttgttgctcgtatagcttggcttagaaaaaaccatgttactctcgtagttcgaactcatcttttttctacgac

SEQ ID NO: 70185 - DNA, 575 bp, Zea Mays
attacctcatatctatttaactatagtgaaaaaaaatccgaacaaagaatccatggtggtggaatttcggatcaatataagtggcggagttgggattggttcttggtgcaaaagcaagagcaaaagatcatctctatccgtatcctagctttggtggtccgcagaacaggtggttaagaatagggagaaacaagggttaggtggcagaggaggcagtgaaatccggccaaatctcgacgcaatttttcttgccgattgctggtgcgtagtaagatcgtagctgaatccgtaggacgggcgctaatcggaggaacttgcatcgattcttgcgtgctgacggtaccggcaaggcggcaagataagagatagtgtatttttcgtaccggtacatttcatacacatcgctatgctgtacagacggcgttgaggactggaggatgacttttgtttctaggattttgagttgtagtgagtgtttgtgcaatcacacaagaacaaacatgtgaatatgtgatgtactttcagtggtatataaacgggatggtcctataaaataattctaaattgaattcaat

SEQ ID NO: 70186 - DNA, 1335 bp, Zea Mays
gttatcggttaccgcttgatcacacacacgactacacggctccagcgtgcaccgtgcaacggtgcttgcccagcccttcgccgccgctcctcacctctgcagtgttccttccttcctgtggaagaaaccgcagtaggcagtagcagagctgcagagccggagaggccaggctcgccgctcgtggggaagagatggagcacagaagagtgaaggatcaggagagtgatggcgtatctcagaaggacatagagaactttgataagatatctctttctagcaatacatcaacttcaagtcttagcactgcaggagggccgaaggatagttcgaagctaaagtccattgttacacttgcattgacattgctaacaagttcccaggcaatattgattgtatggtcgaaaagagctggaaagtatgactatagtgtcacacagcaaatttttcggttaagtcaaattcagtgggctgcatttattcttttatgtgctggatgcactactgctcagctcagtccctcgtcagaccatgttcttcagacccctattcaaggtgatggctcttttaagtggttttgcaggagtatatactgaagttatcatcaagaaaaatccttcaagaaatatcaatgcacagaatttttggctgtacatatttgggatgctcttcaatttggttgcaatttgtgtccaggacttcgatgctgtcatgaacaaaggctttttccatggctactcgtttattacagttttgatgattcttaatcatgctttgagtggaattgctgtatcaatggtgatgaaatatgctaacaatattatcaaggtttactcaacatcagttgcaatgcttctgacagcaacagtatccgtcttcttatttggcttccacctgtctcttgcattcttgcttggatccacggtcgtttctgtgtctgtgtacctgcactcagttgggaagctgcagcaacggaactagggtttttcttcctgcatgctgacggaagagtgtttttcttcgaatgccctacaagatcaggcagttggagcgctgtagaatgtttttctagtagcactgtgaacattgttgcaccatgagggagaacgtaagatggaaggcattcctgttcatcagaagaagaataacgtgcgatcattttttttgaaggaataagaattcgtagccaaaggaagaggatagtcatgaagggtactaaactatgacatatgtttggttcctcgcatgaagatcatcctgcatatgggtggtggatatgtgagaatgtatccagtgctcccatacccccccacttcaaagtaataatctagatcaaag

SEQ ID NO: 70187 - DNA, 1413 bp, Zea Mays
atacacccaacttgtcagtttttttttcccagctagctactgctacgccagcacgccactggttatcggttaccgcttgatcacacacacgactacacggctccagcgtgcaccgtgcaacggtgcttgcccagcccttcgccgccgctcctcacctctgcagtgttccttccttcctgtggaagaaaccgcagtaggcagtagcagagctgcagagccggagaggccaggctcgccgctcgtggggaagagatggagcacagaagagtgaaggatcaggagagtgatggcgtatctcagaaggacatagagaactttgataagatatctctttctagcaatacatcaacttcaagtcttagcactgcaggagggccgaaggatagttcgaagctaaagtccattgttacacttgcattgacattgctaacaagttcccaggcaatattgattgtatggtcgaaaagagctggaaagtatgactatagtgtcacacagcaaatttttcggttaagtcaaattcagtgggctgcatttattcttttatgtgctggatgcactactgctcagctcagtccctcgtcagaccatgttcttcagacccctattcaaggttgggtgatggcaattgtgatggctcttttaagtggttttgcaggagtatatactgaagttatcatcaagaaaaatccttcaagaaatatcaatgcacagaatttttggctgtacatatttgggatgctcttcaatttggttgcaatttgtgtccaggacttcgatgctgtcatgaacaaaggctttttccatggctactcgtttattacagttttgatgattcttaatcatgctttgagtggaattgctgtatcaatggtgatgaaatatgctaacaatattatcaaggtttactcaacatcagttgcaatgcttctgacagcaacagtatccgtcttcttatttggcttccacctgtctcttgcattcttgcttggatccacggtcgtttctgtgtctgtgtacctgcactcagttgggaagctgcagcaacggaactagggtttttcttcctgcatgctgacggaagagtgtttttcttcgaatgccctacaagatcaggcagttggagcgctgtagaatgtttttctagtagcactgtgaacattgttgcaccatgagggagaacgtaagatggaaggcattcctgttcatcagaagaagaataacgtgcgatcattttttttgaaggaataagaattcgtagccaaaggaagaggatagtcatgaagggtactaaactatgacatatgtttggttcctcgcatgaagatcatcctgcatatgggtggtggatatgtgagaatgtatccagtgctcccatacccccccacttcaaagtaataatctagatcaaag

SEQ ID NO: 70188 - DNA, 1743 bp, Zea Mays
ggaagatctttctgtgcagtcacggccctcttccttcttccatcgccactcactagtcactattctgcccctccgaccgtgtgtgcacaggaagggccagtcacggcaccgcagcatcgcggtcgcagattgccgtgccgagcgaagcgaccacaacaaagcggccagcgaggctctccgacaccgagccgcgcgcacgcaacgatgcccttcctgctcacgccgggcgctcgggcggtgccctcaccgtcaacgctctcgcgcctactgcttccgctccacctacaaattactaatggccggcacaaccaccagcacggtcacgtccccgcctctcccctcctataccctcgcctccgcaaccgccgcagccgattcttcgcggcctcctcctcctcctcctcgcctcagatggcggcgcctgccgacgccgccggtggctcctctgacgcgttcgaggtgatccgcgttcaccaggcaaaagctgttcgtctttctccagttgaagaaatacggaccattatggaccgaagtgtcagatgtgttcttgctacccattctcaggatcatgctggttatccatctggttcaatggttgattttgcatgtgatcaggatggttaccccatattagcagtgagtagtttagcagtccattcaaagaatctctctggaaatcctaaatgctcacttcttgttgccaaagatcctgaggacagaactgatactgtaatcactgtatatggcgacgctgttcctgtttctgacgaagaaaaagattcagtgagaagtgcttacctacgcaggcaccctgatgctttctgggttgactttggtgacttcagtttcctgcacatcaaacctaaagctgtgcgctatgtatctggcgttgcaactgctctccttggttctggagaattcaatgttgcagagtataaggaagcaaaagttgatccaatatctcaattctcaactcctatcacaagccatatgaacaaggatcatgccaatgatacaaagctcattgtgcaacactccactactgtcaaggtggattttgcttatatgctggacgtggacagccttggttttaatgtgaaggctggttatgatggaagtgttctgaagttgagaatccccttcccaagacaggcgcaagacaggaagtgggtcctgactcttgactctcttaaccttataatctgacatatatctcttcttttcctcttaatttgtgtgctattaagctcagatgctttttcttcatggttgtctttcagtatgttttgtacaccatttaattgatgcctaaaatacagctattcctgaatatttcttgacgggttctctgacatgggcatgccactcttgtacagggatgttaagacactaattgtggaaatgctccaagctgcaagagcctcatcttcagatcctgaatgatgtcgtcggtctggaatgtgaagaatcgtgcaaattgaagtaaacctaatgaataagagttattgggtttccgtccaatctctgcaccaactgaaggtggggccacagacactccatggattgatacacgaccttgtatataatataacaaagagcgcttgagccttgaagtacttgtagttgaatgaatacaaagcgatttcactatattgtacttactgacatgcataacaatttcaacggattgttcaccaaatgactgaactaattttaaccaaacaacttaattttttcacggca

SEQ ID NO: 70189 - DNA, 1537 bp, Zea Mays
ggaagatctttctgtgcagtcacggccctcttccttcttccatcgccactcactagtcactattctgcccctccgaccgtgtgtgcacaggaagggccagtcacggcaccgcagcatcgcggtcgcagattgccgtgccgagcgaagcgaccacaacaaagcggccagcgaggctctccgacaccgagccgcgcgcacgcaacgatgcccttcctgctcacgccgggcgctcgggcggtgccctcaccgtcaacgctctcgcgcctactgcttccgctccacctacaaattactaatggccggcacaaccaccagcacggtcacgtccccgcctctcccctcctataccctcgcctccgcaaccgccgcagccgattcttcgcggcctcctcctcctcctcctcgcctcagatggcggcgcctgccgacgccgccggtggctcctctgacgcgttcgaggtgatccgcgttcaccaggcaaaagctgttcgtctttctccagttgaagaaatacggaccattatggaccgaagtgtcagatgtgttcttgctacccattctcaggatcatgctggttatccatctggttcaatggttgattttgcatgtgatcaggatggttaccccatattagcagtgagtagtttagcagtccattcaaagaatctctctggaaatcctaaatgctcacttcttgttgccaaagatcctgaggacagaactgatactgtaatcactgtatatggcgacgctgttcctgtttctgacgaagaaaaagattcagtgagaagtgcttacctacgcaggcaccctgatgctttctgggttgactttggtgacttcagtttcctgcacatcaaacctaaagctgtgcgctatgtatctggcgttgcaactgctctccttggttctggagaattcaatgttgcagagtataaggaagcaaaagttgatccaatatctcaattctcaactcctatcacaagccatatgaacaaggatcatgccaatgatacaaagctcattgtgcaacactccactactgtcaaggtggattttgcttatatgctggacgtggacagccttggttttaatgtgaaggctggttatgatggaagtgttctgaagttgagaatccccttcccaagacaggcgcaagacaggaagtggggatgttaagacactaattgtggaaatgctccaagctgcaagagcctcatcttcagatcctgaatgatgtcgtcggtctggaatgtgaagaatcgtgcaaattgaagtaaacctaatgaataagagttattgggtttccgtccaatctctgcaccaactgaaggtggggccacagacactccatggattgatacacgaccttgtatataatataacaaagagcgcttgagccttgaagtacttgtagttgaatgaatacaaagcgatttcactatattgtacttactgacatgcataacaatttcaacggattgttcaccaaatgactgaactaattttaaccaaacaacttaattttttcacggca

SEQ ID NO: 70190 - DNA, 1155 bp, Zea Mays
gtcgtcaatgcttttgtggcgtgcgcgaggcagatggcggcgcctgccgacgccgccggtggctcctctgacgcgttcgaggtgatccgcgttcaccaggcaaaagctgttcgtctttctccagttgaagaaatacggaccattatggaccgaagtgtcagatgtgttcttgctacccattctcaggatcatgctggttatccatctggttcaatggttgattttgcatgtgatcaggatggttaccccatattagcagtgagtagtttagcagtccattcaaagaatctctctggaaatcctaaatgctcacttcttgttgccaaagatcctgaggacagaactgatactgtaatcactgtatatggcgacgctgttcctgtttctgacgaagaaaaagattcagtgagaagtgcttacctacgcaggcaccctgatgctttctgggttgactttggtgacttcagtttcctgcacatcaaacctaaagctgtgcgctatgtatctggcgttgcaactgctctccttggttctggagaattcaatgttgcagagtataaggaagcaaaagttgatccaatatctcaattctcaactcctatcacaagccatatgaacaaggatcatgccaatgatacaaagctcattgtgcaacactccactactgtcaaggtggattttgcttatatgctggacgtggacagccttggttttaatgtgaaggctggttatgatggaagtgttctgaagttgagaatccccttcccaagacaggcgcaagacaggaaggatgttaagacactaattgtggaaatgctccaagctgcaagagcctcatcttcagatcctgaatgatgtcgtcggtctggaatgtgaagaatcgtgcaaattgaagtaaacctaatgaataagagttattgggtttccgtccaatctctgcaccaactgaaggtggggccacagacactccatggattgatacacgaccttgtatataatataacaaagagcgcttgagccttgaagtacttgtagttgaatgaatacaaagcgatttcactatattgtacttactgacatgcataacaatttcaacggattgttcaccaaatgactgaactaattttaaccaaacaacttaattttttcacggca

SEQ ID NO: 70191 - DNA, 2235 bp, Zea Mays
ataataataataataatgattaaatataattagtagtttagttaagctttcatcaataaatactttgttcataaatactttcttcataagtttagcttgtccttgtaaatggaaaaatgataaatagttgatctataattcagaacactacaatggtattgactattaagcacacagcacttgcaacagaatgaaatatactacatcgaacttcgatgaatagcattgcaaatcaaaacaggatgatatgaacaacaatcatggccaatagggggctacgaacaatttatcacaaaatacaaaatggaaacacacagcagcagcacgcaatggagtggacccatacagagtatactcaaaataactcaaccattaagcaccagcgaactaattattaaccggctactcaatagtcatcgccctcgtcaccctcgtcatctgcaccctctgcgccgacttcctcatagtccttctcaagagcagccaagtcctcacgggcctcggagaactcaccctcttccataccctcaccgacgtaccagtgaacgaacgcccgcttggcgtacataaggtcgaacttgtgatcgatgcgcgagaacacctcagcaacggcagtgttgttgctgatcatacacacggcacgctggacctttgccaggtcgcctccagggacaacagacggtggctggtagttgatgccacacttgaatccggtggggcaccttccacaaactggacagttctcttggtcttgatggttgcgactgcagcattgacatccttgggaacaacatcaccacggtacatcaagcagcaagccatgtacttcccatgccttgggtcacacttggccatcatgcttgagggctcaaagacggcattggtgatttcaggaacagagagctgctcatggtaagccttctcagcagagattacaggggcatatgaggaaagcatgaaatgtatacgtgggtatggaacaaggttggtctggaactcggtgacatccacattgatagcaccatcaaacctcagggaggtggttagagatgatatgatctgtgagatcagcctgttcaagttggtgtaggttggcctttcgatgtcaagggacctcctgcatatgtcatagatagcctcgttgtccaggaggactgcaacatcagtgtgctcaagcaaggagtgggtggagaggacactgttgtatggctctacaacagctgttgacacctgcaatccagggtggcattagaggaaaagttaaaccatggaccagacccaaaatgatcgatcatctctacccattgtccacataacagctaagatgcaaaaagaaactactctcatgagcaagctgaatggcccacatcacatggacaggagggagcagcactataggataatgttggcacatatgcgatgcatgatttcaagacactcataaagatgacctgtggcatgtgacagttgtactaatcatggtctaaaccatgcacaggaaggtcctcctcactaaccagaagtccacaacagttgattttttgtccacacatgatttaaataatgctaggctggtccaatgatcagtgtctatctgtgtgatttagaaggcaaggacagtgctgctaaattacatggtccgtagattaattctatataaaacaattccctgttggttgacaaatataaattgttaacctgcttcatgtattatttccatttctcagatatttaagccagcatctcagtttggaaagaatagatatacgaatactttttttgagaaatcaccggatactaggttgctaatataaggttttagcataggtaaggtcatacctgtggggaaggataaatggtgaaaccaagcttggatttcttgccataatcaactgaaaggcgctccaataaaagtgacccaagtccagagccagtcccaccaccaacagcattgaacaccaagaatccctgcagcccagtgcagttgtctgcaagcttgcgcacacggtccaggcatagatcgacaatctccttcccaactgcattccacataattagaattgaacatatccacagtcacagaagcataatacccactcctattacatattcacatacacatggtgaattaccagtgtagtggccacgggcaaagttgttagctgcgtcttccttgcccgagatgagctgctctgggtggaagagttggcggtacgagccagaaagaaaaaaaaa

SEQ ID NO: 70192 - DNA, 1605 bp, Zea Mays
ataataataataataatgattaaatataattagtagtttagttaagctttcatcaataaatactttgttcataaatactttcttcataagtttagcttgtccttgtaaatggaaaaatgataaatagttgatctataattcagaacactacaatggtattgactattaagcacacagcacttgcaacagaatgaaatatactacatcgaacttcgatgaatagcattgcaaatcaaaacaggatgatatgaacaacaatcatggccaatagggggctacgaacaatttatcacaaaatacaaaatggaaacacacagcagcagcacgcaatggagtggacccatacagagtatactcaaaataactcaaccattaagcaccagcgaactaattattaaccggctactcaatagtcatcgccctcgtcaccctcgtcatctgcaccctctgcgccgacttcctcatagtccttctcaagagcagccaagtcctcacgggcctcggagaactcaccctcttccataccctcaccgacgtaccagtgaacgaacgcccgcttggcgtacataaggtcgaacttgtgatcgatgcgcgagaacacctcagcaacggcagtgttgttgctgatcatacacacggcacgctggacctttgccaggtcgcctccagggacaacagacggtggctggtagttgatgccacacttgaatccggtggggcaccttccacaaactggacagttctcttggtcttgatggttgcgactgcagcattgacatccttgggaacaacatcaccacggtacatcaagcagcaagccatgtacttcccatgccttgggtcacacttggccatcatgcttgagggctcaaagacggcattggtgatttcaggaacagagagctgctcatggtaagccttctcagcagagattacaggggcatatgaggaaagcatgaaatgtatacgtgggtatggaacaaggttggtctggaactcggtgacatccacattgatagcaccatcaaacctgttcaagttggtgtaggttggcctttcgatgtcaagggacctcctgcatatgtcatagatagcctcgttgtccaggaggactgcaacatcagtgtgctcaagcaaggagtggttgtctgcaagcttgcgcacacggtccaggcatagatcgacaatctccttcccaactgcattccacataattagaattgaacatatccacagtcacagaagcataatacccactcctattacatattcacatacacatggtgaattaccagtgtagtggccacgggcaaagttgttagctgcgtcttccttgcccgagatgagctgctctgggtggaagagttggcggtacgagccagtgcgaacctcatcaatgacagtgggttcaaggtcgacgaagatggccctcggcacatgcttgccagaaccggtctcgctgaagaacgtgttgaaggcatcatcattcacctgggcatggtgccatcgggctcgatgccgtgctcgaggcagtagagctcccagcaggcgttgccgacctggatcccggcctggccgatgtggatgctgatgatctctctcatc

SEQ ID NO: 70193 - DNA, 1713 bp, Zea Mays
ataataataataataatgattaaatataattagtagtttagttaagctttcatcaataaatactttgttcataaatactttcttcataagtttagcttgtccttgtaaatggaaaaatgataaatagttgatctataattcagaacactacaatggtattgactattaagcacacagcacttgcaacagaatgaaatatactacatcgaacttcgatgaatagcattgcaaatcaaaacaggatgatatgaacaacaatcatggccaatagggggctacgaacaatttatcacaaaatacaaaatggaaacacacagcagcagcacgcaatggagtggacccatacagagtatactcaaaataactcaaccattaagcaccagcgaactaattattaaccggctactcaatagtcatcgccctcgtcaccctcgtcatctgcaccctctgcgccgacttcctcatagtccttctcaagagcagccaagtcctcacgggcctcggagaactcaccctcttccataccctcaccgacgtaccagtgaacgaacgcccgcttggcgtacataaggtcgaacttgtgatcgatgcgcgagaacacctcagcaacggcagtgttgttgctgatcatacacacggcacgctggacctttgccaggtcgcctccagggacaacagacggtggctggtagttgatgccacacttgaatccggtggggcaccttccacaaactggacagttctcttggtcttgatggttgcgactgcagcattgacatccttgggaacaacatcaccacggtacatcaagcagcaagccatgtacttcccatgccttgggtcacacttggccatcatgcttgagggctcaaagacggcattggtgatttcaggaacagagagctgctcatggtaagccttctcagcagagattacaggggcatatgaggaaagcatgaaatgtatacgtgggtatggaacaaggttggtctggaactcggtgacatccacattgatagcaccatcaaacctcagggaggtggttagagatgatatgatctgtgagatcagcctgttcaagttggtgtaggttggcctttcgatgtcaagggacctcctgcatatgtcatagatagcctcgttgtccaggaggactgcaacatcagtgcgctccaataaaagtgacccaagtccagagccagtcccaccaccaacagcattgaacaccaagaatccctgcagcccagtgcagttgtctgcaagcttgcgcacacggtccaggcatagatcgacaatctccttcccaactgcattccacataattagaattgaacatatccacagtcacagaagcataatacccactcctattacatattcacatacacatggtgaattaccagtgtagtggccacgggcaaagttgttagctgcgtcttccttgcccgagatgagctgctctgggtggaagagttggcggtacgagccagtgcgaacctcatcaatgacagtgggttcaaggtcgacgaagatggccctcggcacatgcttgccagaaccggtctcgctgaagaacgtgttgaaggcatcatcattcacctgggcatggtgccatcgggctcgatgccgtgctcgaggcagtagagctcccagcaggcgttgccgacctggatcccggcctggccgatgtggatgctgatgatctctctcatc

SEQ ID NO: 70194 - DNA, 2403 bp, Zea Mays
ataataataataataatgattaaatataattagtagtttagttaagctttcatcaataaatactttgttcataaatactttcttcataagtttagcttgtccttgtaaatggaaaaatgataaatagttgatctataattcagaacactacaatggtattgactattaagcacacagcacttgcaacagaatgaaatatactacatcgaacttcgatgaatagcattgcaaatcaaaacaggatgatatgaacaacaatcatggccaatagggggctacgaacaatttatcacaaaatacaaaatggaaacacacagcagcagcacgcaatggagtggacccatacagagtatactcaaaataactcaaccattaagcaccagcgaactaattattaaccggctactcaatagtcatcgccctcgtcaccctcgtcatctgcaccctctgcgccgacttcctcatagtccttctcaagagcagccaagtcctcacgggcctcggagaactcaccctcttccataccctcaccgacgtaccagtgaacgaacgcccgcttggcgtacataaggtcgaacttgtgatcgatgcgcgagaacacctcagcaacggcagtgttgttgctgatcatacacacggcacgctggacctttgccaggtcgcctccagggacaacagacggtggctggtagttgatgccacacttgaatccggtggggcaccttccacaaactggacagttctcttggtcttgatggttgcgactgcagcattgacatccttgggaacaacatcaccacggtacatcaagcagcaagccatgtacttcccatgccttgggtcacacttggccatcatgcttgagggctcaaagacggcattggtgatttcaggaacagagagctgctcatggtaagccttctcagcagagattacaggggcatatgaggaaagcatgaaatgtatacgtgggtatggaacaaggttggtctggaactcggtgacatccacattgatagcaccatcaaacctgttcaagttggtgtaggttggcctttcgatgtcaagggacctcctgcatatgtcatagatagcctcgttgtccaggaggactgcaacatcagtgtgctcaagcaaggagtgggtggagaggacactgttgtatggctctacaacagctgttgacacctgcaatccagggtggcattagaggaaaagttaaaccatggaccagacccaaaatgatcgatcatctctacccattgtccacataacagctaagatgcaaaaagaaactactctcatgagcaagctgaatggcccacatcacatggacaggagggagcagcactataggataatgttggcacatatgcgatgcatgatttcaagacactcataaagatgacctgtggcatgtgacagttgtactaatcatggtctaaaccatgcacaggaaggtcctcctcactaaccagaagtccacaacagttgattttttgtccacacatgatttaaataatgctaggctggtccaatgatcagtgtctatctgtgtgatttagaaggcaaggacagtgctgctaaattacatggtccgtagattaattctatataaaacaattccctgttggttgacaaatataaattgttaacctgcttcatgtattatttccatttctcagatatttaagccagcatctcagtttggaaagaatagatatacgaatactttttttgagaaatcaccggatactaggttgctaatataaggttttagcataggtaaggtcatacctgtggggaaggataaatggtgaaaccaagcttggatttcttgccataatcaactgaaaggcgctccaataaaagtgacccaagtccagagccagtcccaccaccaacagcattgaacaccaagaatccctgcagcccagtgcagttgtctgcaagcttgcgcacacggtccaggcatagatcgacaatctccttcccaactgcattccacataattagaattgaacatatccacagtcacagaagcataatacccactcctattacatattcacatacacatggtgaattaccagtgtagtggccacgggcaaagttgttagctgcgtcttccttgcccgagatgagctgctctgggtggaagagttggcggtacgagccagtgcgaacctcatcaatgacagtgggttcaaggtcgacgaagatggccctcggcacatgcttgccagaaccggtctcgctgaagaacgtgttgaaggcatcatcattcacctgggcatggtgccatcgggctcgatgccgtgctcgaggcagtagagctcccagcaggcgttgccgacctggatcccggcctggccgatgtggatgctgatgatctctctcatc

SEQ ID NO: 70195 - DNA, 2237 bp, Zea Mays
cctagcgccttttggaaccttggccacagatcacttcaagaaatactatgatgctgtcatgccatacctaaaatctatcttgatgcatgcaactgataagtccaataggatgctccgtgccaagtccatggagtgtataagtttggtaggaatggctgtgggtaaggacaagttcagagacgacgcaaggcaggttatggaagtacttatggctttgcaaggagctccaatggaaactgatgatccaattaccagctacatgttgcagtctgctcaactcaagcctgatgttacagttacttcagctgaatcagatgacgatattgcatcagatgacgatagcattgaaacaattacacttggtgacaaaagaataggaattcgaactagtgtgctggaagagaaagcaacagcttgcaacatgctgtgctgttatgctgatgagcttaaggagggtttcttcccatggattgatcaggttgccccaacgttggttcctctgctgaagttttacttccatgaggaagtcaggagagctgctgttgcggccatgccggaacttctacgctcagcaaaattggctgttgagaaagggcaggctcaaggacgtgatgagtcttatgtcaaacagttgtctgactacataattgcagcacttgttgaagcactgcacaaggagccagaaacagaaatgtgctcatccatgctggattctttaaacgagtgtatgcagctttcgggtcttttgcttgatgaagcccaagtacgagctatcatagatgagattaaaaacgtcattatagccagtgccacccggaaaagagaacgctcggagagaacaaaagcggaagattttgatgctgatgaaggagagctactcaaagaagagaatgaacaggaggaggaagtatttgatcaggtcagtgagtgcctagggactttgattaaaaccttcaaaggttctttcttgccgttttttgaagagctctctatgtacattacaccaatgttgggaaaagataaaacacctgaagagagaaggatagctatctgtatttttgatgatgttgcagagcaatgccgtgaatcagctctgaagtattatgacacataccttcctttccttttggaggcatcaaacgatgaaaattcagatgttcggcaggctgctgtctatggtgtgggtgtatgtgccgagtttggtggtcatgtttttcgccctctagtaggagaggccttatcaaaattaaacaatgttataaggcatcctgatgcacgacttcctgataatatcatggcatatgacaatgctgtttcggcgcttggaaaaatatgccaatttcatcgggatggtattgatgcagctcaggttgttccagcctggcttagctgcttgcctataaaagacgacaaggttgaagctaaagttgtacatggacagctttgctccatggtggagaggtcggatgctgaaattcttgggcctcacagtcagtatcttcctaaaattgtttcaatttttgcagaggttttgtgcaatggaacagaacttgccactgatgaaactagaaacaggatggtgaatgtcttgaggcgtttccagcagactttgcctcctgattttcttgcatcgacgttttccaacttgcaaccgcagcaacagctactgctacagtccatcttgtcgacatagttgttttttctgtcgctgcaaggtgggggtttgttatttttcttgatgttttatcagccaattctttatgtcgtatctttttctggtggggtactttgtgaatgcattgtttgcttcaacgaactggaggctgtcaccacacatggttttgatagagtgtatattgtctgtcttgtattcgaaatatggtttgagatgtgctgcaacagaggtgcaagggaaacggtgggatttattgtcggatgggttggacatttgcagttttttggtaatgagatcactataagtggagttactttctgcttctctttgaagccattttaattctgttgaaaattattaaaatgtgctctgttggaagatgcagaagctcctccgggttcatactggtaattggtgaaataaaaagcagtcttatctttctgaatgaaccttgggttcgtgtgtatttaagctggatcgttaatttattctgagataaaaccgtagcaattcgctaatgtgttcggagatcaaaccgttgcaaatttccatctggcgatat

SEQ ID NO: 70196 - DNA, 3952 bp, Zea Mays
ctcccccacgtccgcctgctcgcgctcgagctcgagccgcatctcccaaaccctacccatataaaatattaagcccaacgcccgagtctctctctctctcaacttcccttcccaccaccctcaccctccccttcccgccgccaccaccagttcaaccctctctccctcaaaccctagccgccgccgcgctcgttccggattcggttccgatccgatggcgtccgccgaggaccaggccgcggccgccgcgctgctggggggtgacccggcggcgttcgacgcgctgctctcgacgctcatgtcgtcctccaacgccgaccgttccgccgccgaggccgccttccaccgcctccgggcctcgcacccggagcccctcgcgctgcggctcgccacctcgctggcggcgcccaccacccccgccgacctgcgcgccatggcgggggtcctcctccgcaaggtcctctccccggccccgtcttccgacgcgtcctccaacaacgccacgcccccggcgccgctctggccgcagctctcccccgcggggcaggccgcgctcaaggcgcacctcctctccgcgctccagtccgatcctcccaagcccatcgccaagaaggtctgcgacgctatctctgagctcgcggcctcgctgctgcctgagaacgcctggcccgagctgctgccgttcctcttccgcgccgcgtcggggcctgatgcgcacaaccttcaggagtcagcgctgctcatcttcgcgaggctggcggattacatcgcagaatctctcctcgaccatctcatgactatccacaacctcctcgcctcagccctggcgcatcccacgtctcctgatgttcggattgcggccctgggtgccgcagtcaaccttgttcagtgcctgccaaccaactccgacagggataagatgcaggatttgctcccagcaatgatgagggcgctcactgattgcctaaactctggccaggaagtctctgcgcaggaggcactggagctgctggtggagctcgctggcgccgagccaaggttcctgaggaggcagattgctgatgtggtaggggcaatgttgcaagttgctgaggctacacagctggaagatgggaccagacacttggcggtggagtttgtgattactctagctgaggctagagagcgtgcaccaggaatgatgcggcgactcccgcagtttgttggtaggctgtttgcagtgctgatgcagatgctgcttgatgtcgaggatgaccctgcttggcactctgctgaaactgaagatgaggacgcaggggaagggaacaactatggagtggcgcaggagtgccttgaccgcctttccatcgccattggtgggaacgcaattgtaccaattgcttctgagctgctaccacagtacctgtcttctgctgagtggcagaagcaccatgctgcgctcattacacttgcacagattgcggaaggatgtgcaaaggttatgcttaaaaatttggaacaagtcgtttcgatgatattgaatggatttcaacatccccacccacgtgtgagatgggctgctatcaatgccatcggtcagctttctacggatttgggcccagatcttcaagttcattaccaccagcaggtgctgcctgcattggccaatgctatggatgatttccagaatccacgagttcaggcacatgctgcttcagcgattttgaattttagtgagaattgtacaccggaaattttgacgccttacctggatggaattgtgaacaaattacttgttcttcttcagaatggaaagcaaatggtgcaggagggagcattgacagctttagcgtcagtagcagattcatcacaggatcacttcaagaaatactatgatgctgtcatgccatacctaaaatctatcttgatgcatgcaactgataagtccaataggatgctccgtgccaagtccatggagtgtataagtttggtaggaatggctgtgggtaaggacaagttcagagacgacgcaaggcaggttatggaagtacttatggctttgcaaggagctccaatggaaactgatgatccaattaccagctacatgttgcaggcttgggctaggctatgcaaatgtcttggacaggatttccttccttacatgagtgttgttatgcctccactgcttcagtctgctcaactcaagcctgatgttacagttacttcagctgaatcagatgacgatattgcatcagatgacgatagcattgaaacaattacacttggtgacaaaagaataggaattcgaactagtgtgctggaagagaaagcaacagcttgcaacatgctgtgctgttatgctgatgagcttaaggagggtttcttcccatggattgatcaggttgccccaacgttggttcctctgctgaagttttacttccatgaggaagtcaggagagctgctgttgcggccatgccggaacttctacgctcagcaaaattggctgttgagaaagggcaggctcaaggacgtgatgagtcttatgtcaaacagttgtctgactacataattgcagcacttgttgaagcactgcacaaggagccagaaacagaaatgtgctcatccatgctggattctttaaacgagtgtatgcagctttcgggtcttttgcttgatgaagcccaagtacgagctatcatagatgagattaaaaacgtcattatagccagtgccacccggaaaagagaacgctcggagagaacaaaagcggaagattttgatgctgatgaaggagagctactcaaagaagagaatgaacaggaggaggaagtatttgatcaggtcagtgagtgcctagggactttgattaaaaccttcaaaggttctttcttgccgttttttgaagagctctctatgtacattacaccaatgttgggaaaagataaaacacctgaagagagaaggatagctatctgtatttttgatgatgttgcagagcaatgccgtgaatcagctctgaagtattatgacacataccttcctttccttttggaggcatcaaacgatgaaaattcagatgttcggcaggctgctgtctatggtgtgggtgtatgtgccgagtttggtggtcatgtttttcgccctctagtaggagaggccttatcaaaattaaacaatgttataaggcatcctgatgcacgacttcctgataatatcatggcatatgacaatgctgtttcggcgcttggaaaaatatgccaatttcatcgggatggtattgatgcagctcaggttgttccagcctggcttagctgcttgcctataaaagacgacaaggttgaagctaaagttgtacatggacagctttgctccatggtggagaggtcggatgctgaaattcttgggcctcacagtcagtatcttcctaaaattgtttcaatttttgcagaggttttgtgcaatggaacagaacttgccactgatgaaactagaaacaggatggtgaatgtcttgaggcgtttccagcagactttgcctcctgattttcttgcatcgacgttttccaacttgcaaccgcagcaacagctactgctacagtccatcttgtcgacatagttgttttttctgtcgctgcaagaggtgcaagggaaacggtgggatttattgtcggatgggttggacatttgcagttttttggtaatgagatcactataagtggagttactttctgcttctctttgaagccattttaattctgttgaaaattattaaaatgtgctctgttggaagatgcagaagctcctccgggttcatactggtaattggtgaaataaaaagcagtcttatctttctgaatgaaccttgggttcgtgtgtatttaagctggatcgttaatttattctgagataaaaccgtagcaattcgctaatgtgttcggagatcaaaccgttgcaaatttccatctggcgatat

SEQ ID NO: 70197 - DNA, 4109 bp, Zea Mays
ctcccccacgtccgcctgctcgcgctcgagctcgagccgcatctcccaaaccctacccatataaaatattaagcccaacgcccgagtctctctctctctcaacttcccttcccaccaccctcaccctccccttcccgccgccaccaccagttcaaccctctctccctcaaaccctagccgccgccgcgctcgttccggattcggttccgatccgatggcgtccgccgaggaccaggccgcggccgccgcgctgctggggggtgacccggcggcgttcgacgcgctgctctcgacgctcatgtcgtcctccaacgccgaccgttccgccgccgaggccgccttccaccgcctccgggcctcgcacccggagcccctcgcgctgcggctcgccacctcgctggcggcgcccaccacccccgccgacctgcgcgccatggcgggggtcctcctccgcaaggtcctctccccggccccgtcttccgacgcgtcctccaacaacgccacgcccccggcgccgctctggccgcagctctcccccgcggggcaggccgcgctcaaggcgcacctcctctccgcgctccagtccgatcctcccaagcccatcgccaagaaggtctgcgacgctatctctgagctcgcggcctcgctgctgcctgagaacgcctggcccgagctgctgccgttcctcttccgcgccgcgtcggggcctgatgcgcacaaccttcaggagtcagcgctgctcatcttcgcgaggctggcggattacatcgcagaatctctcctcgaccatctcatgactatccacaacctcctcgcctcagccctggcgcatcccacgtctcctgatgttcggattgcggccctgggtgccgcagtcaaccttgttcagtgcctgccaaccaactccgacagggataagatgcaggatttgctcccagcaatgatgagggcgctcactgattgcctaaactctggccaggaagtctctgcgcaggaggcactggagctgctggtggagctcgctggcgccgagccaaggttcctgaggaggcagattgctgatgtggtaggggcaatgttgcaagttgctgaggctacacagctggaagatgggaccagacacttggcggtggagtttgtgattactctagctgaggctagagagcgtgcaccaggaatgatgcggcgactcccgcagtttgttggtaggctgtttgcagtgctgatgcagatgctgcttgatgtcgaggatgaccctgcttggcactctgctgaaactgaagatgaggacgcaggggaagggaacaactatggagtggcgcaggagtgccttgaccgcctttccatcgccattggtgggaacgcaattgtaccaattgcttctgagctgctaccacagtacctgtcttctgctgagtggcagaagcaccatgctgcgctcattacacttgcacagattgcggaaggatgtgcaaaggttatgcttaaaaatttggaacaagtcgtttcgatgatattgaatggatttcaacatccccacccacgtgtgagatgggctgctatcaatgccatcggtcagctttctacggatttgggcccagatcttcaagttcattaccaccagcaggtgctgcctgcattggccaatgctatggatgatttccagaatccacgagttcaggcacatgctgcttcagcgattttgaattttagtgagaattgtacaccggaaattttgacgccttacctggatggaattgtgaacaaattacttgttcttcttcagaatggaaagcaaatggtgcaggagggagcattgacagctttagcgtcagtagcagattcatcacaggatcacttcaagaaatactatgatgctgtcatgccatacctaaaatctatcttgatgcatgcaactgataagtccaataggatgctccgtgccaagtccatggagtgtataagtttggtaggaatggctgtgggtaaggacaagttcagagacgacgcaaggcaggttatggaagtacttatggctttgcaaggagctccaatggaaactgatgatccaattaccagctacatgttgcaggcttgggctaggctatgcaaatgtcttggacaggatttccttccttacatgagtgttgttatgcctccactgcttcagtctgctcaactcaagcctgatgttacagttacttcagctgaatcagatgacgatattgcatcagatgacgatagcattgaaacaattacacttggtgacaaaagaataggaattcgaactagtgtgctggaagagaaagcaacagcttgcaacatgctgtgctgttatgctgatgagcttaaggagggtttcttcccatggattgatcaggttgccccaacgttggttcctctgctgaagttttacttccatgaggaagtcaggagagctgctgttgcggccatgccggaacttctacgctcagcaaaattggctgttgagaaagggcaggctcaaggacgtgatgagtcttatgtcaaacagttgtctgactacataattgcagcacttgttgaagcactgcacaaggagccagaaacagaaatgtgctcatccatgctggattctttaaacgagtgtatgcagctttcgggtcttttgcttgatgaagcccaagtacgagctatcatagatgagattaaaaacgtcattatagccagtgccacccggaaaagagaacgctcggagagaacaaaagcggaagattttgatgctgatgaaggagagctactcaaagaagagaatgaacaggaggaggaagtatttgatcaggtcagtgagtgcctagggactttgattaaaaccttcaaaggttctttcttgccgttttttgaagagctctctatgtacattacaccaatgttgggaaaagataaaacacctgaagagagaaggatagctatctgtatttttgatgatgttgcagagcaatgccgtgaatcagctctgaagtattatgacacataccttcctttccttttggaggcatcaaacgatgaaaattcagatgttcggcaggctgctgtctatggtgtgggtgtatgtgccgagtttggtggtcatgtttttcgccctctagtaggagaggccttatcaaaattaaacaatgttataaggcatcctgatgcacgacttcctgataatatcatggcatatgacaatgctgtttcggcgcttggaaaaatatgccaatttcatcgggatggtattgatgcagctcaggttgttccagcctggcttagctgcttgcctataaaagacgacaaggttgaagctaaagttgtacatggacagctttgctccatggtggagagtcagtatcttcctaaaattgtttcaatttttgcagaggttttgtgcaatggaacagaacttgccactgatgaaactagaaacaggatggtgaatgtcttgaggcgtttccagcagactttgcctcctgattttcttgcatcgacgttttccaacttgcaaccgcagcaacagctactgctacagtccatcttgtcgacatagttgttttttctgtcgctgcaaggtgggggtttgttatttttcttgatgttttatcagccaattctttatgtcgtatctttttctggtggggtactttgtgaatgcattgtttgcttcaacgaactggaggctgtcaccacacatggttttgatagagtgtatattgtctgtcttgtattcgaaatatggtttgagatgtgctgcaacagaggtgcaagggaaacggtgggatttattgtcggatgggttggacatttgcagttttttggtaatgagatcactataagtggagttactttctgcttctctttgaagccattttaattctgttgaaaattattaaaatgtgctctgttggaagatgcagaagctcctccgggttcatactggtaattggtgaaataaaaagcagtcttatctttctgaatgaaccttgggttcgtgtgtatttaagctggatcgttaatttattctgagataaaaccgtagcaattcgctaatgtgttcggagatcaaaccgttgcaaatttccatctggcgatat

SEQ ID NO: 70198 - DNA, 4129 bp, Zea Mays
ctcccccacgtccgcctgctcgcgctcgagctcgagccgcatctcccaaaccctacccatataaaatattaagcccaacgcccgagtctctctctctctcaacttcccttcccaccaccctcaccctccccttcccgccgccaccaccagttcaaccctctctccctcaaaccctagccgccgccgcgctcgttccggattcggttccgatccgatggcgtccgccgaggaccaggccgcggccgccgcgctgctggggggtgacccggcggcgttcgacgcgctgctctcgacgctcatgtcgtcctccaacgccgaccgttccgccgccgaggccgccttccaccgcctccgggcctcgcacccggagcccctcgcgctgcggctcgccacctcgctggcggcgcccaccacccccgccgacctgcgcgccatggcgggggtcctcctccgcaaggtcctctccccggccccgtcttccgacgcgtcctccaacaacgccacgcccccggcgccgctctggccgcagctctcccccgcggggcaggccgcgctcaaggcgcacctcctctccgcgctccagtccgatcctcccaagcccatcgccaagaaggtctgcgacgctatctctgagctcgcggcctcgctgctgcctgagaacgcctggcccgagctgctgccgttcctcttccgcgccgcgtcggggcctgatgcgcacaaccttcaggagtcagcgctgctcatcttcgcgaggctggcggattacatcgcagaatctctcctcgaccatctcatgactatccacaacctcctcgcctcagccctggcgcatcccacgtctcctgatgttcggattgcggccctgggtgccgcagtcaaccttgttcagtgcctgccaaccaactccgacagggataagatgcaggatttgctcccagcaatgatgagggcgctcactgattgcctaaactctggccaggaagtctctgcgcaggaggcactggagctgctggtggagctcgctggcgccgagccaaggttcctgaggaggcagattgctgatgtggtaggggcaatgttgcaagttgctgaggctacacagctggaagatgggaccagacacttggcggtggagtttgtgattactctagctgaggctagagagcgtgcaccaggaatgatgcggcgactcccgcagtttgttggtaggctgtttgcagtgctgatgcagatgctgcttgatgtcgaggatgaccctgcttggcactctgctgaaactgaagatgaggacgcaggggaagggaacaactatggagtggcgcaggagtgccttgaccgcctttccatcgccattggtgggaacgcaattgtaccaattgcttctgagctgctaccacagtacctgtcttctgctgagtggcagaagcaccatgctgcgctcattacacttgcacagattgcggaaggatgtgcaaaggttatgcttaaaaatttggaacaagtcgtttcgatgatattgaatggatttcaacatccccacccacgtgtgagatgggctgctatcaatgccatcggtcagctttctacggatttgggcccagatcttcaagttcattaccaccagcaggtgctgcctgcattggccaatgctatggatgatttccagaatccacgagttcaggcacatgctgcttcagcgattttgaattttagtgagaattgtacaccggaaattttgacgccttacctggatggaattgtgaacaaattacttgttcttcttcagaatggaaagcaaatggtgcaggagggagcattgacagctttagcgtcagtagcagattcatcacaggatcacttcaagaaatactatgatgctgtcatgccatacctaaaatctatcttgatgcatgcaactgataagtccaataggatgctccgtgccaagtccatggagtgtataagtttggtaggaatggctgtgggtaaggacaagttcagagacgacgcaaggcaggttatggaagtacttatggctttgcaaggagctccaatggaaactgatgatccaattaccagctacatgttgcaggcttgggctaggctatgcaaatgtcttggacaggatttccttccttacatgagtgttgttatgcctccactgcttcagtctgctcaactcaagcctgatgttacagttacttcagctgaatcagatgacgatattgcatcagatgacgatagcattgaaacaattacacttggtgacaaaagaataggaattcgaactagtgtgctggaagagaaagcaacagcttgcaacatgctgtgctgttatgctgatgagcttaaggagggtttcttcccatggattgatcaggttgccccaacgttggttcctctgctgaagttttacttccatgaggaagtcaggagagctgctgttgcggccatgccggaacttctacgctcagcaaaattggctgttgagaaagggcaggctcaaggacgtgatgagtcttatgtcaaacagttgtctgactacataattgcagcacttgttgaagcactgcacaaggagccagaaacagaaatgtgctcatccatgctggattctttaaacgagtgtatgcagctttcgggtcttttgcttgatgaagcccaagtacgagctatcatagatgagattaaaaacgtcattatagccagtgccacccggaaaagagaacgctcggagagaacaaaagcggaagattttgatgctgatgaaggagagctactcaaagaagagaatgaacaggaggaggaagtatttgatcaggtcagtgagtgcctagggactttgattaaaaccttcaaaggttctttcttgccgttttttgaagagctctctatgtacattacaccaatgttgggaaaagataaaacacctgaagagagaaggatagctatctgtatttttgatgatgttgcagagcaatgccgtgaatcagctctgaagtattatgacacataccttcctttccttttggaggcatcaaacgatgaaaattcagatgttcggcaggctgctgtctatggtgtgggtgtatgtgccgagtttggtggtcatgtttttcgccctctagtaggagaggccttatcaaaattaaacaatgttataaggcatcctgatgcacgacttcctgataatatcatggcatatgacaatgctgtttcggcgcttggaaaaatatgccaatttcatcgggatggtattgatgcagctcagcctggcttagctgcttgcctataaaagacgacaaggttgaagctaaagttgtacatggacagctttgctccatggtggagaggtcggatgctgaaattcttgggcctcacagtcagtatcttcctaaaattgtttcaatttttgcagaggttttgtgcaatggaacagaacttgccactgatgaaactagaaacaggatggtgaatgtcttgaggcgtttccagcagactttgcctcctgattttcttgcatcgacgttttccaacttgcaaccgcagcaacagctactgctacagtccatcttgtcgacatagttgttttttctgtcgctgcaaggtgggggtttgttatttttcttgatgttttatcagccaattctttatgtcgtatctttttctggtggggtactttgtgaatgcattgtttgcttcaacgaactggaggctgtcaccacacatggttttgatagagtgtatattgtctgtcttgtattcgaaatatggtttgagatgtgctgcaacagaggtgcaagggaaacggtgggatttattgtcggatgggttggacatttgcagttttttggtaatgagatcactataagtggagttactttctgcttctctttgaagccattttaattctgttgaaaattattaaaatgtgctctgttggaagatgcagaagctcctccgggttcatactggtaattggtgaaataaaaagcagtcttatctttctgaatgaaccttgggttcgtgtgtatttaagctggatcgttaatttattctgagataaaaccgtagcaattcgctaatgtgttcggagatcaaaccgttgcaaatttccatctggcgatat

SEQ ID NO: 70199 - DNA, 4115 bp, Zea Mays
ctcccccacgtccgcctgctcgcgctcgagctcgagccgcatctcccaaaccctacccatataaaatattaagcccaacgcccgagtctctctctctctcaacttcccttcccaccaccctcaccctccccttcccgccgccaccaccagttcaaccctctctccctcaaaccctagccgccgccgcgctcgttccggattcggttccgatccgatggcgtccgccgaggaccaggccgcggccgccgcgctgctggggggtgacccggcggcgttcgacgcgctgctctcgacgctcatgtcgtcctccaacgccgaccgttccgccgccgaggccgccttccaccgcctccgggcctcgcacccggagcccctcgcgctgcggctcgccacctcgctggcggcgcccaccacccccgccgacctgcgcgccatggcgggggtcctcctccgcaaggtcctctccccggccccgtcttccgacgcgtcctccaacaacgccacgcccccggcgccgctctggccgcagctctcccccgcggggcaggccgcgctcaaggcgcacctcctctccgcgctccagtccgatcctcccaagcccatcgccaagaaggtctgcgacgctatctctgagctcgcggcctcgctgctgcctgagaacgcctggcccgagctgctgccgttcctcttccgcgccgcgtcggggcctgatgcgcacaaccttcaggagtcagcgctgctcatcttcgcgaggctggcggattacatcgcagaatctctcctcgaccatctcatgactatccacaacctcctcgcctcagccctggcgcatcccacgtctcctgatgttcggattgcggccctgggtgccgcagtcaaccttgttcagtgcctgccaaccaactccgacagggataagatgcaggatttgctcccagcaatgatgagggcgctcactgattgcctaaactctggccaggaagtctctgcgcaggaggcactggagctgctggtggagctcgctggcgccgagccaaggttcctgaggaggcagattgctgatgtggtaggggcaatgttgcaagttgctgaggctacacagctggaagatgggaccagacacttggcggtggagtttgtgattactctagctgaggctagagagcgtgcaccaggaatgatgcggcgactcccgcagtttgttggtaggctgtttgcagtgctgatgcagatgctgcttgatgtcgaggatgaccctgcttggcactctgctgaaactgaagatgaggacgcaggggaagggaacaactatggagtggcgcaggagtgccttgaccgcctttccatcgccattggtgggaacgcaattgtaccaattgcttctgagctgctaccacagtacctgtcttctgctgagtggcagaagcaccatgctgcgctcattacacttgcacagattgcggaaggatgtgcaaaggttatgcttaaaaatttggaacaagtcgtttcgatgatattgaatggatttcaacatccccacccacgtgtgagatgggctgctatcaatgccatcggtcagctttctacggatttgggcccagatcttcaagttcattaccaccagcaggtgctgcctgcattggccaatgctatggatgatttccagaatccacgagttcaggcacatgctgcttcagcgattttgaattttagtgagaattgtacaccggaaattttgacgccttacctggatggaattgtgaacaaattacttgttcttcttcagaatggaaagcaaatggtgcaggagggagcattgacagctttagcgtcagtagcagattcatcacaggatcacttcaagaaatactatgatgctgtcatgccatacctaaaatctatcttgatgcatgcaactgataagtccaataggatgctccgtgccaagtccatggagtgtataagtttggtaggaatggctgtgggtaaggacaagttcagagacgacgcaaggcaggttatggaagtacttatggctttgcaaggagctccaatggaaactgatgatccaattaccagctacatgttgcaggcttgggctaggctatgcaaatgtcttggacaggatttccttccttacatgagtgttgttatgcctccactgcttcagtctgctcaactcaagcctgatgttacagttacttcagctgaatcagatgacgatattgcatcagatgacgatagcattgaaacaattacacttggtgacaaaagaataggaattcgaactagtgtgctggaagagaaagcaacagcttgcaacatgctgtgctgttatgctgatgagcttaaggagggtttcttcccatggattgatcaggttgccccaacgttggttcctctgctgaagttttacttccatgaggaagtcaggagagctgctgttgcggcaaaattggctgttgagaaagggcaggctcaaggacgtgatgagtcttatgtcaaacagttgtctgactacataattgcagcacttgttgaagcactgcacaaggagccagaaacagaaatgtgctcatccatgctggattctttaaacgagtgtatgcagctttcgggtcttttgcttgatgaagcccaagtacgagctatcatagatgagattaaaaacgtcattatagccagtgccacccggaaaagagaacgctcggagagaacaaaagcggaagattttgatgctgatgaaggagagctactcaaagaagagaatgaacaggaggaggaagtatttgatcaggtcagtgagtgcctagggactttgattaaaaccttcaaaggttctttcttgccgttttttgaagagctctctatgtacattacaccaatgttgggaaaagataaaacacctgaagagagaaggatagctatctgtatttttgatgatgttgcagagcaatgccgtgaatcagctctgaagtattatgacacataccttcctttccttttggaggcatcaaacgatgaaaattcagatgttcggcaggctgctgtctatggtgtgggtgtatgtgccgagtttggtggtcatgtttttcgccctctagtaggagaggccttatcaaaattaaacaatgttataaggcatcctgatgcacgacttcctgataatatcatggcatatgacaatgctgtttcggcgcttggaaaaatatgccaatttcatcgggatggtattgatgcagctcaggttgttccagcctggcttagctgcttgcctataaaagacgacaaggttgaagctaaagttgtacatggacagctttgctccatggtggagaggtcggatgctgaaattcttgggcctcacagtcagtatcttcctaaaattgtttcaatttttgcagaggttttgtgcaatggaacagaacttgccactgatgaaactagaaacaggatggtgaatgtcttgaggcgtttccagcagactttgcctcctgattttcttgcatcgacgttttccaacttgcaaccgcagcaacagctactgctacagtccatcttgtcgacatagttgttttttctgtcgctgcaaggtgggggtttgttatttttcttgatgttttatcagccaattctttatgtcgtatctttttctggtggggtactttgtgaatgcattgtttgcttcaacgaactggaggctgtcaccacacatggttttgatagagtgtatattgtctgtcttgtattcgaaatatggtttgagatgtgctgcaacagaggtgcaagggaaacggtgggatttattgtcggatgggttggacatttgcagttttttggtaatgagatcactataagtggagttactttctgcttctctttgaagccattttaattctgttgaaaattattaaaatgtgctctgttggaagatgcagaagctcctccgggttcatactggtaattggtgaaataaaaagcagtcttatctttctgaatgaaccttgggttcgtgtgtatttaagctggatcgttaatttattctgagataaaaccgtagcaattcgctaatgtgttcggagatcaaaccgttgcaaatttccatctggcgatat

SEQ ID NO: 70200 - DNA, 3935 bp, Zea Mays
ctcccccacgtccgcctgctcgcgctcgagctcgagccgcatctcccaaaccctacccatataaaatattaagcccaacgcccgagtctctctctctctcaacttcccttcccaccaccctcaccctccccttcccgccgccaccaccagttcaaccctctctccctcaaaccctagccgccgccgcgctcgttccggattcggttccgatccgatggcgtccgccgaggaccaggccgcggccgccgcgctgctggggggtgacccggcggcgttcgacgcgctgctctcgacgctcatgtcgtcctccaacgccgaccgttccgccgccgaggccgccttccaccgcctccgggcctcgcacccggagcccctcgcgctgcggctcgccacctcgctggcggcgcccaccacccccgccgacctgcgcgccatggcgggggtcctcctccgcaaggtcctctccccggccccgtcttccgacgcgtcctccaacaacgccacgcccccggcgccgctctggccgcagctctcccccgcggggcaggccgcgctcaaggcgcacctcctctccgcgctccagtccgatcctcccaagcccatcgccaagaaggtctgcgacgctatctctgagctcgcggcctcgctgctgcctgagaacgcctggcccgagctgctgccgttcctcttccgcgccgcgtcggggcctgatgcgcacaaccttcaggagtcagcgctgctcatcttcgcgaggctggcggattacatcgcagaatctctcctcgaccatctcatgactatccacaacctcctcgcctcagccctggcgcatcccacgtctcctgatgttcggattgcggccctgggtgccgcagtcaaccttgttcagtgcctgccaaccaactccgacagggataagatgcaggatttgctcccagcaatgatgagggcgctcactgattgcctaaactctggccaggaagtctctgcgcaggaggcactggagctgctggtggagctcgctggcgccgagccaaggttcctgaggaggcagattgctgatgtggtaggggcaatgttgcaagttgctgaggctacacagctggaagatgggaccagacacttggcggtggagtttgtgattactctagctgaggctagagagcgtgcaccaggaatgatgcggcgactcccgcagtttgttggtaggctgtttgcagtgctgatgcagatgctgcttgatgtcgaggatgaccctgcttggcactctgctgaaactgaagatgaggacgcaggggaagggaacaactatggagtggcgcaggagtgccttgaccgcctttccatcgccattggtgggaacgcaattgtaccaattgcttctgagctgctaccacagtacctgtcttctgctgagtggcagaagcaccatgctgcgctcattacacttgcacagattgcggaaggatgtgcaaaggttatgcttaaaaatttggaacaagtcgtttcgatgatattgaatggatttcaacatccccacccacgtgtgagatgggctgctatcaatgccatcggtcagctttctacggatttgggcccagatcttcaagttcattaccaccagcaggtgctgcctgcattggccaatgctatggatgatttccagaatccacgagttcaggcacatgctgcttcagcgattttgaattttagtgagaattgtacaccggaaattttgacgccttacctggatggaattgtgaacaaattacttgttcttcttcagaatggaaagcaaatggtgcaggagggagcattgacagctttagcgtcagtagcagattcatcacaggatcacttcaagaaatactatgatgctgtcatgccatacctaaaatctatcttgatgcatgcaactgataagtccaataggatgctccgtgccaagtccatggagtgtataagtttggtaggaatggctgtgggtaaggacaagttcagagacgacgcaaggcaggttatggaagtacttatggctttgcaaggagctccaatggaaactgatgatccaattaccagctacatgttgcaggcttgggctaggctatgcaaatgtcttggacaggatttccttccttacatgagtgttgttatgcctccactgcttcagtctgctcaactcaagcctgatgttacagttacttcagctgaatcagatgacgatattgcatcagatgacgatagcattgaaacaattacacttggtgacaaaagaataggaattcgaactagtgtgctggaagagaaagcaacagcttgcaacatgctgtgctgttatgctgatgagcttaaggagggtttcttcccatggattgatcaggttgccccaacgttggttcctctgctgaagttttacttccatgaggaagtcaggagagctgctgttgcggccatgccggaacttctacgctcagcaaaattggctgttgagaaagggcaggctcaaggacgtgatgagtcttatgtcaaacagttgtctgactacataattgcagcacttgttgaagcactgcacaaggagccagaaacagaaatgtgctcatccatgctggattctttaaacgagtgtatgcagctttcgggtcttttgcttgatgaagcccaagtacgagctatcatagatgagattaaaaacgtcattatagccagtgccacccggaaaagagaacgctcggagagaacaaaagcggaagattttgatgctgatgaaggagagctactcaaagaagagaatgaacaggaggaggaagtatttgatcaggtcagtgagtgcctagggactttgattaaaaccttcaaaggttctttcttgccgttttttgaagagctctctatgtacattacaccaatgttgggaaaagataaaacacctgaagagagaaggatagctatctgtatttttgatgatgttgcagagcaatgccgtgaatcagctctgaagtattatgacacataccttcctttccttttggaggcatcaaacgatgaaaattcagatgttcggcaggttgttccagcctggcttagctgcttgcctataaaagacgacaaggttgaagctaaagttgtacatggacagctttgctccatggtggagaggtcggatgctgaaattcttgggcctcacagtcagtatcttcctaaaattgtttcaatttttgcagaggttttgtgcaatggaacagaacttgccactgatgaaactagaaacaggatggtgaatgtcttgaggcgtttccagcagactttgcctcctgattttcttgcatcgacgttttccaacttgcaaccgcagcaacagctactgctacagtccatcttgtcgacatagttgttttttctgtcgctgcaaggtgggggtttgttatttttcttgatgttttatcagccaattctttatgtcgtatctttttctggtggggtactttgtgaatgcattgtttgcttcaacgaactggaggctgtcaccacacatggttttgatagagtgtatattgtctgtcttgtattcgaaatatggtttgagatgtgctgcaacagaggtgcaagggaaacggtgggatttattgtcggatgggttggacatttgcagttttttggtaatgagatcactataagtggagttactttctgcttctctttgaagccattttaattctgttgaaaattattaaaatgtgctctgttggaagatgcagaagctcctccgggttcatactggtaattggtgaaataaaaagcagtcttatctttctgaatgaaccttgggttcgtgtgtatttaagctggatcgttaatttattctgagataaaaccgtagcaattcgctaatgtgttcggagatcaaaccgttgcaaatttccatctggcgatat

SEQ ID NO: 70201 - DNA, 4135 bp, Zea Mays
ctcccccacgtccgcctgctcgcgctcgagctcgagccgcatctcccaaaccctacccatataaaatattaagcccaacgcccgagtctctctctctctcaacttcccttcccaccaccctcaccctccccttcccgccgccaccaccagttcaaccctctctccctcaaaccctagccgccgccgcgctcgttccggattcggttccgatccgatggcgtccgccgaggaccaggccgcggccgccgcgctgctggggggtgacccggcggcgttcgacgcgctgctctcgacgctcatgtcgtcctccaacgccgaccgttccgccgccgaggccgccttccaccgcctccgggcctcgcacccggagcccctcgcgctgcggctcgccacctcgctggcggcgcccaccacccccgccgacctgcgcgccatggcgggggtcctcctccgcaaggtcctctccccggccccgtcttccgacgcgtcctccaacaacgccacgcccccggcgccgctctggccgcagctctcccccgcggggcaggccgcgctcaaggcgcacctcctctccgcgctccagtccgatcctcccaagcccatcgccaagaaggtctgcgacgctatctctgagctcgcggcctcgctgctgcctgagaacgcctggcccgagctgctgccgttcctcttccgcgccgcgtcggggcctgatgcgcacaaccttcaggagtcagcgctgctcatcttcgcgaggctggcggattacatcgcagaatctctcctcgaccatctcatgactatccacaacctcctcgcctcagccctggcgcatcccacgtctcctgatgttcggattgcggccctgggtgccgcagtcaaccttgttcagtgcctgccaaccaactccgacagggataagatgcaggatttgctcccagcaatgatgagggcgctcactgattgcctaaactctggccaggaagtctctgcgcaggaggcactggagctgctggtggagctcgctggcgccgagccaaggttcctgaggaggcagattgctgatgtggtaggggcaatgttgcaagttgctgaggctacacagctggaagatgggaccagacacttggcggtggagtttgtgattactctagctgaggctagagagcgtgcaccaggaatgatgcggcgactcccgcagtttgttggtaggctgtttgcagtgctgatgcagatgctgcttgatgtcgaggatgaccctgcttggcactctgctgaaactgaagatgaggacgcaggggaagggaacaactatggagtggcgcaggagtgccttgaccgcctttccatcgccattggtgggaacgcaattgtaccaattgcttctgagctgctaccacagtacctgtcttctgctgagtggcagaagcaccatgctgcgctcattacacttgcacagattgcggaaggatgtgcaaaggttatgcttaaaaatttggaacaagtcgtttcgatgatattgaatggatttcaacatccccacccacgtgtgagatgggctgctatcaatgccatcggtcagctttctacggatttgggcccagatcttcaagttcattaccaccagcaggtgctgcctgcattggccaatgctatggatgatttccagaatccacgagttcaggcacatgctgcttcagcgattttgaattttagtgagaattgtacaccggaaattttgacgccttacctggatggaattgtgaacaaattacttgttcttcttcagaatggaaagcaaatggtgcaggagggagcattgacagctttagcgtcagtagcagattcatcacaggatcacttcaagaaatactatgatgctgtcatgccatacctaaaatctatcttgatgcatgcaactgataagtccaataggatgctccgtgccaagtccatggagtgtataagtttggtaggaatggctgtgggtaaggacaagttcagagacgacgcaaggttatggaagtacttatggctttgcaaggagctccaatggaaactgatgatccaattaccagctacatgttgcaggcttgggctaggctatgcaaatgtcttggacaggatttccttccttacatgagtgttgttatgcctccactgcttcagtctgctcaactcaagcctgatgttacagttacttcagctgaatcagatgacgatattgcatcagatgacgatagcattgaaacaattacacttggtgacaaaagaataggaattcgaactagtgtgctggaagagaaagcaacagcttgcaacatgctgtgctgttatgctgatgagcttaaggagggtttcttcccatggattgatcaggttgccccaacgttggttcctctgctgaagttttacttccatgaggaagtcaggagagctgctgttgcggccatgccggaacttctacgctcagcaaaattggctgttgagaaagggcaggctcaaggacgtgatgagtcttatgtcaaacagttgtctgactacataattgcagcacttgttgaagcactgcacaaggagccagaaacagaaatgtgctcatccatgctggattctttaaacgagtgtatgcagctttcgggtcttttgcttgatgaagcccaagtacgagctatcatagatgagattaaaaacgtcattatagccagtgccacccggaaaagagaacgctcggagagaacaaaagcggaagattttgatgctgatgaaggagagctactcaaagaagagaatgaacaggaggaggaagtatttgatcaggtcagtgagtgcctagggactttgattaaaaccttcaaaggttctttcttgccgttttttgaagagctctctatgtacattacaccaatgttgggaaaagataaaacacctgaagagagaaggatagctatctgtatttttgatgatgttgcagagcaatgccgtgaatcagctctgaagtattatgacacataccttcctttccttttggaggcatcaaacgatgaaaattcagatgttcggcaggctgctgtctatggtgtgggtgtatgtgccgagtttggtggtcatgtttttcgccctctagtaggagaggccttatcaaaattaaacaatgttataaggcatcctgatgcacgacttcctgataatatcatggcatatgacaatgctgtttcggcgcttggaaaaatatgccaatttcatcgggatggtattgatgcagctcaggttgttccagcctggcttagctgcttgcctataaaagacgacaaggttgaagctaaagttgtacatggacagctttgctccatggtggagaggtcggatgctgaaattcttgggcctcacagtcagtatcttcctaaaattgtttcaatttttgcagaggttttgtgcaatggaacagaacttgccactgatgaaactagaaacaggatggtgaatgtcttgaggcgtttccagcagactttgcctcctgattttcttgcatcgacgttttccaacttgcaaccgcagcaacagctactgctacagtccatcttgtcgacatagttgttttttctgtcgctgcaaggtgggggtttgttatttttcttgatgttttatcagccaattctttatgtcgtatctttttctggtggggtactttgtgaatgcattgtttgcttcaacgaactggaggctgtcaccacacatggttttgatagagtgtatattgtctgtcttgtattcgaaatatggtttgagatgtgctgcaacagaggtgcaagggaaacggtgggatttattgtcggatgggttggacatttgcagttttttggtaatgagatcactataagtggagttactttctgcttctctttgaagccattttaattctgttgaaaattattaaaatgtgctctgttggaagatgcagaagctcctccgggttcatactggtaattggtgaaataaaaagcagtcttatctttctgaatgaaccttgggttcgtgtgtatttaagctggatcgttaatttattctgagataaaaccgtagcaattcgctaatgtgttcggagatcaaaccgttgcaaatttccatctggcgatat

SEQ ID NO: 70202 - DNA, 4057 bp, Zea Mays
ctcccccacgtccgcctgctcgcgctcgagctcgagccgcatctcccaaaccctacccatataaaatattaagcccaacgcccgagtctctctctctctcaacttcccttcccaccaccctcaccctccccttcccgccgccaccaccagttcaaccctctctccctcaaaccctagccgccgccgcgctcgttccggattcggttccgatccgatggcgtccgccgaggaccaggccgcggccgccgcgctgctggggggtgacccggcggcgttcgacgcgctgctctcgacgctcatgtcgtcctccaacgccgaccgttccgccgccgaggccgccttccaccgcctccgggcctcgcacccggagcccctcgcgctgcggctcgccacctcgctggcggcgcccaccacccccgccgacctgcgcgccatggcgggggtcctcctccgcaaggtcctctccccggccccgtcttccgacgcgtcctccaacaacgccacgcccccggcgccgctctggccgcagctctcccccgcggggcaggccgcgctcaaggcgcacctcctctccgcgctccagtccgatcctcccaagcccatcgccaagaaggtctgcgacgctatctctgagctcgcggcctcgctgctgcctgagaacgcctggcccgagctgctgccgttcctcttccgcgccgcgtcggggcctgatgcgcacaaccttcaggagtcagcgctgctcatcttcgcgaggctggcggattacatcgcagaatctctcctcgaccatctcatgactatccacaacctcctcgcctcagccctggcgcatcccacgtctcctgatgttcggattgcggccctgggtgccgcagtcaaccttgttcagtgcctgccaaccaactccgacagggataagatgcaggatttgctcccagcaatgatgagggcgctcactgattgcctaaactctggccaggaagtctctgcgcaggaggcactggagctgctggtggagctcgctggcgccgagccaaggttcctgaggaggcagattgctgatgtggtaggggcaatgttgcaagttgctgaggctacacagctggaagatgggaccagacacttggcggtggagtttgtgattactctagctgaggctagagagcgtgcaccaggaatgatgcggcgactcccgcagtttgttggtaggctgtttgcagtgctgatgcagatgctgcttgatgtcgaggatgaccctgcttggcactctgctgaaactgaagatgaggacgcaggggaagggaacaactatggagtggcgcaggagtgccttgaccgcctttccatcgccattggtgggaacgcaattgtaccaattgcttctgagctgctaccacagtacctgtcttctgctgagtggcagaagcaccatgctgcgctcattacacttgcacagattgcggaaggatgtgcaaaggttatgcttaaaaatttggaacaagtcgtttcgatgatattgaatggatttcaacatccccacccacgtgtgagatgggctgctatcaatgccatcggtcagctttctacggatttgggcccagatcttcaagttcattaccaccagcaggtgctgcctgcattggccaatgctatggatgatttccagaatccacgagttcaggcacatgctgcttcagcgattttgaattttagtgagaattgtacaccggaaattttgacgccttacctggatggaattgtgaacaaattacttgttcttcttcagaatggaaagcaaatggtgcaggagggagcattgacagctttagcgtcagtagcagattcatcacaggatcacttcaagaaatactatgatgctgtcatgccatacctaaaatctatcttgatgcatgcaactgataagtccaataggatgctccgtgccaagtccatggagtgtataagtttggtaggaatggctgtgggtaaggacaagttcagagacgacgcaaggcaggttatggaagtacttatggctttgcaaggagctccaatggaaactgatgatccaattaccagctacatgttgcaggcttgggctaggctatgcaaatgtcttggacaggatttccttccttacatgagtgttgttatgcctccactgcttcagtctgctcaactcaagcctgatgttacagttacttcagctgaatcagatgacgatattgcatcagatgacgatagcattgaaacaattacacttggtgacaaaagaataggaattcgaactagtgtgctggaagagaaagcaacagcttgcaacatgctgtgctgttatgctgatgagcttaaggagggtttcttcccatggattgatcaggttgccccaacgttggttcctctgctgaagttttacttccatgaggaagtcaggagagctgctgttgcggccatgccggaacttctacgctcagcaaaattggctgttgagaaagggcaggctcaaggacgtgatgagtcttatgtcaaacagttgtctgactacataattgcagcacttgttgaagcactgcacaaggagccagaaacagaaatgtgctcatccatgctggattctttaaacgagttgccacccggaaaagagaacgctcggagagaacaaaagcggaagattttgatgctgatgaaggagagctactcaaagaagagaatgaacaggaggaggaagtatttgatcaggtcagtgagtgcctagggactttgattaaaaccttcaaaggttctttcttgccgttttttgaagagctctctatgtacattacaccaatgttgggaaaagataaaacacctgaagagagaaggatagctatctgtatttttgatgatgttgcagagcaatgccgtgaatcagctctgaagtattatgacacataccttcctttccttttggaggcatcaaacgatgaaaattcagatgttcggcaggctgctgtctatggtgtgggtgtatgtgccgagtttggtggtcatgtttttcgccctctagtaggagaggccttatcaaaattaaacaatgttataaggcatcctgatgcacgacttcctgataatatcatggcatatgacaatgctgtttcggcgcttggaaaaatatgccaatttcatcgggatggtattgatgcagctcaggttgttccagcctggcttagctgcttgcctataaaagacgacaaggttgaagctaaagttgtacatggacagctttgctccatggtggagaggtcggatgctgaaattcttgggcctcacagtcagtatcttcctaaaattgtttcaatttttgcagaggttttgtgcaatggaacagaacttgccactgatgaaactagaaacaggatggtgaatgtcttgaggcgtttccagcagactttgcctcctgattttcttgcatcgacgttttccaacttgcaaccgcagcaacagctactgctacagtccatcttgtcgacatagttgttttttctgtcgctgcaaggtgggggtttgttatttttcttgatgttttatcagccaattctttatgtcgtatctttttctggtggggtactttgtgaatgcattgtttgcttcaacgaactggaggctgtcaccacacatggttttgatagagtgtatattgtctgtcttgtattcgaaatatggtttgagatgtgctgcaacagaggtgcaagggaaacggtgggatttattgtcggatgggttggacatttgcagttttttggtaatgagatcactataagtggagttactttctgcttctctttgaagccattttaattctgttgaaaattattaaaatgtgctctgttggaagatgcagaagctcctccgggttcatactggtaattggtgaaataaaaagcagtcttatctttctgaatgaaccttgggttcgtgtgtatttaagctggatcgttaatttattctgagataaaaccgtagcaattcgctaatgtgttcggagatcaaaccgttgcaaatttccatctggcgatat

SEQ ID NO: 70203 - DNA, 2256 bp, Zea Mays
aagcgtgaggttgttgagccgctcaagcagcgaagcatgccaaaatgtgatgacgacgaggcgcccatggcatttctctacttttttgttgtgacgccaaattcttcggttatgggcttatgacaaatacaggaaacacgtactaactctcggctctagcccgtgcccgtggacgcatggcagtggcaccaccactttgcatgtgcgagcgtcaaacaatctcggctagtcaaccttctagagaatttccatggaaacttttcaaacttctccggccaccattaatgtccacccacgatgcaggtacggacgcgatgacagctcccagtgcaccatgtttgatcttttccgcatctgatccatatccgattctacaggtcatgcagtcggtcatgcagtctccagacccactataaaacccaaagcaaagcagaagcactccacacgcttcagcattcttcaaatacttgcataagatggcaggttccgtggcaatcgtgggcatcttcgtcgccctcctcgccgtggccggcgaggcggctgtgttcacggtggtgaaccagtgcccgttcaccgtgtgggccgcgtccgtgccggtgggcggcgggcggcagctgaaccgcggcgagagctggcggatcacggcccccgcgggcacgacggccgcgcgcatctgggcgcgcacggggtgcaagttcgacgcgagcgggcgcgggagctgccgcacgggggactgcggcggcgtgctgcagtgcactgggtacgggcgcgcgcccaacacgctggcggagtacgcgctgaagcagttcaacaacctcgacttcttcgacatctccctcatcgacggcttcaacgtgcccatgagcttcctccccgacggcgggtccgggtgcagccgcggcccgcgctgcgccgtggacgtgaacgcgcgctgccctgccgagctgcggcaggacggcgtgtgcaacaacgcgtgccccgtgttcaagaaggacgagtactgctgcgtcggctcggcggccaacgactgccacccgaccaactactccaggtacttcaaggggcagtgccccgacgcgtacagctaccccaaggatgacgccaccagcaccttcacctgccccgccggaaccaactacaaggtcgtcttctgcccgtgaggccgctgaactagcatcagcgtgcgcgcgtcgaccaagaacaagaaataaacgaccgaggctgtgtatgttgcccgccgtgtgctcaactggagcaaaaataaagccaacaaaacaagcacgtgtgatctctatgtcaccaactctatcaccttaattaatggggcattatgaagttgtttctttacatgctcgtactgaaattgggttttatggactgaatcgcatagcatttgatagttgccgccggtagcggtagtgatctttggacgaggattgcaagcttcggctacaagcacgacgactacatctctcagcgtgctcaactggtcgcggggagagaggtgcttgagatgttgtagggatatgatggttattgactttaatattatataaaagatagattgctgacgttttattttatagtaggtgttggaaaaaatgatcctgacaaggaaagatcgagttccttggaactcgtcctatgttgacaaaagtagagtatgtagtgtataaccctgaaccatttatatggtactctatatagaagacacgactaaattacactataatatagtgtgtatgtctaaacccgtatcttactaattactacattcattacactaattatagtactactcaataaatttaggccccgtttcaatctcacgggataaactttagcttcctgctaaactttagctatatgaattgaattgctaaaatttagcttaaattaccaccattagctttcctgtttagattataaatggctaaaagtagctaaaaaatagctgctaaagtttatctcgcgagattgaaacagggccttagtccaccaatcagttatgtattccatttcgagcacaacgccaaaagatgtgtcttgtgcttttgggccacattaagagtctgctttattaaggttcgtaagcctctgttataggatacgattataattctcgctcgaacatttttgtcctttggctgctgggacatattctcaattattctatttttacatgattcaacagagtcgagggcactcgggaccttctatactaaaatcatctcaattcttgatatgtatcaaggc

SEQ ID NO: 70204 - DNA, 1839 bp, Zea Mays
aagcgtgaggttgttgagccgctcaagcagcgaagcatgccaaaatgtgatgacgacgaggcgcccatggcatttctctacttttttgttgtgacgccaaattcttcggttatgggcttatgacaaatacaggaaacacgtactaactctcggctctagcccgtgcccgtggacgcatggcagtggcaccaccactttgcatgtgcgagcgtcaaacaatctcggctagtcaaccttctagagaatttccatggaaacttttcaaacttctccggccaccattaatgtccacccacgatgcaggtacggacgcgatgacagctcccagtgcaccatgtttgatcttttccgcatctgatccatatccgattctacaggtcatgcagtcggtcatgcagtctccagacccactataaaacccaaagcaaagcagaagcactccacacgcttcagcattcttcaaatacttgcataagatggcaggttccgtggcaatcgtgggcgtgaacgcgcgctgccctgccgagctgcggcaggacggcgtgtgcaacaacgcgtgccccgtgttcaagaaggacgagtactgctgcgtcggctcggcggccaacgactgccacccgaccaactactccaggtacttcaaggggcagtgccccgacgcgtacagctaccccaaggatgacgccaccagcaccttcacctgccccgccggaaccaactacaaggtcgtcttctgcccgtgaggccgctgaactagcatcagcgtgcgcgcgtcgaccaagaacaagaaataaacgaccgaggctgtgtatgttgcccgccgtgtgctcaactggagcaaaaataaagccaacaaaacaagcacgtgtgatctctatgtcaccaactctatcaccttaattaatggggcattatgaagttgtttctttacatgctcgtactgaaattgggttttatggactgaatcgcatagcatttgatagttgccgccggtagcggtagtgatctttggacgaggattgcaagcttcggctacaagcacgacgactacatctctcagcgtgctcaactggtcgcggggagagaggtgcttgagatgttgtagggatatgatggttattgactttaatattatataaaagatagattgctgacgttttattttatagtaggtgttggaaaaaatgatcctgacaaggaaagatcgagttccttggaactcgtcctatgttgacaaaagtagagtatgtagtgtataaccctgaaccatttatatggtactctatatagaagacacgactaaattacactataatatagtgtgtatgtctaaacccgtatcttactaattactacattcattacactaattatagtactactcaataaatttaggccccgtttcaatctcacgggataaactttagcttcctgctaaactttagctatatgaattgaattgctaaaatttagcttaaattaccaccattagctttcctgtttagattataaatggctaaaagtagctaaaaaatagctgctaaagtttatctcgcgagattgaaacagggccttagtccaccaatcagttatgtattccatttcgagcacaacgccaaaagatgtgtcttgtgcttttgggccacattaagagtctgctttattaaggttcgtaagcctctgttataggatacgattataattctcgctcgaacatttttgtcctttggctgctgggacatattctcaattattctatttttacatgattcaacagagtcgagggcactcgggaccttctatactaaaatcatctcaattcttgatatgtatcaaggc

SEQ ID NO: 70205 - DNA, 1818 bp, Zea Mays
aagcgtgaggttgttgagccgctcaagcagcgaagcatgccaaaatgtgatgacgacgaggcgcccatggcatttctctacttttttgttgtgacgccaaattcttcggttatgggcttatgacaaatacaggaaacacgtactaactctcggctctagcccgtgcccgtggacgcatggcagtggcaccaccactttgcatgtgcgagcgtcaaacaatctcggctagtcaaccttctagagaatttccatggaaacttttcaaacttctccggccaccattaatgtccacccacgatgcaggtacggacgcgatgacagctcccagtgcaccatgtttgatcttttccgcatctgatccatatccgattctacaggtcatgcagtcggtcatgcagtctccagacccactataaaacccaaagcaaagcagaagcactccacacgcttcagcattcttcaaatacttgcataagatggcaggttccgtggcaatcgtgggcatcttcgtcgccctcctcgccgtggccggcgaggcggctgtgttcacgaaggacgagtactgctgcgtcggctcggcggccaacgactgccacccgaccaactactccaggtacttcaaggggcagtgccccgacgcgtacagctaccccaaggatgacgccaccagcaccttcacctgccccgccggaaccaactacaaggtcgtcttctgcccgtgaggccgctgaactagcatcagcgtgcgcgcgtcgaccaagaacaagaaataaacgaccgaggctgtgtatgttgcccgccgtgtgctcaactggagcaaaaataaagccaacaaaacaagcacgtgtgatctctatgtcaccaactctatcaccttaattaatggggcattatgaagttgtttctttacatgctcgtactgaaattgggttttatggactgaatcgcatagcatttgatagttgccgccggtagcggtagtgatctttggacgaggattgcaagcttcggctacaagcacgacgactacatctctcagcgtgctcaactggtcgcggggagagaggtgcttgagatgttgtagggatatgatggttattgactttaatattatataaaagatagattgctgacgttttattttatagtaggtgttggaaaaaatgatcctgacaaggaaagatcgagttccttggaactcgtcctatgttgacaaaagtagagtatgtagtgtataaccctgaaccatttatatggtactctatatagaagacacgactaaattacactataatatagtgtgtatgtctaaacccgtatcttactaattactacattcattacactaattatagtactactcaataaatttaggccccgtttcaatctcacgggataaactttagcttcctgctaaactttagctatatgaattgaattgctaaaatttagcttaaattaccaccattagctttcctgtttagattataaatggctaaaagtagctaaaaaatagctgctaaagtttatctcgcgagattgaaacagggccttagtccaccaatcagttatgtattccatttcgagcacaacgccaaaagatgtgtcttgtgcttttgggccacattaagagtctgctttattaaggttcgtaagcctctgttataggatacgattataattctcgctcgaacatttttgtcctttggctgctgggacatattctcaattattctatttttacatgattcaacagagtcgagggcactcgggaccttctatactaaaatcatctcaattcttgatatgtatcaaggc

SEQ ID NO: 70206 - DNA, 2033 bp, Zea Mays
gtaaccgacgaggatatgtttccctcaccttcgaccaccactaacctcaacctccgcatctctctctctcgcgcgcgccgcccttcccagcgccgtcggctgccgctcctcccctccaccgccgcctctgctccgcccgtcctcgcgccgtctcgaccgctgcggcttcgtctctccccattgtccgtcccctctcaacgcactctacgacggaccgatgacttgacggatctgggggtttgtctagggtgggtgaacggaaggggatggagttcacggagtcgttcaagcagacgggcccgtgctccttctcccccgactcgcgcttccttgctattgccgtagactaccgtctcgtcgtccgcgacgtactctcactgaaggtagtggtacaattattttcatgcgtggacaagataagctctgtagaatgggcaccagattcagaatacattttatgtggactttacaagcgacccatggtgcaagcttggtcactgagtcaacctgattggacctgcaagattgatgaaggtccagcagggattgcatatgctcgctggagtcctgacagtcgtcatatattaactacatctgagtttcagctccgtctcactgtgtggtctctcgtaaatacagcatgcgtacatgtccagtggccaaaacatggttctaaaggtgtttctttcaccaaagacgggaaatttgctgcaatctgtaccagacgtgattgcaaggattacattaatttactatcatgtcactcttgggaaataatgactgtctttgctattgacacggtagacttagctggtgttgaatggtcaccatatgatagtgctattgttgtttgggattcacttcttgaatataaggttctgatatattcgccagacggaaggtgcttgttcaagtatctagcttatgaaagtgggttgggtgtgaaaactgttgcttggtcaccatgtggacagtttttagcagtgggcagctatgatcaagcagtacggactttgaatcacttgacgtggaaaacttttgcggagttctcacatgcagggtatattcgtagtccttgcaatgctgctatatataaggaagtggatgacccatggcaacttgatatgtcagaattatgtctaagtgaaggcctctctcgaaacatgccagacaatggtgcagaaaatggcaccgagggaggaggctctagagttaaatatgctgtgatggatgttcccatcaccttaccttcgttgaaaccagcttttgacaagcctaaccccaaacaaggcattggtatgctgtcatggagcagcgacagccactatttcttcaccaggaatgacaacatgccaactgttctctggatatgggatatatgccgccttgagcttgccgctgtgctcgtgcagaaagatccaatccgtgctgcagcatgggaccctacctgcacacgccttgttttatgcacagagagccctcacttgtacatgtggacgccatccggtgcctgctgtgtcaacatcccctttctgaacttccgaatcgttgatttgaagtggagctcgaatgggagctgtctcctcctgaaggagcgcgaatctttctgctgtgccacaatcatatctgccctgcctgaggaagaacctgatcattctgatgatacttctgaagatgaatgagtggcctcatggtatgtctagcagcttatgcgaatggaactgggaactaacagtacaaatgatcttgtgatggtgaatgagtgacactgactgactacttagctacttgtagaatccagagtggattgcgataccatgaatcgataaggtcatttcgctgcttagatggcaaatgctctatcaccaggcactacagaatggacagagaactgtgtggttctatttgttgtattcttgctcttgtttgtctgttgtagtttctccaaggttgtactgcttgaccttacttgttggatcttaatcttacatatccagtcaccagggtattttcaatctgggagtacatactta

SEQ ID NO: 70207 - DNA, 1925 bp, Zea Mays
gtaaccgacgaggatatgtttccctcaccttcgaccaccactaacctcaacctccgcatctctctctctcgcgcgcgccgcccttcccagcgccgtcggctgccgctcctcccctccaccgccgcctctgctccgcccgtcctcgcgccgtctcgaccgctgcggcttcgtctctccccattgtccgtcccctctcaacgcactctacgacggaccgatgacttgacggatctgggggtttgtctagggtgggtgaacggaaggggatggagttcacggagtcgttcaagcagacgggcccgtgctccttctcccccgactcgcgcttccttgctattgccgtagactaccgtctcgtcgtccgcgacgtactctcactgaaggtggtacaattattttcatgcgtggacaagataagctctgtagaatgggcaccagattcagaatacattttatgtggactttacaagcgacccatggtgcaagcttggtcactgagtcaacctgattggacctgcaagattgatgaagcatgcgtacatgtccagtggccaaaacatggttctaaaggtgtttctttcaccaaagacgggaaatttgctgcaatctgtaccagacgtgattgcaaggattacattaatttactatcatgtcactcttgggaaataatgactgtctttgctattgacacggtagacttagctggtgttgaatggtcaccatatgatagtgctattgttgtttgggattcacttcttgaatataaggttctgatatattcgccagacggaaggtgcttgttcaagtatctagcttatgaaagtgggttgggtgtgaaaactgttgcttggtcaccatgtggacagtttttagcagtgggcagctatgatcaagcagtacggactttgaatcacttgacgtggaaaacttttgcggagttctcacatgcagggtatattcgtagtccttgcaatgctgctatatataaggaagtggatgacccatggcaacttgatatgtcagaattatgtctaagtgaaggcctctctcgaaacatgccagacaatggtgcagaaaatggcaccgagggaggaggctctagagttaaatatgctgtgatggatgttcccatcaccttaccttcgttgaaaccagcttttgacaagcctaaccccaaacaaggcattggtatgctgtcatggagcagcgacagccactatttcttcaccaggaatgacaacatgccaactgttctctggatatgggatatatgccgccttgagcttgccgctgtgctcgtgcagaaagatccaatccgtgctgcagcatgggaccctacctgcacacgccttgttttatgcacagagagccctcacttgtacatgtggacgccatccggtgcctgctgtgtcaacatcccctttctgaacttccgaatcgttgatttgaagtggagctcgaatgggagctgtctcctcctgaaggagcgcgaatctttctgctgtgccacaatcatatctgccctgcctgaggaagaacctgatcattctgatgatacttctgaagatgaatgagtggcctcatggtatgtctagcagcttatgcgaatggaactgggaactaacagtacaaatgatcttgtgatggtgaatgagtgacactgactgactacttagctacttgtagaatccagagtggattgcgataccatgaatcgataaggtcatttcgctgcttagatggcaaatgctctatcaccaggcactacagaatggacagagaactgtgtggttctatttgttgtattcttgctcttgtttgtctgttgtagtttctccaaggttgtactgcttgaccttacttgttggatcttaatcttacatatccagtcaccagggtattttcaatctgggagtacatactta

SEQ ID NO: 70208 - DNA, 446 bp, Zea Mays
cccctccaaataaatcaaagccccatgccccgtataaatcaaagccccatgccccgtggagttgtttcctggccatccaagctcactctgcgctctccctctcctctaccgcgaagcccgcggccgacgctctctgtctctgttcatcgtcggagccgtccgccactggaggaccaccgaaaagcggattcagtggtagaggacccaaatttgtttgaagaagatcaacgtgatacttttgagcaagaaggtgaggatgaagactttgacagggactatgatgagctataagtctagcgacactccggtcatcatcttgtaggagatcgcctatgttatttctgctataatttgattatgctactgtttaagaatcttaagtctgaatgatgtaatgaaatttatatactctcttttacgcctttatgcattgtgttttggtatat

SEQ ID NO: 70209 - DNA, 1882 bp, Zea Mays
cccactcccgcattctaccccggaattgtggagtccccaatcgcgagaccacggttcctccctgcggctcctctgccgcgtccggcgttggctaccggccgttactgcaatcgcgacagaccggtcaccacggttcctccctgcggctcccctgccgcgtccggcgttgggctaccggccgttattgctggtggcgagcgccacccccccacccccaacctctcaaagtctcaagtgattaaggatgtctctgtccaaaccgtgcgccatgccggagcggcgcatcgtgccggttcccgcgacgtccgacatcggcgttctgcccatggacgccctgcgcgagattctactgcgcctccaggccaaggagctctgccgcctccgcctggtctgccgtctgtggcggtccctcctctccgacccgcacttcgccgcgccccactacgcgcggcatcgggcggtgctcatcatcgccgcctacaaggacgacgcggggcgcgacgtgctcgtggacatcatggatctctccgggcaaatcgtgaagaaggtgcccacaatggagggcgacagagccgccgtgaggggcggggggacccttgaccgcgtctgtgttaggaaaatcgacgacagccgcagcagctaccgagtgttcaacccgattcgcgaggaagtgtactacttaccggacagattattcgatccggctactggagctgtgtaccgcataccagacagctacgcagaagagcatgtggagctcgcttcgagcttgatcaccgagcccaagtatctgtttggacaggtcgcccggacaggagagtgcaagatgtttcgaatgctattccatttttccgttggcattggaggtcgggggatgtttgaggtctgcacgctcaactccgataacagtagcagccgggcagcagggtggaggagagccgcgccccttgaaaaaggcattcagattagtaggtttaccagtgtggtaatcgatggggttgtctactgcctttgctttggtccacaccattctatcaccttcgacaaccgagttaccgagcaagatttgatatttacattcgaccttgagactgaggcatggggaccgtcaatccgggggcccccgatcaccttccctgatgacgctgatctcatgttctactaccttggtcttcctaatgtaaagcaactgacaatagccaacctgaatcgctccttggctgttgtgcatggcccagctccgtatgttgatgtttggattctactggactttgcaaagggtctctgggtcaaaatgtacagcatacagtttgagaaatacaccattcttaagcccgtgcatcccttgtttgtgtttggcgacgggaggatcatcctgtataaacaagaccatgattacctgcagatttatgatccaagaaccaacacacttgctgatttactggagtcaaagcatttctctgcagttgctaggtacacaggaaacctactgagcttagagcgctgagtactaatgaggtttataaaaaggagtcatctcagctcagctggagcatggcgcagaaatttcaagaagacggcgctgcactttcatcagtgagatcgaatggatggaggtgacaatagggtgacgatcatctgaaggcagagcattccatgctgagagacttttgttgaaaactgagcacagcctgtgcgctgttaaaagccatctggccatgtaaaggttcagatgttgtgtgtggctatgaacgctttacgttgtgaggtaacgcctctcagtgtagttcatgttgtgccaattggatgaaccctctgtgttcattccaatgtgtttttttgcggtttgattagttttcttttcattccaatgtgtttttat

SEQ ID NO: 70210 - DNA, 673 bp, Zea Mays
atagcttttgccataacttttttaaaattcttcgaagaggccgccactaaatggctccacgaataaatgggtgtgaagtcttggatgcttggtttgctcacagggatcaggctgtggagtacggagttcacaagatctaggagatcaacaacctcgaggatgggaggatatagaaggagaaaatgtcttcagccagcaatagggtgagaacagacttgccgaacatgaaggaagggttgcagctggagcctgacaatagtggtgttctaagttgtggatactggacactgctgttggaatactagagcgacatgatgttgtaagggatctagagaggaagcttctggagttgcaataggtgatgccttcttatttactccttttttggcacaaggtcttctctgtatcatatagtatgttacaaaagctatggccattcaatgaacatagttcctctcaatatgcaacttcaagtgcagcgctacaagattctacttcatagagctgtatacatgaaaacaaacaactccagaacatgtcttctctcccaagcttcatggtagatacccatgtacaattctaattgcagtgacatgttacaaatttctatgcaattgtgtaccaaattatgtgctgcagtcgctattttgtttaaatggtttcaaaatggtcg

SEQ ID NO: 70211 - DNA, 473 bp, Zea Mays
cgaatgtattgcttataggatttatatctaatgtttcaacaggtggcccaggagataaattctgaagccaagttccagaatgattttcttcatgaactgcaaatgacccttgcaaaagctcaggctggagtgaagaacaacatgcggagattgaacaagagcatcatccagcagggctcaaaccatgttctctatgttgtcctctttgcactgttttgcttctttattgtctacctcttgtcaaagttctctagaagatagttccgtctttggtgggcaaatctaggataccatgacttgtatgtagtctaaagaaagaaaaaaactattgtacttctgcctggccttgtatcctcagtcttttcgtcgaaaatcgaatcaaactagaaatacccttcaaagatttatgctaacgtcatccactgatccctatgattggaactgttgggattgaattttttctaccgagacgc

SEQ ID NO: 70212 - DNA, 1530 bp, Zea Mays
actacagcgccaccaggcagccacctccctcctctcagtcgcctccctcccgcctccactagtcgttgtagtcaacactgtgcagtacgccacccaccacctctccattaaagaaaaggggaggcaagtcggggcctcggggagaaggggctggctgagcatcagaccatgacgtccggggcggcggcggcgggaggtctggggcggacgccgacgtggaaggagcgggagaacaacaagcgccgggagcgccggcggagggccatcgccgccaagatcttcacgggcctccgcgccctcggcaactacaagctgcccaagcactgcgacaacaacgaggtgctcaaggcgctctgccgcgaggcggggtgggtcgtcgaggacgacggcaccacctaccggaaggccgccgccggggatgctgagcccgtgctcgtcgtcgcagctgctgagcgcgccgtcctcgagcttcccgagcccggtgccgtcctaccacgccagcccggcgtcgtcgagcttcccgagcccgacgcgcctcgaccacagcagcggcggcagcagcacccacaaccccgccgcggcggccgcggcggccgccgcctccctgctcccgttcctccggggcctgccgaacctgccgccgctccgcgtgtccagcagcgcgcccgtcacgccgccgctctcctcgcccacggcggcggcggcgtcgcggccgcccaccaaggtccgcaggcccaactgggacgccgccgccgccgtcgtcgccgctgaccccttccggcaccccttgttcgcggtctccgcccccgccagccccacccgcgcgcgccggcgcgagcacccggacaccatcccggagtgcgacgagtccgacgtctgctccgcggtcgactccgcccggtggatcagcttccaggccaccacggcgcccgcgtcgcccacgtacaacctcgtccacccggcctccgactccatggagctggacgggacgacggcagccgtcgaggagttcgagttcgacaagggccgcgtcgtcacgccgtgggaaggcgagcggatccacgaggtcgccgccgaggagctcgagctcacgctcggcgtcggcgccaagtgaagcgattggcagcaagcaaagcttggatctttgagctcccgtactgcaatgccgcgattggcagataaaaaaaaatgtgtactactacgtagcgtcgtagccgcgtgaagaatcgtggatgcattcgtgctgagtttcgatcggaggcacattcggtgtagggcgtaggtgacgctgttgtttcattcatgaacagctgatcaggtgaaagaacaatcgttgttcgtccgtccgtccgcctgtattgcattgcattattgatcacagactgtatgctgactccattcggatgtagtactagctggatctttggcatctactcactgtttgttctgtaagtaaagaatggcctcagaattcgtgacctccctcgtgggtaaaaaaaaagagatgggatgggctggacttcgtgcctg

SEQ ID NO: 70213 - DNA, 1030 bp, Zea Mays
cttatgggaggaactcaaaatccagatgatatggcaaggcactgttactggaagccaaactttgcaactcagccctgaaatacaataatgcaggtcaatggtaaaaagacaattggttcctttcaaaagaagtacaacattgggtcatttgagctgctgagcaaaactgcaccaatccaggcaatttcactcattatactgggcccctttgtggactactatctaaatggacggtcattgttgaactaccctttttcgggaggggcaactttcttcatcttgctttcctgctccctggccgtcttctgcaacatgagccaatacctctgcatcggccggttctcagcgacctcgtttcaggtcctgggccacatgaagaccgtgtgtgtgctgatcctcggctggatcctgtttgactcggccctcaccgtgaagaacatcctcgggatgctgctcgccgtgatgggcatggtggtctacagctgggccatggaagcggagaagaaggtggcagcccctgtcccccggatcaagagcgaaatgctcgacggggaggacgtacccctcaaggccagggtgagcggcgtgcccgcggtcgacctcgaggacggcgagatgaagagctagctgccgccgccgccgctgattcgttcattcttcttgttcttttgtaactgtgcgcgcgcgatcgctcgatccaaagttgcttgtccgtcagctctcagctatcgacactacactgttaattttggccccttgttggggagagtccagttcctaggtgacgacgaccacccccagttcggcgtagatcaaacacacactagcagaatgcagatttttaggattttttcaggcggcggggtggatccattcattgtcatgttgacaagactcataatagaaatacaggtaacatatgtatctccgctccgtggtaggattgataaggaatcatttatccagccggcgatgtagtccttattttttatgtttcgctgtccggttctggttgctggggttctgcaca

SEQ ID NO: 70214 - DNA, 2314 bp, Zea Mays
cgtttccggcccccccagccccccacccagttcgaaagcctccctccctccccgttctcccttccttgcctaggcggcaacgcaacacccccccgtgctttattataacccagcggcccctcccgcatgaggcaaccgagacgggacgagtccagcagccggccaccagcccatccgaaccctgctgcccccctctccgggttcgcgtgaggctgtgtgctgctgggaggagggagggggaagcggcggcggggcgccatggaggccgagaagaaggcgccggcggtgtcagacgtgggcgcgtgggcgatgaacgtcgtcagctccgtcagcctcatcatggccaacaagcagctcatgtcctcctccggctacgccttcgccttcgccaccacgctgaccgggttccacttcacggtcacggcgctcgtcgggtggatctccaacgccaccggctactccgtctccaagcacgtcccgctctgggagctcgtctggttctctctcgtcgccaacacctccatcaccgggatgaacctcagcctcatgctcaactccgtcggcttctaccagatctccaaactgagcatgattccggtggtctgcctcatggaatgggtgctgaacagcaagcactacaccaccaaggtcatctcggcggtggttgtcgtggccgccggtgtcgggatttgcaccgtcacggatgtcgaggtcaatgccaaggggttcatctgcgcttgcgtggcagtgttctgcacgtcgcttcaacagattcttgtagcctaactggttataactactcagcaaggcactgttactggaagccaaactttgcaactcagccctgaaatacaataatgcaggtcaatggtaaaaaggtactaaaagatcatcagttgagacatatcatgatctgccaattcatatactacattataagctgcacattgacagttctcatagatactactatgcttcctcactttttgtgttttcttgtactgtacaaatgtatttgcttgtttcgttgtatccttcaagatcagactacctgcaattaatttgaagatttttttgttgttttacattcttctcgtttcatcttcatttctacttctactatctatataaggagatgctttactaacaacaatatcgtctttgaagtttgtgttttactaacaaaaatctgatttttgaagtttctggaaaatttctaaactttagtaatacttttaagttgtacatgaataatttaatatttttagtatcgaatactgaaaagaaagttactttctacaacaatacttgtctcacagttacgcttatgcaatctactaagttccactatactctgagggggtgagctgatgatgtgtttcctcttcccagacaattggttcctttcaaaagaagtacaacattgggtcatttgagctgctgagcaaaactgcaccaatccaggcaatttcactcattatactgggcccctttgtggactactatctaaatggacggtcattgttgaactaccctttttcgggaggggcaactttcttcatcttgctttcctgctccctggccgtcttctgcaacatgagccaatacctctgcatcggccggttctcagcgacctcgtttcaggtcctgggccacatgaagaccgtgtgtgtgctgatcctcggctggatcctgtttgactcggccctcaccgtgaagaacatcctcgggatgctgctcgccgtgatgggcatggtggtctacagctgggccatggaagcggagaagaaggtggcagcccctgtcccccggatcaagagcgaaatgctcgacggggaggacgtacccctcaaggccagggtgagcggcgtgcccgcggtcgacctcgaggacggcgagatgaagagctagctgccgccgccgccgctgattcgttcattcttcttgttcttttgtaactgtgcgcgcgcgatcgctcgatccaaagttgcttgtccgtcagctctcagctatcgacactacactgttaattttggccccttgttggggagagtccagttcctaggtgacgacgaccacccccagttcggcgtagatcaaacacacactagcagaatgcagatttttaggattttttcaggcggcggggtggatccattcattgtcatgttgacaagactcataatagaaatacaggtaacatatgtatctccgctccgtggtaggattgataaggaatcatttatccagccggcgatgtagtccttattttttatgtttcgctgtccggttctggttgctggggttctgcaca

SEQ ID NO: 70215 - DNA, 1800 bp, Zea Mays
cgtttccggcccccccagccccccacccagttcgaaagcctccctccctccccgttctcccttccttgcctaggcggcaacgcaacacccccccgtgctttattataacccagcggcccctcccgcatgaggcaaccgagacgggacgagtccagcagccggccaccagcccatccgaaccctgctgcccccctctccgggttcgcgtgaggctgtgtgctgctgggaggagggagggggaagcggcggcggggcgccatggaggccgagaagaaggcgccggcggtgtcagacgtgggcgcgtgggcgatgaacgtcgtcagctccgtcagcctcatcatggccaacaagcagctcatgtcctcctccggctacgccttcgccttcgccaccacgctgaccgggttccacttcacggtcacggcgctcgtcgggtggatctccaacgccaccggctactccgtctccaagcacgtcccgctctgggagctcgtctggttctctctcgtcgccaacacctccatcaccgggatgaacctcagcctcatgctcaactccgtcggcttctaccagatctccaaactgagcatgattccggtggtctgcctcatggaatgggtgctgaacagcaagcactacaccaccaaggtcatctcggcggtggttgtcgtggccgccggtgtcgggatttgcaccgtcacggatgtcgaggtcaatgccaaggggttcatctgcgcttgcgtggcagtgttctgcacgtcgcttcaacagattcttgtagcctaactggttataactactcagcaaggcactgttactggaagccaaactttgcaactcagccctgaaatacaataatgcaggtcaatggtaaaaagacaattggttcctttcaaaagaagtacaacattgggtcatttgagctgctgagcaaaactgcaccaatccaggcaatttcactcattatactgggcccctttgtggactactatctaaatggacggtcattgttgaactaccctttttcgggaggggcaactttcttcatcttgctttcctgctccctggccgtcttctgcaacatgagccaatacctctgcatcggccggttctcagcgacctcgtttcaggtcctgggccacatgaagaccgtgtgtgtgctgatcctcggctggatcctgtttgactcggccctcaccgtgaagaacatcctcgggatgctgctcgccgtgatgggcatggtggtctacagctgggccatggaagcggagaagaaggtggcagcccctgtcccccggatcaagagcgaaatgctcgacggggaggacgtacccctcaaggccagggtgagcggcgtgcccgcggtcgacctcgaggacggcgagatgaagagctagctgccgccgccgccgctgattcgttcattcttcttgttcttttgtaactgtgcgcgcgcgatcgctcgatccaaagttgcttgtccgtcagctctcagctatcgacactacactgttaattttggccccttgttggggagagtccagttcctaggtgacgacgaccacccccagttcggcgtagatcaaacacacactagcagaatgcagatttttaggattttttcaggcggcggggtggatccattcattgtcatgttgacaagactcataatagaaatacaggtaacatatgtatctccgctccgtggtaggattgataaggaatcatttatccagccggcgatgtagtccttattttttatgtttcgctgtccggttctggttgctggggttctgcaca

SEQ ID NO: 70216 - DNA, 3470 bp, Zea Mays
cgtttccggcccccccagccccccacccagttcgaaagcctccctccctccccgttctcccttccttgcctaggcggcaacgcaacacccccccgtgctttattataacccagcggcccctcccgcatgaggcaaccgagacgggacgagtccagcagccggccaccagcccatccgaaccctgctgcccccctctccgggttcgcgtgaggctgtgtgctgctgggaggagggagggggaagcggcggcggggcgccatggaggccgagaagaaggcgccggcggtgtcagacgtgggcgcgtgggcgatgaacgtcgtcagctccgtcagcctcatcatggccaacaagcagctcatgtcctcctccggctacgccttcgccttcgccaccacgctgaccgggttccacttcacggtcacggcgctcgtcgggtggatctccaacgccaccggctactccgtctccaagcacgtcccgctctgggagctcgtctggttctctctcgtcgccaacacctccatcaccgggatgaacctcagcctcatgctcaactccgtcggcttctaccagatctccaaactgagcatgattccggtggtctgcctcatggaatgggtgctgaacagcaagcactacaccaccaaggtcatctcggcggtggttgtcgtggccgccggtgtcgggatttgcaccgtcacggatgtcgaggtcaatgccaaggggttcatctgcgcttgcgtggcagtgttctgcacgtcgcttcaacagattgtgagctcttctccttttttcaccagtcttcttgctatagcccctttttttggtattgtgtattccattatgatgatatggagaattctagttttgacagccataatgctattctgcaatttgcaacgagatttggttatgtgactctgaatttgagctgtcagccttatgtaaaccgatttggtcaataatgatgaaatattttgaaattgattagaggttgttcatcctattagatgccttcccttgtgctcctaagttgtgaaaaggggaggcaaaacatgccgttttgggtctgagattcccctcataagttgttctgttgaagatgcccatcactgcttagttttgttgcaaaaaccacccgctatgcacacattcagccgattatgccattgtagtgccatgacaggccaagctagccgagtgaagtttgttcaagtgcttggattagctttattatcatgttgcagtcctcttttttcccgcaaatagcaagcctcagtttgtcaacatttaagctctcatcaggattgttttggtcgaatccctgaaaagtgccgggattatactttagtgattacattgacagttcgtaattgataaaagcaggttgaataggttaagcatacctgggatagaaccaagtaggggagtgggtatgatgcaacaaaatggcttatgggaggaactcaaaatccagatgatatgggttggtttttgcaattttccccttcaaacaattgagctgttttgggcatcacttaattgatttatctgtagcttgtagcctaactggttataactactcagcaaggcactgttactggaagccaaactttgcaactcagccctgaaatacaataatgcaggtcaatggtaaaaaggtactaaaagatcatcagttgagacatatcatgatctgccaattcatatactacattataagctgcacattgacagttctcatagatactactatgcttcctcactttttgtgttttcttgtactgtacaaatgtatttgcttgtttcgttgtatccttcaagatcagactacctgcaattaatttgaagatttttttgttgttttacattcttctcgtttcatcttcatttctacttctactatctatataaggagatgctttactaacaacaatatcgtctttgaagtttgtgttttactaacaaaaatctgatttttgaagtttctggaaaatttctaaactttagtaatacttttaagttgtacatgaataatttaatatttttagtatcgaatactgaaaagaaagttactttctacaacaatacttgtctcacagttacgcttatgcaatctactaagttccactatactctgagggggtgagctgatgatgtgtttcctcttcccagacaattggttcctttcaaaagaagtacaacattgggtcatttgagctgctgagcaaaactgcaccaatccaggcaatttcactcattatactgggcccctttgtggactactatctaaatggacggtcattgttgaactaccctttttcgggaggggcaactgtaagttatcctagtcacaattctcggttcttgagagcattgctatctttatgactactacttgtcctgagttatctatcttctactttaagttcattggcagtattctcatctcttcagcctatatgcttaactctattattttttgccattctactatagtgaaaaacccagccagtggccccgcctgtagtaaattcttgttgctgggatcatataagacagcttattctgacatggaattgccagaacacttatcctttttccttttcctatatcatttgcttaatattcttaatgacaatttgcatattggttgacttgactatataggttttcttggttttgcaccttaatttcttgattgccaaatttcttcatcttgctttcctgctccctggccgtcttctgcaacatgagccaatacctctgcatcggccggttctcagcgacctcgtttcaggtcctgggccacatgaagaccgtgtgtgtgctgatcctcggctggatcctgtttgactcggccctcaccgtgaagaacatcctcgggatgctgctcgccgtgatgggcatggtggtctacagctgggccatggaagcggagaagaaggtggcagcccctgtcccccggatcaagagcgaaatgctcgacggggaggacgtacccctcaaggccagggtgagcggcgtgcccgcggtcgacctcgaggacggcgagatgaagagctagctgccgccgccgccgctgattcgttcattcttcttgttcttttgtaactgtgcgcgcgcgatcgctcgatccaaagttgcttgtccgtcagctctcagctatcgacactacactgttaattttggccccttgttggggagagtccagttcctaggtgacgacgaccacccccagttcggcgtagatcaaacacacactagcagaatgcagatttttaggattttttcaggcggcggggtggatccattcattgtcatgttgacaagactcataatagaaatacaggtaacatatgtatctccgctccgtggtaggattgataaggaatcatttatccagccggcgatgtagtccttattttttatgtttcgctgtccggttctggttgctggggttctgcaca

SEQ ID NO: 70217 - DNA, 2147 bp, Zea Mays
cgtttccggcccccccagccccccacccagttcgaaagcctccctccctccccgttctcccttccttgcctaggcggcaacgcaacacccccccgtgctttattataacccagcggcccctcccgcatgaggcaaccgagacgggacgagtccagcagccggccaccagcccatccgaaccctgctgcccccctctccgggttcgcgtgaggctgtgtgctgctgggaggagggagggggaagcggcggcggggcgccatggaggccgagaagaaggcgccggcggtgtcagacgtgggcgcgtgggcgatgaacgtcgtcagctccgtcagcctcatcatggccaacaagcagctcatgtcctcctccggctacgccttcgccttcgccaccacgctgaccgggttccacttcacggtcacggcgctcgtcgggtggatctccaacgccaccggctactccgtctccaagcacgtcccgctctgggagctcgtctggttctctctcgtcgccaacacctccatcaccgggatgaacctcagcctcatgctcaactccgtcggcttctaccagatctccaaactgagcatgattccggtggtctgcctcatggaatgggtgctgaacagcaagcactacaccaccaaggtcatctcggcggtggttgtcgtggccgccggtgtcgggatttgcaccgtcacggatgtcgaggtcaatgccaaggggttcatctgcgcttgcgtggcagtgttctgcacgtcgcttcaacagattacaattggttcctttcaaaagaagtacaacattgggtcatttgagctgctgagcaaaactgcaccaatccaggcaatttcactcattatactgggcccctttgtggactactatctaaatggacggtcattgttgaactaccctttttcgggaggggcaactgtaagttatcctagtcacaattctcggttcttgagagcattgctatctttatgactactacttgtcctgagttatctatcttctactttaagttcattggcagtattctcatctcttcagcctatatgcttaactctattattttttgccattctactatagtgaaaaacccagccagtggccccgcctgtagtaaattcttgttgctgggatcatataagacagcttattctgacatggaattgccagaacacttatcctttttccttttcctatatcatttgcttaatattcttaatgacaatttgcatattggttgacttgactatataggttttcttggttttgcaccttaatttcttgattgccaaatgtaagcaaaatgtttgtagcagttgattgcagctacaaatgaagttactcattatgctcccttttaaacgttttgcagttcttcatcttgctttcctgctccctggccgtcttctgcaacatgagccaatacctctgcatcggccggttctcagcgacctcgtttcaggtcctgggccacatgaagaccgtgtgtgtgctgatcctcggctggatcctgtttgactcggccctcaccgtgaagaacatcctcgggatgctgctcgccgtgatgggcatggtggtctacagctgggccatggaagcggagaagaaggtggcagcccctgtcccccggatcaagagcgaaatgctcgacggggaggacgtacccctcaaggccagggtgagcggcgtgcccgcggtcgacctcgaggacggcgagatgaagagctagctgccgccgccgccgctgattcgttcattcttcttgttcttttgtaactgtgcgcgcgcgatcgctcgatccaaagttgcttgtccgtcagctctcagctatcgacactacactgttaattttggccccttgttggggagagtccagttcctaggtgacgacgaccacccccagttcggcgtagatcaaacacacactagcagaatgcagatttttaggattttttcaggcggcggggtggatccattcattgtcatgttgacaagactcataatagaaatacaggtaacatatgtatctccgctccgtggtaggattgataaggaatcatttatccagccggcgatgtagtccttattttttatgtttcgctgtccggttctggttgctggggttctgcaca

SEQ ID NO: 70218 - DNA, 2947 bp, Zea Mays
cgtttccggcccccccagccccccacccagttcgaaagcctccctccctccccgttctcccttccttgcctaggcggcaacgcaacacccccccgtgctttattataacccagcggcccctcccgcatgaggcaaccgagacgggacgagtccagcagccggccaccagcccatccgaaccctgctgcccccctctccgggttcgcgtgaggctgtgtgctgctgggaggagggagggggaagcggcggcggggcgccatggaggccgagaagaaggcgccggcggtgtcagacgtgggcgcgtgggcgatgaacgtcgtcagctccgtcagcctcatcatggccaacaagcagctcatgtcctcctccggctacgccttcgccttcgccaccacgctgaccgggttccacttcacggtcacggcgctcgtcgggtggatctccaacgccaccggctactccgtctccaagcacgtcccgctctgggagctcgtctggttctctctcgtcgccaacacctccatcaccgggatgaacctcagcctcatgctcaactccgtcggcttctaccagatctccaaactgagcatgattccggtggtctgcctcatggaatgggtgctgaacagcaagcactacaccaccaaggtcatctcggcggtggttgtcgtggccgccggtgtcgggatttgcaccgtcacggatgtcgaggtcaatgccaaggggttcatctgcgcttgcgtggcagtgttctgcacgtcgcttcaacagattgtgagctcttctccttttttcaccagtcttcttgctatagcccctttttttggtattgtgtattccattatgatgatatggagaattctagttttgacagccataatgctattctgcaatttgcaacgagatttggttatgtgactctgaatttgagctgtcagccttatgtaaaccgatttggtcaataatgatgaaatattttgaaattgattagaggttgttcatcctattagatgccttcccttgtgctcctaagttgtgaaaaggggaggcaaaacatgccgttttgggtctgagattcccctcataagttgttctgttgaagatgcccatcactgcttagttttgttgcaaaaaccacccgctatgcacacattcagccgattatgccattgtagtgccatgacaggccaagctagccgagtgaagtttgttcaagtgcttggattagctttattatcatgttgcagtcctcttttttcccgcaaatagcaagcctcagtttgtcaacatttaagctctcatcaggattgttttggtcgaatccctgaaaagtgccgggattatactttagtgattacattgacagttcgtaattgataaaagcaggttgaataggttaagcatacctgggatagaaccaagtaggggagtgggtatgatgcaacaaaatggcttatgggaggaactcaaaatccagatgatatgggttggtttttgcaattttccccttcaaacaattgagctgttttgggcatcacttaattgatttatctgtagcttgtagcctaactggttataactactcagcaaggcactgttactggaagccaaactttgcaactcagccctgaaatacaataatgcaggtcaatggtaaaaaggtactaaaagatcatcagttgagacatatcatgatctgccaattcatatactacattataagctgcacattgacagttctcatagatactactatgcttcctcactttttgtgttttcttgtactgtacaaatgtatttgcttgtttcgttgtatccttcaagatcagactacctgcaattaatttgaagatttttttgttgttttacattcttctcgtttcatcttcatttctacttctactatctatataaggagatgctttactaacaacaatatcgtctttgaagtttgtgttttactaacaaaaatctgatttttgaagtttctggaaaatttctaaactttagtaatacttttaagttgtacatgaataatttaatatttttagtatcgaatactgaaaagaaagttactttctacaacaatacttgtctcacagttacgcttatgcaatctactaagttccactatactctgagggggtgagctgatgatgtgtttcctcttcccagacaattggttcctttcaaaagaagtacaacattgggtcatttgagctgctgagcaaaactgcaccaatccaggcaatttcactcattatactgggcccctttgtggactactatctaaatggacggtcattgttgaactaccctttttcgggaggggcaactttcttcatcttgctttcctgctccctggccgtcttctgcaacatgagccaatacctctgcagctgggccatggaagcggagaagaaggtggcagcccctgtcccccggatcaagagcgaaatgctcgacggggaggacgtacccctcaaggccagggtgagcggcgtgcccgcggtcgacctcgaggacggcgagatgaagagctagctgccgccgccgccgctgattcgttcattcttcttgttcttttgtaactgtgcgcgcgcgatcgctcgatccaaagttgcttgtccgtcagctctcagctatcgacactacactgttaattttggccccttgttggggagagtccagttcctaggtgacgacgaccacccccagttcggcgtagatcaaacacacactagcagaatgcagatttttaggattttttcaggcggcggggtggatccattcattgtcatgttgacaagactcataatagaaatacaggtaacatatgtatctccgctccgtggtaggattgataaggaatcatttatccagccggcgatgtagtccttattttttatgtttcgctgtccggttctggttgctggggttctgcaca

SEQ ID NO: 70219 - DNA, 2706 bp, Zea Mays
gggaaaaagcgtcatgactcgactcgtgtcagtgtatcactcgtgtagtcgtgtggcgcggccccgctgcgcccttgtcgtcgccgcggcctccctccccgcgtcaatccgccgtcgtctcgttctcgtcaccaccccgcgaggccgcgaggtttttcaccgcttgcccgcctacccctccccgtgcccgttgacgtttccggcccccccagccccccacccagttcgaaagcctccctccctccccgttctcccttccttgcctaggcggcaacgcaacacccccccgtgctttattataacccagcggcccctcccgcatgaggcaaccgagacgggacgagtccagcagccggccaccagcccatccgaaccctgctgcccccctctccgggttcgcgtgaggctgtgtgctgctgggaggagggagggggaagcggcggcggggcgccatggaggccgagaagaaggcgccggcggtgtcagacgtgggcgcgtgggcgatgaacgtcgtcagctccgtcagcctcatcatggccaacaagcagctcatgtcctcctccggctacgccttcgccttcgccaccacgctgaccgggttccacttcacggtcacggcgctcgtcgggtggatctccaacgccaccggctactccgtctccaagcacgtcccgctctgggagctcgtctggttctctctcgtcgccaacacctccatcaccgggatgaacctcagcctcatgctcaactccgtcggcttctaccagatctccaaactgagcatgattccggtggtctgcctcatggaatgggtgctgaacagcaagcactacaccaccaaggtcatctcggcggtggttgtcgtggccgccggtgtcgggatttgcaccgtcacggatgtcgaggtcaatgccaaggggttcatctgcgcttgcgtggcagtgttctgcacgtcgcttcaacagattgtgagctcttctccttttttcaccagtcttcttgctatagcccctttttttggtattgtgtattccattatgatgatatggagaattctagttttgacagccataatgctattctgcaatttgcaacgagatttggttatgtgactctgaatttgagctgtcagccttatgtaaaccgatttggtcaataatgatgaaatattttgaaattgattagaggttgttcatcctattagatgccttcccttgtgctcctaagttgtgaaaaggggaggcaaaacatgccgttttgggtctgagattcccctcataagttgttctgttgaagatgcccatcactgcttagttttgttgcaaaaaccacccgctatgcacacattcagccgattatgccattgtagtgccatgacaggccaagctagccgagtgaagtttgttcaagtgcttggattagctttattatcatgttgcagtcctcttttttcccgcaaatagcaagcctcagtttgtcaacatttaagctctcatcaggattgttttggtcgaatccctgaaaagtgccgggattatactttagtgattacattgacagttcgtaattgataaaagcaggttgaataggttaagcatacctgggatagaaccaagtaggggagtgggtatgatgcaacaaaatggcttatgggaggaactcaaaatccagatgatatggcttgtagcctaactggttataactactcagcaaggcactgttactggaagccaaactttgcaactcagccctgaaatacaataatgcaggtcaatggtaaaaagacaattggttcctttcaaaagaagtacaacattgggtcatttgagctgctgagcaaaactgcaccaatccaggcaatttcactcattatactgggcccctttgtggactactatctaaatggacggtcattgttgaactaccctttttcgggaggggcaactttcttcatcttgctttcctgctccctggccgtcttctgcaacatgagccaatacctctgcatcggccggttctcagcgacctcgtttcaggtcctgggccacatgaagaccgtgtgtgtgctgatcctcggctggatcctgtttgactcggccctcaccgtgaagaacatcctcgggatgctgctcgccgtgatgggcatggtggtctacagctgggccatggaagcggagaagaaggtggcagcccctgtcccccggatcaagagcgaaatgctcgacggggaggacgtacccctcaaggccagggtgagcggcgtgcccgcggtcgacctcgaggacggcgagatgaagagctagctgccgccgccgccgctgattcgttcattcttcttgttcttttgtaactgtgcgcgcgcgatcgctcgatccaaagttgcttgtccgtcagctctcagctatcgacactacactgttaattttggccccttgttggggagagtccagttcctaggtgacgacgaccacccccagttcggcgtagatcaaacacacactagcagaatgcagatttttaggattttttcaggcggcggggtggatccattcattgtcatgttgacaagactcataatagaaatacaggtaacatatgtatctccgctccgtggtaggattgataaggaatcatttatccagccggcgatgtagtccttattttttatgtttcgctgtccggttctggttgctggggttctgcaca

SEQ ID NO: 70220 - DNA, 793 bp, Zea Mays
cgtagccttctcaatccaagaacagcactgctcgatgcctaccttagaactgacctcacctcacgcatcctggacaaatctcgagatacagtacgagatggtggcaccaatctaaacaaaccacggtttccaaccggggtgaatttaataagatagattgagttgcatagtcacctacatcaagctaacaaacagtccaccgcacacaccgcgccttgggtcagggtaacagcaacctgaacaagaaagacgcatcataaatatacgccacgcggtacatactataacccacacacaccatgtaaaggaaagttcatctacgattgcatggcgtcctctccatctgcttgccccggcacttcgttgaacatgtactggctctggtactccatcaggtactgcgtcgatcgcttcacgtccaggaacagctggtacacccggctaatgtcctccatctcgaccaccttccccttgcgcctctggcaggctagcgcggcagatgtgataaggttgatggcataccgcagagaggtctccacaccgatcttggtgagcagaaccttggcgtccgcggacatctccacgtcttcctcgtcgcaccggatatccaggatcttccggatctcatcctccgtgtagggatgcgtcgtgataatcagtagccggtcaaggaagtctggcgggatcccatgcggcgagcggtagtttgtcccgcggatagacgtgatccctcggttcgttgcgattactaagatcggcgccatgtcgttttccaacgcgcggttcaggaagg

SEQ ID NO: 70221 - DNA, 1714 bp, Zea Mays
ttctcttgtaaacttgtaggagaaataatccgctcacatttcatttcaattgaaatggaaaaaaacacgagttgattctgatgtcatatggtccatgatcaatcataggaactaaatctctgtatccatcttcctcttagtatggactaagtttaccttcctgacaataacatattaccttgtgatggtgagtattgaataacgacgtactaaatgaacaagataatttccttgtcaagtcaatcagaacattttgttttttattttagctttgaagatgtcatcccttggcaactttgtgtatatttcttttgagctgatttcatcttttcaagcaagtctcatcttccttctccatatttcttcggcataggatattaacaaaggcccaaagaacaaaccatcaattctgggaactgtttctctcaatctagcagattatgcattgacggctggagagacaattgagataattcttccgttgtctatacctggtggtgcacctgaacgagcctcatcccttcatctcactctgagtatggttgaattaagagcttttcaagaaacatctgatgcatcacagcgatctgctgcaaccttgccattgtccccatcacctagtgattctcttcctggaggaaaatatgaggttttggttattaaagcagggttgaggaaggtaaaaattctcacagatctggtgtcgacacgaaggcctaagaagacttgccagggaggtggcgaagataaatgacagagttgaggaagatgaatttggagattcaactatcaggaagtctttcagttatgggtatctgcaatctgtcaactatgttggtggcctagtttatgcccatgcaaagattgatggggagcatgaggactggatatattatagtaaccgaaaaactgatgtcggtttccatgtagagaaagtattgccatcaaccacagagaatggttgctaactgctaagcgcagtatacttccttggagaaagaggaaactgagtttacggtcgttgaaggctaaaggtgaacctctcttgaaaaaggcatatgggggaagagggaggtgatgatattgactaggatcgacgcttgctaacatcatctgatgaatctgtttcagagggatcaagaggatatggattagcaaatactatggtgtcagaatttggtgatgacaattttgtcattgaaaattgggagttgaaggagataattagttgtgatggtcgtatgaagctttcatcccagatgttctttgcatcaatagaccagagaagtgagcgagcagctggggagactgcatgtacatcacttgtagctattattgcagactggttccaagcaaatcagaatattatgcctatccagtcacagtttgacagccttatccgtgaaggatcactagagtggagaaacctttgtgagaacgagacatatagaaagcgttttcctgataagcactttgatcttgaaactgtccttcataccaaaattcacccgctgacagtttcccccagcaatcttttatttgatctgtcttattatgactatggatgagacttttgtgatataattgatgagactatggatttaaatattgttatgtgattatgtgtgagatgttttatgtgaaaatatgttgtgctatatagttgttgatatatttgttatgttgtggaatgtggtgtaaaataaaaataaac

SEQ ID NO: 70222 - DNA, 1569 bp, Zea Mays
gtaaaattttgtgttcagaatatggtcttttaccagttcccactcatggtgtgtttgaaaaaggaaagttctctgtagtttttggattctagctggatttggatctaaattcctaacgatttgagttcctattccatggtctaaacatgcactacatttctaagatattaacaaaggcccaaagaacaaaccatcaattctgggaactgtttctctcaatctagcagattatgcattgacggctggagagacaattgagataattcttccgttgtctatacctggtggtgcacctgaacgagcctcatcccttcatctcactctgagtatggttgaattaagagcttttcaagaaacatctgatgcatcacagcgatctgctgcaaccttgccattgtccccatcacctagtgattctcttcctggaggaaaatatgaggttttggttattaaagcagggttgaggaaggtaaaaattctcacagatctggtgtcgacacgaaggcctaagaagacttgccagggaggtggcgaagataagttctgtgttaacagtgatagtgttgaatatccatgcgatactgagtctcttgatgacgatctagatgacagagttgaggaagatgaatttggagattcaactatcaggaagtctttcagttatgggtatctgcaatctgtcaactatgttggtggcctagtttatgcccatgcaaagattgatggggagcatgaggactggatatattatagtaaccgaaaaactgatgtcggtttccatgtagagaaagtattgccatcaaccacagagaatggttgctaactgctaagcgcagtatacttccttggagaaagaggaaactgagtttacggtcgttgaaggctaaaggtgaacctctcttgaaaaaggcatatgggggaagagggaggtgatgatattgactaggatcgacgcttgctaacatcatctgatgaatctgtttcagagggatcaagaggatatggattagcaaatactatggtgtcagaatttggtgatgacaattttgtcattgaaaattgggagttgaaggagataattagttgtgatggtcgtatgaagctttcatcccagatgttctttgcatcaatagaccagagaagtgagcgagcagctggggagactgcatgtacatcacttgtagctattattgcagactggttccaagcaaatcagaatattatgcctatccagtcacagtttgacagccttatccgtgaaggatcactagagtggagaaacctttgtgagaacgagacatatagaaagcgttttcctgataagcactttgatcttgaaactgtccttcataccaaaattcacccgctgacagtttcccccagcaatcttttatttgatctgtcttattatgactatggatgagacttttgtgatataattgatgagactatggatttaaatattgttatgtgattatgtgtgagatgttttatgtgaaaatatgttgtgctatatagttgttgatatatttgttatgttgtggaatgtggtgtaaaataaaaataaac

SEQ ID NO: 70223 - DNA, 1725 bp, Zea Mays
ccgcccccgcccccggccccgcccgccgtgcccacctcgcggtccggctggccttgcctcctcctcctcgcttctctcagcctcaggccaacacgcagcccagggccgccgtcgccacggaggtgaggtggaaggagcgtagggcctccgcgcttggctcgctgcagcgagccgcggtcaggcgcaactgcacacgggaggacgccggcgtggcgtgggaggaggagttcgagagcgtcgtcaccctcgcggcgatgtcggagcgagagggcgccgcgttccacccatgggagctcgccttctgcgtcatcagcatgaggatattaacaaaggcccaaagaacaaaccatcaattctgggaactgtttctctcaatctagcagattatgcattgacggctggagagacaattgagataattcttccgttgtctatacctggtggtgcacctgaacgagcctcatcccttcatctcactctgagtatggttgaattaagagcttttcaagaaacatctgatgcatcacagcgatctgctgcaaccttgccattgtccccatcacctagtgattctcttcctggaggaaaatatgaggttttggttattaaagcagggttgaggaaggtaaaaattctcacagatctggtgtcgacacgaaggcctaagaagacttgccagggaggtggcgaagataagttctgtgttaacagtgatagtgttgaatatccatgcgatactgagtctcttgatgacgatctagatgacagagttgaggaagatgaatttggagattcaactatcaggaagtctttcagttatgggtatctgcaatctgtcaactatgttggtggcctagtttatgcccatgcaaagattgatggggagcatgaggactggatatattatagtaaccgaaaaactgatgtcggtttccatgtagagaaagtattgccatcaaccacagagaatggttgctaactgctaagcgcagtatacttccttggagaaagaggaaactgagtttacggtcgttgaaggctaaaggtgaacctctcttgaaaaaggcatatgggggaagagggaggtgatgatattgactaggatcgacgcttgctaacatcatctgatgaatctgtttcagagggatcaagaggatatggattagcaaatactatggtgtcagaatttggtgatgacaattttgtcattgaaaattgggagttgaaggagataattagttgtgatggtcgtatgaagctttcatcccagatgttctttgcatcaatagaccagagaagtgagcgagcagctggggagactgcatgtacatcacttgtagctattattgcagactggttccaagcaaatcagaatattatgcctatccagtcacagtttgacagccttatccgtgaaggatcactagagtggagaaacctttgtgagaacgagacatatagaaagcgttttcctgataagcactttgatcttgaaactgtccttcataccaaaattcacccgctgacagtttcccccagcaatcttttatttgatctgtcttattatgactatggatgagacttttgtgatataattgatgagactatggatttaaatattgttatgtgattatgtgtgagatgttttatgtgaaaatatgttgtgctatatagttgttgatatatttgttatgttgtggaatgtggtgtaaaataaaaataaac

SEQ ID NO: 70224 - DNA, 1182 bp, Zea Mays
gcaacctgggcacctgccattggcggcctcggcgacttcatcaacaacttgcgggcaaaacaaagtgtgaaatacagtccacgaacttagagacatgatttaaaaaactttaagagccacgagctggccggcctgagcttgctggccgtcgctctccagctgcgccggaccagcgagcgaatcttcccacgttgcttcagcctagcttagctcatatggcaacaatggcagctagctagctagctgcctactgcacaagttcttcgcacgaccaccctcaacaagaccctctaataatgtgaagttagttggtgccggtggcggccagttcgagcttctgcttgtctttcgtggccccgtcctggggtttcagctcgtcgtcggtggcgccgaacagcttgctcatcgcctccagcgtccggccgcgggtctccgggaggaaggtgaagaagaacacccacgcgagcaccgcgacgccggcgtagaggaagaaggcgccgccgatggtgatggccttggacagcgagatgaaggtcatggagatcacgccgctggtcaggcggttggaggccacgcccagcgcgcagcccatcgcgcgcacatgcagcgggaatacctccgagctgtacacccacgtgatggggccgaggccgatggagaagaaggccacgtaggccatggtagacgcgatggccacgccgatggcccatgggatcttttcgtcctggtagtgcccgatgacggtgagcccggcggcgagcccgaccagcgagaagatcatgccgcccacgctgctcaggaggagcggccgccggccgactctatcgagcaggaacgtggccaccaggatgaagagcgtcttggtgacgcccaccgcgcaggtcgttcccaggagctggttgtcgctggtgatgccggcggccttgaacacgcgcgggctgtacagcaccacggcgtcgatgccggacgcctgctggaagaagtggatgccgatgcccgagaggaggatgcgacgcatggccggggtcggggacaggatgagctccttccacacccgcgcctcctcgctgtcccgcttctttggcacggccaccacgtcgccgtcgagctcctgcgggatgccggcggcggccttgatgtcagcgagcctctccgcggcctcctccggcgaggatgccgaag

SEQ ID NO: 70225 - DNA, 2119 bp, Zea Mays
agagggttccttcctccgtcctgggtcaacaaaacccgacggagcagccccggtccccggcacttcacacgtagcgcgcagccgcagagtcaccgtctcgcttcgcagtcctactcgcactgtcgcacacacccgtccccatcctcttccggtctcgccctcccctcacgccgctcgccgcgtccggccgcggcaacccgacctgcgtcaatcgccatgttagggaactgaggacttcccctcctgccaaggcccaagtggagcattctcccactatctctgcaactatagcctgaggagattttcgacttcttgaagattatcacgtttctctgtttccaattctaagtttcggtagcatatcaattattttcttttagggctcgtttgttttccttcattttaatgaattggaatctaactaatggaatagactatttttttagaatgtgacattccactactttccaaagtttatatataagcctatctcaaattcatgaggtgagagatgaaaattgattctatagattaacataattacatgctacttctctaatgtacaacttatagcacactcttttatttgcttgtctatagcataagtgtagtgtataactatctctctcatgtgatttaggataatatacaaatatattacatatacaaatatattaacttaagtagtttgtgtctaaattatgattattagaatggaattcaaatccaatgaaacaaacgggccttagggaaatgggaattttattgccttaacaaagcaaatagaagaaacctctggttttcaaatgataggccagatctgagcaaatctgccaatggcactgtaggactttgtacatcaattatcctttcccgaagtatacagggtgtgtaacatatttgtttaagttactgttccatgtgtcatgttaatttgcatttcagttccttgcattgcactgaccaaacgcagtgtttctttgtatcatctctttggacatgttattgtcacatcatgtggaatgatttttttaacgattctgaacagactacctcaaggcgtcttgccgataggaagatagcacgatttgagaagaatatcacaaagaggggctctgttcctgagacagtcaagaaggcaaatgattatcctgttggacctattcttcttgggttctttgtcttcgttgttgttggatcatctctctttcagatcatcaagacagcatcaaacgctggtttattctgaggacaattggtcacttacttttagtcactctaaagtcgaggaacagggttgacatatgcagtttgtcacttaaaaactatacaagtgtatggcgtagctggtactctacaatgtcgcctttctaatgctgtaccatggagagttttaagttataatgtatagtccatatatatatatatatgcaatggaagtgctaatttaagtcacttagctgacagggaatacgttcaatccataatacattacatatcgagtaaggtctagtttgagtattctagtattaacctcaattcacatgtattgaggtagtttgatgtgtaatttaaactaatttacacttcaacacatgtggaacatgtggattgaagtctaaagtactcaaacaaagactaaagttatttttatgctcaaattggtcttaccattggggtactgtactgtttgatctgcggactaacctggtaatcctccgcgaaattttatattgggtgtactatattttaaactgtagtattctaaaactgttgtaaaaaataccatgagtacgtcatgacattccaaaactgtggcgtggtatttcgaaactgtggttttgaaatattttactcccaaactttagtattgtctgcattctgaatttgtgtttgctattatttatatcgtagcttcaacctcgaagaacgttctgcctaacagcaacttacatcggacaccgcgtaagtacaattaatgtgggcttcgtgggccgctttgactttgcacatgctcgaaagcacattcattataaatacaaatacatgttcgtagttttacgatactatatttgaaattgtcgtgacagcattatagtttttatcagcaccaaaaata

SEQ ID NO: 70226 - DNA, 1910 bp, Zea Mays
gtgtggcccacgggaagtctcgagagggttccttcctccgtcctgggtcaacaaaacccgacggagcagccccggtccccggcacttcacacgtagcgcgcagccgcagagtcaccgtctcgcttcgcagtcctactcgcactgtcgcacacacccgtccccatcctcttccggtctcgccctcccctcacgccgctcgccgcgtccggccgcggcaacccgacctgcgtcaatcgccatgactacctcaaggcgtcttgccgataggaagatagcacgatttgagaagaatatcacaaagaggggctctgttcctgagacagtcaagaaggcaaatgattatcctgttggacctattcttcttgggttctttgtcttcgttgttgttggatcatgtaagtccttatgtttctgatgttttgtggttgatggtcttcctggacactctttcgcctttaacagttgaatgcatctgctgtctgccatcctaccaaatcagctcggaatcatcatcaatcctaagttcctaacacagtttcttgtcagttgttatttgtattacagtaacatgcttattattctgaagggtaatgctttatgtgccttggccagctaaattgtggtacatgactaatgagcagcagttctttgcaaagtaatcagcacttctgtgctttgaattttgaatttggaagtttggacttgttggacctaaaatgttctcttggtttactctaagatgtattggctaacaaccatagccattaactgtaccactctgataacgacttacagtggaatagagaagtacaaaaattgcagggcaagggttttataccgtagttatatacttgctcaatctaatatgaatatgatgcttccagagaattgtgagttttatgtagcctgatcattttttaccctagtgttagaaaaatgcttatgagctatttgaatttgcggtctgagttatttactctctccttcatgcagctctctttcagatcatcaagacagcatcaaacgctggtttattctgaggacaattggtcacttacttttagtcactctaaagtcgaggaacagggttgacatatgcagtttgtcacttaaaaactatacaagtgtatggcgtagctggtactctacaatgtcgcctttctaatgctgtaccatggagagttttaagttataatgtatagtccatatatatatatatatgcaatggaagtgctaatttaagtcacttagctgacagggaatacgttcaatccataatacattacatatcgagtaaggtctagtttgagtattctagtattaacctcaattcacatgtattgaggtagtttgatgtgtaatttaaactaatttacacttcaacacatgtggaacatgtggattgaagtctaaagtactcaaacaaagactaaagttatttttatgctcaaattggtcttaccattggggtactgtactgtttgatctgcggactaacctggtaatcctccgcgaaattttatattgggtgtactatattttaaactgtagtattctaaaactgttgtaaaaaataccatgagtacgtcatgacattccaaaactgtggcgtggtatttcgaaactgtggttttgaaatattttactcccaaactttagtattgtctgcattctgaatttgtgtttgctattatttatatcgtagcttcaacctcgaagaacgttctgcctaacagcaacttacatcggacaccgcgtaagtacaattaatgtgggcttcgtgggccgctttgactttgcacatgctcgaaagcacattcattataaatacaaatacatgttcgtagttttacgatactatatttgaaattgtcgtgacagcattatagtttttatcagcaccaaaaata

SEQ ID NO: 70227 - DNA, 3087 bp, Zea Mays
aagtcccaacgaaccttgcggccggggaatatcatttatcgcccgagtctgcaggggtggggacgtggtgtacatcattgctggtcatgccccaacaatcccccctgtgttcgttggtgtcgcgggtgttgttgttccgagatggaggaaaacgagacgaggacggtattatgttgtcctggtgaaagatgctcctaagtacgtcactcatggtttccaaccggcggtgcctcttgctggcagtgattttaacaagatttgtgttaccttcaaatctgaaagcatattcactcacacagatgttcagaactacttcaggtatcatcatctaacttcagtgtttgatgcattttgacttgaagcctctacctgttatgtcgttgtgcacctgtaaataccatttttgtgatatttctaccagtcagtatggtactgttagtgaagagagattttcagaagagagacacatgcacggtcatgtgagttttgtggaccttgagactgcaaaacggatcatatcagaaagtggccctcatttcatctgtggaaatgaagttcgtgccaaagcgtacagggaaaaacatgaactgaaattgatcaagaggctccttctaattaatgaatggcatcctaagaaacaagcaactgtcattctcactggattgatcaagaggctccttctgattataagcatctcagatagttttactttacacagatgcttgtttcttaggatgtggtgcattaattattaaatggaacaactgacttattttttctaaacgttttggctatttcagcttcagacaaggacggcataatgttgtcccagtggaagatgctcctaagtatatgactggtggttttgtattagagatgcctcctgctagcagtgcttctaacaagatttttattaccttcaactgtatacacatattcactcatacatctgtccagaaatacttcagccagtatggtactgttaatgaagtgataattccaataatgcaaaagaggcccgatttcggttttgtaagtttcctggactctgagtccgtaaaacagatcttatcagaaaggggccctcatttcatctgtggaaatgaagttcatgtcaaagcatacagggaaaagcatgaattggagtaaggatcttataattagttgttttctgttgctttctgcttatgtattgtagtaacgcagagtttaagcatactgtgatcattttctgttaaatgatgtctcatccatgttttggatgttcatatctataatcttatttttacctgtgacccctttttgtataactcttgaattgagttcatcacgtcaatttctttttgttccctttgtacaattgagtacttttgtcttgttaatacaagtttaggaataaagccattatatttctgttttaaaatgtgttgaaggtacatgatgttaactgagaaagatatccattgtaactgcggtgtacgcgatgtgtcagatgtgggcgatttgcaattttgccaccattggcagtggacttcgctaatttgctatcggacacacaaatcatagacacataccggacccacaaatcatagacacttgggggtggcgacattgcaaatatttcgtcagatgtagatgcagttggtgagcatcatacagtgactattggtgactttgggcttcagacgaccttggaatttgactactgagactctgagaggaagcttcgtccactaacaaacattgacaaaagactcaagtgcaagtgctctgatcagtgacttagaagacttcaaatacagttcatttttcagttaacaaaaggaggaagttagaactacgccgtataacaaatcaaaatacaatacaattcatttttttcagttaacaaaagaggacatgacagaacatgaacatttcatacgaaacctgtatgaccggcagatacatctaggtgtagttgaagtatgttagcaactcgtaatacacgacctccaaaccaatagctagaggaacactctgtatactattctggcaaatcagggtacaacagaatgtattagagatagaagaaccggtaacatgagaggaaaggagaggaggcagatgagagtaatggggaaatgtagtcttcagtttgtaaattgattctttgatgatcctccacagcttcaacatgtctccttttatagctgaatatgcctaattgccacctgtcaaagaccccacatgacagtatgctgacattccccaccgcttgaaatgcggcttgcccctaagccgctgatagtgtagacaagattggtggatcaacttcttcaagcgtgcaagtgtgcagagaattgtagcaagaatgtcgaacgttccatgagcttggagatagaatgggaacccttgatccgaacccctaagtagcagtaacttggacttcgcgacagcgtcatatcaacagcgtcaaaggcattgcagaggcattatggtcctttaatgtggtaacaagtggacatgtgcaattccaagcattggctctgaatattcctagcaacaagaaaaggtgcaatgcgtactgtaacgaagcacctgtggtactgtagctgcaatccactttgaacaggctgcctcgatcaattgccaaccaaggatgctttgtcagaatgttgaccacgaccagtgatttaatccatcgcaccaaggctgcataacagtaaaaagatggccacgacataggtctaacttgaacaccatcaccgagtagcacaaattgcatgggtggtggcatggttgcttgtacggcacgacatcccaaccacaaccacagccaaatggagggcatctcatttctggtttctttgctcgcccaatgaattcgtggaaccatgaacttgtttttgtttctttcgatgcaaatatgtcctgccacttccatttctcacattttctgagtccatcgaccaggccatcgtccttggagagggtaccgtcgtagccgttcaccttgcagtccaccatcgactcgtgcggcaggagcagcatggcggccgagtacatgtgcagggtctcgttgatgatgcagtgcaggtagccgag

SEQ ID NO: 70228 - DNA, 3663 bp, Zea Mays
aagtcccaacgaaccttgcggccggggaatatcatttatcgcccgagtctgcaggggtggggacgtggtgtacatcattgctggtcatgccccaacaatcccccctgtgttcgttggtgtcgcgggtgttgttgttccgagatggaggaaaacgaggaaacaaaaaatggatatagaggagtgcaggacgaggttgcaggataaggtccgcctacttcatccaaagaatgccgaagggatcgttgactacatgattgcaaacacaccacttgagaatatcagatcatatttgttgactgccacagataatgtactaatgaacctatttgagggtgcaaaccgcctgcaaaatatcctgaatttgtccgaggaaaatgagcccctatttggtctattcaccccctttgatcagattggaccacagaagcagcaccagttttcttcaagaaaccattctcaggtccttcaggctccattgtaccccattggcccaagtggagcttttcagaatccatactcgaaactcactggcttcagggatcatttccagtctttgagcattctggatggtgacacgccgagtcactacaaatgtgctagtataaatgttggtggctatcccagtaatggcaaggtccaaacaaagacttgtcgtttttacttgtccattagaaagtgtaagtatggtgagaattgtcacttttcccttgtgtgcggttacccagagattaatgacatgaggcaagttgaccaccttggttcattgcaaatgttggagatggagatcgatctcctgttgctgcagccatcatcacaagtcccggtagatcatcttgaaaaaaaattccttgagatttatacaaagcttctggaaattgatggattccatacagaggaccagaggaataggaagactggttacggcctcacagatctgttcatgcaacttaacgccaccagagagactgagaggttccttctgatcctaaacatttcagctagttttactctgcattattgcatagatgtttgttgcttacgttgccttgtgtttctatcattaagtgttaaatggcaaattgttttatttttcttctaagtgttttggctatttcaacttcagacgaggacggtattatgttgtcctggtgaaagatgctcctaagtacgtcactcatggtttccaaccggcggtgcctcttgctggcagtgattttaacaagatttgtgttaccttcaaatctgaaagcatattcactcacacagatgttcagaactacttcagtcagtatggtactgttagtgaagagagattttcagaagagagacacatgcacggtcatgtgagttttgtggaccttgagactgcaaaacggatcatatcagaaagtggccctcatttcatctgtggaaatgaagttcgtgccaaagcgtacagggaaaaacatgaactgaaattgatcaagaggctccttctaattaatgaatggcatcctaagaaacaagcaactgtcattctcactggattgatcaagaggctccttctgattataagcatctcagatagttttactttacacagatgcttgtttcttaggatgtggtgcattaattattaaatggaacaactgacttattttttctaaacgttttggctatttcagcttcagacaaggacggcataatgttgtcccagtggaagatgctcctaagtatatgactggtggttttgtattagagatgcctcctgctagcagtgcttctaacaagatttttattaccttcaactgtatacacatattcactcatacatctgtccagaaatacttcagccagtatggtactgttaatgaagtgataattccaataatgcaaaagaggcccgatttcggttttgtaagtttcctggactctgagtccgtaaaacagatcttatcagaaaggggccctcatttcatctgtggaaatgaagttcatgtcaaagcatacagggaaaagcatgaattggagtacatgatgttaactgagaaagatatccattgtaactgcggtgtacgcgatgtgtcagatgtgggcgatttgcaattttgccaccattggcagtggacttcgctaatttgctatcggacacacaaatcatagacacataccggacccacaaatcatagacacttgggggtggcgacattgcaaatatttcgtcagatgtagatgcagttggtgagcatcatacagtgactattggtgactttgggcttcagacgaccttggaatttgactactgagactctgagaggaagcttcgtccactaacaaacattgacaaaagactcaagtgcaagtgctctgatcagtgacttagaagacttcaaatacagttcatttttcagttaacaaaaggaggaagttagaactacgccgtataacaaatcaaaatacaatacaattcatttttttcagttaacaaaagaggacatgacagaacatgaacatttcatacgaaacctgtatgaccggcagatacatctaggtgtagttgaagtatgttagcaactcgtaatacacgacctccaaaccaatagctagaggaacactctgtatactattctggcaaatcagggtacaacagaatgtattagagatagaagaaccggtaacatgagaggaaaggagaggaggcagatgagagtaatggggaaatgtagtcttcagtttgtaaattgattctttgatgatcctccacagcttcaacatgtctccttttatagctgaatatgcctaattgccacctgtcaaagaccccacatgacagtatgctgacattccccaccgcttgaaatgcggcttgcccctaagccgctgatagtgtagacaagattggtggatcaacttcttcaagcgtgcaagtgtgcagagaattgtagcaagaatgtcgaacgttccatgagcttggagatagaatgggaacccttgatccgaacccctaagtagcagtaacttggacttcgcgacagcgtcatatcaacagcgtcaaaggcattgcagaggcattatggtcctttaatgtggtaacaagtggacatgtgcaattccaagcattggctctgaatattcctagcaacaagaaaaggtgcaatgcgtactgtaacgaagcacctgtggtactgtagctgcaatccactttgaacaggctgcctcgatcaattgccaaccaaggatgctttgtcagaatgttgaccacgaccagtgatttaatccatcgcaccaaggctgcataacagtaaaaagatggccacgacataggtctaacttgaacaccatcaccgagtagcacaaattgcatgggtggtggcatggttgcttgtacggcacgacatcccaaccacaaccacagccaaatggagggcatctcatttctggtttctttgctcgcccaatgaattcgtggaaccatgaacttgtttttgtttctttcgatgcaaatatgtcctgccacttccatttctcacattttctgagtccatcgaccaggccatcgtccttggagagggtaccgtcgtagccgttcaccttgcagtccaccatcgactcgtgcggcaggagcagcatggcggccgagtacatgtgcagggtctcgttgatgatgcagtgcaggtagccgag

SEQ ID NO: 70229 - DNA, 4023 bp, Zea Mays
aagtcccaacgaaccttgcggccggggaatatcatttatcgcccgagtctgcaggggtggggacgtggtgtacatcattgctggtcatgccccaacaatcccccctgtgttcgttggtgtcgcgggtgttgttgttccgagatggaggaaaacgaggaaacaaaaaatggatatagaggagtgcaggacgaggttgcaggataaggtccgcctacttcatccaaagaatgccgaagggatcgttgactacatgattgcaaacacaccacttgagaatatcagatcatatttgttgactgccacagataatgtactaatgaacctatttgagggtgcaaaccgcctgcaaaatatcctgaatttgtccgaggaaaatgagcccctatttggtctattcaccccctttgatcagattggaccacagaagcagcaccagttttcttcaagaaaccattctcaggtccttcaggctccattgtaccccattggcccaagtggagcttttcagaatccatactcgaaactcactggcttcagggatcatttccagtctttgagcattctggatggtgacacgccgagtcactacaaatgtgctagtataaatgttggtggctatcccagtaatggcaaggtccaaacaaagacttgtcgtttttacttgtccattagaaagtgtaagtatggtgagaattgtcacttttcccttgtgtgcggttacccagagattaatgacatgaggcaagttgaccaccttggttcattgcaaatgttggagatggagatcgatctcctgttgctgcagccatcatcacaagtcccggtagatcatcttgaaaaaaaattccttgagatttatacaaagcttctggaaattgatggattccatacagaggaccagaggaataggaagactggttacggcctcacagatctgttcatgcaacttaacgccaccagagagactgagagacgaggacggtattatgttgtcctggtgaaagatgctcctaagtacgtcactcatggtttccaaccggcggtgcctcttgctggcagtgattttaacaagatttgtgttaccttcaaatctgaaagcatattcactcacacagatgttcagaactacttcagtcagtatggtactgttagtgaagagagattttcagaagagagacacatgcacggtcatgtgagttttgtggaccttgagactgcaaaacggatcatatcagaaagtggccctcatttcatctgtggaaatgaagttcgtgccaaagcgtacagggaaaaacatgaactgaagtaaggatcttataattggttgttttctgttggttgctgcttatgtattatagtgccacacggtgtaagcataatagcgtactgcaatcgtttttcattagttgatgtatctttcatggtttaacaattagcagtttcatgcctagaatctttattgttaaccgtggttaaaattttacatgagcttgtttttatgtagtcttatagctgtcattctcaccagattgatcaagaggctccttctaattaatgaatggcatcctaagaaacaagcaactgtcattctcactggattgatcaagaggctccttctgattataagcatctcagatagttttactttacacagatgcttgtttcttaggatgtggtgcattaattattaaatggaacaactgacttattttttctaaacgttttggctatttcagcttcagacaaggacggcataatgttgtcccagtggaagatgctcctaagtatatgactggtggttttgtattagagatgcctcctgctagcagtgcttctaacaagatttttattaccttcaactgtatacacatattcactcatacatctgtccagaaatacttcagccagtatggtactgttaatgaagtgataattccaataatgcaaaagaggcccgatttcggttttgtaagtttcctggactctgagtccgtaaaacagatcttatcagaaaggggccctcatttcatctgtggaaatgaagttcatgtcaaagcatacagggaaaagcatgaattggagtaaggatcttataattagttgttttctgttgctttctgcttatgtattgtagtaacgcagagtttaagcatactgtgatcattttctgttaaatgatgtctcatccatgttttggatgttcatatctataatcttatttttacctgtgacccctttttgtataactcttgaattgagttcatcacgtcaatttctttttgttccctttgtacaattgagtacttttgtcttgttaatacaagtttaggaataaagccattatatttctgttttaaaatgtgttgaaggtacatgatgttaactgagaaagatatccattgtaactgcggtgtacgcgatgtgtcagatgtgggcgatttgcaattttgccaccattggcagtggacttcgctaatttgctatcggacacacaaatcatagacacataccggacccacaaatcatagacacttgggggtggcgacattgcaaatatttcgtcagatgtagatgcagttggtgagcatcatacagtgactattggtgactttgggcttcagacgaccttggaatttgactactgagactctgagaggaagcttcgtccactaacaaacattgacaaaagactcaagtgcaagtgctctgatcagtgacttagaagacttcaaatacagttcatttttcagttaacaaaaggaggaagttagaactacgccgtataacaaatcaaaatacaatacaattcatttttttcagttaacaaaagaggacatgacagaacatgaacatttcatacgaaacctgtatgaccggcagatacatctaggtgtagttgaagtatgttagcaactcgtaatacacgacctccaaaccaatagctagaggaacactctgtatactattctggcaaatcagggtacaacagaatgtattagagatagaagaaccggtaacatgagaggaaaggagaggaggcagatgagagtaatggggaaatgtagtcttcagtttgtaaattgattctttgatgatcctccacagcttcaacatgtctccttttatagctgaatatgcctaattgccacctgtcaaagaccccacatgacagtatgctgacattccccaccgcttgaaatgcggcttgcccctaagccgctgatagtgtagacaagattggtggatcaacttcttcaagcgtgcaagtgtgcagagaattgtagcaagaatgtcgaacgttccatgagcttggagatagaatgggaacccttgatccgaacccctaagtagcagtaacttggacttcgcgacagcgtcatatcaacagcgtcaaaggcattgcagaggcattatggtcctttaatgtggtaacaagtggacatgtgcaattccaagcattggctctgaatattcctagcaacaagaaaaggtgcaatgcgtactgtaacgaagcacctgtggtactgtagctgcaatccactttgaacaggctgcctcgatcaattgccaaccaaggatgctttgtcagaatgttgaccacgaccagtgatttaatccatcgcaccaaggctgcataacagtaaaaagatggccacgacataggtctaacttgaacaccatcaccgagtagcacaaattgcatgggtggtggcatggttgcttgtacggcacgacatcccaaccacaaccacagccaaatggagggcatctcatttctggtttctttgctcgcccaatgaattcgtggaaccatgaacttgtttttgtttctttcgatgcaaatatgtcctgccacttccatttctcacattttctgagtccatcgaccaggccatcgtccttggagagggtaccgtcgtagccgttcaccttgcagtccaccatcgactcgtgcggcaggagcagcatggcggccgagtacatgtgcagggtctcgttgatgatgcagtgcaggtagccgag

SEQ ID NO: 70230 - DNA, 3678 bp, Zea Mays
ccaagtcccaacgaaccttgcggccggggaatatcatttatcgcccgagtctgcaggggtggggacgtggtgtacatcattgctggtcatgccccaacaatcccccctgtgttcgttggtgtcgcgggtgttgttgttccgagatggaggaaaacgaggaaacaaaaaatggatatagaggagtgcaggacgaggttgcaggataaggtccgcctacttcatccaaagaatgccgaagggatcgttgactacatgattgcaaacacaccacttgagaatatcagatcatatttgttgactgccacagataatgtactaatgaacctatttgagggtgcaaaccgcctgcaaaatatcctgaatttgtccgaggaaaatgagcccctatttggtctattcaccccctttgatcagattggaccacagaagcagcaccagttttcttcaagaaaccattctcaggtccttcaggctccattgtaccccattggcccaagtggagcttttcagaatccatactcgaaactcactggcttcagggatcatttccagtctttgagcattctggatggtgacacgccgagtcactacaaatgtgctagtataaatgttggtggctatcccagtaatggcaaggtccaaacaaagacttgtcgtttttacttgtccattagaaagtgtaagtatggtgagaattgtcacttttcccttgtgtgcggttacccagagattaatgacatgaggcaagttgaccaccttggttcattgcaaatgttggagatggagatcgatctcctgttgctgcagccatcatcacaagtcccggtagatcatcttgaaaaaaaattccttgagatttatacaaagcttctggaaattgatggattccatacagaggaccagaggaataggaagactggttacggcctcacagatctgttcatgcaacttaacgccaccagagagactgagagacgaggacggtattatgttgtcctggtgaaagatgctcctaagtacgtcactcatggtttccaaccggcggtgcctcttgctggcagtgattttaacaagatttgtgttaccttcaaatctgaaagcatattcactcacacagatgttcagaactacttcagtcagtatggtactgttagtgaagagagattttcagaagagagacacatgcacggtcatgtgagttttgtggaccttgagactgcaaaacggatcatatcagaaagtggccctcatttcatctgtggaaatgaagttcgtgccaaagcgtacagggaaaaacatgaactgaagtaaggatcttataattggttgttttctgttggttgctgcttatgtattatagtgccacacggtgtaagcataatagcgtactgcaatcgtttttcattagttgatgtatctttcatggtttaacaattagcagtttcatgcctagaatctttattgttaaccgtggttaaaattttacatgagcttgtttttatgtagtcttatagctgtcattctcaccagattgatcaagaggctccttctaattaatgaatggcatcctaagaaacaagcaactgtcattctcactggattgatcaagaggctccttctgattataagcatctcagatagttttactttacacagatgcttgtttcttaggatgtggtgcattaattattaaatggaacaactgacttattttttctaaacgttttggctatttcagcttcagacaaggacggcataatgttgtcccagtggaagatgctcctaagtatatgactggtggttttgtattagagatgcctcctgctagcagtgcttctaacaagatttttattaccttcaactgtatacacatattcactcatacatctgtccagaaatacttcagccagtatggtactgttaatgaagtgataattccaataatgcaaaagaggcccgatttcggttttgtaagtttcctggactctgagtccgtaaaacagatcttatcagaaaggggccctcatttcatctgtggaaatgaagttcatgtcaaagcatacagggaaaagcatgaattggaatgtgggcgatttgcaattttgccaccattggcagtggacttcgctaatttgctatcggacacacaaatcatagacacataccggacccacaaatcatagacacttgggggtggcgacattgcaaatatttcgtcagatgtagatgcagttggtgagcatcatacagtgactattggtgactttgggcttcagacgaccttggaatttgactactgagactctgagaggaagcttcgtccactaacaaacattgacaaaagactcaagtgcaagtgctctgatcagtgacttagaagacttcaaatacagttcatttttcagttaacaaaaggaggaagttagaactacgccgtataacaaatcaaaatacaatacaattcatttttttcagttaacaaaagaggacatgacagaacatgaacatttcatacgaaacctgtatgaccggcagatacatctaggtgtagttgaagtatgttagcaactcgtaatacacgacctccaaaccaatagctagaggaacactctgtatactattctggcaaatcagggtacaacagaatgtattagagatagaagaaccggtaacatgagaggaaaggagaggaggcagatgagagtaatggggaaatgtagtcttcagtttgtaaattgattctttgatgatcctccacagcttcaacatgtctccttttatagctgaatatgcctaattgccacctgtcaaagaccccacatgacagtatgctgacattccccaccgcttgaaatgcggcttgcccctaagccgctgatagtgtagacaagattggtggatcaacttcttcaagcgtgcaagtgtgcagagaattgtagcaagaatgtcgaacgttccatgagcttggagatagaatgggaacccttgatccgaacccctaagtagcagtaacttggacttcgcgacagcgtcatatcaacagcgtcaaaggcattgcagaggcattatggtcctttaatgtggtaacaagtggacatgtgcaattccaagcattggctctgaatattcctagcaacaagaaaaggtgcaatgcgtactgtaacgaagcacctgtggtactgtagctgcaatccactttgaacaggctgcctcgatcaattgccaaccaaggatgctttgtcagaatgttgaccacgaccagtgatttaatccatcgcaccaaggctgcataacagtaaaaagatggccacgacataggtctaacttgaacaccatcaccgagtagcacaaattgcatgggtggtggcatggttgcttgtacggcacgacatcccaaccacaaccacagccaaatggagggcatctcatttctggtttctttgctcgcccaatgaattcgtggaaccatgaacttgtttttgtttctttcgatgcaaatatgtcctgccacttccatttctcacattttctgagtccatcgaccaggccatcgtccttggagagggtaccgtcgtagccgttcaccttgcagtccaccatcgactcgtgcggcaggagcagcatggcggccgagtacatgtgcagggtctcgttgatgatgcagtgcaggtagccgag

SEQ ID NO: 70231 - DNA, 3458 bp, Zea Mays
ctcccaagtcccaacgaaccttgcggccggggaatatcatttatcgcccgagtctgcaggggtggggacgtggtgtacatcattgctggtcatgccccaacaatcccccctgtgttcgttggtgtcgcgggtgttgttgttccgagatggaggaaaacgaggaaacaaaaaatggatatagaggagtgcaggacgaggttgcaggataaggtccgcctacttcatccaaagaatgccgaagggatcgttgactacatgattgcaaacacaccacttgagaatatcagatcatatttgttgactgccacagataatgtactaatgaacctatttgagggtgcaaaccgcctgcaaaatatcctgaatttgtccgaggaaaatgagcccctatttggtctattcaccccctttgatcagattggaccacagaagcagcaccagttttcttcaagaaaccattctcaggtccttcaggctccattgtaccccattggcccaagtggagcttttcagaatccatactcgaaactcactggcttcagggatcatttccagtctttgagcattctggatggtgacacgccgagtcactacaaatgtgctagtataaatgttggtggctatcccagtaatggcaaggtccaaacaaagacttgtcgtttttacttgtccattagaaagtgtaagtatggtgagaattgtcacttttcccttgtgtgcggttacccagagattaatgacatgaggcaagttgaccaccttggttcattgcaaatgttggagatggagatcgatctcctgttgctgcagccatcatcacaagtcccggtagatcatcttgaaaaaaaattccttgagatttatacaaagcttctggaaattgatggattccatacagaggaccagaggaataggaagactggttacggcctcacagatctgttcatgcaacttaacgccaccagagagactgagagacgaggacggtattatgttgtcctggtgaaagatgctcctaagtacgtcactcatggtttccaaccggcggtgcctcttgctggcagtgattttaacaagatttgtgttaccttcaaatctgaaagcatattcactcacacagatgttcagaactacttcagtcagtatggtactgttagtgaagagagattttcagaagagagacacatgcacggtcatgtgagttttgtggaccttgagactgcaaaacggatcatatcagaaagtggccctcatttcatctgtggaaatgaagttcgtgccaaagcgtacagggaaaaacatgaactgaaattgatcaagaggctccttctaattaatgaatggcatcctaagaaacaagcaactgtcattctcactggattgatcaagaggctccttctgattataagcatctcagatagttttactttacacagatgcttgtttcttaggatgtggtgcattaattattaaatggaacaactgacttattttttctaaacgttttggctatttcagcttcagacaaggacggcataatgttgtcccagtggaagatgctcctaagtatatgactggtggttttgtattagagatgcctcctgctagcagtgcttctaacaagatttttattaccttcaactgtatacacatattcactcatacatctgtccagaaatacttcagccagtatggtactgttaatgaagtgataattccaataatgcaaaagaggcccgatttcggttttgtaagtttcctggactctgagtccgtaaaacagatcttatcagaaaggggccctcatttcatctgtggaaatgaagttcatgtcaaagcatacagggaaaagcatgaattggaatgtgggcgatttgcaattttgccaccattggcagtggacttcgctaatttgctatcggacacacaaatcatagacacataccggacccacaaatcatagacacttgggggtggcgacattgcaaatatttcgtcagatgtagatgcagttggtgagcatcatacagtgactattggtgactttgggcttcagacgaccttggaatttgactactgagactctgagaggaagcttcgtccactaacaaacattgacaaaagactcaagtgcaagtgctctgatcagtgacttagaagacttcaaatacagttcatttttcagttaacaaaaggaggaagttagaactacgccgtataacaaatcaaaatacaatacaattcatttttttcagttaacaaaagaggacatgacagaacatgaacatttcatacgaaacctgtatgaccggcagatacatctaggtgtagttgaagtatgttagcaactcgtaatacacgacctccaaaccaatagctagaggaacactctgtatactattctggcaaatcagggtacaacagaatgtattagagatagaagaaccggtaacatgagaggaaaggagaggaggcagatgagagtaatggggaaatgtagtcttcagtttgtaaattgattctttgatgatcctccacagcttcaacatgtctccttttatagctgaatatgcctaattgccacctgtcaaagaccccacatgacagtatgctgacattccccaccgcttgaaatgcggcttgcccctaagccgctgatagtgtagacaagattggtggatcaacttcttcaagcgtgcaagtgtgcagagaattgtagcaagaatgtcgaacgttccatgagcttggagatagaatgggaacccttgatccgaacccctaagtagcagtaacttggacttcgcgacagcgtcatatcaacagcgtcaaaggcattgcagaggcattatggtcctttaatgtggtaacaagtggacatgtgcaattccaagcattggctctgaatattcctagcaacaagaaaaggtgcaatgcgtactgtaacgaagcacctgtggtactgtagctgcaatccactttgaacaggctgcctcgatcaattgccaaccaaggatgctttgtcagaatgttgaccacgaccagtgatttaatccatcgcaccaaggctgcataacagtaaaaagatggccacgacataggtctaacttgaacaccatcaccgagtagcacaaattgcatgggtggtggcatggttgcttgtacggcacgacatcccaaccacaaccacagccaaatggagggcatctcatttctggtttctttgctcgcccaatgaattcgtggaaccatgaacttgtttttgtttctttcgatgcaaatatgtcctgccacttccatttctcacattttctgagtccatcgaccaggccatcgtccttggagagggtaccgtcgtagccgttcaccttgcagtccaccatcgactcgtgcggcaggagcagcatggcggccgagtacatgtgcagggtctcgttgatgatgcagtgcaggtagccgag

SEQ ID NO: 70232 - DNA, 3608 bp, Zea Mays
ccccgctctacctcccaagtcccaacgaaccttgcggccggggaatatcatttatcgcccgagtctgcaggggtggggacgtggtgtacatcattgctggtcatgccccaacaatcccccctgtgttcgttggtgtcgcgggtgttgttgttccgagatggaggaaaacgaggaaacaaaaaatggatatagaggagtgcaggacgaggttgcaggataaggtccgcctacttcatccaaagaatgccgaagggatcgttgactacatgattgcaaacacaccacttgagaatatcagatcatatttgttgactgccacagataatgtactaatgaacctatttgagggtgcaaaccgcctgcaaaatatcctgaatttgtccgaggaaaatgagcccctatttggtctattcaccccctttgatcagattggaccacagaagcagcaccagttttcttcaagaaaccattctcaggtccttcaggctccattgtaccccattggcccaagtggagcttttcagaatccatactcgaaactcactggcttcagggatcatttccagtctttgagcattctggatggtgacacgccgagtcactacaaatgtgctagtataaatgttggtggctatcccagtaatggcaaggtccaaacaaagacttgtcgtttttacttgtccattagaaagtgtaagtatggtgagaattgtcacttttcccttgtgtgcggttacccagagattaatgacatgaggcaagttgaccaccttggttcattgcaaatgttggagatggagatcgatctcctgttgctgcagccatcatcacaagtcccggtagatcatcttgaaaaaaaattccttgagatttatacaaagcttctggaaattgatggattccatacagaggaccagaggaataggaagactggttacggcctcacagatctgttcatgcaacttaacgccaccagagagactgagagacgaggacggtattatgttgtcctggtgaaagatgctcctaagtacgtcactcatggtttccaaccggcggtgcctcttgctggcagtgattttaacaagatttgtgttaccttcaaatctgaaagcatattcactcacacagatgttcagaactacttcagtcagtatggtactgttagtgaagagagattttcagaagagagacacatgcacggtcatgtgagttttgtggaccttgagactgcaaaacggatcatatcagaaagtggccctcatttcatctgtggaaatgaagttcgtgccaaagcgtacagggaaaaacatgaactgaacttcagacaaggacggcataatgttgtcccagtggaagatgctcctaagtatatgactggtggttttgtattagagatgcctcctgctagcagtgcttctaacaagatttttattaccttcaactgtatacacatattcactcatacatctgtccagaaatacttcagccagtatggtactgttaatgaagtgataattccaataatgcaaaagaggcccgatttcggttttgtaagtttcctggactctgagtccgtaaaacagatcttatcagaaaggggccctcatttcatctgtggaaatgaagttcatgtcaaagcatacagggaaaagcatgaattggagtaaggatcttataattagttgttttctgttgctttctgcttatgtattgtagtaacgcagagtttaagcatactgtgatcattttctgttaaatgatgtctcatccatgttttggatgttcatatctataatcttatttttacctgtgacccctttttgtataactcttgaattgagttcatcacgtcaatttctttttgttccctttgtacaattgagtacttttgtcttgttaatacaagtttaggaataaagccattatatttctgttttaaaatgtgttgaaggtacatgatgttaactgagaaagatatccattgtaactgcggtgtacgcgatgtgtcagatgtgggcgatttgcaattttgccaccattggcagtggacttcgctaatttgctatcggacacacaaatcatagacacataccggacccacaaatcatagacacttgggggtggcgacattgcaaatatttcgtcagatgtagatgcagttggtgagcatcatacagtgactattggtgactttgggcttcagacgaccttggaatttgactactgagactctgagaggaagcttcgtccactaacaaacattgacaaaagactcaagtgcaagtgctctgatcagtgacttagaagacttcaaatacagttcatttttcagttaacaaaaggaggaagttagaactacgccgtataacaaatcaaaatacaatacaattcatttttttcagttaacaaaagaggacatgacagaacatgaacatttcatacgaaacctgtatgaccggcagatacatctaggtgtagttgaagtatgttagcaactcgtaatacacgacctccaaaccaatagctagaggaacactctgtatactattctggcaaatcagggtacaacagaatgtattagagatagaagaaccggtaacatgagaggaaaggagaggaggcagatgagagtaatggggaaatgtagtcttcagtttgtaaattgattctttgatgatcctccacagcttcaacatgtctccttttatagctgaatatgcctaattgccacctgtcaaagaccccacatgacagtatgctgacattccccaccgcttgaaatgcggcttgcccctaagccgctgatagtgtagacaagattggtggatcaacttcttcaagcgtgcaagtgtgcagagaattgtagcaagaatgtcgaacgttccatgagcttggagatagaatgggaacccttgatccgaacccctaagtagcagtaacttggacttcgcgacagcgtcatatcaacagcgtcaaaggcattgcagaggcattatggtcctttaatgtggtaacaagtggacatgtgcaattccaagcattggctctgaatattcctagcaacaagaaaaggtgcaatgcgtactgtaacgaagcacctgtggtactgtagctgcaatccactttgaacaggctgcctcgatcaattgccaaccaaggatgctttgtcagaatgttgaccacgaccagtgatttaatccatcgcaccaaggctgcataacagtaaaaagatggccacgacataggtctaacttgaacaccatcaccgagtagcacaaattgcatgggtggtggcatggttgcttgtacggcacgacatcccaaccacaaccacagccaaatggagggcatctcatttctggtttctttgctcgcccaatgaattcgtggaaccatgaacttgtttttgtttctttcgatgcaaatatgtcctgccacttccatttctcacattttctgagtccatcgaccaggccatcgtccttggagagggtaccgtcgtagccgttcaccttgcagtccaccatcgactcgtgcggcaggagcagcatggcggccgagtacatgtgcagggtctcgttgatgatgcagtgcaggtagccgag

SEQ ID NO: 70233 - DNA, 3282 bp, Zea Mays
cggccgcaggccacccgcccgccccgctctacctcccaagtcccaacgaaccttgcggccggggaatatcatttatcgcccgagtctgcaggggtggggacgtggtgtacatcattgctggtcatgccccaacaatcccccctgtgttcgttggtgtcgcgggtgttgttgttccgagatggaggaaaacgaggaaacaaaaaatggatatagaggagtgcaggacgaggttgcaggataaggtccgcctacttcatccaaagaatgccgaagggatcgttgactacatgattgcaaacacaccacttgagaatatcagatcatatttgttgactgccacagataatgtactaatgaacctatttgagggtgcaaaccgcctgcaaaatatcctgaatttgtccgaggaaaatgagcccctatttggtctattcaccccctttgatcagattggaccacagaagcagcaccagttttcttcaagaaaccattctcaggtccttcaggctccattgtaccccattggcccaagtggagcttttcagaatccatactcgaaactcactggcttcagggatcatttccagtctttgagcattctggatggtgacacgccgagtcactacaaatgtgctagtataaatgttggtggctatcccagtaatggcaaggtccaaacaaagacttgtcgtttttacttgtccattagaaagtgtaagtatggtgagaattgtcacttttcccttgtgtgcggttacccagagattaatgacatgaggcaagttgaccaccttggttcattgcaaatgttggagatggagatcgatctcctgttgctgcagccatcatcacaagtcccggtagatcatcttgaaaaaaaattccttgagatttatacaaagcttctggaaattgatggattccatacagaggaccagaggaataggaagactggttacggcctcacagatctgttcatgcaacttaacgccaccagagagactgagagacgaggacggtattatgttgtcctggtgaaagatgctcctaagtacgtcactcatggtttccaaccggcggtgcctcttgctggcagtgattttaacaagatttgtgttaccttcaaatctgaaagcatattcactcacacagatgttcagaactacttcagtcagtatggtactgttagtgaagagagattttcagaagagagacacatgcacggtcatgtgagttttgtggaccttgagactgcaaaacggatcatatcagaaagtggccctcatttcatctgtggaaatgaagttcgtgccaaagcgtacagggaaaaacatgaactgaacttcagacaaggacggcataatgttgtcccagtggaagatgctcctaagtatatgactggtggttttgtattagagatgcctcctgctagcagtgcttctaacaagatttttattaccttcaactgtatacacatattcactcatacatctgtccagaaatacttcagccagtatggtactgttaatgaagtgataattccaataatgcaaaagaggcccgatttcggttttgtaagtttcctggactctgagtccgtaaaacagatcttatcagaaaggggccctcatttcatctgtggaaatgaagttcatgtcaaagcatacagggaaaagcatgaattggaatgtgggcgatttgcaattttgccaccattggcagtggacttcgctaatttgctatcggacacacaaatcatagacacataccggacccacaaatcatagacacttgggggtggcgacattgcaaatatttcgtcagatgtagatgcagttggtgagcatcatacagtgactattggtgactttgggcttcagacgaccttggaatttgactactgagactctgagaggaagcttcgtccactaacaaacattgacaaaagactcaagtgcaagtgctctgatcagtgacttagaagacttcaaatacagttcatttttcagttaacaaaaggaggaagttagaactacgccgtataacaaatcaaaatacaatacaattcatttttttcagttaacaaaagaggacatgacagaacatgaacatttcatacgaaacctgtatgaccggcagatacatctaggtgtagttgaagtatgttagcaactcgtaatacacgacctccaaaccaatagctagaggaacactctgtatactattctggcaaatcagggtacaacagaatgtattagagatagaagaaccggtaacatgagaggaaaggagaggaggcagatgagagtaatggggaaatgtagtcttcagtttgtaaattgattctttgatgatcctccacagcttcaacatgtctccttttatagctgaatatgcctaattgccacctgtcaaagaccccacatgacagtatgctgacattccccaccgcttgaaatgcggcttgcccctaagccgctgatagtgtagacaagattggtggatcaacttcttcaagcgtgcaagtgtgcagagaattgtagcaagaatgtcgaacgttccatgagcttggagatagaatgggaacccttgatccgaacccctaagtagcagtaacttggacttcgcgacagcgtcatatcaacagcgtcaaaggcattgcagaggcattatggtcctttaatgtggtaacaagtggacatgtgcaattccaagcattggctctgaatattcctagcaacaagaaaaggtgcaatgcgtactgtaacgaagcacctgtggtactgtagctgcaatccactttgaacaggctgcctcgatcaattgccaaccaaggatgctttgtcagaatgttgaccacgaccagtgatttaatccatcgcaccaaggctgcataacagtaaaaagatggccacgacataggtctaacttgaacaccatcaccgagtagcacaaattgcatgggtggtggcatggttgcttgtacggcacgacatcccaaccacaaccacagccaaatggagggcatctcatttctggtttctttgctcgcccaatgaattcgtggaaccatgaacttgtttttgtttctttcgatgcaaatatgtcctgccacttccatttctcacattttctgagtccatcgaccaggccatcgtccttggagagggtaccgtcgtagccgttcaccttgcagtccaccatcgactcgtgcggcaggagcagcatggcggccgagtacatgtgcagggtctcgttgatgatgcagtgcaggtagccgag

SEQ ID NO: 70234 - DNA, 1870 bp, Zea Mays
ctcattatcatggtttgtgaaaattaccctagggcttgcaaatgactcgaaggctactgcagtcaacaatcaaaatcatcatgacattcctatgcaaaatcatggctcaaatcatgcctcaccatctagcaatttgatgactgaaaataaacctctatgctcacgggaatcgagtcacacagcaaatgtttcaagtgctccaaaccaacctgtttcaatagtttgtccatctgacaacatgcctgctgaagttggtacatcagagatgcacctgataaatagctctgaaaatgctgcccaggagacacaaactgaaaatgtagctgaaaaatcagcagaggatggctataattggcgcaaatatggacagaagcatgtcaagggaagtgaaaatcctagaagttattacaagtgcactcatcctaattgtgaagttaaaaagctattagagcgttcgcttgatggtcagattactgaagttgtttataaagggcatcataatcatcccaagccccaaccaaatagaaggttagctgctggtgcagttccttcaagccaggctgaagaaagatacgatggtgtggcacctattgaagacaaaccttcaaatatttattccaacctctgtaaccaagcacattcagctggcatggttgataatgttccgggtccagcaagtgatgatgatgttgatgctggaggtggaagaccctaccctggggatgactctaatgatgatgatgacttggactcaaaacgcaggaaaatggaatctgctggtatcgatgctgctttgatgggtaaaccaaatcgcgagccccgtgtcgttgtacaaactgttagtgaagttgatatcttggatgatgggtatcgctggcgcaaatatgggcagaaagtagtgaaaggaaaccctaacccacggagttactacaaatgcacacatacaggatgcccagtcaggaaacatgttgagagagcatcacatgacccgaagtcagtgatcacaacatatgaaggaaaacataaccatgaagtccctgcttccaggaatgcaagccatgagatgtctgcagctcccatgaagccggtggtgcatcctattaacagcagcatgccaggctttggtggcatgatgagagcatgcgatgccagggccttcaacaatcaatattctcaggcagccgaaagtgacaccatcagtcttgaccttggtgtaggtatcagccctaaccacagcgatgcaacaaaccagatgcagccctcagttccggaacctatgcagtatcagatgcgacacatggctcctgtgtacggtagcatgggacttccaggaatgcctgtgccagcaatacctggaaatgtagtagctagcagcatatacggctccagagaagaaaaaggaaacgaagggtttactttcaaagctgcacctttggaccgatcagctaacttatgttacagtagtgctggtaacttagtgatgggtccatgagtgcctcttctgatggctatacctccatgaatcacacctatcaccgtcgtcatgaagttctcttcggaagatgctctaccgtgtatcatcttcacataattggaggcggtcaaggtatacctgggagctgcagcgatggcacatgatgtcttttgctgtgtggatgaactcgctgtatgtgacgctgcagctaaacattcgttgtacagcaaaccagttatgattaattagattatgataatttggttatgtaaacttctttctggacagaaccgaagagccatctggtggcaaagctttgttatctcctgcatatgaacgatgccagtttgatattcatatgaaatgaaatatatcatttcacaagtgcggtttcat

SEQ ID NO: 70235 - DNA, 1866 bp, Zea Mays
gtgattgaaggttgtccttggtatctgcaaacaaccttgtcacacctggctactgcagtcaacaatcaaaatcatcatgacattcctatgcaaaatcatggctcaaatcatgcctcaccatctagcaatttgatgactgaaaataaacctctatgctcacgggaatcgagtcacacagcaaatgtttcaagtgctccaaaccaacctgtttcaatagtttgtccatctgacaacatgcctgctgaagttggtacatcagagatgcacctgataaatagctctgaaaatgctgcccaggagacacaaactgaaaatgtagctgaaaaatcagcagaggatggctataattggcgcaaatatggacagaagcatgtcaagggaagtgaaaatcctagaagttattacaagtgcactcatcctaattgtgaagttaaaaagctattagagcgttcgcttgatggtcagattactgaagttgtttataaagggcatcataatcatcccaagccccaaccaaatagaaggttagctgctggtgcagttccttcaagccaggctgaagaaagatacgatggtgtggcacctattgaagacaaaccttcaaatatttattccaacctctgtaaccaagcacattcagctggcatggttgataatgttccgggtccagcaagtgatgatgatgttgatgctggaggtggaagaccctaccctggggatgactctaatgatgatgatgacttggactcaaaacgcaggaaaatggaatctgctggtatcgatgctgctttgatgggtaaaccaaatcgcgagccccgtgtcgttgtacaaactgttagtgaagttgatatcttggatgatgggtatcgctggcgcaaatatgggcagaaagtagtgaaaggaaaccctaacccacggagttactacaaatgcacacatacaggatgcccagtcaggaaacatgttgagagagcatcacatgacccgaagtcagtgatcacaacatatgaaggaaaacataaccatgaagtccctgcttccaggaatgcaagccatgagatgtctgcagctcccatgaagccggtggtgcatcctattaacagcagcatgccaggctttggtggcatgatgagagcatgcgatgccagggccttcaacaatcaatattctcaggcagccgaaagtgacaccatcagtcttgaccttggtgtaggtatcagccctaaccacagcgatgcaacaaaccagatgcagccctcagttccggaacctatgcagtatcagatgcgacacatggctcctgtgtacggtagcatgggacttccaggaatgcctgtgccagcaatacctggaaatgtagtagctagcagcatatacggctccagagaagaaaaaggaaacgaagggtttactttcaaagctgcacctttggaccgatcagctaacttatgttacagtagtgctggtaacttagtgatgggtccatgagtgcctcttctgatggctatacctccatgaatcacacctatcaccgtcgtcatgaagttctcttcggaagatgctctaccgtgtatcatcttcacataattggaggcggtcaaggtatacctgggagctgcagcgatggcacatgatgtcttttgctgtgtggatgaactcgctgtatgtgacgctgcagctaaacattcgttgtacagcaaaccagttatgattaattagattatgataatttggttatgtaaacttctttctggacagaaccgaagagccatctggtggcaaagctttgttatctcctgcatatgaacgatgccagtttgatattcatatgaaatgaaatatatcatttcacaagtgcggtttcat

SEQ ID NO: 70236 - DNA, 2092 bp, Zea Mays
gcttcgactatggatggccatttcgttgctgttcttttgttgagattggtttaagtgctgtctctggttttcgttcttctttctgactactctcaacccgaaatcagttgaaccgtctcccacaaccggtactctgagcatggctgcaaacatgaacaagagcactcatccggacatactgccttcgcctagggataattcagctgatagtggccaagaagatggaggctctcgggagtttgaattcaagcctcatctcaattctcaatcgtcggctactgcagtcaacaatcaaaatcatcatgacattcctatgcaaaatcatggctcaaatcatgcctcaccatctagcaatttgatgactgaaaataaacctctatgctcacgggaatcgagtcacacagcaaatgtttcaagtgctccaaaccaacctgtttcaatagtttgtccatctgacaacatgcctgctgaagttggtacatcagagatgcacctgataaatagctctgaaaatgctgcccaggagacacaaactgaaaatgtagctgaaaaatcagcagaggatggctataattggcgcaaatatggacagaagcatgtcaagggaagtgaaaatcctagaagttattacaagtgcactcatcctaattgtgaagttaaaaagctattagagcgttcgcttgatggtcagattactgaagttgtttataaagggcatcataatcatcccaagccccaaccaaatagaaggttagctgctggtgcagttccttcaagccaggctgaagaaagatacgatggtgtggcacctattgaagacaaaccttcaaatatttattccaacctctgtaaccaagcacattcagctggcatggttgataatgttccgggtccagcaagtgatgatgatgttgatgctggaggtggaagaccctaccctggggatgactctaatgatgatgatgacttggactcaaaacgcaggaaaatggaatctgctggtatcgatgctgctttgatgggtaaaccaaatcgcgagccccgtgtcgttgtacaaactgttagtgaagttgatatcttggatgatgggtatcgctggcgcaaatatgggcagaaagtagtgaaaggaaaccctaacccacggagttactacaaatgcacacatacaggatgcccagtcaggaaacatgttgagagagcatcacatgacccgaagtcagtgatcacaacatatgaaggaaaacataaccatgaagtccctgcttccaggaatgcaagccatgagatgtctgcagctcccatgaagccggtggtgcatcctattaacagcagcatgccaggctttggtggcatgatgagagcatgcgatgccagggccttcaacaatcaatattctcaggcagccgaaagtgacaccatcagtcttgaccttggtgtaggtatcagccctaaccacagcgatgcaacaaaccagatgcagccctcagttccggaacctatgcagtatcagatgcgacacatggctcctgtgtacggtagcatgggacttccaggaatgcctgtgccagcaatacctggaaatgtagtagctagcagcatatacggctccagagaagaaaaaggaaacgaagggtttactttcaaagctgcacctttggaccgatcagctaacttatgttacagtagtgctggtaacttagtgatgggtccatgagtgcctcttctgatggctatacctccatgaatcacacctatcaccgtcgtcatgaagttctcttcggaagatgctctaccgtgtatcatcttcacataattggaggcggtcaaggtatacctgggagctgcagcgatggcacatgatgtcttttgctgtgtggatgaactcgctgtatgtgacgctgcagctaaacattcgttgtacagcaaaccagttatgattaattagattatgataatttggttatgtaaacttctttctggacagaaccgaagagccatctggtggcaaagctttgttatctcctgcatatgaacgatgccagtttgatattcatatgaaatgaaatatatcatttcacaagtgcggtttcat

SEQ ID NO: 70237 - DNA, 2028 bp, Zea Mays
cttccataaagaaagcatcaagctgctggggaaaagaaaagagttgaaccgtctcccacaaccggtactctgagcatggctgcaaacatgaacaagagcactcatccggacatactgccttcgcctagggataattcagctgatagtggccaagaagatggaggctctcgggagtttgaattcaagcctcatctcaattctcaatcgtcggctactgcagtcaacaatcaaaatcatcatgacattcctatgcaaaatcatggctcaaatcatgcctcaccatctagcaatttgatgactgaaaataaacctctatgctcacgggaatcgagtcacacagcaaatgtttcaagtgctccaaaccaacctgtttcaatagtttgtccatctgacaacatgcctgctgaagttggtacatcagagatgcacctgataaatagctctgaaaatgctgcccaggagacacaaactgaaaatgtagctgaaaaatcagcagaggatggctataattggcgcaaatatggacagaagcatgtcaagggaagtgaaaatcctagaagttattacaagtgcactcatcctaattgtgaagttaaaaagctattagagcgttcgcttgatggtcagattactgaagttgtttataaagggcatcataatcatcccaagccccaaccaaatagaaggttagctgctggtgcagttccttcaagccaggctgaagaaagatacgatggtgtggcacctattgaagacaaaccttcaaatatttattccaacctctgtaaccaagcacattcagctggcatggttgataatgttccgggtccagcaagtgatgatgatgttgatgctggaggtggaagaccctaccctggggatgactctaatgatgatgatgacttggactcaaaacgcaggaaaatggaatctgctggtatcgatgctgctttgatgggtaaaccaaatcgcgagccccgtgtcgttgtacaaactgttagtgaagttgatatcttggatgatgggtatcgctggcgcaaatatgggcagaaagtagtgaaaggaaaccctaacccacggagttactacaaatgcacacatacaggatgcccagtcaggaaacatgttgagagagcatcacatgacccgaagtcagtgatcacaacatatgaaggaaaacataaccatgaagtccctgcttccaggaatgcaagccatgagatgtctgcagctcccatgaagccggtggtgcatcctattaacagcagcatgccaggctttggtggcatgatgagagcatgcgatgccagggccttcaacaatcaatattctcaggcagccgaaagtgacaccatcagtcttgaccttggtgtaggtatcagccctaaccacagcgatgcaacaaaccagatgcagccctcagttccggaacctatgcagtatcagatgcgacacatggctcctgtgtacggtagcatgggacttccaggaatgcctgtgccagcaatacctggaaatgtagtagctagcagcatatacggctccagagaagaaaaaggaaacgaagggtttactttcaaagctgcacctttggaccgatcagctaacttatgttacagtagtgctggtaacttagtgatgggtccatgagtgcctcttctgatggctatacctccatgaatcacacctatcaccgtcgtcatgaagttctcttcggaagatgctctaccgtgtatcatcttcacataattggaggcggtcaaggtatacctgggagctgcagcgatggcacatgatgtcttttgctgtgtggatgaactcgctgtatgtgacgctgcagctaaacattcgttgtacagcaaaccagttatgattaattagattatgataatttggttatgtaaacttctttctggacagaaccgaagagccatctggtggcaaagctttgttatctcctgcatatgaacgatgccagtttgatattcatatgaaatgaaatatatcatttcacaagtgcggtttcat

SEQ ID NO: 70238 - DNA, 2173 bp, Zea Mays
aaaccaccacctagctgctcgtcgctccttgtctcgtctccttcactcacctccccccgcggcccgcgccaatggccgattcgccaaaccctagctccggcgaccttcccgccggcgctgggtgctcgccggagaagccggtcctggcggatcgacgtgtgtctgcgctcgccggcgccggcgcgaggttgaaccgtctcccacaaccggtactctgagcatggctgcaaacatgaacaagagcactcatccggacatactgccttcgcctagggataattcagctgatagtggccaagaagatggaggctctcgggagtttgaattcaagcctcatctcaattctcaatcgtcggctactgcagtcaacaatcaaaatcatcatgacattcctatgcaaaatcatggctcaaatcatgcctcaccatctagcaatttgatgactgaaaataaacctctatgctcacgggaatcgagtcacacagcaaatgtttcaagtgctccaaaccaacctgtttcaatagtttgtccatctgacaacatgcctgctgaagttggtacatcagagatgcacctgataaatagctctgaaaatgctgcccaggagacacaaactgaaaatgtagctgaaaaatcagcagaggatggctataattggcgcaaatatggacagaagcatgtcaagggaagtgaaaatcctagaagttattacaagtgcactcatcctaattgtgaagttaaaaagctattagagcgttcgcttgatggtcagattactgaagttgtttataaagggcatcataatcatcccaagccccaaccaaatagaaggttagctgctggtgcagttccttcaagccaggctgaagaaagatacgatggtgtggcacctattgaagacaaaccttcaaatatttattccaacctctgtaaccaagcacattcagctggcatggttgataatgttccgggtccagcaagtgatgatgatgttgatgctggaggtggaagaccctaccctggggatgactctaatgatgatgatgacttggactcaaaacgcaggaaaatggaatctgctggtatcgatgctgctttgatgggtaaaccaaatcgcgagccccgtgtcgttgtacaaactgttagtgaagttgatatcttggatgatgggtatcgctggcgcaaatatgggcagaaagtagtgaaaggaaaccctaacccacggagttactacaaatgcacacatacaggatgcccagtcaggaaacatgttgagagagcatcacatgacccgaagtcagtgatcacaacatatgaaggaaaacataaccatgaagtccctgcttccaggaatgcaagccatgagatgtctgcagctcccatgaagccggtggtgcatcctattaacagcagcatgccaggctttggtggcatgatgagagcatgcgatgccagggccttcaacaatcaatattctcaggcagccgaaagtgacaccatcagtcttgaccttggtgtaggtatcagccctaaccacagcgatgcaacaaaccagatgcagccctcagttccggaacctatgcagtatcagatgcgacacatggctcctgtgtacggtagcatgggacttccaggaatgcctgtgccagcaatacctggaaatgtagtagctagcagcatatacggctccagagaagaaaaaggaaacgaagggtttactttcaaagctgcacctttggaccgatcagctaacttatgttacagtagtgctggtaacttagtgatgggtccatgagtgcctcttctgatggctatacctccatgaatcacacctatcaccgtcgtcatgaagttctcttcggaagatgctctaccgtgtatcatcttcacataattggaggcggtcaaggtatacctgggagctgcagcgatggcacatgatgtcttttgctgtgtggatgaactcgctgtatgtgacgctgcagctaaacattcgttgtacagcaaaccagttatgattaattagattatgataatttggttatgtaaacttctttctggacagaaccgaagagccatctggtggcaaagctttgttatctcctgcatatgaacgatgccagtttgatattcatatgaaatgaaatatatcatttcacaagtgcggtttcat

SEQ ID NO: 70239 - DNA, 2426 bp, Zea Mays
acgaaacctgtgtgtgaatgtgtgatgagggcaaaaagcaagtaacccatctatctagggttggaagcttgtacatggccacctcggtggttgtggcacgcctcgcgggcgaggcctcgcagcccaaggtcctaccttctgcgaatggagtctcatccgagagctattggcgggtagctgctacgcgccgttggcagggccgcggtgtccggtgctgcgcggccggtttccgcggtgggggcgccgacgccgacgccgtgatcgccagcgaggactttgtggggttctttcgggaggcgtggccgtacatccggggccaccgtgggagcaccttcgtggtggtcatctccagcgaggtcgtgtgcgggccgcacttctaccgcgttctgcaggacatatcacttctccatggtctggggattaaatttgttcttgttccaggaacacatattcaaattgataagctgttgtcagaaagagggaagaaggccaagtatgttggtcagtacagaattactgatgaagatgcaagaaaggctgcaatggatgcagctggtagaatacgattgacaatagaagctaaactttctcctggtcctccaatgttaaatcttcgtaggcatggtgttattggacgctggcatggtcttgtggatagcattgcaagtggcaatttccttggtgctaagagaagaggggtggttaatggtattgactacggattcaccggggaagttacgaaaatagacgtttcacggataagagaaaggcttgatagtgatagcatagttgttatcagcaacatgggcttcagttcatcgggagatgtgttaaattgcaacacctacgaggttgctactgcatgtgctttagccttggaggcagataaacttatctgcgttgtagatggtcaggtatttgatgatcatggacgggccattcaatacatgtctattgaggaggctgatttgttgattagaaagcgtgctaggcaaagtgatattgctgcaagttatgtcaaggttgtggatgaggaaggcatcaattctttgcataaaggggacgacagaccatcattgagtcccaaggcttacataaatgggtatgctgcttcttttcgaaacggattgggttttaacaatggaaatggtatttattctggcgagcaagggtttgctattggtggtgaagagcggttaagcagatcaaatgctgatccttttaaaaacgggttgggttttaacaatggaaatggtatttactctggtgagcaagggttcgctattggtggtgaagagaggttaagcagatcaaatggctatctttctgagttggtcgcggcagcatatgtgtgccatggtggtgttcaaagagttcatattatagatggatgtgttgatggatcacttctattagaattgtttacgagagatggagcaggaacaatgattgctagggatgtttatgaaggaacaaggatggctacagcggaagatcttcctggcattagaaaaattattcggccgctggaggattctggtgttttggtgcggagaacagatgcacagcttcttgaagcgctagagtcattctatgttgttgaaagagatggttcaatcattgcttgtgctgctctatttccattccctgaggaacaatctggtgaagttgctgcaattgctgtatctgaagaatgccgaggaagaggtcagggggacaagttacttgattacgtggaaaagatggcattatccctgggtctcaagaaattattcttgcttactacacgaactgcagattggtttgtgcgacgtggcttttcagagtgctcaattggatctatccctgagcagaggagaaaacgtatcaacttgtcccgtggatccaagtattacataaagcagctgtagccaaagcctgctgggattatcgccaacaattttgtcatcaggtgactcagcagcatgcacagagtttggttccacacttccacttaattaagatggtaccagccaagattacaccaatttcgcggttgcccaaaggcatataattgcacaaagaaacaaaacaccattttactgtcactgtgtttgaaagatggttgtctttgtttaagtatgtgacagaagtttgttttgccaatagaatcaaggcagagaagaaatagctgattgaattatatgtagaccctatttaacaagcaataccaaagatgaagtgctcgtacagtatcatctctggttggtgcctcattgtgtgcatcatagatgattgaacttgccttttccactcatagctgattggccttatcttttctacttttgttgagagaaaaaaaagagctagtgaaacaattggttctcttgtatcagatgtcaaagtatccttgaatgaaaacaaaaaatatgaagtgctcgtctgtt

SEQ ID NO: 70240 - DNA, 2361 bp, Zea Mays
acgaaacctgtgtgtgaatgtgtgatgagggcaaaaagcaagtaacccatctatctagggttggaagcttgtacatggccacctcggtggttgtggcacgcctcgcgggcgaggcctcgcagcccaaggtcctaccttctgcgaatggagtctcatccgagagctattggcgggtagctgctacgcgccgttggcagggccgcggtgtccggtgctgcgcggccggtttccgcggtgggggcgccgacgccgacgccgtgatcgccagcgaggactttgtggggttctttcgggaggcgtggccgtacatccggggccaccgtgggagcaccttcgtggtggtcatctccagcgaggtcgtgtgcgggccgcacttctaccgcgttctgcaggacatatcacttctccatggtctggggattaaatttgttcttgttccaggaacacatattcaaattgataagctgttgtcagaaagagggaagaaggccaagtatgttggtcagtacagaattactgatgaagatgcaagaaaggctgcaatggatgcagctggtagaatacgattgacaatagaagctaaactttctcctggtcctccaatgttaaatcttcgtaggcatggtgttattggacgctggcatggtcttgtggatagcattgcaagtggcaatttccttggtgctaagagaagaggggtggttaatggtattgactacggattcaccggggaagttacgaaaatagacgtttcacggataagagaaaggcttgatagtgatagcatagttgttatcagcaacatgggcttcagttcatcgggagatgtgttaaattgcaaatggtcaggtatttgatgatcatggacgggccattcaatacatgtctattgaggaggctgatttgttgattagaaagcgtgctaggcaaagtgatattgctgcaagttatgtcaaggttgtggatgaggaaggcatcaattctttgcataaaggggacgacagaccatcattgagtcccaaggcttacataaatgggtatgctgcttcttttcgaaacggattgggttttaacaatggaaatggtatttattctggcgagcaagggtttgctattggtggtgaagagcggttaagcagatcaaatgctgatccttttaaaaacgggttgggttttaacaatggaaatggtatttactctggtgagcaagggttcgctattggtggtgaagagaggttaagcagatcaaatggctatctttctgagttggtcgcggcagcatatgtgtgccatggtggtgttcaaagagttcatattatagatggatgtgttgatggatcacttctattagaattgtttacgagagatggagcaggaacaatgattgctagggatgtttatgaaggaacaaggatggctacagcggaagatcttcctggcattagaaaaattattcggccgctggaggattctggtgttttggtgcggagaacagatgcacagcttcttgaagcgctagagtcattctatgttgttgaaagagatggttcaatcattgcttgtgctgctctatttccattccctgaggaacaatctggtgaagttgctgcaattgctgtatctgaagaatgccgaggaagaggtcagggggacaagttacttgattacgtggaaaagatggcattatccctgggtctcaagaaattattcttgcttactacacgaactgcagattggtttgtgcgacgtggcttttcagagtgctcaattggatctatccctgagcagaggagaaaacgtatcaacttgtcccgtggatccaagtattacataaagcagctgtagccaaagcctgctgggattatcgccaacaattttgtcatcaggtgactcagcagcatgcacagagtttggttccacacttccacttaattaagatggtaccagccaagattacaccaatttcgcggttgcccaaaggcatataattgcacaaagaaacaaaacaccattttactgtcactgtgtttgaaagatggttgtctttgtttaagtatgtgacagaagtttgttttgccaatagaatcaaggcagagaagaaatagctgattgaattatatgtagaccctatttaacaagcaataccaaagatgaagtgctcgtacagtatcatctctggttggtgcctcattgtgtgcatcatagatgattgaacttgccttttccactcatagctgattggccttatcttttctacttttgttgagagaaaaaaaagagctagtgaaacaattggttctcttgtatcagatgtcaaagtatccttgaatgaaaacaaaaaatatgaagtgctcgtctgtt

SEQ ID NO: 70241 - DNA, 2328 bp, Zea Mays
acgaaacctgtgtgtgaatgtgtgatgagggcaaaaagcaagtaacccatctatctagggttggaagcttgtacatggccacctcggtggttgtggcacgcctcgcgggcgaggcctcgcagcccaaggtcctaccttctgcgaatggagtctcatccgagagctattggcgggtagctgctacgcgccgttggcagggccgcggtgtccggtgctgcgcggccggtttccgcggtgggggcgccgacgccgacgccgtgatcgccagcgaggactttgtggggttctttcgggaggcgtggccgtacatccggggccaccgtgggagcaccttcgtggtggtcatctccagcgaggtcgtgtgcgggccgcacttctaccgcgttctgcaggacatatcacttctccatggtctggggattaaatttgttcttgttccaggaacacatattcaaattgataagctgttgtcagaaagagggaagaaggccaagtatgttggtcagtacagaattactgatgaagatgcaagaaaggctgcaatggatgcagctggtagaatacgattgacaatagaagctaaactttctcctggtcctccaatgttaaatcttcgtaggcatggtgttattggacgctggcatggtcttgtggatagcattgcaagtggcaatttccttggtgctaagagaagaggggtggttaatggtattgactacggattcaccggggaagttacgaaaatagacgtttcacggataagagaaaggcttgatagtgatagcatagttgttatcagcaacatgggcttcagttcatcgggagatgtgttaaattgcaacacctacgaggttgctactgcatgtgctttagccttggaggcagataaacttatctgcgttgtagatggtcaggtatttgatgatcatggacgggccattcaatacatgtctattgaggaggctgatttgttgattagaaagcgtgctaggcaaagtgatattgctgcaagttatgtcaaggttgtggatgaggaaggcatcaattctttgcataaaggggacgacagaccatcattgagtcccaaggcttacataaatgggtatgctgcttcttttcgaaacggattgggttttaacaatggaaatggtatttattctggcgagcaagggtttgctattggtggtgaagagcggttaagcagatcaaatgctgatccttttaaaaacgggttgggttttaacaatggaaatggtatttactctggtgagcaagggttcgctattggtggtgaagagaggttaagcagatcaaatggctatctttctgagttggtcgcggcagcatatgtgtgccatggatgtttatgaaggaacaaggatggctacagcggaagatcttcctggcattagaaaaattattcggccgctggaggattctggtgttttggtgcggagaacagatgcacagcttcttgaagcgctagagtcattctatgttgttgaaagagatggttcaatcattgcttgtgctgctctatttccattccctgaggaacaatctggtgaagttgctgcaattgctgtatctgaagaatgccgaggaagaggtcagggggacaagttacttgattacgtggaaaagatggcattatccctgggtctcaagaaattattcttgcttactacacgaactgcagattggtttgtgcgacgtggcttttcagagtgctcaattggatctatccctgagcagaggagaaaacgtatcaacttgtcccgtggatccaagtattacataaagcagctgtagccaaagcctgctgggattatcgccaacaattttgtcatcaggtgactcagcagcatgcacagagtttggttccacacttccacttaattaagatggtaccagccaagattacaccaatttcgcggttgcccaaaggcatataattgcacaaagaaacaaaacaccattttactgtcactgtgtttgaaagatggttgtctttgtttaagtatgtgacagaagtttgttttgccaatagaatcaaggcagagaagaaatagctgattgaattatatgtagaccctatttaacaagcaataccaaagatgaagtgctcgtacagtatcatctctggttggtgcctcattgtgtgcatcatagatgattgaacttgccttttccactcatagctgattggccttatcttttctacttttgttgagagaaaaaaaagagctagtgaaacaattggttctcttgtatcagatgtcaaagtatccttgaatgaaaacaaaaaatatgaagtgctcgtctgtt

SEQ ID NO: 70242 - DNA, 2564 bp, Zea Mays
acgaaacctgtgtgtgaatgtgtgatgagggcaaaaagcaagtaacccatctatctagggttggaagcttgtacatggccacctcggtggttgtggcacgcctcgcgggcgaggcctcgcagcccaaggtcctaccttctgcgaatggagtctcatccgagagctattggcgggtagctgctacgcgccgttggcagggccgcggtgtccggtgctgcgcggccggtttccgcggtgggggcgccgacgccgacgccgtgatcgccagcgaggactttgtggggttctttcgggaggcgtggccgtacatccggggccaccgtgggagcaccttcgtggtggtcatctccagcgaggtcgtgtgcgggccgcacttctaccgcgttctgcagggaagaaggccaagtatgttggtcagtacagaattactgatgaagatgcaagaaaggctgcaatggatgcagctggtagaatacgattgacaatagaagctaaactttctcctggtcctccaatgttaaatcttcgtaggcatggtgttattggacgctggcatggtcttgtggatagcattgcaagtggcaatttccttggtgctaagagaagaggggtggttaatggtattgactacggattcaccggggaagttacgaaaatagacgtttcacggataagagaaaggcttgatagtgatagcatagttgttatcagcaacatgggcttcagttcatcgggagatgtgttaaattgcaacacctacgaggttgctactgcatgtgctttagccttggaggcagataaacttatctgcgttgtagatggtcaggtatttgatgatcatggacgggccattcaatacatgtctattgaggaggctgatttgttgattagaaagcgtgctaggcaaagtgatattgctgcaagttatgtcaaggttgtggatgaggaaggcatcaattctttgcataaaggggacgacagaccatcattgagtcccaaggcttacataaatgggtatgctgcttcttttcgaaacggattgggttttaacaatggaaatggtatttattctggcgagcaagggtttgctattggtggtgaagagcggttaagcagatcaaatgctgatccttttaaaaacgggttgggttttaacaatggaaatggtatttactctggtgagcaagggttcgctattggtggtgaagagaggttaagcagatcaaatggctatctttctgagttggtcgcggcagcatatgtgtgccatggatgtttatgaaggaacaaggatggctacagcggaagatcttcctggcattagaaaaattattcggccgctggaggattctggtgttttggtgcggagaacagatgcacagcttcttgaagcgctagagtcattctatgttgttgaaagagatggttcaatcattgcttgtgctgctctatttccattccctgaggaacaatctggtgaagttgctgcaattgctgtatctgaagaatgccgaggaagaggtcagggggacaagttacttggtatgttctttgcttacatggataatcagaatccattctcttgattggttgttgcaacccctctaccaggttgccacaaccatttctccaacacatgcccacatgttcctgtgtgcactttctcacatgcacatacaatccctaaatattataacaagataacagaccgcctaccagtaatgtggtgttaaagtgggggttctctgttttttcagtaagcgtatcttctcacccattttaaaggggtttcagtcttgtggcatttgtactagaacaagctaagaagtcctttttttgttactcatggtggttgccattcttcagattacgtggaaaagatggcattatccctgggtctcaagaaattattcttgcttactacacgaactgcagattggtttgtgcgacgtggcttttcagagtgctcaattggatctatccctgagcagaggagaaaacgtatcaacttgtcccgtggatccaagtattacataaagcagctgtagccaaagcctgctgggattatcgccaacaattttgtcatcaggtgactcagcagcatgcacagagtttggttccacacttccacttaattaagatggtaccagccaagattacaccaatttcgcggttgcccaaaggcatataattgcacaaagaaacaaaacaccattttactgtcactgtgtttgaaagatggttgtctttgtttaagtatgtgacagaagtttgttttgccaatagaatcaaggcagagaagaaatagctgattgaattatatgtagaccctatttaacaagcaataccaaagatgaagtgctcgtacagtatcatctctggttggtgcctcattgtgtgcatcatagatgattgaacttgccttttccactcatagctgattggccttatcttttctacttttgttgagagaaaaaaaagagctagtgaaacaattggttctcttgtatcagatgtcaaagtatccttgaatgaaaacaaaaaatatgaagtgctcgtctgtt

SEQ ID NO: 70243 - DNA, 2925 bp, Zea Mays
acgaaacctgtgtgtgaatgtgtgatgagggcaaaaagcaagtaacccatctatctagggttggaagcttgtacatggccacctcggtggttgtggcacgcctcgcgggcgaggcctcgcagcccaaggtcctaccttctgcgaatggagtctcatccgagagctattggcgggtagctgctacgcgccgttggcagggccgcggtgtccggtgctgcgcggccggtttccgcggtgggggcgccgacgccgacgccgtgatcgccagcgaggactttgtggggttctttcgggaggcgtggccgtacatccggggccaccgtgggagcaccttcgtggtggtcatctccagcgaggtcgtgtgcgggccgcacttctaccgcgttctgcaggacatatcacttctccatggtctggggattaaatttgttcttgttccaggaacacatattcaaattgataagctgttgtcagaaagagggaagaaggccaagtatgttggtcagtacagaattactgatgaagatgcaagaaaggctgcaatggatgcagctggtagaatacgattgacaatagaagctaaactttctcctggtcctccaatgttaaatcttcgtaggcatggtgttattggacgctggcatggtcttgtggatagcattgcaagtggcaatttccttggtgctaagagaagaggggtggttaatggtattgactacggattcaccggggaagttacgaaaatagacgtttcacggataagagaaaggcttgatagtgatagcatagttgttatcagcaacatgggcttcagttcatcgggagatgtgttaaattgcaagtatattttcttaattatttttaagttttttcgtatgattgtacaatgtatacatcaaaattgtgtagttgtatgcttgctaccaagtcaagcataatatcatatgaatgcaaataattttcgtaaaacttgttcctttgcatatattgcagctaccatactaaacaaaattgatttgtgttgtttgcaataattcagcacctacgaggttgctactgcatgtgctttagccttggaggcagataaacttatctgcgttgtagatggtcaggtatttgatgatcatggacgggccattcaatacatgtctattgaggaggctgatttgttgattagaaagcgtgctaggcaaagtgatattgctgcaagttatgtcaaggttgtggatgaggaaggcatcaattctttgcataaaggggacgacagaccatcattgagtcccaaggcttacataaatgggtatgctgcttcttttcgaaacggattgggttttaacaatggaaatggtatttattctggcgagcaagggtttgctattggtggtgaagagcggttaagcagatcaaatgctgatccttttaaaaacgggttgggttttaacaatggaaatggtatttactctggtgagcaagggttcgctattggtggtgaagagaggttaagcagatcaaatggctatctttctgagttggtcgcggcagcatatgtgtgccatggtggtgttcaaagagttcatattatagatggatgtgttgatggatcacttctattagaattgtttacgagagatggagcaggaacaatgattgctagggatgtttatgaaggaacaaggatggctacagcggaagatcttcctggcattagaaaaattattcggccgctggaggattctggtgttttggtgcggagaacagatgcacagcttcttgaagcgctagagtcattctatgttgttgaaagagatggttcaatcattgcttgtgctgctctatttccattccctgaggaacaatctggtgaagttgctgcaattgctgtatctgaagaatgccgaggaagaggtcagggggacaagttacttggtatgttctttgcttacatggataatcagaatccattctcttgattggttgttgcaacccctctaccaggttgccacaaccatttctccaacacatgcccacatgttcctgtgtgcactttctcacatgcacatacaatccctaaatattataacaagataacagaccgcctaccagtaatgtggtgttaaagtgggggttctctgttttttcagtaagcgtatcttctcacccattttaaaggggtttcagtcttgtggcatttgtactagaacaagctaagaagtcctttttttgttactcatggtggttgccattcttcagattacgtggaaaagatggcattatccctgggtctcaagaaattattcttgcttactacacgaactgcagattgagtgctcaattggatctatccctgagcagaggagaaaacgtatcaacttgtcccgtggatccaagtattacataaagcagctgtagccaaagcctgctgggattatcgccaacaattttgtcatcaggtgactcagcagcatgcacagagtttggttccacacttccacttaattaagatggtaccagccaagattacaccaatttcgcggttgcccaaaggcatataattgcacaaagaaacaaaacaccattttactgtcactgtgtttgaaagatggttgtctttgtttaagtatgtgacagaagtttgttttgccaatagaatcaaggcagagaagaaatagctgattgaattatatgtagaccctatttaacaagcaataccaaagatgaagtgctcgtacagtatcatctctggttggtgcctcattgtgtgcatcatagatgattgaacttgccttttccactcatagctgattggccttatcttttctacttttgttgagagaaaaaaaagagctagtgaaacaattggttctcttgtatcagatgtcaaagtatccttgaatgaaaacaaaaaatatgaagtgctcgtctgtt

SEQ ID NO: 70244 - DNA, 1661 bp, Zea Mays
gttttgttctgttatcgattggtctgaagctcaagctgcgaactagaagaatgtgtgcaagatgggtttatgtcgagttgtcgacccagttgattcctctccaatggggtcttctgtgacaggaatgggcgtctttatgcttgcttctacaagtatttgtgatgaaaatgggcaggttctaatttattcaccagctaggactgcatcccagcaaggttcaggcaaagtcgggaggtggaaaattaattttttgtcaacccaaaagtgggagaacccgttgatgggatggacatctactggggatccatatgctaatgtcggtgaagcaggacttacgtttgacagtgcagagtcagcaaaggcgtttgccgaaaaacatggatggaattatgtggttcggaaacgccatgcacctcttctgaggcctaaggcctacgctgagaacttcaagtggagaggccctccaaaagcggagcaagcatgagctcgagacatctgtgatgctgacattggcacgatgtcgttttcctcctggctcgattttattttgctttcaaccgtgcccattgttaaagtacgaactagagaatgcatctatcaaacttgtaataagcatgatgtgcaatcaaacaaaatggtgtacttgtacttccaaaacgttaattcgtggatgacattgcttttgcaaccttgtgtgctttcttggctggtatctgaaaagatacatcatgccatttctgagttgaatgatgacgcctacttgcttttggccctatcacacattcacaaatgagctgccagtcgctacgcacgaccactcttgcatgtccgtgtgttcatgggcaacccacgcagttatgaaatgagagtcgggtaggtcagtttcctgaaagggcaggttatacttcctttgcattctccagtcaacatcttatatttactcaggatttcagaactgggtctacatcctattggacttcgcgaaagaggaagctgctcagttttaacatgcagctagcggcttagtctatgcacttggtttcattggatgcagctcaagcttccctaactctcactaatctcctcggagctgtgtccaacggatgcgtcggcgtcggcggcggcggtgcggaacctccaggcgaagaggtaatccctggactcgcactgcagccggctgacgtcgcagggtgcagcgatggaggtgaccttcccgtcgtcctcccactcgatctttgccgtgcatgtgaacgccccgtacgagtccggcagagaggaccggtccgctaccaccagcgccacctccccgctgatcctcctcgacgtggcagccacggcgtcgagccacgggcactcgggctgccccaccatctccttgtacgcgtcgttcacgagccggacgcggttgcctgagtcggagaccaccgccgggagcgcgtcgacctccagctccgcctccacctgaaccgccgtcttcgagacggcggcgtcggtgcaggccgcgtcgtcggtgcggtggatgcacccgacgtggatggcagaccacaccgggcgcaccgcccgcggcgatatgaccctgggctccagcagcttccgcagcaggtcgcgctccacggggacgtccctcccctcctctgtcgccgccgccgccgccgccttcg

SEQ ID NO: 70245 - DNA, 1869 bp, Zea Mays
ttatcacccagccagaccaggcctgcaagagatccattgttgcaagggaagcccaacctaaggcctaacccgcacagggcatagtacccatcaattctttgctggcggcctaagaagaaggatgtgctccgccatactctcgatccaacaaccaggtcgttcagccgcagattagcaggccgcctgcgctcccaagctcctcctttcccctcagcctcccctcctctccggtgtacgtctccgtcgagatggccgccccgctccggcggagcctcccctcccttggccgcgcgcttctcacgccggcgccggcgcggatgctctccgcggaggcctctgatgccctcgttgagatcaagcccggggagatcgggatggtctccggcatccctgaggagcatctccgccgtaaggttctaatttattcaccagctaggactgcatcccagcaaggttcaggcaaagtcgggaggtgggagaacccgttgatgggatggacatctactggggatccatatgctaatgtcggtgaagcaggacttacgtttgacagtgcagagtcagcaaaggcgtttgccgaaaaacatggatggaattatgtggttcggaaacgccatgcacctcttctgaggcctaaggcctacgctgagaacttcaagtggagaggccctccaaaagcggagcaagcatgagctcgagacatctgtgatgctgacattggcacgatgtcgttttcctcctggctcgattttattttgctttcaaccgtgcccattgttaaagtacgaactagagaatgcatctatcaaacttgtaataagcatgatgtgcaatcaaacaaaatggtgtacttgtacttccaaaacgttaattcgtggatgacattgcttttgcaaccttgtgtgctttcttggctggtatctgaaaagatacatcatgccatttctgagttgaatgatgacgcctacttgcttttggccctatcacacattcacaaatgagctgccagtcgctacgcacgaccactcttgcatgtccgtgtgttcatgggcaacccacgcagttatgaaatgagagtcgggtaggtcagtttcctgaaagggcaggttatacttcctttgcattctccagtcaacatcttatatttactcaggatttcagaactgggtctacatcctattggacttcgcgaaagaggaagctgctcagttttaacatgcagctagcggcttagtctatgcacttggtttcattggatgcagctcaagcttccctaactctcactaatctcctcggagctgtgtccaacggatgcgtcggcgtcggcggcggcggtgcggaacctccaggcgaagaggtaatccctggactcgcactgcagccggctgacgtcgcagggtgcagcgatggaggtgaccttcccgtcgtcctcccactcgatctttgccgtgcatgtgaacgccccgtacgagtccggcagagaggaccggtccgctaccaccagcgccacctccccgctgatcctcctcgacgtggcagccacggcgtcgagccacgggcactcgggctgccccaccatctccttgtacgcgtcgttcacgagccggacgcggttgcctgagtcggagaccaccgccgggagcgcgtcgacctccagctccgcctccacctgaaccgccgtcttcgagacggcggcgtcggtgcaggccgcgtcgtcggtgcggtggatgcacccgacgtggatggcagaccacaccgggcgcaccgcccgcggcgatatgaccctgggctccagcagcttccgcagcaggtcgcgctccacggggacgtccctcccctcctctgtcgccgccgccgccgccgccttcg

SEQ ID NO: 70246 - DNA, 1810 bp, Zea Mays
ttatcacccagccagaccaggcctgcaagagatccattgttgcaagggaagcccaacctaaggcctaacccgcacagggcatagtacccatcaattctttgctggcggcctaagaagaaggatgtgctccgccatactctcgatccaacaaccaggtcgttcagccgcagattagcaggccgcctgcgctcccaagctcctcctttcccctcagcctcccctcctctccggtgtacgtctccgtcgagatggccgccccgctccggcggagcctcccctcccttggccgcgcgcttctcacgccggcgccggcgcggatgctctccgcggaggcctctgatgccctcgttgagatcaagcccggggagatcgggatggtctccggcatccctgaggagcatctccgccgtaaggtgggagaacccgttgatgggatggacatctactggggatccatatgctaatgtcggtgaagcaggacttacgtttgacagtgcagagtcagcaaaggcgtttgccgaaaaacatggatggaattatgtggttcggaaacgccatgcacctcttctgaggcctaaggcctacgctgagaacttcaagtggagaggccctccaaaagcggagcaagcatgagctcgagacatctgtgatgctgacattggcacgatgtcgttttcctcctggctcgattttattttgctttcaaccgtgcccattgttaaagtacgaactagagaatgcatctatcaaacttgtaataagcatgatgtgcaatcaaacaaaatggtgtacttgtacttccaaaacgttaattcgtggatgacattgcttttgcaaccttgtgtgctttcttggctggtatctgaaaagatacatcatgccatttctgagttgaatgatgacgcctacttgcttttggccctatcacacattcacaaatgagctgccagtcgctacgcacgaccactcttgcatgtccgtgtgttcatgggcaacccacgcagttatgaaatgagagtcgggtaggtcagtttcctgaaagggcaggttatacttcctttgcattctccagtcaacatcttatatttactcaggatttcagaactgggtctacatcctattggacttcgcgaaagaggaagctgctcagttttaacatgcagctagcggcttagtctatgcacttggtttcattggatgcagctcaagcttccctaactctcactaatctcctcggagctgtgtccaacggatgcgtcggcgtcggcggcggcggtgcggaacctccaggcgaagaggtaatccctggactcgcactgcagccggctgacgtcgcagggtgcagcgatggaggtgaccttcccgtcgtcctcccactcgatctttgccgtgcatgtgaacgccccgtacgagtccggcagagaggaccggtccgctaccaccagcgccacctccccgctgatcctcctcgacgtggcagccacggcgtcgagccacgggcactcgggctgccccaccatctccttgtacgcgtcgttcacgagccggacgcggttgcctgagtcggagaccaccgccgggagcgcgtcgacctccagctccgcctccacctgaaccgccgtcttcgagacggcggcgtcggtgcaggccgcgtcgtcggtgcggtggatgcacccgacgtggatggcagaccacaccgggcgcaccgcccgcggcgatatgaccctgggctccagcagcttccgcagcaggtcgcgctccacggggacgtccctcccctcctctgtcgccgccgccgccgccgccttcg

SEQ ID NO: 70247 - DNA, 5411 bp, Zea Mays
cctgtctctcttcctcctcgctccctccgccttgtccctctgtaggtcacttggtcaggttctcatccccttcttgctccctctgcatcgtccctctgtaggtccacgcgctcctcccgtccacgcctgcgagtatctcttctcagagtctccagatcggggcctccggcagccgctcgcgccaacgctgtcgccgcttgtccgctccttcaccagacaccagcatgcgacacacttctagaatcaaacaggcggtgggaaagagaaaaaaagggaggacgatctcggctctctcacgccgttaaggtcaacaaaggtggggagggccgaccctccggcgttgtcgtcggcgcttgtgcctggtggcggcaggcacagccccgtggacggcaagattaggagtgggggagtcttcaaccatccatcgcaccgcggtcaaagggtctgcgccgcctgcatccagcaggccatggcagtcagtcttcaaccagctactgcctactgtgccaccgtcaaaggggcccgcgccgcacacttccagcagaacaggcgagcaagcccgtcagtcttcaagggcctaaatcggattgaagtaatacatttggtttcttttttttggcctatcaaatatatatgctactgcatgtttaccatggccaactcgagagggaggcatgcaacttgctaccggaggggagctacgcaccactgcaccgtgcgcgcgtcctggggaggccctggcgcgctgaatcgctgaaggtcataatgtatagatgcagcttcaaactaagtaccaggtttgattcaaagcgaggtgagaatttcttacgttgttctttctgaattatgtttccctaagaagaagttatttaaccaaatagactatgttttatttgacgacagacatacaatttttcctttaaccattcatcacaacagtaatgtaacagttaattgcggcagtttttgcttaagcttttagtaaaagttggccatgttctttagttaaaaaaagaactttggtacattcagatggactcgatctatgtcctagctgttttatatcatttattgatcaggctctagccacaacaaatatccaattcgattagaaagcacgagtaaacatgtgccttgacattgcacggggattatcatacctccatcattgtgcttcttgacatggatcttacctcgaaaatcttagattttggtgtagcaaatcttcttccaccaaacgtaacgcatgctagcataacaattataggaacaatgtaagtgaatgtctgttttatatttttccgatttcttctcttattttttcctttagtgcttagagaagctcgattttgtaccattcttttcaatttaattaggcgatactttttaagaaatatccaaacaattaaggaaaacaatggcatttctaattacctgtatatgatatatatggcctatgaatacctttttgcagccttgcttacttcattctaattaggagactctatttgggtcctcagcattctattcgagaacaagtgacacacaaatcacatgtttacagttttcgtctgctgcttctagacattgttagcaggagatcaaacagtgacacaaggttagcacatgaaaatcagatactccttgaaaaaatagattttactctaggttatagtttacatatatttccatctcgaatatttgtcgcttgttagttcaaaaataaactaatggacgacaaatgaaaaaaaacgaaggaagtaccttctagtacatgcctaccggtacagtccacatttgcttaaataagatttcctcctcgagttataatacagtcacataaaaaatctattatatatatatatataattgtccaaatacagttgcacgatgagtaatcataatcaacataacattgtttactgtttcatacaacatgtacaggtatatgcatataggttcaagaaagaaaaacttcatgtccaaaaggaaggagaatgaattctccgcaaaatcataaaaaacattacaagtttatatcatgtttatgtgcacttcataacctttatgaacaatattttgctaactaaaaaggattgtacatatgactaatacttttgtcaacacattgtttcagaaactcactgcaaactactattcttattattttatggccttcaacaccaacattttattgcttacgtgcatgtacataccagctcctataggcaacaccaacgtaatacgacatcctgactgctcatactattatatttgtaaactaaactatcctgctaatgttatatgaacaaatatatattcagaataaatctgtcacttctatgatgaacttttggaacacactgctgaaatacaatgtaatatatatggtcctctcagtctaccgtaggtttgctgtaactactacaattacaatctcagcacatcaacttctgtaagcactggaaccagtttaaatttgcccttaaatttatggcagcatatggtacataataactgctaacaactactctaagtgtacatataattttaatacataaccccaacgaaactgatcgtaaaaatggttcaggttcaccatgcgcgcatggcgcgcaccatacactagtaaaagtgaaacatgatgcaaagggacaaatggaataacacataagaacttatcttattgctttaacattttcagtatgtttcttattgtattggacaaatttataagcataccttcggctcctgaataatgggatgcacgaagattctttgaaggctaagcactacgaagtcgggacccttccaaagatactttttgtagggtaatgttcatctatttataggggagacgaactgactttgtacatatttacagtaatgcccatccatttttacataagccatttacaaatgacattagggtagtaatgtacttcctcctttctcagctccgcaaattccaaccctcgtcgtccggtagccttccttttggacttgtggcccaagttgccgccttcagccattattttcgttgcttgcgtatagacgaaatgcctttgtacactgcttttagccaaagcttagctttgtccgtcagtgagaatattcctgaaacacacttgtgattttgaaaatggttgcttatgattttcgttgcttgtgattttgctcttcgtttttcgactttatgattttacccttctgttttgaaaaccaaattaccgtttgcctcaccctctcaacgccattagtgaaaatcagatttggtgattaaaaaaataaaaaatgtgaaaacaatggatgaaaggtccaaactgccctccttatattatatatgggtgttacctaacaagagtaaaatcacaattacataatataacaaagggcaaaatcacaatacatgtatagacatttttgtcttttttatatcagatttaacaccattaactacatgaaacgacgcaggggtatgccaaagcctcgtttccaaaaccaagggttaaaattacaaagttaaaaaacaaggttaaattacgattgcaaggctagagaggttatactaaatgcctctatagtttacgtggctgacctctaacataaaaatgatttagttctgctaagagtttaaaaataatttagaaagcctaaaatatataaaaaacggttgatttgaaatagtaaaattgaacgatgatcgcgagcgttgatttagatctagtcatcggctccgacttctccggtcaagtcctccccctacctctaccagctgcccgtcgcacacaaaaccccaggctgcccgccgccgccgcgacccgccacgccgccatgtccgctgccgcggcgctccggccgatcgagccacttcccctcccgactgggctctccctctcgccgcgcctcaagcttctgctcaccttctttcgcgccgacctcaccgtccggcccctggacgagtggcagctcaagtccgccctcctcgcgtttctccgcgacccacctctccccctcccgctcctccccgactcagacctctccgtgagccgcctccctgacctccagaagcgccgtcgcgaggagcccgtagcctctggggtcctccacgtccgcgacctctccttcctccgcccccgcaagggagacggcgaggccgaggagatgaccggggagcaggagaagtacttcgagtggcggagcaccctggttcagaagctcgaaggcatcgagctcaacctcgagggagtgaagttccggatgaccgtcgagatcccatcgtctgacgacttcagaacgatgaagaagtcatgggaggatttctactcctccgagctactcaataccaggaatcctgtgagaaagatagctaaaaggccagacacaattgttgtccgtggcgtgccttccaggtggtttgcagagacaagagtatcatccaaaccttccacgctggtcacccacactgttttctcagcgcttggtaaaataaggaacctaaatatttccaatgatgatgagatagaagcaaaaggacatggagtcaacaaggggctcatatctggacttaattgcaaagttcaggtgcaatttgagagctacaatgacttccaggatgcaatgaaggcattatgtggacgttctttagagaaggatcacggttgaaagtagactatgacgtgacctgggactgtgaaggtttctttcgcatttctcaatatgagccagttcgtaacaatttagaggagagggattcattagcatcggttaatagccagaggaaacatcacacttcgcgaattgaatcagattataggaagagattcagggagtgatgacataagcccatggtatgagcgagatttctttgtcctctggagagggaaaacagctgcattgtaccatcgtattgtttcgttctcagatttcaagttatatttctcatttgttcacaattaaccgaacagaaaaacccattctgatacttactaatttgtatttattattagtatcggttttatccttgatgatacccagaggccagagagcgccacaaaacgaactgtttttttattccaaagaattcttagatgttgagcattggcgcctggacccatgctcatcgatcagtcacagtggcgtctgagttcagacttcagagtaatgaatgatttcagaaatgagcatagggacgggtcagcctacacgtgccgagctttgacgatatatcggttacagccgtgcaggtggaaaattctagagaccaaaactaatagtctttctggtttggataagctattttctgtcagtctgtatggagaggatcagatcttttctgactcaagccagaggctaagatctcgagtgacaattcaaggcaagggatgtgcatccctgcctgtgataggagg

SEQ ID NO: 70248 - DNA, 5415 bp, Zea Mays
cctgtctctcttcctcctcgctccctccgccttgtccctctgtaggtcacttggtcaggttctcatccccttcttgctccctctgcatcgtccctctgtaggtccacgcgctcctcccgtccacgcctgcgagtatctcttctcagagtctccagatcggggcctccggcagccgctcgcgccaacgctgtcgccgcttgtccgctccttcaccagacaccagcatgcgacacacttctagaatcaaacaggcggtgggaaagagaaaaaaagggaggacgatctcggctctctcacgccgttaaggtcaacaaaggtggggagggccgaccctccggcgttgtcgtcggcgcttgtgcctggtggcggcaggcacagccccgtggacggcaagattaggagtgggggagtcttcaaccatccatcgcaccgcggtcaaagggtctgcgccgcctgcatccagcaggccatggcagtcagtcttcaaccagctactgcctactgtgccaccgtcaaaggggcccgcgccgcacacttccagcagaacaggcgagcaagcccgtcagtcttcaagggcctaaatcggattgaagtaatacatttggtttcttttttttggcctatcaaatatatatgctactgcatgtttaccatggccaactcgagagggaggcatgcaacttgctaccggaggggagctacgcaccactgcaccgtgcgcgcgtcctggggaggccctggcgcgctgaatcgctgaaggtcataatgtatagatgcagcttcaaactaagtaccaggtttgattcaaagcgaggtgagaatttcttacgttgttctttctgaattatgtttccctaagaagaagttatttaaccaaatagactatgttttatttgacgacagacatacaatttttcctttaaccattcatcacaacagtaatgtaacagttaattgcggcagtttttgcttaagcttttagtaaaagttggccatgttctttagttaaaaaaagaactttggtacattcagatggactcgatctatgtcctagctgttttatatcatttattgatcaggctctagccacaacaaatatccaattcgattagaaagcacgagtaaacatgtgccttgacattgcacggggattatcatacctccatcattgtgcttcttgacatggatcttacctcgaaaatcttagattttggtgtagcaaatcttcttccaccaaacgtaacgcatgctagcataacaattataggaacaatgtaagtgaatgtctgttttatatttttccgatttcttctcttattttttcctttagtgcttagagaagctcgattttgtaccattcttttcaatttaattaggcgatactttttaagaaatatccaaacaattaaggaaaacaatggcatttctaattacctgtatatgatatatatggcctatgaatacctttttgcagccttgcttacttcattctaattaggagactctatttgggtcctcagcattctattcgagaacaagtgacacacaaatcacatgtttacagttttcgtctgctgcttctagacattgttagcaggagatcaaacagtgacacaaggttagcacatgaaaatcagatactccttgaaaaaatagattttactctaggttatagtttacatatatttccatctcgaatatttgtcgcttgttagttcaaaaataaactaatggacgacaaatgaaaaaaaacgaaggaagtaccttctagtacatgcctaccggtacagtccacatttgcttaaataagatttcctcctcgagttataatacagtcacataaaaaatctattatatatatatatataattgtccaaatacagttgcacgatgagtaatcataatcaacataacattgtttactgtttcatacaacatgtacaggtatatgcatataggttcaagaaagaaaaacttcatgtccaaaaggaaggagaatgaattctccgcaaaatcataaaaaacattacaagtttatatcatgtttatgtgcacttcataacctttatgaacaatattttgctaactaaaaaggattgtacatatgactaatacttttgtcaacacattgtttcagaaactcactgcaaactactattcttattattttatggccttcaacaccaacattttattgcttacgtgcatgtacataccagctcctataggcaacaccaacgtaatacgacatcctgactgctcatactattatatttgtaaactaaactatcctgctaatgttatatgaacaaatatatattcagaataaatctgtcacttctatgatgaacttttggaacacactgctgaaatacaatgtaatatatatggtcctctcagtctaccgtaggtttgctgtaactactacaattacaatctcagcacatcaacttctgtaagcactggaaccagtttaaatttgcccttaaatttatggcagcatatggtacataataactgctaacaactactctaagtgtacatataattttaatacataaccccaacgaaactgatcgtaaaaatggttcaggttcaccatgcgcgcatggcgcgcaccatacactagtaaaagtgaaacatgatgcaaagggacaaatggaataacacataagaacttatcttattgctttaacattttcagtatgtttcttattgtattggacaaatttataagcataccttcggctcctgaataatgggatgcacgaagattctttgaaggctaagcactacgaagtcgggacccttccaaagatactttttgtagggtaatgttcatctatttataggggagacgaactgactttgtacatatttacagtaatgcccatccatttttacataagccatttacaaatgacattagggtagtaatgtacttcctcctttctcagctccgcaaattccaaccctcgtcgtccggtagccttccttttggacttgtggcccaagttgccgccttcagccattattttcgttgcttgcgtatagacgaaatgcctttgtacactgcttttagccaaagcttagctttgtccgtcagtgagaatattcctgaaacacacttgtgattttgaaaatggttgcttatgattttcgttgcttgtgattttgctcttcgtttttcgactttatgattttacccttctgttttgaaaaccaaattaccgtttgcctcaccctctcaacgccattagtgaaaatcagatttggtgattaaaaaaataaaaaatgtgaaaacaatggatgaaaggtccaaactgccctccttatattatatatgggtgttacctaacaagagtaaaatcacaattacataatataacaaagggcaaaatcacaatacatgtatagacatttttgtcttttttatatcagatttaacaccattaactacatgaaacgacgcaggggtatgccaaagcctcgtttccaaaaccaagggttaaaattacaaagttaaaaaacaaggttaaattacgattgcaaggctagagaggttatactaaatgcctctatagtttacgtggctgacctctaacataaaaatgatttagttctgctaagagtttaaaaataatttagaaagcctaaaatatataaaaaacggttgatttgaaatagtaaaattgaacgatgatcgcgagcgttgatttagatctagtcatcggctccgacttctccggtcaagtcctccccctacctctaccagctgcccgtcgcacacaaaaccccaggctgcccgccgccgccgcgacccgccacgccgccatgtccgctgccgcggcgctccggccgatcgagccacttcccctcccgactgggctctccctctcgccgcgcctcaagcttctgctcaccttctttcgcgccgacctcaccgtccggcccctggacgagtggcagctcaagtccgccctcctcgcgtttctccgcgacccacctctccccctcccgctcctccccgactcagacctctccgtgagccgcctccctgacctccagaagcgccgtcgcgaggagcccgtagcctctggggtcctccacgtccgcgacctctccttcctccgcccccgcaagggagacggcgaggccgaggagatgaccggggagcaggagaagtacttcgagtggcggagcaccctggttcagaagctcgaaggcatcgagctcaacctcgagggagtgaagttccggatgaccgtcgagatcccatcgtctgacgacttcagaacgatgaagaagtcatgggaggatttctactcctccgagctactcaataccaggaatcctgtgagaaagatagctaaaaggccagacacaattgttgtccgtggcgtgccttccaggtggtttgcagagacaagagtatcatccaaaccttccacgctggtcacccacactgttttctcagcgcttggtaaaataaggaacctaaatatttccaatgatgatgagatagaagcaaaaggacatggagtcaacaaggggctcatatctggacttaattgcaaagttcaggtgcaatttgagagctacaatgacttccaggatgcaatgaaggcattatgtggacgttctttagagaaggaaggatcacggttgaaagtagactatgacgtgacctgggactgtgaaggtttctttcgcatttctcaatatgagccagttcgtaacaatttagaggagagggattcattagcatcggttaatagccagaggaaacatcacacttcgcgaattgaatcagattataggaagagattcagggagtgatgacataagcccatggtatgagcgagatttctttgtcctctggagagggaaaacagctgcattgtaccatcgtattgtttcgttctcagatttcaagttatatttctcatttgttcacaattaaccgaacagaaaaacccattctgatacttactaatttgtatttattattagtatcggttttatccttgatgatacccagaggccagagagcgccacaaaacgaactgtttttttattccaaagaattcttagatgttgagcattggcgcctggacccatgctcatcgatcagtcacagtggcgtctgagttcagacttcagagtaatgaatgatttcagaaatgagcatagggacgggtcagcctacacgtgccgagctttgacgatatatcggttacagccgtgcaggtggaaaattctagagaccaaaactaatagtctttctggtttggataagctattttctgtcagtctgtatggagaggatcagatcttttctgactcaagccagaggctaagatctcgagtgacaattcaaggcaagggatgtgcatccctgcctgtgataggagg

SEQ ID NO: 70249 - DNA, 1736 bp, Zea Mays
cctgtctctcttcctcctcgctccctccgccttgtccctctgtaggtcacttggtcaggttctcatccccttcttgctccctctgcatcgtccctctgtaggtccacgcgctcctcccgtccacgcctgcgagtatctcttctcagagtctccagatcggggcctccggcagccgctcgcgccaacgctgtcgccgcttgtccgctccttcaccagacaccagcatgcgacacacttctagaatcaaacaggcggtgggaaagagaaaaaaagggaggacgatctcggctctctcacgccgttaaggtcaacaaaggtggggagggccgaccctccggcgttgtcgtcggcgcttgtgcctggtggcggcaggcacagccccgtggacggcaagattaggagtgggggagtcttcaaccatccatcgcaccgcggtcaaagggtctgcgccgcctgcatccagcaggccatggcagtcagtcttcaaccagctactgcctactgtgccaccgtcaaaggggcccgcgccgcacacttccagcagaacaggcgagcaagcccgtcagtcttcaagggcctaaatcggattgaagtaatacatttggtttcttttttttggcctatcaaatatatatgctactgcatgtttaccatggccaactcgagagggaggcatgcaacttgctaccggaggggagctacgcaccactgcaccgtgcgcgcgtcctggggaggccctggcgcgctgaatcgctgaaggtcataatgtatagatgcagcttcaaactaagtaccaggtttgattcaaagcgaggaacctaaatatttccaatgatgatgagatagaagcaaaaggacatggagtcaacaaggggctcatatctggacttaattgcaaagttcaggtgcaatttgagagctacaatgacttccaggatgcaatgaaggcattatgtggacgttctttagagaaggaaggatcacggttgaaagtagactatgacgtgacctgggactgtgaaggtttctttcgcatttctcaatatgagccagttcgtaacaatttagaggagagggattcattagcatcggttaatagccagaggaaacatcacacttcgcgaattgaatcagattataggaagagattcagggagtgatgacataagcccatggtatgagcgagatttctttgtcctctggagagggaaaacagctgcattgtaccatcgtattgtttcgttctcagatttcaagttatatttctcatttgttcacaattaaccgaacagaaaaacccattctgatacttactaatttgtatttattattagtatcggttttatccttgatgatacccagaggccagagagcgccacaaaacgaactgtttttttattccaaagaattcttagatgttgagcattggcgcctggacccatgctcatcgatcagtcacagtggcgtctgagttcagacttcagagtaatgaatgatttcagaaatgagcatagggacgggtcagcctacacgtgccgagctttgacgatatatcggttacagccgtgcaggtggaaaattctagagaccaaaactaatagtctttctggtttggataagctattttctgtcagtctgtatggagaggatcagatcttttctgactcaagccagaggctaagatctcgagtgacaattcaaggcaagggatgtgcatccctgcctgtgataggagg

SEQ ID NO: 70250 - DNA, 5383 bp, Zea Mays
cctgtctctcttcctcctcgctccctccgccttgtccctctgtaggtcacttggtcaggttctcatccccttcttgctccctctgcatcgtccctctgtaggtccacgcgctcctcccgtccacgcctgcgagtatctcttctcagagtctccagatcggggcctccggcagccgctcgcgccaacgctgtcgccgcttgtccgctccttcaccagacaccagcatgcgacacacttctagaatcaaacaggcggtgggaaagagaaaaaaagggaggacgatctcggctctctcacgccgttaaggtcaacaaaggtggggagggccgaccctccggcgttgtcgtcggcgcttgtgcctggtggcggcaggcacagccccgtggacggcaagattaggagtgggggagtcttcaaccatccatcgcaccgcggtcaaagggtctgcgccgcctgcatccagcaggccatggcagtcagtcttcaaccagctactgcctactgtgccaccgtcaaaggggcccgcgccgcacacttccagcagaacaggcgagcaagcccgtcagtcttcaagggcctaaatcggattgaagtaatacatttggtttcttttttttggcctatcaaatatatatgctactgcatgtttaccatggccaactcgagagggaggcatgcaacttgctaccggaggggagctacgcaccactgcaccgtgcgcgcgtcctggggaggccctggcgcgctgaatcgctgaaggtcataatgtatagatgcagcttcaaactaagtaccaggtttgattcaaagcgaggtgagaatttcttacgttgttctttctgaattatgtttccctaagaagaagttatttaaccaaatagactatgttttatttgacgacagacatacaatttttcctttaaccattcatcacaacagtaatgtaacagttaattgcggcagtttttgcttaagcttttagtaaaagttggccatgttctttagttaaaaaaagaactttggtacattcagatggactcgatctatgtcctagctgttttatatcatttattgatcaggctctagccacaacaaatatccaattcgattagaaagcacgagtaaacatgtgccttgacattgcacggggattatcatacctccatcattgtgcttcttgacatggatcttacctcgaaaatcttagattttggtgtagcaaatcttcttccaccaaacgtaacgcatgctagcataacaattataggaacaatgtaagtgaatgtctgttttatatttttccgatttcttctcttattttttcctttagtgcttagagaagctcgattttgtaccattcttttcaatttaattaggcgatactttttaagaaatatccaaacaattaaggaaaacaatggcatttctaattacctgtatatgatatatatggcctatgaatacctttttgcagccttgcttacttcattctaattaggagactctatttgggtcctcagcattctattcgagaacaagtgacacacaaatcacatgtttacagttttcgtctgctgcttctagacattgttagcaggagatcaaacagtgacacaaggttagcacatgaaaatcagatactccttgaaaaaatagattttactctaggttatagtttacatatatttccatctcgaatatttgtcgcttgttagttcaaaaataaactaatggacgacaaatgaaaaaaaacgaaggaagtaccttctagtacatgcctaccggtacagtccacatttgcttaaataagatttcctcctcgagttataatacagtcacataaaaaatctattatatatatatatataattgtccaaatacagttgcacgatgagtaatcataatcaacataacattgtttactgtttcatacaacatgtacaggtatatgcatataggttcaagaaagaaaaacttcatgtccaaaaggaaggagaatgaattctccgcaaaatcataaaaaacattacaagtttatatcatgtttatgtgcacttcataacctttatgaacaatattttgctaactaaaaaggattgtacatatgactaatacttttgtcaacacattgtttcagaaactcactgcaaactactattcttattattttatggccttcaacaccaacattttattgcttacgtgcatgtacataccagctcctataggcaacaccaacgtaatacgacatcctgactgctcatactattatatttgtaaactaaactatcctgctaatgttatatgaacaaatatatattcagaataaatctgtcacttctatgatgaacttttggaacacactgctgaaatacaatgtaatatatatggtcctctcagtctaccgtaggtttgctgtaactactacaattacaatctcagcacatcaacttctgtaagcactggaaccagtttaaatttgcccttaaatttatggcagcatatggtacataataactgctaacaactactctaagtgtacatataattttaatacataaccccaacgaaactgatcgtaaaaatggttcaggttcaccatgcgcgcatggcgcgcaccatacactagtaaaagtgaaacatgatgcaaagggacaaatggaataacacataagaacttatcttattgctttaacattttcagtatgtttcttattgtattggacaaatttataagcataccttcggctcctgaataatgggatgcacgaagattctttgaaggctaagcactacgaagtcgggacccttccaaagatactttttgtagggtaatgttcatctatttataggggagacgaactgactttgtacatatttacagtaatgcccatccatttttacataagccatttacaaatgacattagggtagtaatgtacttcctcctttctcagctccgcaaattccaaccctcgtcgtccggtagccttccttttggacttgtggcccaagttgccgccttcagccattattttcgttgcttgcgtatagacgaaatgcctttgtacactgcttttagccaaagcttagctttgtccgtcagtgagaatattcctgaaacacacttgtgattttgaaaatggttgcttatgattttcgttgcttgtgattttgctcttcgtttttcgactttatgattttacccttctgttttgaaaaccaaattaccgtttgcctcaccctctcaacgccattagtgaaaatcagatttggtgattaaaaaaataaaaaatgtgaaaacaatggatgaaaggtccaaactgccctccttatattatatatgggtgttacctaacaagagtaaaatcacaattacataatataacaaagggcaaaatcacaatacatgtatagacatttttgtcttttttatatcagatttaacaccattaactacatgaaacgacgcaggggtatgccaaagcctcgtttccaaaaccaagggttaaaattacaaagttaaaaaacaaggttaaattacgattgcaaggctagagaggttatactaaatgcctctatagtttacgtggctgacctctaacataaaaatgatttagttctgctaagagtttaaaaataatttagaaagcctaaaatatataaaaaacggttgatttgaaatagtaaaattgaacgatgatcgcgagcgttgatttagatctagtcatcggctccgacttctccggtcaagtcctccccctacctctaccagctgcccgtcgcacacaaaaccccaggctgcccgccgccgccgcgacccgccacgccgccatgtccgctgccgcggcgctccggccgatcgagccacttcccctcccgactgggctctccctctcgccgcgcctcaagcttctgctcaccttctttcgcgccgacctcaccgtccggcccctggacgagtggcagctcaagtccgccctcctcgcgtttctccgcgacccacctctccccctcccgctcctccccgactcagacctctccgtgagccgcctccctgacctccagaagcgccgtcgcgaggagcccgtagcctctggggtcctccacgtccgcgacctctccttcctccgcccccgcaagggagacggcgaggccgaggagatgaccggggagcaggagaagtacttcgagtggcggagcaccctggttcagaagctcgaaggcatcgagctcaacctcgagggagtgaagttccggatgaccgtcgagatcccatcgtctgacgacttcagaacgatgaagaagtcatgggaggatttctactcctccgagctactcaataccaggaatcctgtgagaaagatagctaaaaggccagacacaattgttgtccgtggcgtgccttccaggtggtttgcagagacaagagtatcatccaaaccttccacgctggtcacccacactgttttctcagcgcttggtaaaataagaagcaaaaggacatggagtcaacaaggggctcatatctggacttaattgcaaagttcaggtgcaatttgagagctacaatgacttccaggatgcaatgaaggcattatgtggacgttctttagagaaggaaggatcacggttgaaagtagactatgacgtgacctgggactgtgaaggtttctttcgcatttctcaatatgagccagttcgtaacaatttagaggagagggattcattagcatcggttaatagccagaggaaacatcacacttcgcgaattgaatcagattataggaagagattcagggagtgatgacataagcccatggtatgagcgagatttctttgtcctctggagagggaaaacagctgcattgtaccatcgtattgtttcgttctcagatttcaagttatatttctcatttgttcacaattaaccgaacagaaaaacccattctgatacttactaatttgtatttattattagtatcggttttatccttgatgatacccagaggccagagagcgccacaaaacgaactgtttttttattccaaagaattcttagatgttgagcattggcgcctggacccatgctcatcgatcagtcacagtggcgtctgagttcagacttcagagtaatgaatgatttcagaaatgagcatagggacgggtcagcctacacgtgccgagctttgacgatatatcggttacagccgtgcaggtggaaaattctagagaccaaaactaatagtctttctggtttggataagctattttctgtcagtctgtatggagaggatcagatcttttctgactcaagccagaggctaagatctcgagtgacaattcaaggcaagggatgtgcatccctgcctgtgataggagg

SEQ ID NO: 70251 - DNA, 6408 bp, Zea Mays
cctgtctctcttcctcctcgctccctccgccttgtccctctgtaggtcacttggtcaggttctcatccccttcttgctccctctgcatcgtccctctgtaggtccacgcgctcctcccgtccacgcctgcgagtatctcttctcagagtctccagatcggggcctccggcagccgctcgcgccaacgctgtcgccgcttgtccgctccttcaccagacaccagcatgcgacacacttctagaatcaaacaggcggtgggaaagagaaaaaaagggaggacgatctcggctctctcacgccgttaaggtcaacaaaggtggggagggccgaccctccggcgttgtcgtcggcgcttgtgcctggtggcggcaggcacagccccgtggacggcaagattaggagtgggggagtcttcaaccatccatcgcaccgcggtcaaagggtctgcgccgcctgcatccagcaggccatggcagtcagtcttcaaccagctactgcctactgtgccaccgtcaaaggggcccgcgccgcacacttccagcagaacaggcgagcaagcccgtcagtcttcaagggcctaaatcggattgaagtaatacatttggtttcttttttttggcctatcaaatatatatgctactgcatgtttaccatggccaactcgagagggaggcatgcaacttgctaccggaggggagctacgcaccactgcaccgtgcgcgcgtcctggggaggccctggcgcgctgaatcgctgaaggtcataatgtatagatgcagcttcaaactaagtaccaggtttgattcaaagcgaggtgagaatttcttacgttgttctttctgaattatgtttccctaagaagaagttatttaaccaaatagactatgttttatttgacgacagacatacaatttttcctttaaccattcatcacaacagtaatgtaacagttaattgcggcagtttttgcttaagcttttagtaaaagttggccatgttctttagttaaaaaaagaactttggtacattcagatggactcgatctatgtcctagctgttttatatcatttattgatcaggctctagccacaacaaatatccaattcgattagaaagcacgagtaaacatgtgccttgacattgcacggggattatcatacctccatcattgtgcttcttgacatggatcttacctcgaaaatcttagattttggtgtagcaaatcttcttccaccaaacgtaacgcatgctagcataacaattataggaacaatgtaagtgaatgtctgttttatatttttccgatttcttctcttattttttcctttagtgcttagagaagctcgattttgtaccattcttttcaatttaattaggcgatactttttaagaaatatccaaacaattaaggaaaacaatggcatttctaattacctgtatatgatatatatggcctatgaatacctttttgcagccttgcttacttcattctaattaggagactctatttgggtcctcagcattctattcgagaacaagtgacacacaaatcacatgtttacagttttcgtctgctgcttctagacattgttagcaggagatcaaacagtgacacaaggttagcacatgaaaatcagatactccttgaaaaaatagattttactctaggttatagtttacatatatttccatctcgaatatttgtcgcttgttagttcaaaaataaactaatggacgacaaatgaaaaaaaacgaaggaagtaccttctagtacatgcctaccggtacagtccacatttgcttaaataagatttcctcctcgagttataatacagtcacataaaaaatctattatatatatatatataattgtccaaatacagttgcacgatgagtaatcataatcaacataacattgtttactgtttcatacaacatgtacaggtatatgcatataggttcaagaaagaaaaacttcatgtccaaaaggaaggagaatgaattctccgcaaaatcataaaaaacattacaagtttatatcatgtttatgtgcacttcataacctttatgaacaatattttgctaactaaaaaggattgtacatatgactaatacttttgtcaacacattgtttcagaaactcactgcaaactactattcttattattttatggccttcaacaccaacattttattgcttacgtgcatgtacataccagctcctataggcaacaccaacgtaatacgacatcctgactgctcatactattatatttgtaaactaaactatcctgctaatgttatatgaacaaatatatattcagaataaatctgtcacttctatgatgaacttttggaacacactgctgaaatacaatgtaatatatatggtcctctcagtctaccgtaggtttgctgtaactactacaattacaatctcagcacatcaacttctgtaagcactggaaccagtttaaatttgcccttaaatttatggcagcatatggtacataataactgctaacaactactctaagtgtacatataattttaatacataaccccaacgaaactgatcgtaaaaatggttcaggttcaccatgcgcgcatggcgcgcaccatacactagtaaaagtgaaacatgatgcaaagggacaaatggaataacacataagaacttatcttattgctttaacattttcagtatgtttcttattgtattggacaaatttataagcataccttcggctcctgaataatgggatgcacgaagattctttgaaggctaagcactacgaagtcgggacccttccaaagatactttttgtagggtaatgttcatctatttataggggagacgaactgactttgtacatatttacagtaatgcccatccatttttacataagccatttacaaatgacattagggtagtaatgtacttcctcctttctcagctccgcaaattccaaccctcgtcgtccggtagccttccttttggacttgtggcccaagttgccgccttcagccattattttcgttgcttgcgtatagacgaaatgcctttgtacactgcttttagccaaagcttagctttgtccgtcagtgagaatattcctgaaacacacttgtgattttgaaaatggttgcttatgattttcgttgcttgtgattttgctcttcgtttttcgactttatgattttacccttctgttttgaaaaccaaattaccgtttgcctcaccctctcaacgccattagtgaaaatcagatttggtgattaaaaaaataaaaaatgtgaaaacaatggatgaaaggtccaaactgccctccttatattatatatgggtgttacctaacaagagtaaaatcacaattacataatataacaaagggcaaaatcacaatacatgtatagacatttttgtcttttttatatcagatttaacaccattaactacatgaaacgacgcaggggtatgccaaagcctcgtttccaaaaccaagggttaaaattacaaagttaaaaaacaaggttaaattacgattgcaaggctagagaggttatactaaatgcctctatagtttacgtggctgacctctaacataaaaatgatttagttctgctaagagtttaaaaataatttagaaagcctaaaatatataaaaaacggttgatttgaaatagtaaaattgaacgatgatcgcgagcgttgatttagatctagtcatcggctccgacttctccggtcaagtcctccccctacctctaccagctgcccgtcgcacacaaaaccccaggctgcccgccgccgccgcgacccgccacgccgccatgtccgctgccgcggcgctccggccgatcgagccacttcccctcccgactgggctctccctctcgccgcgcctcaagcttctgctcaccttctttcgcgccgacctcaccgtccggcccctggacgagtggcagctcaagtccgccctcctcgcgtttctccgcgacccacctctccccctcccgctcctccccgactcagacctctccgtgagccgcctccctgacctccagaagcgccgtcgcgaggagcccgtagcctctggggtcctccacgtccgcgacctctccttcctccgcccccgcaagggagacggcgaggccgaggagatgaccggggagcaggagaagtacttcgagtggcggagcaccctggttcagaagctcgaaggcatcgagctcaacctcgagggagtgaagttccggatgaccgtcgagatcccatcgtctgacgacttcagaacgatgaagaagtcatgggaggatttctactcctccgagctactcaataccaggaatcctgtgagaaagatagctaaaaggccagacacaattgttgtccgtggcgtgccttccaggtggtttgcagagacaagagtatcatccaaaccttccacgctggtcacccacactgttttctcagcgcttggtaaaataaggtgaactttggtgatctctagtttgttcggatcatagtccactatctattttttcgctgattaactagttagtgcttttgcatcagggtgctgcatccctgatgaattagtgctacaagaaatggaaactgcaaaaacctaaagacatctaaattaactgagcatgacccacatttggaatttatagaaacctaacacatcattgttggattaatgattcaatgttgtttgtgtcggcagcttctttgtttcgcttgtagaacaatatttactcccatgtacctaaccctcatgttatcctgaaaagtgcatggtgttacacaattgatgtgcataggtaaaaacctgtatcacagttttggagtgaccttcctcattttgtgtttgtattagttcatttttctctattgttttctgtacttttgtaatatatacttaacacataaattataatatatatatttcacacataaattagtaaataatcccttcattcaaaattacaggatgtttaggttttttttaaatacacagtttttactatatatctagacatagcagatatctaagtgcatagtaatgggtctgtttctagagccgccaaaacttctcataatttggaacggagggagtatatattactggtgattgtaattgactaactgtaactcatgtgaagaacattctgaaacataactagaaaaatacattccaaaaacacaccatgattagtatatcacttttcaataaactgacaagcttgcaaaatgattttctgcgaattggcttcactgaagtggtgatgcatagacccttcaatttcattttttcattggtatctgtattcacctagttttgacctgctagccttcaaattaatataatgaaaaaaaatctctgttaattagtactggtttatgcaatacacttgactgtctgtaaatactttttaaattagtacttccttgcaacattcttccatccaaatgtcaggaacctaaatatttccaatgatgatgagatagaagcaaaaggacatggagtcaacaaggggctcatatctggacttaattgcaaagttcaggtgcaatttgagagctacaatgacttccaggatgcaatgaaggcattatgtggacgttctttagagaaggaaggatcacggttgaaagtagactatgacgtgacctgggactgtgaaggtttctttcgcatttctcaatatgagccagttcgtaacaatttagaggagagggattcattagcatcggttaatagccagaggaaacatcacacttcgcgaattgaatcagattataggaagagattcagggagtgatgacataagcccatggtatgagcgagatttctttgtcctctggagagggaaaacagctgcattgtaccatcgtattgtttcgttctcagatttcaagttatatttctcatttgttcacaattaaccgaacagaaaaacccattctgatacttactaatttgtatttattattagtatcggttttatccttgatgatacccagaggccagagagcgccacaaaacgaactgtttttttattccaaagaattcttagatgttgagcattggcgcctggacccatgctcatcgatcagtcacagtggcgtctgagttcagacttcagagtaatgaatgatttcagaaatgagcatagggacgggtcagcctacacgtgccgagctttgacgatatatcggttacagccgtgcaggtggaaaattctagagaccaaaactaatagtctttctggtttggataagctattttctgtcagtctgtatggagaggatcagatcttttctgactcaagccagaggctaagatctcgagtgacaattcaaggcaagggatgtgcatccctgcctgtgataggagg

SEQ ID NO: 70252 - DNA, 2335 bp, Zea Mays
cctgtctctcttcctcctcgctccctccgccttgtccctctgtaggtcacttggtcaggttctcatccccttcttgctccctctgcatcgtccctctgtaggtccacgcgctcctcccgtccacgcctgcgagtatctcttctcagagtctccagatcggggcctccggcagccgctcgcgccaacgctgtcgccgcttgtccgctccttcaccagacaccagcatgcgacacacttctagaatcaaacaggcggtgggaaagagaaaaaaagggaggacgatctcggctctctcacgccgttaaggtcaacaaaggtggggagggccgaccctccggcgttgtcgtcggcgcttgtgcctggtggcggcaggcacagccccgtggacggtaaggtcggcgcgtctgcgagggtattcgacggtggcttccaggaggcgtatgctttatctcattatctgctctgcttccaggcaagattaggagtgggggagtcttcaaccatccatcgcaccgcggtcaaagggtctgcgccgcctgcatccagcaggccatggcagtcagtcttcaaccagctactgcctactgtgccaccgtcaaaggggcccgcgccgcacacttccagcagaacaggcggttagactggctccaacaaggccctctaaagggtcctgtaccctaaatttagaggacgaggacgtcctctactccctccagcaacgtcctctaaacggtcctctaaatttagagaacgctgctggatcctctatatgtagagtttctctaaacggttctctatctatttgaatactttaaacaaccgatttaataaaactaaaatatgtacaatacatttgagagtatgacaaatacgtatgtacaaaaattaaaaaattaaaaatgtgtttaatataggtatttacatatagagaacgtgatttagaggacgttgttggagagaaagtagatataggagatggaatcttttagagaagactgtaaaggacggatatagaggatgtatatagaggacgttgctggagacagtcttagtcttcaatgtgcaatcatgcacacctattttcctctaatttattttctttttttgggattctactgaaaaaggaattcttttgcaaacaatctctcaaggcagagcaagcccgtcagtcttcaagggcctaaatcggattgaagtaatacatttggtttcttttttttggcctatcaaatatatatgctactgcatgtttaccatggccaactcgagagggaggcatgcaacttgctaccggaggggagctacgcaccactgcaccgtgcgcgcgtcctggggaggccctggcgcgctgaatcgctgaaggtcataatgtatagatgcagcttcaaactaagtaccaggtttgattcaaagcgaggaacctaaatatttccaatgatgatgagatagaagcaaaaggacatggagtcaacaaggggctcatatctggacttaattgcaaagttcaggtgcaatttgagagctacaatgacttccaggatgcaatgaaggcattatgtggacgttctttagagaaggatcacggttgaaagtagactatgacgtgacctgggactgtgaaggtttctttcgcatttctcaatatgagccagttcgtaacaatttagaggagagggattcattagcatcggttaatagccagaggaaacatcacacttcgcgaattgaatcagattataggaagagattcagggagtgatgacataagcccatggtatgagcgagatttctttgtcctctggagagggaaaacagctgcattgtaccatcgtattgtttcgttctcagatttcaagttatatttctcatttgttcacaattaaccgaacagaaaaacccattctgatacttactaatttgtatttattattagtatcggttttatccttgatgatacccagaggccagagagcgccacaaaacgaactgtttttttattccaaagaattcttagatgttgagcattggcgcctggacccatgctcatcgatcagtcacagtggcgtctgagttcagacttcagagtaatgaatgatttcagaaatgagcatagggacgggtcagcctacacgtgccgagctttgacgatatatcggttacagccgtgcaggtggaaaattctagagaccaaaactaatagtctttctggtttggataagctattttctgtcagtctgtatggagaggatcagatcttttctgactcaagccagaggctaagatctcgagtgacaattcaaggcaagggatgtgcatccctgcctgtgataggagg

SEQ ID NO: 70253 - DNA, 1620 bp, Zea Mays
atgggggacaacaggcggaggggcgaagtaggttgtcgggagtatgggagcagtagcgttgaaccttgtggtcagggcatgcagcttggcgaggccgatgggagcagaggcgggttcagcgatcgcaccagcagggaagggcgttggcggctgcgcctgcaggggggactagtgaagcttctgaagtcatgtgactatcgaactttggcaatcggtgatggtgggaatgatgtaaggatgatacaacaggctgacattggtgtaggaattagtggtagggaaggtcttcaagctgcaagggctgctgactatagcattggcaaattcaggttcctgaaaaggttgattcttgttcatgggcggtactcctacaatcgcactgccttcctgtcgcatttttcttttctttcaggcattgctggaacaagcttattcaactcagttagtttgatggcttataatgttttctacacaagcattcctgttttaactactgtactggacaaggatttatctgaaaagacagtgatgcaaaatccagagatattactttactgccaagctggaaggcttctcaatccaagtacctttgctggttggtttggtcgatcattgtatcatgcaatcattattttcttaataaccatccatgcatatgctaatgagaaaagcgagatggaggagctctcaatggttgcactctcaggaagcatttggttgcaggcatttgttgtgacgttggagatgaattccttcacatctgtgcaacttctggccatatggggaaacctcattgccttctatgtcctcaatttctttatcagcagtatacccacttctggaatgtacactatcatgttcggcctttgcagacaaccgtcatactggataacgctggtgttgatcagtggagttggaatgggtcctgtattggctctgaaatatttcagatatacatacagacctagcgtgatcaacattcttcagaaggccgagcgttcacgggggccaatgtacaccctgctgaatctagagtctcagttgagatcagacaaagatagtatgatggtagccggttccacagcgccagccaagaataagagctctgtttacgagccgttgctttctgactccccgatggcatccaggagatctcttgcaccagcatcttcatttgatatcttccagccagcacattctagaacatctcacccaagaaacataaaagccaattaattttttggaacaacagttaactcgtaacagtatggcataccagaatgacaaaaaaaaaagatgtcagtcgaattagatatgttgcatatttctgttaatgatttagtagatattgcccaaaaagatataacgaaaagtcatacttaatcctttatagctgttagcaaaaatgggtagtgaccatttatgttctctatggggaataaattaatttctccaatccaccagatgcaaaaaaataaacttatgtcccagtcataccaaaaagacttgcgttgtctccggacccatccaattttaaattgcgatgtgctgtcgggcccaaattatgtgttgctgctgcgttttccctttcgctttccccagtttcactcactttttgcc

SEQ ID NO: 70254 - DNA, 4261 bp, Zea Mays
gccctcattcctgtctacagaagtacagctaacaaaacaaaatacaggtgttggtggcgctgacgggaatgcctccatatggccggtgactgctgcgccatgcttcgatgggtcgctattagctgtggttacggtctctgaatacctcgcgctgcgacgagatttcagcggcggcggcgtctaccagtccatgtccatccagcagggttcagtctgtgtgagcaaggacgcttcactttcagtgctctctgtctgtaagttgtcacaacctactcgcatatccatgcgcgtcggcgttgcacgcatacagccatacaggggaaaaaagaggagaggagaaatcggcccagttgcacgcagcgaaggtagccgaagaaaaaaaaaattctcccgttcacctcgcctgcgggacaactggggcaacagccgccggccggtgccccctcccccctacgcccagctgcccagatccgagccctttgcccggcgattacaccaggcctgcccagctgacctcacctggacaatcaagctgaagagaaatatcatagtgtgcatggtttttcaggaatgaagcgttttgtctacataaatgatgagtcttatcagaacgactactgtgataaccgggtttctaatacaaagtataccttattgaacttcgtgccaaaaaacctatgggaacagttcaggcgcttcatgaatcaatatttcttgttgatagcttgtctgcaactatggtcacttatcactcctgtaaatcctgcaagtacctggggcccacttatatttatctttgctgtttctgcaaccaaagaggcatgggatgactacaacaggtatatttcagataaacaagcgaatgataaggaagtgtggattgttaagaatggtgcccggaaacacattcaagctcaagatatccgtgtcggtaacatagtttggattcgagagaatgaagaagtaccatgtgatcttgttttgttgggaacttctgaaccacaaggcatctgtcatgttgagctgctcttgatggggaaattgatttgaagacaagagcaagcccaccaccatgcgtagggctggagtttgaacagctgcacaaaataaagggtgtgatcgagtgcccaataccagataaagacatacgaagatttgatgcaaacatccgcctgtttcctccattcattgataatgacatttgcccattgactattaataacacattgctgcagtcatgctacttgagaaatacagaatgggcttgtggtgtagcagtttatacaggcaatgaaactaagttgggaatgagtaggggtgtcccagaacccaagctaactgctatggatgcaatgattgataagcttactggtgccatattcttatttcaacttacagtcgttgtcgttcttggggctgcaggcaatatttggaaggatatggaagctcgcaagcaatggtatgttaagtatgatgacaatgaaccatggtatcagattctggttatacctctgcggtttgaactattgtgctctattatgattcccatttcgataaaggtttctttggactttgttaaaagtctctatgcaaagttcatagattgggatgatgatatttatgacctggaaaatgacacacctgcccgtgcagcaaacacagcaattagtgaggacttgggacaggttgaatatattttgacagataaaactgggacattgactgagaacaagatgatcttcagaaggtgctgtattgggggtaccttttatgggaatgaatctggagatgcgctcagagacgttgaattactgaacgctgtcgccaataattctcctaatgtcatcaagtttttgacagtcatgacactctgcaatacagtaattcctataaaaagtcctactggaccaattttgtataaagcccagtcccaggatgaggatgccctggttaatgcagctgcaaatttgcatatggttcttgtcagcaagaatggaagcaatgcagaaattcacttcaaccggcgagtgatgcaatatgagatacttgacattcttgagttcacatctgaccggaaaagaatgtctattgttattttggattgtcagagtggcaagttttttctcttgtccaaaggagctgatgaggcaatgcttccttgtgcttattctggacaaaagacaaagacatttgttgatgcagttgacaaatatgctcagctggggttgcgcacactctgcttgggatggcgtgagctggaaccagaggaatacactaaatggtctcaatcatttaaggaggccaatagctcattgaatgacagggagtggaaagttgctgaggtttgccaaaagctagaacatagcttggagattctaggtgtcagtgcaatagaagatcgcctccaggatggggtaccagaaactatcgaaatactgaggcagtcaggaatcaacttctggatgttaactggtgataaacaaagtactgccattcaaattgctcttttgtgcaacttgatttcttcagaacctaaaggacagctcttgcatatcaatgggaaaactcaagatgaagttgctagaagcttggaaagagttcttcttaccatgaggattacgtcatcagagcctaaggagctggcttttgtagtggatggctgggcactagagattattctatcacgctatactgaagcttttactgaactagcagttctttcaaaaactgcattatgctgccgtgttacaccttcacaaaaagcacagtgaagcttctgaagtcatgtgactatcgaactttggcaatcggtgatggtgggaatgatgtaaggatgatacaacaggctgacattggtgtaggaattagtggtagggaaggtcttcaagctgcaagggctgctgactatagcattggcaaattcaggttcctgaaaaggttgattcttgttcatgggcggtactcctacaatcgcactgccttcctgtcgcagtactctttctacaagtcattgttaatttgctttattcagatacttttttcttttctttcaggcattgctggaacaagcttattcaactcagttagtttgatggcttataatgttttctacacaagcattcctgttttaactactgtactggacaaggatttatctgaaaagacagtgatgcaaaatccagagatattactttactgccaagctggaaggcttctcaatccaagtacctttgctggttggtttggtcgatcattgtatcatgcaatcattattttcttaataaccatccatgcatatgctaatgagaaaagcgagatggaggagctctcaatggttgcactctcaggaagcatttggttgcaggcatttgttgtgacgttggagatgaattccttcacatctgtgcaacttctggccatatggggaaacctcattgccttctatgtcctcaatttctttatcagcagtatacccacttctggaatgtacactatcatgttcggcctttgcagacaaccgtcatactggataacgctggtgttgatcagtggagttggaatgggtcctgtattggctctgaaatatttcagatatacatacagacctagcgtgatcaacattcttcagaaggccgagcgttcacgggggccaatgtacaccctgctgaatctagagtctcagttgagatcagacaaagatagtatgatggtagccggttccacagcgccagccaagaataagagctctgtttacgagccgttgctttctgactccccgatggcatccaggagatctcttgcaccagcatcttcatttgatatcttccagccagcacattctagaacatctcacccaagaaacataaaagccaattaattttttggaacaacagttaactcgtaacagtatggcataccagaatgacaaaaaaaaaagatgtcagtcgaattagatatgttgcatatttctgttaatgatttagtagatattgcccaaaaagatataacgaaaagtcatacttaatcctttatagctgttagcaaaaatgggtagtgaccatttatgttctctatggggaataaattaatttctccaatccaccagatgcaaaaaaataaacttatgtcccagtcataccaaaaagacttgcgttgtctccggacccatccaattttaaattgcgatgtgctgtcgggcccaaattatgtgttgctgctgcgttttccctttcgctttccccagtttcactcactttttgcc

SEQ ID NO: 70255 - DNA, 4091 bp, Zea Mays
gccctcattcctgtctacagaagtacagctaacaaaacaaaatacaggtgttggtggcgctgacgggaatgcctccatatggccggtgactgctgcgccatgcttcgatgggtcgctattagctgtggttacggtctctgaatacctcgcgctgcgacgagatttcagcggcggcggcgtctaccagtccatgtccatccagcagggttcagtctgtgtgagcaaggacgcttcactttcagtgctctctgtctgtaagttgtcacaacctactcgcatatccatgcgcgtcggcgttgcacgcatacagccatacaggggaaaaaagaggagaggagaaatcggcccagttgcacgcagcgaaggtagccgaagaaaaaaaaaattctcccgttcacctcgcctgcgggacaactggggcaacagccgccggccggtgccccctcccccctacgcccagctgcccagatccgagccctttgcccggcgattacaccaggcctgcccagctgacctcacctggacaatcaagctgaagagaaatatcatagtgtgcatggtttttcaggaatgaagcgttttgtctacataaatgatgagtcttatcagaacgactactgtgataaccgggtttctaatacaaagtataccttattgaacttcgtgccaaaaaacctatgggaacagttcaggcgcttcatgaatcaatatttcttgttgatagcttgtctgcaactatggtcacttatcactcctgtaaatcctgcaagtacctggggcccacttatatttatctttgctgtttctgcaaccaaagaggcatgggatgactacaacagattcaagctcaagatatccgtgtcggtaacatagtttggattcgagagaatgaagaagtaccatgtgatcttgttttgttgggaacttctgaaccacaaggcatctgtcatgttgagctgctcttgatggggaaattgatttgaagacaagagcaagcccaccaccatgcgtagggctggagtttgaacagctgcacaaaataaagggtgtgatcgagtgcccaataccagataaagacatacgaagatttgatgcaaacatccgcctgtttcctccattcattgataatgacatttgcccattgactattaataacacattgctgcagtcatgctacttgagaaatacagaatgggcttgtggtgtagcagtttatacaggcaatgaaactaagttgggaatgagtaggggtgtcccagaacccaagctaactgctatggatgcaatgattgataagcttactggtgccatattcttatttcaacttacagtcgttgtcgttcttggggctgcaggcaatatttggaaggatatggaagctcgcaagcaatggtatgttaagtatgatgacaatgaaccatggtatcagattctggttatacctctgcggtttgaactattgtgctctattatgattcccatttcgataaaggtttctttggactttgttaaaagtctctatgcaaagttcatagattgggatgatgatatttatgacctggaaaatgacacacctgcccgtgcagcaaacacagcaattagtgaggacttgggacaggttgaatatattttgacagataaaactgggacattgactgagaacaagatgatcttcagaaggtgctgtattgggggtaccttttatgggaatgaatctggagatgcgctcagagacgttgaattactgaacgctgtcgccaataattctcctaatgtcatcaagtttttgacagtcatgacactctgcaatacagtaattcctataaaaagtcctactggaccaattttgtataaagcccagtcccaggatgaggatgccctggttaatgcagctgcaaatttgcatatggttcttgtcagcaagaatggaagcaatgcagaaattcacttcaaccggcgagtgatgcaatatgagatacttgacattcttgagttcacatctgaccggaaaagaatgtctattgttattttggattgtcagagtggcaagttttttctcttgtccaaaggagctgatgaggcaatgcttccttgtgcttattctggacaaaagacaaagacatttgttgatgcagttgacaaatatgctcagctggggttgcgcacactctgcttgggatggcgtgagctggaaccagaggaatacactaaatggtctcaatcatttaaggaggccaatagctcattgaatgacagggagtggaaagttgctgaggtttgccaaaagctagaacatagcttggagattctaggtgtcagtgcaatagaagatcgcctccaggatggggtaccagaaactatcgaaatactgaggcagtcaggaatcaacttctggatgttaactggtgataaacaaagtactgccattcaaattgctcttttgtgcaacttgatttcttcaggagctggcttttgtagtggatggctgggcactagagattattctatcacgctatactgaagcttttactgaactagcagttctttcaaaaactgcattatgctgccgtgttacaccttcacaaaaagcacagctagtgaagcttctgaagtcatgtgactatcgaactttggcaatcggtgatggtgggaatgatgtaaggatgatacaacaggctgacattggtgtaggaattagtggtagggaaggtcttcaagctgcaagggctgctgactatagcattggcaaattcaggttcctgaaaaggttgattcttgttcatgggcggtactcctacaatcgcactgccttcctgtcgcagtactctttctacaagtcattgttaatttgctttattcagatacttttttcttttctttcaggcattgctggaacaagcttattcaactcagttagtttgatggcttataatgttttctacacaagcattcctgttttaactactgtactggacaaggatttatctgaaaagacagtgatgcaaaatccagagatattactttactgccaagctggaaggcttctcaatccaagtacctttgctggttggtttggtcgatcattgtatcatgcaatcattattttcttaataaccatccatgcatatgctaatgagaaaagcgagatggaggagctctcaatggttgcactctcaggaagcatttggttgcaggcatttgttgtgacgttggagatgaattccttcacatctgtgcaacttctggccatatggggaaacctcattgccttctatgtcctcaatttctttatcagcagtatacccacttctggaatgtacactatcatgttcggcctttgcagacaaccgtcatactggataacgctggtgttgatcagtggagttggaatgggtcctgtattggctctgaaatatttcagatatacatacagacctagcgtgatcaacattcttcagaaggccgagcgttcacgggggccaatgtacaccctgctgaatctagagtctcagttgagatcagacaaagatagtatgatggtagccggttccacagcgccagccaagaataagagctctgtttacgagccgttgctttctgactccccgatggcatccaggagatctcttgcaccagcatcttcatttgatatcttccagccagcacattctagaacatctcacccaagaaacataaaagccaattaattttttggaacaacagttaactcgtaacagtatggcataccagaatgacaaaaaaaaaagatgtcagtcgaattagatatgttgcatatttctgttaatgatttagtagatattgcccaaaaagatataacgaaaagtcatacttaatcctttatagctgttagcaaaaatgggtagtgaccatttatgttctctatggggaataaattaatttctccaatccaccagatgcaaaaaaataaacttatgtcccagtcataccaaaaagacttgcgttgtctccggacccatccaattttaaattgcgatgtgctgtcgggcccaaattatgtgttgctgctgcgttttccctttcgctttccccagtttcactcactttttgcc

SEQ ID NO: 70256 - DNA, 4220 bp, Zea Mays
gccctcattcctgtctacagaagtacagctaacaaaacaaaatacaggtgttggtggcgctgacgggaatgcctccatatggccggtgactgctgcgccatgcttcgatgggtcgctattagctgtggttacggtctctgaatacctcgcgctgcgacgagatttcagcggcggcggcgtctaccagtccatgtccatccagcagggttcagtctgtgtgagcaaggacgcttcactttcagtgctctctgtctgtaagttgtcacaacctactcgcatatccatgcgcgtcggcgttgcacgcatacagccatacaggggaaaaaagaggagaggagaaatcggcccagttgcacgcagcgaaggtagccgaagaaaaaaaaaattctcccgttcacctcgcctgcgggacaactggggcaacagccgccggccggtgccccctcccccctacgcccagctgcccagatccgagccctttgcccggcgattacaccaggcctgcccagctgacctcacctggacaatcaagctgaagagaaatatcatagtgtgcatggtttttcaggaatgaagcgttttgtctacataaatgatgagtcttatcagaacgactactgtgataaccgggtttctaatacaaagtataccttattgaacttcgtgccaaaaaacctatgggaacagttcaggcgcttcatgaatcaatatttcttgttgatagcttgtctgcaactatggtcacttatcactcctgtaaatcctgcaagtacctggggcccacttatatttatctttgctgtttctgcaaccaaagaggcatgggatgactacaacaggtatatttcagataaacaagcgaatgataaggaagtgtggattgttaagaatggtgcccggaaacacattcaagctcaagatatccgtgtcggtaacatagtttggattcgagagaatgaagaagtaccatgtgatcttgttttgttgggaacttctgaaccacaaggcatctgtcatgttgagctgctcttgatggggaaattgatttgaagacaagagcaagcccaccaccatgcgtagggctggagtttgaacagctgcacaaaataaagggtgtgatcgagtgcccaataccagataaagacatacgaagatttgatgcaaacatccgcctgtttcctccattcattgataatgacatttgcccattgactattaataacacattgctgcagtcatgctacttgagaaatacagaatgggcttgtggtgtagcagtttatacaggcaatgaaactaagttgggaatgagtaggggtgtcccagaacccaagctaactgctatggatgcaatgattgataagcttactggtgccatattcttatttcaacttacagtcgttgtcgttcttggggctgcaggcaatatttggaaggatatggaagctcgcaagcaatggtatgttaagtatgatgacaatgaaccatggtatcagattctggttatacctctgcggtttgaactattgtgctctattatgattcccatttcgataaaggtttctttggactttgttaaaagtctctatgcaaagttcatagattgggatgatgatatttatgacctggaaaatgacacacctgcccgtgcagcaaacacagcaattagtgaggacttgggacaggttgaatatattttgacagataaaactgggacattgactgagaacaagatgatcttcagaaggtgctgtattgggggtaccttttatgggaatgaatctggagatgcgctcagagacgttgaattactgaacgctgtcgccaataattctcctaatgtcatcaagtttttgacagtcatgacactctgcaatacagtaattcctataaaaagtcctactggaccaattttgtataaagcccagtcccaggatgaggatgccctggttaatgcagctgcaaatttgcatatggttcttgtcagcaagaatggaagcaatgcagaaattcacttcaaccggcgagtgatgcaatatgagatacttgacattcttgagttcacatctgaccggaaaagaatgtctattgttattttggattgtcagagtggcaagttttttctcttgtccaaaggagctgatgaggcaatgcttccttgtgcttattctggacaaaagacaaagacatttgttgatgcagttgacaaatatgctcagctggggttgcgcacactctgcttgggatggcgtgagctggaaccagaggaatacactaaatggtctcaatcatttaaggaggccaatagctcattgaatgacagggagtggaaagttgctgaggtttgccaaaagctagaacatagcttggagattctaggtgtcagtgcaatagaagatcgcctccaggatggggtaccagaaactatcgaaatactgaggcagtcaggaatcaacttctggatgttaactggtgataaacaaagtactgccattcaaattgctcttttgtgcaacttgatttcttcagaacctaaaggacagctcttgcatatcaatgggaaaactcaagatgaagttgctagaagcttggaaagagttcttcttaccatgaggattacgtcatcagagcctaaggagctggcttttgtagtggatggctgggcactagagattattctatcacgctatactgaagcttttactgaactagcagttctttcaaaaactgcattatgctgccgtgttacaccttcacaaaaagcacagctagtgaagcttctgaagtcatgtgactatcgaactttggcaatcggtgatggtgggaatgatgtaaggatgatacaacaggctgacattggtgtaggaattagtggtagggaaggtcttcaagctgcaagggctgctgactatagcattggcaaattcaggttcctgaaaaggttgattcttgttcatgggcggtactcctacaatcgcactgccttcctgtcgcatttttcttttctttcaggcattgctggaacaagcttattcaactcagttagtttgatggcttataatgttttctacacaagcattcctgttttaactactgtactggacaaggatttatctgaaaagacagtgatgcaaaatccagagatattactttactgccaagctggaaggcttctcaatccaagtacctttgctggttggtttggtcgatcattgtatcatgcaatcattattttcttaataaccatccatgcatatgctaatgagaaaagcgagatggaggagctctcaatggttgcactctcaggaagcatttggttgcaggcatttgttgtgacgttggagatgaattccttcacatctgtgcaacttctggccatatggggaaacctcattgccttctatgtcctcaatttctttatcagcagtatacccacttctggaatgtacactatcatgttcggcctttgcagacaaccgtcatactggataacgctggtgttgatcagtggagttggaatgggtcctgtattggctctgaaatatttcagatatacatacagacctagcgtgatcaacattcttcagaaggccgagcgttcacgggggccaatgtacaccctgctgaatctagagtctcagttgagatcagacaaagatagtatgatggtagccggttccacagcgccagccaagaataagagctctgtttacgagccgttgctttctgactccccgatggcatccaggagatctcttgcaccagcatcttcatttgatatcttccagccagcacattctagaacatctcacccaagaaacataaaagccaattaattttttggaacaacagttaactcgtaacagtatggcataccagaatgacaaaaaaaaaagatgtcagtcgaattagatatgttgcatatttctgttaatgatttagtagatattgcccaaaaagatataacgaaaagtcatacttaatcctttatagctgttagcaaaaatgggtagtgaccatttatgttctctatggggaataaattaatttctccaatccaccagatgcaaaaaaataaacttatgtcccagtcataccaaaaagacttgcgttgtctccggacccatccaattttaaattgcgatgtgctgtcgggcccaaattatgtgttgctgctgcgttttccctttcgctttccccagtttcactcactttttgcc

SEQ ID NO: 70257 - DNA, 4305 bp, Zea Mays
gccctcattcctgtctacagaagtacagctaacaaaacaaaatacaggtgttggtggcgctgacgggaatgcctccatatggccggtgactgctgcgccatgcttcgatgggtcgctattagctgtggttacggtctctgaatacctcgcgctgcgacgagatttcagcggcggcggcgtctaccagtccatgtccatccagcagggttcagtctgtgtgagcaaggacgcttcactttcagtgctctctgtctgtaagttgtcacaacctactcgcatatccatgcgcgtcggcgttgcacgcatacagccatacaggggaaaaaagaggagaggagaaatcggcccagttgcacgcagcgaaggtagccgaagaaaaaaaaaattctcccgttcacctcgcctgcgggacaactggggcaacagccgccggccggtgccccctcccccctacgcccagctgcccagatccgagccctttgcccggcgattacaccaggcctgcccagctgacctcacctggacaatcaagctgaagagaaatatcatagtgtgcatggtttttcaggaatgaagcgttttgtctacataaatgatgagtcttatcagaacgactactgtgataaccgggtttctaatacaaagtataccttattgaacttcgtgccaaaaaacctatgggaacagttcaggcgcttcatgaatcaatatttcttgttgatagcttgtctgcaactatggtcacttatcactcctgtaaatcctgcaagtacctggggcccacttatatttatctttgctgtttctgcaaccaaagaggcatgggatgactacaacaggtatatttcagataaacaagcgaatgataaggaagtgtggattgttaagaatggtgcccggaaacacattcaagctcaagatatccgtgtcggtaacatagtttggattcgagagaatgaagaagtaccatgtgatcttgttttgttgggaacttctgaaccacaaggcatctgtcatgttgagctgctcttgatggggaaattgatttgaagacaagagcaagcccaccaccatgcgtagggctggagtttgaacagctgcacaaaataaagggtgtgatcgagtgcccaataccagataaagacatacgaagatttgatgcaaacatccgcctgtttcctccattcattgataatgacatttgcccattgactattaataacacattgctgcagtcatgctacttgagaaatacagaatgggcttgtggtgtagcagtttatacagctttaccaggagattgattattgataatctccactttcaggcaatgaaactaagttgggaatgagtaggggtgtcccagaacccaagctaactgctatggatgcaatgattgataagcttactggtgccatattcttatttcaacttacagtcgttgtcgttcttggggctgcaggcaatatttggaaggatatggaagctcgcaagcaatggtatgttaagtatgatgacaatgaaccatggtatcagattctggttatacctctgcggtttgaactattgtgctctattatgattcccatttcgataaaggtttctttggactttgttaaaagtctctatgcaaagttcatagattgggatgatgatatttatgacctggaaaatgacacacctgcccgtgcagcaaacacagcaattagtgaggacttgggacaggttgaatatattttgacagataaaactgggacattgactgagaacaagatgatcttcagaaggtgctgtattgggggtaccttttatgggaatgaatctggagatgcgctcagagacgttgaattactgaacgctgtcgccaataattctcctaatgtcatcaagtttttgacagtcatgacactctgcaatacagtaattcctataaaaagtcctactggaccaattttgtataaagcccagtcccaggatgaggatgccctggttaatgcagctgcaaatttgcatatggttcttgtcagcaagaatggaagcaatgcagaaattcacttcaaccggcgagtgatgcaatatgagatacttgacattcttgagttcacatctgaccggaaaagaatgtctattgttattttggattgtcagagtggcaagttttttctcttgtccaaaggagctgatgaggcaatgcttccttgtgcttattctggacaaaagacaaagacatttgttgatgcagttgacaaatatgctcagctggggttgcgcacactctgcttgggatggcgtgagctggaaccagaggaatacactaaatggtctcaatcatttaaggaggccaatagctcattgaatgacagggagtggaaagttgctgaggtttgccaaaagctagaacatagcttggagattctaggtgtcagtgcaatagaagatcgcctccaggatggggtaccagaaactatcgaaatactgaggcagtcaggaatcaacttctggatgttaactggtgataaacaaagtactgccattcaaattgctcttttgtgcaacttgatttcttcagaacctaaaggacagctcttgcatatcaatgggaaaactcaagatgaagttgctagaagcttggaaagagttcttcttaccatgaggattacgtcatcagagcctaaggagctggcttttgtagtggatggctgggcactagagattattctatcacgctatactgaagcttttactgaactagcagttctttcaaaaactgcattatgctgccgtgttacaccttcacaaaaagcacagctagtgaagcttctgaagtcatgtgactatcgaactttggcaatcggtgatggtgggaatgatgtaaggatgatacaacaggctgacattggtgtaggaattagtggtagggaaggtcttcaagctgcaagggctgctgactatagcattggcaaattcaggttcctgaaaaggttgattcttgttcatgggcggtactcctacaatcgcactgccttcctgtcgcagtactctttctacaagtcattgttaatttgctttattcagatacttttttcttttctttcaggcattgctggaacaagcttattcaactcagttagtttgatggcttataatgttttctacacaagcattcctgttttaactactgtactggacaaggatttatctgaaaagacagtgatgcaaaatccagagatattactttactgccaagctggaaggcttctcaatccaagtacctttgctggttggtttggtcgatcattgtatcatgcaatcattattttcttaataaccatccatgcatatgctaatgagaaaagcgagatggaggagctctcaatggttgcactctcaggaagcatttggttgcaggcatttgttgtgacgttggagatgaattccttcacatctgtgcaacttctggccatatggggaaacctcattgccttctatgtcctcaatttctttatcagcagtatacccacttctggaatgtacactatcatgttcggcctttgcagacaaccgtcatactggataacgctggtgttgatcagtggagttggaatgggtcctgtattggctctgaaatatttcagatatacatacagacctagcgtgatcaacattcttcagaaggccgagcgttcacgggggccaatgtacaccctgctgaatctagagtctcagttgagatcagacaaagatagtatgatggtagccggttccacagcgccagccaagaataagagctctgtttacgagccgttgctttctgactccccgatggcatccaggagatctcttgcaccagcatcttcatttgatatcttccagccagcacattctagaacatctcacccaagaaacataaaagccaattaattttttggaacaacagttaactcgtaacagtatggcataccagaatgacaaaaaaaaaagatgtcagtcgaattagatatgttgcatatttctgttaatgatttagtagatattgcccaaaaagatataacgaaaagtcatacttaatcctttatagctgttagcaaaaatgggtagtgaccatttatgttctctatggggaataaattaatttctccaatccaccagatgcaaaaaaataaacttatgtcccagtcataccaaaaagacttgcgttgtctccggacccatccaattttaaattgcgatgtgctgtcgggcccaaattatgtgttgctgctgcgttttccctttcgctttccccagtttcactcactttttgcc

SEQ ID NO: 70258 - DNA, 4265 bp, Zea Mays
gccctcattcctgtctacagaagtacagctaacaaaacaaaatacaggtgttggtggcgctgacgggaatgcctccatatggccggtgactgctgcgccatgcttcgatgggtcgctattagctgtggttacggtctctgaatacctcgcgctgcgacgagatttcagcggcggcggcgtctaccagtccatgtccatccagcagggttcagtctgtgtgagcaaggacgcttcactttcagtgctctctgtctgtaagttgtcacaacctactcgcatatccatgcgcgtcggcgttgcacgcatacagccatacaggggaaaaaagaggagaggagaaatcggcccagttgcacgcagcgaaggtagccgaagaaaaaaaaaattctcccgttcacctcgcctgcgggacaactggggcaacagccgccggccggtgccccctcccccctacgcccagctgcccagatccgagccctttgcccggcgattacaccaggcctgcccagctgacctcacctggacaatcaagctgaagagaaatatcatagtgtgcatggtttttcaggaatgaagcgttttgtctacataaatgatgagtcttatcagaacgactactgtgataaccgggtttctaatacaaagtataccttattgaacttcgtgccaaaaaacctatgggaacagttcaggcgcttcatgaatcaatatttcttgttgatagcttgtctgcaactatggtcacttatcactcctgtaaatcctgcaagtacctggggcccacttatatttatctttgctgtttctgcaaccaaagaggcatgggatgactacaacaggtatatttcagataaacaagcgaatgataaggaagtgtggattgttaagaatggtgcccggaaacacattcaagctcaagatatccgtgtcggtaacatagtttggattcgagagaatgaagaagtaccatgtgatcttgttttgttgggaacttctgaaccacaaggcatctgtcatgttgagctgctcttgatggggaaattgatttgaagacaagagcaagcccaccaccatgcgtagggctggagtttgaacagctgcacaaaataaagggtgtgatcgagtgcccaataccagataaagacatacgaagatttgatgcaaacatccgcctgtttcctccattcattgataatgacatttgcccattgactattaataacacattgctgcagtcatgctacttgagaaatacagaatgggcttgtggtgtagcagtttatacaggcaatgaaactaagttgggaatgagtaggggtgtcccagaacccaagctaactgctatggatgcaatgattgataagcttactggtgccatattcttatttcaacttacagtcgttgtcgttcttggggctgcaggcaatatttggaaggatatggaagctcgcaagcaatggtatgttaagtatgatgacaatgaaccatggtatcagattctggttatacctctgcggtttgaactattgtgctctattatgattcccatttcgataaaggtttctttggactttgttaaaagtctctatgcaaagttcatagattgggatgatgatatttatgacctggaaaatgacacacctgcccgtgcagcaaacacagcaattagtgaggacttgggacaggttgaatatattttgacagataaaactgggacattgactgagaacaagatgatcttcagaaggtgctgtattgggggtaccttttatgggaatgaatctggagatgcgctcagagacgttgaattactgaacgctgtcgccaataattctcctaatgtcatcaagtttttgacagtcatgacactctgcaatacagtaattcctataaaaagtcctactggaccaattttgtataaagcccagtcccaggatgaggatgccctggttaatgcagctgcaaatttgcatatggttcttgtcagcaagaatggaagcaatgcagaaattcacttcaaccggcgagtgatgcaatatgagatacttgacattcttgagttcacatctgaccggaaaagaatgtctattgttattttggattgtcagagtggcaagttttttctcttgtccaaaggagctgatgaggcaatgcttccttgtgcttattctggacaaaagacaaagacatttgttgatgcagttgacaaatatgctcagctggggttgcgcacactctgcttgggatggcgtgagctggaaccagaggaatacactaaatggtctcaatcatttaaggaggccaatagctcattgaatgacagggagtggaaagttgctgaggtttgccaaaagctagaacatagcttggagattctaggtgtcagtgcaatagaagatcgcctccaggatggggtaccagaaactatcgaaatactgaggcagtcaggaatcaacttctggatgttaactggtgataaacaaagtactgccattcaaattgctcttttgtgcaacttgatttcttcagaacctaaaggacagctcttgcatatcaatgggaaaactcaagatgaagttgctagaagcttggaaagagttcttcttaccatgaggattacgtcatcagagcctaaggagctggcttttgtagtggatggctgggcactagagattattctatcacgctatactgaagcttttactgaactagcagttctttcaaaaactgcattatgctgccgtgttacaccttcacaaaaagcacagctagtgaagcttctgaagtcatgtgactatcgaactttggcaatcggtgatggtgggaatgatgtaaggatgatacaacaggctgacattggtgtaggaattagtggtagggaaggtcttcaagctgcaagggctgctgactatagcattggcaaattcaggttcctgaaaaggttgattcttgttcatgggcggtactcctacaatcgcactgccttcctgtcgcagtactctttctacaagtcattgttaatttgctttattcagatacttttttcttttctttcaggcattgctggaacaagcttattcaactcagttagtttgatggcttataatgttttctacacaagcattcctgttttaactactgtactggacaaggatttatctgaaaagacagtgatgcaaaatccagagatattactttactgccaagctggaaggcttctcaatccaagtacctttgctggttggtttggtcgatcattgtatcatgcaatcattattttcttaataaccatccatgcatatgctaatgagaaaagcgagatggaggagctctcaatggttgcactctcaggaagcatttggttgcaggcatttgttgtgacgttggagatgaattccttcacatctgtgcaacttctggccatatggggaaacctcattgccttctatgtcctcaatttctttatcagcagtatacccacttctggaatgtacactatcatgttcggcctttgcagacaaccgtcatactggataacgctggtgttgatcagtggagttggaatgggtcctgtattggctctgaaatatttcagatatacatacagacctagcgtgatcaacattcttcagaaggccgagcgttcacgggggccaatgtacaccctgctgaatctagagtctcagttgagatcagacaaagatagtatgatggtagccggttccacagcgccagccaagaataagagctctgtttacgagccgttgctttctgactccccgatggcatccaggagatctcttgcaccagcatcttcatttgatatcttccagccagcacattctagaacatctcacccaagaaacataaaagccaattaattttttggaacaacagttaactcgtaacagtatggcataccagaatgacaaaaaaaaaagatgtcagtcgaattagatatgttgcatatttctgttaatgatttagtagatattgcccaaaaagatataacgaaaagtcatacttaatcctttatagctgttagcaaaaatgggtagtgaccatttatgttctctatggggaataaattaatttctccaatccaccagatgcaaaaaaataaacttatgtcccagtcataccaaaaagacttgcgttgtctccggacccatccaattttaaattgcgatgtgctgtcgggcccaaattatgtgttgctgctgcgttttccctttcgctttccccagtttcactcactttttgcc

SEQ ID NO: 70259 - DNA, 4195 bp, Zea Mays
atgggcgtcgcgccctcattcctgtctacagaagtacagctaacaaaacaaaatacaggtgttggtggcgctgacgggaatgcctccatatggccggtgactgctgcgccatgcttcgatgggtcgctattagctgtggttacggtctctgaatacctcgcgctgcgacgagatttcagcggcggcggcgtctaccagtccatgtccatccagcagggttcagtctgtgtgagcaaggacgcttcactttcagtgctctctgtctgtaagttgtcacaacctactcgcatatccatgcgcgtcggcgttgcacgcatacagccatacaggggaaaaaagaggagaggagaaatcggcccagttgcacgcagcgaaggtagccgaagaaaaaaaaaattctcccgttcacctcgcctgcgggacaactggggcaacagccgccggccggtgccccctcccccctacgcccagctgcccagatccgagccctttgcccggcgattacaccaggcctgcccagctgacctcacctggacaatcaagctgaagagaaatatcatagtgtgcatggtttttcaggaatgaagcgttttgtctacataaatgatgagtcttatcagaacgactactgtgataaccgggtttctaatacaaagtataccttattgaacttcgtgccaaaaaacctatgggaacagttcaggcgcttcatgaatcaatatttcttgttgatagcttgtctgcaactatggtcacttatcactcctgtaaatcctataaacaagcgaatgataaggaagtgtggattgttaagaatggtgcccggaaacacattcaagctcaagatatccgtgtcggtaacatagtttggattcgagagaatgaagaagtaccatgtgatcttgttttgttgggaacttctgaaccacaaggcatctgtcatgttgagacagctgctcttgatggggaaattgatttgaagacaagagcaagcccaccaccatgcgtagggctggagtttgaacagctgcacaaaataaagggtgtgatcgagtgcccaataccagataaagacatacgaagatttgatgcaaacatccgcctgtttcctccattcattgataatgacatttgcccattgactattaataacacattgctgcagtcatgctacttgagaaatacagaatgggcttgtggtgtagcagtttatacaggcaatgaaactaagttgggaatgagtaggggtgtcccagaacccaagctaactgctatggatgcaatgattgataagcttactggtgccatattcttatttcaacttacagtcgttgtcgttcttggggctgcaggcaatatttggaaggatatggaagctcgcaagcaatggtatgttaagtatgatgacaatgaaccatggtatcagattctggttatacctctgcggtttgaactattgtgctctattatgattcccatttcgataaaggtttctttggactttgttaaaagtctctatgcaaagttcatagattgggatgatgatatttatgacctggaaaatgacacacctgcccgtgcagcaaacacagcaattagtgaggacttgggacaggttgaatatattttgacagataaaactgggacattgactgagaacaagatgatcttcagaaggtgctgtattgggggtaccttttatgggaatgaatctggagatgcgctcagagacgttgaattactgaacgctgtcgccaataattctcctaatgtcatcaagtttttgacagtcatgacactctgcaatacagtaattcctataaaaagtcctactggaccaattttgtataaagcccagtcccaggatgaggatgccctggttaatgcagctgcaaatttgcatatggttcttgtcagcaagaatggaagcaatgcagaaattcacttcaaccggcgagtgatgcaatatgagatacttgacattcttgagttcacatctgaccggaaaagaatgtctattgttattttggattgtcagagtggcaagttttttctcttgtccaaaggagctgatgaggcaatgcttccttgtgcttattctggacaaaagacaaagacatttgttgatgcagttgacaaatatgctcagctggggttgcgcacactctgcttgggatggcgtgagctggaaccagaggaatacactaaatggtctcaatcatttaaggaggccaatagctcattgaatgacagggagtggaaagttgctgaggtttgccaaaagctagaacatagcttggagattctaggtgtcagtgcaatagaagatcgcctccaggatggggtaccagaaactatcgaaatactgaggcagtcaggaatcaacttctggatgttaactggtgataaacaaagtactgccattcaaattgctcttttgtgcaacttgatttcttcagaacctaaaggacagctcttgcatatcaatgggaaaactcaagatgaagttgctagaagcttggaaagagttcttcttaccatgaggattacgtcatcagagcctaaggagctggcttttgtagtggatggctgggcactagagattattctatcacgctatactgaagcttttactgaactagcagttctttcaaaaactgcattatgctgccgtgttacaccttcacaaaaagcacagctagtgaagcttctgaagtcatgtgactatcgaactttggcaatcggtgatggtgggaatgatgtaaggatgatacaacaggctgacattggtgtaggaattagtggtagggaaggtcttcaagctgcaagggctgctgactatagcattggcaaattcaggttcctgaaaaggttgattcttgttcatgggcggtactcctacaatcgcactgccttcctgtcgcagtactctttctacaagtcattgttaatttgctttattcagatacttttttcttttctttcaggcattgctggaacaagcttattcaactcagttagtttgatggcttataatgttttctacacaagcattcctgttttaactactgtactggacaaggatttatctgaaaagacagtgatgcaaaatccagagatattactttactgccaagctggaaggcttctcaatccaagtacctttgctggttggtttggtcgatcattgtatcatgcaatcattattttcttaataaccatccatgcatatgctaatgagaaaagcgagatggaggagctctcaatggttgcactctcaggaagcatttggttgcaggcatttgttgtgacgttggagatgaattccttcacatctgtgcaacttctggccatatggggaaacctcattgccttctatgtcctcaatttctttatcagcagtatacccacttctggaatgtacactatcatgttcggcctttgcagacaaccgtcatactggataacgctggtgttgatcagtggagttggaatgggtcctgtattggctctgaaatatttcagatatacatacagacctagcgtgatcaacattcttcagaaggccgagcgttcacgggggccaatgtacaccctgctgaatctagagtctcagttgagatcagacaaagatagtatgatggtagccggttccacagcgccagccaagaataagagctctgtttacgagccgttgctttctgactccccgatggcatccaggagatctcttgcaccagcatcttcatttgatatcttccagccagcacattctagaacatctcacccaagaaacataaaagccaattaattttttggaacaacagttaactcgtaacagtatggcataccagaatgacaaaaaaaaaagatgtcagtcgaattagatatgttgcatatttctgttaatgatttagtagatattgcccaaaaagatataacgaaaagtcatacttaatcctttatagctgttagcaaaaatgggtagtgaccatttatgttctctatggggaataaattaatttctccaatccaccagatgcaaaaaaataaacttatgtcccagtcataccaaaaagacttgcgttgtctccggacccatccaattttaaattgcgatgtgctgtcgggcccaaattatgtgttgctgctgcgttttccctttcgctttccccagtttcactcactttttgcc

SEQ ID NO: 70260 - DNA, 4276 bp, Zea Mays
atgggcgtcgcgccctcattcctgtctacagaagtacagctaacaaaacaaaatacaggtgttggtggcgctgacgggaatgcctccatatggccggtgactgctgcgccatgcttcgatgggtcgctattagctgtggttacggtctctgaatacctcgcgctgcgacgagatttcagcggcggcggcgtctaccagtccatgtccatccagcagggttcagtctgtgtgagcaaggacgcttcactttcagtgctctctgtctgtaagttgtcacaacctactcgcatatccatgcgcgtcggcgttgcacgcatacagccatacaggggaaaaaagaggagaggagaaatcggcccagttgcacgcagcgaaggtagccgaagaaaaaaaaaattctcccgttcacctcgcctgcgggacaactggggcaacagccgccggccggtgccccctcccccctacgcccagctgcccagatccgagccctttgcccggcgattacaccaggcctgcccagctgacctcacctggacaatcaagctgaagagaaatatcatagtgtgcatggtttttcaggaatgaagcgttttgtctacataaatgatgagtcttatcagaacgactactgtgataaccgggtttctaatacaaagtataccttattgaacttcgtgccaaaaaacctatgggaacagttcaggcgcttcatgaatcaatatttcttgttgatagcttgtctgcaactatggtcacttatcactcctgtaaatcctgcaagtacctggggcccacttatatttatctttgctgtttctgcaaccaaagaggcatgggatgactacaacaggtatatttcagataaacaagcgaatgataaggaagtgtggattgttaagaatggtgcccggaaacacattcaagctcaagatatccgtgtcggtaacatagtttggattcgagagaatgaagaagtaccatgtgatcttgttttgttgggaacttctgaaccacaaggcatctgtcatgttgagacagctgctcttgatggggaaattgatttgaagacaagagcaagcccaccaccatgcgtagggctggagtttgaacagctgcacaaaataaagggtgtgatcgagtgcccaataccagataaagacatacgaagatttgatgcaaacatccgcctgtttcctccattcattgataatgacatttgcccattgactattaataacacattgctgcagtcatgctacttgagaaatacagaatgggcttgtggtgtagcagtttatacaggcaatgaaactaagttgggaatgagtaggggtgtcccagaacccaagctaactgctatggatgcaatgattgataagcttactggtgccatattcttatttcaacttacagtcgttgtcgttcttggggctgcaggcaatatttggaaggatatggaagctcgcaagcaatggtatgttaagtatgatgacaatgaaccatggtatcagattctggttatacctctgcggtttgaactattgtgctctattatgattcccatttcgataaaggtttctttggactttgttaaaagtctctatgcaaagttcatagattgggatgatgatatttatgacctggaaaatgacacacctgcccgtgcagcaaacacagcaattagtgaggacttgggacaggttgaatatattttgacagataaaactgggacattgactgagaacaagatgatcttcagaaggtgctgtattgggggtaccttttatgggaatgaatctggagatgcgctcagagacgttgaattactgaacgctgtcgccaataattctcctaatgtcatcaagtttttgacagtcatgacactctgcaatacagtaattcctataaaaagtcctactggaccaattttgtataaagcccagtcccaggatgaggatgccctggttaatgcagctgcaaatttgcatatggttcttgtcagcaagaatggaagcaatgcagaaattcacttcaaccggcgagtgatgcaatatgagatacttgacattcttgagttcacatctgaccggaaaagaatgtctattgttattttggattgtcagagtggcaagttttttctcttgtccaaaggagctgatgaggcaatgcttccttgtgcttattctggacaaaagacaaagacatttgttgatgcagttgacaaatatgctcagctggggttgcgcacactctgcttgggatggcgtgagctggaaccagaggaatacactaaatggtctcaatcatttaaggaggccaatagctcattgaatgacagggagtggaaagttgctgaggtttgccaaaagctagaacatagcttggagattctaggtgtcagtgcaatagaagatcgcctccaggatggggtaccagaaactatcgaaatactgaggcagtcaggaatcaacttctggatgttaactggtgataaacaaagtactgccattcaaattgctcttttgtgcaacttgatttcttcagaacctaaaggacagctcttgcatatcaatgggaaaactcaagatgaagttgctagaagcttggaaagagttcttcttaccatgaggattacgtcatcagagcctaaggagctggcttttgtagtggatggctgggcactagagattattctatcacgctatactgaagcttttactgaactagcagttctttcaaaaactgcattatgctgccgtgttacaccttcacaaaaagcacagtgaagcttctgaagtcatgtgactatcgaactttggcaatcggtgatggtgggaatgatgtaaggatgatacaacaggctgacattggtgtaggaattagtggtagggaaggtcttcaagctgcaagggctgctgactatagcattggcaaattcaggttcctgaaaaggttgattcttgttcatgggcggtactcctacaatcgcactgccttcctgtcgcagtactctttctacaagtcattgttaatttgctttattcagatacttttttcttttctttcaggcattgctggaacaagcttattcaactcagttagtttgatggcttataatgttttctacacaagcattcctgttttaactactgtactggacaaggatttatctgaaaagacagtgatgcaaaatccagagatattactttactgccaagctggaaggcttctcaatccaagtacctttgctggttggtttggtcgatcattgtatcatgcaatcattattttcttaataaccatccatgcatatgctaatgagaaaagcgagatggaggagctctcaatggttgcactctcaggaagcatttggttgcaggcatttgttgtgacgttggagatgaattccttcacatctgtgcaacttctggccatatggggaaacctcattgccttctatgtcctcaatttctttatcagcagtatacccacttctggaatgtacactatcatgttcggcctttgcagacaaccgtcatactggataacgctggtgttgatcagtggagttggaatgggtcctgtattggctctgaaatatttcagatatacatacagacctagcgtgatcaacattcttcagaaggccgagcgttcacgggggccaatgtacaccctgctgaatctagagtctcagttgagatcagacaaagatagtatgatggtagccggttccacagcgccagccaagaataagagctctgtttacgagccgttgctttctgactccccgatggcatccaggagatctcttgcaccagcatcttcatttgatatcttccagccagcacattctagaacatctcacccaagaaacataaaagccaattaattttttggaacaacagttaactcgtaacagtatggcataccagaatgacaaaaaaaaaagatgtcagtcgaattagatatgttgcatatttctgttaatgatttagtagatattgcccaaaaagatataacgaaaagtcatacttaatcctttatagctgttagcaaaaatgggtagtgaccatttatgttctctatggggaataaattaatttctccaatccaccagatgcaaaaaaataaacttatgtcccagtcataccaaaaagacttgcgttgtctccggacccatccaattttaaattgcgatgtgctgtcgggcccaaattatgtgttgctgctgcgttttccctttcgctttccccagtttcactcactttttgcc

SEQ ID NO: 70261 - DNA, 4320 bp, Zea Mays
atgggcgtcgcgccctcattcctgtctacagaagtacagctaacaaaacaaaatacaggtgttggtggcgctgacgggaatgcctccatatggccggtgactgctgcgccatgcttcgatgggtcgctattagctgtggttacggtctctgaatacctcgcgctgcgacgagatttcagcggcggcggcgtctaccagtccatgtccatccagcagggttcagtctgtgtgagcaaggacgcttcactttcagtgctctctgtctgtaagttgtcacaacctactcgcatatccatgcgcgtcggcgttgcacgcatacagccatacaggggaaaaaagaggagaggagaaatcggcccagttgcacgcagcgaaggtagccgaagaaaaaaaaaattctcccgttcacctcgcctgcgggacaactggggcaacagccgccggccggtgccccctcccccctacgcccagctgcccagatccgagccctttgcccggcgattacaccaggcctgcccagctgacctcacctggacaatcaagctgaagagaaatatcatagtgtgcatggtttttcaggaatgaagcgttttgtctacataaatgatgagtcttatcagaacgactactgtgataaccgggtttctaatacaaagtataccttattgaacttcgtgccaaaaaacctatgggaacagttcaggcgcttcatgaatcaatatttcttgttgatagcttgtctgcaactatggtcacttatcactcctgtaaatcctgcaagtacctggggcccacttatatttatctttgctgtttctgcaaccaaagaggcatgggatgactacaacaggtatatttcagataaacaagcgaatgataaggaagtgtggattgttaagaatggtgcccggaaacacattcaagctcaagatatccgtgtcggtaacatagtttggattcgagagaatgaagaagtaccatgtgatcttgttttgttgggaacttctgaaccacaaggcatctgtcatgttgagacagctgctcttgatggggaaattgatttgaagacaagagcaagcccaccaccatgcgtagggctggagtttgaacagctgcacaaaataaagggtgtgatcgagtgcccaataccagataaagacatacgaagatttgatgcaaacatccgcctgtttcctccattcattgataatgacatttgcccattgactattaataacacattgctgcagtcatgctacttgagaaatacagaatgggcttgtggtgtagcagtttatacagctttaccaggagattgattattgataatctccactttcaggcaatgaaactaagttgggaatgagtaggggtgtcccagaacccaagctaactgctatggatgcaatgattgataagcttactggtgccatattcttatttcaacttacagtcgttgtcgttcttggggctgcaggcaatatttggaaggatatggaagctcgcaagcaatggtatgttaagtatgatgacaatgaaccatggtatcagattctggttatacctctgcggtttgaactattgtgctctattatgattcccatttcgataaaggtttctttggactttgttaaaagtctctatgcaaagttcatagattgggatgatgatatttatgacctggaaaatgacacacctgcccgtgcagcaaacacagcaattagtgaggacttgggacaggttgaatatattttgacagataaaactgggacattgactgagaacaagatgatcttcagaaggtgctgtattgggggtaccttttatgggaatgaatctggagatgcgctcagagacgttgaattactgaacgctgtcgccaataattctcctaatgtcatcaagtttttgacagtcatgacactctgcaatacagtaattcctataaaaagtcctactggaccaattttgtataaagcccagtcccaggatgaggatgccctggttaatgcagctgcaaatttgcatatggttcttgtcagcaagaatggaagcaatgcagaaattcacttcaaccggcgagtgatgcaatatgagatacttgacattcttgagttcacatctgaccggaaaagaatgtctattgttattttggattgtcagagtggcaagttttttctcttgtccaaaggagctgatgaggcaatgcttccttgtgcttattctggacaaaagacaaagacatttgttgatgcagttgacaaatatgctcagctggggttgcgcacactctgcttgggatggcgtgagctggaaccagaggaatacactaaatggtctcaatcatttaaggaggccaatagctcattgaatgacagggagtggaaagttgctgaggtttgccaaaagctagaacatagcttggagattctaggtgtcagtgcaatagaagatcgcctccaggatggggtaccagaaactatcgaaatactgaggcagtcaggaatcaacttctggatgttaactggtgataaacaaagtactgccattcaaattgctcttttgtgcaacttgatttcttcagaacctaaaggacagctcttgcatatcaatgggaaaactcaagatgaagttgctagaagcttggaaagagttcttcttaccatgaggattacgtcatcagagcctaaggagctggcttttgtagtggatggctgggcactagagattattctatcacgctatactgaagcttttactgaactagcagttctttcaaaaactgcattatgctgccgtgttacaccttcacaaaaagcacagctagtgaagcttctgaagtcatgtgactatcgaactttggcaatcggtgatggtgggaatgatgtaaggatgatacaacaggctgacattggtgtaggaattagtggtagggaaggtcttcaagctgcaagggctgctgactatagcattggcaaattcaggttcctgaaaaggttgattcttgttcatgggcggtactcctacaatcgcactgccttcctgtcgcagtactctttctacaagtcattgttaatttgctttattcagatacttttttcttttctttcaggcattgctggaacaagcttattcaactcagttagtttgatggcttataatgttttctacacaagcattcctgttttaactactgtactggacaaggatttatctgaaaagacagtgatgcaaaatccagagatattactttactgccaagctggaaggcttctcaatccaagtacctttgctggttggtttggtcgatcattgtatcatgcaatcattattttcttaataaccatccatgcatatgctaatgagaaaagcgagatggaggagctctcaatggttgcactctcaggaagcatttggttgcaggcatttgttgtgacgttggagatgaattccttcacatctgtgcaacttctggccatatggggaaacctcattgccttctatgtcctcaatttctttatcagcagtatacccacttctggaatgtacactatcatgttcggcctttgcagacaaccgtcatactggataacgctggtgttgatcagtggagttggaatgggtcctgtattggctctgaaatatttcagatatacatacagacctagcgtgatcaacattcttcagaaggccgagcgttcacgggggccaatgtacaccctgctgaatctagagtctcagttgagatcagacaaagatagtatgatggtagccggttccacagcgccagccaagaataagagctctgtttacgagccgttgctttctgactccccgatggcatccaggagatctcttgcaccagcatcttcatttgatatcttccagccagcacattctagaacatctcacccaagaaacataaaagccaattaattttttggaacaacagttaactcgtaacagtatggcataccagaatgacaaaaaaaaaagatgtcagtcgaattagatatgttgcatatttctgttaatgatttagtagatattgcccaaaaagatataacgaaaagtcatacttaatcctttatagctgttagcaaaaatgggtagtgaccatttatgttctctatggggaataaattaatttctccaatccaccagatgcaaaaaaataaacttatgtcccagtcataccaaaaagacttgcgttgtctccggacccatccaattttaaattgcgatgtgctgtcgggcccaaattatgtgttgctgctgcgttttccctttcgctttccccagtttcactcactttttgcc

SEQ ID NO: 70262 - DNA, 1906 bp, Zea Mays
ctcaacttcagaaatttcctccgctggattttagctaaaaactgttttgtagttcaaagttttctccgctgtactgtactgccatctgggtcgacattttcaaacacggcaacggaagcggcctctccgttctgccgcattagtgacgcctgcaggacgtgatcacgtcgcggagcagctacctgaggcgcctgctgtcagagtccagcgacgtcgcgatcacgctgccggcgggcctcacgttcgacgcgttcgtgcaggccatcgcgacctgctacgtcgtccccgacgatgcagcggcggcggcgctgtccccggcgagcctcgccgcggcgtgggtggcgggggcctggctggagctgggcgcgggaccgggcccggggcgggacccttgcgggctgacccacgccgcggaggactacttccatgaggtggccaccgaccacggccgagccgcgggcgtgctgcggtgctgcgcggcgttcctgggcggcgaggcggccgggcccgccgcggacctgctcgcccggtgcgtcgaggtgctcgcggcgtccgacagcgggagcgggaggtggctcgacgacgtggccgcgctccccgtggaggagtttctggtggtcgtggaggccatgcgcgcgcggtccgcgcacgaccacgacctcatgtacacagtcgtcgaccactacctggagaaccacaaggggaagcttacggaggaggacaaatcccggttgtgctacaacgtcaactgcaccaagctgtcgcagcacctcttcatgcacctggtccaaaaccctcgcctcccgctccgcttcgtcgtgcaggccatgctcgtggagcagctccactcccaccacaccatgctcctcacccatcaccaccaggccgctgcactggcgccgacgcgatcggcagcgccgctcctcaagccaaccccatcgggcgtcttcagtggcggcgtcgcgggggaggacgccagcatgacgctcggcgacatcctccagcgcgacgccgcgctgcaccagtccgcgcacatccgcgcatccatgcaggctaccagcctccgcatcgagaccctcgagcgcgagctggccggcctccgcacccgcttgcgccgctccgagcagcagcaggcggagaccgaggcagcggccgcggccgcgactggcgcctcctcgaccgactgcgcgcccggcaagtccgccagcttccggatcccgcgaagccggctctgggaaggcgaggagctcgcgcccgttggcctccggcgcgccgcagctagggacagcagtgcgaggggcttcaagtcacggttggtgcacggattcaagaacctgttcggcaggaggcaagcggccaccggcgcgccgtccgcgaccggcgaggactcgagtacccgatgcttcggtgataaaggcgcggccgctgctacgccggagctggagagcgacgacgatgaggtggtgagcatggaggagaggcggcggcctcaccggagaaaccactctcttgtgtgatcatcgtcgccgtccatgcgctagctggcaaacaatgtttgcaaaacatgcaagcagggatagggacacggagtcgtagagatccttggtatatggtgacatcactattttcacacggctatatatgagtatatgacatcgtcgttgattgttagtttatttctttggacggatgcaccgtgtaaggttcttggatgcaaggctcaagaactagccttgtgtttttaacatgtcgatgttttcacaatgacaggttagttgcttggaagggtctggggcaagatttcaagtagaagcccatttattttttatatatgaatgttatcgaaaaatattcatataaaaacatgtaaataaaaaaattaatatattatgtatgcatacctttt

SEQ ID NO: 70263 - DNA, 2337 bp, Zea Mays
aaaacataccagcacgcatgggagcagaagaacctcccggcgttccctagcgcgggaaaggacagggagggatcgggggggccggccggccgcggggtgccaccgcatttacaagccacatgcacgcattcattgccgccccgatttaacacaccccttgtaacgccgtcgctgggccacaaccctactaccacaacaagcgcagccgcagcggcagcctccggaggaccggatacagtcatacagagagggggagggcatggagatgagcatagggtggcaggagctcggcgtcgtcgacaccatctacgaggacgaccacgaggaggaggaggaagacgacgacgaccacgagggacaagaggaggagcgcttcgactcgcccaccggcaccatgtcgtcctcgccgcccacctcgcgctcctcctccccggaggtggaggacgccgcggcggtggcggaggcgcacccgtcgtccctgccgccggcgctcaggcgcgcagtgcaagcgtggtgccgggagaacgggtcgcgcaagcccgacgtggtcgtccgcgtccaggagcatcgcctccctctgcacagggacgtgatcacgtcgcggagcagctacctgaggcgcctgctgtcagagtccagcgacgtcgcgatcacgctgccggcgggcctcacgttcgacgcgttcgtgcaggccatcgcgacctgctacgtcgtccccgacgatgcagcggcggcggcgctgtccccggcgagcctcgccgcggcgtgggtggcgggggcctggctggagctgggcgcgggaccgggcccggggcgggacccttgcgggctgacccacgccgcggaggactacttccatgaggtggccaccgaccacggccgagccgcgggcgtgctgcggtgctgcgcggcgttcctgggcggcgaggcggccgggcccgccgcggacctgctcgcccggtgcgtcgaggtgctcgcggcgtccgacagcgggagcgggaggtggctcgacgacgtggccgcgctccccgtggaggagtttctggtggtcgtggaggccatgcgcgcgcggtccgcgcacgaccacgacctcatgtacacagtcgtcgaccactacctggagaaccacaaggggaagcttacggaggaggacaaatcccggttgtgctacaacgtcaactgcaccaagctgtcgcagcacctcttcatgcacctggtccaaaaccctcgcctcccgctccgcttcgtcgtgcaggccatgctcgtggagcagctccactcccaccacaccatgctcctcacccatcaccaccaggccgctgcactggcgccgacgcgatcggcagcgccgctcctcaagccaaccccatcgggcgtcttcagtggcggcgtcgcgggggaggacgccagcatgacgctcggcgacatcctccagcgcgacgccgcgctgcaccagtccgcgcacatccgcgcatccatgcaggctaccagcctccgcatcgagaccctcgagcgcgagctggccggcctccgcacccgcttgcgccgctccgagcagcagcaggcggagaccgaggcagcggccgcggccgcgactggcgcctcctcgaccgactgcgcgcccggcaagtccgccagcttccggatcccgcgaagccggctctgggaaggcgaggagctcgcgcccgttggcctccggcgcgccgcagctagggacagcagtgcgaggggcttcaagtcacggttggtgcacggattcaagaacctgttcggcaggaggcaagcggccaccggcgcgccgtccgcgaccggcgaggactcgagtacccgatgcttcggtgataaaggcgcggccgctgctacgccggagctggagagcgacgacgatgaggtggtgagcatggaggagaggcggcggcctcaccggagaaaccactctcttgtgtgatcatcgtcgccgtccatgcgctagctggcaaacaatgtttgcaaaacatgcaagcagggatagggacacggagtcgtagagatccttggtatatggtgacatcactattttcacacggctatatatgagtatatgacatcgtcgttgattgttagtttatttctttggacggatgcaccgtgtaaggttcttggatgcaaggctcaagaactagccttgtgtttttaacatgtcgatgttttcacaatgacaggttagttgcttggaagggtctggggcaagatttcaagtagaagcccatttattttttatatatgaatgttatcgaaaaatattcatataaaaacatgtaaataaaaaaattaatatattatgtatgcatacctttt

SEQ ID NO: 70264 - DNA, 3434 bp, Zea Mays
tcatttaggtgctccactgtgccagctcaacatgcgctctctggccggggcgtcgcgggcgtgcgcctgggtcgagtcgaagcacgcctccacgctatgccgcggccaccgccgccgcacggggtcacctccttgccccatcaatgctccgtcctcctgcggcgcctcgccgcgagccgttccctggcctcttcctcctacttcctccgcgcactccgctgcctccacgcgcgcctcctcacctccgcgctcctccatgcgccgccgcacccgcacctcaccctccgcctcatccacctctacactctctcccgagacctccccgccgccgcgaccctcttctgcgccgacccgtgccccgtttccgccacttccctcgtcgccgcgtacgccgccgcggaccgcctccccgccgccgtctccttcttcgacgccgtcccgccggcgcgccgcgacaccgttctccacaacgccgtgatctccgcctacgcccgcgcgtcccacgctgcgcccgcggttgccgtgttccgctccctgctcgcctccggctcccttcggcccgacgactactcattcaccgcgctactgagcgccgggggccacctgcccaacatttctgtccggcactgcgcgcagctacattgctcagtgctgaagtccggcgccgggggtgccttgtcggtgtgcaacgcgctcgttgccctgtacatgaaatgtgaatcgcccgaggcgacacgagatgcacggaaggtgctcgacgaaatgccgaataaggacgaccttacgtggactactatggtcgttggctatgttaggagaggcgacgttggtgctgcaagatcagttttcgaggaggttgatgggaagtttgatgttgtgtggaatgccatgatctcagggtatgttcattcaggaatggctgtggaggcgtttgagctgtttagaaggatggtattggaaagggtgcctcttgatgagttcacatttactagtgttctgagtgcttgtgcaaatgttggcctctttgcacatgggaaatctgtccatggtcagattattcggctgcagccaaattttgtacctgaggcagctctccctgttaacaacgccttggtgaccttctactcaaagtgtgggaatattgctgttgcaagaaggatatttgacaatatgacattgaaggatgtcgtttcttggaacaccattttgtcggggtatgttgagagcagctgtttggacaaggcggtcgaagtatttgaggagatgccatataaaaatgagttgtcatggatggtgatggtatcaggatatgtgcatggaggatttgctgaagatgcacttaaactgtttaacaagatgaggtctgagaatgtcaagccgtgtgactacacctatgctggtgctattgctgcatgtggcgagctcggggcactgaagcatggaaagcagcttcatgggcatattgtgcagcttggttttgaggggagcaattctgcaggaaacgcactcattaccatgtatgctagatgtggtgctgtgaaagaagctcatcttatgtttcttgtgatgcccaatattgactctgtttcgtggaatgctatgatttcagcccttgggcagcatggacatggaagagaggcactagaactctttgatcgcatggttgctgaaggcatatatcctgataggatctctttcctcacagtattgacagcttgcaatcactctggtctcgtagatgaaggctttcgatatttcgagtccatgaagagggactttggcattatacctggagaagatcactatacgcgactgattgatttgctcggtcgagctggacggattggagaagctagagacttgatcaagacgatgccttttgagcctaccccatccatttgggaggcaattctttctggttgccggactagtggagatatggaacttggtgctcatgctgctgaccagctctttaagatgacaccacagcatgatggtacatatatccttttgtctaacacttactcagctgcgggatgttgggtagatgctgccagagtaaggaagctaatgcgtgatcgaggggttaagaaggaacctgggtgcagctggatagaagctggaaacaaagttcatgtgtttctcgttggtgatacaaaacatccagaagcacatgaagtttacaaattccttgaaatggttggcgccaagatgagaaagcttggatatgttcctgatacaaaggttgtattgcatgacatggagcctcatcagaaggaacatatattatttgcgcatagtgagcgactggcggttggttttggactcctaaacttgcctcctggagctacggttacagttcttaagaacttgagaatatgtgatgattgtcatgctgcaataatgttcatgtcaaaggctgtcggaagagagattgttgttagagatgttagacggtttcaccatttcaaggatggagaatgttcgtgtggtaactattggtgaatacttttgtcatagcatatgttcttcaggtcctggcctgaacttcaattttgagccagcttgggttccaactaaacaaggagacttgaattggaatttaacgagtggacccacttcaatctgagagactcgggttggtatggtggctcagtcaactcatgtcttattgtcaatcatttactcatgttttgtcaatggcttaagattggcgtgctacatgctacccttgatgctggggttgacgctttaccagtgttcatttgccaaaatatccttccaaatccataatgtcatggaatggtctactgaatgccacaatggtgatccacggtactacctcgtcagcacagataggtgacagcaaatgcgcgagggacagagaccaaatcacattggccctctatcagattatggatgagtttttttcagtagttttctaacgttgagttggactcatcttggagtatgtatgaataccatctccttcccaatttcatattctcttacagattagatgtcacggggaaattgatttccgaacagagatggccaacatgctggaactgcccgacaagcagatacgccatttgatgcagaggaaccatttgatcgttacgtgattttatgtttccatttaatttcgccatggctgataatgagcacaaccaaagatcgaatcagatctctatttggcagaatactcgtcctgtttacccgatgtaaactttttcatgcatatgtttttatttccgtgatcaaatcacgcgctttactagtctgggcttttagctagtgttttgaacagacatctctttgggaaccaacacttcacaggaacggatctgaatctgatcaagacattagaatagcacacccaacaaaacaagcatgtccgctgggttagaaatgcctacgaaaatgaagttttc

SEQ ID NO: 70265 - DNA, 931 bp, Zea Mays
ccaaacacccccagagtgtatactagtctagcaccaaagcgaccgagccgcggatttcacccctgcctttccttcaccccgtgtccaggccctggtgcccgcgcgttcccgtgcggcaactggccgccgccgccgcactacgccaggtgcccaattcctcgtcgggtcctccgccggcgacgagcacccaccagaaaactggagtggactctacatgtcaagacagtatggcgccaggaagcaaggcggagaggaaagcagcactagacgctggcgcatggatgttcaatgtcgtcacatccgttggtatcatcatggtcaacaaagccttaatggcgacgcatggttttagtttcgctacaacgttgaccggacttcatttcgcgatgacgaccttgatgacattagtaatgaaatggctgggatatattcagccgtcctatctaccgttacctgaactagtaaaattcgccttttttgcgaacctgtctattgttgggatgaatgtaagcttgatgtggaactctgttggattctatcagatcgcaaagctgtgtatcattccagtcttatgcattctggaaatcatgttcgacaaagtccgttactctagagatacaaagctcagtatagtgcttgtccttgtaggtgttgctgtatgcacagtcactgatgttagtgtgaactctcaagggttactagctgcagtaatagctgtttggagcacagcactacagcagcattatgttcaccaccttcaatggaagtactcgcttggctcattcaacctcttaggccatactgctccagcccaggcagcatcgttgttagtattgggtccttttgtggacttctggctgaccaacaaaagagtcgatgcttttaactacacatcaatagttacgaattgtaggccatagcagaaaatggg

SEQ ID NO: 70266 - DNA, 2114 bp, Zea Mays
ccaaacacccccagagtgtatactagtctagcaccaaagcgaccgagccgcggatttcacccctgcctttccttcaccccgtgtccaggccctggtgcccgcgcgttcccgtgcggcaactggccgccgccgccgcactacgccaggtgcccaattcctcgtcgggtcctccgccggcgacgagcacccaccagaaaactggagtggactctacatgtcaagacagtatggcgccaggaagcaaggcggagaggaaagcagcactagacgctggcgcatggatgttcaatgtcgtcacatccgttggtatcatcatggtcaacaaagccttaatggcgacgcatggttttagtttcgctacaacgttgaccggacttcatttcgcgatgacgaccttgatgacattagtaatgaaatggctgggatatattcagccgtcctatctaccgttacctgaactagtaaaattcgccttttttgcgaacctgtctattgttgggatgaatgtaagcttgatgtggaactctgttggattctatcagatcgcaaagctgtgtatcattccagtcttatgcattctggaaatcatgttcgacaaagtccgttactctagagatacaaagctcagtatagtgcttgtccttgtaggtgttgctgtatgcacagtcactgatgttagtgtgaactctcaagggttactagctgcagtaatagctgtttggagcacagcactacagcagcattggagcctgtccatttgtggcctgaggtcctgagtttgaagtttgaaccaggcttcttgcaaaattatgcaagggtgggctttttagaaattcccttccccaggcctcaccttgtgtgggagctctcattgggcacactcccttttttcctgaactaagtaagcaaaataatccagtaccctgctgctgctttgagtacgacaactttgtatgttcaccaccttcaatggaagtactcgcttggctcattcaacctcttaggccatactgctccagcccaggcagcatcgttgttagtattgggtccttttgtggacttctggctgaccaacaaaagagtcgatgcttttaactacacatcaatagttacgttctttatcgtgttgtcgtgcataattgctgtcgggaccaacctaagccagttcatatgcatcggaagattcacggccgtctcgttccaagtcctaggtcacatgaagacggttctcgtgttgaccctggggttctttttctttgggaaagagggtctcaatttccacgtcgcccttggcatgtttctggcagtgatcggcatgatctggtatgggaatgcctcctcgaaacctggaggcaaagagcgccaggtttactccacaccgagtgagaaaactcagaagcatggggtgctgtcatcccaatccgagcttgatcagaaggtctgaaatgagcaggggcggacccacaggggggtccgggtgggccctggcacaccctaagccaggcccactggggaccccacccgccgagcgccgaagccccaaggttgtttcaacttctccaatccttcagcacgactgcggctgttcgcctgttcctagcggctggagacatggctggctggctttctggcgaaggcgaagtggcgagtgcgcgctgtgcggctgtccgccagacgccagtcgccgactcagccagacgccgccactgcggcacatggatccagatcttagcagtagtagcttccctttccgctgctgattacctgctagctccaaaagcgattttctctcaagctaaattcagtggttctatctctaccactcaaattatataatatgtcaatgttttttctctcatggccttgttgcccctcttccttgaacccaacaaaaaaccaacgaattttattgattgtttagaattttattgatctgcctgctggttttagaatttaggatttttgtcttattgattgttgatttactaccattatttttgtagtgactaaaatatgaagaagcagggaaatattgtctctatttttcgtaatcatgctgcaaaaaacagaagtttcatacttatttgttgaatgtcaaattttatatctatata

SEQ ID NO: 70267 - DNA, 944 bp, Zea Mays
tcttgtaagattgtgaagtgcttgatgtattgcataggagaaggttacattacatatatatagagacccaaggaaccctaaccctaatgggctggcagcctagcagcggtgccagccccgtctacggatagtcggatacatataggaacacacactctaacacttctcagtcaagattgaagaacatctgtgtttgtattctacattcatttacttcagcctgcactatcacatagttgtttttatattgcttcaatatggtttggctgacgctgctatttaatttgacaggttcgagttatgaatattacgagcccaaggaaattctactctgattaaatggggtatttttccagcaggatctgataatgctatgtccaacgcaacagcgatgggtatcatctatcggttaactcagcatcatgttcagttgcctgaaaatcttggcaattatcaattgctcgagtggaatgtgcagcccttgtcaagaagacctgttgattcagtggttcccgagcaagaactccagccactataattcaaagctgtttggcggagcaacatatatatgattctttggtagagatacccttgtgcggggttacatatcacagcggcacgcatctgctgctggagtaagcccttctttgtatgtaacacaagctagaagcttacagaagaagcacattatgattacgtgacttcattcaaaacttagaagtgttgttcataaactgtctagtgattcagatcaagagctcctctcttatgcttacagtagaaggttctgttcatgtaatgtagattaagtaggggtagagaagagactaagcacacctgtggaacgaaacgatgtaatatctatttgataagtgctgagggtatttggcttcttaaaaggttttcagggcatgattgattctcttgcctactattaagaaagt

SEQ ID NO: 70268 - DNA, 1524 bp, Zea Mays
gttttcttttgcctcgcgtcctccttccctgtgtgacaagtaaagtgcattctctcaagaaaattcgtggccctgatccaagttataaggatatctgctttgcaggtgctcgaaggaacgtctcaaagctacatgaggtatttccagatgttgacatggtatttggaaatggacagaagctctcacttacacctgaaaattatttattccggcactccaaggttgatggggcttattgtttgggtgtattccaaaatggtaaagatccaacaacactattaggaggttagacacgtcttactgctgccatttgttttacgtctttgtacaatttgctgggttattggtcatctcgaatgtatatcttgtcattcctcaatacacgctggactctctttttatgtctattggcttataaagtgcacaagcttacaggtttattctgtagaattacaaccaatattagattcatccttctatgcagcactttaggatcttatattgcatattaaaggttatcagcataggctgagtgaatagtatggtatgcagtgttactctgacctgtttatacacttgcataatagattttttgtaaactttattagttgactggcttggaagaaatatttaacatgttctcaccttatatctgacctaatatatgcattttctgttagcttgatttgttcaaactttatgagaagaataactaattaaaattattaaatctgagcactgcatttcattgtcaacatttgcttaattcttcagagtatctcttggccttactcattcaatccaaaagtgtacaacatgttttttttttctcgaacgcgcaggagaactgcgccccattatatattaagcagaggaatagaaaaaacagaacaaaacaaaaaaggtttacagtcctccttacggaggccagaaacaggcatacaaataaagatccataaggggataaaaaaatcaaactactcaaatcttcctaaggctctaccaagggtgcagccagatgtgtgaggccttttgcaccagccacttcccatcttcttctttcctcatcagcagctctgagacttgaagacatacttgggttgcagccatcaaaaatgcatttatttcgatgattccataaagtccaagctcctagaatgatgagagagttaaggcccttttttgtgagaccatgtactgctcctcccaccacttcccaccatcccaggaaggagtttgtagtcggctgtggtgcaagagaatgaagaccaaatttcctgagtaaaaggtaccagaattctcgggcgaaagaacattgcacaaggaggtggtctatattttcttcctcttggtcacataacagacatttctctggatgatttaggcctcgctttgccaatctatcagctgtccaacatctcttatgggccaccaaccaaaggaagaagcgacattttggcaaggcccaggacttccagattcttttataatgttcaaatgtcacagatcctaggaacagtcctt

SEQ ID NO: 70269 - DNA, 961 bp, Zea Mays
gagagatttaggcaagatcaacatccgatgcttgggaacgggttataggagataaccagataatagggcagattcataggggatcccgagatttggatgataaagccaacatgattcacaagaaaaagggttaccagatcaggcaaaaggagaggtaggcaaacaggatcagctaggatgatcaacaaaaatgctatgatgttttaggagcaaggatttatggaaagaaacatggccttgatagggtttgcgcaactagacaccaaacaacatttttttatgtaacatgtgcagaaggagacttgggttggtctagcggtcaagctgtggggttccataagctgtgcaggtgtaactttatgggtaaaacacacaagggttagaaaacactaacacaagcataaattttttttaagaggattcacttgctaactcaaggtcgtttggatgggggtctttttatgaacagaacaagcaacaaaatgttttgcaaaaagggttgaacaattacagtgccacctagatagcaagacaagagaaacacataacacgacctaacaagtcttaccaatctgacacgaggtaaggcattttttttgcagtccatgtcaatacaacacattattcacaatttcttattattggaataaaggtgagagaagcatgttgaggcacaagagacaattataatgcgataatcatgatgcatgctcattctagtcgtcttctcagacctaactacttttcgggtgcttgctatagcatccttattaacattaatagtagcctttatggcctatataaatagccacctagctacccatctatttcctaaggcttcacgtcctaggtctcacttatcgtcctgacgatctatccaacattggtttctagcaagttttacttttagaaaaggttggtaatcatgacttattgacttctctgtgatggtattcgctcc

SEQ ID NO: 70270 - DNA, 1215 bp, Zea Mays
gaaaaaagaccttttttagggtatgggtattaattggttacgagttcctcagcctgtcagctggtacaagagaacaagggtagacccggaggccaccacatgagtggggtatgggaaaggaataaactgaggcaagtcttctttccgcaaagcgaagaggctgcttcaaacttgatgaccccaaatctagggagctaattgctttgagggctgtgattaagtgtatcgaagagcataagcttcagaaggagtgttcacttggacctctccagaagcgtgtttctgagctgaagcccaagggtgagaaaaggccatcaagtgatgctgggcgtacttatgcaaagaagcctcgaggccctggcatttcatttcctaggagacctgccggttctgttggttcagctgctcgcaggcctccatttccgggctatacctggcagcgtgctcctgcgccgatgccctcccgtggtcctgctccagtgccctcccgtgcccctcttcctgcccctcttcctgatagatatggagctgctgaccggtaccattacacaccaccagccccagcatacgactctggtgcattttcgtcttacagtgaacctttcagtgccccaaaaccattccagtacactccagggtcagtggcagcatcatacaattcaagcccctataaagtcgcttatggtggcccaggagcaccagtcagaagcacctatccaggttatgccagcgcatctgggccggctgcttccagcagctatgcaaattatatgggatccgtatatcgccctccccagcaaccatagattcgactcctccctcaaaaaatgttgtgctggtgatgcaagacatggaaaccagtccctcccatccaactcccatggcggagatgtaaacttgagctattttcttgtttcatcgtccacaacagtggggtttggaggtgtatactgatgctctcatgtccagctacatctacaatgtaccttgcactcttgtttgcttttagctgtgcttattcctgagtcgttgaatgttttatattttctttccacaagtctgtctcatgtagggaactgtctcatctaggaatataactcctttacttgctaccgttgcgattgagttggaaacgccgattgagttggaaacgccaaaacgtggcttgagtttaacagcttgcttatccctatctcatttcatttttcactttgt

SEQ ID NO: 70271 - DNA, 1736 bp, Zea Mays
gaacaattggcttggcagtattcaaagaactcaggcacaagaaattcagaattgcaaatttactacagcataaagggaaaaaacatagattattattggtttgttgcaaaatgtctacggaagcgactttgaacaattctggtggttctgaatctgcattgctgttactggaacagcttgctgaagtttttggaaagttaaaaactcacaccgaaacatttctgcatttgcaaaatggcataaaatgggaagatattgaagggcatttcctcagccttgatgagtcgtacagaagcaagtttgatgaactggtagagaaggagaaggcattagaagaaaagaaagctgaagcttgtaggttgattgcagagaaagaggctaaagtttctacaaaagagcatgcctcactgaatcagcttcaggagctaagggatgctgctgtctcttctctagcagaggttcgacaaaaatataaggtggagcttgctgagatacttgaagcaagtggaagcaaagacaaaaaggtatcattgaggagttggttaagcggcacaggcaaattgatgcagttcatttcatacaagcttttgggctttcggagacattcccccctgcacctctgctgaagacatatgttgaggaacaaaaggatacaattgaaaataatggcgatgcaactgcgatctcattaacggatgaccccaaatctagggagctaattgctttgagggctgtgattaagtgtatcgaagagcataagcttcagaaggagtgttcacttggacctctccagaagcgtgtttctgagctgaagcccaagggtgagaaaaggccatcaagtgatgctgggcgtacttatgcaaagaagcctcgaggccctggcatttcatttcctaggagacctgccggttctgttggttcagctgctcgcaggcctccatttccgggctatacctggcagcgtgctcctgcgccgatgccctcccgtggtcctgctccagtgccctcccgtgcccctcttcctgcccctcttcctgatagatatggagctgctgaccggtaccattacacaccaccagccccagcatacgactctggtgcattttcgtcttacagtgaacctttcagtgccccaaaaccattccagtacactccagggtcagtggcagcatcatacaattcaagcccctataaagtcgcttatggtggcccaggagcaccagtcagaagcacctatccaggttatgccagcgcatctgggccggctgcttccagcagctatgcaaattatatgggatccgtatatcgccctccccagcaaccatagattcgactcctccctcaaaaaatgttgtgctggtgatgcaagacatggaaaccagtccctcccatccaactcccatggcggagatgtaaacttgagctattttcttgtttcatcgtccacaacagtggggtttggaggtgtatactgatgctctcatgtccagctacatctacaatgtaccttgcactcttgtttgcttttagctgtgcttattcctgagtcgttgaatgttttatattttctttccacaagtctgtctcatgtagggaactgtctcatctaggaatataactcctttacttgctaccgttgcgattgagttggaaacgccgattgagttggaaacgccaaaacgtggcttgagtttaacagcttgcttatccctatctcatttcatttttcactttgt

SEQ ID NO: 70272 - DNA, 1675 bp, Zea Mays
ctcactcactcttctctgacgccgctgattattattggtttgttgcaaaatgtctacggaagcgactttgaacaattctggtggttctgaatctgcattgctgttactggaacagcttgctgaagtttttggaaagttaaaaactcacaccgaaacatttctgcatttgcaaaatggcataaaatgggaagatattgaagggcatttcctcagccttgatgagtcgtacagaagcaagtttgatgaactggtagagaaggagaaggcattagaagaaaagaaagctgaagcttgtaggttgattgcagagaaagaggctaaagtttctacaaaagagcatgcctcactgaatcagcttcaggagctaagggatgctgctgtctcttctctagcagaggttcgacaaaaatataaggtggagcttgctgagatacttgaagcaagtggaagcaaagacaaaaaggtatcattgaggagttggttaagcggcacaggcaaattgatgcagttcatttcatacaagcttttgggctttcggagacattcccccctgcacctctgctgaagacatatgttgaggaacaaaaggatacaattgaaaataatggcgatgcaactgcgatctcattaacggatgaccccaaatctagggagctaattgctttgagggctgtgattaagtgtatcgaagagcataagcttcagaaggagtgttcacttggacctctccagaagcgtgtttctgagctgaagcccaagggtgagaaaaggccatcaagtgatgctgggcgtacttatgcaaagaagcctcgaggccctggcatttcatttcctaggagacctgccggttctgttggttcagctgctcgcaggcctccatttccgggctatacctggcagcgtgctcctgcgccgatgccctcccgtggtcctgctccagtgccctcccgtgcccctcttcctgcccctcttcctgatagatatggagctgctgaccggtaccattacacaccaccagccccagcatacgactctggtgcattttcgtcttacagtgaacctttcagtgccccaaaaccattccagtacactccagggtcagtggcagcatcatacaattcaagcccctataaagtcgcttatggtggcccaggagcaccagtcagaagcacctatccaggttatgccagcgcatctgggccggctgcttccagcagctatgcaaattatatgggatccgtatatcgccctccccagcaaccatagattcgactcctccctcaaaaaatgttgtgctggtgatgcaagacatggaaaccagtccctcccatccaactcccatggcggagatgtaaacttgagctattttcttgtttcatcgtccacaacagtggggtttggaggtgtatactgatgctctcatgtccagctacatctacaatgtaccttgcactcttgtttgcttttagctgtgcttattcctgagtcgttgaatgttttatattttctttccacaagtctgtctcatgtagggaactgtctcatctaggaatataactcctttacttgctaccgttgcgattgagttggaaacgccgattgagttggaaacgccaaaacgtggcttgagtttaacagcttgcttatccctatctcatttcatttttcactttgt

SEQ ID NO: 70273 - DNA, 2226 bp, Zea Mays
gacccaggcaagaggcaacacagcaagcagcagaaaacatctccgggagtccgaaccacccacaggcggcaggccacaccacaggagcgcgtgctgggggagatcctcgcccgcaacgccggcaccgagtacctcgccaagtacggcctcgccgccgctactacggaccgcgccaccttccgcgccaaggtgccgatggcgacgtacgaggacctgcagccgtacatccgccgcattgccgacggcgaccgctcgcccatcctgtcggggcacccggtgtccgagttcctcaccagctccggcacgtccgccggcgagcgcaagctcatgcccaccatcgaggacgagctcaaccgccgccagctgctgtacagcctccagatgcccgtacgtgcccgggatggacaaggggaaggctctccatttcctctttgtcaagtcggagacgaagacgccgggcggcctcgcggcgaggcccgtcctgacgagctactacaagagcaaccacttcaagaaccgcccgttcgacgcctacaacaactacacgagccccacggcggccatcctctgcgccgacgcgttccagagcatgtacgcgcagatgctgtgcgggctgtgccagcgccaggacgtgctgcgcgtcggcgcggtgttcgcgtcgggcctcctccgcgccattcgcttcctccagctcaactgggagcagctcgcggaggacatcgaagccggctcgctcaccccgcgcgtcaccgacccgtcggtgcgcgaggcggtcgccggcatcctccgcgctgaccccgagctcgcggcgctggtccgctccgagtgctccaagggcgactgggctggcatcatcacccgcatttggcccagcaccaagtacctggacgtcatcgtcaccggcgccatggcgcagtacatcccgacgctcaagtactacagcggcgggctcccgatggcgtgcaccatgtacgcgtcctccgagtgctacttcgggctgaacctccgccccatgtgcgacccctcggaggtgtcctacaccctgatgcccaacatgtgctacttcgagttcctgccgatggactccgcggcggcgtccggcggcgacgcgagccagctggtggacctcgcccgcgtggaggtcgggcgcgagtacgagctggtgatcaccacgtacgcggggctgaaccggtaccgcgtcggcgacgtgctccaggtgaccggcttccacaactccgcgccgcagttccggttcgtgcggcgcaagaacgtgctgctgtccatcgagtccgacaagacggacgaggccgagctgcagcgcgccgtggagcgcgcgtccgcgctgctccgcccgcacggcgccgccgtggtggagtacaccagccaggcctacaccaagagcatcccgggccactacgtcatctactgggagctcctggccaagggccccgcgggcggcgccgcggtgggcgaggggacgctggagaggtgctgcctggagatggaggaggcgctgaacacggtgtacaggcagagccgcgtggcggacgggtccatcgggccgctggagatccgggtggtccggccgggcaccttcgaggagctcatggactacgccatctcccgcggcgcgtccatcaaccagtacaaggtgccccggtgcgtgacgttcccgcccatcatcgagctcctggactcccgcgtcgtgtccagccacttcagccccgcgctgccgcactggacccccggccagcgctccgactccgactagacacgcgggccggcgtgcggcgaggcgtgtccggcgcgcttaattagactgggaattcgttccttgcgtatcgcagacgtagaatatgcccgtgaaattaaaatatttgttaattttggaattttgggtactgtcagttagcggctttgagggtaacctgtgatgtgacgagagttggagtcactactgaaggctgagctggtcagctgaagcaacagtcgacgcctgaaggtgttttccggcagtaatggcactgttgtccctatcactttagtagtacggaggacgcggctaacttaaacgttcttccaaatccaaatccaaatctgtacgagctatgcccctgtgcatgcagaagacattgctgcaacattctgattactactaaaaccggctgcgagctcgttgtgcagacgagtactccagtagtaacttcccagttcgtacggttcttt

SEQ ID NO: 70274 - DNA, 926 bp, Zea Mays
cgaatagctgacccgtagtgtagcatgctttactgagaggctcaggcacggacgcttggcattatttaacaataaagccttagctcagccttctcaaactgcaccaccagtccaccacatgagtggatttcagatgacttcaagcaagtgccgttgccacttgtttctagccaaagcctacgtgccattggcattggacaaactcttgagctggatacggcgtcttcttttaactgttcgcattggccttttagcgggagagacaaccgaaactatattctgatctgatggaggaaccctacgagaaagacacacacctgctgctctctttgggacttgtctgtcagagaaaaaatcatgccggatggtgctgatatgcccctagtggaatggtgactcggacccccgcgggggctcgatccggacgaggcggcggcaaggaagcagcacgccttgtctatcggcagccagcagtgggcagagttactcttgcacacaagaaccttcgcctctgcagttgtgctcattcatcctcgtcccgttacacagtggccatagtgctgaggcgatgtcgatccgtcaccagtgctgagcatagttttgttccgtctgctctttcgcgcatcatctcggtgtgctgttccaagttccgtgatttttgttccgatctgctgtcagcctcccacatgcgtaccttcctgttcctctgctttgtgagccatcccgcgacctatttgcctgatgaaactgaggtgtactatcatggagtgaaattgttggttgggccaatcagaaacgatggtgatcagtgttaagtaaccctagttagggttatgtgggcaaatatctgctttgcccctgaggggtctcacatctctatataaggaacatgtacaccccttcataatagagagatcagaaagagg

SEQ ID NO: 70275 - DNA, 925 bp, Zea Mays
aagaaatatcaagttttaggtggactgaagcaacttctttcgaggcacggacgcttggcattatttaacaataaagccttagctcagccttctcaaactgcaccaccagtccaccacatgagtggatttcagatgacttcaagcaagtgccgttgccacttgtttctagccaaagcctacgtgccattggcattggacaaactcttgagctggatacggcgtcttcttttaactgttcgcattggccttttagcgggagagacaaccgaaactatattctgatctgatggaggaaccctacgagaaagacacacacctgctgctctctttgggacttgtctgtcagagaaaaaatcatgccggatggtgctgatatgcccctagtggaatggtgactcggacccccgcgggggctcgatccggacgaggcggcggcaaggaagcagcacgccttgtctatcggcagccagcagtgggcagagttactcttgcacacaagaaccttcgcctctgcagttgtgctcattcatcctcgtcccgttacacagtggccatagtgctgaggcgatgtcgatccgtcaccagtgctgagcatagttttgttccgtctgctctttcgcgcatcatctcggtgtgctgttccaagttccgtgatttttgttccgatctgctgtcagcctcccacatgcgtaccttcctgttcctctgctttgtgagccatcccgcgacctatttgcctgatgaaactgaggtgtactatcatggagtgaaattgttggttgggccaatcagaaacgatggtgatcagtgttaagtaaccctagttagggttatgtgggcaaatatctgctttgcccctgaggggtctcacatctctatataaggaacatgtacaccccttcataatagagagatcagaaagagg

SEQ ID NO: 70276 - DNA, 908 bp, Zea Mays
attcggaagaaatatcaagttttaggtggactgaagcaacttctttcgaggtgattcgaatagctgacccgtagtgtagcatgctttactgagaggcacggacgcttggcattatttaacaataaagccttagctcagccttctcaaactgcaccaccagtccaccacatgagtggatttcagatgacttcaagcaagtgccgttgccacttgtttctagccaaagcctacgtgccattggcattggacaaactcttgagctggatacggcgtcttcttttaactgttcgcattggccttttagcgggagagacaaccgaaactatattctgatctgatggaggaaccctacgagaaagacacacacctgctgctctctttgggacttgtctgtcagagaaaaaatcatgccggatggtgctgatatgcccctagtggaatggtgactcggacccccgcgggggctcgatccggacgaggcggcggcaaggaagcagcacgccttgtctatcggcagccagcagtgggcagtggccatagtgctgaggcgatgtcgatccgtcaccagtgctgagcatagttttgttccgtctgctctttcgcgcatcatctcggtgtgctgttccaagttccgtgatttttgttccgatctgctgtcagcctcccacatgcgtaccttcctgttcctctgctttgtgagccatcccgcgacctatttgcctgatgaaactgaggtgtactatcatggagtgaaattgttggttgggccaatcagaaacgatggtgatcagtgttaagtaaccctagttagggttatgtgggcaaatatctgctttgcccctgaggggtctcacatctctatataaggaacatgtacaccccttcataatagagagatcagaaagagg

SEQ ID NO: 70277 - DNA, 1102 bp, Zea Mays
cttcagtagtggcaaacatgttggtccttgttattcttcgagatggtatacctgtcatcagtactcagtagtgaccggcttcaacaaacttcagtttcctgtccagctcactccctatcagactttattcggaagaaatatcaagttttaggtggactgaagcaacttctttcgaggtgattcgaatagctgacccgtagtgtagcatgctttactgagaggcacggacgcttggcattatttaacaataaagccttagctcagccttctcaaactgcaccaccagtccaccacatgagtggatttcagatgacttcaagcaagtgccgttgccacttgtttctagccaaagcctacgtgccattggcattggacaaactcttgagctggatacggcgtcttcttttaactgttcgcattggccttttagcgggagagacaaccgaaactatattctgatctgatggaggaaccctacgagaaagacacacacctgctgctctctttgggacttgtctgtcagagaaaaaatcatgccggatggtgctgatatgcccctagtggaatggtgactcggacccccgcgggggctcgatccggacgaggcggcggcaaggaagcagcacgccttgtctatcggcagccagcagtgggcagagttactcttgcacacaagaaccttcgcctctgcagttgtgctcattcatcctcgtcccgttacacagtggccatagtgctgaggcgatgtcgatccgtcaccagtgctgagcatagttttgttccgtctgctctttcgcgcatcatctcggtgtgctgttccaagttccgtgatttttgttccgatctgctgtcagcctcccacatgcgtaccttcctgttcctctgctttgtgagccatcccgcgacctatttgcctgatgaaactgaggtgtactatcatggagtgaaattgttggttgggccaatcagaaacgatggtgatcagtgttaagtaaccctagttagggttatgtgggcaaatatctgctttgcccctgaggggtctcacatctctatataaggaacatgtacaccccttcataatagagagatcagaaagagg

SEQ ID NO: 70278 - DNA, 1536 bp, Zea Mays
ctgaagtcttagttgcaggagaaagtcctatgtggagtggccactggtttcgcctcttgaggcttgacttcttcactttttggcgcatcaagacccaacttcagccacggtactctctccattgctgtgtttagagagggttttctgaagtttgtgttgtcgtgcctccccctgctttgctattgctataaaaagaagcaggggtctgcgggcagcaataattcagcagaaaaggcgagccatcggtactttgaagtggaccagaggatatgctagcttcagtagtggcaaacatgttggtccttgttattcttcgagatggtatacctgtcatcagtactcagtagtgaccggcttcaacaaacttcagtttcctgtccagctcactccctatcagactttattcggaagaaatatcaagttttaggtggactgaagcaacttctttcgaggcacggacgcttggcattatttaacaataaagccttagctcagccttctcaaactgcaccaccagtccaccacatgagtggatttcagatgacttcaagcaagtgccgttgccacttgtttctagccaaagcctacgtgccattggcattggacaaactcttgagctggatacggcgtcttcttttaactgttcgcattggccttttagcgggagagacaaccgaaactatattctgatctgatggaggaaccctacgagaaagacacacacctgctgctctctttgggacttgtctgtcagagaaaaaatcatgccggatggtgctgatatgcccctagtggaatggtgactcggacccccgcgggggctcgatccggacgaggcggcggcaaggaagcagcacgccttgtctatcggcagccagcagtgggcaggtaacgattgtcatctaaatatcatttggagcgtcatttgcagcaaaatcgatttatgttttcacttttgaacacttttcctatctccaaatagtcattctcgttttctagcgagaaacctaaaaaaaaagatgctcatatttagatagccaacttaaaaggttgagggcatttttcaccaaaaatctctatttgtctcgtagagttactcttgcacacaagaaccttcgcctctgcagttgtgctcattcatcctcgtcccgttacacagtggccatagtgctgaggcgatgtcgatccgtcaccagtgctgagcatagttttgttccgtctgctctttcgcgcatcatctcggtgtgctgttccaagttccgtgatttttgttccgatctgctgtcagcctcccacatgcgtaccttcctgttcctctgctttgtgagccatcccgcgacctatttgcctgatgaaactgaggtgtactatcatggagtgaaattgttggttgggccaatcagaaacgatggtgatcagtgttaagtaaccctagttagggttatgtgggcaaatatctgctttgcccctgaggggtctcacatctctatataaggaacatgtacaccccttcataatagagagatcagaaagagg

SEQ ID NO: 70279 - DNA, 1583 bp, Zea Mays
atctgaagtcttagttgcaggagaaagtcctatgtggagtggccactggtttcgcctcttgaggcttgacttcttcactttttggcgcatcaagacccaacttcagccacggtactctctccattgctgtgtttagagagggttttctgaagtttgtgttgtcgtgcctccccctgctttgctattgctataaaaagaagcaggggtctgcgggcagcaataattcagcagaaaaggcgagccatcggtactttgaagtggaccagaggatatgctagcttcagtagtggcaaacatgttggtccttgttattcttcgagatggtatacctgtcatcagtactcagtagtgaccggcttcaacaaacttcagtttcctgtccagctcactccctatcagactttattcggaagaaatatcaagttttaggtggactgaagcaacttctttcgaggtgattcgaatagctgacccgtagtgtagcatgctttactgagaggcacggacgcttggcattatttaacaataaagccttagctcagccttctcaaactgcaccaccagtccaccacatgagtggatttcagatgacttcaagcaagtgccgttgccacttgtttctagccaaagcctacgtgccattggcattggacaaactcttgagctggatacggcgtcttcttttaactgttcgcattggccttttagcgggagagacaaccgaaactatattctgatctgatggaggaaccctacgagaaagacacacacctgctgctctctttgggacttgtctgtcagagaaaaaatcatgccggatggtgctgatatgcccctagtggaatggtgactcggacccccgcgggggctcgatccggacgaggcggcggcaaggaagcagcacgccttgtctatcggcagccagcagtgggcaggtaacgattgtcatctaaatatcatttggagcgtcatttgcagcaaaatcgatttatgttttcacttttgaacacttttcctatctccaaatagtcattctcgttttctagcgagaaacctaaaaaaaaagatgctcatatttagatagccaacttaaaaggttgagggcatttttcaccaaaaatctctatttgtctcgtagagttactcttgcacacaagaaccttcgcctctgcagttgtgctcattcatcctcgtcccgttacacagtggccatagtgctgaggcgatgtcgatccgtcaccagtgctgagcatagttttgttccgtctgctctttcgcgcatcatctcggtgtgctgttccaagttccgtgatttttgttccgatctgctgtcagcctcccacatgcgtaccttcctgttcctctgctttgtgagccatcccgcgacctatttgcctgatgaaactgaggtgtactatcatggagtgaaattgttggttgggccaatcagaaacgatggtgatcagtgttaagtaaccctagttagggttatgtgggcaaatatctgctttgcccctgaggggtctcacatctctatataaggaacatgtacaccccttcataatagagagatcagaaagagg

SEQ ID NO: 70280 - DNA, 1286 bp, Zea Mays
cccacctgtcagcctccatacgaagccccctccgccgtcctctgcgtcaaaacgtcgaaaagctagctagcgcaatgcccgccgccaccagcgtctccctcgccgtcgccgacgccgtctgggcggagatcagatccgctggccgggcatccgacgagcacctatccatcctcgagacgctgttcggaaagaacatgctgcgggcctgcaagatcgtcgacgagcgcggcgtcaggcgcgtcaccggcgcgcccagtggccgctcggtctttctggtgatgggggagtcgaagaggaaggaggagtacctttgcttcccggagcacctctgcacgtgctactcattcttctacgacgtcgtcgggcgtggcgagcagctgagctgtaagcaccagttagctgcacggcttgcagaggctgtgggagagcaccaggaggttgaagtgaaagatgaggagctcgcaaatatgcttgcacggacgcttggcattatttaacaataaagccttagctcagccttctcaaactgcaccaccagtccaccacatgagtggatttcagatgacttcaagcaagtgccgttgccacttgtttctagccaaagcctacgtgccattggcattggacaaactcttgagctggatacggcgtcttcttttaactgttcgcattggccttttagcgggagagacaaccgaaactatattctgatctgatggaggaaccctacgagaaagacacacacctgctgctctctttgggacttgtctgtcagagaaaaaatcatgccggatggtgctgatatgcccctagtggaatggtgactcggacccccgcgggggctcgatccggacgaggcggcggcaaggaagcagcacgccttgtctatcggcagccagcagtgggcagtggccatagtgctgaggcgatgtcgatccgtcaccagtgctgagcatagttttgttccgtctgctctttcgcgcatcatctcggtgtgctgttccaagttccgtgatttttgttccgatctgctgtcagcctcccacatgcgtaccttcctgttcctctgctttgtgagccatcccgcgacctatttgcctgatgaaactgaggtgtactatcatggagtgaaattgttggttgggccaatcagaaacgatggtgatcagtgttaagtaaccctagttagggttatgtgggcaaatatctgctttgcccctgaggggtctcacatctctatataaggaacatgtacaccccttcataatagagagatcagaaagagg

SEQ ID NO: 70281 - DNA, 756 bp, Zea Mays
tcctccggcatacttcatccacgtccacacaaagacacggcgtacgggccaccgctgcagctgaggtggtcacagtcgttggctgcgcagagcacggaccctgcgcagctcagcgagtgccgcgaacgtaagcaaggaggcaccgtcaggcgctgctggcggccggcgatggggtccagacgatgagccgctcccgctcggctaggtcatcgcagatgtagatgagtatcgcggccatggcggcagtccagggccgcccagttggtttgatcgagcgttctcaatgcagccatggagacaggggaggcggtagcgatggtggggaagaagagggagtcgccgaggtcgtggttctggaagtagccgaacagaggcggcgttccgtggaactcgcggtagcgacgacgacgaaagctgcggtcgtagcgcagacgccatgtcgccgccaaaagaacacgagcattcgcatgaagacgctttaaaaaaaaatcttatttgctttctttcggtgcaggatctcgaaggcaacggattctggagacctactctcccgatcgcagatgcacgttggcgctcgggatgaagaggatcacaacgacgacgcagaagtgtgcagaggcaaaaaaactaacttgcgttggaatagattctggcgatggctattaggcaccttatatagggtcgcgtacgcgaactgataggctcgcgatccaatttgttatttttgtaggatttaattgaatttctcaattggag

SEQ ID NO: 70282 - DNA, 3414 bp, Zea Mays
tttggcttctgggagagacccacgacgctccattcccccacgaaatgagactccgcgcgcaaaagccccgtttctcgccgcgcgcgagaaaaccctaccttttcccgccacccgcgcgcatttagtcgagcacatagtccgcaccccacatcaccaccgccaccatcagaacctctacgcaccgggtatcgaacgcatctacgatggagggcgacgacttcacgccggagggcggcaagctccccgagttcaagctagatgcgagacaagcgcagggtttcatctccttcttcaagaagctgccgcaggatccccgggccgttcgtctcttcgatcgcagggattattacactgcccatggcgagaatgctacgtttatcgcaaggacatactaccacacaatgtctgccttacgtcaactaggtagcagctctgatggaatcttaagtgccagcgtgagcaaggctatgtttgagaccattgcccgcaacattttgttggaaaggactgactgtacattggaactctatgagggaagtgggtcaaattggaggttaacaaagtccggaacacctggaaatattggtagttttgaagacattctgtttgcaaacaatgacatggaagattcaccagtgattgttgctttgtttccagcgtgccgggaaagtcagctgtatgtagggcttagttttttggatatgaccaataggaagcttgggttggctgagtttcccgaagatagccgattcactaatgttgaatcagctcttgttgcattaggttgcaaggagtgtcttctcccagcagattgtgaaaaatccattgacctaaacccccttcaagacgtcattagtaactgtaatgttctgttgactgagaaaaagaaggctgacttcaaatccagggatctcgcacaagatcttggtagaataatcaggggttctgttgagcctgtacgtgatctactatctcagtttgactatgctcttggtccccttggagctcttttatcttatgccgagttgctagcagatgacactaactatggaaattacacaattgagaagtacaatttgaactgctacatgcgacttgattctgctgcagttcgagcattaaacattgcagaagggaaaactgatgtaaacaagaacttcagtttgtttggtttgatgaacagaacttgtactgttgggatgggaaaaagattgctgaacagatggctgaaacaacctctattagatgttaatgaaattaataaccgactagacatggttcaggcttttgtagaagacccagaacttcgtcagggactccggcaacaacttaaaaggatatcagatattgatcgtctaacacatagtctccgaaagaaatcagctaatctgcagcctgttgttaagctttatcagtcctgtagcagaatcccatacatcaagggcattcttcagcaatataatggccaattttcaacattgataaggtcaaagtttcttgaaccgttagaagaatggatggcaaagaatcgatttggtcggttttcttctcttgttgagacagctattgatcttgctcagctggagaatggagagtacagaatatctcctctatattcttctgacttgggtgtactaaaggatgagctttctgtggttgaaaaccacataaacaatctgcacgtggatacagctagtgatctggatctttctgttgataagcaactgaagctagaaaaaggatcccttggacatgtgttcagaatgtcaaagaaagaggaacagaaagtcaggaagaaactcactggcagctacttaatcatagaaactcgtaaagatggtgtaaagttcacaaattctaagctgaaaaatctaagtgatcaataccaggcattgtttggtgagtacacaagttgtcagaaaaaggtggttggtgatgtagtgagggtttcaggcacattctcagaggtatttgaaaattttgctgcagttctgtcggagttggatgttttacaaagttttgctgatttggcaactagttgcccagttccttatgttaggccagacatcactgcgtcggatgaaggagatattgttctactgggtagcagacatccttgtctagaggcacaagatggtgttaactttatacccaatgattgcactctggtgagagggaaaagttggtttcagatcatcactggaccaaacatgggaggaaaatccacatttataagacagcttcatggtgtatcaacttttatgcaagaaatgcttgaaacagcatccatcctaaaaggcgcctctgataagtctcttataattattgatgagctggggcgtggaacttccacatatgatggatttggtcttgcatgggctatctgtgagcatcttatggaagtgactcgagcgcctaccttgtttgcaacccatttccatgaactaactgcattagcacatagaaatgatgatgagcaccaacacatttcagacatcggagttgcaaattatcacgtgggtgctcacatagacccattaagtaggaagttaactatgctttacaaggttgaacctggtgcatgcgaccaaagttttggtattcatgttgcagaatttgctaattttccagaagctgttgttgcccttgcgaaaagcaaagcagcagagttagaagacttttctactacacctaccttttccgatgatttgaaagacgaggttggatcaaagcgcaagagggtatttagcccagatgacatcaccagaggagctgcacgggctcggcttttccttgaggaattcgccgcattgcctatggatgagatggatgggagcaagatcttggagatggccaccaagatgaaagctgacttgcagaaagatgcagctgacaatccttggctccagcagttcttctgaagctaattaatccccgcgtgtatggaggcaagaccatgagagaacctcgctgatgctaggatctcctgatccattttgttaatacgcatcagcagatgtactctagtctttaggcttagccgacagtgcaacagggaaaaccatgtgcatatttaacgcggcggtagtgctgctactcctgcataccgttcgggtgcagctactctgctctgccgttctgccccgtctgtgattgcacgccgtcctttacagccgtgaagtctgctgtgccagtctcgtcgaagcttgaagtttctgcacgtctattggctattgctgtgctgcttgtctagcaaaattctttcagtgcaagtagggattgatagtttgtagagattgttgggattttgtcgaggatggcctcacaacgacctttaatcagcttttcaacccagccatacttaccttctaaacaaattaataaaaagaagcaaacttagtgacaaaggtttcc

SEQ ID NO: 70283 - DNA, 3557 bp, Zea Mays
tttggcttctgggagagacccacgacgctccattcccccacgaaatgagactccgcgcgcaaaagccccgtttctcgccgcgcgcgagaaaaccctaccttttcccgccacccgcgcgcatttagtcgagcacatagtccgcaccccacatcaccaccgccaccatcagaacctctacgcaccgggtatcgaacgcatctacgatggagggcgacgacttcacgccggagggcggcaagctccccgagttcaagctagatgcgagacaagcgcagggtttcatctccttcttcaagaagctgccgcaggatccccgggccgttcgtctcttcgatcgcagggattattacactgcccatggcgagaatgctacgtttatcgcaaggacatactaccacacaatgtctgccttacgtcaactaggtagcagctctgatggaatcttaagtgccagcgtgagcaaggctatgtttgagaccattgcccgcaacattttgttggaaaggactgactgtacattggaactctatgagggaagtgggtcaaattggaggttaacaaagtccggaacacctggaaatattggtagttttgaagacattctgtttgcaaacaatgacatggaagattcaccagtgattgttgctttgtttccagcgtgccgggaaagtcagctgtatgtagggcttagttttttggatatgaccaataggaagcttgggttggctgagtttcccgaagatagccgattcactaatgttgaatcagctcttgttgcattaggttgcaaggagtgtcttctcccagcagattgtgaaaaatccattgacctaaacccccttcaagacgtcattagtaactgtaatgttctgttgactgagaaaaagaaggctgacttcaaatccagggatctcgcacaagatcttggtagaataatcaggggttctgttgagcctgtacgtgatctactatctcagtttgactatgctcttggtccccttggagctcttttatcttatgccgagttgctagcagatgacactaactatggaaattacacaattgagaagtacaatttgaactgctacatgcgacttgattctgctgcagttcgagcattaaacattgcagaagggaaaactgatgtaaacaagaacttcagtttgtttggtttgatgaacagaacttgtactgttgggatgggaaaaagattgctgaacagatggctgaaacaacctctattagatgttaatgaaattaataaccgactagacatggttcaggcttttgtagaagacccagaacttcgtcagggactccggcaacaacttaaaaggatatcagatattgatcgtctaacacatagtctccgaaagaaatcagctaatctgcagcctgttgttaagctttatcagtcctgtagcagaatcccatacatcaagggcattcttcagcaatataatggccaattttcaacattgataaggtcaaagtttcttgaaccgttagaagaatggatggcaaagaatcgatttggtcggttttcttctcttgttgagacagctattgatcttgctcagctggagaatggagagtacagaatatctcctctatattcttctgacttgggtgtactaaaggatgagctttctgtggttgaaaaccacataaacaatctgcacgtggatacagctagtgatctggatctttctgttgataagcaactgaagctagaaaaaggatcccttggacatgtgttcagaatgtcaaagaaagaggaacagaaagtcaggaagaaactcactggcagctacttaatcatagaaactcgtaaagatggtgtaaagttcacaaattctaagctgaaaaatctaagtgatcaataccaggcattgtttggtgagtacacaagttgtcagaaaaaggtggttggtgatgtagtgagggtttcaggcacattctcagaggtatttgaaaattttgctgcagttctgtcggagttggatgttttacaaagttttgctgatttggcaactagttgcccagttccttatgttaggccagacatcactgcgtcggatgaaggagatattgttctactgggtagcagacatccttgtctagaggcacaagatggtgttaactttatacccaatgattgcactctggtgagagggaaaagttggtttcagatcatcactggaccaaacatgggaggaaaatccacatttataagacagcttgtctcaattaattttcatatgagaatcaggttggtgtaaatgtattgatggcacaagttggttcctttgtaccttgtgatcaagcaagcattagtgtgagggattgtatttttgctcgtgttggcgctggtgattgccaacttcatggtgtatcaacttttatgcaagaaatgcttgaaacagcatccatcctaaaaggcgcctctgataagtctcttataattattgatgagctggggcgtggaacttccacatatgatggatttggtcttgcatgggctatctgtgagcatcttatggaagtgactcgagcgcctaccttgtttgcaacccatttccatgaactaactgcattagcacatagaaatgatgatgagcaccaacacatttcagacatcggagttgcaaattatcacgtgggtgctcacatagacccattaagtaggaagttaactatgctttacaaggttgaacctggtgcatgcgaccaaagttttggtattcatgttgcagaatttgctaattttccagaagctgttgttgcccttgcgaaaagcaaagcagcagagttagaagacttttctactacacctaccttttccgatgatttgaaagacgaggttggatcaaagcgcaagagggtatttagcccagatgacatcaccagaggagctgcacgggctcggcttttccttgaggaattcgccgcattgcctatggatgagatggatgggagcaagatcttggagatggccaccaagatgaaagctgacttgcagaaagatgcagctgacaatccttggctccagcagttcttctgaagctaattaatccccgcgtgtatggaggcaagaccatgagagaacctcgctgatgctaggatctcctgatccattttgttaatacgcatcagcagatgtactctagtctttaggcttagccgacagtgcaacagggaaaaccatgtgcatatttaacgcggcggtagtgctgctactcctgcataccgttcgggtgcagctactctgctctgccgttctgccccgtctgtgattgcacgccgtcctttacagccgtgaagtctgctgtgccagtctcgtcgaagcttgaagtttctgcacgtctattggctattgctgtgctgcttgtctagcaaaattctttcagtgcaagtagggattgatagtttgtagagattgttgggattttgtcgaggatggcctcacaacgacctttaatcagcttttcaacccagccatacttaccttctaaacaaattaataaaaagaagcaaacttagtgacaaaggtttcc

SEQ ID NO: 70284 - DNA, 2451 bp, Zea Mays
tttggcttctgggagagacccacgacgctccattcccccacgaaatgagactccgcgcgcaaaagccccgtttctcgccgcgcgcgagaaaaccctaccttttcccgccacccgcgcgcatttagtcgagcacatagtccgcaccccacatcaccaccgccaccatcagaacctctacgcaccgggtatcgaacgcatctacgatggagggcgacgacttcacgccggagggcggcaagctccccgagttcaagctagatgcgagacaagcgcagggtttcatctccttcttcaagaagctgccgcaggatccccgggccgttcgtctcttcgatcgcaggtcctgtagcagaatcccatacatcaagggcattcttcagcaatataatggccaattttcaacattgataaggtcaaagtttcttgaaccgttagaagaatggatggcaaagaatcgatttggtcggttttcttctcttgttgagacagctattgatcttgctcagctggagaatggagagtacagaatatctcctctatattcttctgacttgggtgtactaaaggatgagctttctgtggttgaaaaccacataaacaatctgcacgtggatacagctagtgatctggatctttctgttgataagcaactgaagctagaaaaaggatcccttggacatgtgttcagaatgtcaaagaaagaggaacagaaagtcaggaagaaactcactggcagctacttaatcatagaaactcgtaaagatggtgtaaagttcacaaattctaagctgaaaaatctaagtgatcaataccaggcattgtttggtgagtacacaagttgtcagaaaaaggtggttggtgatgtagtgagggtttcaggcacattctcagaggtatttgaaaattttgctgcagttctgtcggagttggatgttttacaaagttttgctgatttggcaactagttgcccagttccttatgttaggccagacatcactgcgtcggatgaaggagatattgttctactgggtagcagacatccttgtctagaggcacaagatggtgttaactttatacccaatgattgcactctggtgagagggaaaagttggtttcagatcatcactggaccaaacatgggaggaaaatccacatttataagacaggttggtgtaaatgtattgatggcacaagttggttcctttgtaccttgtgatcaagcaagcattagtgtgagggattgtatttttgctcgtgttggcgctggtgattgccaacttcatggtgtatcaacttttatgcaagaaatgcttgaaacagcatccatcctaaaaggcgcctctgataagtctcttataattattgatgagctggggcgtggaacttccacatatgatggatttggtcttgcatgggctatctgtgagcatcttatggaagtgactcgagcgcctaccttgtttgcaacccatttccatgaactaactgcattagcacatagaaatgatgatgagcaccaacacatttcagacatcggagttgcaaattatcacgtgggtgctcacatagacccattaagtaggaagttaactatgctttacaaggttgaacctggtgcatgcgaccaaagttttggtattcatgttgcagaatttgctaattttccagaagctgttgttgcccttgcgaaaagcaaagcagcagagttagaagacttttctactacacctaccttttccgatgatttgaaagacgaggttggatcaaagcgcaagagggtatttagcccagatgacatcaccagaggagctgcacgggctcggcttttccttgaggaattcgccgcattgcctatggatgagatggatgggagcaagatcttggagatggccaccaagatgaaagctgacttgcagaaagatgcagctgacaatccttggctccagcagttcttctgaagctaattaatccccgcgtgtatggaggcaagaccatgagagaacctcgctgatgctaggatctcctgatccattttgttaatacgcatcagcagatgtactctagtctttaggcttagccgacagtgcaacagggaaaaccatgtgcatatttaacgcggcggtagtgctgctactcctgcataccgttcgggtgcagctactctgctctgccgttctgccccgtctgtgattgcacgccgtcctttacagccgtgaagtctgctgtgccagtctcgtcgaagcttgaagtttctgcacgtctattggctattgctgtgctgcttgtctagcaaaattctttcagtgcaagtagggattgatagtttgtagagattgttgggattttgtcgaggatggcctcacaacgacctttaatcagcttttcaacccagccatacttaccttctaaacaaattaataaaaagaagcaaacttagtgacaaaggtttcc

SEQ ID NO: 70285 - DNA, 2341 bp, Zea Mays
tttggcttctgggagagacccacgacgctccattcccccacgaaatgagactccgcgcgcaaaagccccgtttctcgccgcgcgcgagaaaaccctaccttttcccgccacccgcgcgcatttagtcgagcacatagtccgcaccccacatcaccaccgccaccatcagaacctctacgcaccgggtatcgaacgcatctacgatggagggcgacgacttcacgccggagggcggcaagctccccgagttcaagctagatgcgagacaagcgcagggtttcatctccttcttcaagaagctgccgcaggatccccgggccgttcgtctcttcgatcgcagggattattacactgcccatggcgagaatgctacgtttatcgcaaggacatactaccacacaatgtctgccttacgtcaactaggtagcagctctgatggaatcttaagtgccagcgtgagcaaggctatgtttgagaccattgcccgcaacattttgttggaaaggactgactgtacattggaactctatgagggaagtgggtcaaattggaggttaacaaagtccggaacacctggaaatattggtagttttgaagacattctgtttgcaaacaatgacatggaagattcaccagtgattgttgctttgtttccagcgtgccgggaaagtcagctgtatgtagggcttagttttttggatatgaccaataggaagcttgggttggctgagtttcccgaagatagccgattcactaatgttgaatcagctcttgttgcattaggttgcaaggagtgtcttctcccagcagattgtgaaaaatccattgacctaaacccccttcaagacgtcattagtaactgtaatgttctgttgactgagaaaaagaaggctgacttcaaatccagggatctcgcacaagatcttggtagaataatcaggggttctgttgagcctgtacgtgatctactatctcagtttgactatgctcttggtccccttggagctcttttatcttatgccgagttgctagcagatgacactaactatggaaattacacaattgagaagtacaatttgaactgctacatgcgacttgattctgctgcagttcgagcattaaacattgcagaagggaaaactgatgtaaacaagaacttcagtttgtttggtttgatgaacagaacttgtactgttgggatgggaaaaagattgctgaacagatggctgaaacaacctctattagatgttaatgaaattaataaccgactagacatggttcaggcttttgtagaagacccagaacttcgtcagggactccggcaacaacttaaaaggatatcagatattgatcgtctaacacatagtctccgaaagaaatcagctaatctgcagcctgttgttaagctttatcagtcctgtagcagaatcccatacatcaagggcattcttcagcaatataatggccaattttcaacattgataaggtcaaagtttcttgaaccgttagaagaatggatggcaaagaatcgatttggtcggttttcttctcttgttgagacagctattgatcttgctcagctggagaatggagagtacagaatatctcctctatattcttctgacttgggtgtactaaaggatgagctttctgtggttgaaaaccacataaacaatctgcacgtggatacagctagtgatctggatctttctgttgataagcaactgaagctagaaaaaggatcccttggacatgtgttcagaatgtcaaagaaagaggaacagaaagtcaggaagaaactcactggcagctacttaatcatagaaactcgtaaagatggtgtaaagttcacaaattctaagctgaaaaatctaagtgatcaataccaggcattgtttggtgagtacacaagttgtcagaaaaaggtggttggtgatgtagtgagggtttcaggcacattctcagaggtatttgaaaattttgctgcagttctgtcggagttggatgttttacaaagttttgctgatttggcaactagttgcccagttccttatgttaggccagacatcactgcgtcggatgaaggagatattgttctactgggtagcagacatccttgtctagaggcacaagatggtgttaactttatacccaatgattgcactctggtgagagggaaaagttggtttcagatcatcactggaccaaacatgggaggaaaatccacatttataagacagcagatgatccaggcacccaaaatcacgatggagttaaaggattttttagcctgccctgtcactgctaaactgctgctcctgcaccaacttttgaaggaaag

SEQ ID NO: 70286 - DNA, 1430 bp, Zea Mays
ccgctatataaacccgtcgtgtccatggctgctatatcactcagactcagtacaagctcaagccaggcacacagcaagacatcgaccatggctgcctaccaacaagctcccgctctcctgtgcgcctgcctgatgctcgtgctcatggcgggcgcggcatccggcggccgcgtagacgtggaagacatgctgatgatggaccggttccgcgggtggcaagccacgtacaaccgctcgtacctgaccgccgcggagcgtctgcgccggttcgaggtgtaccgccagaacatggagctcatcgaggccacgaaccggcgcgccgggctctcgtaccagctcggcgagaccccgttcacggacctcaccagcgaggagttcctcgccacacacaccatgtccacgcgcctgcatgcgtccgaggccgcgcggcggcaccgggagctcatcacgacgcacgcaggccccgtcagcgacggcggtcgccagtggaaccggaactacacgacggacctcgacgtccccgaaagcgtggactggaggaccaagggcgcggtgacgccggtcaaggaccaaggagcttgtggcagttgctggtcattcgtgacggtggcggcaatcgaaggcctgcacaagataaggacgggccagctcgtctccctgtcggagcaggcggttctggactgctcttccccgcccaaccatggctgcaaccgcggtgaccccgcggctgccatagactgggtgtccgctaacggcggcctcaccaccgagtcggactacccgtatgtgggacggcagggcaaatgcaagctcgacaaggcacgcaaccacgtcgccaagatcaaaggcaggaagttggtggatcaaaacaacgaagccgcgctggaggtcgccgtggcgcagcaacctgttgccgtggacatgaatgtagatccgatcctccagcactacaagagcggggtgttccatggcccctgcgacccagaggatcgtcaaccacggcgtcaccatggtggggtacggtgttgaatctggcggccgcaagtactggatcgccaagaactcgtggggcaatgagtggggcgagaagggatactttcgcctcgagaggcgcgtcaaggacgtcaggggcacctgcggtatagccgagtgggcaaactacccggtgatgtgagctcccgtcccgtgtctgtcgccaccgtgctttacctgcctggcctacagtgcggtcgtcttgctttcctgcacatgcgcaagcctatatatgatgatgtgcagaagtcagcttgtagaacaggctgaaataaactcgacgcgcccggcatgtgtactcggcagtgtcgtcgttgtcatttgcctattatctatcatcttaagaactatatagtaagctccatgtgtagctgctaaataaaaacgcccccttaaat

SEQ ID NO: 70287 - DNA, 2659 bp, Zea Mays
cgccaaaccaaaccaaacaaaccatcctctccctccctctctccccgctcgcttcttgcaactctcccgtaaatctgcacaggcgcagcgcggcatttaatgctctccaacctttggtctctgcctgcccccaaacgctcccccattccgtccactcccctctctccccaccaagcaccagcccacggatgcggtcgcgaccaccgcggcaaggtcgaatccatggctagagctagcagaagcagaagcagaagccgcgggctcggcgcttgagccctcgatcctcgggggtcccggttccttctccctgcattgatcgcgtcactcgacgcgagaaggcgagcaaagaggggaaaaaaaggaggatcctttcccgtgtttcttctgtcgattctgcggttctttgcaagtggcaatgaggcggcatgggtggcagctcccgtaccaccctctccaggtggtggccgtgtccgtcttcctggcgctggcgttcgcgttctacgtcttcttcgcacccttcgtcgggaggaaagtgttccagtacgtggtcatggggctatacactccgctggtattatgtgtcttctttctatacatctggtgtgccgcagcaaacccagcagatccaggggtcttcaaatcaaagaagtatctgagcttgtacggaagcggcaaacacaagcatctgaaggaatccagaaagacttcttcagatgctcggttacaaatagagggaactagagaaaaacaagagcatgaggtcgcagcatctagcgagaggtcaattactcaatacaaggacaataatccatcttgcttgagttcaaccctctctccttctctccttctattctaccctctctcttttgttttctcctgctgccaaccacatgaaagttcctctgagcagcaagccaccgaggaagggatgtttttctgcagcctatgtgaagttcaggtgttgaagtatagtaagcattgcagagtttgtgacaaatgtgttgatggttttgatcatcactgcaggtggctcaacaattgcattggaagaagaaactatagaaggttttttattctaatgtcaactgccgttatcttggtctccatggtttgtgcaatttgggccagcttatcctacaatcagcaattggagtattggtgctagtgctatgctttgttgagcgaaaggaattctctatgcaaattgtttcaaagcttggaagcagcttctctgtagtgccttttgttattgtggtggcatcatgtaccatcctagccatggtcgcttcactgcctgttgctcaacttctttttttccacattcttctgatcaagaagggaatcagtacctatgactacatcattgccctgcgagagcaagagcaagatgatctgagtgggcagcagagtccacagatgtctcgtgtaagctcctacaccggactcagcagtgctagttcctttggtccacttcgtcgtggttcatggtgcactccgccaaggctgtttcttgaggatcaggctgcttcttcgcataattctgctacgaagaggaaagaagaccaggggaagaggaaaaagggctcaggggccgtgaaaataagcccatgggcattagctcgtcttaacgctgaagaagtttcgagggttgctgcagaggcacggaataagtccaaagttttagtgccaatcagaaaagatgactattcacgaggccacgaaacagatagtagctatggaggcaccagcagtggtaggatcgatctaggacccgatagcaagaggagaacaaacagaagaggaagacagcccagtgatctctttctcaaacctgttgcaaagatatctacagatgctattgattctgccagcagcgacatgtccaatttagcaccattgcaacttgaggcacggagcgccttccatcccagcagggctgcatcctctgtgaatgttggtgggtcatctccagatagcagcttggattcgcctgacctgcatctgtacagagtctcagctgtctcatcgtctggagccgaagacttgcagctgacagctctcactgctccaggaagcacttcacatcaagggattcaactgtcgagatcgaccagcgatgggtatgaagcgtcagggggtgaagacagcgaccgcattccgtcacagatagtgcaccgctcgtcaaactgggcaagcatcatcctcaactctgaccagagtgcgtcctcgtctggcattcttgtgccgaagaacagattgtcctgaattcagataaatgaagattgtaaatgatcaaccaagaacgggaggttccagtatctgagctttgttttcaatgtcgaatcttgttgcagggatggcttgatactgcgcaaatcattaatttttttattagtttctgaatcgctaggtaggcaagtgtctgaatttcttccgtggggtgttcaggtgcttgtaattttgctgtcagacgacaatgaactgatttgtttagaggttggtaccttggatcaaatgcctgattagttggtgattgttcttgtggttgacttgtcggctctgacggcatgtacttatatgctgcaataggcaacgagcattcagaaagtactacatccatcctagaaaaaaatgccattatagaagactgtaatatttt

SEQ ID NO: 70288 - DNA, 3028 bp, Zea Mays
agcgcccaaaaggccagagcgaagcagccacggtccgggccacgccaaaccaaaccaaacaaaccatcctctccctccctctctccccgctcgcttcttgcaactctcccgtaaatctgcacaggcgcagcgcggcatttaatgctctccaacctttggtctctgcctgcccccaaacgctcccccattccgtccactcccctctctccccaccaagcaccagcccacggatgcggtcgcgaccaccgcggcaaggtcgaatccatggctagagctagcagaagcagaagcagaagccgcgggctcggcgcttgagccctcgatcctcgggggtcccggttccttctccctgcattgatcgcgtcactcgacgcgagaaggcgagcaaagaggggaaaaaaaggaggatcctttcccgtgtttcttctgtcgattctgcggttctttgcaagtggcaatgaggcggcatgggtggcagctcccgtaccaccctctccaggtggtggccgtgtccgtcttcctggcgctggcgttcgcgttctacgtcttcttcgcacccttcgtcgggaggaaagtgttccagtacgtggtcatggggctatacactccgctggtattatgtgtcttctttctatacatctggtgtgccgcagcaaacccagcagatccaggggtcttcaaatcaaagaagtatctgagcttgtacggaagcggcaaacacaagcatctgaaggaatccagaaagacttcttcagatgctcggttacaaatagagggaactagagaaaaacaagagcatgaggtcgcagcatctagcgagaggtcaattactcaatacaaggacaataatccatcttgcttgagttcaaccctctctccttctctccttctattctaccctctctcttttgttttctcctgctgccaaccacatgaaagttcctctgagcagcaagccaccgaggaagggatgtttttctgcagcctatgtgaagttcaggtgttgaagtatagtaagcattgcagagtttgtgacaaatgtgttgatggttttgatcatcactgcaggtggctcaacaattgcattggaagaagaaactatagaaggttttttattctaatgtcaactgccgttatcttggtctccatggtttgtgcaatttgggccagcttatcctacaatcagcaattggagtattggtgctagtgctatgctttgttgagcgaaaggaattctctatgcaaattgtttcaaagcttggaagcagcttctctgtagtgccttttgttattgtggtggcatcatgtaccatcctagccatggtcgcttcactgcctgttgctcaacttctttttttccacattcttctgatcaagaagggaatcagtacctatgactacatcattgccctgcgagagcaagagcaagatgatctgagtgggcagcagagtccacagatgtctcgtgtaagctcctacaccggactcagcagtgctagttcctttggtccacttcgtcgtggttcatggtgcactccgccaaggctgtttcttgaggatcaggtgtgaaccgtacatccttaggcttcttgaattattaaacagataatgttcattcccaggctgactctttatttatatgtcacatgggtagtatatctggcgaatggaagttaagttggtcacttttctaacagtcatgctaactctgagtttctaactgataactaacactagtgtcttgcacatctaactggtagcaatttcacatataagactcatcatgagctgtacgtacgattaaaaaaaagaaacatttcacatctgccgattaactcactactgacatgaagttactgaatcttctagtttgatgttattccatcggaggctgcttcttcgcataattctgctacgaagaggaaagaagaccaggggaagaggaaaaagggctcaggggccgtgaaaataagcccatgggcattagctcgtcttaacgctgaagaagtttcgagggttgctgcagaggcacggaataagtccaaagttttagtgccaatcagaaaagatgactattcacgaggccacgaaacagatagtagctatggaggcaccagcagtggtaggatcgatctaggacccgatagcaagaggagaacaaacagaagaggaagacagcccagtgatctctttctcaaacctgttgcaaagatatctacagatgctattgattctgccagcagcgacatgtccaatttagcaccattgcaacttgaggcacggagcgccttccatcccagcagggctgcatcctctgtgaatgttggtgggtcatctccagatagcagcttggattcgcctgacctgcatctgtacagagtctcagctgtctcatcgtctggagccgaagacttgcagctgacagctctcactgctccaggaagcacttcacatcaagggattcaactgtcgagatcgaccagcgatgggtatgaagcgtcagggggtgaagacagcgaccgcattccgtcacagatagtgcaccgctcgtcaaactgggcaagcatcatcctcaactctgaccagagtgcgtcctcgtctggcattcttgtgccgaagaacagattgtcctgaattcagataaatgaagattgtaaatgatcaaccaagaacgggaggttccagtatctgagctttgttttcaatgtcgaatcttgttgcagggatggcttgatactgcgcaaatcattaatttttttattagtttctgaatcgctaggtaggcaagtgtctgaatttcttccgtggggtgttcaggtgcttgtaattttgctgtcagacgacaatgaactgatttgtttagaggttggtaccttggatcaaatgcctgattagttggtgattgttcttgtggttgacttgtcggctctgacggcatgtacttatatgctgcaataggcaacgagcattcagaaagtactacatccatcctagaaaaaaatgccattatagaagactgtaatatttt

SEQ ID NO: 70289 - DNA, 4630 bp, Zea Mays
atggcgctcttccgcaagttcttcctcaagaagaccccggatcggctgctcgagatctccgaccgcgtctacgtgttcgactgctgcttctcgactgattccatgggtgaggatgagtaccgggattacttgagcggcattgttgcgcagttgcaggaattttttccggacgcatcatttatggtatccaatttttggtctggggacaaaagaagccgaatttcagacatattatctgagtatgacatgacagtaatggactacccacaacagtatgaagggtgtccattgcttcagcttgagatgatccaccatttcttgaaatcatgtgaaaattggctatcggtggaaggtcagcataatatgcttttgatgcattgtgagagagggggttggccagttcttgcattcatgttggctggactgcttttgtatcgcaaaacatacactggtgagcagaagacactagaaatggtctataagcaggctcgaagggactttatacaacagttttttcccttgaatcctcagccttcacatttgagatatttgcactatataacaagacaaggaggtggttcagaatggcctcctattagcagacccctcatcttggattcagtagttctccatgttgttccacggtttgacgtagatggtggttgtaggccatatttgcgtgtgcatgggcaagactcaagccccggtaacaagagtgcaaaagtcctttatgagatgccaaaaacaagcaagcatcttccacattatggacaggcagaagtccctataaaactaagtgtgttttgccgtgtttatggagatgtggtccttgaattcatccatattggcgataatatagagcataaggaaacaatgttccgcatcatgttcaacactgcattcgttcaatcaaacatccttgcgctgaatcgtgatgatattgatgttgcttggaatgtgaataatcagttcccaagggacttccgggctgagacaggtacatttttcggaccctgattcattcaaacctgctgctaccgtcgaggagatagctgatgatggagatgagactgatgttgcttcggtagacacaggagaggagttttatgaagcagaggaggattggcatgatgctagaaaagaccaagaaactcgatcaactgatggtggaatatcattagatgacgttgcagatggtggggtggcaactgaagaaaggagcagcctagaaaagcaccaattcaatgagggtgtgaagattggtgtctcccagaatttaggtagcatgaatgagaaaggggcaagtgcacctaccccaacttttgacaaccaggaaggtttgcagcagcctcgtgaagttcttgcaaatggtaaactaagcagcactaatggccaagagaacagtgatgtgcatgatatacaggtggttgctacatctgttgattcagagggacacaagtttggatctacctgtcaggaggacatgaaaggtgtaattgcacaaactttagtcaccacagttgatccaagttgcagtgatgaaattgaatgccaggctaatgaacaaacaaaaatatcggaataccctgatttggactacactgcttttggttctcctagaagtttgtcacgtacaaatggtgatacccacttgagaactacaaaaaatgaagggttgcagaacggtgatatcaagattatcactgagaacacaataagtatggacaacgatctagtgatctatgaagagaaaactatagttgtcaatggtaacactgtacaggaagtaaagaatattgtcaatgaaaagagcattgcagccaagatagacaaaccaattattgagagtaggaactcactgaacaacaacaatggcaagattcaaatcgctaaaccttctgatacatctaatggcaaattggatgggtgtagattagaatcttgccttgaggaagccctacctacaaagaaaaccactgtccatgacaggattgttgtcttaccagccactgatgtaggaactgagataaaaaccaagcaagaggggcttggtgacaagcaggattttgcacccccacccccacccccacctcttgcttcacgtgcaggtccaccaccacctccgcctcctccaggtgctcgctctggacctccacctcctccgccccctccaggtgcacgaccaggagctccaccaccaccacctcctccaggttcacggacaggagctccaccaccaccgcctcctccaggagctccacctcccccacccccacctggaggtggtggaagaggacctccaccacctcctgcacctagagggcatcttggtggtcctcctccacctccaccaccaagtggacgtgcaccaggtgtgccacctccacctagagcaccaggtgtgccgccaccaccaggaaataatccatccttaggcagaggacgtggggctgtacgccctctgggatcagcttatggggctgctgcctcacgtaagtcaacattgaagccattacactgggttaaagtgacaagggcccttcaaggtagtctgtgggaagaattgcagcgcaacgatgactcacagagtgtttcagagtttgatatatcagaacttgagagcctttttcctgcagctgttccgaagtccgatgacagctcaaaatctgaacgtagaaaatcacttggatcaaaaccagaaaaagtgcacctaattgagttgaggagggcgaataacacagagatcatgctaacaaaagttaagatgccactctcggatttggtgagtgcagctctggcgcttgatcaatctaccttggatgttgatcaagtggagaatctcataaagttctgtcctacaaaagaagaaatggaacttctcaagaattacaccggagacaaacaaaatcttgggaaatgtgaacagttcttcttagaattgatgaaagtgcctagaatggagtcaaaactgcgagtattctccttcaagatccagtttggttcacaagttgctgatcttagaagaagcttgaatatcatcgactcttcatgtaatgagatccgaacttctctcaagttgaaagaaataatgaagaaaatccttctccttgggaataccctgaaccagggaactgctagaggtgctgcagttggcttccggttggacagtcttctaaaacttacagatacccgggcaacaaataataagatgacactaatgcactacctctgcaaggtacttgctgcaagatctccacagcttttaaacttctatgtggatcttgttagcttagatgctgcatcaaagatacaactaaaaatgttggctgaggaaatgcaagcagttagtaaagggctggaaaaagttcaccttgagtatgatgcttcagaaagggatggtccagtatctgaaatttttcgtgagaaactgaaagagttcaccgacaatgctggagctgatgtgcagtcgttatcttcattgttttctgaagtgggtaaaaaggctgatgcgttgattaagtattttggtgaggatcctgttcgctgcccctttgaacaagtaatctctaccctcttaacatttgtaacaacatttcgaaaagcacatgaggagaacctgaagcaagctgagcttgagaagaaaaaagctgaaaaagaggcagaagcagagaaggccaagaacgcacaattaactggcaaaaatgactctaaaccatcaaatccaagacggcaagctaaacaaaccttagagaggacaaggtctgcaagcagacgaggaagagatgttgggtgataacccgaatggtcagtaattttctgtgcttctgatctgctcgcgaggctaatggacgaccgctgggcaagagaagtttcatggacggacgctggcatccgtcgggtgcagcgcgatcgcatcaaagaaaactctacaggccacccttcaacggtctcactggagaatgccgacgtctgtttttatccatgtcggccatcagggtccagtgctaacttctgactgctgtaaagaattgctaacactgacgctaactccattctttcttttcttttttcatgttacttttccattctttctaacaacggtggccaagtacagccatggcttcgaaaaactaccgcctggtgcttaggtggaaaattgtaaaaaataggcatctgggtgaaaaaaaggtatggagataatctaggtggcaaagagtatcaggagtaaatatgtgatgcaaactcagccagtagtttagctgtaaagttttgtagtgagtgtgtattgccgccactttgtattctatgatcatgaagcagtgaaggcggcgttttctttacgatacgtagtcagatagccttgtcggctacgtgtcgcctgtgtacgtgtgatatatgtgctgtcaattgctgttatgattcaaccttgataaaattaggcatgattcaaatgcatcttttgttagcgtcctaaattgattttagttgaaaataaatagaaatagagtctgtaaaaatgagagtccattgtcacctcaatggctctgtagaaggactagaattcttgttcaagaaactaagagcattttcgaccacgccttaaactagtggtttaaaatgaaatataggg

SEQ ID NO: 70290 - DNA, 4661 bp, Zea Mays
atggcgctcttccgcaagttcttcctcaagaagaccccggatcggctgctcgagatctccgaccgcgtctacggtataatgctcgcactccccgtcgacctggttcgtgcggtgttcgactgctgcttctcgactgattccatgggtgaggatgagtaccgggattacttgagcggcattgttgcgcagttgcaggaattttttccggacgcatcatttatggtatccaatttttggtctggggacaaaagaagccgaatttcagacatattatctgagtatgacatgacagtaatggactacccacaacagtatgaagggtgtccattgcttcagcttgagatgatccaccatttcttgaaatcatgtgaaaattggctatcggtggaaggtcagcataatatgcttttgatgcattgtgagagagggggttggccagttcttgcattcatgttggctggactgcttttgtatcgcaaaacatacactggtgagcagaagacactagaaatggtctataagcaggctcgaagggactttatacaacagttttttcccttgaatcctcagccttcacatttgagatatttgcactatataacaagacaaggaggtggttcagaatggcctcctattagcagacccctcatcttggattcagtagttctccatgttgttccacggtttgacgtagatggtggttgtaggccatatttgcgtgtgcatgggcaagactcaagccccggtaacaagagtgcaaaagtcctttatgagatgccaaaaacaagcaagcatcttccacattatggacagaagtccctataaaactaagtgtgttttgccgtgtttatggagatgtggtccttgaattcatccatattggcgataatatagagcataaggaaacaatgttccgcatcatgttcaacactgcattcgttcaatcaaacatccttgcgctgaatcgtgatgatattgatgttgcttggaatgtgaataatcagttcccaagggacttccgggctgaggtacatttttcggaccctgattcattcaaacctgctgctaccgtcgaggagatagctgatgatggagatgagactgatgttgcttcggtagacacaggagaggagttttatgaagcagaggaggattggcatgatgctagaaaagaccaagaaactcgatcaactgatggtggaatatcattagatgacgttgcagatggtggggtggcaactgaagaaaggagcagcctagaaaagcaccaattcaatgagggtgtgaagattggtgtctcccagaatttaggtagcatgaatgagaaaggggcaagtgcacctaccccaacttttgacaaccaggaaggtttgcagcagcctcgtgaagttcttgcaaatggtaaactaagcagcactaatggccaagagaacagtgatgtgcatgatatacaggtggttgctacatctgttgattcagagggacacaagtttggatctacctgtcaggaggacatgaaaggtgtaattgcacaaactttagtcaccacagttgatccaagttgcagtgatgaaattgaatgccaggctaatgaacaaacaaaaatatcggaataccctgatttggactacactgcttttggttctcctagaagtttgtcacgtacaaatggtgatacccacttgagaactacaaaaaatgaagggttgcagaacggtgatatcaagattatcactgagaacacaataagtatggacaacgatctagtgatctatgaagagaaaactatagttgtcaatggtaacactgtacaggaagtaaagaatattgtcaatgaaaagagcattgcagccaagatagacaaaccaattattgagagtaggaactcactgaacaacaacaatggcaagattcaaatcgctaaaccttctgatacatctaatggcaaattggatgggtgtagattagaatcttgccttgaggaagccctacctacaaagaaaaccactgtccatgacaggattgttgtcttaccagccactgatgtaggaactgagataaaaaccaagcaagaggggcttggtgacaagcaggattttgcacccccacccccacccccacctcttgcttcacgtgcaggtccaccaccacctccgcctcctccaggtgctcgctctggacctccacctcctccgccccctccaggtgcacgaccaggagctccaccaccaccacctcctccaggttcacggacaggagctccaccaccaccgcctcctccaggagctccacctcccccacccccacctggaggtggtggaagaggacctccaccacctcctgcacctagagggcatcttggtggtcctcctccacctccaccaccaagtggacgtgcaccaggtgtgccacctccacctagagcaccaggtgtgccgccaccaccaggaaataatccatccttaggcagaggacgtggggctgtacgccctctgggatcagcttatggggctgctgcctcacgtaagtcaacattgaagccattacactgggttaaagtgacaagggcccttcaaggtagtctgtgggaagaattgcagcgcaacgatgactcacagagtgtttcagagtttgatatatcagaacttgagagcctttttcctgcagctgttccgaagtccgatgacagctcaaaatctgaacgtagaaaatcacttggatcaaaaccagaaaaagtgcacctaattgagttgaggagggcgaataacacagagatcatgctaacaaaagttaagatgccactctcggatttggtgagtgcagctctggcgcttgatcaatctaccttggatgttgatcaagtggagaatctcataaagttctgtcctacaaaagaagaaatggaacttctcaagaattacaccggagacaaacaaaatcttgggaaatgtgaacagttcttcttagaattgatgaaagtgcctagaatggagtcaaaactgcgagtattctccttcaagatccagtttggttcacaagttgctgatcttagaagaagcttgaatatcatcgactcttcatgtaatgagatccgaacttctctcaagttgaaagaaataatgaagaaaatccttctccttgggaataccctgaaccagggaactgctagaggtgctgcagttggcttccggttggacagtcttctaaaacttacagatacccgggcaacaaataataagatgacactaatgcactacctctgcaaggtacttgctgcaagatctccacagcttttaaacttctatgtggatcttgttagcttagatgctgcatcaaagatacaactaaaaatgttggctgaggaaatgcaagcagttagtaaagggctggaaaaagttcaccttgagtatgatgcttcagaaagggatggtccagtatctgaaatttttcgtgagaaactgaaagagttcaccgacaatgctggagctgatgtgcagtcgttatcttcattgttttctgaagtgggtaaaaaggctgatgcgttgattaagtattttggtgaggatcctgttcgctgcccctttgaacaagtaatctctaccctcttaacatttgtaacaacatttcgaaaagcacatgaggagaacctgaagcaagctgagcttgagaagaaaaaagctgaaaaagaggcagaagcagagaaggccaagaacgcacaattaactggcaaaaatgactctaaaccatcaaatccaagacggcaagctaaacaaaccttagagaggacaaggtctgcaagcagacgaggaagagatgttgggtgataacccgaatggtcagtaattttctgtgcttctgatctgctcgcgaggctaatggacgaccgctgggcaagagaagtttcatggacggacgctggcatccgtcgggtgcagcgcgatcgcatcaaagaaaactctacaggccacccttcaacggtctcactggagaatgccgacgtctgtttttatccatgtcggccatcagggtccagtgctaacttctgactgctgtaaagaattgctaacactgacgctaactccattctttcttttcttttttcatgttacttttccattctttctaacaacggtggccaagtacagccatggcttcgaaaaactaccgcctggtgcttaggtggaaaattgtaaaaaataggcatctgggtgaaaaaaaggtatggagataatctaggtggcaaagagtatcaggagtaaatatgtgatgcaaactcagccagtagtttagctgtaaagttttgtagtgagtgtgtattgccgccactttgtattctatgatcatgaagcagtgaaggcggcgttttctttacgatacgtagtcagatagccttgtcggctacgtgtcgcctgtgtacgtgtgatatatgtgctgtcaattgctgttatgattcaaccttgataaaattaggcatgattcaaatgcatcttttgttagcgtcctaaattgattttagttgaaaataaatagaaatagagtctgtaaaaatgagagtccattgtcacctcaatggctctgtagaaggactagaattcttgttcaagaaactaagagcattttcgaccacgccttaaactagtggtttaaaatgaaatataggg

SEQ ID NO: 70291 - DNA, 4653 bp, Zea Mays
cgccggccgagaggcggcggcagcgggggcggaggaggagcaggaggagggggagggcgaggaggatggcgctcttccgcaagttcttcctcaagaagaccccggatcggctgctcgagatctccgaccgcgtctacggtataatgctcgcactccccgtcgacctggttcgtgcggtgttcgactgctgcttctcgactgattccatgggtgaggatgagtaccgggattacttgagcggcattgttgcgcagttgcaggaattttttccggacgcatcatttatggtatccaatttttggtctggggacaaaagaagccgaatttcagacatattatctgagtatgacatgacagtaatggactacccacaacagtatgaagggtgtccattgcttcagcttgagatgatccaccatttcttgaaatcatgtgaaaattggctatcggtggaaggtcagcataatatgcttttgatgcattgtgagagagggggttggccagttcttgcattcatgttggctggactgcttttgtatcgcaaaacatacactggtgagcagaagacactagaaatggtctataagcaggctcgaagggactttatacaacagttttttcccttgaatcctcagccttcacatttgagatatttgcactatataacaagacaaggaggtggttcagaatggcctcctattagcagacccctcatcttggattcagtagttctccatgttgttccacggtttgacgtagatggtggttgtaggccatatttgcgtgtgcatgggcaagactcaagccccggtaacaagagtgcaaaagtcctttatgagatgccaaaaacaagcaagcatcttccacattatggacaggcagaagtccctataaaactaagtgtgttttgccgtgtttatggagatgtggtccttgaattcatccatattggcgataatatagagcataaggaaacaatgttccgcatcatgttcaacactgcattcgttcaatcaaacatccttgcgctgaatcgtgatgatattgatgttgcttggaatgtgaataatcagttcccaagggacttccgggctgaggtacatttttcggaccctgattcattcaaacctgctgctaccgtcgaggagatagctgatgatggagatgagactgatgttgcttcggtagacacaggagaggagttttatgaagcagaggaggattggcatgatgctagaaaagaccaagaaactcgatcaactgatggtggaatatcattagatgacgttgcagatggtggggtggcaactgaagaaaggagcagcctagaaaagcaccaattcaatgagggtgtgaagattggtgtctcccagaatttaggtagcatgaatgagaaaggggcaagtgcacctaccccaacttttgacaaccaggaaggtttgcagcagcctcgtgaagttcttgcaaatggtaaactaagcagcactaatggccaagagaacagtgatgtgcatgatatacaggtggttgctacatctgttgattcagagggacacaagtttggatctacctgtcaggaggacatgaaaggtgtaattgcacaaactttagtcaccacagttgatccaagttgcagtgatgaaattgaatgccaggctaatgaacaaacaaaaatatcggaataccctgatttggactacactgcttttggttctcctagaagtttgtcacgtacaaatggtgatacccacttgagaactacaaaaaatgaagggttgcagaacggtgatatcaagattatcactgagaacacaataagtatggacaacgatctagtgatctatgaagagaaaactatagttgtcaatggtaacactgtacaggaagtaaagaatattgtcaatgaaaagagcattgcagccaagatagacaaaccaattattgagagtaggaactcactgaacaacaacaatggcaagattcaaatcgctaaaccttctgatacatctaatggcaaattggatgggtgtagattagaatcttgccttgaggaagccctacctacaaagaaaaccactgtccatgacaggattgttgtcttaccagccactgatgtaggaactgagataaaaaccaagcaagaggggcttggtgacaagcaggattttggtatagttcttcctcaaagtcgaacagtagccagggctaggagtccaaggcttgaaagtgatgaccgagggcaaatccctgataaagctgtgtcatcagtattgaagaagatggcagtaggcaatgcaaagatggaagagcaaccaaagcttgccaaaccaaaaacaatacgtagatggatctcaccaaagaaggaatctgatgctacctctgtgcataggccatctcaccctccatctagatacgacagttcaccagctgcactggctattcgatccatgcctacagatgttaagatcagtgcagtaaatgatgcacctttattatcattgaaacaaccatatggctgcaactttacacgagaagtaacatctgcactgtctgcttcatcgcctccacaacaatccttgttaccaggtgcacaaattgcatcaagaaaccagtgtttcagagtttgatatatcagaacttgagagcctttttcctgcagctgttccgaagtccgatgacagctcaaaatctgaacgtagaaaatcacttggatcaaaaccagaaaaagtgcacctaattgagttgaggagggcgaataacacagagatcatgctaacaaaagttaagatgccactctcggatttggtgagtgcagctctggcgcttgatcaatctaccttggatgttgatcaagtggagaatctcataaagttctgtcctacaaaagaagaaatggaacttctcaagaattacaccggagacaaacaaaatcttgggaaatgtgaacagttcttcttagaattgatgaaagtgcctagaatggagtcaaaactgcgagtattctccttcaagatccagtttggttcacaagttgctgatcttagaagaagcttgaatatcatcgactcttcatgtaatgagatccgaacttctctcaagttgaaagaaataatgaagaaaatccttctccttgggaataccctgaaccagggaactgctagaggtgctgcagttggcttccggttggacagtcttctaaaacttacagatacccgggcaacaaataataagatgacactaatgcactacctctgcaaggtacttgctgcaagatctccacagcttttaaacttctatgtggatcttgttagcttagatgctgcatcaaagatacaactaaaaatgttggctgaggaaatgcaagcagttagtaaagggctggaaaaagttcaccttgagtatgatgcttcagaaagggatggtccagtatctgaaatttttcgtgagaaactgaaagagttcaccgacaatgctggagctgatgtgcagtcgttatcttcattgttttctgaagtgggtaaaaaggctgatgcgttgattaagtattttggtgaggatcctgttcgctgcccctttgaacaagtaatctctaccctcttaacatttgtaacaacatttcgaaaagcacatgaggagaacctgaagcaagctgagcttgagaagaaaaaagctgaaaaagaggcagaagcagagaaggccaagaacgcacaattaactggcaaaaatgactctaaaccatcaaatccaagacggcaagctaaacaaaccttagagaggacaaggtctgcaagcagacgaggaagagatgttgggtgataacccgaatggtcagtaattttctgtgcttctgatctgctcgcgaggctaatggacgaccgctgggcaagagaagtttcatggacggacgctggcatccgtcgggtgcagcgcgatcgcatcaaagaaaactctacaggccacccttcaacggtctcactggagaatgccgacgtctgtttttatccatgtcggccatcagggtccagtgctaacttctgactgctgtaaagaattgctaacactgacgctaactccattctttcttttcttttttcatgttacttttccattctttctaacaacggtggccaagtacagccatggcttcgaaaaactaccgcctggtgcttaggtggaaaattgtaaaaaataggcatctgggtgaaaaaaaggtatggagataatctaggtggcaaagagtatcaggagtaaatatgtgatgcaaactcagccagtagtttagctgtaaagttttgtagtgagtgtgtattgccgccactttgtattctatgatcatgaagcagtgaaggcggcgttttctttacgatacgtagtcagatagccttgtcggctacgtgtcgcctgtgtacgtgtgatatatgtgctgtcaattgctgttatgattcaaccttgataaaattaggcatgattcaaatgcatcttttgttagcgtcctaaattgattttagttgaaaataaatagaaatagagtctgtaaaaatgagagtccattgtcacctcaatggctctgtagaaggactagaattcttgttcaagaaactaagagcattttcgaccacgccttaaactagtggtttaaaatgaaatataggg

SEQ ID NO: 70292 - DNA, 4538 bp, Zea Mays
tgaggaggcacagcagctcggcgggcgccggccgagaggcggcggcagcgggggcggaggaggagcaggaggagggggagggcgaggaggatggcgctcttccgcaagttcttcctcaagaagaccccggatcggctgctcgagatctccgaccgcgtctacgtgttcgactgctgcttctcgactgattccatgggtgaggatgagtaccgggattacttgagcggcattgttgcgcagttgcaggaattttttccggacgcatcatttatggtatccaatttttggtctggggacaaaagaagccgaatttcagacatattatctgagtatgacatgacagtaatggactacccacaacagtatgaagggtgtccattgcttcagcttgagatgatccaccatttcttgaaatcatgtgaaaattggctatcggtggaaggtcagcataatatgcttttgatgcattgtgagagagggggttggccagttcttgcattcatgttggctggactgcttttgtatcgcaaaacatacactggtgagcagaagacactagaaatggtctataagcaggctcgaagggactttatacaacagttttttcccttgaatcctcagccttcacatttgagatatttgcactatataacaagacaaggaggtggttcagaatggcctcctattagcagacccctcatcttggattcagtagttctccatgttgttccacggtttgacgtagatggtggttgtaggccatatttgcgtgtgcatgggcaagactcaagccccggtaacaagagtgcaaaagtcctttatgagatgccaaaaacaagcaagcatcttccacattatggacaggcagaagtccctataaaactaagtgtgttttgccgtgtttatggagatgtggtccttgaattcatccatattggcgataatatagagcataaggaaacaatgttccgcatcatgttcaacactgcattcgttcaatcaaacatccttgcgctgaatcgtgatgatattgatgttgcttggaatgtgaataatcagttcccaagggacttccgggctgaggtacatttttcggaccctgattcattcaaacctgctgctaccgtcgaggagatagctgatgatggagatgagactgatgttgcttcggtagacacaggagaggagttttatgaagcagaggaggattggcatgatgctagaaaagaccaagaaactcgatcaactgatggtggaatatcattagatgacgttgcagatggtggggtggcaactgaagaaaggagcagcctagaaaagcaccaattcaatgagggtgtgaagattggtgtctcccagaatttaggtagcatgaatgagaaaggggcaagtgcacctaccccaacttttgacaaccaggaaggtttgcagcagcctcgtgaagttcttgcaaatggtaaactaagcagcactaatggccaagagaacagtgatgtgcatgatatacaggtggttgctacatctgttgattcagagggacacaagtttggatctacctgtcaggaggacatgaaaggtgtaattgcacaaactttagtcaccacagttgatccaagttgcagtgatgaaattgaatgccaggctaatgaacaaacaaaaatatcggaataccctgatttggactacactgcttttggttctcctagaagtttgtcacgtacaaatggtgatacccacttgagaactacaaaaaatgaagggttgcagaacggtgatatcaagattatcactgagaacacaataagtatggacaacgatctagtgatctatgaagagaaaactatagttgtcaatggtaacactgtacaggaagtaaagaatattgtcaatgaaaagagcattgcagccaagatagacaaaccaattattgagagtaggaactcactgaacaacaacaatggcaagattcaaatcgctaaaccttctgatacatctaatggcaaattggatgggtgtagattagaatcttgccttgaggaagccctacctacaaagaaaaccactgtccatgacaggattgttgtcttaccagccactgatgtaggaactgagataaaaaccaagcaagaggggcttggtgacaagcaggattttggtatagttcttcctcaaagtcgaacagtagccagggctaggagtccaaggcttgaaagtgatgaccgagggcaaatccctgataaagctgtgtcatcagtattgaagaagatggcagtaggcaatgcaaagatggaagagcaaccaaagcttgccaaaccaaaaacaatacgtagatggatctcaccaaagaaggaatctgatgctacctctgtgcataggccatctcaccctccatctagatacgacagttcaccagctgcactggctattcgatccatgcctacagatgttaagatcagtgcagtaaatgatgcacctttattatcattgaaacaaccatatggctgcaactttacacgagaagtaacatctgcactgtctgcttcatcgcctccacaacaatccttgttaccagtgtttcagagtttgatatatcagaacttgagagcctttttcctgcagctgttccgaagtccgatgacagctcaaaatctgaacgtagaaaatcacttggatcaaaaccagaaaaagtgcacctaattgagttgaggagggcgaataacacagagatcatgctaacaaaagttaagatgccactctcggatttggtgagtgcagctctggcgcttgatcaatctaccttggatgttgatcaagtggagaatctcataaagttctgtcctacaaaagaagaaatggaacttctcaagaattacaccggagacaaacaaaatcttgggaaatgtgaacagttcttcttagaattgatgaaagtgcctagaatggagtcaaaactgcgagtattctccttcaagatccagtttggttcacaagttgctgatcttagaagaagcttgaatatcatcgactcttcatgtaatgagatccgaacttctctcaagttgaaagaaataatgaagaaaatccttctccttgggaataccctgaaccagggaactgctagaggtgctgcagttggcttccggttggacagtcttctaaaacttacagatacccgggcaacaaataataagatgacactaatgcactacctctgcaaggtacttgctgcaagatctccacagcttttaaacttctatgtggatcttgttagcttagatgctgcatcaaagatacaactaaaaatgttggctgaggaaatgcaagcagttagtaaagggctggaaaaagttcaccttgagtatgatgcttcagaaagggatggtccagtatctgaaatttttcgtgagaaactgaaagagttcaccgacaatgctggagctgatgtgcagtcgttatcttcattgttttctgaagtgggtaaaaaggctgatgcgttgattaagtattttgcacatgaggagaacctgaagcaagctgagcttgagaagaaaaaagctgaaaaagaggcagaagcagagaaggccaagaacgcacaattaactggcaaaaatgactctaaaccatcaaatccaagacggcaagctaaacaaaccttagagaggacaaggtctgcaagcagacgaggaagagatgttgggtgataacccgaatggtcagtaattttctgtgcttctgatctgctcgcgaggctaatggacgaccgctgggcaagagaagtttcatggacggacgctggcatccgtcgggtgcagcgcgatcgcatcaaagaaaactctacaggccacccttcaacggtctcactggagaatgccgacgtctgtttttatccatgtcggccatcagggtccagtgctaacttctgactgctgtaaagaattgctaacactgacgctaactccattctttcttttcttttttcatgttacttttccattctttctaacaacggtggccaagtacagccatggcttcgaaaaactaccgcctggtgcttaggtggaaaattgtaaaaaataggcatctgggtgaaaaaaaggtatggagataatctaggtggcaaagagtatcaggagtaaatatgtgatgcaaactcagccagtagtttagctgtaaagttttgtagtgagtgtgtattgccgccactttgtattctatgatcatgaagcagtgaaggcggcgttttctttacgatacgtagtcagatagccttgtcggctacgtgtcgcctgtgtacgtgtgatatatgtgctgtcaattgctgttatgattcaaccttgataaaattaggcatgattcaaatgcatcttttgttagcgtcctaaattgattttagttgaaaataaatagaaatagagtctgtaaaaatgagagtccattgtcacctcaatggctctgtagaaggactagaattcttgttcaagaaactaagagcattttcgaccacgccttaaactagtggtttaaaatgaaatataggg

SEQ ID NO: 70293 - DNA, 4665 bp, Zea Mays
tgaggaggcacagcagctcggcgggcgccggccgagaggcggcggcagcgggggcggaggaggagcaggaggagggggagggcgaggaggatggcgctcttccgcaagttcttcctcaagaagaccccggatcggctgctcgagatctccgaccgcgtctacggtataatgctcgcactccccgtcgacctggttcgtgcggtgttcgactgctgcttctcgactgattccatgggtgaggatgagtaccgggattacttgagcggcattgttgcgcagttgcaggaattttttccggacgcatcatttatggtatccaatttttggtctggggacaaaagaagccgaatttcagacatattatctgagtatgacatgacagtaatggactacccacaacagtatgaagggtgtccattgcttcagcttgagatgatccaccatttcttgaaatcatgtgaaaattggctatcggtggaaggtcagcataatatgcttttgatgcattgtgagagagggggttggccagttcttgcattcatgttggctggactgcttttgtatcgcaaaacatacactggtgagcagaagacactagaaatggtctataagcaggctcgaagggactttatacaacagttttttcccttgaatcctcagccttcacatttgagatatttgcactatataacaagacaaggaggtggttcagaatggcctcctattagcagacccctcatcttggattcagtagttctccatgttgttccacggtttgacgtagatggtggttgtaggccatatttgcgtgtgcatgggcaagactcaagccccggtaacaagagtgcaaaagtcctttatgagatgccaaaaacaagcaagcatcttccacattatggacaggcagaagtccctataaaactaagtgtgttttgccgtgtttatggagatgtggtccttgaattcatccatattggcgataatatagagcataaggaaacaatgttccgcatcatgttcaacactgcattcgttcaatcaaacatccttgcgctgaatcgtgatgatattgatgttgcttggaatgtgaataatcagttcccaagggacttccgggctgaggtacatttttcggaccctgattcattcaaacctgctgctaccgtcgaggagatagctgatgatggagatgagactgatgttgcttcggtagacacaggagaggagttttatgaagcagaggaggattggcatgatgctagaaaagaccaagaaactcgatcaactgatggtggaatatcattagatgacgttgcagatggtggggtggcaactgaagaaaggagcagcctagaaaagcaccaattcaatgagggtgtgaagattggtgtctcccagaatttaggtagcatgaatgagaaaggggcaagtgcacctaccccaacttttgacaaccaggaaggtttgcagcagcctcgtgaagttcttgcaaatggtaaactaagcagcactaatggccaagagaacagtgatgtgcatgatatacaggtggttgctacatctgttgattcagagggacacaagtttggatctacctgtcaggaggacatgaaaggtgtaattgcacaaactttagtcaccacagttgatccaagttgcagtgatgaaattgaatgccaggctaatgaacaaacaaaaatatcggaataccctgatttggactacactgcttttggttctcctagaagtttgtcacgtacaaatggtgatacccacttgagaactacaaaaaatgaagggttgcagaacggtgatatcaagattatcactgagaacacaataagtatggacaacgatctagtgatctatgaagagaaaactatagttgtcaatggtaacactgtacaggaagtaaagaatattgtcaatgaaaagagcattgcagccaagatagacaaaccaattattgagagtaggaactcactgaacaacaacaatggcaagattcaaatcgctaaaccttctgatacatctaatggcaaattggatgggtgtagattagaatcttgccttgaggaagccctacctacaaagaaaaccactgtccatgacaggattgttgtcttaccagccactgatgtaggaactgagataaaaaccaagcaagaggggcttggtgacaagcaggattttgcacccccacccccacccccacctcttgcttcacgtgcaggtccaccaccacctccgcctcctccaggagctccaccaccaccgcctcctccaggagctccacctcccccacccccacctggaggtggtggaagaggacctccaccacctcctgcacctagagggcatcttggtggtcctcctccacctccaccaccaagtggacgtgcaccaggtgtgccacctccacctagagcaccaggtgtgccgccaccaccaggaaataatccatccttaggcagaggacgtggggctgtacgccctctgggatcagcttatggggctgctgcctcacgtaagtcaacattgaagccattacactgggttaaagtgacaagggcccttcaaggtagtctgtgggaagaattgcagcgcaacgatgactcacagagtgtttcagagtttgatatatcagaacttgagagcctttttcctgcagctgttccgaagtccgatgacagctcaaaatctgaacgtagaaaatcacttggatcaaaaccagaaaaagtgcacctaattgagttgaggagggcgaataacacagagatcatgctaacaaaagttaagatgccactctcggatttggtgagtgcagctctggcgcttgatcaatctaccttggatgttgatcaagtggagaatctcataaagttctgtcctacaaaagaagaaatggaacttctcaagaattacaccggagacaaacaaaatcttgggaaatgtgaacagttcttcttagaattgatgaaagtgcctagaatggagtcaaaactgcgagtattctccttcaagatccagtttggttcacaagttgctgatcttagaagaagcttgaatatcatcgactcttcatgtaatgagatccgaacttctctcaagttgaaagaaataatgaagaaaatccttctccttgggaataccctgaaccagggaactgctagaggtgctgcagttggcttccggttggacagtcttctaaaacttacagatacccgggcaacaaataataagatgacactaatgcactacctctgcaaggtacttgctgcaagatctccacagcttttaaacttctatgtggatcttgttagcttagatgctgcatcaaagatacaactaaaaatgttggctgaggaaatgcaagcagttagtaaagggctggaaaaagttcaccttgagtatgatgcttcagaaagggatggtccagtatctgaaatttttcgtgagaaactgaaagagttcaccgacaatgctggagctgatgtgcagtcgttatcttcattgttttctgaagtgggtaaaaaggctgatgcgttgattaagtattttggtgaggatcctgttcgctgcccctttgaacaagtaatctctaccctcttaacatttgtaacaacatttcgaaaagcacatgaggagaacctgaagcaagctgagcttgagaagaaaaaagctgaaaaagaggcagaagcagagaaggccaagaacgcacaattaactggcaaaaatgactctaaaccatcaaatccaagacggcaagctaaacaaaccttagagaggacaaggtctgcaagcagacgaggaagagatgttgggtgataacccgaatggtcagtaattttctgtgcttctgatctgctcgcgaggctaatggacgaccgctgggcaagagaagtttcatggacggacgctggcatccgtcgggtgcagcgcgatcgcatcaaagaaaactctacaggccacccttcaacggtctcactggagaatgccgacgtctgtttttatccatgtcggccatcagggtccagtgctaacttctgactgctgtaaagaattgctaacactgacgctaactccattctttcttttcttttttcatgttacttttccattctttctaacaacggtggccaagtacagccatggcttcgaaaaactaccgcctggtgcttaggtggaaaattgtaaaaaataggcatctgggtgaaaaaaaggtatggagataatctaggtggcaaagagtatcaggagtaaatatgtgatgcaaactcagccagtagtttagctgtaaagttttgtagtgagtgtgtattgccgccactttgtattctatgatcatgaagcagtgaaggcggcgttttctttacgatacgtagtcagatagccttgtcggctacgtgtcgcctgtgtacgtgtgatatatgtgctgtcaattgctgttatgattcaaccttgataaaattaggcatgattcaaatgcatcttttgttagcgtcctaaattgattttagttgaaaataaatagaaatagagtctgtaaaaatgagagtccattgtcacctcaatggctctgtagaaggactagaattcttgttcaagaaactaagagcattttcgaccacgccttaaactagtggtttaaaatgaaatataggg

SEQ ID NO: 70294 - DNA, 5019 bp, Zea Mays
aagaaaaagagagggggaagagttaaagctaagcgaggagaaaggctgcagtaagcagaggaagaggcgtcccaatcccacggtgcctcgacctcgacctcgaccgcctcccgggctcccacgcccacccatccccaccaccggctccttgctgctgcgctccaccctccgccgcggagccctaggcggagctgcggatcccgagatccccggcgtcgccgccccggagctcgccgccggcggcgggcgcggcccccctcatgcctttggcgccccgatcggagccgacgaccggtggccgcctgaggaggcacagcagctcggcgggcgccggccgagaggcggcggcagcgggggcggaggaggagcaggaggagggggagggcgaggaggatggcgctcttccgcaagttcttcctcaagaagaccccggatcggctgctcgagatctccgaccgcgtctacgtgttcgactgctgcttctcgactgattccatgggtgaggatgagtaccgggattacttgagcggcattgttgcgcagttgcaggaattttttccggacgcatcatttatggtatccaatttttggtctggggacaaaagaagccgaatttcagacatattatctgagtatgacatgacagtaatggactacccacaacagtatgaagggtgtccattgcttcagcttgagatgatccaccatttcttgaaatcatgtgaaaattggctatcggtggaaggtcagcataatatgcttttgatgcattgtgagagagggggttggccagttcttgcattcatgttggctggactgcttttgtatcgcaaaacatacactggtgagcagaagacactagaaatggtctataagcaggctcgaagggactttatacaacagttttttcccttgaatcctcagccttcacatttgagatatttgcactatataacaagacaaggaggtggttcagaatggcctcctattagcagacccctcatcttggattcagtagttctccatgttgttccacggtttgacgtagatggtggttgtaggccatatttgcgtgtgcatgggcaagactcaagccccggtaacaagagtgcaaaagtcctttatgagatgccaaaaacaagcaagcatcttccacattatggacaggcagaagtccctataaaactaagtgtgttttgccgtgtttatggagatgtggtccttgaattcatccatattggcgataatatagagcataaggaaacaatgttccgcatcatgttcaacactgcattcgttcaatcaaacatccttgcgctgaatcgtgatgatattgatgttgcttggaatgtgaataatcagttcccaagggacttccgggctgaggtacatttttcggaccctgattcattcaaacctgctgctaccgtcgaggagatagctgatgatggagatgagactgatgttgcttcggtagacacaggagaggagttttatgaagcagaggaggattggcatgatgctagaaaagaccaagaaactcgatcaactgatggtggaatatcattagatgacgttgcagatggtggggtggcaactgaagaaaggagcagcctagaaaagcaccaattcaatgagggtgtgaagattggtgtctcccagaatttaggtagcatgaatgagaaaggggcaagtgcacctaccccaacttttgacaaccaggaaggtttgcagcagcctcgtgaagttcttgcaaatggtaaactaagcagcactaatggccaagagaacagtgatgtgcatgatatacaggtggttgctacatctgttgattcagagggacacaagtttggatctacctgtcaggaggacatgaaaggtgtaattgcacaaactttagtcaccacagttgatccaagttgcagtgatgaaattgaatgccaggctaatgaacaaacaaaaatatcggaataccctgatttggactacactgcttttggttctcctagaagtttgtcacgtacaaatggtgatacccacttgagaactacaaaaaatgaagggttgcagaacggtgatatcaagattatcactgagaacacaataagtatggacaacgatctagtgatctatgaagagaaaactatagttgtcaatggtaacactgtacaggaagtaaagaatattgtcaatgaaaagagcattgcagccaagatagacaaaccaattattgagagtaggaactcactgaacaacaacaatggcaagattcaaatcgctaaaccttctgatacatctaatggcaaattggatgggtgtagattagaatcttgccttgaggaagccctacctacaaagaaaaccactgtccatgacaggattgttgtcttaccagccactgatgtaggaactgagataaaaaccaagcaagaggggcttggtgacaagcaggattttgcacccccacccccacccccacctcttgcttcacgtgcaggtccaccaccacctccgcctcctccaggtgctcgctctggacctccacctcctccgccccctccaggtgcacgaccaggagctccaccaccaccacctcctccaggttcacggacaggagctccaccaccaccgcctcctccaggagctccacctcccccacccccacctggaggtggtggaagaggacctccaccacctcctgcacctagagggcatcttggtggtcctcctccacctccaccaccaagtggacgtgcaccaggtgtgccacctccacctagagcaccaggtgtgccgccaccaccaggaaataatccatccttaggcagaggacgtggggctgtacgccctctgggatcagcttatggggctgctgcctcacgtaagtcaacattgaagccattacactgggttaaagtgacaagggcccttcaaggtagtctgtgggaagaattgcagcgcaacgatgactcacagagtgtttcagagtttgatatatcagaacttgagagcctttttcctgcagctgttccgaagtccgatgacagctcaaaatctgaacgtagaaaatcacttggatcaaaaccagaaaaagtgcacctaattgagttgaggagggcgaataacacagagatcatgctaacaaaagttaagatgccactctcggatttggtgagtgcagctctggcgcttgatcaatctaccttggatgttgatcaagtggagaatctcataaagttctgtcctacaaaagaagaaatggaacttctcaagaattacaccggagacaaacaaaatcttgggaaatgtgaacagttcttcttagaattgatgaaagtgcctagaatggagtcaaaactgcgagtattctccttcaagatccagtttggttcacaagttgctgatcttagaagaagcttgaatatcatcgactcttcatgtaatgagatccgaacttctctcaagttgaaagaaataatgaagaaaatccttctccttgggaataccctgaaccagggaactgctagaggtgctgcagttggcttccggttggacagtcttctaaaacttacagatacccgggcaacaaataataagatgacactaatgcactacctctgcaaggtacttgctgcaagatctccacagcttttaaacttctatgtggatcttgttagcttagatgctgcatcaaagatacaactaaaaatgttggctgaggaaatgcaagcagttagtaaagggctggaaaaagttcaccttgagtatgatgcttcagaaagggatggtccagtatctgaaatttttcgtgagaaactgaaagagttcaccgacaatgctggagctgatgtgcagtcgttatcttcattgttttctgaagtgggtaaaaaggctgatgcgttgattaagtattttggtgaggatcctgttcgctgcccctttgaacaagtaatctctaccctcttaacatttgtaacaacatttcgaaaagcacatgaggagaacctgaagcaagctgagcttgagaagaaaaaagctgaaaaagaggcagaagcagagaaggccaagaacgcacaattaactggcaaaaatgactctaaaccatcaaatccaagacggcaagctaaacaaaccttagagaggacaaggtctgcaagcagacgaggaagagatgttgggtgataacccgaatggtcagtaattttctgtgcttctgatctgctcgcgaggctaatggacgaccgctgggcaagagaagtttcatggacggacgctggcatccgtcgggtgcagcgcgatcgcatcaaagaaaactctacaggccacccttcaacggtctcactggagaatgccgacgtctgtttttatccatgtcggccatcagggtccagtgctaacttctgactgctgtaaagaattgctaacactgacgctaactccattctttcttttcttttttcatgttacttttccattctttctaacaacggtggccaagtacagccatggcttcgaaaaactaccgcctggtgcttaggtggaaaattgtaaaaaataggcatctgggtgaaaaaaaggtatggagataatctaggtggcaaagagtatcaggagtaaatatgtgatgcaaactcagccagtagtttagctgtaaagttttgtagtgagtgtgtattgccgccactttgtattctatgatcatgaagcagtgaaggcggcgttttctttacgatacgtagtcagatagccttgtcggctacgtgtcgcctgtgtacgtgtgatatatgtgctgtcaattgctgttatgattcaaccttgataaaattaggcatgattcaaatgcatcttttgttagcgtcctaaattgattttagttgaaaataaatagaaatagagtctgtaaaaatgagagtccattgtcacctcaatggctctgtagaaggactagaattcttgttcaagaaactaagagcattttcgaccacgccttaaactagtggtttaaaatgaaatataggg

SEQ ID NO: 70295 - DNA, 4942 bp, Zea Mays
aagaaaaagagagggggaagagttaaagctaagcgaggagaaaggctgcagtaagcagaggaagaggcgtcccaatcccacggtgcctcgacctcgacctcgaccgcctcccgggctcccacgcccacccatccccaccaccggctccttgctgctgcgctccaccctccgccgcggagccctaggcggagctgcggatcccgagatccccggcgtcgccgccccggagctcgccgccggcggcgggcgcggcccccctcatgcctttggcgccccgatcggagccgacgaccggtggccgcctgaggaggcacagcagctcggcgggcgccggccgagaggcggcggcagcgggggcggaggaggagcaggaggagggggagggcgaggaggatggcgctcttccgcaagttcttcctcaagaagaccccggatcggctgctcgagatctccgaccgcgtctacgtgttcgactgctgcttctcgactgattccatgggtgaggatgagtaccgggattacttgagcggcattgttgcgcagttgcaggaattttttccggacgcatcatttatggtatccaatttttggtctggggacaaaagaagccgaatttcagacatattatctgagtatgacatgacagtaatggactacccacaacagtatgaagggtgtccattgcttcagcttgagatgatccaccatttcttgaaatcatgtgaaaattggctatcggtggaaggtcagcataatatgcttttgatgcattgtgagagagggggttggccagttcttgcattcatgttggctggactgcttttgtatcgcaaaacatacactggtgagcagaagacactagaaatggtctataagcaggctcgaagggactttatacaacagttttttcccttgaatcctcagccttcacatttgagatatttgcactatataacaagacaaggaggtggttcagaatggcctcctattagcagacccctcatcttggattcagtagttctccatgttgttccacggtttgacgtagatggtggttgtaggccatatttgcgtgtgcatgggcaagactcaagccccggtaacaagagtgcaaaagtcctttatgagatgccaaaaacaagcaagcatcttccacattatggacaggcagaagtccctataaaactaagtgtgttttgccgtgtttatggagatgtggtccttgaattcatccatattggcgataatatagagcataaggaaacaatgttccgcatcatgttcaacactgcattcgttcaatcaaacatccttgcgctgaatcgtgatgatattgatgttgcttggaatgtgaataatcagttcccaagggacttccgggctgaggtacatttttcggaccctgattcattcaaacctgctgctaccgtcgaggagatagctgatgatggagatgagactgatgttgcttcggtagacacaggagaggagttttatgaagcagaggaggattggcatgatgctagaaaagaccaagaaactcgatcaactgatggtggaatatcattagatgacgttgcagatggtggggtggcaactgaagaaaggagcagcctagaaaagcaccaattcaatgagggtgtgaagattggtgtctcccagaatttaggtagcatgaatgagaaaggggcaagtgcacctaccccaacttttgacaaccaggaaggtttgcagcagcctcgtgaagttcttgcaaatggtaaactaagcagcactaatggccaagagaacagtgatgtgcatgatatacaggtggttgctacatctgttgattcagagggacacaagtttggatctacctgtcaggaggacatgaaaggtgtaattgcacaaactttagtcaccacagttgatccaagttgcagtgatgaaattgaatgccaggctaatgaacaaacaaaaatatcggaataccctgatttggactacactgcttttggttctcctagaagtttgtcacgtacaaatggtgatacccacttgagaactacaaaaaatgaagggttgcagaacggtgatatcaagattatcactgagaacacaataagtatggacaacgatctagtgatctatgaagagaaaactatagttgtcaatggtaacactgtacaggaagtaaagaatattgtcaatgaaaagagcattgcagccaagatagacaaaccaattattgagagtaggaactcactgaacaacaacaatggcaagattcaaatcgctaaaccttctgatacatctaatggcaaattggatgggtgtagattagaatcttgccttgaggaagccctacctacaaagaaaaccactgtccatgacaggattgttgtcttaccagccactgatgtaggaactgagataaaaaccaagcaagaggggcttggtgacaagcaggattttggtatagttcttcctcaaagtcgaacagtagccagggctaggagtccaaggcttgaaagtgatgaccgagggcaaatccctgataaagctgtgtcatcagtattgaagaagatggcagtaggcaatgcaaagatggaagagcaaccaaagcttgccaaaccaaaaacaatacgtagatggatctcaccaaagaaggaatctgatgctacctctgtgcataggccatctcaccctccatctagatacgacagttcaccagctgcactggctattcgatccatgcctacagatgttaagatcagtgcagtaaatgatgcacctttattatcattgaaacaaccatatggctgcaactttacacgagaagtaacatctgcactgtctgcttcatcgcctccacaacaatccttgttaccaggtgcacaaattgcatcaagaaaccagtgtttcagagtttgatatatcagaacttgagagcctttttcctgcagctgttccgaagtccgatgacagctcaaaatctgaacgtagaaaatcacttggatcaaaaccagaaaaagtgcacctaattgagttgaggagggcgaataacacagagatcatgctaacaaaagttaagatgccactctcggatttggtgagtgcagctctggcgcttgatcaatctaccttggatgttgatcaagtggagaatctcataaagttctgtcctacaaaagaagaaatggaacttctcaagaattacaccggagacaaacaaaatcttgggaaatgtgaacagttcttcttagaattgatgaaagtgcctagaatggagtcaaaactgcgagtattctccttcaagatccagtttggttcacaagttgctgatcttagaagaagcttgaatatcatcgactcttcatgtaatgagatccgaacttctctcaagttgaaagaaataatgaagaaaatccttctccttgggaataccctgaaccagggaactgctagaggtgctgcagttggcttccggttggacagtcttctaaaacttacagatacccgggcaacaaataataagatgacactaatgcactacctctgcaaggtacttgctgcaagatctccacagcttttaaacttctatgtggatcttgttagcttagatgctgcatcaaagatacaactaaaaatgttggctgaggaaatgcaagcagttagtaaagggctggaaaaagttcaccttgagtatgatgcttcagaaagggatggtccagtatctgaaatttttcgtgagaaactgaaagagttcaccgacaatgctggagctgatgtgcagtcgttatcttcattgttttctgaagtgggtaaaaaggctgatgcgttgattaagtattttggtgaggatcctgttcgctgcccctttgaacaagtaatctctaccctcttaacatttgtaacaacatttcgaaaagcacatgaggagaacctgaagcaagctgagcttgagaagaaaaaagctgaaaaagaggcagaagcagagaaggccaagaacgcacaattaactggcaaaaatgactctaaaccatcaaatccaagacggcaagctaaacaaaccttagagaggacaaggtctgcaagcagacgaggaagagatgttgggtgataacccgaatggtcagtaattttctgtgcttctgatctgctcgcgaggctaatggacgaccgctgggcaagagaagtttcatggacggacgctggcatccgtcgggtgcagcgcgatcgcatcaaagaaaactctacaggccacccttcaacggtctcactggagaatgccgacgtctgtttttatccatgtcggccatcagggtccagtgctaacttctgactgctgtaaagaattgctaacactgacgctaactccattctttcttttcttttttcatgttacttttccattctttctaacaacggtggccaagtacagccatggcttcgaaaaactaccgcctggtgcttaggtggaaaattgtaaaaaataggcatctgggtgaaaaaaaggtatggagataatctaggtggcaaagagtatcaggagtaaatatgtgatgcaaactcagccagtagtttagctgtaaagttttgtagtgagtgtgtattgccgccactttgtattctatgatcatgaagcagtgaaggcggcgttttctttacgatacgtagtcagatagccttgtcggctacgtgtcgcctgtgtacgtgtgatatatgtgctgtcaattgctgttatgattcaaccttgataaaattaggcatgattcaaatgcatcttttgttagcgtcctaaattgattttagttgaaaataaatagaaatagagtctgtaaaaatgagagtccattgtcacctcaatggctctgtagaaggactagaattcttgttcaagaaactaagagcattttcgaccacgccttaaactagtggtttaaaatgaaatataggg

SEQ ID NO: 70296 - DNA, 4972 bp, Zea Mays
aagaaaaagagagggggaagagttaaagctaagcgaggagaaaggctgcagtaagcagaggaagaggcgtcccaatcccacggtgcctcgacctcgacctcgaccgcctcccgggctcccacgcccacccatccccaccaccggctccttgctgctgcgctccaccctccgccgcggagccctaggcggagctgcggatcccgagatccccggcgtcgccgccccggagctcgccgccggcggcgggcgcggcccccctcatgcctttggcgccccgatcggagccgacgaccggtggccgcctgaggaggcacagcagctcggcgggcgccggccgagaggcggcggcagcgggggcggaggaggagcaggaggagggggagggcgaggaggatggcgctcttccgcaagttcttcctcaagaagaccccggatcggctgctcgagatctccgaccgcgtctacgtgttcgactgctgcttctcgactgattccatgggtgaggatgagtaccgggattacttgagcggcattgttgcgcagttgcaggaattttttccggacgcatcatttatggtatccaatttttggtctggggacaaaagaagccgaatttcagacatattatctgagtatgacatgacagtaatggactacccacaacagtatgaagggtgtccattgcttcagcttgagatgatccaccatttcttgaaatcatgtgaaaattggctatcggtggaaggtcagcataatatgcttttgatgcattgtgagagagggggttggccagttcttgcattcatgttggctggactgcttttgtatcgcaaaacatacactggtgagcagaagacactagaaatggtctataagcaggctcgaagggactttatacaacagttttttcccttgaatcctcagccttcacatttgagatatttgcactatataacaagacaaggaggtggttcagaatggcctcctattagcagacccctcatcttggattcagtagttctccatgttgttccacggtttgacgtagatggtggttgtaggccatatttgcgtgtgcatgggcaagactcaagccccggtaacaagagtgcaaaagtcctttatgagatgccaaaaacaagcaagcatcttccacattatggacaggcagaagtccctataaaactaagtgtgttttgccgtgtttatggagatgtggtccttgaattcatccatattggcgataatatagagcataaggaaacaatgttccgcatcatgttcaacactgcattcgttcaatcaaacatccttgcgctgaatcgtgatgatattgatgttgcttggaatgtgaataatcagttcccaagggacttccgggctgaggtacatttttcggaccctgattcattcaaacctgctgctaccgtcgaggagatagctgatgatggagatgagactgatgttgcttcggtagacacaggagaggagttttatgaagcagaggaggattggcatgatgctagaaaagaccaagaaactcgatcaactgatggtggaatatcattagatgacgttgcagatggtggggtggcaactgaagaaaggagcagcctagaaaagcaccaattcaatgagggtgtgaagattggtgtctcccagaatttaggtagcatgaatgagaaaggggcaagtgcacctaccccaacttttgacaaccaggaaggtttgcagcagcctcgtgaagttcttgcaaatggtaaactaagcagcactaatggccaagagaacagtgatgtgcatgatatacaggtggttgctacatctgttgattcagagggacacaagtttggatctacctgtcaggaggacatgaaaggtgtaattgcacaaactttagtcaccacagttgatccaagttgcagtgatgaaattgaatgccaggctaatgaacaaacaaaaatatcggaataccctgatttggactacactgcttttggttctcctagaagtttgtcacgtacaaatggtgatacccacttgagaactacaaaaaatgaagggttgcagaacggtgatatcaagattatcactgagaacacaataagtatggacaacgatctagtgatctatgaagagaaaactatagttgtcaatggtaacactgtacaggaagtaaagaatattgtcaatgaaaagagcattgcagccaagatagacaaaccaattattgagagtaggaactcactgaacaacaacaatggcaagattcaaatcgctaaaccttctgatacatctaatggcaaattggatgggtgtagattagaatcttgccttgaggaagccctacctacaaagaaaaccactgtccatgacaggattgttgtcttaccagccactgatgtaggaactgagataaaaaccaagcaagaggggcttggtgacaagcaggattttgcacccccacccccacccccacctcttgcttcacgtgcaggtccaccaccacctccgcctcctccaggtgctcgctctggacctccacctcctccgccccctccaggtgcacgaccaggagctccaccaccaccacctcctccaggttcacggacaggagctccaccaccaccgcctcctccaggagctccacctcccccacccccacctggaggtggtggaagaggacctccaccacctcctgcacctagagggcatcttggtggtcctcctccacctccaccaccaagtggacgtgcaccaggtgtgccacctccacctagagcaccaggtgtgccgccaccaccaggaaataatccatccttaggcagaggacgtggggctgtacgccctctgggatcagcttatggggctgctgcctcacgtaagtcaacattgaagccattacactgggttaaagtgacaagggcccttcaaggtagtctgtgggaagaattgcagcgcaacgatgactcacagagctgttccgaagtccgatgacagctcaaaatctgaacgtagaaaatcacttggatcaaaaccagaaaaagtgcacctaattgagttgaggagggcgaataacacagagatcatgctaacaaaagttaagatgccactctcggatttggtgagtgcagctctggcgcttgatcaatctaccttggatgttgatcaagtggagaatctcataaagttctgtcctacaaaagaagaaatggaacttctcaagaattacaccggagacaaacaaaatcttgggaaatgtgaacagttcttcttagaattgatgaaagtgcctagaatggagtcaaaactgcgagtattctccttcaagatccagtttggttcacaagttgctgatcttagaagaagcttgaatatcatcgactcttcatgtaatgagatccgaacttctctcaagttgaaagaaataatgaagaaaatccttctccttgggaataccctgaaccagggaactgctagaggtgctgcagttggcttccggttggacagtcttctaaaacttacagatacccgggcaacaaataataagatgacactaatgcactacctctgcaaggtacttgctgcaagatctccacagcttttaaacttctatgtggatcttgttagcttagatgctgcatcaaagatacaactaaaaatgttggctgaggaaatgcaagcagttagtaaagggctggaaaaagttcaccttgagtatgatgcttcagaaagggatggtccagtatctgaaatttttcgtgagaaactgaaagagttcaccgacaatgctggagctgatgtgcagtcgttatcttcattgttttctgaagtgggtaaaaaggctgatgcgttgattaagtattttggtgaggatcctgttcgctgcccctttgaacaagtaatctctaccctcttaacatttgtaacaacatttcgaaaagcacatgaggagaacctgaagcaagctgagcttgagaagaaaaaagctgaaaaagaggcagaagcagagaaggccaagaacgcacaattaactggcaaaaatgactctaaaccatcaaatccaagacggcaagctaaacaaaccttagagaggacaaggtctgcaagcagacgaggaagagatgttgggtgataacccgaatggtcagtaattttctgtgcttctgatctgctcgcgaggctaatggacgaccgctgggcaagagaagtttcatggacggacgctggcatccgtcgggtgcagcgcgatcgcatcaaagaaaactctacaggccacccttcaacggtctcactggagaatgccgacgtctgtttttatccatgtcggccatcagggtccagtgctaacttctgactgctgtaaagaattgctaacactgacgctaactccattctttcttttcttttttcatgttacttttccattctttctaacaacggtggccaagtacagccatggcttcgaaaaactaccgcctggtgcttaggtggaaaattgtaaaaaataggcatctgggtgaaaaaaaggtatggagataatctaggtggcaaagagtatcaggagtaaatatgtgatgcaaactcagccagtagtttagctgtaaagttttgtagtgagtgtgtattgccgccactttgtattctatgatcatgaagcagtgaaggcggcgttttctttacgatacgtagtcagatagccttgtcggctacgtgtcgcctgtgtacgtgtgatatatgtgctgtcaattgctgttatgattcaaccttgataaaattaggcatgattcaaatgcatcttttgttagcgtcctaaattgattttagttgaaaataaatagaaatagagtctgtaaaaatgagagtccattgtcacctcaatggctctgtagaaggactagaattcttgttcaagaaactaagagcattttcgaccacgccttaaactagtggtttaaaatgaaatataggg

SEQ ID NO: 70297 - DNA, 3191 bp, Zea Mays
cttgccttgccgagtcgccttttaagccccccgcgctcgattttcccaccccacctgcgactgcgagctcgcccccgctcggccactctctccccttcccccgaggccccgatcgacctcccacccccccacctgctgccgtttctccagccagtttcggcgcattccctcgtccttttggctttcagttgcggcgtcgcggcagggcggtttcgcagcccttggctgccgcgccgtcgttcttgcccaagttccggtctcggcttcgccgccggtgattctggcggtttcgtgatacgtccccgcgcagcgcctgcggctgcggctgcgggcgcggaaaggcggcgcctttcccgctcgccgcaacgggtgctccgtgcgtccgctcggtcggtaacccctgcctctctcccgcccgcctcaacacccctcgcgatcacggggaagagtcgccgtcgtggcccgtcgacgggggagtgcggtcagtggtggtgtcaacaaagtctcgccctgctttatttttttctccatggtggctcgcgtcgcgtcgtaatcggaccattaattagtcttccagcctaggtcaatcccgggcctcacggcgtgttcttgactcgtgccgtgttcgacccgtgacgcctgtggttggcgggcggaatgggtcgagctgtctgctcttgattcttcgcaccgcggccaccggctcgcagcgcaatgctggtgtgagggcggaaggggtcaggcttgggagccgagaaggagccgactcttggtccgtgtccgtgcgtgagctcgacgtatggtcggtggcgctcggtggtgttcatagtgcgccgccgccatgggctgcgtcgcgtccaagaacgccgtctcggtgacgccggcggccgactcgtccggcgggctcagggaccggagccagccgcgcgcccaggggtctgctgccccgttgccgttgccggtgcccgtgccttccctgcgcagctcgtcgtccgcggcgaggaggccggagaaggtcaaggacgaagccgaggagccagggaaggccgtcgtcgccgtggcggccgcgtcccggagcttccggcttcggagcctgcggaagagcctcgagggcgagcaggtggctgccgggtggccgccgtggctcagcgccgtcgccggggaggccatccaggggtggatcccactcaaggccgactccttcgagaagctggagaaggttgggcaaggcacatacagcagtgtgttcagggcgagggaccttgacactggaaagatcgttgccttgaagaaggttcgattcgacaattttgagccagagagtgttagattcatggcaagggagatacagatattaagaagacttgatcatccaaatgtcatgaaactggaaggcttgattacttcccgactatcgtgcagcctttatctagtatttgaatacatggagcatgatcttgctggactttgctcctccccggacatcagattcactgaagcacagctcaagtgctacatgaaccagttactgtcaggactggagcattgtcattcacgccgtgtggttcatcgtgatatgaagggcgctaatctcctcgtgaataacgaaggggttctaaagatagctgattttggacttgcaaatttctttgatcccaacaaaaaccatcctctaaccagccgtgttgttactctgtggtatcgaccacctgaactgctactaggttcaactcactatgacgcagctgtcgatttgtggagtcttgggtgtgtatttgccgagatgtatcgtgggaaacctatcctgcagggaagaaccgaggtggaacaactacacaagatttttaagctatgcggttcacctgctgatgattattggaagaagtcgaaattgcctcatgcaacagtatttaaaccgcatcatccatatcccagcacccttcgagatgtttttaaagaggtaccagaaaatgccttgagtttactagaaactctcctatcggtggagccctacaagcgtggtactgcatctagtgctctttcttctgagtttttcaggacaaaaccttatgcttgtgaaccatcgagcttgcctaagtatgcacccaacaaggagatggacgcaaagctacgagatgatgcactcagaaggaaagctagtagcagagggcatggggcagaagcatcgaagaagtcttcaaggatcagcagagcagcaagagaacacactgcagtccctaagcagataaataacgcagaggaacccaaaaacaacgtgaacgcaaccagagatggcacaatactacaggatcgcacgaaactgtcactgaacggcgacgctaggctattcgcggacatacagccagtgccagcagcggctcaagtgaaaggaagctctcgtcacgctaagaacgagtcacgagaggaaatgcccttctcagggccactgagtgtcccttcctctagtggcttcgcatgggcggcggcccaaagaccgcaggaggaccgtgctctcgctaggtcacggaccagatccagctcaagaggccagtttcctgcagaggccgaccgggactgtactaggacccaagccaccacagagagtgctgctgccggcctcagagacataccacgcgtcggctccaaggtccgggagcgggagcctcacgacgcggcgaagcgcgcggtcctgaggaagtggtcgcagctagagcgcccggactcgtttgactcctgcgacacttaccactcccagaacttctcccacgccatgctcgttggggttgggggcggtgctctctcgtcgaagaacagcttcgagggcggtcatggtcatggtcatggtcaggaggagaaggccgagtactcggggcctttgttgccccagtcgcacaaggtcgacgagctgttgcagaagaacgaacgccagtgctctatccgttttggctgtacaaaagaaacagtagcggctgacgcggcagttgtgtagttggttggaaccgataagctggcagcaccacgtggtgcgagcgactgtagtaaacattacaggctggttggttcatggctaactacgacacactttgtctaacgttagttgttcgaattgaaaaactaatattagttaaaaatattagacagtaacttaaatagcgaaccaaaaagaaaatgagaagtaaaaaatccaataa

SEQ ID NO: 70298 - DNA, 2720 bp, Zea Mays
cttgccttgccgagtcgccttttaagccccccgcgctcgattttcccaccccacctgcgactgcgagctcgcccccgctcggccactctctccccttcccccgaggccccgatcgacctcccacccccccacctgctgccgtttctccagccagtttcggcgcattccctcgtccttttggctttcagttgcggcgtcgcggcagggcggtttcgcagcccttggctgccgcgccgtcgttcttgcccaagttccggtctcggcttcgccgccggtgattctggcggtttcgtgatacgtccccgcgcagcgcctgcggctgcggctgcgggcgcggaaaggcggcgcctttcccgctcgccgcaacgggtgctccgtgcgtccgctcggtcggtaacccctgcctctctcccgcccgcctcaacacccctcgcgatcacggggaagagtcgccgtcgtggcccgtcgacgggggagtgcggttgggcaaggcacatacagcagtgtgttcagggcgagggaccttgacactggaaagatcgttgccttgaagaaggttcgattcgacaattttgagccagagagtgttagattcatggcaagggagatacagatattaagaagacttgatcatccaaatgtcatgaaactggaaggcttgattacttcccgactatcgtgcagcctttatctagtatttgaatacatggagcatgatcttgctggactttgctcctccccggacatcagattcactgaagcacagctcaagtgctacatgaaccagttactgtcaggactggagcattgtcattcacgccgtgtggttcatcgtgatatgaagggcgctaatctcctcgtgaataacgaaggggttctaaagatagctgattttggacttgcaaatttctttgatcccaacaaaaaccatcctctaaccagccgtgttgttactctgtggtatcgaccacctgaactgctactaggttcaactcactatgacgcagctgtcgatttgtggagtcttgggtgtgtatttgccgagatgtatcgtgggaaacctatcctgcagggaagaaccgaggtggaacaactacacaagatttttaagctatgcggttcacctgctgatgattattggaagaagtcgaaattgcctcatgcaacagtatttaaaccgcatcatccatatcccagcacccttcgagatgtttttaaagaggtaccagaaaatgccttgagtttactagaaactctcctatcggtggagccctacaagcgtggtactgcatctagtgctctttcttctgagtttttcaggacaaaaccttatgcttgtgaaccatcgagcttgcctaagtatgcacccaacaaggagatggacgcaaagctacgagatgatgcactcagaaggaaagctagtagcagagggcatggggcagaagcatcgaagaagtcttcaaggatcagcagagcagcaagagaacacactgcagtccctaagcagataaataacgcagaggaacccaaaaacaacgtgaacgcaaccagagatggcacaatactacaggatcgcacgaaactgtcactgaacggcgacgctaggctattcgcggacatacagccagtgccagcagcggctcaagtgaaaggaagctctcgtcacgctaagaacgagtcacgagaggaaatgcccttctcagggccactgagtgtcccttcctctagtggcttcgcatgggcggcggcccaaagaccgcaggaggaccgtgctctcgctaggtcacggaccagatccagctcaagaggccagtttcctgcagaggccgaccgggactgtactaggacccaagccaccacagagagtgctgctgccggcctcagagacataccacgcgtcggctccaaggtccgggagcgggagcctcacgacgcggcgaagcgcgcggtcctgaggaagtggtcgcagctagagcgcccggactcgtttgactcctgcgacacttaccactcccagaacttctcccacgccatgctcgttggggttgggggcggtgctctctcgtcgaagaacagcttcgagggcggtcatggtcatggtcatggtcaggaggagaaggccgagtactcggggcctttgttgccccagtcgcacaaggtcgacgagctgttgcagaagaacgagcgccatatccggcaggctgttcgaacgtcatggttcaggagaggaggaagaaaggtggacaagtgaggaaaagcttgacggtttcctttccatggaagtgggggtgcccatgtctgatgggcctctggtgccagtctgggaagtggacaactggtgctgacgattccattgtttaactggaaacacaatggactttggtggtcccagctcacagcaaaattttagcctctttttttttcctggcgtgtgttgcagattgcccggagacgccagtgctctatccgttttggctgtacaaaagaaacagtagcggctgacgcggcagttgtgtagttggttggaaccgataagctggcagcaccacgtggtgcgagcgactgtagtaaacattacaggctggttggttcatggctaactacgacacactttgtctaacgttagttgttcgaattgaaaaactaatattagttaaaaatattagacagtaacttaaatagcgaaccaaaaagaaaatgagaagtaaaaaatccaataa

SEQ ID NO: 70299 - DNA, 2628 bp, Zea Mays
cttgccttgccgagtcgccttttaagccccccgcgctcgattttcccaccccacctgcgactgcgagctcgcccccgctcggccactctctccccttcccccgaggccccgatcgacctcccacccccccacctgctgccgtttctccagccagtttcggcgcattccctcgtccttttggctttcagttgcggcgtcgcggcagggcggtttcgcagcccttggctgccgcgccgtcgttcttgcccaagttccggtctcggcttcgccgccggtgattctggcggtttcgtgatacgtccccgcgcagcgcctgcggctgcggctgcgggcgcggaaaggcggcgcctttcccgctcgccgcaacgggtgctccgtgcgtccgctcggttgggcaaggcacatacagcagtgtgttcagggcgagggaccttgacactggaaagatcgttgccttgaagaaggttcgattcgacaattttgagccagagagtgttagattcatggcaagggagatacagatattaagaagacttgatcatccaaatgtcatgaaactggaaggcttgattacttcccgactatcgtgcagcctttatctagtatttgaatacatggagcatgatcttgctggactttgctcctccccggacatcagattcactgaagcacagctcaagtgctacatgaaccagttactgtcaggactggagcattgtcattcacgccgtgtggttcatcgtgatatgaagggcgctaatctcctcgtgaataacgaaggggttctaaagatagctgattttggacttgcaaatttctttgatcccaacaaaaaccatcctctaaccagccgtgttgttactctgtggtatcgaccacctgaactgctactaggttcaactcactatgacgcagctgtcgatttgtggagtcttgggtgtgtatttgccgagatgtatcgtgggaaacctatcctgcagggaagaaccgaggtggaacaactacacaagatttttaagctatgcggttcacctgctgatgattattggaagaagtcgaaattgcctcatgcaacagtatttaaaccgcatcatccatatcccagcacccttcgagatgtttttaaagaggtaccagaaaatgccttgagtttactagaaactctcctatcggtggagccctacaagcgtggtactgcatctagtgctctttcttctgagtttttcaggacaaaaccttatgcttgtgaaccatcgagcttgcctaagtatgcacccaacaaggagatggacgcaaagctacgagatgatgcactcagaaggaaagctagtagcagagggcatggggcagaagcatcgaagaagtcttcaaggatcagcagagcagcaagagaacacactgcagtccctaagcagataaataacgcagaggaacccaaaaacaacgtgaacgcaaccagagatggcacaatactacaggatcgcacgaaactgtcactgaacggcgacgctaggctattcgcggacatacagccagtgccagcagcggctcaagtgaaaggaagctctcgtcacgctaagaacgagtcacgagaggaaatgcccttctcagggccactgagtgtcccttcctctagtggcttcgcatgggcggcggcccaaagaccgcaggaggaccgtgctctcgctaggtcacggaccagatccagctcaagaggccagtttcctgcagaggccgaccgggactgtactaggacccaagccaccacagagagtgctgctgccggcctcagagacataccacgcgtcggctccaaggtccgggagcgggagcctcacgacgcggcgaagcgcgcggtcctgaggaagtggtcgcagctagagcgcccggactcgtttgactcctgcgacacttaccactcccagaacttctcccacgccatgctcgttggggttgggggcggtgctctctcgtcgaagaacagcttcgagggcggtcatggtcatggtcatggtcaggaggagaaggccgagtactcggggcctttgttgccccagtcgcacaaggtcgacgagctgttgcagaagaacgagcgccatatccggcaggctgttcgaacgtcatggttcaggagaggaggaagaaaggtggacaagtgaggaaaagcttgacggtttcctttccatggaagtgggggtgcccatgtctgatgggcctctggtgccagtctgggaagtggacaactggtgctgacgattccattgtttaactggaaacacaatggactttggtggtcccagctcacagcaaaattttagcctctttttttttcctggcgtgtgttgcagattgcccggagacgccagtgctctatccgttttggctgtacaaaagaaacagtagcggctgacgcggcagttgtgtagttggttggaaccgataagctggcagcaccacgtggtgcgagcgactgtagtaaacattacaggctggttggttcatggctaactacgacacactttgtctaacgttagttgttcgaattgaaaaactaatattagttaaaaatattagacagtaacttaaatagcgaaccaaaaagaaaatgagaagtaaaaaatccaataa

SEQ ID NO: 70300 - DNA, 1395 bp, Zea Mays
tcagccgtcgatagcgtgattcaaacgcgagaagatgccttcctctgcagccgtacacgcgtccgatcgcccgacaaaaccgacggttcagatacgctcaacatatgcacctgaaggcgtccaaccgacatgcgggcccgttttccagcaagccccaagagtcagtgaaacacaccgtcttctctcgggttggaagcggtgggtgcacctgctgttagcggtataaaaagcggaaaccctagcattcgccgcgagcttatcacttatcatccccatccgcacctctctccatctccctgctcctccgcctccttcttgatccagccaagccagggatcgccatgtcggactcggaggagcaccacttcgaatcgaaggccgacgccggagcgtccaagacctacccgcagcaggctggcaccgtccgtaagaacggcttcatcgtcatcaagaaccgcccctgcaaggttgtggaggtttctacctcaaagactggtaagcatggccatgccaaatgccactttgttgccatagacatattcaacgggaaaaagctcgaagatattgttccttcgtcacacaactgtgatgtgagccttcttacttcagatggcaacactaaggatgatcttagactcccaactgatgagactcttgtggcccagatcaaggaagggtttgaaagcggcaaggatcttgttgtgactgtccagtctgctatgggggaggagcagatctgcgcgctgaaggatgttggccccaagtaacttccctgccttggaatactgtatctcaaaacctaaatcgaaaaaagaagtgtatcaaggattgctacagagacatccatctggcttgagctggcttttgctatggcaaacacaagtgcagggatcgctgggtgttgcaccgtgtctgcattatgtggttacattctggaccctgtattttctatgcttttatgcccctactgtttagtattaattatcaataaatttgtttgggacggttgaattgcatgcattgcatgaggtttcttgttcgttatttgttttctcttgccatgcttccagtattggtgatggcagtttactcgtaattttttttgtacttgtttcgaaaactggtgggcagtttacccgcgcttgtgctccatccattgttctagtgttatccattcctcttttttcccccttcaaaatataaactataaagaagaaaatattatgacttacataaagaatcgttttagagaagcggtaccaaacatgactcgacggaaaattgctccaaaccaactattaactcgatgtttgtattttttttcttctctgccaaaacctgtcaacccgctttatggtaactttgcggtatatgttctcgaaagaaaactggtgt

SEQ ID NO: 70301 - DNA, 1153 bp, Zea Mays
tacagcggtagtaactagtaagactccataggactgttggtacgacacacacagttatggcttttggaagcaattatacccgacgggatttaaggagctaaaatccccttatattcaaaattgaatagcaaggggtttcagctcctctccggcggtatccttacttccaaacaagccctttaagttgctaattggcgcttcttattgctcaagttgcatccttctgccaagtttttccacaggatgcactgagtggagccagtgaacttcaatgcatggctctagtggtgttaacctcgaaagacagcccgttatcctggaggcgctgctggagatcagtagggccaaagacggtgccaggcgtgtataccccgcccttgggcaggttggcacgctggctcagcaggacgagggcgcactgcaccagcacgatcggagttgtgacgtaaccgacctcgggtcccgaaaccttggtgatcacctccttgtccggcttgcttcttccgagctccaacgagctatccacgttgctgtagccgtgaccgacaaaccacatcttgaacgaggcgctcttcacctcttcctcggtcgggccggctctgctgaacagcccagcggagaaaaactcagggtacttcagcaggagggacctgccgaaggagaagttggcgagcaggccgatgaagattccggtgaagatgaagcgcacaaggatcagcagggatctggaggcgatcttcacgccaaaatgggcaggtttgacagaagaccataatttcttcctatgatcagcgtactctggggtttcttctgcgccaggaaggccctcaggatgctcagtcaaggttgatagagttctcttcacgaccactgtgtcagcggaaggcagtttcatagcccacattcccagaggattgtgaccttcaatcagcgaccctttgggaggtggagggcctggaatctgcaaaaaagaataaatcttagcggtaatcaagattctatccagaaaagtgtcatctgaatcatgtgatgccattatgagatttccatccgagtaatcttaactactggatattcagtagtactcaagttgtacacaaatggttgtctagcaaagcagtcaatcctcatttcaaaatagatcatctcaggc

SEQ ID NO: 70302 - DNA, 2309 bp, Zea Mays
tcacaactcagctggtcatgtagactgctggcttgtagtttagtggagagatgatggcgtccaggtcaccacaggggcattggggcatgcaacgcagtgtaaattatctttgcagcccacgcacatgtttcaatttttaatttgtcatttttcaaaaaaatattcataacatggaagttgtattgtagatttcgatggaacctgcaacttttgtagataaaatgtttttttttattttaaatcgtttagatatccaaataatgtgctaaattttcagacaacaagaacaaaagggaaaacaaggtgagatggtagggacggatcgcagaataaatcgcacacaagaaaaaaaaacacgcgatgatggtgcggatagctagaaggtggtaattaaaacactaattaaatgcattgccacgcacgtgccaagaattcatacgagagcacaggactgctagaggaactctgaatttagttgcacatgcctatcacacgtgcagttgaattcctgggttcagatgaattctttactatactagaaaaggcagcgccctatcgggtgctataccagctcaactgaaaatagcttatggataaaacaagagaactgatggtagtatccttggatggctataccagttcgtgagcacccttggatggctaaccatgtcgatggtagtatcctttctagcagcttaccgagcatcaacaggcactgcaatactgcactccgatagcatgtgtttctgagatttggtatccctttgatagcatagccttgcgcatcagatggtttggattcatagcaaggccatatgtctgcaagatccatagccacaccaaaccgagatgaccggctctctgctggaagtacttcattcatgatttcctgctctccttttgcaatctccacatcatgggtagtcagcaagccctccttcgtaagcaggtcgacagaattgatatcatccctcaccaatatagtcaaccagccagtgatgtaaatcaaatgttgagccttgcttatagcatccaagatatctgtccagcacctatgtagctcacagttcttgccatcagcgagctggatctcggttctccggatgcccctcgcccagttacagtccttgcccacatcaaagaactgaggcttcacggggaggttggggacggagtaggcgccgcggttgaggtccattgtcgaacacttggttggcgtggtgacgagaacctgctcctcctctgcgtgcaccgccaactgtagaatagaaggagccagagatggtgccgcgtcgtccagaacagaatagctgttggcctcgatgtcgacgggaccacgctggacgagctccgtggtgaggtgaagcggtacggcggactcggccagcttctgcaccgccgcggctgcctccatggtcgcgcaacccttggccttgtccgtctcggccagtgcccgagcagccttagcgtcacggtacggctcgtccaccaccgcagcatgcgtcggtggtagcgcgaggtagggcagtagcagattccccacggtgagaaggaaaggggatggtgaggcggccgctcccatcgccgccatggcctcctcggcagaggagtcctcttcctcgttggtttccccggcacggaagggcggcggaatgaagcggtggaagctaggctcatcgtaggtgacagcgcgagtcctggcgctgctgtcggcgtcggagaactccattgtcgaacacttggtaggcgacttgctggtggtgttacagtcgacgaggactgtggccgacgaagtcccctcgttgtactctagtagcgcgagcacctcggcaatctcgtcgtcgttcggctcgtcgtagcagtcgtagaggacgggaggaggagcggactctgactcgaacgagccgaatagcgaggcgaaggaagaggaggtggaagcctgttcgccgccactgcccgccagcgccgcagtcaagcggaactccatgtgcgccatcccgacgagaatcgtctgcatcgccgcctccatggatatagagtgaacaggatgcctagttctgagaagccgttgtcatcgaggggcgatgaaggatcgatctggcaatggggaggaggtctgcgatggtagggtcggcgggtgtgcgacggcggatcgtcatggcggcgggggagcaggtctaggatgggagggatggaggtgggtgcgcgtctacgcgagggactgtgacgactgtatgcgacgactgtcgaaaactgtatttcgagtccgagcagaacgacacacgtgttgaagacagatgggctgtgag

SEQ ID NO: 70303 - DNA, 7683 bp, Zea Mays
cacacaaggatcggcgagctcttcttcttctcaaggatcactctcgatcccgcaaggaccaccacacactttggtgtctcttgctagcttttacaagcctccaaaactttggaggaagttcaatgggagtcaaaactccacgcgcaaatgaacacaaagatgaagcacacactatctctcgaaggatctcacaaggcactagtgctaaactcaattgagtagctctcttttgcttgctctctcttttgtggcacttgtgttggttgtagtggtctaaatcttgtgtataggatggatcaatgaatatatgtggttgggatggcttgagtatgtcaactagatgacttggaatgttgcttgggctcccacaccttgaagtggccggttggggtggtatttatagccaccaatcaaaaactagccgttggtgaaagctgtctatcgcatggtgcaccggacagtccggtgcacaccggacatgtccggtgcgccagccacgtcacccgaccgttagggttccgaccgttggagagctgacttctaggcccgcctggatgtccggtggcgcaccggacatgtactgtagagtgtccggtgcgccgtctcgcgcgtgcctgacttctgcgcgctctggcgcgcatttaatgcgcctgcaggtgaccgttggcgccgaagtagccgttgccccgctgtcacaccggacagtccggtgtacaccggacagtccggtgaattatagcggagcagccgaagcgaattcccgagactggcgagttcggagccgcgacttcttggagcaccggacactgtccggtgtacaccggacagtctggtgaattttagcgtgccggctccgagaattcccgaaggtgaagagtttgaagtcgaccttccctggtgcaccggacacagtccggtggtgcaccggacagtccggtgcaccagaccagggtgccttcggttggccctttgctcctttgtttgaacccaatacttggtctttttattggctaagtgtgaacctttggcacctgtataagttatacactagagcaaactagttagtccaattatttgtgttgggcaattcaaccaccaaaattagtataggaaataggtgtaagcctaattccctttcaatctccccctttttggtgattgatgccaacacaaaccaaagcaaatataaaagtgcataattgaactagtttgcataatgtaagtgcgaaggttgctttgaattgagccaatataaatacttacaagatatgcatggattgtttctttgtttttaacatattggaccacatttgcaccacatgttttgtttttgcaaattctttttgtaaatccttttcaaagttctttttgcaaaatagtcaaaggtaaatgaataagatttttgcgaagcattttcaagtttgaaattttctccccttgtttcaaatgcttttcctttgactaaacaaaactccctctcaaataaattcttctcttagtgttcaagagtgttttgagatatcaagttttgaaaatactacttgctccccctttagaacacaaagagataccaatttgaaatttaccaattgaaaatcactaattttaaaaatttggtgcggtccttttgctttgggccaatactttctccccctttggcatgaatcgccaaaaacggatatttggaatgaaatataggcccttttcctaactattttctcccctttggcagataaaacatatgagtgaagattataccaaagatggagagacattgtggagtgatggcgaagggtagataataccgatagagtagagtggaagctttgtcttcgccgaagactccaattccctttcaatgtacctatgacttggtttgaaattcacttgaaaacacatttagtcatagcatataaaagagatatgatcaagaggatatatcaaattaagcatgatcatagttctatataacatagattgctccccctaagtatgtgcatggagaggaacacatattttggccttaaatgccaattgcacataattaggttaatgaggacatatctatatcatacagattgtgaagtgcattgtgtcatagtataagtgtgatgctcatgacaatttatgcacttatgaaagcatgttgtaaacaatttaagcattttcccttaaggatttcaaagagacttaaggaccatccacctttgaaacaaaggcagcttatcctcgttacaaggttaagctttaagctctttgacaataaaagtacttcatctagtttttccagagatgcactaaagcaggaatgaattttgggaaatttaaactaggtatgaagcagggataatacatggacatgctttctcttcctttcatacaagatatgcaaagaatgtatagacaaggaagatttaggtacaagtttaaatgaaaggagaaagttttacctttttgtacctttacatagggacgctctcttcattgtgctttgtccttagtctttagatgcttaagacctatactcaatgacaatatatggaaatattttgcacaagagagagttctacaactagtgatcttttcaagttattgttagcatatatcaaatggatcacaagttgcataaatgtatcatgaattctccttttaacttagtgcatatcaagagagatatcgattgatagaatatacgacactaagaaatatgattgttgattgaagttattcaatgatcaaacaaataatagatgtgatcaagagaacaacaaacgcatgagattattaattaagcttaggataggagaatccagcaaatacttcatgagaaactcattctcatgcaagagactttatgaaatttctaagataaagtaatagtctcaacataatcaagatatagaaagaggctccccctaaagatatgcatcaggtatttgaatgaattgaaaggatgcatttactttaaagacaaatagagagaaacattatacatcttgatcaaggctcattagatttgtaataaacaacttgagcctagtattctcaatatgaaagggtttagaatactcacaaccacaccattgattgtttcgtagaagtaggtggtgttgttcttgatgttctcctctttcatttgagagtcctccctttgcagtggcttctttttcctttcaaacttattgaaaatactcaagaagaatgttagtaatacaagggagtatatagtgatggatgattccttttagataggaaataagcataattcatcatccatgagtcacatagacatgaagtaaattccttaacgttagtgcacattaacagagaagaggaatgagcacctttttaatcatttttgatcaatcaaaggaattttactttttcatattgaatttattatcatgacttagaagcgcatcaatatgagaatggatatagcaaaggcatgaattagattctgatggacaagcgcatttatgaatatgatattgaatgcatacttagttaattttggtccaataaagaatctattcctcacaagggtagaatatgataatttagattaaatacccattgagatgggaaccaaacttaaggagatgagttcccatacctttgcttttgcctttcttcctttgggtgaagatcaacccatgaggcttgtgcactttctttcttgtagattttcataatttgaactcaagagaaatgttagtagcaacacaagcactagtttccatttttgtaatcattttgataaggaatgagaagctagattactaaaacatggaaacttcatagcatgaactagattatccttagatgatgttatgctcaattttaactcctaaaacaagcataaataatcctttatgattatgggaatctaattcatgatatggaaagcgataaatgtgaaagaatcaaatccaatctaagtaagtagaagcacttcataagtcattggattgatttttctttttatgttagattacatgcttttccaaagagaaacctattctctataagtgagactacttgggttacttagataaaaatcattaatctcactattctagttatagagagagttttccttttataagtgtcctaaggatttgaattccttacatgacaccttattcttttaagaacatgaaatatctctctatatctagaatcatggcaacaacaagataattagaggaaagatatgccatgacatactagcaataaattaaagcatgtagattgccatagtatggaaatgatgaatgtgcaaactaccatatgagaggaaattcttcaaagaatggtaatatcaatttaaagacatttaaagtgcttcaatttttctatgtgactacacaagacacataagaaatgatattttaaatacttgcacttaaaagataagtgttaccatcctttggctttcctccatgttgtaggccttgatttttccgcataagataattctttatttcctacaacatcaataacttcctcgagatgatatgagtttaagatgtagtagtttgaagaataaccttgggtcaatcacggatatagattattgaagattgatagcttgagttgataagaatcgaatggactttctcaagcaccccaaggcttcatatcatcttcttttcctgcaaagcttgtcaagcatattttggtacccatcgcttgatgggtccatcacggttagtcaacaaagatctaggaacccaaaagtcctttgtgttagtactaggtaaactcattacctttctagcacaagttgcaattttgggttgcctagttacatgagaattaattgacaagttaggagtggaattgttaccaatgggacaatccttgcattgatgtcccttctttcggcatgtgtagcataggcgtttttcaagttttgaagttttcttctttccttgtttgttgcttgctacatggttagtaaaaactttcttttctaaccctatgccttttgttttaaatggggacaagatctaagcaagtgtcccttcttggagcatttaaaacaaagtctattatccttgttaataatcaagccatttttaatgtagggacatgacctaatcaagtgcccctcttcaaagcattcactacacctcttaatgtgaagtgtggcttgatcattaccttggatgttaccttttgtggaggcgtggttgaggcttttggaggaggtgttgaatttcatcttttgtttcttcctcttggcaatcctcaaatccttgacattttcttcaagggatgtagtgcatgccacggttgtttctgtctcaagcttcttcaccatgtgatcacggttatcttgagagggttgggcaatgcatttcccttttagttgagtcaagctcttctttagcctctcattttcttctttgagcttttgatatgaatcatcatttgttcctgcaaattctagctcaaaggaagatttgcttgtcgacaaacaacaagcattagcacatggtaatatagtatcaatttgaatacatgtgcatgattgaggttgttgggattttaagttttctatcacaacctcacgagcaatgtttaatatgatatgatcatccataagattttcatgagaacatagaagcatatcatatttttcttgaaaagctagattttcaacttttagcttttctacttggtccttaagcaaggtattcctatttactaattgagcaatacaatgtaaagcgttatcatgctcaattgaaacagtttcatacctttggaccaaatcaacatgagagcactttagctcctcatgttctttagtcaactcgtcaaagtgtagcatttttatggagagaatatcttctagcctttgacgagcttcgctttgctctctcgctctttctagaagtttgagcatgaccgccttatcttcttggcttaggcgagcgtagagatgcacaaagcttctttcttcctcctcatcctcatttgtgcttccgctgttattttcattagccacacaacacatgtgggaatcgaaatgggaagacaaaccttttggagaggtggattcatcgtttggtctccaccgttcattttcttcttccttgcaagggttagtatcacaaataccaaaggaagtagaagcacaaaatgaactatcatgtttggacttattaaatttgcttttaattctagtccaaatatcatgcacatcacaaatgggtttgtcatattttattatgaaggcatgataatcttctttgctgagggatttacttaagatgtcataagctagatagtttaagcgtatacatcttaaatcttcttcggaagcattttccctagcatagttaggaggaataatactcttgtctaaaatttgttctaattgtgggtctaccgctctaaaagcatttatcactctagtagaccatgaatcataattagaacaatccgaaagtaatatctcaagagttacctccttgttctcctgggtcttcttgttcttttgggatcttctacgagccatcacttcgagttgttagactcaagataaagtgcctagctccgataccaattgaaagtcgcctagagggggggtgaataggcggaacctgaaaattaaaactttatcccctaactagatcccttgattagtggttagaacaagatatacaaatatcggagaatagaaactaagttcttgcttgaaaagagtattgctaaataatgcgggagaggtaaatcaatacaactaataagttatagaataacaaagcaagaaggccttagatgagaagagcactaggacaagttctttcttgcaacgtgtggcttcactaaatggaaatttaacttgaagcgacaccaaatgatattggcaaagaatggagcaagaaaaacttagagtacgagaaaacaaacaaatcacaagcaataaacacaatggacacgagtgatttgttttatcgaggttcggccctcgaaggcctagtccccgttgaggagtccacttaaggacgggtatttttcaaccctttccctctctcccccgatcacacaaggattggcgagctcttcttcttctcaaggatcactctcgatcccgcaaggaccaccacacactttggtgtctcttgctagcttttacaagcctccaaaactttggaggaagttcaatgggagtcaaaactccacgtgcaaatgaacacaaagatgaagcacacactatctctcgaaggatctcacaaggcactagtgctaaactcaattgagtagctctcttttgcttgctctctcttttgtggcacttgtgttggttgtagtggtctaaatcttgtgtataggatggatcaatgaatatatgtggttgggagggcttgagtatgtcaactagatgacttggaatgttgcttgggctcccacaccttgaagtggccggttggggtggtatttatagccaccaatcaaaaactagccattggtgaaagctgtctgtcgcatggtgcaccggacagtccggtgcacaccggacatgtccggtgcgccagccacgtcacccgaccattagggttccgaccgttggagagctgacttctgggcccgcctggatgtccggtggcgcaccggacatgtactgtagagtgtccggtgcgccgtctcgcgcgtgcctgacttctg

SEQ ID NO: 70304 - DNA, 1149 bp, Zea Mays
atcgtaggcttctgtacgttcctagccatctcagctcgatcttcaagaaagaagaagcaaatagagcacacagtcgagtgtaaaccatccaaccaatcatggcttcgagttccaggagcaccgtgttttcacttctcctcctggtggcgctgctgctcagctgcagcggcatgagcagcgcggcgcggttgctggaagaggcgccgcccaaggaggagcacccacatcctgccgtgccggagctgccagaacctgagctgccgccgcaccctaccgacgtcgtgccgcctgagctgcccaaacccgagttgccaccgcacccggccgttgtccccgagctgccgaagcctgaggtgcctcatccggtgccggagcagccgaagcccgagctgacaccgcacccggcggccgtgccagagctcccgaaaccggaggtgccgcacccgacagccgtccctgagctcccgaaaccagaggtgccgcacccagtgccggagctgcccaagcccgaggtgccaccgcacccgacagccgtccctgagctcccgaaacctgaggtgccgtacccagtgccggagctgcccaagcccgagctgacaccgcacccggcggccgtgcccgagctgccgaagtctgaggtgccgcacccagtgccggagctgcccaagcccgagctgccaaagcctgaactccctcctcacccgaccgtgccaaagctgccgcacccagaggttccggaggtgccaaaccacgagctgccgcctctaccgaaagctgagctgccaccgaagccggagggccactacccggagccggaggcgaaaccatgagcggacgtacagtccgagactcggttatctgcacattttccctcatgcacacgtacgtgtctgttgtatagtagctatatatgatttgtgatgttgtgttcttccgtacgagtcatagagcttacatgtgatataagctagtagtacctatcaatttggatccatatgttatatgtatatctgaatgaataaagaattctagttgttatatttaaactgttgggagttattcgtgtgtgcataatatatatgtttatgatctttcttattgttgtttttttagtaaatactcatttgcatttttcttgttacgacgaat

SEQ ID NO: 70305 - DNA, 1744 bp, Zea Mays
caacgacctctgaaaccctaaccaaataaacccaccgttcgaaatccccaaaggccaaaaccctcctccgaacccttcccgccgccgccacccccaccccgaccggcaccaccacctcctagctccaccaccgtccgccgtcgccgcgatggaagacgacccgtcgcgccaggtgcgcgtgcgcttcgtcacaaagctgccacctccgctgcggacgccgcccgctgccatcgccgtccccgcggacctcactcgcatgggcctctccgagatcgtcaacagcctcctcgcagccgccgagccggaccaccagtcgcagcccttcgacttcatcgtgcagggcgagctcgtgcggctgccactccaagagtttctcctagccaagggcatctccgcggagagggtgcttgagctcgagtatgtgagagcagtggcgccaaggaagcaggaggaaccttgcccccatgatgactgggttagtgctgtggatggatcaaacccaggttttatattatctggatgctatgatggtcttgcaagattatggaaagatgcagcagtatgcacacaaattttggagggacacaatgatgcaattacttctaccagattcatcaataagggatctgaaaccgagggcagtctgcatgtagtgactggctcaaaggataggtcactgcggctatacaagtgtgatacatcagtcattatggactacccaaagcgggttggggcttacaaaattctccgcggccacacggcatcggttaaaagtatctccgcagacccttctggcgatatgctatgttctggatcctgggatggtaccatcaagttgtgggcagttgaaggatctgatgacgatgatgctgtttcattgaagaagagaaggatgaattctgattcatctggacctgaagagtctcagttagagggttcagccacttcaacacttctgggacatacacaaggtgtaactgctgttacctggcctgaacggaaaacgatatattcagcatcttgggatcattctgtaaggcagtgggatgttcaaacagtgaaagaaacatggaatatgttttgtgggaaggccttgaattgcttggactgtggaggtgagggttcttcattgattgctgctggtggttctgatcccgtgttgagggtatgggaccctcgcaaacctggaacattagctcctgtttttcagttctcctctcattcaagctggatcactgcttgtaaatggcatccgagttcttgtttccatttggtgtcatcttcctttgacgggaaagtgatgttgtgggatctaagaacagcatggccgctggcgtctgtggactcgcatgaagataaggttttatgtgcggactggtggaaaggggacagtgtgataagtggcggagctgattccaagctatgtatctcatctggtattcaaatcgtgtgatgaagttcttccttatggttctcgagcccatgttattgagattatatgggttgacaagccatttccagaagccaaataatgtcagatatgtctgggaagatacgcaacccttcagtcaagatcaagatacggcacagggctttaccagatgtgtatgcaaaagtgcatttcttgcataagctgatgaccactacacagattagcttaacaagaaagagctatcgtcgccaccgaaaaaatgaagcatagccaagttgacgaagtcctatcagattctacaaatcctaaaat

SEQ ID NO: 70306 - DNA, 554 bp, Zea Mays
atggcggagaggagaagcgcggcgagggcggcggccagcccaccagctcttgggggaaggagcaagcccgccgccgccgcggtgtccatgctagcgtccgtgcctggtcctaggccgccgaacccggtacccgcagttccggcggcagtgcctgtccccatgccagcgccggctgtgcctgtgcctgtggaggtccctgcggttcctcctcccatggtgcctgcagtggtcggggtcatggttccaacggcgctgggtgtggagggggcgcgtttacttgggtcgctggtggtgagggcggcggtgccggtgaagtcgcaggtggcgcccttggccttgttgttctggtagtagctgttggccgcccaggagcagtgcgccgcgacggtgttggggttgtagcacgcccccgtctcgtggatggagttgcagtccgcccccgacccgcacgcgtagtcgatcgtcttctgcagcgcggcctgagacgcgtcctgcctgcacacgcaccactctgcgccaaaaaaaaatgtttggttgtgtaaggtgtgtgctgc

SEQ ID NO: 70307 - DNA, 439 bp, Zea Mays
gatcggaatgttcggtgttcacgcgtgcatgcaagcatggtgaccggagaaggtgtcaggattcagcccaacaccagcaagctggaggacttggggttcagattcaagtacggagtggaggagacgctggactgcagcgtcgagtgcgccaagaggctgggagagctctagatgcatgctacacatgcatgcgcagcattggaattcagcgactgtgatacgagagctagtgatggttcgtcactttactacatcgaacggtggtcgtggaggatgacgaggtcgtcatgtcttgttgatgccggcactacatagagggtacgtgctgtgaggtcatgatccaatgcaccatcacagagacatccaccgtaggaactcggatccccatactcgtgtgcacgactaccattgttatgtgatgttgatgcaagtgaacttg

SEQ ID NO: 70308 - DNA, 1423 bp, Zea Mays
gtttagcagacaagggaggggactgagaactgggaagccgacgctccgctcggcaaagcctgaggcggcgacgacgcttgatcgcagcccgactcacaccgtgaggagttcgagggatggctttcgctagtagaattggaaatgcgctcaggagaactttagcgcccacttgctccccactgcttcagccagactttcttttgccaccgacgaaaccactctgaaggatgcattttctgagtttgggaatgtacttgaagctcggatcatcattgatcgggaatcagggaggtcaaggggttttggttttataacttttacatccactgaagaagcctcagctgcaatgacttccatggatggcaaggaacttcaaggacgaaatataagggtgaaccatgccaatgaacgcgctggtgggatacgcgggggtggtggattcggagctggtggtggttatggtggtggaggtggatatcctactggtgggtatggcggtggtggatatagttctggtggtggtggaggatatagttctggtggtggaggaggatatagttctgggggttatgctgccaatggttacggtgttggatctggcagtggctatggtggcacctacagcaatgcatcaggtggtggatattcaggcagtgatggttacggcaatggagctgccagtggtggttatgctaacaacttgagcagcggatacaacagcaatggaaggtacaataccattggcagttctgatggaaacactggtgggtacaattcgtctcccaacccgtatggtgtaggcaactacaatactggaggttcgagttccagtggtggaaccttaggagagtttggtggtggaggttttggtggcaacaactttgctggaaatgttaccggggggttttctggcggtggggcaagctatggagctaacaagccgcaatacaatggcgacgacgacctgctgggcgaaggtttcttcgacaaggaagtggcagagtaaatgagggagcggcgtactcgcacctctcgcacggtgctgcggatcatttttttcccccaaactgcatcagatcggtcgtgctaaatggagcaaatagaactttgcctgagctcattaggatatagaacataatcctttgttcttttttattctgtttcagacaaggcacgtatgttattttatccactcagctagcgtagctttactacaactatattgtgagaagaaaaagttgttatatcaactatattgtgagaagaaagagtggttatatcttctcaacaagaaatgatgatagttcaggtgctaattttcttagcctttgtattcttacgtactagatagaaatgtccaaagtccaatgtcgttcccaataataaaaataaaaataaaactctagcatatgctggaatagct

SEQ ID NO: 70309 - DNA, 1554 bp, Zea Mays
cggacattgcggtgtagtatagggtttagcagacaagggaggggactgagaactgggaagccgacgctccgctcggcaaagcctgaggcggcgacgacgcttgatcgcagcccgactcacaccgagctgcgtgcctgcgttcattcgaggcgtgcgctccttcaattttccctgacaccgatgcatagagttagatgaggagttcgagggatggctttcgctagtagaattggaaatgcgctcaggagaactttagcgcccacttgctccccactgcttcagccagtaagatgcatgtcctcttccaagctctttgttggaggactttcttttgccaccgacgaaaccactctgaaggatgcattttctgagtttgggaatgtacttgaagctcggatcatcattgatcgggaatcagggaggtcaaggggttttggttttataacttttacatccactgaagaagcctcagctgcaatgacttccatggatggcaaggaacttcaaggacgaaatataagggtgaaccatgccaatgaacgcgctggtgggatacgcgggggtggtggattcggagctggtggtggttatggtggtggaggtggatatcctactggtgggtatggcggtggtggatatagttctggtggtggtggaggatatagttctggtggtggaggaggatatagttctgggggttatgctgccaatggttacggtgttggatctggcagtggctatggtggcacctacagcaatgcatcaggtggtggatattcaggcagtgatggttacggcaatggagctgccagtggtggttatgctaacaacttgagcagcggatacaacagcaatggaaggtacaataccattggcagttctgatggaaacactggtgggtacaattcgtctcccaacccgtatggtgtaggcaactacaatactggaggttcgagttccagtggtggaaccttaggagagtttggtggtggaggttttggtggcaacaactttgctggaaatgttaccggggggttttctggcggtggggcaagctatggagctaacaagccgcaatacaatggcgacgacgacctgctgggcgaaggtttcttcgacaaggaagtggcagagtaaatgagggagcggcgtactcgcacctctcgcacggtgctgcggatcatttttttcccccaaactgcatcagatcggtcgtgctaaatggagcaaatagaactttgcctgagctcattaggatatagaacataatcctttgttcttttttattctgtttcagacaaggcacgtatgttattttatccactcagctagcgtagctttactacaactatattgtgagaagaaaaagttgttatatcaactatattgtgagaagaaagagtggttatatcttctcaacaagaaatgatgatagttcaggtgctaattttcttagcctttgtattcttacgtactagatagaaatgtccaaagtccaatgtcgttcccaataataaaaataaaaataaaactctagcatatgctggaatagct

SEQ ID NO: 70310 - DNA, 2132 bp, Zea Mays
atgtgataatagtgtctgtattctgataattggtaattgatatccctattaaccatacaactgtccttttatagatgtagaaatccacttgccccctgacaatagccccacaaggcagccactcctaacattccccaccgcttaaaatgcggcttgcccccaagccgcgaaccatgatcgtcaagttgccggagaccatgcacagtccaagcacgcaaactccataggtggaggccacggttgcttgaatcctccactgtgagcaattcctgctaagtcatgaaccaggggctttaccatggaaccaagctggtgattgtccgtctcaacgcagctgagcaccttgcccagttcttccaccatttcattcagtatgccctctacaccaaggatgttggcagttgatgaatactgcctcagcatcgatgagtagctccacttatcaggcttggaacgatcatccatggacgccttcatgtctccgaagatctcctcagcctcgtccacatagtcaatgtcgacgtacctggatagaagcatgttgtagagcatcacgtccattgcttcatccttcatcagccggtacacagccatggcatcctcatcgtagtgtgccctggtgtatgcatgcaggagacaacagtaggtcaccttgctgtgctgcacctgcttgtcaatcatctccctgtggatgctcttcaccacccaaggttgcaatgcgtggcccatgacatacaacattgtattgcacatgaccagtccagtccacctcctccgaatccggcggtcgccgccggccatcgccgcggcggatatggcgtccctccgtgtggtgtcggtgctagtgttggtggcaatggcggcgagcgcgggcggcgtcgcggcgcggcctctggtcgggggaggcggggcgtgggagaacagggcgccgctgcagacgtcgcgccccttcaacatcgcgcaccggggctccaacggggagctccccgaggagacggcggcggcctacgcgcgcgccatcgacgagggcgcggacttcatcgaggcggacatcgaggccaccaaggacggccacctcgtctgcttccacgacaccacgctcgacggcaccaccgacgtcgccgaccacccggagttcgccggccgccggcgcaccctcgaggtgcagtgggccaacgtcaccggatacttcgtcactgatttcacgctggtggagctcaagacgctgcgggcgaagcagcgatgggacttccgtgacaagtcccacaacggcgtctcgccgatcatcacgttcgacgagttcatcgacgtcgcgctgaacgccaagagggtggtcgggatctacccggagatgaagaaccctgtgttcatgaacaagcacgtgcagtgggctgacgggaagaagtacgaggacaagttcatcgcgacgctgaagaagtacggctacggcggcaagtacatgtcgccggcgtggcgcgccaggccggtcttcgtccagtctttcgcgccgacgtcgctggtccgcgcggccggcctcacggactcgccgctcgtcttcctcgtcgacgacgtgaccgtgcggaccgaggacaccaaccagccgtacgacgagatcacctcaggcgagcacctggactacatgaagaggtacgtggtgggcatcgggccctggaaggacacggtggtgccgccgaccaaggacaaccggctggccacgccgtcggacctcgtcgcaatggcgcacgcgagggggctgcaggtgcacccctacacgtaccgcaacgagaacaagttcctgcacttcgacttccggcaggacccctacgccgagtacgactactggatcaacgatgtcggcatcgatggcctcttcaccgacttcccggcgagcctccgccggttccaggagtggaccgccaagaacaaagactgattgtgaggttactgtcttggtagcgggcttctttgattcagtcattcagatcgtagctctggagatgttttcagagtgtagagacaattctttggtgttccttgttttaaatagccatatattttcttgattggatcagtaacacagttcttaccggttgttcatcataacagaccagtaatgtgatctcatcttcaca

SEQ ID NO: 70311 - DNA, 1083 bp, Zea Mays
ctcatccgactagctcccctcctacaaaaccaattttccgctcccatttacgccggatggaacaaaaaaaaatatcagcgagaaccctcgttttcttttttgtttagcagggggcacaagagcaagctgcaagcagattacagggccacgaagctcgcccctgctctgctctctatcttattagtccttcaattgggctttcctctgctgcggggttctgttctcgtctgggtttcagacgccagatttggagcagaacacaccggtccttggtttccttgccggctgcaatgttatggcgcttcggggggcccgcggaccgccgtgcggcggaggcgaccggaccggacggcgcggcctgccacgacgagccgcagccgctgccgctgcgcctgcgcacgctgcggtcgctgacgatgcggacggcgagcacgggcgacctccggagcgccatggcggaggacatgcccatggtgtcgtacaaggcggagggccccggcgggcgcaagacggacgggttcctgtacaagtacaggaagggggaggaggtgcggatcgtgtgcgtctgccacggcagcttcctcacgccggccgagttcgtggagcacgccggcggcggcgaggtccccaacccgctgcgccacatcgtcgtcaacccgcagcagtcggtgttcttgtagcgcccggccgcctcggcctcgcgatggagatggaggtggtggctgtaccgtcggagctgcagaagctggaaaccttctctctcttttttttttattttgctttgtttcttttctgtttgttttggtactcatgtagtcatgtggttgctattattattacaattattattaacagcaacagtagtaattaattatgctatcgattccctgcgttcttccactatctcgccgtcgtcgttgaagagtggcctgacgaggactggccactggggatgtccctgtgaattgtgtgcgaaaggtggcagccctccgtggtttgccgtgggacgacgcgatcgtggaaaaggttggacagcacatcgggtgcgaaggtgggcatcacacagtccatctccggcacgtt

SEQ ID NO: 70312 - DNA, 1926 bp, Zea Mays
ctaagtttgtataaagggccaagggcaatggccttggaagatgggagcccagctacttttactccacaagtgattgctaatgcatttgtcaaacaatactatcaaactcttcgatatgccagagaggatgcctataaattctataatgacaaaagtattcttggtcgaacagattctaatgggaaaatgatttgtgtaaccacaattgatgatatcaaggagcaacttgtgtctacagattgtgctgactgtttgatagagatcgagactgttgatgcacagccatcccatgtggatggtgtgatcattttggttgctggatattttacaacggctgttgtgaaacagaagtttatacaatcattttttctcgctccacaggaaaatagtggctattatgttttgaatgatacattcagacttactgggatttcattcgaggtgaaggtagttgcagctaaccatgataacaaaagcacacaaattaccaccctgcccaatgagccagaaatagattcatttaaggagagtgaagtgccaggtgtaccacctgcaggaaacattctcgtcaatgatggagttatcagcacctctgcaaatgttgtttctccagttaagaatgaccctgttgttgagacatgtgtgaaagtggttaacgaggatgttgtgaagatacctgtagccgctccagcttcaactcctgttacagctgaggaagttgttaacaaggattttgtgaagattcctgagtctgctccggctctcccttcatcagttgagaaggctgatccagctcctagtgcacctgttgagaaaggtgctccagctcttcgcgcaccagttgagaaggctgatccagctcctcgtgcaccagttgagaaggaagtaactaggaagacttatgcatcagttgttaaaatcccgagggaggacacacagcctgccccagctgccagaccctccaagcccaacctaaatataaagatggttcaaaatacggagaaaaatgtgtcctcaccatcgaaacctgctcatgctactgttaatgccctaccgggcgataagggtgttcctaaaaacaaatcacctgatgagccagggtactcaatttttgttaagaatttaccttttgaagcaactgttgaaatggtcgaacaagagttcagcaagtttggtgctattaaatctggtggtgtacaagtcaaatgccagcctgatcagttttgctttggctttgtcgaatttgagtctcagcaatccatgctagcagcaatcgagttgttgatggtgttatcacccgtggggatgacaatggcaacggcggtggcggtcggttccattctggcagaggtggtggttactatggggacggctacaagcggcagtggggcggtcagaacaacggctactacaacggcgcggataacatgaggaacgactactcaggtcgtgtccgtggaccgcaagggaacggccaccctcagaacggccacggctaccatcagaacggccacggctactactctgggaatggctaccaacagcgacgccccaacagcaatgggaacggactgagggtcgagcgcaacaatggcttcaggcagcaaggccctgcatctgcctagaccttgtcatttttgcagtccatccttgatacgaaagcagtggggatattttgatgtctataggtagatactttgtcatggctgaattttgttgtcgcggttgataagagcaatcgtgcgtcctttgactggaactgtaatgaggagtggagtcagtcgtgtcgcaaaggggaaaaaaacatctatcgaaatccctgctactcttttgtcgtgctgtcctcttcaagctgtctgcgtgtacatcggtttttctgcttagcaattggactgggcggagacaagcttctctccaattctcaca

SEQ ID NO: 70313 - DNA, 2073 bp, Zea Mays
ggctcttttccatctcgctataaacccttcacgccccggcgtccgcggctcgctcctgttcgcgccgccgactcgcctcgcgtcgcctcactagggtttgcagttcccgtcgcgggcgaaggcggcgtcgtctcgtggcggcgccgtctccgtgtgccttcccgctcccaagcaatggccttggaagatgggagcccagctacttttactccacaagtgattgctaatgcatttgtcaaacaatactatcaaactcttcgatatgccagagaggatgcctataaattctataatgacaaaagtattcttggtcgaacagattctaatgggaaaatgatttgtgtaaccacaattgatgatatcaaggagcaacttgtgtctacagattgtgctgactgtttgatagagatcgagactgttgatgcacagccatcccatgtggatggtgtgatcattttggttgctggatattttacaacggctgttgtgaaacagaagtttatacaatcattttttctcgctccacaggaaaatagtggctattatgttttgaatgatacattcagacttactgggatttcattcgaggtgaaggtagttgcagctaaccatgataacaaaagcacacaaattaccaccctgcccaatgagccagaaatagattcatttaaggagagtgaagtgccaggtgtaccacctgcaggaaacattctcgtcaatgatggagttatcagcacctctgcaaatgttgtttctccagttaagaatgaccctgttgttgagacatgtgtgaaagtggttaacgaggatgttgtgaagatacctgtagccgctccagcttcaactcctgttacagctgaggaagttgttaacaaggattttgtgaagattcctgagtctgctccggctctcccttcatcagttgagaaggctgatccagctcctagtgcacctgttgagaaaggtgctccagctcttcgcgcaccagttgagaaggctgatccagctcctcgtgcaccagttgagaaggaagtaactaggaagacttatgcatcagttgttaaaatcccgagggaggacacacagcctgccccagctgccagaccctccaagcccaacctaaatataaagatggttcaaaatacggagaaaaatgtgtcctcaccatcgaaacctgctcatgctactgttaatgccctaccgggcgataagggtgttcctaaaaacaaatcacctgatgagccagggtactcaatttttgttaagaatttaccttttgaagcaactgttgaaatggtcgaacaagagttcagcaagtttggtgctattaaatctggtggtgtacaagtcaaatgccagcctgatcagttttgctttggctttgtcgaatttgagtctcagcaatccatgctagcagcaatcgagttgttgatggtgttatcacccgtggggatgacaatggcaacggcggtggcggtcggttccattctggcagaggtggtggttactatggggacggctacaagcggcagtggggcggtcagaacaacggctactacaacggcgcggataacatgaggaacgactactcaggtcgtgtccgtggaccgcaagggaacggccaccctcagaacggccacggctaccatcagaacggccacggctactactctgggaatggctaccaacagcgacgccccaacagcaatgggaacggactgagggtcgagcgcaacaatggcttcaggcagcaaggccctgcatctgcctagaccttgtcatttttgcagtccatccttgatacgaaagcagtggggatattttgatgtctataggtagatactttgtcatggctgaattttgttgtcgcggttgataagagcaatcgtgcgtcctttgactggaactgtaatgaggagtggagtcagtcgtgtcgcaaaggggaaaaaaacatctatcgaaatccctgctactcttttgtcgtgctgtcctcttcaagctgtctgcgtgtacatcggtttttctgcttagcaattggactgggcggagacaagcttctctccaattctcaca

SEQ ID NO: 70314 - DNA, 1672 bp, Zea Mays
cataaacccttttcgaaggtgccctttttcgaaaccctcttggctcttttccatctcgctataaacccttcacgccccggcgtccgcggctcgctcctgttcgcgccgccgactcgcctcgcgtcgcctcactagggtttgcagttcccgtcgcgggcgaaggcggcgtcgtctcgtggcggcgccgtctccgtgtgccttcccgctcccaagcaatggccttggaagatgggagcccagctacttttactccacaagtgattgctaatgcatttgtcaaacaatactatcaaactcttcgatatgccagagaggatgcctataaattctataatgacaaaagtattcttggtcgaacagattctaatgggaaaatgatttgtgtaaccacaattgatgatatcaaggagcaacttgtgtctacagattgtgctgactgtttgatagagatcgagactgttgatgcacagccatcccatgtggatggtgtgatcattttggttgctggatattttacaacggctgttgtgaaacagaagtttatacaatcattttttctcgctccacaggaaaatagtggctattatgttttgaatgatacattcagacttactgggatttcattcgaggtgaaggtagttgcagctaaccatgataacaaaagcacacaaattaccaccctgcccaatgagccagaaatagattcatttaaggagagtgaagtgccaggtgtaccacctgcaggaaacattctcgtcaatgatggagttatcagcacctctgcaaatgttgtttctccagttaagaatgaccctgttgttgagacatgtgtgaaagtggttaacgaggatgttgtgaagatacctgtagccgctccagcttcaactcctgttacagctgaggaagttgttaacaaggattttgtgaagattcctgagtctgctccggctctcccttcatcagttgagaaggctgctccagcacctcccgcatcagttgagaaggctgctgcagcacctcccgcatcagttgagaaaggtgctccagctcctcgcacaccagttgagaaggctgatccagctcctagtgcacctgttgagaaaggtgctccagctcttcgcgcaccagttgagaaggctgatccagctcctcgtgcaccagttgagaaggaagtaactaggaagacttatgcatcagttgttaaaatcccgagggaggacacacagcctgccccagctgccagaccctccaagcccaacctaaatataaagatggttcaaaatacggagaaaaatgtgtcctcaccatcgaaacctgctcatgctactgttaatgccctaccgggcgataagggtgttcctaaaaacaaatcacctgatgagccagggtactcaatttttgttaagaatttaccttttgaagcaactgttgaaatggtcgaacaagagttcagcaagtttggtgctattaaatctggtggtgtacaagtcaaatgccagcctgatcagttttgctttggctttgtcgaatttgagtctcagcaatccatgctagcagcaatcgaggcttctagggtttatttcggcacaagagaatcatatgttgaggagaaaagaactaaaacacgagctacttaccattattggaccttttcagtggcctaacctttgac

SEQ ID NO: 70315 - DNA, 3811 bp, Zea Mays
cagcccctcacatgggccttgcgatgcagcgggagcatcaggaccagggaggacacacacaccacgccggtgcgcccccctcgccctcggccccctcccttatttcaaccccatcggccggccgcggccatcacacatgcacacccaaacccacacccacatgccagcccgccaagagcgaactgcttccccacctccccacgacgggagcctgcatggccatgacgcccgcaatgataataataacatccctctgaactcgcccgcgcccatcccaaaaccgaacacacagcacaagagaactctgctccgctccgccttccactgcattccgtagtacgtacctacctacctcctgtgcccgcgcgcagaaccgctactcccccgcctctgcctcagctctgaccgttcactgccgtgccccctcctgcccgccacggaaccttctacgcctccggaggaggactctcccgtcggtggcgccgccgcgccggccacaccggtcgtcgcgcctgaatgctgcgatcgtcctgcaggccgcactacgcctgaccgggccgacagccagctcgcgaagatgcacgccgggacgacgcgcggcgacggcggcacgcggggcctccagcgccgattcggctgcatggccggcattttccagatcttcgaccgccatcggctcatcgccggggccggccgccgcgccgcccggcaggcgcagaagaggctgcctccgccttcttccgctccgccaggcaaaactcaacatccaaagagcagcagcgatgttctagttcaaagttcaagtgcgtcgaagatcgttctggagaaaacattgagcaaatgcacgaccgagaacagcagcctttccatcgaatcgtcaagcgattcgtcttcctcctctccgtgcacgtccttctcctccctcgatggcaacaaatcagtccaacaggagcttccttacaccagcgaggagctctttgcgcagaggccactgaagagctcgccgagtctgagggaacctgacatgaacgccaagtctggccatcctaatgccggtttcagagacatagtgaaggactgcatcaaccgggactccggaggcctgacggtaaaaacttcggtgcacgaggcaaggagaaatgggcagcacaaggactcaccgaggccactgctgctgtccaaatcaatggatgggacctgtatcattgggatcgataggaccacaaatgttcctgcaaatgtcaatggatctagaaggtgtttgcaggagcagtcacgcttttcttgtgatgaccgaaggctcctgcgaccaactgaaacccaggaaagcaagaggtcttcctcgaggccaaaggagcttcctagattgtccttggacagtaggaaggagtctctgagtccaggctcacgtcagaaggacctcggttacaagagaactgatgatattcttctggatactttgaggcctcaagattcccctagccatagcagagctaacagtgtcattgccaagctaatggggttggaagaagcaacaaatgctacaggagtgctcactgccgatagctgtgaacccacaaggtcaccgagaccagctcagaccactcaatatgggcatccatcacgctcccccagaggcacttgccaggattcctgcagcatgcagctgaagaacgagtcctcagtactgaaaaccaagccttccccacgaattctcacagaagcagctccttggagacagcaggaaagaagtgtcaccaatatctgtcgagaagctgaagggaggccaaggattgcatctgtctatgctgatatagagagaagggttgggggcttcgactttttagagtgtaataacaaggacttcagggctctcagaatattgggtgcattgaatgtgagagatgctaagaacaagaatgacagcagtggcagaccaatggctactcacagaacaggatatgacctaaccacctctggaagcttccaggctcctattgtggtcatgaagcctgcaggaaccactgagaagcatggggtttcacttgcttctgttgcccccatagcaggcctcagaagcctcagaaagttgccagctagatattcatctttcactggcacaaatgaggccagcacaaatgagaatattcatcttcagatgtcaagagctcaattgaagtctgaagaaactgtcagcagtgccagctcaccaaggcctacaagctcatcgaaccccagaaatgtgctaaagaaggcagaacctgaaagaagatcccgtccacctgtttcaccaaaatctccaagcaagaagtccaatgaagctgtctccccaaaaggaagaacaagatcaaagccttctcaggtgaaaagccaccgtgatgaggtcttgcatagtacagggaacagaataagcttagctaagcaggttgacgtcagcgttatagattgtccaaagcctccgggtggcaactcaaccttcgttccaccaagcaatgctgctgcaacagcaagtcacaaggctccttcaattctggattcagaccaaaacattcattcactggacaacattccaagccctgtctctgtccttgatacatccttctatcataaaaggatctcagattcattcaaagatggtgagacacattcttcagaggaatgctggaacccaaacagcctgcctgacacaccacagtcaaaagcgagcagtgaagccaaccagattaaaccagaaaatttggaagttctgatccagaagcttgagcagctacagtcaatgaacgaagaagacgcaagtatcaaagaagtcatggcatcagtcactgcaaataaagatcaccagtatatctatgagatactgttggcatctggtcttttgcacaaagaacatagtatcacggcattacctgctcaactccaaacatcaaattatccaatcaatccggagctcttcctcattcttgagcaaacaaaaccagacttagttttcgcattccaagctgtcagtggaactaagaaaacttgtaagccttacacagggaagcttcaccgaagacttgtgtttgacctggtaaacgaaacaatagctcaaaagatgatcatctgcagatctggaagccagccagcaaagtttcttcaatcaaggaagttgagtgggtggcaactattcaaggatttgtgcactgaggttgacaggcaaataaaatgcaccggggaggaggagaatggaaacatgatattagatgaggatacagtcaatggaacgaaagactggatgagcttcgacactatgctacatggcatagtttgggagattgaacgatccatcttcaagggtcttatcgacgaggttatcggcggtgagactatagagaagatgcaatttgggcaaaggaaactgcagaggcagctttctttcagtagtataaactgaatatgcgtcgtagcagtcatttccatggaagcttataacaactagtaaatgtgacagtttctattttttctgaagactaaactgtacaagtataaatgatcctcaacactagtcttgctgcctgactattgcaattcgagatttgtgtgacatgactactgtttgactctactaccggtcaaggcgattgaagtgcacagtaccccgcgtgtgcatggtggacccattatatcaagtgtttataggaatgtcgggtagatgataacttgagataaagttctcgttttttgcatttattgttacggatgatgttgcggtcaaactgtatgccgcaaatgtaccaataagcactatattgtccatgcggctacaacggct

SEQ ID NO: 70316 - DNA, 687 bp, Zea Mays
gtgtaacatctgcaacttctgctacactgttattgatcacgaacaagtttactaattatgtataagctacaaagttaggttggctgatgccactgttgcctgcacggccttgcagatgctgtgatggggtctggaattggtgatgcatgtcagcaatacaataaccgacaggacaaaagagatggtatgcggcttaagccttttccgaaacgtggcagcttggctacttctcgagatgacgtagtatttgtagaagcaacagcagtagtatactgcccaatattatagcattcgtgttgtgcaatgtaatgcacgtgagaacgcttgtgtggttgtgcctctggctggcctctaaacggacgtcttttttgtggtcttattagtcgagtcgttcaactgcgccaagtcttgctgcagtttttttgttttgttgccactgtgtctgagcctcgggtggcctggtgtaccttcgaggctgctgttaagcagggtcttgtcagtcagggcagggacctttgttgccgcaattagtacggtacgtaaactgcccatctcggtgggtaagctaatcgaccaaggactagtgctgtggtaacggatcctgattcaaatgtttatttataatttgttaggactctaaataatttttagtttgaaaataattagaattagagattgatctttaaa

SEQ ID NO: 70317 - DNA, 1571 bp, Zea Mays
aaacccccgcgtccaatcaaaacacgacagcgggacgagcgaaaccaccgtggtttcgccaaaccgctttccttcccatctaaaaccgccccctcccttcctcttctcctagctctcttgcctgcgcaccactcgagtcgagactcgagaggcacctgatctttccttcccgtcttcctcccacacgtccccatcaccattgctgcgacgagagtgagcgggagagggtaggtggcgaggcggcggagatggggcgggggccggtgcagctgcgccggatcgagaacaagatcaaccgccaggtgaccttctccaagcgccggaacgggctgctgaagaaggcccacgagatctccgtgctctgcgacgcagaggtcgcgctcatcgtcttctccactaaggggaagctctacgagtactctagccattccagcatggaaggcattcttgagcgttaccagcgttactcatttgaagaaagggcagtacttaacccaagtattgaagaccaggcaaattggggagatgaatatgtccggttaaaatccaaacttgatgcacttcagaagagtcaaaggcagctgttaggagaacaattgagttcactgaccataaaagaactccagcaactggagcaacaactggacagttctttgaagcatattaggtcaagaaagctctatttttttttggtacagaatcagctcatgttcgattcaatttccgcgcttcagaaaaaggagaaagcacttacagatcaaaacggtgtcctgcaaaagttcatggaggcagagaaggagaaaaacaaggctttgatgaacgcgcagctccgggagcagcaaaatggagcatcaacaagctccccatcactttcaccaccaatagttccagattccatgccaactctaaatatagggccatgtcaacatagaggggcagcagaatctgagtctgaaccgtctcctgctcctgcacaagcaaacaggggcaacctgccaccatggatgctccgcactgtcaagtaacaggtgaggtcttcccagtgtagttttgcagctgatctcgacagcaacacacctgtcaccgaaatgcttcggtgaccctagatatcaaccgatgcacgatccatctcgatcctgtgatcgaataccggcgtaggtactaccaataaagtcaggccccgtcaaatgctttacatggtgattgaagtctggagcttctcagcaccaccatatattgtgttcagttcctgtgtttattgccatagctaccctttttttctctgatctacgagctagacgtagctttgtgcttggagattccactactatgtttcctctgtcctgtgtatgctttaacggagatgcacgttgtacccgtggtaatatatataaatttgcgttgtaaagatcaagtggctcttttctccgaaatgttatgaagtctcaggtgtcaaacatgcgtgactttttaactttgaactgtacgtttcagtattcaagtgtcttgacaatttgaaccgcgtgactagcttctagtcgtggttaatatatgctacacatacactggtg

SEQ ID NO: 70318 - DNA, 1386 bp, Zea Mays
aagccacccaggggcccaccccgtggatcacgcacctgatcccgcgtgccctggcccacgcggtgggcggacggccccggccccgccagcgtggcggaaacggacggcatcggtggatgccggctggcccccagacttatcgacaaacaaacggccggggccgcgacacgtcgccccctggatgcgttcttatccccacgatgcatccgacgaccgctgccccattctccactccgctctctcaaactccccggctccccgctctcccccgcccgtccagctcgtgctccgcctccgctgctctgccctcttcctcctctgcgtttctcctcagagctgtttgacttgaccggacagtgctgttcggtggctcggccgcgatgccggactccgacaacgagtccggcgggccgagcaacgcggagttctcgtcgccgcgggagcaggaccggttcctgccgatcgcgaacgtgagccggatcatgaagaaggcgctcccggccaacgccaagatctccaaggacgccaaggagacggtgcaggagtgcgtgtcggagttcatctccttcatcaccggcgaggcctccgacaagtgccagcgcgagaagcgcaagaccatcaacggcgacgacctactctgggccatgaccacgctcggcttcgaggactacgtcgagccgctcaagctctacctccacaagttccgcgagctcgagggcgagaaggcggccacgacgagcgcctcctccggcccgcagccgccgctgcacagggagacgacgccgtcgtcgtcaacgcacaatggcgcgggcgggcccgtcgggggatacggcatgtacggcggcgcgggcgggggaagcggtatgatcatgatgatgggacagcccatgtacggcggctccccgccggccgcgtcgtccgggtcgtacccgcaccaccagatggccatgggcggaaaaggtggcgcctatggctacggcggaggctcgtcgtcgtcgccgtcagggctcggcaggcagcaaacactttggctagaggtacacgaagatgatggcaactgaaaatcctcggaatcatgaactcagcacactagcttgcacagcaatgccccagctgaaatatgatgcaaaaataagggtgaaagtagtaccaaataattctctaatctggtccatcatgaatgtgaatgttaaggctataaacaagagtttttactgtccatgcggatacagataatccgattgtgattgtgtatggatgcagatatgatgcggaaccaacaaaatccgatgaatacactagaatgcacaactagctatgcatgacaatgggtaaccgcaatccgaaacataatggtttttttaccctattaagggcttgttcggt

SEQ ID NO: 70319 - DNA, 1285 bp, Zea Mays
aagccacccaggggcccaccccgtggatcacgcacctgatcccgcgtgccctggcccacgcggtgggcggacggccccggccccgccagcgtggcggaaacggacggcatcggtggatgccggctggcccccagacttatcgacaaacaaacggccggggccgcgacacgtcgccccctggatgcgttcttatccccacgatgcatccgacgaccgctgccccattctccactccgctctctcaaactccccggctccccgctctcccccgcccgtccagctcgtgctccgcctccgctgctctgccctcttcctcctctgcgtttctcctcagagctgtttgacttgaccggacagtgctgttcggtggctcggccgcgatgccggactccgacaacgagtccggcgggccgagcaacgcggagttctcgtcgccgcgggagcaggaccggttcctgccgatcgcgaacgtgagccggatcatgaagaaggcgctcccggccaacgccaagatctccaaggacgccaaggagacggtgcaggagtgcgtgtcggagttcatctccttcatcaccggcgaggcctccgacaagtgccagcgcgagaagcgcaagaccatcaacggcgacgacctactctgggccatgaccacgctcggcttcgaggactacgtcgagccgctcaagctctacctccacaagttccgcgagctcgagggcgagaaggcggccacgacgagcgcctcctccggcccgcagccgccgctgcacagggagacgacgccgtcgtcgtcaacgcacaatggcgcgggcgggcccgtcgggggatacggcatgtacggcggcgcgggcgggggaagcggtatgatcatgatgatgggacagcccatgtacggcggctccccgccggccgcgtcgtccgggtcgtacccgcaccaccagatggccatgggcggaaaaggtggcgcctatggctacggcggaggctcgtcgtcgtcgccgtcagggctcggcaggtaggacaggttgtgaccgtcgccgtccatgcttgcatggccatggccatggcatggctcccgccgccggcttcttgcttggtgtcggtaattagcgctggtggcctgcgctggttaagttaaccttcggttttccccccttttcttttcgtgttgactgggaactacttaattggtgctttccttccattgctgttgagataattttaaattttaaggtgttatgccacgtgatgacaagtgtcggcacgggcttaatcattcaaaaag

SEQ ID NO: 70320 - DNA, 1946 bp, Zea Mays
ttttattatttttattaacatttatacgtctaaaatttgtcttaaaagtagatttaatacatagaaacgaaaggactacatggcagagtgatctaacaatcaatctaaaccagctggtaactaacaatgatagagggactgacaaacactgccagcttaatctatcagtcgctgcctccattttccacaaaaagaagcttatccagtcctatggatctcttgccatatgtcatccttgcaagcggataacactagtccttggcatggtctagtgcgggtttcttccgctgttgtgcatgccggttcacgaactccgcgacgtcacccacaaacttcttgctgtccgcgaggtcgtccaacacgtagaaggcgtggatggcgtccgggtactccgccacggtgacctcctcggagcacacggcgcggagcgcatccgcgtacgccctctgcctgtcctgatgcacgtcccacccgccgacgcacaccagcgtgggcgggaacgcccgccaccggtccgcgcccgcgcccgcgtcgcgcctgatcgcggcgggcacgttggcggcctcgtggtcccgcgtggcgccgggcggcaggaacgcgcgccacagccacgccagccgctcggggctcccgaacggggcgtcgcggagccgcatctccgaccccgtcggcgcctcgccgctgaagaaaggctgcacggcgaggaggcccgcgacggcgtcggggggatacggcagcgcgcctgccgcgccggcgagggcccaccggagggctgcctcgccgtcgtcgtagggagccgggaagcggtgctcgggggcgaggcggtagtcgacggaggcgatgacggccgggatggccgacgccgcggagtggaagacgaaaccgccgccgtggaagtacacgaccaccgggagctcgttgccgccgccgggggtctccgggacgaaaaggcgggcgcgcaggtggtcggagacggcgtggtccgtagatgccacgccgccgaggggggccgtcggggtgggcggtgcggcgcggtcgaagagggagagcaggaagcggttaacggtgccgtcgcggcggagcgaggcggcgtgcagcgcggacgcggcgcccacaagcagcctcgcgcgccacggcagcgggggcttctctggcctcggcggttggtctgacgcggccatggatctccctgtcctgtccctcggtatctcgtgcaggcaggccgctgatgaatgatgataagggcagtggcagtggagcagatgacgagtccttgtcattgaggggcgtttataatcgctcgtcttcgtctcccacgcccgtgggccgccggatccaccgtcgcagcgcttgtctcccagactcccacgcatcggagatgcgggccgcgagagcgagccgttccttcttgcctgagggctgtcgccagactcctgttgtgtcacctcgcagcgcatgggaacagagaagcgccgccatgcgcgaggtggacgctgctgttagaaaacctttcatgtgatctaattccgaggggtgcgatgtgtctcctcactatgtatatatatatgtacacacttcatgagatcaatacaacagttcggtcatttgtctctctctcaatctcattaccactgagtatactataacacgttatcagcactgtctcacggagaaatcagagggatgcgaaggaaaatacttgttgttctcgacaagaataggtcgctgccatcaacaaacggtttctgcatgaagtccctgtccaattgccgcacgcacaagcagtgctccttggtgttcttttagacaaattcaccaattttataagagcattcgttcaaataaacaaatcagagaagtctgattttacaagcgacgacggccaaggcgcatgcgggcatggctatggcgcctgtgccaggatggggtcgtgcccgcgccggtgc

SEQ ID NO: 70321 - DNA, 1531 bp, Zea Mays
aggctcccgttttaaagcgccgcacccgcacccaccgccctcctcctctgtgctagactgtcatcatcccttcctccttccccacgcgtacacacactcccgcggcagccaccatcccggagctcgagaccagcggcaccaggccaggagggtgacggcccggcgactcagtcgagcgccactcccatggcggacaagatctccacgatcgtcctcaaggttgaccttgaatgcgagagatgctacaggaagatcagaaaagtcctctgcaagatccaagacaagatgaacatcaagacgatctcgttcgacgagaagagcaatgccgtgaccatctccgggccgttcgacgccgacacggtctgcaacaagctctgctgcaaggccggccgggtcatcaaggcgatggacgtcaagggcaaggacaaggacggcggcaagcccaaggacgccggcaaaccggcggcggccgagaaggacgcaggcaaggccgggaaggagggcggcgccaaggcggagaagaaggaggagaaggccgagaagaagaaggaggagaagggcaacaaggacgggaaggcggaggccaagaaggtgaagttcgccgaggtccccgcggcggacgcgaagcccggcaaggccatgccgcccggcatgaccaaggccgacctgggcccgctcctggagaagatgatggcggccaaggccgggtccgagccgcagccgatcgcgccgccgccgggcgccgcgcagggcgtggccgtgccgtccgtctggcccgcgcccgccgggtccgtgtccggctacggctacggctacaacccaggctacgaggcgccgccgccgccgtcctactacgccgctggcgccgggggcggctacggctgcggctgcggcggctacaacggctactgccggtgcggcaagccggccgcgcccgggcccggcgggtactacggcgtgccggtgtacgatagccaggggtggtactacggcggtggcggcggcgcccggcagccgtactacccgcagcagcactgctgcgaggaccccaatgccgggtgcagcgtcatgtgatggcgatgcgcgccagcccgtggattggatggacagacagagcaatcagtgtgtggtcacagtcacacagccatagtgccatggccagtgccggagtcggggagaaaggaacttctgtttttttcccgcgtgtcgtcttgttcttgtttatgccccgtggattctgtttatttatttattttagggcttgttcgttttggagtggattgaagggggattggaggggattaaatcccctcctatacaaatttgtataggaggggatttaatccctcaatccttcaatcactcaaacgaacaagcccttagggagttgagttgtgcatgtgaacagtcgatgcttaattgcttatggtgtctatctagtgtgggtgatgaaagtataacgacagtacagtaccagtagtttgtttagatgaaagcatggaacaccttgagtgctcttgaaaatgtcaaa

SEQ ID NO: 70322 - DNA, 1238 bp, Zea Mays
cgcccgccgcgccgcgctgcttgctatgccctctccactacccggccgcctagctctcttctcttgtactgggagaaggtgacggtgccgatcacgaagccgttcgtgtcgctcataggcatgggcagcggccgcacggtgatcacgtggaacgccagggcgtcggacatggaccgctccggccaccaggtcggcaccttctactccgcctccgtcgccgtcgaggccgactacttctgcgccagccacatcaccttcgagaactccgcgccggcggcgccgccgggggccgtggggcagcaggcggtggcactgcggctgtccggcgacaagaccatgctgtacaggtgtaggatcctggggacgcaggacacgctgttcgacaacatcggccgccacttcctctacaactgcgacatccagggctccatcgacttcattttcgggaacgcgaggtccctgtaccaggacggtgctgttcggggagtacagctgcaagggcccaggggcgagcacgaggaaccgggtgccttggtcccgctcgctcacctacgacgaggcgcggccgttcctcggcccgagcttcatcaacggcgagcagtggctcaggctgtagatccgatccgtcctcccggctgccgagctgagcttcgtcgacggcgagctatggtccctccgtccgagctgtgtgtaggtcatgcgacttctctggtcttcttcggtgcatatagcgtgacaagcaagcagctagtcagactgtagacatgtacgctgtaccatatactactagtaccatgtacaaacctgatacccatatgtgtagtgagatactgagatggccatgtccatcattcatggcaagatacatagtagtttgcatgcatgtatgtgaaggaaaacaggggaggccaaagtccgatacgtgacacgtacgcctcatgcagatgggtcatggggcctccacctcaggcccgcccaacataccagaaaatcaaaatgatgagatcactgcatggctttcctgatttctagcacgggcaagttcagatccagtatgccaaatgccacaaatagatggcgcatggctttgggagtgaaaaaatgctctcattctgcaacactttcagatcaacatgcgcagctgcagttcaagggatcatcatagcgatcataacggatcatcatgatcgactgcaccaaaatgtagacacaccataccgcgcaagtgtagatagtag

SEQ ID NO: 70323 - DNA, 2009 bp, Zea Mays
ccgccctgaatcctgcgctccagcgcgccgaggccgaaccgacgtgccttgctaatttcctgcgttcgggccggtagcgctagacgagcaggcggcgggcgcggccctcgtattcaattccgtcaccactttctcctcacgccttcaacgtctcgcatcccatcccattccgtcccgtcctcccccattccatcgtagtaccaccgccggtcgtcacccacatctcaagcttcgtctcatgtcatgcaacgcagcgtgctataatacggcgccacacaatcacagccccggccggtcggctcgcgctacccctatatatcgtcctcattctcattccctgaccactgagtcactgaccacctccctccccggccggccatctctcccgagctaaactgtggcaggcagctagctgttacgagctagctccgcgcgcgctaggcggcgtcacgtacgtgctgtgatcaactgtctagttctccactcgacgcggacaccctgacccgcgcgcgcgccgtggccatggtcgccgccgccgggcgcaggcggcgccgctgcgcggccgccatcctcctggtcctgcccgtcgtcgccgtcctcgcgtcgtcgtccgcggcggcggacgggtcgttcataacgtgggacgacctcagcacgccgtccgccgccgccgtgcagggcggcgtgaaggcggccagcgggggaggcgcccgcgagctggacacgatcgtggtggcgcaggacgggacggggcactcgcgcaccgtgcagggcgccgtcgacatggtgcccgccggaaacagccgccgcgtcaagatcctcgtcaggcccggcgtgtacagggagaaggtgacggtgccgatcacgaagccgttcgtgtcgctcataggcatgggcagcggccgcacggtgatcacgtggaacgccagggcgtcggacatggaccgctccggccaccaggtcggcaccttctactccgcctccgtcgccgtcgaggccgactacttctgcgccagccacatcaccttcgagaactccgcgccggcggcgccgccgggggccgtggggcagcaggcggtggcactgcggctgtccggcgacaagaccatgctgtacaggtgtaggatcctggggacgcaggacacgctgttcgacaacatcggccgccacttcctctacaactgcgacatccagggctccatcgacttcattttcgggaacgcgaggtccctgtaccaggacggtgctgttcggggagtacagctgcaagggcccaggggcgagcacgaggaaccgggtgccttggtcccgctcgctcacctacgacgaggcgcggccgttcctcggcccgagcttcatcaacggcgagcagtggctcaggctgtagatccgatccgtcctcccggctgccgagctgagcttcgtcgacggcgagctatggtccctccgtccgagctgtgtgtaggtcatgcgacttctctggtcttcttcggtgcatatagcgtgacaagcaagcagctagtcagactgtagacatgtacgctgtaccatatactactagtaccatgtacaaacctgatacccatatgtgtagtgagatactgagatggccatgtccatcattcatggcaagatacatagtagtttgcatgcatgtatgtgaaggaaaacaggggaggccaaagtccgatacgtgacacgtacgcctcatgcagatgggtcatggggcctccacctcaggcccgcccaacataccagaaaatcaaaatgatgagatcactgcatggctttcctgatttctagcacgggcaagttcagatccagtatgccaaatgccacaaatagatggcgcatggctttgggagtgaaaaaatgctctcattctgcaacactttcagatcaacatgcgcagctgcagttcaagggatcatcatagcgatcataacggatcatcatgatcgactgcaccaaaatgtagacacaccataccgcgcaagtgtagatagtag

SEQ ID NO: 70324 - DNA, 2709 bp, Zea Mays
cgcatagccgcatatatttggcagcaggagcggcctctcacttgcttcgacgtatttctctatctatcgatacggttcaagggaccgaagaaggtagagagagaaacttgaaggggagaggaaggagatacaggttcatgttcatttaggtgtcagttcatctgatttctcagaagcaaaatgttgtttggagctcagtgacaccattttgtaatgcatgtgccttttacgggaaatggaggatcattatgtccatcccaagtctaagtctaaccatggctccttgtcaggaaatggttatgagatgaaaaatccaggccatgaagtttgtgatagggattcatcatcagagtctgatcgatctcacccagaagcatcagcagtgagtgaaagcagtctagatgaacacacatcaactcaatcagacaatgatgaagatcatgggaaggataatcaggacacattgaagccagtattgtccttggggaaggaagggtctgcctttttggccccaaaaatagattacaacccatcttttgcttatattccttatactgctgatgcttactatggtggcgttggggtcttgacaggatatgctccacataccattgtccatccccagcaaaatgatacaacaaatagtccggttatgttgcctgcggaacctgcagaagaagaaccaatatatgtcaatgcaaaacaataccatgcaatccttaggaggaggcagacacgtgctaaactggaggcgcagaacaagatggtgaaaggccggaaggtgatgagacaatatttgttcacaaaatgatgctttaaggggcagatgagatcacttgttctgaactgatacaagattttaccttgtgagacgaagcatccacaaaatgatcatcttgggacagaactgaagcaatctccttcaggatccgccttccttcatccgttgaacgtactcgcaagaagctcaagactattcaccttctcgtccattacaaaacaatgtaatagtatatgtatgtttccatccataaatttccttgaggaccgctggggttatgttcaggctttttccttgttaaagctgaatgtgaataaatctcaagaaagttaaaaatacttactgagaggttactagtcactattatatttatatataaaagagagcacattttcatcccagtacggctagattagcatggaagatggattcttcaatttcgaatccccgtggtgctatgctcgctaggatttacgagggtaggcaccagccaggcgtgtcaagagtacctggtccctacgcgttctcataacgcaggggctaacctagcctctggtccctcaaagtatgtttggatgcactagaactaatagttagctgttaaaattagctgaagacatcaaaacagtctaactaatagttcaactattagctatttttagcaaattagctaatagttagccaactactccctccgtaccataccacaatagagttcgttttatcacttgctctttatgtctatattcaaataaatgataatgaatctagactagagatgtcaatgagaaatttcacaccgggttatagcatcccagatccatctccatcatgtttgatccatcctcatacccatcatgggtgcaaaactcatcccatacctatccccattcgggttacgggtccccagtgggtcctcatccccaattaagggataaataggtactaacagctagcacaaactatccagatttcagacatcaccacatcggcaagcactcatccatgaaccataatccattcatccatttatcagaaaagaaattagtacttcgggaccgatagaagaaataaagaaatagagtctgttcaccttcctgggtcaccatctaagttcgttggcgcctgagaatccatggtcgtcaccatcatcctaggctcttagcagtcagcggtgctcctcgtcgctggtgaagtcgctagtgtgcagtgccagagcaacgtccaggcgtgcggcggttgaccggctggatagggcgtagcgtatggctggttattttagggttttgttttttgctagtctgctagttgccttgctgtgttgccttgttgggctagaacttaggcctagtgcgctgtcgtgctacgcttggtggccgactcggcctcaactcattcatacaaacatgataggtgtacacgtatgaaatacccatgggtaatcgggttcggatttttgcttcccaaacccatacacgtttacccaatggatggagattttgtcccatattcatacccatggggacaatttttgtcccatacccataccctaataggggaattccccacgagttagcgggtatcgggtcccattgacatctctaatctagacacatacaaaacacatacactaattattgtatgaatacaataaaaggctaaaacgaattttaatttggaacacaggcagtatttgttagctagctaattccaatagaatttttttagccaactaactattaggtatagtgcattcaaacactcccttactaaggacagaatttcacttcaattccagagtactgctacagaaaaaaggaacagaattgtcaaattccgccaaagacatcgaaccacctaccaccatgtagtcatgtactatatggtccttcctagcaaggcagtagaatcagattctgcaaaaaaag

SEQ ID NO: 70325 - DNA, 2822 bp, Zea Mays
cgcatagccgcatatatttggcagcaggagcggcctctcacttgcttcgacgtatttctctatctatcgatacggttcaagggaccgaagaaggtagagagagaaacttgaaggggagaggaaggagatacaggttcatgttcatttaggtgtcagttcatctgatttctcagaagcaaaatgttgtttggagctcagtgacaccattttgtaatgcatgtgccttttacgggaaatggaggatcattatgtccatcccaagtctaagtctaaccatggctccttgtcaggaaatggttatgagatgaaaaatccaggccatgaagtttgtgatagggattcatcatcagagtctgatcgatctcacccagaagcatcagcagtgagtgaaagcagtctagatgaacacacatcaactcaatcagacaatgatgaagatcatgggaaggataatcaggacacattgaagccagtattgtccttggggaaggaagggtctgcctttttggccccaaaaatagattacaacccatcttttgcttatattccttatactgctgatgcttactatggtggcgttggggtcttgacaggatatgctccacataccattagagagatcgtccatgactccttgtatactaggtgttacgaaggatccttgtgaaacacattatttctgtttccttagttctggattgattatttttcaaagcaacagaaatggtccatccccagcaaaatgatacaacaaatagtccggttatgttgcctgcggaacctgcagaagaagaaccaatatatgtcaatgcaaaacaataccatgcaatccttaggaggaggcagacacgtgctaaactggaggcgcagaacaagatggtgaaaggccggaaggtgatgagacaatatttgttcacaaaatgatgctttaaggggcagatgagatcacttgttctgaactgatacaagattttaccttgtgagacgaagcatccacaaaatgatcatcttgggacagaactgaagcaatctccttcaggatccgccttccttcatccgttgaacgtactcgcaagaagctcaagactattcaccttctcgtccattacaaaacaatgtaatagtatatgtatgtttccatccataaatttccttgaggaccgctggggttatgttcaggctttttccttgttaaagctgaatgtgaataaatctcaagaaagttaaaaatacttactgagaggttactagtcactattatatttatatataaaagagagcacattttcatcccagtacggctagattagcatggaagatggattcttcaatttcgaatccccgtggtgctatgctcgctaggatttacgagggtaggcaccagccaggcgtgtcaagagtacctggtccctacgcgttctcataacgcaggggctaacctagcctctggtccctcaaagtatgtttggatgcactagaactaatagttagctgttaaaattagctgaagacatcaaaacagtctaactaatagttcaactattagctatttttagcaaattagctaatagttagccaactactccctccgtaccataccacaatagagttcgttttatcacttgctctttatgtctatattcaaataaatgataatgaatctagactagagatgtcaatgagaaatttcacaccgggttatagcatcccagatccatctccatcatgtttgatccatcctcatacccatcatgggtgcaaaactcatcccatacctatccccattcgggttacgggtccccagtgggtcctcatccccaattaagggataaataggtactaacagctagcacaaactatccagatttcagacatcaccacatcggcaagcactcatccatgaaccataatccattcatccatttatcagaaaagaaattagtacttcgggaccgatagaagaaataaagaaatagagtctgttcaccttcctgggtcaccatctaagttcgttggcgcctgagaatccatggtcgtcaccatcatcctaggctcttagcagtcagcggtgctcctcgtcgctggtgaagtcgctagtgtgcagtgccagagcaacgtccaggcgtgcggcggttgaccggctggatagggcgtagcgtatggctggttattttagggttttgttttttgctagtctgctagttgccttgctgtgttgccttgttgggctagaacttaggcctagtgcgctgtcgtgctacgcttggtggccgactcggcctcaactcattcatacaaacatgataggtgtacacgtatgaaatacccatgggtaatcgggttcggatttttgcttcccaaacccatacacgtttacccaatggatggagattttgtcccatattcatacccatggggacaatttttgtcccatacccataccctaataggggaattccccacgagttagcgggtatcgggtcccattgacatctctaatctagacacatacaaaacacatacactaattattgtatgaatacaataaaaggctaaaacgaattttaatttggaacacaggcagtatttgttagctagctaattccaatagaatttttttagccaactaactattaggtatagtgcattcaaacactcccttactaaggacagaatttcacttcaattccagagtactgctacagaaaaaaggaacagaattgtcaaattccgccaaagacatcgaaccacctaccaccatgtagtcatgtactatatggtccttcctagcaaggcagtagaatcagattctgcaaaaaaag

SEQ ID NO: 70326 - DNA, 3404 bp, Zea Mays
cgcatagccgcatatatttggcagcaggagcggcctctcacttgcttcgacgtatttctctatctatcgatacggttcaagggaccgaagaaggtagagagagaaacttgaaggggagaggaaggagatacaggttcatgttcatttaggtgtcagttcatctgatttctcagaagcaaaatgttgtttggagctcagtgacaccattttgtaatgcatgtgccttttacgggaaatggaggatcattatgtccatcccaagtctaagtctaaccatggctccttgtcaggaaatggttatgagatgaaaaatccaggccatgaagtttgtgatagggattcatcatcagagtctgatcgatctcacccagaagcatcagcagtgagtgaaagcagtctagatgaacacacatcaactcaatcagacaatgatgaagatcatgggaaggataatcaggacacattgaagccagtattgtccttggggaaggaagggtctgcctttttggccccaaaaatagattacaacccatcttttgcttatattccttatactgctgatgcttactatggtggcgttggggtcttgacaggatatgctccacataccattagagagatcgtccatgactccttgtatactaggtgttacgaaggatccttgtgaaacacattatttctgtttccttagttctggattgattatttttcaaagcaacagaaatggtccatccccagcaaaatgatacaacaaatagtccggttatgttgcctgcggaacctgcagaagaagaaccaatatatgtcaatgcaaaacaataccatgcaatccttaggaggaggcagacacgtgctaaactggaggcgcagaacaagatggtgaaaggccggaagccataccttcatgagtctcgacaccgtcatgccatgaagcgggcccgtggctcaggagggcggttcctcaacacaaagcagcagccccaggagcagaaccagcagtaccaggcgtcgagtggttcaatgtgctcaaagaccattggcaacagcgtaatctcccaaagtggccccatttgcacgccctcttctgacgctgcaggtgcttcagcagccagccaggaccgcggctgcttgccctcggtgggcttccgccccacagccaacttcagtgagcaaggtggaggcggctcgaagctggtcgtgaacggcatgcagcagcgtgtttccaccataaggtgaagagaagtgggcacgacaccattcccaggcgcgcactgcctgtggcaactcatccttggcttttgaaactatggatatgcaatggacatgtagcttcgagttcctcagaataaccaaacgtgaagaatatgcaaagtccttttgagatttgctgtagctgaaagaactgtggttaggttatgagtttcttcctggagactgatccatacatgacatgctacctcgtgctgagtttctgaggtgatgagacaatatttgttcacaaaatgatgctttaaggggcagatgagatcacttgttctgaactgatacaagattttaccttgtgagacgaagcatccacaaaatgatcatcttgggacagaactgaagcaatctccttcaggatccgccttccttcatccgttgaacgtactcgcaagaagctcaagactattcaccttctcgtccattacaaaacaatgtaatagtatatgtatgtttccatccataaatttccttgaggaccgctggggttatgttcaggctttttccttgttaaagctgaatgtgaataaatctcaagaaagttaaaaatacttactgagaggttactagtcactattatatttatatataaaagagagcacattttcatcccagtacggctagattagcatggaagatggattcttcaatttcgaatccccgtggtgctatgctcgctaggatttacgagggtaggcaccagccaggcgtgtcaagagtacctggtccctacgcgttctcataacgcaggggctaacctagcctctggtccctcaaagtatgtttggatgcactagaactaatagttagctgttaaaattagctgaagacatcaaaacagtctaactaatagttcaactattagctatttttagcaaattagctaatagttagccaactactccctccgtaccataccacaatagagttcgttttatcacttgctctttatgtctatattcaaataaatgataatgaatctagactagagatgtcaatgagaaatttcacaccgggttatagcatcccagatccatctccatcatgtttgatccatcctcatacccatcatgggtgcaaaactcatcccatacctatccccattcgggttacgggtccccagtgggtcctcatccccaattaagggataaataggtactaacagctagcacaaactatccagatttcagacatcaccacatcggcaagcactcatccatgaaccataatccattcatccatttatcagaaaagaaattagtacttcgggaccgatagaagaaataaagaaatagagtctgttcaccttcctgggtcaccatctaagttcgttggcgcctgagaatccatggtcgtcaccatcatcctaggctcttagcagtcagcggtgctcctcgtcgctggtgaagtcgctagtgtgcagtgccagagcaacgtccaggcgtgcggcggttgaccggctggatagggcgtagcgtatggctggttattttagggttttgttttttgctagtctgctagttgccttgctgtgttgccttgttgggctagaacttaggcctagtgcgctgtcgtgctacgcttggtggccgactcggcctcaactcattcatacaaacatgataggtgtacacgtatgaaatacccatgggtaatcgggttcggatttttgcttcccaaacccatacacgtttacccaatggatggagattttgtcccatattcatacccatggggacaatttttgtcccatacccataccctaataggggaattccccacgagttagcgggtatcgggtcccattgacatctctaatctagacacatacaaaacacatacactaattattgtatgaatacaataaaaggctaaaacgaattttaatttggaacacaggcagtatttgttagctagctaattccaatagaatttttttagccaactaactattaggtatagtgcattcaaacactcccttactaaggacagaatttcacttcaattccagagtactgctacagaaaaaaggaacagaattgtcaaattccgccaaagacatcgaaccacctaccaccatgtagtcatgtactatatggtccttcctagcaaggcagtagaatcagattctgcaaaaaaag

SEQ ID NO: 70327 - DNA, 2072 bp, Zea Mays
cgcatagccgcatatatttggcagcaggagcggcctctcacttgcttcgacgtatttctctatctatcgatacggttcaagggaccgaagaaggtagagagagaaacttgaaggggagaggaaggagatacaggttcatgttcatttaggtgtcagttcatctgatttctcagaagcaaaatgttgtttggagctcagtgacaccattttgtaatgcatgtgccttttacgggaaatggaggatcattatgtccatcccaagtctaagtctaaccatggctccttgtcaggaaatggttatgagatgaaaaatccaggccatgaagtttgtgatagggattcatcatcagagtctgatcgatctcacccagaagcatcagcagtgagtgaaagcagtctagatgaacacacatcaactcaatcagacaatgatgaagatcatgggaaggataatcaggacacattgaagccagtattgtccttggggaaggaagggtctgcctttttggccccaaaaatagattacaacccatcttttgcttatattccttatactgctgatgcttactatggtggcgttggggtcttgacaggatatgctccacataccattgtacattcacccttaacttttcagtttctgtctttctggccacattctgcaagtaaacatcaaacatttagagtaacaagatcatacaatggtttctgtgatacatttgcagttattttcattgcagagagagatcgtccatgactccttgtatactaggtgttacgaaggatccttgtgaaacacattatttctgtttccttagttctggattgattatttttcaaagcaacagaaatggtaaatcatgcttttacttgatgtttggcaatgcacacaaaattttgttgtagcgtgtttcgaccaacgctcttagttttttataatttgcgcggaacttaatggaaactatcttcaaataaaagatagaaggaatacaaaaccatagttgcatgctaccacaattttggccatcatgctagctgtcattcttgataacactaacacataggctccttcatactaaaaaaactttgttgttgccaaacaaatgagccttcattaatgtcgtcattcctgtaatacgcatttaggtccatccccagcaaaatgatacaacaaatagtccggttatgttgcctgcggaacctgcagaagaagaaccaatatatgtcaatgcaaaacaataccatgcaatccttaggaggaggcagacacgtgctaaactggaggcgcagaacaagatggtgaaaggccggaagccataccttcatgagtctcgacaccgtcatgccatgaagcgggcccgtggctcaggagggcggttcctcaacacaaagcagcagccccaggagcagaaccagcagtaccaggcgtcgagtggttcaatgtgctcaaagaccattggcaacagcgtaatctcccaaagtggccccatttgcacgccctcttctgacgctgcaggtgcttcagcagccagccaggaccgcggctgcttgccctcggtgggcttccgccccacagccaacttcagtgagcaaggtggaggcggctcgaagctggtcgtgaacggcatgcagcagcgtgtttccaccataaggtgaagagaagtgggcacgacaccattcccaggcgcgcactgcctgtggcaactcatccttggcttttgaaactatggatatgcaatggacatgtagcttcgagttcctcagaataaccaaacgtgaagaatatgcaaagtccttttgagatttgctgtagctgaaagaactgtggttaggttatgagtttcttcctggagactgatccatacatgacatgctacctcgtgctgagtttctgaggtgaagccatcgaaacatgaccgtgtggttcagtacccttgctgccttcagtgtctgataagctagctctccagtttgcagtttctctgaattccagcatgtctagtctctgcttatcttttgcatgtaacgtgatggtgacttagcatacacatctattcatccatctatgttct

SEQ ID NO: 70328 - DNA, 1667 bp, Zea Mays
cgcatagccgcatatatttggcagcaggagcggcctctcacttgcttcgacgtatttctctatctatcgatacggttcaagggaccgaagaaggtagagagagaaacttgaaggggagaggaaggagatacaggttcatgttcatttaggtgtcagttcatctgatttctcagaagcaaaatgttgtttggagctcagtgacaccattttgtaatgcatgtgccttttacgggaaatggaggatcattatgtccatcccaagtctaagtctaaccatggctccttgtcaggaaatggttatgagatgaaaaatccaggccatgaagtttgtgatagggattcatcatcagagtctgatcgatctcacccagaagcatcagcagtgagtgaaagcagtctagatgaacacacatcaactcaatcagacaatgatgaagatcatgggaaggataatcaggacacattgaagccagtattgtccttggggaaggaagggtctgcctttttggccccaaaaatagattacaacccatcttttgcttatattccttatactgctgatgcttactatggtggcgttggggtcttgacaggatatgctccacataccattttattttcattgcagagagagatcgtccatgactccttgtatactaggtgttacgaaggatccttgtgaaacacattatttctgtttccttagttctggattgattatttttcaaagcaacagaaatggtccatccccagcaaaatgatacaacaaatagtccggttatgttgcctgcggaacctgcagaagaagaaccaatatatgtcaatgcaaaacaataccatgcaatccttaggaggaggcagacacgtgctaaactggaggcgcagaacaagatggtgaaaggccggaagccataccttcatgagtctcgacaccgtcatgccatgaagcgggcccgtggctcaggagggcggttcctcaacacaaagcagcagccccaggagcagaaccagcagtaccaggcgtcgagtggttcaatgtgctcaaagaccattggcaacagcgtaatctcccaaagtggccccatttgcacgccctcttctgacgctgcaggtgcttcagcagccagccaggaccgcggctgcttgccctcggtgggcttccgccccacagccaacttcagtgagcaaggtggaggcggctcgaagctggtcgtgaacggcatgcagcagcgtgtttccaccataaggtgaagagaagtgggcacgacaccattcccaggcgcgcactgcctgtggcaactcatccttggcttttgaaactatggatatgcaatggacatgtagcttcgagttcctcagaataaccaaacgtgaagaatatgcaaagtccttttgagatttgctgtagctgaaagaactgtggttaggttatgagtttcttcctggagactgatccatacatgacatgctacctcgtgctgagtttctgaggtgaagccatcgaaacatgaccgtgtggttcagtacccttgctgccttcagtgtctgataagctagctctccagtttgcagtttctctgaattccagcatgtctagtctctgcttatcttttgcatgtaacgtgatggtgacttagcatacacatctattcatccatctatgttct

SEQ ID NO: 70329 - DNA, 2848 bp, Zea Mays
aaaagctttggtgggcttatgagtgattcttttgtccaagagggccgaagtgcgtccaagtccgcgcaagcccacttagccattagtcaccgcacaaaccctaaccaatcattctaccaatccatgtcaccctctatatatttgcactcctcccgtgccgccgccgccgcgccgtaccgccggcctctccaccgttcattctccaatggcgtcgactcacgcaatcagcaagaagcggaagttcgtggcggatggcgtgttcttcgcggagctgaatgagatgctgacccgcgagctcgcggaggatggctactccggcgtcgaggtccgcgtcacccccatgcgcaccgagatcatcatccgtgccacccgcactcagaacgttctcggcgagaagggccggaggatcagggagctgacttctgtggttcagaagcgcttcaacttcccggagggtggtgttgagctctacgcagagaaggtgaacaaccgtggcctctgcgccattgcccaggccgagtcgctacgctacaagcttcttggtggactagccgtgagaagggcatgttatggtgttctcaggtttgtcatggagagtggtgctaagggctgtgaggttattgtaagtggtaagctcagggctcagcgtgctaagtctatgaagttcaaggatgggtacatgatttcttctggtcatcctgtcaacctatacattgattcagctgtgagacatgttctattgagacagggtgtgcttggtatcaaggttaagattatgctggactgggatccaaagggcaagcaagggccaaccatgcctttacctgatttggttacaattcacgtgcctaaggaagaggatgaattcttgaggcctcttgcagctgaaatccaagttgcctgaagtaaaaaagtagttccagtgaggcctacgcctgtggttgtggtcctcctttttttgtgtaatgttcattattaacatgtcgaaagtaaaaagagctttactttctacagttgcaagcagtggtaatcaatgtattatttctgcttctcactttagttttgtttgtttttatcttgctgctctgtattatcctgttattcacttgacttgccttgtagttacagtttatactttctgctagtgtgttatttagactgatgtttcctttggcaaaaattcatgagttgttaattgtttgcctactatggtcctgcaggatagtgtgtatcagcttcacgcaattttgatgcgtcttttgctgaaagtgtttcctgctatatcaatctgaggaaaatgggcagttgggttaagcatatctgctttctccaacaatcattttcctctcatgtactcagaaacatattttgttttttatatgctatcgtcatctgctttgttggttagtttttttttgtaatatatcatttccatagaatttggcagtatgcttctatttgtctgctgtaaatttatagatgtcaggacatgtactctacattcatgttcttctgaactggactgtcacaagttttcttcacttctgcacaactagttgctaagaaggatagtgtgtatcagctttatgctaacttctatgcattttgcgctgaaagtgtttcctgctatatagattgaaggaaagtgggcagttgggctagacttgtatcctgttttctccaacaatcattttcctctcatgttacataatacatatattctttaccagtttttgaattgcgggcttagtatttacatgctttaactgctttgtactgtatgaatcaaggagtatgtaaattggtctattgcatgtgccatagtttgaattccatgtgcaggacttgtctagacaggcatacacagattgtgttacttgccacctgaacattcctgctatatcagtttaagaaaaatgggcagttgagttaggccagatattttactgtggttttctcaacaatcatttttctcatattgtatccctacaaacaactccttggttaaaacttttgtttgccttgaggaatgctttaggtttaggcctatattcttgttttcgtgatggagtgatgtttcatgtgcttccatgattgattggaattgtactgttaaagcatttgttggtgcaggatttttgtatcggcagcatgctaattgtgcaatgttaccgagcggtcctgcaaaatcgatttcagggaggatggccttctccgcgcttagtgttgtcaccgaatgcattaagctgtcccctctatatgactttggtgaattctgtgtatttgattttggggaagaactttgttggttgtttgcgtttgtgttttttgtaaggattgcaaacagcctaggcgagttgctactgtgtttgtttgggactggtaattccatcactacattacctctttaggtgctccataagggctcctttgggagcaaggatacccggggttttaggcccttcaatctcctctgctatcattgctcccaaacaaaaaaataggaaaggaatgtattagtgtaatgcaatctctgtaaacagtcatgatgacttttaaataactctcactgtgcatgagctttcccctgatatgttttcataaaaaaatctgtggctggggattggactggtaactatacttcccctggagcagaaattgtcgagttcttacctgttgtctatcgtaactggagcttcatctgaaaaagcaaacgctgctggagcgcgcctctctataccatcgttgcagccgttttgtgtaaaacaatttacgttgcaaatgtacgctgcttttgtaaactcatcatttttatagaactttgggccagctggtggttaaatctgta

SEQ ID NO: 70330 - DNA, 4809 bp, Zea Mays
cgcagctccacggtacctgactagcatgctacatgactcaaacacaagagtaccatatcatcatgcagtcatacaagttttggcacaaatccaatcatcatagggtaaaccatgtgactgcagagacaagcacgaatcagcaaagaagtacttactgctgacaaatatctccgtgctgaagcacctcagaacctgagaggtcaaacccgtgagccttccacctcgcatcatcatcgggatgatctccactctcctcctgaaaccctagatcccccaagttaccagtgcggaagcaaaacagcaagtgacgaaggcaccaataacaaatatattccacaaacgagtacattaagtctaggtggtccctggggagagcgaagcacaggaagtggtgggattcttgtagcaggcggcctcctgtgacagcttcatgatggacatggtgttgaggagatgagatgacaatgcccaaaacctgattcagcaccttgacgatgcaaattttgtaggtatcaatgctattcttggccttattcttccacttggtatgatacaacccacttgttcttcatttgctcttgggtgtatagccttttggaacgattaaagaactatttcacaagattttcatggcccacactgtcaaagcatttttgtggtctatcatggacaaggtcttcttccaagcaaatgtggtcaaaagaccttagcagctagaggtgtcaatgggcacctggacccgatacccattaactcattgtgaatttttctatcagggttagagtatgagaagattttaatcaatacaaatttgagagaaattcttccccattgggtgtgtggatatgagtacaaggagatagaatccgaactcgattaaccatggataatatttacttagtaaaattaggtgtacatcttaatagtcaataaacacaacaactaaccctacctctccaaacccttttaagcaaatattcaccgtggacagctaccagcccacgcgtcactttatttttgttattttgcatagttaaacaatatttttttgttacatgtcacatgtcagatttattagtggtgtattgttgttgagtgtcgtgtgaccgttaatgtcatataaaatataatataattattttttttgtcggggatggagatccattacggatttcatacccgaatggagatggtatgagatgaattttatatttatgatggtatggggatagagatagttataactttatgggatgggtatgaggtatctaatcccggattgacagtttgacacttctattgcagcaaaagcataccattttgacttagagttttccatctatgataccaagggcaaatataaggatgggaacgtgctcaataggaaaaagggcatcccgtctaattagcaccgcaactctttgatctccatcgactacaaaaccaattaattaatgctcacattcacccataagcaaatgcagaactaatattgctaagagagagacacggttgcggcggaatgactataaaggcaatgcttgaaatcaaatacggtgtatgcattcatccacaagctcgatatctccatccgcacttctgcaggagggaaactgaagaaggaaaagcaatcttacctgcggcacgggcggctcgcccgtcctcgtagcacgagcgcaggagatgcggcccggggtgaggcactgaggcagggtcgcggccgaggggatcgcaacctcagggcgagatggcaatggtagtgtgatggggagatggcggcagcgggccagaatcaaagagtttagtcaaatctataccaaacaaaagtgcaattcttgtttttcgtcaaataaatttaagtttagttgaatctataccaaaatttagtaactttatggtaccgaataaatcctggtatattaataatacactacctccaaatttttatttgactaatttggaccgttcgtcgtcaaataaaaaagaatggatagagtattaattaaaaacaattttaatatttttataagaaaacatataagttgcacatggatcttggattcacatcttgtgtgtagagcaataatattcgtcacccactctataataacttaacaatcgttagattatctgtgatttttctaatccattttttaatcattctagcgtgggcgatcatgatctaggatgagcaattgcattctatacctgtggcggcggaatggttctacgcactggaacacgacaacaacgttcgttgacttcaccaaccttcgattcgactcaccaattcgctccagccccttggccgaattaaatgatctctagcgcattggcactgtcgaggaataccagcgacagttctcacttcttctgtgccggtgcaatgaccttactaccatgcagtaggtcagcatgttcacggcaggtctagggaacccctgcacacggatgtcaaattataagctcccaggaatttgcagtgcgccatgaacctgacaagggcctatgaaaaaagggaattggaggcaggaaaaagaggaggatacagagctgctaggaatagtttggtagtcaaggaagccggcaacaacacagcatccaaggtagttgttcgcctcgacctcgattcaaacggctatcaccggaagagttagcgacgaagcgtgcaaaggggaaatgctatcattgcacagagaagtactcaatgggtgttgctcgggggggagggggggtcttgctggaattagaatatggcacttgagaggagaggaggcagtagtcgagttgggcatatcacataccacgtcgcgccctgactggaattgaagtaggggaaaccatgaagcttacagttctgacaagggagtgccactcacagcccaggtagacactggttccacacacacattcatcacagaggcaatggtgtctaagatgtaacttccactagaaaggcgccaaggcacagtgaaagtcgccaatggggacaaggttaccaacctaggattatgtacatggttatcagttcaaattgttgaagaacagttctccctaacttgctatgctctaccactggaaggctttgatgttgtgttgggagtacaatgtgatccttaggtctgattccatgggacttcgaacgtctatcaatgacattctggaagcaagaccacaaggtttgttggacagggatgtgtgactataagccacgctgttgtgcattttcagaagggaaggaattggtggacaaattattgtactcctacgaagacttgtttgcataaccctgcggcctaccaccagcccgacgccatgatcaccacatcaaattactgcctggcacgacaccaatggttgtacgttcgtaccgatacccctagctcttgaaggatgaaattgagaagcaatgtgaggacatgctgcatcgaggaattataagggaatgcacgccaacattctcttctccggtgctccttgtgaagaagtcagatggaacatggagattctgtgtggactaccatgaactcaatgggaagacggtgaatgaccatttccccataccagtggttgatgaattgttagatgagctttagggttctagattcttcaccaagctggaccttcggagtgggtaccaccaggtgcgaatgcaccccaaagatgttgacaaaacaaaattccgaacacaccgaggccactttgagttcctcgtcatgccattcggcctcaccaacgccccgtccacattccaaagcttgatgaatgatatcctcaactcattcatatgcaagtttgtgctagtatttttcgatgacatcctgatttatagcaagacgtgggcagctcacctccaacacgtcaagtaagtgttccaaacactgagaacacataagttggcattgaagcgctccaagtgtttttatggggttactagtgtgtcatatttgggccatataatctcggcatatggtgtggctatggatcctgagaaggtagcaacattagagacttagtcgcagcccagaactttaagggtgctacgtggtttccttgggcttacaggatattaccggaagttcattgcaagctatggcgaaatcgcagcaccattaactgtcctattgaagaaggaatcatttcagtggtcggaggcatcaacaaaggcattcctcgcactcaaacaggcacacatgaccgtctccttgctgcagatgcctgacttgagcaagagttttgtggttgttccgacgcgtcaggttccaggtttggggcagttctccaccaaggtgcacgagcgtgtggcatattttagtaaagcggtggccagtggcggagctctataaaattaacatcccgagccactctataaaacttgaaggttactttaaacagcccctaatatattgtgcggctaattataccgctaaaactaaatatatcacaaacataaactaagataatatttacttcaattcagcatctaaaaatacaataaacttgattaaaaatataaaagtacataattagagacgatttagtccttccccgcctctaataacttcatcaacattagcacgtggatttgaacctacacattacaagttcaatatttgtataaaatgagagatacaacattaacaatataactaatgaatgcaaaaatatataagtgagtcaaactactatcagtcataacatttaacaatctagtatttagctcgttgttcactagtaattagtaaaaaaaatttgagaaaatgagaagcccttacacgctggcctgaaacctggaagcctggaactgga

SEQ ID NO: 70331 - DNA, 1175 bp, Zea Mays
ctgaaacatgtagtctgatgtctgcttacgtaaagaattcattaggtgcatgtttcataacataatatcatgaagggtacagttcctataactaaagtaactcaataagagggacaattttaagatttcaacacactttattcatcagaggaaaaaaagtataaaaaaactctgcagctaatgcattaatgtcacctaagttataagtcaaattatcttctccaagcagtcatccaggttgggagttgccttatccatgacggacagaaagatgtaaggaaatgctaataccactagtcactgcttagtaagtgggacacaaaatgcattaattgaaaacatataatttcatgaaagaaaacatcccagcagattttaagactaaactaggaaatgctcttttacataaaaggccatgttaaaggtataatatatggagtatcttaattctgttgcaaataggtattgataactaatgcatccagctttcaagaatcatgagtatgtcatatatatttgtgaatgtaaatttgcaggaagacaaggtctagaaaaagtgaaaattagaacttttcagtggttcattggagaaagaaacggcatcaataatgcttacactgcactatcaagaattttctagagtaccgtatcaaataaatggcaactaaacagtcttcagctaacagttagtagacatatgatggctcctcctttgactataacctcagcctaaatacaattccattccagtctctccttcatttttatttatttgaaagtggcattgaaaggaaattgagtaagtatcaaaagttattagtattggtagatcaacaaagtttctgttagaaacaagtgggcagagcagaaaatatataccttgccatccattgccttgacagctttctctgcctctgcttgcgatgaatatttgacaaaaccaaatcccttcatccttccagtttggtggtctctcataagtcgagctgcacttaataagatacaaaagcagaattaaactgaaatactgccattttgattcaactaacctaaccgatactgttaaagagacaaataaactatcaagtttcattaagaaagacgaaggttcccaactggaagtggtaaagagcatgaggcagggacgataatagtagtagcacaagtaatgtacc

SEQ ID NO: 70332 - DNA, 4762 bp, Zea Mays
cagcaattcccatgtttttgcatcgaaaggactaaaggaggcctggtttccctgctcccgtaagccgcgtgcgctctctcgctctcccagagtcccagcgcgacgactggcgaccgccgcccccaccctgcgccacgtgccgagggcttcgccgggcccttcgccgctcgccggcgacgagcacacaccagatccaccaatctcgggcctgttccctttcaatacacgtgggttgttgtcgaaaatgaaccaatgcccccctcaatctctcccaacataaatggattgtggaaatttatattgtttctgagcgaggactacaatatacatgtattacatccactaccttcgttcgttatccggtatcctatactgatcgccccctgcctcaagtggatccacaatggttctgcctcgtcgaaccccagaactgctggaggccgatgaagcccaaagctttgtgcataagcttcagctcagtgtctcggggggccttcctcatgctgtgccagtgccaggcttgagaacagaagaacatgagctggttaaagctgttttccaggtgctgcaaggcttcgagacgtcctggttctattgggacagtgatgtgccttggtaccgtgagaaagcggggatatatgtggctcacttgtcactgacgggtcttaggtctttgttgagtccattcctgttcacggcaacatgcttaaagcaagtagagctttttgttgggaaggttaggatgcaacatcacaagattccgacgttggatgcgttcgctagctcggttgattcttggcttaagtccaaaattccaatgactgttgtcatattattaacatcagaggctccgcaaagcagctctgaaggaggaagaacagcaatttgtttcagtcaacaagactataactctgctgggattaactgattcattgtcaagtttacgttctggagcagaacatttgtctcaagttttgcatggagctgtgccagatggcttttgggattctggtgcacatatggcatctagtgaagttgcagttcatattcttgaccatctcttcaagaagttaaatgaagtatgtcttctggaagatggcgagggtgaaccatttcatatgctgctagtgatatttactggaagtttattaccttatcttcaatgtcttgattcctggctatatgatggtatccttgatgacccttatgaagagatgttcttttatgcaaataatgcggttacaatagatcagccgtcattctgggaaatgagctatatgcttagagtaagaggttcaagagttgacagttcaacaactttaactgagagcgaatctatcaagaaaaaaggatcaagcaataaggaatctactactgcaggagcttgcttgaaagtgaacaatcaaggttgtgtgtatatattatgcccaacatttttgaaggatgttgcgagggccattgtatctgcgggaaaatcctttcaacttgtcgaacatgttcaagacgtacatcagattcaaactcacaaaagtacacatcggtccaatttgtatcaagatactaattgcagtggtcaacagaaattttggccagatatgtcaaatttaagaatccatgatggtcctccaagaaataaagatgctcttgaagtatccacaagtcagtttgggaatgattctcgtgaaatgggactcctaaccttgtctgagatcttcttgatatgcatatctggtctgttagaaaatggtgaccatgtatatgagtacttaagaacactgcatgctgataatgttccaaataacaatgcttttatggaaaatgagagcaacttgaaagaaacagagggtacatgcacagggaacatcattgagaagacttgggtaaagctcctaaaggatgctacatcaggaaggaaatgtaatggcatggaggagaccatacatgctgttatagataaggcaggatttgcctctggttgccccaaagatgcatcttccaatgtcgtagaaggggttttcactttatcttgttacgaaaacccagctatcactgcttgcagagaagtgctaatgaggaacccagcttcttggagtgaactgaatatatctgaaagttttcatctccctccactgaatgatgggaacatgcgaagagctatatttgctgatgggcattctgcaggaactagcactgattataagtttggtttccagtttgatgatctggaacatgtccgccaagaagatgacagaaggaccttggaggacctttacgcatttccaacccttcttccttgcgcaaaagaaaatgcgctgctgtcagaaattttacctatgcagaaagatagtacactagcatcgagagttttgaagtttattcagaatatgagcatgaaagatccccttcagccagtgggtatcatccaagaatgcctttccaaatgtataaagagacaggtcgatctcataggcaatcaaatcctgtgcaagctaatgggtgaatggagattaatggatgaactgtttgtgttacgtgctatttatttgctaggatcaggtgacatgttgcagcagtttctgataacaatttttgataagcttgatagagggaattcctgggatgacgactttgagttgaataatttattgcaggaatccataagaaactcagctgacaaaatgctcctgacagcaccagattctttggttgtttcattagcaaaatatgacacacacaatggtgaggaaggtatatcaacttccaaaaaaggtcgtgcacttggttttggcattgatgcccttgacatgctgaattttacatataaggtgtcttggcctcttgatctaattattaatacagaggcactgaagaagtataatcaggtaatgggattcttactgaaggtcaaacgagcaaagttcgttttggatgaaacacgaaagtggatgtggaaggccagaggcaggaccgcgcacaatttcaaacaacacctaatagtggcacagaagctcctccattttgtcgatgcatttcatcagtatgtcatggaccgagtttatcatagtgcatggactgagctttgtgatggcatgacggctgctaccacactggatgaagtcatggaagttcacgaggcatatctctcttctattcaacgacaatgctttgtggcctctgataagctgtgggccctcattgccagtcgagttaagactattcttggattggcactggacttccacaatgtagaacaaactctcagtaccggtgggacggcttcagctgtgaggacacgatgcgagatggaaatcgaccggattgagaagcaatttgatgagtgtgtcatatttctcctgaggatcctatctttcaagctcaatgtgggtcatttcccccatcttgccgatctagttacaaggatcaattacaatcactatttcatgtctgatagtgggagcttctctgctattcctgggtcccggccacggtagtagactagtagagcaagcagtggacagaattgttggtgttgcacctggaactgagttgtgacaccagcgtgccgttgtgcaacatcagcatgattggtaagagaaaagcagaccaaaacgtccggaatggtgggcagggcaacaattttggagacttggagcgtaaaggagaaaatgcccaaaacaacacatacacaaagcaacattgttgtgggttttttcacatgacaatatgtttggattgcagtcttaagttgccacacccaacgttagaaagaaagatcttggttaatcaaccaggctagttcgtagggcacagagctgccaacatttcttacacaggtcaacggataccaatgcacggcaacctttcagatggcaagtgaaatcctctcgtggggagggtgtcctacttgctttcgtgtccttttgccatctccacaaagatcaatcttccacgtagaatctgttgacatgcagttaattagagaaagtttaagcacaagaatatcagataaagccgatgccagttcacatctggctcaggcaagattcagaagaaagtgttgctgatgacatagtggagttccataacgctcagtacatggacgtgaacaaaccaactggagcactttgtgtgcagaaaatatgccaaggtacaattgcatttaacaaataaagctgcaaatcaacataaaactatgttcatcttgctggaaactagtgagtttccagcttgtgccgagtcgtgattatgcattttttttgaaattcctaaactaatgctgctgaaggaaagtgcaatggaactatggttcttaaggcgtcgcctagtcgtccgggcgccaaatccatggtgtcagctgtcgccttgccaaaaccacagcaaaatgagagagggaggggaagaagagagaggggaaggcagatctggcgccggtggagcgtcggcggcacgagaacgcgagcgcggggcggaggggagcgaagaacttcggtggcgcaagggcctggcgacgacgcgcaggtccgacactggtgtcccgcgtggcctatggcggcgttggacggaggagcgagggactggagacggcgtggagtccagaggcagcgtcgggcggaggagcgatatggcaaaggtcatagtctataccactatataatccaccacttcaaataaatctagagccacaccaacaaatgcaaccagaaaaccaacacattaaaaattaacggacaaaatcctatctaaacttctcagttctcttact

SEQ ID NO: 70333 - DNA, 3649 bp, Zea Mays
ctaaaggaggcctggtttccctgctcccgtaagccgcgtgcgctctctcgctctcccagagtcccagcgcgacgactggcgaccgccgcccccaccctgcgccacgtgccgagggcttcgccgggcccttcgccgctcgccggcgacgagcacacaccagatccaccaatctcgggcctgttccctttcaatacacgtgggttgttgtcgaaaatgaaccaatgcccccctcaatctctcccaacataaatggattgtggaaatttatattgtttctgagcgaggactacaatatacatgtattacatccactaccttcgttcgttatccggtatcctatactgatcgccccctgcctcaagtggatccacaatggttctgcctcgtcgaaccccagaactgctggaggccgatgaagcccaaagctttgtgcataagcttcagctcagtgtctcggggggccttcctcatgctgtgccagtgccaggcttgagaacagaagaacatgagctggttaaagctgttttccaggtgctgcaaggcttcgagacgtcctggttctattgggacagtgatgtgccttggtaccgtgagaaagcggggatatatgtggctcacttgtcactgacgggtcttaggtctttgttgagtccattcctgttcacggcaacatgcttaaagcaagtagagctttttgttgggaaggttaggatgcaacatcacaagattccgacgttggatgcgttcgctagctcggttgattcttggcttaagaggctccgcaaagcagctctgaaggaggaagaacagcaatttgtttcagtcaacaagactataactctgctgggattaactgattcattgtcaagtttacgttctggagcagaacatttgtctcaagttttgcatggagctgtgccagatggcttttgggattctggtgcacatatggcatctagtgaagttgcagttcatattcttgaccatctcttcaagaagttaaatgaagtatgtcttctggaagatggcgagggtgaaccatttcatatgctgctagtgatatttactggaagtttattaccttatcttcaatgtcttgattcctggctatatgatggtatccttgatgacccttatgaagagatgttcttttatgcaaataatgcggttacaatagatcagccgtcattctgggaaatgagctatatgcttagagtaagaggttcaagagttgacagttcaacaactttaactgagagcgaatctatcaagaaaaaaggatcaagcaataaggaatctactactgcaggagcttgcttgaaagtgaacaatcaaggttgtgtgtatatattatgcccaacatttttgaaggatgttgcgagggccattgtatctgcgggaaaatcctttcaacttgtcgaacatgttcaagacgtacatcagattcaaactcacaaaagtacacatcggtccaatttgtatcaagatactaattgcagtggtcaacagaaattttggccagatatgtcaaatttaagaatccatgatggtcctccaagaaataaagatgctcttgaagtatccacaagtcagtttgggaatgattctcgtgaaatgggactcctaaccttgtctgagatcttcttgatatgcatatctggtctgttagaaaatggtgaccatgtatatgagtacttaagaacactgcatgctgataatgttccaaataacaatgcttttatggaaaatgagagcaacttgaaagaaacagagggtacatgcacagggaacatcattgagaagacttgggtaaagctcctaaaggatgctacatcaggaaggaaatgtaatggcatggaggagaccatacatgctgttatagataaggcaggatttgcctctggttgccccaaagatgcatcttccaatgtcgtagaaggggttttcactttatcttgttacgaaaacccagctatcactgcttgcagagaagtgctaatgaggaacccagcttcttggagtgaactgaatatatctgaaagttttcatctccctccactgaatgatgggaacatgcgaagagctatatttgctgatgggcattctgcaggaactagcactgattataagtttggtttccagtttgatgatctggaacatgtccgccaagaagatgacagaaggaccttggaggacctttacgcatttccaacccttcttccttgcgcaaaagaaaatgcgctgctgtcagaaattttacctatgcagaaagatagtacactagcatcgagagttttgaagtttattcagaatatgagcatgaaagatccccttcagccagtgggtatcatccaagaatgcctttccaaatgtataaagagacaggtcgatctcataggcaatcaaatcctgtgcaagctaatgggtgaatggagattaatggatgaactgtttgtgttacgtgctatttatttgctaggatcaggtgacatgttgcagcagtttctgataacaatttttgataagcttgatagagggaattcctgggatgacgactttgagttgaataatttattgcaggaatccataagaaactcagctgacaaaatgctcctgacagcaccagattctttggttgtttcattagcaaaatatgacacacacaatggtgaggaaggtatatcaacttccaaaaaaggtcgtgcacttggttttggcattgatgcccttgacatgctgaattttacatataaggtgtcttggcctcttgatctaattattaatacagaggcactgaagaagtataatcaggtaatgggattcttactgaaggtcaaacgagcaaagttcgttttggatgaaacacgaaagtggatgtggaaggccagaggcaggaccgcgcacaatttcaaacaacacctaatagtggcacagaagctcctccattttgtcgatgcatttcatcagtatgtcatggaccgagtttatcatagtgcatggactgagctttgtgatggcatgacggctgctaccacactggatgaagtcatggaagttcacgaggcatatctctcttctattcaacgacaatgctttgtggcctctgataagctgtgggccctcattgccagtcgagttaagactattcttggattggcactggacttccacaatgtagaacaaactctcagtaccggtgggacggcttcagctgtgaggacacgatgcgagatggaaatcgaccggattgagaagcaatttgatgagtgtgtcatatttctcctgaggatcctatctttcaagctcaatgtgggtcatttcccccatcttgccgatctagttacaaggatcaattacaatcactatttcatgtctgatagtgggagcttctctgctattcctgggtcccggccacggtagtagactagtagagcaagcagtggacagaattgttggtgttgcacctgggtgatttttcctacccttttttgagaagaaccagaggcgtgaactgagttgtgacaccagcgtgccgttgtgcaacatcagcatgattggtaagagaaaagcagaccaaaacgtccggaatggtgggcagggcaacaattttggagacttggagcgtaaaggagaaaatgcccaaaacaac

SEQ ID NO: 70334 - DNA, 3814 bp, Zea Mays
gcaattcccatgtttttgcatcgaaaggactaaaggaggcctggtttccctgctcccgtaagccgcgtgcgctctctcgctctcccagagtcccagcgcgacgactggcgaccgccgcccccaccctgcgccacgtgccgagggcttcgccgggcccttcgccgctcgccggcgacgagcacacaccagatccaccaatctcgggcctgttccctttcaatacacgtgggttgttgtcgaaaatgaaccaatgcccccctcaatctctcccaacataaatggattgtggaaatttatattgtttctgagcgaggactacaatatacatgtattacatccactaccttcgttcgttatccggtatcctatactgatcgccccctgcctcaagtggatccacaatggttctgcctcgtcgaaccccagaactgctggaggccgatgaagcccaaagctttgtgcataagcttcagctcagtgtctcggggggccttcctcatgctgtgccagtgccaggcttgagaacagaagaacatgagctggttaaagctgttttccaggtgctgcaaggcttcgagacgtcctggttctattgggacagtgatgtgccttggtaccgtgagaaagcggggatatatgtggctcacttgtcactgacgggtcttaggtctttgttgagtccattcctgttcacggcaacatgcttaaagcaagtagagctttttgttgggaaggttaggatgcaacatcacaagattccgacgttggatgcgttcgctagctcggttgattcttggcttaagaggctccgcaaagcagctctgaaggaggaagaacagcaatttgtttcagtcaacaagactataactctgctgggattaactgattcattgtcaagtttacgttctggagcagaacatttgtctcaagttttgcatggagctgtgccagatggcttttgggattctggtgcacatatggcatctagtgaagttgcagttcatattcttgaccatctcttcaagaagttaaatgaagtatgtcttctggaagatggcgagggtgaaccatttcatatgctgctagtgatatttactggaagtttattaccttatcttcaatgtcttgattcctggctatatgatggtatccttgatgacccttatgaagagatgttcttttatgcaaataatgcggttacaatagatcagccgtcattctgggaaatgagctatatgcttagagtaagaggttcaagagttgacagttcaacaactttaactgagagcgaatctatcaagaaaaaaggatcaagcaataaggaatctactactgcaggagcttgcttgaaagtgaacaatcaaggttgtgtgtatatattatgcccaacatttttgaaggatgttgcgagggccattgtatctgcgggaaaatcctttcaacttgtcgaacatgttcaagacgtacatcagattcaaactcacaaaagtacacatcggtccaatttgtatcaagatactaattgcagtggtcaacagaaattttggccagatatgtcaaatttaagaatccatgatggtcctccaagaaataaagatgctcttgaagtatccacaagtcagtttgggaatgattctcgtgaaatgggactcctaaccttgtctgagatcttcttgatatgcatatctggtctgttagaaaatggtgaccatgtatatgagtacttaagaacactgcatgctgataatgttccaaataacaatgcttttatggaaaatgagagcaacttgaaagaaacagagggtacatgcacagggaacatcattgagaagacttgggtaaagctcctaaaggatgctacatcaggaaggaaatgtaatggcatggaggagaccatacatgctgttatagataaggcaggatttgcctctggttgccccaaagatgcatcttccaatgtcgtagaaggggttttcactttatcttgttacgaaaacccagctatcactgcttgcagagaagtgctaatgaggaacccagcttcttggagtgaactgaatatatctgaaagttttcatctccctccactgaatgatgggaacatgcgaagagctatatttgctgatgggcattctgcaggaactagcactgattataagtttggtttccagtttgatgatctggaacatgtccgccaagaagatgacagaaggaccttggaggacctttacgcatttccaacccttcttccttgcgcaaaagaaaatgcgctgctgtcagaaattttacctatgcagaaagatagtacactagcatcgagagttttgaagtttattcagaatatgagcatgaaagatccccttcagccagtgggtatcatccaagaatgcctttccaaatgtataaagagacaggtcgatctcataggcaatcaaatcctgtgcaagctaatgggtgaatggagattaatggatgaactgtttgtgttacgtgctatttatttgctaggatcaggtgacatgttgcagcagtttctgataacaatttttgataagcttgatagagggaattcctgggatgacgactttgagttgaataatttattgcaggaatccataagaaactcagctgacaaaatgctcctgacagcaccagattctttggttgtttcattagcaaaatatgacacacacaatggtgaggaaggtatatcaacttccaaaaaaggtcgtgcacttggttttggcattgatgcccttgacatgctgaattttacatataaggtgtcttggcctcttgatctaattattaatacagaggcactgaagaagtataatcaggtaatgggattcttactgaaggtcaaacgagcaaagttcgttttggatgaaacacgaaagtggatgtggaaggccagaggcaggaccgcgcacaatttcaaacaacacctaatagtggcacagaagctcctccattttgtcgatgcatttcatcagtatgtcatggaccgagtttatcatagtgcatggactgagctttgtgatggcatgacggctgctaccacactggatgaagtcatggaagttcacgaggcatatctctcttctattcaacgacaatgctttgtggcctctgataagctgtgggccctcattgccagtcgagttaagactattcttggattggcactggacttccacaatgtagaacaaactctcagtaccggtgggacggcttcagctgtgaggacacgatgcgagatggaaatcgaccggattgagaagcaatttgatgagtgtgtcatatttctcctgaggatcctatctttcaagctcaatgtgggtcatttcccccatcttgccgatctagttacaaggatcaattacaatcactatttcatgtctgatagtgggagcttctctgctattcctgggtcccggccacggtagtagactagtagagcaagcagtggacagaattgttggtgttgcacctgggtgatttttcctacccttttttgagaagaaccagaggcgtggtttgtttactttcgaaatagaaagctccagaacagtgctaatgcttctctctccaaattggaacaaaaaatcatgcctcgggcttgttacaatatctatatgtagattgttttcaaaaggatgacactaaaaaagaactgagttgtgacaccagcgtgccgttgtgcaacatcagcatgattggtaagagaaaagcagaccaaaacgtccggaatggtgggcagggcaacaattttggagacttggagcgtaaaggagaaaatgcccaaaacaac

SEQ ID NO: 70335 - DNA, 135 bp, Zea Mays
atgcacaaagcatatcaaatgatgggacaatgtaccaaaatcctaggcatatgccatctttcaaccccagaacctgctcagaagacccttcttttcttttttcatacggttctcaaggtttgggaactcaactga

SEQ ID NO: 70336 - DNA, 719 bp, Zea Mays
ctttgctcggctaactagtgcagtgctgtgcaagtggccagtggccatatcgtaatttctttgcaaggaagggcagccattcagtatcagtatcagtcttgaaaaaataccaacagttttgaactgcagctttacctgtgaataaaattatataaaaattgcctgcttccggagactgaaatacacaacacgtatctgtacagcgacaaagtagaagagaagaaggagctaatcaaggggataacgctgggcaacaaagacaagttccagcttacacctctcccccaggaagtccttgtgttgtggggagagcacgaccagatattccccgtcgagaaggcatttcaagtggcaaggaaacttggagcgaatgctaggctggaggtcctcaaggacaccggccacatgcctcaagaagaggatccaaagcggttcaacgaggcaatcctcaacttcttgcttccagctccaaagtcgtccttgtaacgcgatatatatcccatagttattcacttattattattcaggcccaaggatcaccggagagttcacgatttcgatatgcacattctgcccgatcagtgcagtctttgtcgctttggtatcacctcaccttcaagattgattatggaggaattggaaagtatgttatggaaactattgctatttatctgccaatatatatcttcccgtggaatgcatgcttggattaatttgtc

SEQ ID NO: 70337 - DNA, 2004 bp, Zea Mays
aagataataattttgctgaatggtggagaaaggtttcgagaaaatatcagtaaagagaaaagaaaatgattgaactccctgatcatcttagcctggagtatatggaagcatagaattaattgtatttttaagactgaatctccctctgttaatctgattttgtctaattttaaggatgagcacatcagcacagcctgtggtgcctggatggagccaaaaatctctaagccttagacatttgtggaactaattagtttctgttttgggtcgggctaggtgtgttttttctttctgttgtcctagaggtgtgttcccttctctcatgatacatgacctccgtatgagagctttggggttgtatagaggccttctttctctctttgattaatgaaacacagctctcctgccctttctaaaaaaacaactatacagtaaccttgttgaatttaacattgcttgtgaagcctcctttattgcaggtagtactactattccacatttacaaccatatatcaacaacataacaaaatcagagtttcaaatcttagtcatctgagcaaactggctcgtagaaacgatacagccagtagaattgatgaagctgacagattacgtatagtcttccttgcaatggaagatgcaagagctgtgctcattaagcttgctgacaggctacacaacatgaggactctggattctttgtccaagactaaacagcagagcgttgcaaaggaaacgttggagatatttgctcccttggcgaatcagttgggcatcttgaattggaaggaacaacttgaaaacctgtgcttcaagtatctttacccagaaaattttgatgaactgtcaacaaaacttatcgagatctataacatagatatgattgcagctgcaacaagacgacttgaacaagcccttcaggtgagaggactatcctattatgccatatatgggaggcacaagagcatgtacagcatctacagaaaaatggcaaggaagaagctggtcatggataaaatttatgatatacatggggtgcgtgttattctcgagaataaggctgattgttttgccacattagagattatccatcacctatggcctagaattcctggcaagttcaaagattatatcaacagccccaaacccaacaggtatcagtccctgcacacggttgttctcactgaacaaacgctgccactcgagatccaaattcgtacgagggacatgcatttgcaggcggagttcggaattgctgctcattggagatataaggaaggctatccttcatcacttgcatgtgatgcttcatcgaaggaaacgcacactatcccatctcactctgacgcctgtctgttgtcctactcaaaacaatgtgatcacaaagggcccgtacttgtaatacttctggagaatgaaaagatgtcagtgcaagaaatcccccaaaattggacgatactggacctactgaaaaggtcttcaaactatgggatgccgttgaggctgaggctgaactgccatgccgtccacaactggaaccaggagctaaaaatgggcgacgtgcttgaactgatcccttcgaccccatgcaaatccagaggtcacacgagggagctccaccagaagtttgatcaccgtctcgccgtttcccagtcctgacagccttagaacaccgtaccttgtaaatacatgacgtgaacccatataaatcatctgaagtttagatttcccctgtgcagacaaaatagagatgaggagtcatcaaaactctgtaaccgtcgtatactcattcaagccaaaacaagacagcatgtaatgtaaatcagtatatacatgatacacatggttttagctcaggaaatgacaatatataccgacgacgatgcgcttacggtttttagtagcaaaaggaccttttgtcttgtgcttaaactttctgtctgcgctgttttttcttctccatcctctaaaaccgtgtccagcaggttatccatcatttgttat

SEQ ID NO: 70338 - DNA, 3459 bp, Zea Mays
cccaactccctaaatcattctccacgagaccacgatgcctcttccatcaccgctctctacttctccttcgcctgcaagccagccagcctccattcgcgtggccgccaaaggcgccaaccgccggcgagctatgacaccatcggtctcctgcccggtcaagtgccgcccccacccctgccttgccccgcagccaccagcgccatcaccggagcttctcgccgctcgcggcgccccgatcgccggcgagctgcgggcgtgccggagccctccgtacttgcctctctcgcgctctgccgactccttggaactccgggcggcgtgccgcggcgctccgcctgccagccgagcccgtgctgccgtggcgctgggcggtgacggcccgtccgcggcgctgatagccggcgcacagtcgcgtcacgccatcttccgcgacgagctcgtgcggagagccttcactgccgccgaagcggctcaccgcggccaggtgcgcgcgagcggcgacccgtacctacaacactgcgtggagacagcggcgctgctcgcggagctgggcgccggccctgccgtcgttgctgccggcctgctgcacgacacggtcgacgacgcgggcctgggctacggtttcatctccgagcatttcggtgccggtgtcgccgaccttgtaaaaggggtaattactttgatccctttcgatatgattgtctgggcacaggcgatagtgatgccttgattgtatagatagtacccgatatgagtataattcaactatacagtaacctcttaaacttggcctccagacaacaagataataattttgctgaatggtggagaaaggtttcgagaaaatatcagtaaagagaaaagaaaatgattgaactccctgatcatcttagcctggagtatatggaagcatagaattaattgtatttttaagactgaatctccctctgttaatctgattttgtctaattttaaggatgagcacatcagcacagcctgtggtgcctggatggagccaaaaatctctaagccttagacatttgtggaactaattagtttctgttttgggtcgggctaggtgtgttttttctttctgttgtcctagaggtgtgttcccttctctcatgatacatgacctccgtatgagagctttggggttgtatagaggccttctttctctctttgattaatgaaacacagctctcctgccctttctaaaaaaacaactatacagtaaccttgttgaatttaacattgcttgtgaagcctcctttattgcaggtagtactactattccacatttacaaccatatatcaacaacataacaaaatcagagtacgtcatcgatgccctgcacttgagcataacataagcggcgcaggagtgcaagatcagatcacaagcgactgcagtcctgcaaagaaaccttctctcggactcctctagttttatttctggtatttattggcttagtcgtattcgtgactgggaattgcgtgttgccatgtctctgattgtgactggcagaacttattgatcgttacttcgttcatggagcttctagaaagggtccttgttgtgtctatcccagtatcacgttactatcacctctacattattataatgggcacttgctgaatctagtgtaatgtaaaatcagttcctggtgggttagcagatccaatcagcactgtgctgtatgatgcttacctgtttccattctttccctttcgttttcttttttaatagaatgattcgtttatggtgtcacaccaatttatttcgggatatggaagtcttttgttttgtttattgtgctcatgaatgatatttattattggttgtctaaagtccacatttacaactaatatatgcagaggaaacttcagttgcttgtgacatcttggcttattcttttggacacgatgaggatattgtgtctcgtaccttcatttgactaaacaatggttttgttgccttttttgtaggtttcaaatcttagtcatctgagcaaactggctcgtagaaacgatacagccagtagaattgatgaagctgacagattacgtatagtcttccttgcaatggaagatgcaagagctgtgctcattaagcttgctgacaggctacacaacatgaggactctggattctttgtccaagactaaacagcagagcgttgcaaaggaaacgttggagatatttgctcccttggcgaatcagttgggcatcttgaattggaaggaacaacttgaaaacctgtgcttcaagtatctttacccagaaaattttgatgaactgtcaacaaaacttatcgagatctataacatagatatgattgcagctgcaacaagacgacttgaacaagcccttcaggtgagaggactatcctattatgccatatatgggaggcacaagagcatgtacagcatctacagaaaaatggcaaggaagaagctggtcatggataaaatttatgatatacatggggtgcgtgttattctcgagaataaggctgattgttttgccacattagagattatccatcacctatggcctagaattcctggcaagttcaaagattatatcaacagccccaaacccaacaggtatcagtccctgcacacggttgttctcactgaacaaacgctgccactcgagatccaaattcgtacgagggacatgcatttgcaggcggagttcggaattgctgctcattggagatataaggaaggctatccttcatcacttgcatgtgatgcttcatcgaaggaaacgcacactatcccatctcactctgacgcctgtctgttgtcctactcaaaacaatgtgatcacaaagggcccgtacttgtaatacttctggagaatgaaaagatgtcagtgcaagaaatcccccaaaattggacgatactggacctactgaaaaggtcttcaaactatgggatgccgttgaggctgaggctgaactgccatgccgtccacaactggaaccaggagctaaaaatgggcgacgtgcttgaactgatcccttcgaccccatgcaaatccagaggtcacacgagggagctccaccagaagtttgatcaccgtctcgccgtttcccagtcctgacagccttagaacaccgtaccttgtaaatacatgacgtgaacccatataaatcatctgaagtttagatttcccctgtgcagacaaaatagagatgaggagtcatcaaaactctgtaaccgtcgtatactcattcaagccaaaacaagacagcatgtaatgtaaatcagtatatacatgatacacatggttttagctcaggaaatgacaatatataccgacgacgatgcgcttacggtttttagtagcaaaaggaccttttgtcttgtgcttaaactttctgtctgcgctgttttttcttctccatcctctaaaaccgtgtccagcaggttatccatcatttgttat

SEQ ID NO: 70339 - DNA, 2110 bp, Zea Mays
gccgaacagaaacttccctcttcaccccgcgcgaaactggcaagcccaactccctaaatcattctccacgagaccacgatgcctcttccatcaccgctctctacttctccttcgcctgcaagccagccagcctccattcgcgtggccgccaaaggcgccaaccgccggcgagctatgacaccatcggtctcctgcccggtcaagtgccgcccccacccctgccttgccccgcagccaccagcgccatcaccggagcttctcgccgctcgcggcgccccgatcgccggcgagctgcgggcgtgccggagccctccgtacttgcctctctcgcgctctgccgactccttggaactccgggcggcgtgccgcggcgctccgcctgccagccgagcccgtgctgccgtggcgctgggcggtgacggcccgtccgcggcgctgatagccggcgcacagtcgcgtcacgccatcttccgcgacgagctcgtgcggagagccttcactgccgccgaagcggctcaccgcggccaggtgcgcgcgagcggcgacccgtacctacaacactgcgtggagacagcggcgctgctcgcggagctgggcgccggccctgccgtcgttgctgccggcctgctgcacgacacggtcgacgacgcgggcctgggctacggtttcatctccgagcatttcggtgccggtgtcgccgaccttgtaaaaggggtttcaaatcttagtcatctgagcaaactggctcgtagaaacgatacagccagtagaattgatgaagctgacagattacgtatagtcttccttgcaatggaagatgcaagagctgtgctcattaagcttgctgacaggctacacaacatgaggactctggattctttgtccaagactaaacagcagagcgttgcaaaggaaacgttggagatatttgctcccttggcgaatcagttgggcatcttgaattggaaggaacaacttgaaaacctgtgcttcaactgcaacaagacgacttgaacaagcccttcaggtgagaggactatcctattatgccatatatgggaggcacaagagcatgtacagcatctacagaaaaatggcaaggaagaagctggtcatggataaaatttatgatatacatggggtgcgtgttattctcgagaataaggctgattgttttgccacattagagattatccatcacctatggcctagaattcctggcaagttcaaagattatatcaacagccccaaacccaacaggtatcagtccctgcacacggttgttctcactgaacaaacgctgccactcgagatccaaattcgtacgagggacatgcatttgcaggcggagttcggaattgctgctcattggagatataaggaaggctatccttcatcacttgcatgtgatgcttcatcgaaggaaacgcacactatcccatctcactctgacgcctgtctgttgtcctactcaaaacaatgtgatcacaaagggcccgtacttgtaatacttctggagaatgaaaagatgtcagtgcaagaaatcccccaaaattggacgatactggacctactgaaaaggtcttcaaactatgggatgccgttgaggctgaggctgaactgccatgccgtccacaactggaaccaggagctaaaaatgggcgacgtgcttgaactgatcccttcgaccccatgcaaatccagaggtcacacgagggagctccaccagaagtttgatcaccgtctcgccgtttcccagtcctgacagccttagaacaccgtaccttgtaaatacatgacgtgaacccatataaatcatctgaagtttagatttcccctgtgcagacaaaatagagatgaggagtcatcaaaactctgtaaccgtcgtatactcattcaagccaaaacaagacagcatgtaatgtaaatcagtatatacatgatacacatggttttagctcaggaaatgacaatatataccgacgacgatgcgcttacggtttttagtagcaaaaggaccttttgtcttgtgcttaaactttctgtctgcgctgttttttcttctccatcctctaaaaccgtgtccagcaggttatccatcatttgttat

SEQ ID NO: 70340 - DNA, 2976 bp, Zea Mays
gccgaacagaaacttccctcttcaccccgcgcgaaactggcaagcccaactccctaaatcattctccacgagaccacgatgcctcttccatcaccgctctctacttctccttcgcctgcaagccagccagcctccattcgcgtggccgccaaaggcgccaaccgccggcgagctatgacaccatcggtctcctgcccggtcaagtgccgcccccacccctgccttgccccgcagccaccagcgccatcaccggagcttctcgccgctcgcggcgccccgatcgccggcgagctgcgggcgtgccggagccctccgtacttgcctctctcgcgctctgccgactccttggaactccgggcggcgtgccgcggcgctccgcctgccagccgagcccgtgctgccgtggcgctgggcggtgacggcccgtccgcggcgctgatagccggcgcacagtcgcgtcacgccatcttccgcgacgagctcgtgcggagagccttcactgccgccgaagcggctcaccgcggccaggtgcgcgcgagcggcgacccgtacctacaacactgcgtggagacagcggcgctgctcgcggagctgggcgccggccctgccgtcgttgctgccggcctgctgcacgacacggtcgacgacgcgggcctgggctacggtttcatctccgagcatttcggtgccggtgtcgccgaccttgtaaaaggggtagtactactattccacatttacaaccatatatcaacaacataacaaaatcagagtacgtcatcgatgccctgcacttgagcataacataagcggcgcaggagtgcaagatcagatcacaagcgactgcagtcctgcaaagaaaccttctctcggactcctctagttttatttctggtatttattggcttagtcgtattcgtgactgggaattgcgtgttgccatgtctctgattgtgactggcagaacttattgatcgttacttcgttcatggagcttctagaaagggtccttgttgtgtctatcccagtatcacgttactatcacctctacattattataatgggcacttgctgaatctagtgtaatgtaaaatcagttcctggtgggttagcagatccaatcagcactgtgctgtatgatgcttacctgtttccattctttccctttcgttttcttttttaatagaatgattcgtttatggtgtcacaccaatttatttcgggatatggaagtcttttgttttgtttattgtgctcatgaatgatatttattattggttgtctaaagtccacatttacaactaatatatgcagaggaaacttcagttgcttgtgacatcttggcttattcttttggacacgatgaggatattgtgtctcgtaccttcatttgactaaacaatggttttgttgccttttttgtaggtttcaaatcttagtcatctgagcaaactggctcgtagaaacgatacagccagtagaattgatgaagctgacagattacgtatagtcttccttgcaatggaagatgcaagagctgtgctcattaagcttgctgacaggctacacaacatgaggactctggattctttgtccaagactaaacagcagagcgttgcaaaggaaacgttggagatatttgctcccttggcgaatcagttgggcatcttgaattggaaggaacaacttgaaaacctgtgcttcaagtatctttacccagaaaattttgatgaactgtcaacaaaacttatcgagatctataacatagatatgattgcagctgcaacaagacgacttgaacaagcccttcaggtgagaggactatcctattatgccatatatgggaggcacaagagcatgtacagcatctacagaaaaatggcaaggaagaagctggtcatggataaaatttatgatatacatggggtgcgtgttattctcgagaataaggctgattgttttgccacattagagattatccatcacctatggcctagaattcctggcaagttcaaagattatatcaacagccccaaacccaacaggtatcagtccctgcacacggttgttctcactgaacaaacgctgccactcgagatccaaattcgtacgagggacatgcatttgcaggcggagttcggaattgctgctcattggagatataaggaaggtgaacggagttgctgcacctctgtttctgaaattgttgagtgggtcagatgggttacatggcactgtcaaactctgaacacaggctatccttcatcacttgcatgtgatgcttcatcgaaggaaacgcacactatcccatctcactctgacgcctgtctgttgtcctactcaaaacaatgtgatcacaaagggcccgtacttgtaatacttctggagaatgaaaagatgtcagtgcaagaaatcccccaaaattggacgatactggacctactgaaaaggtcttcaaactatgggatgccgttgaggctgaggctgaactgccatgccgtccacaactggaaccaggagctaaaaatgggcgacgtgcttgaactgatcccttcgaccccatgcaaatccagaggtcacacgagggagctccaccagaagtttgatcaccgtctcgccgtttcccagtcctgacagccttagaacaccgtaccttgtaaatacatgacgtgaacccatataaatcatctgaagtttagatttcccctgtgcagacaaaatagagatgaggagtcatcaaaactctgtaaccgtcgtatactcattcaagccaaaacaagacagcatgtaatgtaaatcagtatatacatgatacacatggttttagctcaggaaatgacaatatataccgacgacgatgcgcttacggtttttagtagcaaaaggaccttttgtcttgtgcttaaactttctgtctgcgctgttttttcttctccatcctctaaaaccgtgtccagcaggttatccatcatttgttat

SEQ ID NO: 70341 - DNA, 765 bp, Zea Mays
tattccatcttttctctaacgtggatcgaattgcagatggagacagttaaaagcccaccaccaccatcagatccaggcccagcccaacagccctttacacctcacagcaaaaccctaggaaagcctcatcaatggctctcgctctcccatccgtcatccaacggcggacgcatgagacacctgccttataagatcacgccattcccatctcctagggttttctccacctccatcacccgcctccactcccccctcccaggtgctgcccaggtaagtcggcggcggcgatgacaacgcgcttcaagaagaaccgcaagaagcgcggccacgtgtccgccgggcacggccgcatcggcaagcacaggaagcacccgggaggtcgcggtaacgccggtggcatgcaccaccaccgtatcctcttcgacaagtaccatccgggctacttcggcaaggttggcatgcgttacttccataagctccgcaacaagttctactgccccgcggtcaacatcgagcgcctctggtcgatggtgcccaccgacaaggcggcggaggccggcggcgacaaggccccgcagatcgacgtcacgcagttcggctacttcaaggtgctcgggaagggggtgctgccgccaaagcccattgtcgtcaaggccaagctcatctccaaggtcgccgagaagaagatcaaggcagcaggcggcgccgtcgtgctcaccgcctagatgaacaatgttctctcattttctggttccggaatttgtg

SEQ ID NO: 70342 - DNA, 1576 bp, Zea Mays
cacgcgctcacggggaaggggaagtagatggaagcaggcggcggccacggccacgaccggcagcttgtcaccgtaacagcagcggagggcgaggagccgccgatctgacctattcctagttgcgcgcgtgtcccgtgaggcgggagctctggaggccatggagagggagccggcggtcgaggaggaggacgacgacgaggaggaggtggcgtgcgagtgctgcggcttcacggaggagtgcacggcgccgtacatcgcgggcgtgcgcgcgcggttcggcgggcggtggatctgcgggctgtgcggggacgcggtgggcgaggagctggggcgcgcggggaccccgcccatctcccccgccgaggcgctggaccggcacgcccgcgcctgccgcggggcgtccgcgccgccgtcgcccgcgggcagccccgacgggctcatcgctgcgctgcgcctgctgctgcgccgcaggctcgggtccccgccggcgtcgaggaaggcgcggtccacgccgagcagcccgacgcgcgacgccgccgaccccggcgtctccgccctcgccgcgggggcgtcccggagctcgctggcgcgcacggggagctgcttcgccgcgctcgtcgaatgagaaggggaaacgaggacggactgacggaaggggaaaagatcagggtagtctctctctctctctattttgccttcaatgtgtaatgtatttctgctcgtttctatctatggaggagtgcgtaggtagtagtactagaggtgccaataaacatccgtgtatatatatatatgatggggaggaagatcgacgacgatctgtgttatttatgatatagtatacacttgtatgagaaaaaggaagtaattccatgtttttctcaggcacggatcagtgagagtctacactccgcttcatttgtgattctgctcctgcgcttttttttttcgaacgcaatattctgcttgggtacaataatgcacaagtcaggttctggtttcagcttcaaggagaagatgacctctgctcccaaaccgagagcacagcaaagcatccaaaacgatttcagcttcagttttttttatgggttgcacttgcatcggagcatccacaggcaagaggtatgcggaatagatacggaaccgaacgagcacaggcgttaggcgtacaaccacagcgacgcgccagtagtttttcatcgggcggtctcgctgacgctgatcgcgcgaatcgctgcccgtgcatcgcgcgtcgaagctagctagctagctgccttgacgcaggctccaagctcgctatcaaatccgcgcactccatctactgccatctcgatcgttccttagtatactactgctagtagcctagtactcccgatcaacttctagagtcgtaaacccagaacaaatctaggtcatagtgaattcacagatcacataattatttgtggcactaaatattatatcgacgttccatcccaaaatattattcgtcttatctttctatttttattcaaatagataacaaacacatatattaaatatattatataaatctattaattaacactctaaaacg

SEQ ID NO: 70343 - DNA, 1856 bp, Zea Mays
ataggcttagctcataaaaaatagctccaaccgtactcaataaatttttatcaaaaaatatagtataggctctgaaatgacctaaatatattaagtcatggattagtgtcctatccttattttctacatcatcctcaactttttcttccctaataatgtcatttattttctaaaatacatgatttagagtttaatggttggagctcaatttgtttttagtgccacaaacactttaaatgatatggtattttaatttcggggcactattttgaggcccctcattggagatgctcttacggtttttggggtgatgttgcccgggagttttggggtaatggtgtaatacccatggcatagcatgagggcgtttgaaaatttaaactactaggtgtttcctcaaaattcacctatgaacctttttaaattgagttctttagacttgcattttggttcgttgacacaccaacatgctgtaatcatattcaatttgataatctgaaacctttggtcatacacagaagagggtcaattcgactgtcatcattaacgcagacatataatgcattaatgcatcactttgtagaagttggtctaaattctaatgatctgtttggttttactgattgatgtgagctatttctgccttatgttcatgagcatggaatgcattattgctagcttgacaccacttgaagcaaggtggctctgccactttattacttctgtttctaatcaccattgcatctgaccattggcttggtaccttgttaaacatcacacaattgccattaaatttaacacctgaaatggtttagaatttgctgttcaaatttgaaccaactcgaatcaccattaccagtactgccgcgtggagcaccaaagatggtgaggggagagcattggcacatgaggcaaggaatcaaactgcagaatttcgtttcaattggggatatgaaatgcctcctgatgttttggcacaatggattgcagacagagcacagatctggacccagtatgtttccaagagaccttctggagttgttgccatgattctgggcattgatgatgagaaaggaactccacaactctttacatgtgatcctgctgggtattttttcggtcacaaggcagcaagtgctggccaaagagatacggaggctgtcaactttcttgagaagaaaatgaagaacaatccttcactaccatttcaggaaaccattcagatggcaatatcagcattgcagttcgccctgaaggctgacctcaaagcctcggaagtcgaggttggggttgtcaggacggatgatccaactttcagagtgctgacagaagctgaaatcgatgagcatctggaagccatcaacccagagccgcggcactctgaaatgctccccggtttattccgggataaactgacattggagaactgaaaccatggcgacctcagctgcattttgggcaccggaaagtcaaagctttcatgtggttctttacgacggctctatggacattggattagcggtttttgggcggttttttcgttccagtgactagcggttttcagtggaaaaacggtttggtaaacctactgggcacacacgaccggccatccgccaagtcaggcgagccccgcgcggtcagtgcttgacgacgtggtatcacagccgccgtctaccgtccctcagcggacggccgggccaattcatgcatcaccgagcaataccgagcaatactgacatctaaaatgttctttagccgtaccatatccaagcaatgaccatagcactagctatgaacgtggtaattattatggtttccccgttacttttcttccttaagaaatatatgccccttca

SEQ ID NO: 70344 - DNA, 1428 bp, Zea Mays
aaacgcggtttggtggaccctgttctcatctcagcacggcaggcacggctgagcgaacgctcctccttccaaacccacgccgacaccgatgccgagagccggggtgtccagcagcgagagtagccgccgtggcgccggtgcgttcagaaccctctccgaagatcgccgcatcaccgtattctgctccgacggtcgcctctaccaagtcgattacgcgtggaacgctacgaagctggcgggcgtcacctccgtcggggtgcgtgggaccgactccgtatgcgtcgtcggccagcggagggcgaacacgcacgcgcccaaggacaaattgctggacatgaccagcgtttcgcgcctgttcccgatcaccgaccggctggggttgctcgccacggggatcgcaggtgacctcaccagtgcttgcttctcatgtcatttctgccagaatgctttgcagaatgtgaggggagagcattggcacatgaggcaaggaatcaaactgcagaatttcgtttcaattggggatatgaaatgcctcctgatgttttggcacaatggattgcagacagagcacagatctggacccagtatgtttccaagagaccttctggagttgttgccatgattctgggcattgatgatgagaaaggaactccacaactctttacatgtgatcctgctgggtattttttcggtcacaaggcagcaagtgctggccaaagagatacggaggctgtcaactttcttgagaagaaaatgaagaacaatccttcactaccatttcaggaaaccattcagatggcaatatcagcattgcagttcgccctgaaggctgacctcaaagcctcggaagtcgaggttggggttgtcaggacggatgatccaactttcagagtgctgacagaagctgaaatcgatgagcatctggaagccatcaacccagagccgcggcactctgaaatgctccccggtttattccgggataaactgacattggagaactgaaaccatggcgacctcagctgcattttgggcaccggaaagtcaaagctttcatgtggttctttacgacggctctatggacattggattagcggtttttgggcggttttttcgttccagtgactagcggttttcagtggaaaaacggtttggtaaacctactgggcacacacgaccggccatccgccaagtcaggcgagccccgcgcggtcagtgcttgacgacgtggtatcacagccgccgtctaccgtccctcagcggacggccgggccaattcatgcatcaccgagcaataccgagcaatactgacatctaaaatgttctttagccgtaccatatccaagcaatgaccatagcactagctatgaacgtggtaattattatggtttccccgttacttttcttccttaagaaatatatgccccttca

SEQ ID NO: 70345 - DNA, 1201 bp, Zea Mays
accagcggatatatatactggagcctggcgagatcaccctaacccctcacactcccatccagccgccaccaggtgcagagtctttcgtcatctcttctccggcgaagaacccccagtcgcccaccagatcacttgttaaactttgttgaggggtgatggcggtttctttcgcaaacctcaactccgaggcagggcttaaaaagcttgatgagtaccttctcactcgcagctacatcactggctaccaagcttccaaggatgacttggctgtctacacttcgttttcggctgctccctcgtccaagtatatcaacgtagcaaggtggtttaaccacattgatgcgctcgtgaggctgagcggaattactgcagagggccaaggtgtgaaggttgaatcctcagcagttccttcagccccaactccagatgttgcgctgctgaagagcgtgctgcagctgccaaggcttctggcaagaagaaagaatctgggaagtcatcagttttacttgatgtgaagccatgggacgatgagactgacatggccaagctcgaggaagctgttaggagtgtccagatggaagggctgctctggggcgcatccaagcttgtcccagttggatatggtatcaagaagctgcaaatcatgatgaccatcgtcgacgaccttgtctctgtcgacactctcattgaggactatctgtgcgctgagccagtgaacgagtacgtgcagagctgcgacatagttgccttcaacaagatctaggcgtgacttccgatcagtccttcccctggggtgctggcgatggtggtggctgggcaatgcaccagcctaatttatccatagctatatgtctgctttgtgtggccagtgatattgccgtgagtatttttggatcctattcgagtcgaatgtaccagtaccagagttaatttgctttaattcgaaacaccgttccagttggaattctgttacccgtgttctttgcttgcagtacctctatttcttcttttttttgcatcggctggtggtggttcctttatttttttttgcattggctgttgtggttcaggtcagactgtgttggtctagattcttgtttttgtgtgatcggaaacatgctatcgcgcgtgacagagctgttgggtgacatgtagtctcagattgcagagctgaaaaggcttgcaacctcgtctcgtggca

SEQ ID NO: 70346 - DNA, 1103 bp, Zea Mays
agaagggagaaagaaaagcagtcgagcagcggtagccggtaggcgagagagtcaggattcaggacgcggcgaggccaccatgagcactctcaagttctgccgggaatgcaacaacatgctgtacccgcgggaggacaaggagacgcgcaccctcctgtacgcgtgccaaacgtgcgagcatgaggagattgccactgatacttgtgtgtacaaaagggttatccgtaagcctggtggtgagcccaaagatgtcctgaaggatgcagcaactgatcctagcctgcctcgcaccagaagcgtcagatgttacaactgcaaccatccagaagctgccttttttcaggtttgtacccaggtgctgtttacttgctgccgctgtcgctaaaggcgatggttgtgttatgtcatatgtaacatgtaatgcctaagcatggtaacagtagtgtgcactgttgcatgatttattcgggattattgtctagggagggttagcatcggcaaccaagccaaattgcatgagataccccctgtggtatccacccactggctactgagtacaatgtaagcttgaaccaatctgttcagatggaaccaaatcagtatcccacgaaaaaatgatttccgtggaatcaccattaccagtggtttttgaaatccttcatcaattcattctatcgtagttgctcttgatttttgttacatgtaatgctgatacattaccagtgatttttgttgcacttgagttttgcgctgttacatgtaatgctgatacattgagcccgcaggccccgactaagggagaacaagccatgacgctgtacttcatctgctgcaacccaagctgcgggcacaggtggagggactgagaaggatctggcttggtcttcgctgcaaacctgccgtattgttagcctaggtacaagttgtgccgtcaactgacgtttgctgcaagcttataagctactataacctcgtaacaaaacgatggtttggctggagacgaaatctgttgttcctcatgataagaaacagaaacagctatgaactaccagtatcatctcgtctcatctactcagtaccatgcattacttctgctgttcaaa

SEQ ID NO: 70347 - DNA, 1929 bp, Zea Mays
cagtcgtccctgtccctccactcctcccgtcgagcacttggcactgccaatggcggctcccgcccacaccccttcgatgcgcgcaagccaccttctttccccgaatgactatggctgttgccttacaagctgaaagaagtgtcattgaaaagaagaaacccgatatcaaacaaaggagggtggttgtcactggcatgggtgtagtgacaccattgggccatgatcctgacgtgttttacaacaatcttcttgatggtgttagcggaataagtgagattgagaggtttgactgttccaacttccccacgagaattgcaggagagataaaatccttctctactgatggttgggttgcacctaaacttgcaaagcggatggacaagtttatgctatatctgataactgctggaaagaaggcattagaaaatggtggactcactgaagaactaaggaatgagttggacaaaaccaggtgtggggttcttattggttctgcaatgggtggcatgaaggtttttaatgatgcaattgaagcactgagggtctcttacaagaaaatgaacccattttgtgttccttttgcaactacgaatatgggctctgcgatccttgcaatggatctgggatggatgggaccaaactattctatttccacagcttgtgctaccagtaacttctgtatccttaatgcagcaaaccacatcagaagaggcgaagctgacgttatgctctgcggtggttctgatgcacctcttatcccaatcggattgggaggttttgtggcatgcagagctctttcacagaggaacagtgacccaacaaaagcttctcggccttgggacatgggacgtgatggttttgttatgggggaaggggctggtgtcctcgtattggaagaacttgagcatgccaaggaaagaggtgcaacaatatatgctgaatttcttggtggaagcttcacatgtgatgcttaccacatgactgagccacatcctgaaggaagagggattactctctgcatcgaaaaggcactagctgatgcaggggtagcaagggaagaaatcaactacgtgaatgcccatgcaacatctacacaagcaggtgacttgaaggagtatgaggctatcgtgcgctgttttcgccagaaccctcaactgagggtgaactcgaccaaatcaatgactgggcatcttataggagcagctggtggaatagaagcagttgcttctatacaagctataagaactggttgggtccatccaaatttgaatttagaaaatccagaggacaccgtggacgtgggcgtcttggtagggtcacagaaggagagatgtgaagtgaaggtggcgttgtccaactcattcggattcggtgggcacaactcatcgattctctttgccccctttaagtgaacatgaccgaggcgaagaaccgacatcttcatcatcgcgcaaatggcttcatatatctggaactccacatagaaatctggtggattctgcaacttcctccgtgccacacatactgcatatggaggtccaaagtgagggtacaatactatgccacacacatttgagcgaacaaaacatcagcccccctacatgtttcatctactatcacaaagttgcaaaatatatatggtaactatcaaagaacttaccgtacctgggccagtgttttcgccttcaccatacctgcccattgtcagtactatttcctacatttggtgtagtcccgtagcttaatcctcttccctgcggaggtgatgggatcttatgttgtattgttgttgccaacagtatcgttattagccatgaattgctggttcccactgtaagcatcactggacgttttcgctttggttgtttctgtttcctgctgttcataaccgagttaaagatatgtaaatggcgaccctgttcggccttt

SEQ ID NO: 70348 - DNA, 2322 bp, Zea Mays
cagtcgtccctgtccctccactcctcccgtcgagcacttggcactgccaatggcggctcccgcccacaccccttcgatgcgcgcaagccaccttctttccccgtgagatcgacgcacctccccctctcgtgcttcattcccgctcgtcgttcgtttcttcggccccgagccgtcgcgcggtcgcctccacatctcgtcgtgctttaaggtctttggcctccgccgttcttggacaggggcacaccactgtccaccggtgcccactacgcgaaatacgagtccctcgtgcggctccgtagggtggaagagatccatcaggcggtgagtgggaggggcggcgtccacacaaccggaggggaggggggcaatggcggccgtggcaggcccactctgcacgtggctcgtcgccgcgtgcttatctgcggcatgcgacgctgaagagcacaagcagaagcatttctgcgcaggcggaagccgcgctgggggcggtgtcatgctcggccagcgccgccgcctcggcgcgcggcgtcgcggcttggcgcgctctggaatgactatggctgttgccttacaagctgaaagaagtgtcattgaaaagaagaaacccgatatcaaacaaaggagggtggttgtcactggcatgggtgtagtgacaccattgggccatgatcctgacgtgttttacaacaatcttcttgatggtgttagcggaataagtgagattgagaggtttgactgttccaacttccccacgagaattgcaggagagataaaatccttctctactgatggttgggttgcacctaaacttgcaaagcggatggacaagtttatgctatatctgataactgctggaaagaaggcattagaaaatggtggactcactgaagaactaaggaatgagttggacaaaaccaggtgtggggttcttattggttctgcaatgggtggcatgaaggtttttaatgatgcaattgaagcactgagggtctcttacaagaaaatgaacccattttgtgttccttttgcaactacgaatatgggctctgcgatccttgcaatggatctgggatggatgggaccaaactattctatttccacagcttgtgctaccagtaacttctgtatccttaatgcagcaaaccacatcagaagaggcgaagctgacgttatgctctgcggtggttctgatgcacctcttatcccaatcggattgggaggttttgtggcatgcagagctctttcacagaggaacagtgacccaacaaaagcttctcggccttgggacatgggacgtgatggttttgttatgggggaaggggctggtgtcctcgtattggaagaacttgagcatgccaaggaaagaggtgcaacaatatatgctgaatttcttggtggaagcttcacatgtgatgcttaccacatgactgagccacatcctgaaggaagagggattactctctgcatcgaaaaggcactagctgatgcaggggtagcaagggaagaaatcaactacgtgaatgcccatgcaacatctacacaagcagctgagggtgaactcgaccaaatcaatgactgggcatcttataggagcagctggtggaatagaagcagttgcttctatacaagctataagaactggttgggtccatccaaatttgaatttagaaaatccagaggacaccgtggacgtgggcgtcttggtagggtcacagaaggagagatgtgaagtgaaggtggcgttgtccaactcattcggattcggtgggcacaactcatcgattctctttgccccctttaagtgaacatgaccgaggcgaagaaccgacatcttcatcatcgcgcaaatggcttcatatatctggaactccacatagaaatctggtggattctgcaacttcctccgtgccacacatactgcatatggaggtccaaagtgagggtacaatactatgccacacacatttgagcgaacaaaacatcagcccccctacatgtttcatctactatcacaaagttgcaaaatatatatggtaactatcaaagaacttaccgtacctgggccagtgttttcgccttcaccatacctgcccattgtcagtactatttcctacatttggtgtagtcccgtagcttaatcctcttccctgcggaggtgatgggatcttatgttgtattgttgttgccaacagtatcgttattagccatgaattgctggttcccactgtaagcatcactggacgttttcgctttggttgtttctgtttcctgctgttcataaccgagttaaagatatgtaaatggcgaccctgttcggccttt

SEQ ID NO: 70349 - DNA, 1919 bp, Zea Mays
cagtcgtccctgtccctccactcctcccgtcgagcacttggcactgccaatggcggctcccgcccacaccccttcgatgcgcgcaagccaccttctttccccgaatgactatggctgttgccttacaagctgaaagaagtgtcattgaaaagaagaaacccgatatcaaacaaaggagggtggttgtcactggcatgggtgtagtgacaccattgggccatgatcctgacgtgttttacaacaatcttcttgatggtgttagcggaataagtgagattgagaggtttgactgttccaacttccccacggagagataaaatccttctctactgatggttgggttgcacctaaacttgcaaagcggatggacaagtttatgctatatctgataactgctggaaagaaggcattagaaaatggtggactcactgaagaactaaggaatgagttggacaaaaccaggtgtggggttcttattggttctgcaatgggtggcatgaaggtttttaatgatgcaattgaagcactgagggtctcttacaagaaaatgaacccattttgtgttccttttgcaactacgaatatgggctctgcgatccttgcaatggatctgggatggatgggaccaaactattctatttccacagcttgtgctaccagtaacttctgtatccttaatgcagcaaaccacatcagaagaggcgaagctgacgttatgctctgcggtggttctgatgcacctcttatcccaatcggattgggaggttttgtggcatgcagagctctttcacagaggaacagtgacccaacaaaagcttctcggccttgggacatgggacgtgatggttttgttatgggggaaggggctggtgtcctcgtattggaagaacttgagcatgccaaggaaagaggtgcaacaatatatgctgaatttcttggtggaagcttcacatgtgatgcttaccacatgactgagccacatcctgaaggaagagggattactctctgcatcgaaaaggcactagctgatgcaggggtagcaagggaagaaatcaactacgtgaatgcccatgcaacatctacacaagcaggtgacttgaaggagtatgaggctatcgtgcgctgttttcgccagaaccctcaactgagggtgaactcgaccaaatcaatgactgggcatcttataggagcagctggtggaatagaagcagttgcttctatacaagctataagaactggttgggtccatccaaatttgaatttagaaaatccagaggacaccgtggacgtgggcgtcttggtagggtcacagaaggagagatgtgaagtgaaggtggcgttgtccaactcattcggattcggtgggcacaactcatcgattctctttgccccctttaagtgaacatgaccgaggcgaagaaccgacatcttcatcatcgcgcaaatggcttcatatatctggaactccacatagaaatctggtggattctgcaacttcctccgtgccacacatactgcatatggaggtccaaagtgagggtacaatactatgccacacacatttgagcgaacaaaacatcagcccccctacatgtttcatctactatcacaaagttgcaaaatatatatggtaactatcaaagaacttaccgtacctgggccagtgttttcgccttcaccatacctgcccattgtcagtactatttcctacatttggtgtagtcccgtagcttaatcctcttccctgcggaggtgatgggatcttatgttgtattgttgttgccaacagtatcgttattagccatgaattgctggttcccactgtaagcatcactggacgttttcgctttggttgtttctgtttcctgctgttcataaccgagttaaagatatgtaaatggcgaccctgttcggccttt

SEQ ID NO: 70350 - DNA, 2315 bp, Zea Mays
cagtcgtccctgtccctccactcctcccgtcgagcacttggcactgccaatggcggctcccgcccacaccccttcgatgcgcgcaagccaccttctttccccgtgagatcgacgcacctccccctctcgtgcttcattcccgctcgtcgttcgtttcttcggccccgagccgtcgcgcggtcgcctccacatctcgtcgtgctttaaggtctttggcctccgccgttcttggacaggggcacaccactgtccaccggtgcccactacgcgaaatacgagtccctcgtgcggctccgtagggtggaagagatccatcaggcggtgagtgggaggggcggcgtccacacaaccggaggggaggggggcaatggcggccgtggcaggcccactctgcacgtggctcgtcgccgcgtgcttatctgcggcatgcgacgctgaagagcacaagcagaagcatttctgcgcaggcggaagccgcgctgggggcggtgtcatgctcggccagcgccgccgcctcggcgcgcggcgtcgcggcttggcgcgctctggaatgactatggctgttgccttacaagctgaaagaagtgtcattgaaaagaagaaacccgatatcaaacaaaggagggtggttgtcactggcatgggtgtagtgacaccattgggccatgatcctgacgtgttttacaacaatcttcttgatggtgttagcggaataagtgagattgagaggtttgactgttccaacttccccacgagaattgcaggagagataaaatccttctctactgatggttgggttgcacctaaacttgcaaagcggatggacaagtttatgctatatctgataactgctggaaagaaggcattagaaaatggtggactcactgaagaactaaggaatgagttggacaaaaccaggtgtggggttcttattggttctgcaatgggtggcatgaaggtttttaatgatgcaattgaagcactgagggtctcttacaagaaaatgaacccattttgtgttccttttgcaactacgaatatgggctctgcgatccttgcaatggatctgggatggatgggaccaaactattctatttccacagcttgtgctaccagtaacttctgtatccttaatgcagcaaaccacatcagaagaggcgaagctgacgttatgctctgcggtggttctgatgcacctcttatcccaatcggattgggaggttttgtggcatgcagagctctttcacagaggaacagtgacccaacaaaagcttctcggccttgggacatgggacgtgatggttttgttatgggggaaggggctggtgtcctcgtattggaagaacttgagcatgccaaggaaagaggtgcaacaatatatgctgaatttcttggtggaagcttcacatgtgatgcttaccacatgactgagccacatcctgaaggaagagggattactctctgcatcgaaaaggcactagctgatgcaggggtagcaagggaagaaatcaactacgtgaatgcccatgcaacatctacacaagcaggtgacttgaaggagtatgaggctatcgtgcgctgttttcgccagaaccctcaactgagggtgaactcgaccaaatcaatgactgggcatcttataggagcagctggtggaatagaagcagttgcttctatacaagacgtgggcgtcttggtagggtcacagaaggagagatgtgaagtgaaggtggcgttgtccaactcattcggattcggtgggcacaactcatcgattctctttgccccctttaagtgaacatgaccgaggcgaagaaccgacatcttcatcatcgcgcaaatggcttcatatatctggaactccacatagaaatctggtggattctgcaacttcctccgtgccacacatactgcatatggaggtccaaagtgagggtacaatactatgccacacacatttgagcgaacaaaacatcagcccccctacatgtttcatctactatcacaaagttgcaaaatatatatggtaactatcaaagaacttaccgtacctgggccagtgttttcgccttcaccatacctgcccattgtcagtactatttcctacatttggtgtagtcccgtagcttaatcctcttccctgcggaggtgatgggatcttatgttgtattgttgttgccaacagtatcgttattagccatgaattgctggttcccactgtaagcatcactggacgttttcgctttggttgtttctgtttcctgctgttcataaccgagttaaagatatgtaaatggcgaccctgttcggccttt

SEQ ID NO: 70351 - DNA, 1234 bp, Zea Mays
ctctagcgcacggtgcaggcgctagaaaccctaaacttcggcatcgaagatggcggcggcgtgcatgcgttgtcctaaagggagcaggacatccagatgatcctcgccaccgacgtgcacctcggtaccaagaattgggacttctagatgacctgtgagaagcttcagttggcattgagaatccatagggcatcattgtgcagtctgctaggccctatgtccagagggctgtcctcaagtttgcgtagtacactggtgctcatgccattgccggcaggcacactcctggtacattcaccaaccagttgcaaacctccttcagcgagccacgccttcttatcctcactgatccaggactggtcaccagtccattaaaggcttgtttgatatcaagtatcatcaaaatccatatggactacggaggctgcgctcggaaacattttcaccactgtgttggtttcaattcatagtcgatcttttttcttctacaggacatagaggaagcaaaggagaaggaggaagaagaggctctggttgctccgggctatggcgcagttgcagaatatactgcccctagagctgacaactggggtgacgagtggggagctggtgagggtgaggccgtgaggctgcagctccacctgctggcgtcccggctgctggtgcagactgggttgctgctccagctcctcccgctgatgcgtgatgatgtgtgggatgcagctgcgcctcctccagcagcagcagccgcctagagatgggaacatgtcgctgcccttgtcacggcatctactctagatctcatctggatactctaatattcaccccaattcacatgtattgagatggattcaggtcacaatccatctcaacacatatagattagaataaataatagagtaagcaaacaagccctaaaccctaactgggagtgaagagtaagtgagcatgattgttggcttacactagtcttcaacagaacttgttagtagacactgctggagtatatttgaatttttagtgtggtagatgagtatcagttttgtgttattggctctgctttgcttagagagcgagtggatcgcgctccatttttgttatctcaaatggatagatctttgttttaaccgtattttgtgaaactacatgctgctcgttccagaaaagtatgcctgccttggttgtaggggtgtaatatggttgaatccagattcgaagatggtgaacattgttt

SEQ ID NO: 70352 - DNA, 1126 bp, Zea Mays
attcacttgtattgttgctctctagcgcacggtgcaggcgctagaaaccctaaacttcggcatcgaagatggcggcggcgtgcatgcgttgtcctaaagggagcaggacatccagatgatcctcgccaccgacgtgcacctcggtaccaagaattgggacttctagatggcacactcctggtacattcaccaaccagttgcaaacctccttcagcgagccacgccttcttatcctcactgatccaggactggtcaccagtccattaaaggcttgtttgatatcaagtatcatcaaaatccatatggactacggaggctgcgctcggaaacattttcaccactgtgttggtttcaattcatagtcgatcttttttcttctacaggacatagaggaagcaaaggagaaggaggaagaagaggctctggttgctccgggctatggcgcagttgcagaatatactgcccctagagctgacaactggggtgacgagtggggagctggtgagggtgaggccgtgaggctgcagctccacctgctggcgtcccggctgctggtgcagactgggttgctgctccagctcctcccgctgatgcgtgatgatgtgtgggatgcagctgcgcctcctccagcagcagcagccgcctagagatgggaacatgtcgctgcccttgtcacggcatctactctagatctcatctggatactctaatattcaccccaattcacatgtattgagatggattcaggtcacaatccatctcaacacatatagattagaataaataatagagtaagcaaacaagccctaaaccctaactgggagtgaagagtaagtgagcatgattgttggcttacactagtcttcaacagaacttgttagtagacactgctggagtatatttgaatttttagtgtggtagatgagtatcagttttgtgttattggctctgctttgcttagagagcgagtggatcgcgctccatttttgttatctcaaatggatagatctttgttttaaccgtattttgtgaaactacatgctgctcgttccagaaaagtatgcctgccttggttgtaggggtgtaatatggttgaatccagattcgaagatggtgaacattgttt

SEQ ID NO: 70353 - DNA, 1213 bp, Zea Mays
tttgagttctaatattcacttgtattgttgctctctagcgcacggtgcaggcgctagaaaccctaaacttcggcatcgaagatggcggcggcgtgcatgcgttgtcctaaagggagcaggacatccagatgatcctcgccaccgacgtgcacctcggtaccaagaattgggacttctagatgtctgctaggccctatgtccagagggctgtcctcaagtttgcgtagtacactggtgctcatgccattgccggcaggcacactcctggtacattcaccaaccagttgcaaacctccttcagcgagccacgccttcttatcctcactgatccaggactggtcaccagtccattaaaggcttgtttgatatcaagtatcatcaaaatccatatggactacggaggctgcgctcggaaacattttcaccactgtgttggtttcaattcatagtcgatcttttttcttctacaggacatagaggaagcaaaggagaaggaggaagaagaggctctggttgctccgggctatggcgcagttgcagaatatactgcccctagagctgacaactggggtgacgagtggggagctggtgagggtgaggccgtgaggctgcagctccacctgctggcgtcccggctgctggtgcagactgggttgctgctccagctcctcccgctgatgcgtgatgatgtgtgggatgcagctgcgcctcctccagcagcagcagccgcctagagatgggaacatgtcgctgcccttgtcacggcatctactctagatctcatctggatactctaatattcaccccaattcacatgtattgagatggattcaggtcacaatccatctcaacacatatagattagaataaataatagagtaagcaaacaagccctaaaccctaactgggagtgaagagtaagtgagcatgattgttggcttacactagtcttcaacagaacttgttagtagacactgctggagtatatttgaatttttagtgtggtagatgagtatcagttttgtgttattggctctgctttgcttagagagcgagtggatcgcgctccatttttgttatctcaaatggatagatctttgttttaaccgtattttgtgaaactacatgctgctcgttccagaaaagtatgcctgccttggttgtaggggtgtaatatggttgaatccagattcgaagatggtgaacattgttt

SEQ ID NO: 70354 - DNA, 1343 bp, Zea Mays
aataaaaattgttgtgtctcttgtccattttacttattgcgattactgccttttgagttctaatattcacttgtattgttgctctctagcgcacggtgcaggcgctagaaaccctaaacttcggcatcgaagatggcggcggcgtgcatgcgttgtcctaaagggagcaggacatccagatgatcctcgccaccgacgtgcacctcggtaccaagaattgggacttctagatggtatctacattattaaccttggcaagacctgtgagaagcttcagttggcattgagaatccatagggcatcattgtgcagtctgctaggccctatgtccagagggctgtcctcaagtttgcgtagtacactggtgctcatgccattgccggcaggcacactcctggtacattcaccaaccagttgcaaacctccttcagcgagccacgccttcttatcctcactgatccaggactggtcaccagtccattaaaggcttgtttgatatcaagtatcatcaaaatccatatggactacggaggctgcgctcggaaacattttcaccactgtgttggtttcaattcatagtcgatcttttttcttctacaggacatagaggaagcaaaggagaaggaggaagaagaggctctggttgctccgggctatggcgcagttgcagaatatactgcccctagagctgacaactggggtgacgagtggggagctggtgagggtgaggccgtgaggctgcagctccacctgctggcgtcccggctgctggtgcagactgggttgctgctccagctcctcccgctgatgcgtgatgatgtgtgggatgcagctgcgcctcctccagcagcagcagccgcctagagatgggaacatgtcgctgcccttgtcacggcatctactctagatctcatctggatactctaatattcaccccaattcacatgtattgagatggattcaggtcacaatccatctcaacacatatagattagaataaataatagagtaagcaaacaagccctaaaccctaactgggagtgaagagtaagtgagcatgattgttggcttacactagtcttcaacagaacttgttagtagacactgctggagtatatttgaatttttagtgtggtagatgagtatcagttttgtgttattggctctgctttgcttagagagcgagtggatcgcgctccatttttgttatctcaaatggatagatctttgttttaaccgtattttgtgaaactacatgctgctcgttccagaaaagtatgcctgccttggttgtaggggtgtaatatggttgaatccagattcgaagatggtgaacattgttt

SEQ ID NO: 70355 - DNA, 2223 bp, Zea Mays
caacctacccccatcagcatcacgcattcacgcgcccgccccagcgccgtcatcggtcgccatccctgcatcgaccgcaccgcatcgcaccgtctccgccgccatgcgccgcttcgcagccgacagggcgcgccgcgcggtggccgcgtctctgcacggtgcagcgtccagatcagcagcgccgtcgcctcacgctccggcgccacgtcatccagcctccccggtgggggcggcggcgatggcggccgccatggtgaggaccatgtccacgacggccgcgggcacgcccccagtgtcggtcgccaccatcaaccccaaggtcttgaagtgtgaatatgcagttcgaggagagattgttacacatgctcagaacttacaacaagaattgcagaaaaatccagaatcacttcctttcgacgagatactctactgtaatattggaaatccccaatcacttgggcaacaaccagttacctatttcagagaagttctctctctatgtgatcatccagctctcctggacaaaagtgaaactcatgctttgtacagttcagatgctatagagagagcatggcaaattctagagaagataccaggtagagcgacaggagcatatagccatagtcagggtataaaaggtttacgtgatgaaattgctgctggaattgctgcccgtgatgggtttcatgcaagtggagataacatctttctaacagatggagcaagcccagcagtgcacatgatgatgcagttgttgataagttctgagagcgatggcattctctgccctattccacagtacccactgtactctgcatcgattgctcttcacggtggttcccttgttccttatttccttaatgaagagacagggtggggactcgatgttgatgagctgaagaaacaactggaggaggctcgatctaagggcatcactgtcagggcgcttgtggtcataaatccaggaaatccaacaggacaggttcttgttgaggaaaaccaaaagaaaattgtcgaattctgcaagaatgaaggacttgttcttctcgcagatgaggaaaatatatatgttgaagataagccattccactcattcaaaaaaattgcacggtcactgggatacactgatgatgatcttcctttggtatcattccagtcagtttctaaaggctactacggagaatgtggaaaacgaggcggttatatggagataactggattcagtcctgaagtacgggaacaaatttacaaggtggcatcagtaaacctgtgctccaatgtttcggggcaaattcttgctagccttgtaatgaacccaccaaaggctggggatgaatcctttgaatccttcatgtcagagaaggatggtatcctttcatcgttggctcggcgtgcaaaggctttggaagaagcattcaacagtttagaaggaattacatgcaacaaagccgaaggtgcaatgtatctgttcccacgccttcatttaccccagaaggcaattggagcagcccaagcagtcggcactgcgccagatgcatactacgcaaaacgcctactggaagccactggaatcgtcgtcgtccccggttctgggtttggacaggtccctggaacgtggcacttcaggtgcacgatactgccgcaggaggacaagatacctgcgatagtatccaggctcaaggagttccacgagaagttcatggatgaattccgtgattgagctgagtatccatcgccctggcgtgatttttatctgttcgaaataataaggctgccaattggttggccccccctccctccctcgtcgtcctatggatgctacagccaaacaccctcccaaattgtgttacaggcagattcctatcgaaaaacctacagaatctcgggcactgcagtctgcaatgccatgcttctgtttgccttgtgagaagtgtatcaggctaggctctgagccctgatgtgtacaaacatacccgaactttgaggccaagttgagttgtctcggcgcatgctgaaactctgctcgccttgtgttgcggagaatctttgctgtccaggttgatatgttcgctgactgggctgactgctctgcttctgctcgtttgacatcgctacaggtaaagaaagacaccagtaggactgtgtgagtgccggcctgtcaggttcgaacttgcatctactaccctagtaataaaaaaagaatagagggttgtggcttctgcg

SEQ ID NO: 70356 - DNA, 2234 bp, Zea Mays
ccaagtccaacctacccccatcagcatcacgcattcacgcgcccgccccagcgccgtcatcggtcgccatccctgcatcgaccgcaccgcatcgcaccgtctccgccgccatgcgccgcttcgcagccgacagggcgcgccgcgcggtggccgcgtctctgcacggtgcagcgtccagatcagcagcgccgtcgcctcacgctccggcgccacgtcatccagcctccccggtgggggcggcggcgatggcggccgccatggtgaggaccatgtccacgacggccgcgggcacgcccccagtgtcggtcgccaccatcaaccccaaggtcttgaagtgtgaatatgcagttcgaggagagattgttacacatgctcagaacttacaacaagaattgcagaaaaatccagaatcacttcctttcgacgagatactctactgtaatattggaaatccccaatcacttgggcaacaaccagttacctatttcagagaagttctctctctatgtgatcatccagctctcctggacaaaagtgaaactcatgctttgtacagatgctatagagagagcatggcaaattctagagaagataccaggtagagcgacaggagcatatagccatagtcagggtataaaaggtttacgtgatgaaattgctgctggaattgctgcccgtgatgggtttcatgcaagtggagataacatctttctaacagatggagcaagcccagcagtgcacatgatgatgcagttgttgataagttctgagagcgatggcattctctgccctattccacagtacccactgtactctgcatcgattgctcttcacggtggttcccttgttccttatttccttaatgaagagacagggtggggactcgatgttgatgagctgaagaaacaactggaggaggctcgatctaagggcatcactgtcagggcgcttgtggtcataaatccaggaaatccaacaggacaggttcttgttgaggaaaaccaaaagaaaattgtcgaattctgcaagaatgaaggacttgttcttctcgcagatgaggtttaccaggaaaatatatatgttgaagataagccattccactcattcaaaaaaattgcacggtcactgggatacactgatgatgatcttcctttggtatcattccagtcagtttctaaaggctactacggagaatgtggaaaacgaggcggttatatggagataactggattcagtcctgaagtacgggaacaaatttacaaggtggcatcagtaaacctgtgctccaatgtttcggggcaaattcttgctagccttgtaatgaacccaccaaaggctggggatgaatcctttgaatccttcatgtcagagaaggatggtatcctttcatcgttggctcggcgtgcaaaggctttggaagaagcattcaacagtttagaaggaattacatgcaacaaagccgaaggtgcaatgtatctgttcccacgccttcatttaccccagaaggcaattggagcagcccaagcagtcggcactgcgccagatgcatactacgcaaaacgcctactggaagccactggaatcgtcgtcgtccccggttctgggtttggacaggtccctggaacgtggcacttcaggtgcacgatactgccgcaggaggacaagatacctgcgatagtatccaggctcaaggagttccacgagaagttcatggatgaattccgtgattgagctgagtatccatcgccctggcgtgatttttatctgttcgaaataataaggctgccaattggttggccccccctccctccctcgtcgtcctatggatgctacagccaaacaccctcccaaattgtgttacaggcagattcctatcgaaaaacctacagaatctcgggcactgcagtctgcaatgccatgcttctgtttgccttgtgagaagtgtatcaggctaggctctgagccctgatgtgtacaaacatacccgaactttgaggccaagttgagttgtctcggcgcatgctgaaactctgctcgccttgtgttgcggagaatctttgctgtccaggttgatatgttcgctgactgggctgactgctctgcttctgctcgtttgacatcgctacaggtaaagaaagacaccagtaggactgtgtgagtgccggcctgtcaggttcgaacttgcatctactaccctagtaataaaaaaagaatagagggttgtggcttctgcg

SEQ ID NO: 70357 - DNA, 2435 bp, Zea Mays
cttatttgcaagaaataaatattttcaagcctcatgatgactaaagaaatgcacatcgcgccttgtctctttgatcaagcaaatttcagcaagagcgcatcttttctttcttgccgagaacgcaaaacccgctcgaacaaataggaaaaaacggaagccgtggcgagatagaaaaacccacacttgagccatcatcccaagtccaacctacccccatcagcatcacgcattcacgcgcccgccccagcgccgtcatcggtcgccatccctgcatcgaccgcaccgcatcgcaccgtctccgccgccatgcgccgcttcgcagccgacagggcgcgccgcgcggtggccgcgtctctgcacggtgcagcgtccagatcagcagcgccgtcgcctcacgctccggcgccacgtcatccagcctccccggtgggggcggcggcgatggcggccgccatggtgaggaccatgtccacgacggccgcgggcacgcccccagtgtcggtcgccaccatcaaccccaaggtcttgaagtgtgaatatgcagttcgaggagagattgttacacatgctcagaacttacaacaagaattgcagaaaaatccagaatcacttcctttcgacgagatactctactgtaatattggaaatccccaatcacttgggcaacaaccagttacctatttcagagaagttctctctctatgtgatcatccagctctcctggacaaaagtgaaactcatgctttgtacagttcagatgctatagagagagcatggcaaattctagagaagataccaggtagagcgacaggagcatatagccatagtcagggtataaaaggtttacgtgatgaaattgctgctggaattgctgcccgtgatgggtttcatgcaagtggagataacatctttctaacagatggagcaagcccagcagtgcacatgatgatgcagttgttgataagttctgagagcgatggcattctctgccctattccacagtacccactgtactctgcatcgattgctcttcacggtggttcccttgttccttatttccttaatgaagagacagggtggggactcgatgttgatgagctgaagaaacaactggaggaggctcgatctaagggcatcactgtcagggcgcttgtggtcataaatccaggaaatccaacaggacaggttcttgttgaggaaaaccaaaagaaaattgtcgaattctgcaagaatgaaggacttgttcttctcgcagatgaggtttaccaggaaaatatatatgttgaagataagccattccactcattcaaaaaaattgcacggtcactgggatacactgatgatgatcttcctttggtatcattccagtcagtttctaaaggctactacggagaatgtggaaaacgaggcggttatatggagataactggattcagtcctgaagtacgggaacaaatttacaaggtggcatcagtaaacctgtgctccaatgtttcggggcaaattcttgctagccttgtaatgaacccaccaaaggctggggatgaatcctttgaatccttcatgtcagagaaggatggtatcctttcatcgttggctcggcgtgcaaaggctttggaagaagcattcaacagtttagaaggaattacatgcaacaaagccgaaggtgcaatgtatctgttcccacgccttcatttaccccagaaggcaattggagcagcccaagcagtcggcactgcgccagatgcatactacgcaaaacgcctactggaagccactggaatcgtcgtcgtccccggttctgggtttggacaggtccctggaacgtggcacttcaggtgcacgatactgccgcaggaggacaagatacctgcgatagtatccaggctcaaggagttccacgagaagttcatggatgaattccgtgattgagctgagtatccatcgccctggcgtgatttttatctgttcgaaataataaggctgccaattggttggccccccctccctccctcgtcgtcctatggatgctacagccaaacaccctcccaaattgtgttacaggcagattcctatcgaaaaacctacagaatctcgggcactgcagtctgcaatgccatgcttctgtttgccttgtgagaagtgtatcaggctaggctctgagccctgatgtgtacaaacatacccgaactttgaggccaagttgagttgtctcggcgcatgctgaaactctgctcgccttgtgttgcggagaatctttgctgtccaggttgatatgttcgctgactgggctgactgctctgcttctgctcgtttgacatcgctacaggtaaagaaagacaccagtaggactgtgtgagtgccggcctgtcaggttcgaacttgcatctactaccctagtaataaaaaaagaatagagggttgtggcttctgcg

SEQ ID NO: 70358 - DNA, 2647 bp, Zea Mays
gtgaacaagtgactgtttgccccgtgggctcgcttatcgaattttataaaggtacagaagtacatggtccgttggctctcctcctgccctttctgttgtccttgctcatttcaaatttactgcggctcacagcgcttgagaaatgatcgttagcattaggggtgtaaacggatacttattcggatatcagttttttggtttttttctttaattgtgaattaatagaatatataatctgttatgcaaatttatattcttgtttttagtattgagcttgtaaagattagggatgacagcgggtcgggttttgttcgggtataataatacccaacccgaaattgtacccgagacttctacaaatatccatacccaccaagccaatcgggcgagaaactgtacccgtacccatgcccatcgggtatccaccgggtatcgggtatccagtggatatgttattgtacattaaataacactcggtcagtgttataataaatgcataaaatattttagtttacatctaagcaccaatgcaacacgagaatgactatatttggctacacgtcgatacaatatctcaactcataattatcacatccaataaatttaaatttgagtacagagaataaaagtgtaatgagttcatgacagttgacagttataacattttcaatgtctcattggtctcgattacattacagttgactgttaacacaacacaaattaatattcattaatcaacaacacatgcgagtgagtttttctagtgaatgtagcacatttttagtggatgtaacacatttaaagaggtatattaatatttcgggtatccactggatacccgtgggtaaagtattttacccatacccgacccgatgtatttcgggtatccgacccgataggacccacgggtgagtttttgtacccgtatccatatccggtgggtacgaaacccgcgggtatccatacccacgggtccaactgccatccctagtaaagattcatgaaaggtaaatatcaaatctattatatatcttctcaaataataaatataaatttcggatacaaatcaaatactgatacatatattttttcacatttttttgttgtatagagcaaataatgtgtgaaataattttatacaaaattttatttcttatttataataattgtgctacataacataagaagagattagcatcaaatttcatacatatctattttaaaatattaaatttaccctaacagttcagatatccgtttacacctctagttagcattagtgctccaagttgggtcgtgccggcacgggcccgccgtgcttcgggcctcggttagtcagacctagctagcacgaaatagagtcgggtcatgccttaccggacctggcgagtagaagtaaggcctagtatggcctggtccaggcacggcacgcctcctcagttcctgataaacgcacatctcggcctctcggtcgtcgtcgcgctaggcgtgcgcatcttggctcgtgcgcggggctgctgcctgctggtcgtggtccaatacacgccagacacaggagccggccggcggtagatgttcccttggggtggatttggatcggagcagcgcagcgcaggcgagcagcgacggtgcgttctgcggtcgtgggctcgtccgctcgtggcgcagccccaggcggacgccaacacgacgcggtacctgggcgtgcggcgccggccgtggggccggtacgcggcggagatccgggacccggccaccaaggacacgaccgtgtcgcgcgctccctccgcggctcccacgcgcgcaccaacttcgcctacccggacctcccgtcgggctcctccgtcacgccctacctctccccggaccacacctcgggcgacaacgccacgcagctcctccagccattctacgccgccgacccagccgccgcgtctttaccaccggcgctcccggccgcgaacgacgcggcaggctacggctatagtgtcgaggacatgtccgctctcatggacgacctcaccatacccgacgacctgaccgtcgactacggcgcagaagacaccggcgggctggaggctggatctggagcggcgacggaccacggacgagggaggcgagcgagagaaataagaggtcgggactcgggagaggagggagaggaagtaaatcacgtaaccctaacgccgcgcctcgtataagccggtcgggatgtatttcgtgtcgggccgacccgaacacggcccaagctcccgtgccgggtcatgtgggccgtcgtgccgaaagcaaaagcacgacccagcacgatgaacgtgtcgtgctggcccagctattttcctcctgtgctggtctgggcttcgtgcttttaaaaacgtgtcgggctcgtgctggcccagtgggcacggcccagacttacaggactagttagcatacagaacttcacccaaaaaaaagatgtcatcacccagcaagaaccatatccaagatttttcttcactagcaaaatattcatattccttagtagaaacaaactgtcagatgcgataaatgttagtctctcgtttcaatttataattaatttgagttttttacccgggcttgtatcattcaaaaatataattactataatttttttactgtgatgtcg

SEQ ID NO: 70359 - DNA, 3484 bp, Zea Mays
aagctttcaaattgtccaggctcccaaggcaattaaagagttcacaagagtgagaatagatctagaaggaaggaataaataaattgatcataaagcattttgcataacataaactttgagcaaggaaatcaacagagacaagaatatagaaaataagcagtttaaatgacaagtttttgaagcagcatcaagcataagatgagtcaaaagtcaataggtccttaaaacaaccgtaactactccgtctagtgttcttatgtcacacacgggttttggggcaccaagacctgggcgcgaacataatcaccaggtatgctgggagcaagtctgacacatatgataaatcatggcacatgatcgaatgtcacaactttactatataataggagttctatacaaaataaataattatattataaggagacaacggtccagcaacccacagttgactgggagacgacggcctagacctctcatgaacacatcgcagcatcctccaagcgcctcatcctgtggtacctgttcttgacctgtgggggtgagacagcaaaagtgagctcacatacgttcatcactcaacaagttgtggggaataatgtgcatgaactcgccaaaggtgcgagctcacgtgaagtgtaaggcttaccaaagaggatggttgaagctgagcattgcttttaaagttggttaaaattttattagcagttactaagtataagtaaataccaactcaattaagtagtagaacaaaagtaacaacatcacctgcgatgcaatgcatatgacaaattaaatttagttccataaattaatcatgtgagggtccgagctgctcatgaccgtgagcacggctagtataccagttttacactctgcagaggttgcgcatctttacccacaagtcatattacccatatgccacggggttgtatgggccccatacacctctactaaggaagcgaggcagggtaacactacctggcctttacaaagttccactagcttcataaaacccgctacaatttataggaagctccaatgcagggatccctcgtctgaccaccatcgcagcaaaatcaacccaaggaactccatacactgaccactcccctactgcccttgcccctttcgggtaaggtagtcatccactagattttctagttaatcagccaagggcatcccatactacccttgtggtggcactgttttcccggatggtcgctccatgttccaattaacataatgatcttatcatgaacaataaataacaactgataacaaaagtatgaataatgtgtatcttaatgcccaaattcacatatagcactagcaagtactacccaaaaagttcagtggtaaacaaggcataaagatagtcaaactagggtgacctattgggtcccatcaaaattaacctatgcgaaccattatgattgggtaaaaaagtgatcaagggcacaactttcctcgcacttgagattccaggtaccaacttgctctttaggtgacacgtgtcctcactgctaaacgtagcaatacagacaaacatggtataggcaaaaacatcatcacaccaaacataagaaaaaatacatattaataatctacatattaaaataagatcataaggacatgaatcattaattttggagttatggattttaagttatgaatttccaaaagttctaggtgctaggtacaagattgattagtagattaattttaatatggttttcatgtcaacacaaagacactatttgataaacaataatagtacaaaattataaaaattgaaatggatcaatttggatttaatatgaattttctatgatatatacaagtttctagcatttattttcacataaaaaatcattttctatgaaaaacggttcccactggttgaagttgggcctctgcagctccagggtcacggggatgtggttcttgacagtgactgttgcatagggagcaacgaggacagcatgggcggggaaggagcccatgctgctggaggtgctggaggaggaggagaagctggtggcagagttggtcgacatggtgacctaggtgagaggggcagcacaacagagaggtgcggtggggaggggtggaaggatcggttaagctgataccatgtagaataagcagggaaggagagaaccaccacacacccaatgtgggtggggagcctttcatatatatagccaatcaggcatacatggaaggtgtcaatcaggcatacatggaagatgccaatcaagcatacatggaaagaacagacatagtaggctatcacctatacaaggaagctattcctgggtgctatacatagcagctagcctgtctaattgatcctgatttacatatcctaatactcctcttcttggagaagcccaccaccgagcatctagttgctgtgaagaaggtgttgcgctacattgtcggcacaataggctacgactatttgttggtacttgcttttctgagtaagtgtatccaacgggagagtggagagagtgtttgcaaagttcgacggggaatgacaatatctctgttaatctggccgctcaagggcactgtacgagggtatttataggtacccaagtgtctattgtcctccggtaaggacatttatgccctcgggtacccggactatccccagaatattcccacatggggaggttacagatcgtcattacagaaaaggctattacagatgaggcccgttacacgcttatacgcgcggggcccattacaatgggccgaatccctcatgggcctccgagcgcgatgaggacgtgggacttgcagacttcgtcggagtcttgccttcgtcttgcaatggagagaacgaagggagaccgctcgggcgtggtcttcgttggagcagctagacgacgaaggcatcgagtgaagggtagcgtctttgctttcgccccaacactattacttcactaagaacgagggtcacctcatcgggttcagtgatagtgatcacgccggcgacgtcgacgcggacaagagcacatcaggcactctgttctttcttggggacaatcgtatcaccgggcagagcaagaagcagaaggtcattctgatgaaggcgcttgcgcgggaacgtttctgcgaactgcgcgacaagctcgaactcgtcaagatcaagcagagatgcaaggcttaggaggagatttgttggataagcctcacatgtagtttagtttgcatgtttgttttatttgcatgcacatgagctccagtctgtggcagccacgggcgtaggaatcatggcgtgagaatcgctcggccacaaacggcatgcagtcatggtcgacgaacacgatgcatggggatggacgcacacacctttctggcaacaccaaaatctttgtctctgctcgcttgttcaccaccgcattgtttctaacagagggggcgtcggttgtcggatccatgggggcggctgggagcgacgcgaggaagagag

SEQ ID NO: 70360 - DNA, 2750 bp, Zea Mays
ctcgtctcttagggatcgagaatcgcggcgaggttcatcgaggcttcttgctctgaacagaggagcaaaccaattgcgacttggaaaaggctaataaggaatggaatcgagttatgccaccgaagagagtaactctaaaggctcttctgcaaatgcatcttcatctccaacaggaagttcagaaacttctgtggatttacaaactcctcctgcagccaaggaaattcctggacgtattgatcatgagggaccaagctggcatgaggtcttagaaatgcgggttcctgatctatcagaagacattgcagaatcacatgcgccttcggatacagatcctgacatactgtctaattcaggaccaactgaggcatacataagctcaacaaatgataaggcagattatccttcttcagtaggcacaagcgaagtgaacggtgtgcctgtaaatgtttcgaacggagctggaactacgctaaaggatgaaatgaaacctaaagaagatgatacgcaccatcagattgatagggatacaaagctgaaaatgaaacaagattcagcaacaacacctgaaagtccgtacagaggccttattgacactgctgcaccctttgagtctgttagagaagctgtcaccaagtttggaggaattgtcgattggaaagctcacaaagctcagatgatggagaggcgcaagctcatacaagttgaattagaaaacattcgaacagaaattccactttgcaaggaggaactagaagccgctgagatgactaaatctcaagttgtcgatgagctagagcacaccaagagacttattgaggagctgaagcatcaactggagaaagtacaggttgaagaagctcaggcaaagcaggactctgagcttgcacaactcagggcacaagaaattgagcacggagtagctgatgaagctagtgcgatagccaggacacaaatggaagtcgccaaagaaaggcacgaaaaggctgttgctgaacttaagtcagtaaaagaggagttggcgtcagtacatgaacagtatgctgccttggtagatgaaagagacacagcaatcaaaagagcagaagaggtcatatctgctgggaaggacattgagaagcgagtggaacaactgacattagaactgattgcgtctaaagggtctcttgaattggcccatgctgcgcatcatgaagcagaggaacgtaggatcggtgcagcattggcgaaagagcaggattgcaatgcttgggagagagagttgcgtcaggcacaagaggagctggaacgattagacagtaagcttgcgttcagtaacgatatgcagcacaatattgatgcaaatttgcacaagttgcttagcctcaattcggagctgtctgcctatgtggcgaacaaactgactgaagaagctgaaggtgtttccaaggatcatgagtccgaagattctagacacattagcaacgcagttaaggaagctctagcatcgaaacagaaagaacttcaggagctcaaagccgacattgagaaggcaaaggctgaggccaacgtgctaagatttgctgccatgacactcagatcagaactggacaacgagaacgcttcacttgtcgcgttgcagcagggagaggctatggcatccgttgctgtttcttcactagaagctgagctcaaccggacgaaacaagagatagaatctgtcaggtccaaggaggcagaggcccaagaaaagatggtggagcttcccatggttttacagcaagcgactcaggaggccgaggacgccagggtagcagctcacgcggcccacgaggagctgaggaaggcgaaggaggcattcgagcaaaccaaggctgccgcagctgcagcagagaccaggttatctgctgttgtgaaagaaacagaagcatccgtagcatcagagaggctagcacgcgaggcgcttcaagctttgcaagaaagcgaacaggcaagagaaactaaggattctcagcgaggagtggtgcttcctataagcgagtactacgaacttagcaagagggcacatgaagccgaagaacaggcgagcgagaaggtagcagaagcactggcacaggtagtgtcggcaaaggaatcagaagcaatgagcctggagagcctaaaggaagcgtccgatgaaatggacgagaagaaggaagctcttgagatcgccttggagagagccgggagggcgaacgaagggaagcttggcgcggagcaggagcttaggaaatggagagccgaccacgagcagcgccgcagagctcacgaatccgcgaaacgcgcggtgaatcctttgaacggtccgtctagagtatttgtcgaacagaagagtccataccacaaggagcaggaatccaaggtgcaggcgtcggggagtagtagctacgagggcctcgttccaaaccaaaagatgcagaggaagaaatcgctgttccctctgatgggctcggttctatccaggaagacccgggcacagacgtgacgtaaacgagatcctataggcacctggggctttgccattcacattgctgtacattggtgtaataagctggttttttttcttggtcttctttggaaagagcctttttgttttgttttaaaggttggtatatcctgtggaaggtgtaatttaatttgtcggtataaacagcgtagaacacattggaatacttttatatgattttttttggtaactcatagttcttcatgaattctgcgaggagatctgt

SEQ ID NO: 70361 - DNA, 2722 bp, Zea Mays
ctcctcttgttcgcgttggatgaaaacaaaaccggagcaaaccaattgcgacttggaaaaggctaataaggaatggaatcgagttatgccaccgaagagagtaactctaaaggctcttctgcaaatgcatcttcatctccaacaggaagttcagaaacttctgtggatttacaaactcctcctgcagccaaggaaattcctggacgtattgatcatgagggaccaagctggcatgaggtcttagaaatgcgggttcctgatctatcagaagacattgcagaatcacatgcgccttcggatacagatcctgacatactgtctaattcaggaccaactgaggcatacataagctcaacaaatgataaggcagattatccttcttcagtaggcacaagcgaagtgaacggtgtgcctgtaaatgtttcgaacggagctggaactacgctaaaggatgaaatgaaacctaaagaagatgatacgcaccatcagattgatagggatacaaagctgaaaatgaaacaagattcagcaacaacacctgaaagtccgtacagaggccttattgacactgctgcaccctttgagtctgttagagaagctgtcaccaagtttggaggaattgtcgattggaaagctcacaaagctcagatgatggagaggcgcaagctcatacaagttgaattagaaaacattcgaacagaaattccactttgcaaggaggaactagaagccgctgagatgactaaatctcaagttgtcgatgagctagagcacaccaagagacttattgaggagctgaagcatcaactggagaaagtacaggttgaagaagctcaggcaaagcaggactctgagcttgcacaactcagggcacaagaaattgagcacggagtagctgatgaagctagtgcgatagccaggacacaaatggaagtcgccaaagaaaggcacgaaaaggctgttgctgaacttaagtcagtaaaagaggagttggcgtcagtacatgaacagtatgctgccttggtagatgaaagagacacagcaatcaaaagagcagaagaggtcatatctgctgggaaggacattgagaagcgagtggaacaactgacattagaactgattgcgtctaaagggtctcttgaattggcccatgctgcgcatcatgaagcagaggaacgtaggatcggtgcagcattggcgaaagagcaggattgcaatgcttgggagagagagttgcgtcaggcacaagaggagctggaacgattagacagtaagcttgcgttcagtaacgatatgcagcacaatattgatgcaaatttgcacaagttgcttagcctcaattcggagctgtctgcctatgtggcgaacaaactgactgaagaagctgaaggtgtttccaaggatcatgagtccgaagattctagacacattagcaacgcagttaaggaagctctagcatcgaaacagaaagaacttcaggagctcaaagccgacattgagaaggcaaaggctgaggccaacgtgctaagatttgctgccatgacactcagatcagaactggacaacgagaacgcttcacttgtcgcgttgcagcagggagaggctatggcatccgttgctgtttcttcactagaagctgagctcaaccggacgaaacaagagatagaatctgtcaggtccaaggaggcagaggcccaagaaaagatggtggagcttcccatggttttacagcaagcgactcaggaggccgaggacgccagggtagcagctcacgcggcccacgaggagctgaggaaggcgaaggaggcattcgagcaaaccaaggctgccgcagctgcagcagagaccaggttatctgctgttgtgaaagaaacagaagcatccgtagcatcagagaggctagcacgcgaggcgcttcaagctttgcaagaaagcgaacaggcaagagaaactaaggattctcagcgaggagtggtgcttcctataagcgagtactacgaacttagcaagagggcacatgaagccgaagaacaggcgagcgagaaggtagcagaagcactggcacaggtagtgtcggcaaaggaatcagaagcaatgagcctggagagcctaaaggaagcgtccgatgaaatggacgagaagaaggaagctcttgagatcgccttggagagagccgggagggcgaacgaagggaagcttggcgcggagcaggagcttaggaaatggagagccgaccacgagcagcgccgcagagctcacgaatccgcgaaacgcgcggtgaatcctttgaacggtccgtctagagtatttgtcgaacagaagagtccataccacaaggagcaggaatccaaggtgcaggcgtcggggagtagtagctacgagggcctcgttccaaaccaaaagatgcagaggaagaaatcgctgttccctctgatgggctcggttctatccaggaagacccgggcacagacgtgacgtaaacgagatcctataggcacctggggctttgccattcacattgctgtacattggtgtaataagctggttttttttcttggtcttctttggaaagagcctttttgttttgttttaaaggttggtatatcctgtggaaggtgtaatttaatttgtcggtataaacagcgtagaacacattggaatacttttatatgattttttttggtaactcatagttcttcatgaattctgcgaggagatctgt

SEQ ID NO: 70362 - DNA, 2702 bp, Zea Mays
acaaacaacacacggagcaaaccaattgcgacttggaaaaggctaataaggaatggaatcgagttatgccaccgaagagagtaactctaaaggctcttctgcaaatgcatcttcatctccaacaggaagttcagaaacttctgtggatttacaaactcctcctgcagccaaggaaattcctggacgtattgatcatgagggaccaagctggcatgaggtcttagaaatgcgggttcctgatctatcagaagacattgcagaatcacatgcgccttcggatacagatcctgacatactgtctaattcaggaccaactgaggcatacataagctcaacaaatgataaggcagattatccttcttcagtaggcacaagcgaagtgaacggtgtgcctgtaaatgtttcgaacggagctggaactacgctaaaggatgaaatgaaacctaaagaagatgatacgcaccatcagattgatagggatacaaagctgaaaatgaaacaagattcagcaacaacacctgaaagtccgtacagaggccttattgacactgctgcaccctttgagtctgttagagaagctgtcaccaagtttggaggaattgtcgattggaaagctcacaaagctcagatgatggagaggcgcaagctcatacaagttgaattagaaaacattcgaacagaaattccactttgcaaggaggaactagaagccgctgagatgactaaatctcaagttgtcgatgagctagagcacaccaagagacttattgaggagctgaagcatcaactggagaaagtacaggttgaagaagctcaggcaaagcaggactctgagcttgcacaactcagggcacaagaaattgagcacggagtagctgatgaagctagtgcgatagccaggacacaaatggaagtcgccaaagaaaggcacgaaaaggctgttgctgaacttaagtcagtaaaagaggagttggcgtcagtacatgaacagtatgctgccttggtagatgaaagagacacagcaatcaaaagagcagaagaggtcatatctgctgggaaggacattgagaagcgagtggaacaactgacattagaactgattgcgtctaaagggtctcttgaattggcccatgctgcgcatcatgaagcagaggaacgtaggatcggtgcagcattggcgaaagagcaggattgcaatgcttgggagagagagttgcgtcaggcacaagaggagctggaacgattagacagtaagcttgcgttcagtaacgatatgcagcacaatattgatgcaaatttgcacaagttgcttagcctcaattcggagctgtctgcctatgtggcgaacaaactgactgaagaagctgaaggtgtttccaaggatcatgagtccgaagattctagacacattagcaacgcagttaaggaagctctagcatcgaaacagaaagaacttcaggagctcaaagccgacattgagaaggcaaaggctgaggccaacgtgctaagatttgctgccatgacactcagatcagaactggacaacgagaacgcttcacttgtcgcgttgcagcagggagaggctatggcatccgttgctgtttcttcactagaagctgagctcaaccggacgaaacaagagatagaatctgtcaggtccaaggaggcagaggcccaagaaaagatggtggagcttcccatggttttacagcaagcgactcaggaggccgaggacgccagggtagcagctcacgcggcccacgaggagctgaggaaggcgaaggaggcattcgagcaaaccaaggctgccgcagctgcagcagagaccaggttatctgctgttgtgaaagaaacagaagcatccgtagcatcagagaggctagcacgcgaggcgcttcaagctttgcaagaaagcgaacaggcaagagaaactaaggattctcagcgaggagtggtgcttcctataagcgagtactacgaacttagcaagagggcacatgaagccgaagaacaggcgagcgagaaggtagcagaagcactggcacaggtagtgtcggcaaaggaatcagaagcaatgagcctggagagcctaaaggaagcgtccgatgaaatggacgagaagaaggaagctcttgagatcgccttggagagagccgggagggcgaacgaagggaagcttggcgcggagcaggagcttaggaaatggagagccgaccacgagcagcgccgcagagctcacgaatccgcgaaacgcgcggtgaatcctttgaacggtccgtctagagtatttgtcgaacagaagagtccataccacaaggagcaggaatccaaggtgcaggcgtcggggagtagtagctacgagggcctcgttccaaaccaaaagatgcagaggaagaaatcgctgttccctctgatgggctcggttctatccaggaagacccgggcacagacgtgacgtaaacgagatcctataggcacctggggctttgccattcacattgctgtacattggtgtaataagctggttttttttcttggtcttctttggaaagagcctttttgttttgttttaaaggttggtatatcctgtggaaggtgtaatttaatttgtcggtataaacagcgtagaacacattggaatacttttatatgattttttttggtaactcatagttcttcatgaattctgcgaggagatctgt

SEQ ID NO: 70363 - DNA, 918 bp, Zea Mays
gacagacctggtggagtcaagtactctaccaaacttgccccttcccttcccagcgcgctctctctagccggcgacgattgggcgagcggcgccactcaacgccaggtcttcgtgaaaaccatcgccggcgatgagtttcaaccagtctactgtcaaggggcaggccaggagggagaggcctagggctcgccctcatggcctgacgcagcagaggaggcaggaaataaaggaagcttttgatctgtttgatacagataactctggaaccattgatgcaaaagagctcaatgttgccatgagagccttgggatttgagatgactgaagagcaaattaggcaaatgattgctgatgttgacaaagatggcagtggagcgatcgactacgaggagtttgagcacatgatgactgccaaaatcggagagagggatagtaaagaggagctttcaaaagcattccgcattattgatcaagatggaaatggaaagatttctaacattgatatccagaggattgccaaagagctgggtgtaaatctcaccctcgatgagatccaagacatggtgcaagaggctgatagaaatggtgacggtgagatagactttgacgagttcatcaggatgatgaggaggaccagctttggctactaggtgtatttatctgtatggcaacttttatgtataacgagcacggcccgacaacctactaagaaaatggtagcgtaggggacggagggatggacggtgaaaacaggtggcacgccaacgactggacggagcgtgcgaggaaggggaaatggcagcgcatggcacgaatgagagatggagatagagagagaaagaatgagtgctacctttcagaagaaagaatgagtgctacctttcagaaggaagaagtcggaatagaaaacgctcgatcc

SEQ ID NO: 70364 - DNA, 1522 bp, Zea Mays
gattacctcctaccgtccgacccggctccctcggtccctccctcggtccctcccggtctcgcagttcctccccgtcgtcttccaccgcaaatcgccgaagcaagcaggcgagctcgggaccagatccactgcgggcagctggagcggaagggccatggggacgccgccgcctttccaggagtccggccactgcgacgtctgccgctgcaccttcaacaccttccgccgccgtcatcactgccgcagctgcggacggacgctctgtcacgagcattcttcgtactacatggctctcccgcagtatgggatatatacagacgtcagagtctgctacggttgcttcaacaaatcctccagccaaggacacgctgataatccggtgtcagctggtagcatttctggagcagctgactctttttcagggctgagtttgggtaaggaggatgattcgtcgcctatgaagaattcaacggttcagagcacggcagcccttattgagtgcaaatgtgggatgcctttgtgtatatgtgaagcaccaaaaccagaaccttctcctacacctgtaaagaatatcaacaccgttcccccaaccacacagtcaaatccaaggccaaagaagcctgctaacactcaacagaaggcttcagctacttccagtagcaactcaagggactgagagaagcaattaaaggcggggatgttaagggtgtaaagaaacttcttacacagggagtggattctaactactgcgacaaacaaggatttactttgctgcatttggctgctttgtttaaccaaactgaaattgctcttattctcatggaccatggggcaaatgttgaaagcaaaaatgggcaaggggaaactcctttggactgtgctccggcaatgctgcaatacaaaatgcgccaacgggtggaagaactcgcggcttcggcttcgaagggaccactagggtgaactgtgctcgtgctagtttctgctgagttcctcctattccagtttgtgtcaaatgtggtgtcaagaataaaatagttaagtcagctgaaagcttcttgctggtgggacagtgtttggtccgccagtgtataccatctagaaacgttgaatgccagtcacggctcacgcgtgtgaaataatatatattcagcttcatcctacattcctactcatgtactctgtagccggtgaatacttccaaacatttaccacgtacaatatgtttttcttttactgaaacagcattcctctaggagatgcatgacagcagaaagcttcctgccggtggcctggtgccggtgggatagtgctcgtgctcccagtaccacctgcaaactttggaatcccagccataatttgccagtgcgaaatactgtaattcattcagcttcacctgcaaactttggattctgccgttaccaagtctgccgtttagtatggtaacgattcacgctcgattaccggcggtaaaatttgaatagggtgatatcagtttttattgtaatatctgattacgatggga

SEQ ID NO: 70365 - DNA, 1511 bp, Zea Mays
gattacctcctaccgtccgacccggctccctcggtccctccctcggtccctcccggtctcgcagttcctccccgtcgtcttccaccgcaaatcgccgaagcaagcaggcgagctcgggaccagatccactgcgggcagctggagcggaagggccatggggacgccgccgcctttccaggagtccggccactgcgacgtctgccgctgcaccttcaacaccttccgccgccgtgctctcccgcagtatgggatatatacagacgtcagagtctgctacggttgcttcaacaaatcctccagccaaggacacgctgataatccggtgtcagctggtagcatttctggagcagctgactctttttcagggctgagtttgggtaaggaggatgattcgtcgcctatgaagaattcaacggttcagagcacggcagcccttattgagtgcaaatgtgggatgcctttgtgtatatgtgaagcaccaaaaccagaaccttctcctacacctgtaaagtcaaatccaaggccaaagaagcctgctaacactcaacagaaggcttcagctacttccagtagcaactcaagcccattcttaaatattggattaatgaacaacgatagcaatgataagggcattgttgactatgaagttagtggggagggactgagagaagcaattaaaggcggggatgttaagggtgtaaagaaacttcttacacagggagtggattctaactactgcgacaaacaaggatttactttgctgcatttggctgctttgtttaaccaaactgaaattgctcttattctcatggaccatggggcaaatgttgaaagcaaaaatgggcaaggggaaactcctttggactgtgctccggcaatgctgcaatacaaaatgcgccaacgggtggaagaactcgcggcttcggcttcgaagggaccactagggtgaactgtgctcgtgctagtttctgctgagttcctcctattccagtttgtgtcaaatgtggtgtcaagaataaaatagttaagtcagctgaaagcttcttgctggtgggacagtgtttggtccgccagtgtataccatctagaaacgttgaatgccagtcacggctcacgcgtgtgaaataatatatattcagcttcatcctacattcctactcatgtactctgtagccggtgaatacttccaaacatttaccacgtacaatatgtttttcttttactgaaacagcattcctctaggagatgcatgacagcagaaagcttcctgccggtggcctggtgccggtgggatagtgctcgtgctcccagtaccacctgcaaactttggaatcccagccataatttgccagtgcgaaatactgtaattcattcagcttcacctgcaaactttggattctgccgttaccaagtctgccgtttagtatggtaacgattcacgctcgattaccggcggtaaaatttgaatagggtgatatcagtttttattgtaatatctgattacgatggga

SEQ ID NO: 70366 - DNA, 1541 bp, Zea Mays
gattacctcctaccgtccgacccggctccctcggtccctccctcggtccctcccggtctcgcagttcctccccgtcgtcttccaccgcaaatcgccgaagcaagcaggcgagctcgggaccagatccactgcgggcagctggagcggaagggccatggggacgccgccgcctttccaggagtccggccactgcgacgtctgccgctgcaccttcaacaccttccgccgccgtgctctcccgcagtatgggatatatacagacgtcagagtctgctacggttgcttcaacaaatcctccagccaaggacacgctgataatccggtgtcagctggtagcatttctggagcagctgactctttttcagggctgagtttgggtaaggaggatgattcgtcgcctatgaagaattcaacggttcagagcacggcagcccttattgagtgcaaatgtgggatgcctttgtgtatatgtgaagcaccaaaaccagaaccttctcctacacctgtaaagaatatcaacaccgttcccccaaccacacagtcaaatccaaggccaaagaagcctgctaacactcaacagaaggcttcagctacttccagtagcaactcaagcccattcttaaatattggattaatgaacaacgatagcaatgataagggcattgttgactatgaagttagtggggagggactgagagaagcaattaaaggcggggatgttaagggtgtaaagaaacttcttacacagggagtggattctaactactgcgacaaacaaggatttactttgctgcatttggctgctttgtttaaccaaactgaaattgctcttattctcatggaccatggggcaaatgttgaaagcaaaaatgggcaaggggaaactcctttggactgtgctccggcaatgctgcaatacaaaatgcgccaacgggtggaagaactcgcggcttcggcttcgaagggaccactagggtgaactgtgctcgtgctagtttctgctgagttcctcctattccagtttgtgtcaaatgtggtgtcaagaataaaatagttaagtcagctgaaagcttcttgctggtgggacagtgtttggtccgccagtgtataccatctagaaacgttgaatgccagtcacggctcacgcgtgtgaaataatatatattcagcttcatcctacattcctactcatgtactctgtagccggtgaatacttccaaacatttaccacgtacaatatgtttttcttttactgaaacagcattcctctaggagatgcatgacagcagaaagcttcctgccggtggcctggtgccggtgggatagtgctcgtgctcccagtaccacctgcaaactttggaatcccagccataatttgccagtgcgaaatactgtaattcattcagcttcacctgcaaactttggattctgccgttaccaagtctgccgtttagtatggtaacgattcacgctcgattaccggcggtaaaatttgaatagggtgatatcagtttttattgtaatatctgattacgatggga

SEQ ID NO: 70367 - DNA, 1312 bp, Zea Mays
gattacctcctaccgtccgacccggctccctcggtccctccctcggtccctcccggtctcgcagttcctccccgtcgtcttccaccgcaaatcgccgaagcaagcaggcgagctcgggaccagatccactgcgggcagctggagcggaagggccatggggacgccgccgcctttccaggagtccggccactgcgacgtctgccgctgcaccttcaacaccttccgccgccgtcatcactgccgcagctgcggacggacgctctgtcacgagcattcttcgtactacatggctctcccgcagtatgggatatatacagacgtcagagtctgctacggttgcttcaacaaatcctccagccaaggacacgctgataatccggtgtcagctggtagcatttctggagcagctgactctttttcagggctgagtttgggtaaggaggatgattcgtcgcctatgaagaattcaacggttcagagcacggcagcccttattgagtgcaaatgtgggatgcctttgtgtatatgtgaagcaccaaaaccagaaccttctcctacacctgtaaagaatatcaacaccgttcccccaaccacacagtcaaatccaaggccaaagaagcctgctaacactcaacagaaggcttcagctacttccagtagcaactcaagcccattcttaaatattggattaatgaacaacgatagcaatgataagggcattgttgactatgaagttagtggggagggactgagagaagcaattaaaggcggggatgttaagggtgtaaagaaacttcttacacagggagtggattctaactactgcgacaaacaaggatttactttgctgcatttggctgctttgtttaaccaaactgaaattgctcttattctcatggaccatggggcaaatgttgaaagcaaaaatgggcaaggggaaactcctttggactgtgctccggcaatgctgcaatacaaaatgcgccaacgggtggaagaactcgcggcttcggcttcgaagggaccactaggcattcctctaggagatgcatgacagcagaaagcttcctgccggtggcctggtgccggtgggatagtgctcgtgctcccagtaccacctgcaaactttggaatcccagccataatttgccagtgcgaaatactgtaattcattcagcttcacctgcaaactttggattctgccgttaccaagtctgccgtttagtatggtaacgattcacgctcgattaccggcggtaaaatttgaatagggtgatatcagtttttattgtaatatctgattacgatggga

SEQ ID NO: 70368 - DNA, 1162 bp, Zea Mays
gattacctcctaccgtccgacccggctccctcggtccctccctcggtccctcccggtctcgcagttcctccccgtcgtcttccaccgcaaatcgccgaagcaagcaggcgagctcgggaccagatccactgcgggcagctggagcggaagggccatggggacgccgccgcctttccaggagtccggccactgcgacgtctgccgctgcaccttcaacaccttccgccgccgtcatcactgccgcagctgcggacggacgctctgtcacgagcattcttcgtactacatggctctcccgcagtatgggatatatacagacgtcagagtctgctacggttgcttcaacaaatcctccagccaaggacacgctgataatccggtgtcagctggtagcatttctggagcagctgactctttttcagggctgagtttgggtaaggaggatgattcgtcgcctatgaagaattcaacggttcagagcacggcagcccttattgagtgcaaatgtgggatgcctttgtgtatatgtgaagcaccaaaaccagaaccttctcctacacctgtaaagaatatcaacaccgttcccccaaccacacagtcaaatccaaggccaaagaagcctgctaacactcaacagaaggcttcagctacttccagtagcaactcaagcccattcttaaatattggattaatgaacaacgatagcaatgataagggcattgttgactatgaagttagtggggagggactgagagaagcaattaaaggcggggatgttaagggtgtaaagaaacttcttacacagggagtggattctaactactgcgacaaacaaggatttactttgctgcatttggctgctttgtttaaccaaactgaaattgctcttattctcatggaccatggggcaaatgttgaaagcaaaaatgggcaagatcccactcatgtggaagcctccgacgatgggtctgctcttaagctctcgaaaaaaatgttcaatgtagagccaaagaggagagagtatgacaaagggaaaagtggcttgagttccatgctcaatttggttctgttgagagttatcatcgtcatatatttagttactcacccgattttgaaattgaagtagggatagttatttcagtgcctggaattgctaacatca

SEQ ID NO: 70369 - DNA, 1105 bp, Zea Mays
gattacctcctaccgtccgacccggctccctcggtccctccctcggtccctcccggtctcgcagttcctccccgtcgtcttccaccgcaaatcgccgaagcaagcaggcgagctcgggaccagatccactgcgggcagctggagcggaagggccatggggacgccgccgcctttccaggagtccggccactgcgacgtctgccgctgcaccttcaacaccttccgccgccgtgctctcccgcagtatgggatatatacagacgtcagagtctgctacggttgcttcaacaaatcctccagccaaggacacgctgataatccggtgtcagctggtagcatttctggagcagctgactctttttcagggctgagtttgggtaaggaggatgattcgtcgcctatgaagaattcaacggttcagagcacggcagcccttattgagtgcaaatgtgggatgcctttgtgtatatgtgaagcaccaaaaccagaaccttctcctacacctgtaaagaatatcaacaccgttcccccaaccacacagtcaaatccaaggccaaagaagcctgctaacactcaacagaaggcttcagctacttccagtagcaactcaagcccattcttaaatattggattaatgaacaacgatagcaatgataagggcattgttgactatgaagttagtggggagggactgagagaagcaattaaaggcggggatgttaagggtgtaaagaaacttcttacacagggagtggattctaactactgcgacaaacaaggatttactttgctgcatttggctgctttgtttaaccaaactgaaattgctcttattctcatggaccatggggcaaatgttgaaagcaaaaatgggcaagatcccactcatgtggaagcctccgacgatgggtctgctcttaagctctcgaaaaaaatgttcaatgtagagccaaagaggagagagtatgacaaagggaaaagtggcttgagttccatgctcaatttggttctgttgagagttatcatcgtcatatatttagttactcacccgattttgaaattgaagtagggatagttatttcagtgcctggaattgctaacatca

SEQ ID NO: 70370 - DNA, 1112 bp, Zea Mays
cgattacctcctaccgtccgacccggctccctcggtccctccctcggtccctcccggtctcgcagttcctccccgtcgtcttccaccgcaaatcgccgaagcaagcaggcgagctcgggaccagatccactgcgggcagctggagcggaagggccatggggacgccgccgcctttccaggagtccggccactgcgacgtctgccgctgcaccttcaacaccttccgccgccgtcatcactgccgcagctgcggacggacgctctgtcacgagcattcttcgtactacatggctctcccgcagtatgggatatatacagacgtcagagtctgctacggttgcttcaacaaatcctccagccaaggacacgctgataatccggtgtcagctggtagcatttctggagcagctgactctttttcagggctgagtttgggtaaggaggatgattcgtcgcctatgaagaattcaacggttcagagcacggcagcccttattgagtgcaaatgtgggatgcctttgtgtatatgtgaagcaccaaaaccagaaccttctcctacacctgtaaagaatatcaacaccgttcccccaaccacacagtcaaatccaaggccaaagaagcctgctaacactcaacagaaggcttcagctacttccagtagcaactcaagcccattcttaaatattggattaatgaacaacgatagcaatgataagggcattgttgactatgaagttagtggggagggactgagagaagcaattaaaggcggggatgttaagggtgtaaagaaacttcttacacaggctgctttgtttaaccaaactgaaattgctcttattctcatggaccatggggcaaatgttgaaagcaaaaatgggcaagatcccactcatgtggaagcctccgacgatgggtctgctcttaagctctcgaaaaaaatgttcaatgtagagccaaagaggagagagtatgacaaagggaaaagtggcttgagttccatgctcaatttggttctgttgagagttatcatcgtcatatatttagttactcacccgattttgaaattgaagtagggatagttatttcagtgcctggaattgctaacatca

SEQ ID NO: 70371 - DNA, 634 bp, Zea Mays
gattacctcctaccgtccgacccggctccctcggtccctccctcggtccctcccggtctcgcagttcctccccgtcgtcttccaccgcaaatcgccgaagcaagcaggcgagctcgggaccagatccactgcgggcagctggagcggaagggccatggggacgccgccgcctttccaggagtccggccactgcgacgtctgccgctgcaccttcaacaccttccgccgccgtgctctcccgcagtatgggatatatacagacgtcagagtctgctacggttgcttcaacaaatcctccagccaaggacacgctgataatccggtgtcagctggtagcatttctggagcagctgactctttttcagggctgagtttgggtaaggaggatgattcgtcgcctatgaagaattcaacggttcagagcacggcagcccttattgagtgcaaatgtgggatgcctttgtgtatatgtgaagcaccaaaaccagaaccttctcctacacctgtaaagaatatcaacaccgttcccccaaccacacagtcaaatccaaggccaaagaagcctgctaacactcaacagaaggcttcagctacttccagtagcaactcaaggaatgccatcttgattcctgca

SEQ ID NO: 70372 - DNA, 694 bp, Zea Mays
gattacctcctaccgtccgacccggctccctcggtccctccctcggtccctcccggtctcgcagttcctccccgtcgtcttccaccgcaaatcgccgaagcaagcaggcgagctcgggaccagatccactgcgggcagctggagcggaagggccatggggacgccgccgcctttccaggagtccggccactgcgacgtctgccgctgcaccttcaacaccttccgccgccgtgctctcccgcagtatgggatatatacagacgtcagagtctgctacggttgcttcaacaaatcctccagccaaggacacgctgataatccggtgtcagctggtagcatttctggagcagctgactctttttcagggctgagtttgggtaaggaggatgattcgtcgcctatgaagaattcaacggttcagagcacggcagcccttattgagtgcaaatgtgggatgcctttgtgtatatgtgaagcaccaaaaccagaaccttctcctacacctgtaaagaatatcaacaccgttcccccaaccacacagtcaaatccaaggccaaagaagcctgctaacactcaacagaaggcttcagctacttccagtagcaactcaagcccattcttaaatattggattaatgaacaacgatagcaatgataagggcattgttgactatgaagttagtggggaggtttta

SEQ ID NO: 70373 - DNA, 974 bp, Zea Mays
gggaagcctacggcactgggctctgtcaaagaccttaaccgtagacgagcttttctacctgaaatcacagttttctctattggaaccagacaggaatgggtgcatcactcttgacaatatcagaatggccttaacgagagaagctactgatgcaatgaaggaatcgcgagttcaagatattcttgtttcgttgagcgcccttcagtacagaagaatggaattccaagagttctgtgcagcagcagttagtgtgcatcagcttgaagcattggatagatgggagcaacatgcgagatctgcttatgaacattttgagaaggaaggcaaccgagctattgtaatagatgaattagcttctgaattgggcctcagcccttcagtgccactgcatgtcgttctgcaagattggatcaggcatacggatgggaaattgagctttctcggatttgtcaagttattgcatggcatgtccagcaggtccctgtcaaagatgagatagctgttgataatctctaacgacagcgcatgcttacaccgccttagcccttgtcgacttggttcgtgggttggagcttgtgtatcaagggcgtatctagcagcacctgatctgtcactaatttgagtatagagttatgtttgttgttgcctgcctactgatcattagccgataggaaaaaggaaaatctcacccatatctgcaacatgtgatgttatctaacagtgttagattaggcgtcattttctgttgtgatttttggaaactttgtaatgcttccttcctggaactggagcaagttaactgcaagttaccaggttggcctttagagcatggacatatcacttaccgtgcgtggtcgttatgtggtactacgtcaggttctcttcgtgtatatattgatgagatggaactgtgcattattttgaatctcaatattagcatgtcaatttgcaaactcgaattgattctgttcttt

SEQ ID NO: 70374 - DNA, 2309 bp, Zea Mays
caaagctctctcgctacctccctccctccctccctccccctcttccgaggcttctcctttccgccatggcctcctgctagtgccagcccccgtcgcaacgcctcccagatcccggacgcagcgtgccgcaccccgcgacggccggctcgcgacatgggagggtgtcacgcgaagccgctcacccacgacgcggaccgctcgccgccgcacgcagcgccggcgaccccgcccccgggctccgccacgcccgccacccccggccccgggaagaagcactgggcggtgtccccgttcttcgcgttctccacgccgagcccgagccccgcgcaccacctcttcggcggctccgcggcatcgccgcgcaagtcccccgctccgccgggctccgcgcccaccacccggccaggcggctcctgaggctgcccttcccgccgccgtcgcccgccaagcacatccgggcggcgctcgccaggcgccacggcccgccgcggccgtctatccccgaggaaggcggcggcgagggggagggcggcggcggcggaggcaggggcctcgacaaggggtttgggttcaacaaggggtttgcggccaagtatgacttgggggatgaggtcggacgggggcacttcggctacacctgcgccgccacggttaagaagggcgcgcgcaagggggagtccgtcgccgtcaaggtcatccccaaagcaaagatgactacatccattgctatagaggatgtccgaagggaggttaaaatcttgaaagctttagcaggaaacaaaaacttggtccaattttatgatgcctacgaggacaacgacaacgtgtatatagtaatggagctgtgcgaaggtggagagctacttgacagaatactttccagaggcgggaagtactccgaggatgatgcaaaagctgtcctggtgcaaatattaaatgtcgtcgctttttgccacattcaaggagtggttcatcgagatctcaaaccagagaattttctttttacatcaaaagatgatgattcccatcttaaggccattgattttggcctatcagactttgtaaaaccagtcgtccattttgggcacgcacggaatctggcatattccgttcggttctcaaagccgatcccagttacaatgaggcaccatggccttctctgactccggaagcaatggattttgtcaagcgattgctgtgcaaggatccgcgtagaaggatgactgcagctcaggctttaagtcatccatggatcagaaattataatgacattaagctgccgttggacattcttatattccgacttatcaaagcttatattcgctcctcatctttacggaaagctgctctgagggctctgtcaaagaccttaaccgtagacgagcttttctacctgaaatcacagttttctctattggaaccagacaggaatgggtgcatcactcttgacaatatcagaatggccttaacgagagaagctactgatgcaatgaaggaatcgcgagttcaagatattcttgtttcgttgagcgcccttcagtacagaagaatggaattccaagagttctgtgcagcagcagttagtgtgcatcagcttgaagcattggatagatgggagcaacatgcgagatctgcttatgaacattttgagaaggaaggcaaccgagctattgtaatagatgaattagcttctgaattgggcctcagcccttcagtgccactgcatgtcgttctgcaagattggatcaggcatacggatgggaaattgagctttctcggatttgtcaagttattgcatggcatgtccagcaggtccctgtcaaagatgagatagctgttgataatctctaacgacagcgcatgcttacaccgccttagcccttgtcgacttggttcgtgggttggagcttgtgtatcaagggcgtatctagcagcacctgatctgtcactaatttgagtatagagttatgtttgttgttgcctgcctactgatcattagccgataggaaaaaggaaaatctcacccatatctgcaacatgtgatgttatctaacagtgttagattaggcgtcattttctgttgtgatttttggaaactttgtaatgcttccttcctggaactggagcaagttaactgcaagttaccaggttggcctttagagcatggacatatcacttaccgtgcgtggtcgttatgtggtactacgtcaggttctcttcgtgtatatattgatgagatggaactgtgcattattttgaatctcaatattagcatgtcaatttgcaaactcgaattgattctgttcttt

SEQ ID NO: 70375 - DNA, 2372 bp, Zea Mays
caaagctctctcgctacctccctccctccctccctccccctcttccgaggcttctcctttccgccatggcctcctgctagtgccagcccccgtcgcaacgcctcccagatcccggacgcagcgtgccgcaccccgcgacggccggctcgcgacatgggagggtgtcacgcgaagccgctcacccacgacgcggaccgctcgccgccgcacgcagcgccggcgaccccgcccccgggctccgccacgcccgccacccccggccccgggaagaagcactgggcggtgtccccgttcttcgcgttctccacgccgagcccgagccccgcgcaccacctcttcggcggctccgcggcatcgccgcgcaagtcccccgctccgccgggctccgcgcccaccacccggccaggcggctcctgaggctgcccttcccgccgccgtcgcccgccaagcacatccgggcggcgctcgccaggcgccacggcccgccgcggccgtctatccccgaggaaggcggcggcgagggggagggcggcggcggcggaggcaggggcctcgacaaggggtttgggttcaacaaggggtttgcggccaagtatgacttgggggatgaggtcggacgggggcacttcggctacacctgcgccgccacggttaagaagggcgcgcgcaagggggagtccgtcgccgtcaaggtcatccccaaagcaaaggaaacaaaaacttggtccaattttatgatgcctacgaggacaacgacaacgtgtatatagtaatggagctgtgcgaaggtggagagctacttgacagaatactttccagaggcgggaagtactccgaggatgatgcaaaagctgtcctggtgcaaatattaaatgtcgtcgctttttgccacattcaaggagtggttcatcgagatctcaaaccagagaattttctttttacatcaaaagatgatgattcccatcttaaggccattgattttggcctatcagactttgtaaaaccagatgagaggctcaatgacatagttggaagtgcttattatgttgctccagaagttctgcatagatgctatagcacagaagctgatgtttggagcataggtgtaattgcatatatccttctttgtggcagtcgtccattttgggcacgcacggaatctggcatattccgttcggttctcaaagccgatcccagttacaatgaggcaccatggccttctctgactccggaagcaatggattttgtcaagcgattgctgtgcaaggatccgcgtagaaggatgactgcagctcaggctttaagtcatccatggatcagaaattataatgacattaagctgccgttggacattcttatattccgacttatcaaagcttatattcgctcctcatctttacggaaagctgctctgagggctctgtcaaagaccttaaccgtagacgagcttttctacctgaaatcacagttttctctattggaaccagacaggaatgggtgcatcactcttgacaatatcagaatggccttaacgagagaagctactgatgcaatgaaggaatcgcgagttcaagatattcttgtttcgttgagcgcccttcagtacagaagaatggaattccaagagttctgtgcagcagcagttagtgtgcatcagcttgaagcattggatagatgggagcaacatgcgagatctgcttatgaacattttgagaaggaaggcaaccgagctattgtaatagatgaattagcttctgaattgggcctcagcccttcagtgccactgcatgtcgttctgcaagattggatcaggcatacggatgggaaattgagctttctcggatttgtcaagttattgcatggcatgtccagcaggtccctgtcaaagatgagatagctgttgataatctctaacgacagcgcatgcttacaccgccttagcccttgtcgacttggttcgtgggttggagcttgtgtatcaagggcgtatctagcagcacctgatctgtcactaatttgagtatagagttatgtttgttgttgcctgcctactgatcattagccgataggaaaaaggaaaatctcacccatatctgcaacatgtgatgttatctaacagtgttagattaggcgtcattttctgttgtgatttttggaaactttgtaatgcttccttcctggaactggagcaagttaactgcaagttaccaggttggcctttagagcatggacatatcacttaccgtgcgtggtcgttatgtggtactacgtcaggttctcttcgtgtatatattgatgagatggaactgtgcattattttgaatctcaatattagcatgtcaatttgcaaactcgaattgattctgttcttt

SEQ ID NO: 70376 - DNA, 3211 bp, Zea Mays
caaagctctctcgctacctccctccctccctccctccccctcttccgaggcttctcctttccgccatggcctcctgctagtgccagcccccgtcgcaacgcctcccagatcccggacgcagcgtgccgcaccccgcgacggccggctcgcgacatgggagggtgtcacgcgaagccgctcacccacgacgcggaccgctcgccgccgcacgcagcgccggcgaccccgcccccgggctccgccacgcccgccacccccggccccgggaagaagcactgggcggtgtccccgttcttcgcgttctccacgccgagcccgagccccgcgcaccacctcttcggcggctccgcggcatcgccgcgcaagtcccccgctccgccgggctccgcgcccaccacccggccaggcggctcctgaggctgcccttcccgccgccgtcgcccgccaagcacatccgggcggcgctcgccaggcgccacggcccgccgcggccgtctatccccgaggaaggcggcggcgagggggagggcggcggcggcggaggcaggggcctcgacaaggggtttgggttcaacaaggggtttgcggccaagtatgacttgggggatgaggtcggacgggggcacttcggctacacctgcgccgccacggttaagaagggcgcgcgcaagggggagtccgtcgccgtcaaggtcatccccaaagcaaagatgactacatccattgctatagaggatgtccgaagggaggttaaaatcttgaaagctttagcaggaaacaaaaacttggtccaattttatgatgcctacgaggacaacgacaacgtgtatatagtaatggagtaagtttacatggcctgagaaattacttttctttttacttgatgtttcatattctatgaggctgtcctccataccatatatagtttgttattatacgtcattattagcacttataactattatcaagaacagaaactataaaatcatgaaaagtcacagcttcatatttgctaattgagttaatgtacctttgggcggtcactttattgttattttttgttcacctattgttgatgcagttagaacaatatttaaatgcatgctaaataccatacgtcgttaaaataattttctgtcaattagttgaaatgatctattgccttagcctttctagtatcctttttattctaagtaacactcataatgcgggataaagattagcatttgtaatgtgtaacaagcaacaactctatataatctggtaccaattgcacttattacttccatggtgaaaatgtactgctacaaatgttctttgtgggaggcagtcaagatatgcttctcttttcctgccgaacattagttagttgtaacattctagaaagggtgaaagcttccagattgtttacgtgctgccaaagtttattaccatggtataccggggtttgaaagatttctcggctaactatttgcttctcatttatatttattaccttttataccctgctgatgaagtgatgatggtcctcgaatagttccatttctgcatttaccatccaatccatgcttgttctttaaagattcatgtttattgtttaaaatcctattctgtaggctgtgcgaaggtggagagctacttgacagaatactttccagaggcgggaagtactccgaggatgatgcaaaagctgtcctggtgcaaatattaaatgtcgtcgctttttgccacattcaaggagtggttcatcgagatctcaaaccagagaattttctttttacatcaaaagatgatgattcccatcttaaggccattgattttggcctatcagactttgtaaaaccagatgagaggctcaatgacatagttggaagtgcttattatgttgctccagaagttctgcatagatgctatagcacagaagctgatgtttggagcataggtgtaattgcatatatccttctttgtggcagtcgtccattttgggcacgcacggaatctggcatattccgttcggttctcaaagccgatcccagttacaatgaggcaccatggccttctctgactccggaagcaatggattttgtcaagcgattgctgtgcaaggatccgcgtagaaggatgactgcagctcaggctttaagtcatccatggatcagaaattataatgacattaagctgccgttggacattcttatattccgacttatcaaagcttatattcgctcctcatctttacggaaagctgctctgagggctctgtcaaagaccttaaccgtagacgagcttttctacctgaaatcacagttttctctattggaaccagacaggaatgggtgcatcactcttgacaatatcagaatggccttaacgagagaagctactgatgcaatgaaggaatcgcgagttcaagatattcttgtttcgttgagcgcccttcagtacagaagaatggaattccaagagttctgtgcagcagcagttagtgtgcatcagcttgaagcattggatagatgggagcaacatgcgagatctgcttatgaacattttgagaaggaaggcaaccgagctattgtaatagatgaattagcttctgaattgggcctcagcccttcagtgccactgcatgtcgttctgcaagattggatcaggcatacggatgggaaattgagctttctcggatttgtcaagttattgcatggcatgtccagcaggtccctgtcaaagatgagatagctgttgataatctctaacgacagcgcatgcttacaccgccttagcccttgtcgacttggttcgtgggttggagcttgtgtatcaagggcgtatctagcagcacctgatctgtcactaatttgagtatagagttatgtttgttgttgcctgcctactgatcattagccgataggaaaaaggaaaatctcacccatatctgcaacatgtgatgttatctaacagtgttagattaggcgtcattttctgttgtgatttttggaaactttgtaatgcttccttcctggaactggagcaagttaactgcaagttaccaggttggcctttagagcatggacatatcacttaccgtgcgtggtcgttatgtggtactacgtcaggttctcttcgtgtatatattgatgagatggaactgtgcattattttgaatctcaatattagcatgtcaatttgcaaactcgaattgattctgttcttt

SEQ ID NO: 70377 - DNA, 1426 bp, Zea Mays
agacggcttttaacgtctccatttctctacccgaatccgaccgagcttccttctgccttcctcggctggagtagtaccttcctctctctctctaccaccagggcaccagcctagtacctcccagaccaaaacttcactcaacaataacaaaatcccaaggccttttaaaggatcaacgtggtagagagagagggagagggagcaagaagagcagctagcaagcaaagaagcgttcgaggattcgagatggaggtgatggtgcctgtgcctgtcatggcgccaagcgcaccgtgcagcccaagaaccgcgaccatggccggcggcgaccacctcccggcctactgctacttcttctccagcgccccgacgagcccgtccagggcgagctgcaactgcaaccccgcgtcgtcgccgccgggtggcgacgaggccagcacgttcgacttcacgctcgggttcagcgggcagctgcaggaggccacgccgaccctcgcggccgccgacgagctcttcgagggcggcaggattcggccgctgaacgcgccgcacccgagcattctgcgggtcgccaacgacgcctcctccggctccgccgatggcactcggtgctccccgaggagagccggcggcgcggatcgtcaagcggaggcggcgccgttggagagaggcaggtcgggctgcaggccctcctccgccgccgctgcggcgccttcttcgtcgaggagcaggagcaggagggccacgcggtctctgtccccgttcaggggcggcagtggcctggacgccgccgccgctgacgacgtcgacgacgagtcccctcctccgtctccccgagcctcctccatgatacgtggctgcggcagcggcagcggcagcaggaagtggcggctcaaggacctgttcctcttccgcagcgcgtccgagggccgcgccaccggcaaggacccgctcctcaagtacaccgcgctgtcgtcggcgtcgttctggcacccccacggccagccccagaggctaagcagcgcgtccatgtccatgcgcaagggaagagggtcggctgcgtcggccggcgacacgccgtacgccacgatcaaccgggcggccgccgccgaggacgtgcggcgccggacgaccaccgccaccaccacgccgctgccgttccaccgcaacagcctgttcggctacctgcgctccaacccggcgatccacagcatcagcaggaagctggggggcagcggccactccggctcgtcctcgtcctccagccgcggaggcaggcaggcagcaggccgacatgacgatccgtacgcacgcacggcacgacgcacagcaccgcaccaggaatctcgacggcgatgatgcagaaatggccgccggagggagggaagcggcgttgtacatcttggcttcctcgctcgtcccatggccg

SEQ ID NO: 70378 - DNA, 3376 bp, Zea Mays
ctcctaaagttttagggaaattagggcagacataatgtataatcattgatttttacgtaaaatatataaatttcagatactattagatgacaggactgaaaaagacaaaaatgatgtcacttaaatcagtgtctcgtcatcaaaacctatgatgcgcggatacttctcaaaacacatgtaccggtgtcggatatcgtatcagatacagatactcctaggatacttccggatacgtatctggggcgtatcgggaatttctgtgaatttaaataaataaaaaatgacggatactcctaggacctctccaacacctgtgggataccttatatccctagtttatcctgcgcgccgccagccgtcgtcgatccgtggccatcatgtcgtctgacgccgccaattctgaggtcgtgtttttgccgtcgtgaggtttgtggacgtgatctgctgccatctgccctatcttgcttctcaaagtctcaaactcgtctcgttcttcttagatccatggccggcggcgatttctgtaattgtgtggccggactctctgactggtacttgtcccattctctgttcttgttagatcccatggcaacgagtgcatctactggtgctagcagcagcgaaggaagttttccagtcgccaataaccctgccatcgcaagacaagtctaggctattgttgcaaggttcctccagatgaggatgagaaaaaaccattgtggaggggtgaagttttgtcgagtggtgacagtacatgttcttgaacaattgaaagctgaagttgctgcagccagtgctgttgctgatagaaccatgcctagagatatcccacttccagttgagggcaatgagaagaggaagaggaggggtgtttcagcaattgaatctagcttcaatttggatgttcgaagacagcttgatgaactaatagctagaatgttttacactggtggtctgctttttaatcttgcacgtaacccatattttagaaaggctttcatgtttgctaccaataacccaattggaggttatgtccctccaagctacaagttgagaacaactcttcttgtgcaagagaggacacatgtggagagaatgctgcagcccgtgaaggaaacttggagctctaaaggtgtgagtattgtttcagatggatggtcagatgctcaaagacgcccactcttgaatttcttggctgttacagaagatggtccaatgtttcttagagagatcaacactgaaggaatatccaagaccgagtatattgcagagaagatgttacagtaattgatgaggttggggcacaaaatggtgtgcaagtgatcactgacaacgctgccaactgcagagctgctggcatcatagttgagcagaagcaccctcatattttttggaccccttgtgttgtgcatactttgaatcttgctttgaagaacatatgtgcttctagggaaattgaagatgtgtgttatactgaatccagtggattagcgaagtcattggagatgccagcatgattaaaaatttcatcatgaatcactccatgaggttgtctatgttcaatgagcaaagcaatctgaaattccttgccattgctgacacaagattgcctctgctattgtgatgttgaaaagatttattgctataaaagatgctctttcagtgatggtagtgagtgaaaagtggagtgtctatagggaagataatccacgtcaggctcaatttgtaaaggagaagattgtgaatgatctgtggtgggataaaatgtgggacacaatgatagagaaggtgaagagtgtaatctatcgtcatgaaatgaaagagacacatgaagaatctatcttttattcagttgtgcatgacatcttggtgagtcgatggacaaaaagcaacacgcccttgcactgcttggcacactcactaaatccaaagtattacactgatgcatggatcaatgaggtccccaaccgacaggctcctcataatgatgaggaaatttcagagatgagaaatacttgtttcaggagatatttttctggtgaagaattaaaaaagattaagttgcagtatgctaatttctctttgtttggacctggattcaattcatttgactcacttgaggatagaaggctaaatcctgggcgtgctgaggatttagttttcacacaccaaaacttgtgtcttctttctagaaaatctgatgaataccactgtggtccatcagcaatgtgggatgttggagctgacactttcgaagctgattttgagggtggtgctgattttcttgagcaagctgatctatcactggatgagccagaacttgaagaaagattgtttgaagatcttgaggcattgggtttgaccgaagatgcagaatgaaatctagttgttgtctcatgtctggtctgtggtctctggtctgttagaattagaacttgtgtggtgaactagtgattatttgccagtctgctggtgtagcgtatcgttacatatgtttttggcatgctagattcatttatttgagttcagataaattctggaagaggaagtagatgtttactttagtcaaagttgttgaacattaacttctaatgcccttaaattgaactgatctgctgtggtccatttcagcatttaattttatttataatatatattgtgtatcaccatatcagtattttttgagaaatggcgtatcggggtatcggcgtatccgtatccccgtatcagggcaacatagatcaaaaccgctagctaaaactgtccaagctgagggagttaaacaaccgattttaaagatgaggggtgaagtaatccaccatctaaaggtcaggggttatgtaaatttatttccttgtatatgatattggactattagtgaagcacacaaaatattaaaataaatgtactttctgcttaactctgctgcattacaacaaacttacaataccccaattatactaagtgctctagaatcaaaattccatctcaactttagaaacataagaaacaaacccagttacttgccagttttgaagaaaaaaattggaaatactgcagatagaggctagggttgcaagtacaggaaagagaacacattttgcaaattttctaacaaagtgatcactataaagcagagggattggaaataaataacagcattccatgatagcaaagttgggaacttagaatcctcctttcgttgattaattttttattcttttccgggttctctctcgcctgtccaggctgtgattgtgtttctttttttcttacatttctgtatctataatacaatacctcaaaataataacaaaaaacagcacaaaaaataaagtttatcaattttcaaacaaataattgtagaacagctggg

SEQ ID NO: 70379 - DNA, 3948 bp, Zea Mays
taaatttttattaattaagctgctactcctaaagttttagggaaattagggcagacataatgtataatcattgatttttacgtaaaatatataaatttcagatactattagatgacaggactgaaaaagacaaaaatgatgtcacttaaatcagtgtctcgtcatcaaaacctatgatgcgcggatacttctcaaaacacatgtaccggtgtcggatatcgtatcagatacagatactcctaggatacttccggatacgtatctggggcgtatcgggaatttctgtgaatttaaataaataaaaaatgacggatactcctaggacctctccaacacctgtgggataccttatatccctagtttatcctgcgcgccgccagccgtcgtcgatccgtggccatcatgtcgtctgacgccgccaattctgaggtcgtgtttttgccgtcgtgaggtttgtggacgtgatctgctgccatctgccctatcttgcttctcaaagtctcaaactcgtctcgttcttcttagatccatggccggcggcgatttctgtaattgtgtggccggactctctgactggtacttgtcccattctctgttcttgttagatcccatggcaacgagtgcatctactggtgctagcagcagcgaaggaagttttccagtcgccaataaccctgccatcgcaagacaagtctaggctattgttgcaaggttcctccagatgaggatgagaaaaaaccattgtggaggggtgaagttttgtcgagtggtgacagtacatgttcttgaacaattgaaagctgaagttgctgcagccagtgctgttgctgatagaaccatgcctagagatatcccacttccagttgagggcaatgagaagaggaagaggaggggtgtttcagcaattgaatctagcttcaatttggatgttcgaagacagcttgatgaactaatagctagaatgttttacactggtggtctgctttttaatcttgcacgtaacccatattttagaaaggctttcatgtttgctaccaataacccaattggaggttatgtccctccaagctacaagttgagaacaactcttcttgtgcaagagaggacacatgtggagagaatgctgcagcccgtgaaggaaacttggagctctaaaggtgtgagtattgtttcagatggatggtcagatgctcaaagacgcccactcttgaatttcttggctgttacagaagatggtccaatgtttcttagagagatcaacactgaaggaatatccaagaccgagtatattgcagagaagatgttacaatttattgctataaaagatgctctttcagtgatggtagtgagtgaaaagtggagtgtctatagggaagataatccacgtcaggctcaatttgtaaaggagaagattgtgaatgatctgtggtgggataaaatgtgggacacaatgatagagaaggtgaagagtgtaatctatcgtcatgaaatgaaagagacacatgaagaatctatcttttattcagttgtgcatgacatcttggtgagtcgatggacaaaaagcaacacgcccttgcactgcttggcacactcactaaatccaaagtattacactgatgcatggatcaatgaggtccccaaccgacaggctcctcataatgatgaggaaatttcagagatgagaaatacttgtttcaggagatatttttctggtgaagaattaaaaaagattaagttgcagtatgctaatttctctttgtttggacctggattcaattcatttgactcacttgaggatagaaggtatatggaaccaaaaatgtggtggagatttcatggccattctgctccagaattaaagaagttggcacttaaaattacttggacagccagcatcatcttcctgtgctgaaagaaattggagtcaatgattcaagtcgtccgactaatcgcgattagtcgggctggtcggcaattaggacacgatttgctggacgactcgactagaagacctagtcgtcctggtcgtcggactaatcgtcgactagggcgactagtcgtccgagttgtgtgtcctggtcgtcccgactagggtttagttattgggccttttttagcccatctacagtctaatttagagtaccctctcctctcctgttctaacctagccgccaacagtctccacaacctacacgtctcctctcctctcctcccttggcaccgcccctgcagtcctgaactcctgattgcaggcggctacaccggtggctacagcaccctgtgtcccctgccccttctcctgcagtcctgctcgcctgctgcactctccaaccgacggtggctgcgaaccagtgacgagatgagcacgtcgtctgaaagtccctcctgctctccacttctccccctaaaccctaaataaccctaaaccctaaacaatgaagcaatatgttagtttatttatcctagttgtttgtgctaatttatataatgtatacatgtatatttatatatatacctatataagtataactactagtctaggacgaccagggaccgactaggggtacatatgggctgatccatagttcattgagaaacaggttcaattctatttcattttatttgtcatattcattatgatcagttggtcacacatgtatgaatttggattcctaatacaaatctgcaatttaaattgtaggctaaatcctgggcgtgctgaggatttagttttcacacaccaaaacttgtgtcttctttctagaaaatctgatgaataccactgtggtccatcagcaatgtgggatgttggagctgacactttcgaagctgattttgagggtggtgctgattttcttgagcaagctgatctatcactggatgagccagaacttgaagaaagattgtttgaagatcttgaggcattgggtttgaccgaagatgcagaatgaaatctagttgttgtctcatgtctggtctgtggtctctggtctgttagaattagaacttgtgtggtgaactagtgattatttgccagtctgctggtgtagcgtatcgttacatatgtttttggcatgctagattcatttatttgagttcagataaattctggaagaggaagtagatgtttactttagtcaaagttgttgaacattaacttctaatgcccttaaattgaactgatctgctgtggtccatttcagcatttaattttatttataatatatattgtgtatcaccatatcagtattttttgagaaatggcgtatcggggtatcggcgtatccgtatccccgtatcagggcaacatagatcaaaaccgctagctaaaactgtccaagctgagggagttaaacaaccgattttaaagatgaggggtgaagtaatccaccatctaaaggtcaggggttatgtaaatttatttccttgtatatgatattggactattagtgaagcacacaaaatattaaaataaatgtactttctgcttaactctgctgcattacaacaaacttacaataccccaattatactaagtgctctagaatcaaaattccatctcaactttagaaacataagaaacaaacccagttacttgccagttttgaagaaaaaaattggaaatactgcagatagaggctagggttgcaagtacaggaaagagaacacattttgcaaattttctaacaaagtgatcactataaagcagagggattggaaataaataacagcattccatgatagcaaagttgggaacttagaatcctcctttcgttgattaattttttattcttttccgggttctctctcgcctgtccaggctgtgattgtgtttctttttttcttacatttctgtatctataatacaatacctcaaaataataacaaaaaacagcacaaaaaataaagtttatcaattttcaaacaaataattgtagaacagctggg

SEQ ID NO: 70380 - DNA, 1920 bp, Zea Mays
ttgtatgttgttttggtctacggaatatgtagttgttggcactattgtgcatgtaggagtagctattttggggtacaccatgcacaaaataatgttcaaagtttattatagggccggaagtgtatccatatatgagttacacacttaactgcagcagctctgcttggttctttagcatatacggaactctgtcattgtatgaatgcaaatattttttagtgggggacgaggggattgtttaggtgccacagtctccatcagcaatacctgaaccatcttattcactaaaacacactacccgtcattggcatttggttgcacaaattcatttaggaattgggttactggtgaacattttaggacccattccattacaaaaatatatcatccatacattttcattatctaaatgatgcatttggtatgacaaattcagtatgttgttattttaattgagatactctttggtacatgtggcaattccatctctcgcacagttgtatgaggaagcaaattgatggtgctgaactagatgagctgatatgcaagacaagaaaactaccccacacagcccttcatatgtggacattcagcaggactaacagaaagggcagcttcttgcttgaacctctgcagcatgggatgtgcaataatcttcaagaaacatatgagagaaacttcccctatgtcaaatttgcacaggaataatggacaagtcaacttaaccgctgcaaacaaacttttcatggcccatgcagctgattaatgatgaggccaatgaaaatcagctctggataggttccaaggacgattggtagtggtccttatagcgagttgctggaaatgctcaaagatgtcggccttaaaaattgggttgtctcatttggccaacttcctgttgatctgtttgagctcagatcaaccatctggagataatttccctacgttcgggcaactgataagctcccatacagcatgtttctactcagatcaactactgaacagctcccaaatgtgatcggtaaagttcctgaaggtcctctttttgtctcaccttagctcaataaaagttaaaataaaaacagcataagggtttgctttgttttatcatggttcatggtaaatttgtgccatttctgaacttcttttagtttgatgacatgttgtccaaacacttttgaagatgtgttgcacactggtacttgccacaagctcacaatttcttatcttattttgatttttttcatacaattttttcagatcaagaactgaggtggttatcatttttcataggggtgtccctttcttttcttaagaataactagattctaatccaatatctttagctgcaaaaccatccttttcctttgatgttatcgcttatattatgatttttttcctacgcgcgttgggcgcgcgccagttactagtatatactaagatgcttcatccacgcaaggagaaagtatacaacgattgaagaatgttccactcaatatatactgagatgcttcatccacacaaggagaaagtaaataagtccactgcctcctgcagctcagtgatggggtagggtgtcccaagtcccaacagttagatagatagctgtaggcagtaggatggtgtaccaatgattaagaaaattatgaccatagtttagactgccaagagtaaactgcaagaaggtgctaatcgccgctaaacaagtaaacaaccattcaacattcacatagctgtgggttctgataattcaggggtgcatgtgcatcatccaggaattaaatttcaaagagaagcaacagtgacagaacttcagaggttgttgccatgtcctttggacaggatagcatgcccaaaagaatgagcatatcatgctcatgacatgcaaaactacagcaagagctagaggtcatcagccac

SEQ ID NO: 70381 - DNA, 5007 bp, Zea Mays
atgctccgatctcaggaccgccgacccttccgcccgccggatcgggctccacggcctccccacccccaccgcgaccagcacaaccacaacgaacaccggtaccagcctctctcccacccccacatcgaccgacgctacagcaatgaacaccggtatcagccccgcggccagcatcagcgcggttgccacgtgcagccgccccttcgcccgtcgcagttcgagctagacctcgagaagaagacactggagtctgagaaggaatttgtcgactccaaaattgcggagtacaaggaggcgatgtggtcgatacagcgggcaatgttgcgtggatcgggggacaaggaggagggtgtcgacttgtttgcggctgtagatgatggggaggtggactttgttaaggtgcatatgatgctgctgcgtgagtgccggaggcttaaggagggcctgccaatctatgcataccgcaggaggattcttaaccatattttcgccaaccaggctgaacttatggaaaaaggtcatgatttaataggagaaacaggttctgggaagagcacacaattggttcagtttcttgctgactcaggtgttgctggtggtggttccatcatatgtactcaacctcgaaagcttgctgctatatctttagcacatagagtagatgaagaaagtaagggttgctatggggacagttctgtgttgtcatattcaaccttactaagttctcaaggttttggcactaagattatattcaccacggacagttgtcttttgcactactgcatgagtgatgtgaatctggatggcatttcgtatattattatcgatgaagctcacgaaagaagcttgaatactgatcttctgttagctatgatcaagaagaagctgcttgataggctggatttgcggctcattataatgtctgctactgctgatgctgacagacttgctgaatacttttatggctgtcaaatatttcatgttagaggacggacttttcctgttgaaattaaatatgtcccagatgtatcagctgaggcttccttgaatagtgtaccaagtatttcttctgttgcttcctctactgcttcctatgttactgatgttgtacaaatggtaaacatcatccacaagaatgaagaagagggtgctatacttgcttttttgacatctcaactggaagtagaatgggcctgtgaaacattcagtgatccaaatgctgtggtacttccgatgcatggcaagctttcttctttagaacagaatcttgtcttcaaaagctaccctggaaagagaaagattatcttctgcacaaatatagctgaaacatcattgaccataaaagatgtgaagtatgttgttgattgtggcttggccaaagaatacagatttgttcccactagtggtctcaatgtactgaaagtcaactggatttcccaaagctctgctaatcaacgtgctggccgtgctggtcgaactggagcagggaagtgttacaggctctaccctgaatctgattttggtatgatggaagtgcatcaagaacctgaaattcgtaaagttcatcttggcaccgctgttcttagaatacttgctttgggtgttacggatgtaaagtgttttgagtttattgatgccccagatcctgaggctatcgctatggctgtgaataatcttgaacaacttggtgctatagaatgtttagtcctagcctctgttatggcaaatgctagtagcatattttgtagagtgggtactaatgaggagaaatataaagctgaccgcctgaaagtccctttctgtcaccctgatggagaccttttcacctcacttgctgtttataagaagtgggagactgggtatggtaacaaaaatacatggtgctggcagaatagtatcaatgccaagaccctgaggaggtgccaggaaactatatctgaacttgaaaaatgtctaaagcatgagctaaacattatcgttccaagttactggagttggaaccctgagaagcctactatgcatgatacatcgctaaagaagattattctatcatctcttagaggtaatcttgctatgttttctggacatgagaatcttgggtataaggttatttcagcaggtcagcgtgtgcaacttcacccttcgtgctcattgttcatttatggcagcaaacctgaatgggtggtattttcagaaatcttgtcggccgtgaatcaatatttggtatgtgtaactgctgttggtcttaacgaagtgcttacagttcaccccatgtcttttattaagcaactggaggagagtaaattgcagaggaaagtgattactgggataggaaataaatcgctgagaagattttgtggtaaatctggccaaaatctgcagaatattatctcacttctgagaaaagattgcagagatgatcacataatggttgatttagacttcagtagcagtgaagttttattatttgctaaagaacatgacatggaaaaggtcttttgcaaggtcaattatgctttggaacttgaagctaaattgctgagagacgaatgtgacgagagaagacctggtagctctactattgcactatttggctctggtgctgaaatcaagcatttggaacttgggaagagatatctaacagtggaaattctgcatcaaaatgctcgtgttatagatgaaaaggaacttgtttgtttggtagattctcttgttcctggtatagcaaattttcataaaaccgggaattttcagacaaacttagatgaaacaaagtgggggaggtttacgttcctcaaaccggattatgctgaagatgctatttcaaaattgaacgggattgagtttcatggttccttactgaaggttagtcctgtaagcatttacagccactcagggctaccatttcctgcagtaagagctaaagtttcttggccacgtaaggcaagcaggggagttgcacttgtaacatgtgctagtggtgaagctgaatttattgtaaaggactgctttgcccttggagttggtggaaggtatgtcaactgtgaggttagtaataggtacgcaaactgtgtctttgtcacagggattccattgcatgtaacagagccagaattgtatgatgcttttcatagtacaacaactaggagaatccttgacatccgcttgcttagaggacagcccacagctagctcgtccgtttctgaatgtacagaagcactgatgagagcgatatcactattcatgccaaataggaactttccttgccaaaaattccgtgttcaagtgttccctccagaagagaaagacttaatgatgaaagctaccataacctttgatggaagttttcacagagaggctgcaagagcactggaccatcttcaaggaagtgttcttccttgttgtctaccttggcagataatccagtgcgagcatgtatttcatagtactgtctcctgtccgatgcgcatttacaatgttatcagccaagatgttggtgctctacttgagagcttccgtagccaaaaaggcgtggcatacaatttggagaagaatgagaatggaaatttccgtgttaagcttactgcaaatgccacaaaaacaatagcagatttgagaaggcctcttgagcttctgatgaagggaaaaataataaaccatcctgatctgatgttaagcacagttcaattgctatggtcccgtgatggtatggaacaattgagatcagttgaacgggagaccggcacttatattctgtatgacaggcaaagtctgaatattaaaatttttgggagcactgataatgtggctgcagcggaggaaaaattggttcacgcacttgtacagctccatgagaagaagcctcttgaggtttgtcttcgtggccggaacctcccaccaaacttgatgaaggaagtgattgtaaagtttggggctgatttagaaggactgaagaacgaggtccctgcagtagatcttcagttaaatacacgaaggcagacactttatgttcgaggcagcaaggaggataagcaaagggtggaagggatgatctctgaactgataacctctagtgaccataatgctcaactgtcgtcagagaatgcatgtcctatttgcctgtgcgagctagaagatccctttaagcttgaatcatgtggccatatgttctgtttagcttgcttggtggatcagtgtgaatctgccatgaaatcacaggatggcttccctcttcgttgcctcgaaagtgggtgcaataagctgttcctcctagctgatctgaggtctctgctgcctgacaagctggacgagctgttcagggcttccttgaatgcatttgttgcatctagcgcagggttataccgtttctgccccacaccggactgcacatcgatttaccaagtagctgctgcaggcgcacaaggcgacagaccctttgtctgtggggcttgctctgtggagacctgcaccaagtgccatctcgagtaccatcctttcatctcctgtgaggcatacaaagagtacaaggcagacccggatgcaactatgcttgaatggcgcaaagggaaggagaacgtgaagaactgcccttcatgtggatttacaattgagaagagtgaaggctgcaaccatgttgagtgcaggtgtggcagccacatttgttggaattgcctggagaacttcaagagcagtgaggagtgctatggccatctcagatccgtgcacttatcctatgcagatctgatgtaaatctgtacagattgtaatgaatcacgtggtctataatctggcaagctgaatttgccttccaacagtgattgtctgatcctaaccggttcccatctctacctgtgctgagaatattgtaggcgctttatcatttgttactacagcggggaatgctctagtgtgcatcggggacggctaacccattttaacactgcccttgctcccatcccttgctagttaattgttattagagcatctccaacaagagcactaaatgag

SEQ ID NO: 70382 - DNA, 5524 bp, Zea Mays
ctcgtgtgttcccggcggcctttcccctttcccctcccaaaaacctctcccaaacccttggaacctacgccgccgacgccgccctcgcagccaccaccgccgccctcgcagccaccgccgcagcaatgctccgatctcaggaccgccgacccttccgcccgccggatcgggctccacggcctccccacccccaccgcgaccagcacaaccacaacgaacaccggtaccagcctctctcccacccccacatcgaccgacgctacagcaatgaacaccggtatcagccccgcggccagcatcagcgcggttgccacgtgcagccgccccttcgcccgtcgcagttcgaggtattcctcgtccgcccgggccccgatttatccgcgccgaccgccattgaggtggaggccctcctcgcgggcctcccgtcgccggccccggccagcatatccgtccaatcctccggccgccatgccgcgcgcctcgtcttcacctccatcccggccgccgcggccgccgcgcgcgagctctgggcgctccgcctcgaggggctccacctcctcaccctggacctcccgcaccccgccctcgccgcccacgcctcgccgctcatcgcctcgctcttcgcctcccacgcctcccgccttcttgactctgacatcatggtcctctcggccgcccgctctgccgagcttgaggcgtccgtacgggatgtaaaacaacgtctgggctcgcctaatcgattccgcgacttccatcagctagacctcgagaagaagacactggagtctgagaaggaatttgtcgactccaaaattgcggagtacaaggaggcgatgtggtcgatacagcgggcaatgttgcgtggatcgggggacaaggaggagggtgtcgacttgtttgcggctgtagatgatggggaggtggactttgttaaggtgcatatgatgctgctgcgtgagtgccggaggcttaaggagggcctgccaatctatgcataccgcaggaggattcttaaccatattttcgccaaccaggtcatgatttaataggagaaacaggttctgggaagagcacacaattggttcagtttcttgctgactcaggtgttgctggtggtggttccatcatatgtactcaacctcgaaagcttgctgctatatctttagcacatagagtagatgaagaaagtaagggttgctatggggacagttctgtgttgtcatattcaaccttactaagttctcaaggttttggcactaagattatattcaccacggacagttgtcttttgcactactgcatgagtgatgtgaatctggatggcatttcgtatattattatcgatgaagctcacgaaagaagcttgaatactgatcttctgttagctatgatcaagaagaagctgcttgataggctggatttgcggctcattataatgtctgctactgctgatgctgacagacttgctgaatacttttatggctgtcaaatatttcatgttagaggacggacttttcctgttgaaattaaatatgtcccagatgtatcagctgaggcttccttgaatagtgtaccaagtatttcttctgttgcttcctctactgcttcctatgttactgatgttgtacaaatggtaaacatcatccacaagaatgaagaagagggtgctatacttgcttttttgacatctcaactggaagtagaatgggcctgtgaaacattcagtgatccaaatgctgtggtacttccgatgcatggcaagctttcttctttagaacagaatcttgtcttcaaaagctaccctggaaagagaaagattatcttctgcacaaatatagctgaaacatcattgaccataaaagatgtgaagtatgttgttgattgtggcttggccaaagaatacagatttgttcccactagtggtctcaatgtactgaaagtcaactggatttcccaaagctctgctaatcaacgtgctggccgtgctggtcgaactggagcagggaagtgttacaggctctaccctgaatctgattttggtatgatggaagtgcatcaagaacctgaaattcgtaaagttcatcttggcaccgctgttcttagaatacttgctttgggtgttacggatgtaaagtgttttgagtttattgatgccccagatcctgaggctatcgctatggctgtgaataatcttgaacaacttggtgctatagaatgtttagtcctagcctctgttatggcaaatgctagtagcatattttgtagagtgggtactaatgaggagaaatataaagctgaccgcctgaaagtccctttctgtcaccctgatggagaccttttcacctcacttgctgtttataagaagtgggagactgggtatggtaacaaaaatacatggtgctggcagaatagtatcaatgccaagaccctgaggaggtgccaggaaactatatctgaacttgaaaaatgtctaaagcatgagctaaacattatcgttccaagttactggagttggaaccctgagaagcctactatgcatgatacatcgctaaagaagattattctatcatctcttagaggtaatcttgctatgttttctggacatgagaatcttgggtataaggttatttcagcaggtcagcgtgtgcaacttcacccttcgtgctcattgttcatttatggcagcaaacctgaatgggtggtattttcagaaatcttgtcggccgtgaatcaatatttggtatgtgtaactgctgttggtcttaacgaagtgcttacagttcaccccatgtcttttattaagcaactggaggagagtaaattgcagaggaaagtgattactgggataggaaataaatcgctgagaagattttgtggtaaatctggccaaaatctgcagaatattatctcacttctgagaaaagattgcagagatgatcacataatggttgatttagacttcagtagcagtgaagttttattatttgctaaagaacatgacatggaaaaggtcttttgcaaggtcaattatgctttggaacttgaagctaaattgctgagagacgaatgtgacgagagaagacctggtagctctactattgcactatttggctctggtgctgaaatcaagcatttggaacttgggaagagatatctaacagtggaaattctgcatcaaaatgctcgtgttatagatgaaaaggaacttgtttgtttggtagattctcttgttcctggtatagcaaattttcataaaaccgggaattttcagacaaacttagatgaaacaaagtgggggaggtttacgttcctcaaaccggattatgctgaagatgctatttcaaaattgaacgggattgagtttcatggttccttactgaaggttagtcctgtaagcatttacagccactcagggctaccatttcctgcagtaagagctaaagtttcttggccacgtaaggcaagcaggggagttgcacttgtaacatgtgctagtggtgaagctgaatttattgtaaaggactgctttgcccttggagttggtggaaggtatgtcaactgtgaggttagtaataggtacgcaaactgtgtctttgtcacagggattccattgcatgtaacagagccagaattgtatgatgcttttcatagtacaacaactaggagaatccttgacatccgcttgcttagaggacagcccacagctagctcgtccgtttctgaatgtacagaagcactgatgagagcgatatcactattcatgccaaataggaactttccttgccaaaaattccgtgttcaagtgttccctccagaagagaaagacttaatgatgaaagctaccataacctttgatggaagttttcacagagaggctgcaagagcactggaccatcttcaaggaagtgttcttccttgttgtctaccttggcagataatccagtgcgagcatgtatttcatagtactgtctcctgtccgatgcgcatttacaatgttatcagccaagatgttggtgctctacttgagagcttccgtagccaaaaaggcgtggcatacaatttggagaagaatgagaatggaaatttccgtgttaagcttactgcaaatgccacaaaaacaatagcagatttgagaaggcctcttgagcttctgatgaagggaaaaataataaaccatcctgatctgatgttaagcacagttcaattgctatggtcccgtgatggtatggaacaattgagatcagttgaacgggagaccggcacttatattctgtatgacaggcaaagtctgaatattaaaatttttgggagcactgataatgtggctgcagcggaggaaaaattggttcacgcacttgtacagctccatgagaagaagcctcttgaggtttgtcttcgtggccggaacctcccaccaaacttgatgaaggaagtgattgtaaagtttggggctgatttagaaggactgaagaacgaggtccctgcagtagatcttcagttaaatacacgaaggcagacactttatgttcgaggcagcaaggaggataagcaaagggtggaagggatgatctctgaactgataacctctagtgaccataatgctcaactgtcgtcagagaatgcatgtcctatttgcctgtgcgagctagaagatccctttaagcttgaatcatgtggccatatgttctgtttagcttgcttggtggatcagtgtgaatctgccatgaaatcacaggatggcttccctcttcgttgcctcgaaagtgggtgcaataagctgttcctcctagctgatctgaggtctctgctgcctgacaagctggacgagctgttcagggcttccttgaatgcatttgttgcatctagcgcagggttataccgtttctgccccacaccggactgcacatcgatttaccaagtagctgctgcaggcgcacaaggcgacagaccctttgtctgtggggcttgctctgtggagacctgcaccaagtgccatctcgagtaccatcctttcatctcctgtgaggcatacaaagagtacaaggcagacccggatgcaactatgcttgaatggcgcaaagggaaggagaacgtgaagaactgcccttcatgtggatttacaattgagaagagtgaaggctgcaaccatgttgagtgcaggtgtggcagccacatttgttggaattgcctggagaacttcaagagcagtgaggagtgctatggccatctcagatccgtgcacttatcctatgcagatctgatgtaaatctgtacagattgtaatgaatcacgtggtctataatctggcaagctgaatttgccttccaacagtgattgtctgatcctaaccggttcccatctctacctgtgctgagaatattgtaggcgctttatcatttgttactacagcggggaatgctctagtgtgcatcggggacggctaacccattttaacactgcccttgctcccatcccttgctagttaattgttattagagcatctccaacaagagcactaaatgag

SEQ ID NO: 70383 - DNA, 701 bp, Zea Mays
ccaaaaaagagaaaaagaaaagcaccgaaaaactagcaaaccctacctcctctcctccccctcctcggcggcggaatgtccgaccgccgccgcgacaaggagaagccccgcgaccgcgacatcgaccgtcatcgcgaccgagaccgcgacatcgaccgtcatcgcgaccgagaccgcgaccgggaccgggacagggacagagatcgcgagcgagaccaccgccgcgagcgcgagcggaagcgctcccgctcccggtccccgtcggcggatcgggaccgctcccaccgccgccactctcattcgcaccgaggccgtccttccccctctcccgacgccggccgccacaagcgccgccgcgaggcgtcccctgcctccgcggaccatcaccataaggaggaaaagaaggctgccgactctcacgcgacacccggcggaggggacatcgcggccgcggccgctgcggtgggtgacggcgacgtgaatgcggaggaactggagatgatgaagatgatgggcattcccgtcggtttcgactccaccaaggggaagcacgtgcccgacgccgacgtcagcggggtgcgtgccgtcaccaagcgccagccgcgccagtacatgaaccgccgcggcggattcaaccgccctctgccgcctgagcgcaaccgctaaggatgggaaaaggcgtcttgcaacgttgatggaag

SEQ ID NO: 70384 - DNA, 1303 bp, Zea Mays
ccaaaaaagagaaaaagaaaagcaccgaaaaactagcaaaccctacctcctctcctccccctcctcggcggcggaatgtccgaccgccgccgcgacaaggagaagccccgcgaccgcgacatcgaccgtcatcgcgaccgagaccgcgacatcgaccgtcatcgcgaccgagaccgcgaccgggaccgggacagggacagagatcgcgagcgagaccaccgccgcgagcgcgagcggaagcgctcccgctcccggtccccgtcggcggatcgggaccgctcccaccgccgccactctcattcgcaccgaggccgtccttccccctctcccgacgccggccgccacaagcgccgccgcgaggcgtcccctgcctccgcggaccatcaccataaggaggaaaagaaggctgccgactctcacgcgacacccggcggaggggacatcgcggccgcggccgctgcggtgggtgacggcgacgtgaatgcggaggaactggagatgatgaagatgatgggcattcccgtcggtttcgactccaccaaggggaagcacgtgcccgacgccgacgtcagcggggtgcgtgccgtcaccaagcgccagccgcgccagtacatgaaccgccgcggcggattcaaccgccctctgccgcctgagcgcaaccgctaaggatgggaaaaggatcatgcgccaacacaaggatgtgctgatttctgggtagcagttactctgttactggacagtgtagtgagcatgaaaacagaatttggtggatcattttgaaactgtggctttacagctttaacatgatgtttctggctttctccgtgcaatttggtaatcaggcatgcaccacatggattcccaagtgaaactgcttttgcttttagttgtatgctttgcaatgaaattattggtaatggacatgagtgcaacatttgtgattataagtttcgaagatctcactgagtagcaggaccaaagagacctgttctttcaataatacgtagaataattctgtaataataatttaagtttaggctactgcattagatccagaaaccagtaccttgagtggtcgaccagtttatggtttgagggaattatagggcaatagtttgaggttgctagatcacttactagtttgctttatgctccagtggttgtttcatgtaagtttgttgtatgctgatgctgccatcctgacaatttaccttggctgctgtcgtgcgctgtttggacaagacaatgcaatatcagaactcgggtatgtgtttgatgttaaatgattaaggactgggttggc

SEQ ID NO: 70385 - DNA, 2245 bp, Zea Mays
atcgtctcgtctcctatcgccacccctccgtggctccgtcatcgcgcacggctaccaacccctcctccgcccgccaataagtaccgccccgctcgccacctccatctcagaggagagagtcgctcagcactgcacgactcctcccccatctaccactacctgtctacctacccagcccatcgatcacccctcgcaacgcaatggcgctggccaccaactccgccgctgccgcagcagctgccgtatccggcggcgcggcatcccagccgcaccgcgcggccacgttcctcccgctgaagaggcgcaccatctccgccatccacgccgccgacccgtctaagaacaacgggcccgccgtccccgcggccgccgccgctaagtcatctgcctctgcggtggccacgccggagaagaatccggcggcgccggtaaagtgggcggtcgacagctggaagtcgaagaaggcactgcagctcccagagtacccgaaccaggaggagctggacacggtgctcaagaccatcgagacgttcccgccggtggtgttcgccggagaggcgcgccaccttgaggagcgcatggccgaggccgccatgggccgcgccttcatcctccagggcggcgactgcgccgagagcttcaaggagttccacgccaacaacatccgtgacaccttccgtatcctgctccagatgggcgccgtgctcatgttcggtggtcaggtgccggtcgtcaaggtggggaggatggctggccagtttgccaagccaaggtccgaaccgttggaggagagggacggcgtcaagctgccaagctacaggggcgacaacgtcaacggcgacgacttcaccgagaagagccgcgtgccagacccgcagaggatgatccgcgcctactcgcagtcggtggcgacgctcaacctgctccgcgcgttggcgaccggagggtacgctgccatgcagcgcgtcacacagtggaacctcgatttcatggatcacagcgagcaaggtgataggtaccgtgaattggcccatagggtggatgaggctcttgggttcatgactgcagcagggcttacagttgaccacccgataatgacgactactgacttctggacctcgcacgagtgccttctcttaccctacgagcagtctcttacccgtaaagactccaccagtggccttttctacgattgttcggcccacatgttgtgggttggtgagcgcactcgtcaactcgatggagcgcatgttgaattccttcgtggtgttgccaatcctcttggcataaaggtgagcgacaaaatgaaccccagtgacttggtgaagctgattgagattctgaacccttcaaacaaacctggaaggatcaccataattacaaggatgggggcagagaacatgagagtgaagttgcctcatctcatccgtgctgttcgcaatgctggattaattgtcacatggattactgatcctatgcatggaaacaccatcaaggccccttgtggcctgaagactcgtccattcgactcaattctggctgaagtgcgcgcattcttcgacgtgcatgatcaagaaggaagtcacccaggaggcatccaccttgaaatgactgggcagaacgtgaccgagtgcattggtggatcacggactgtgaccttcgatgacctgagcgaccgctaccacacccactgtgacccaaggctgaacgcctcccagtccctggagctcgccttcatcattgcagagaggctcaggaagaggaggatgcggtcggggctcaacaacagcctgcctctgccaccactggctttctaagtagccgaagctgaacagagaaggataatctattacaggaaacttcgtcttcaagatacaagctcttctcctttatgacgaaggcatacaagataaagacagatcaaagaggataaaagtaaacgctgaagctatcaccagatagacagcttcggctcgcaatgaagatgatgaataatgatgatgatcgaaagaggaaaagactatttagtccttaataaattgtattacgatcatgtgtaaatgttgagagcataaatgtacttttgtccgggctgcgtcccgtgcctataaatagatgaacaataacactgtactgttcacgctgaattgtattcactttctcgcatccacacatttgagcaagccgaatgtattaatgtaatattaacattattgatattcatttatgttctatggaattgaag

SEQ ID NO: 70386 - DNA, 2643 bp, Zea Mays
aactacccttccccctccgttccacttccaccatctcctatcgtctcgtctcctatcgccacccctccgtggctccgtcatcgcgcacggctaccaacccctcctccgcccgccaataagtaccgccccgctcgccacctccatctcagaggagagagtcgctcagcactgcacgactcctcccccatctaccactacctgtctacctacccagcccatcgatcacccctcgcaacgcaatggcgctggccaccaactccgccgctgccgcagcagctgccgtatccggcggcgcggcatcccagccgcaccgcgcggccacgttcctcccgctgaagaggcgcaccatctccgccatccacgccgccgacccgtctaagaacaacgggcccgccgtccccgcggccgccgccgctaagtcatctgcctctgcggtggccacgccggagaagaatccggcggcgccggtaaagtgggcggtcgacagctggaagtcgaagaaggcactgcagctcccagagtacccgaaccaggaggagctggacacggtgctcaagaccatcgagacgttcccgccggtggtgttcgccggagaggcgcgccaccttgaggagcgcatggccgaggccgccatgggccgcgccttcatcctccagggcggcgactgcgccgagagcttcaaggagttccacgccaacaacatccgtgacaccttccgtatcctgctccagatgggcgccgtgctcatgttcggtggtcaggtgccggtcgtcaaggtggggaggatggctggccagtttgccaagccaaggtccgaaccgttggaggagagggacggcgtcaagctgccaagctacaggggcgacaacgtcaacggcgacgacttcaccgagaagagccgcgtgccagacccgcagaggatgatccgcgcctactcgcagtcggtggcgacgctcaacctgctccgcgcgttggcgaccggagggtacgctgccatgcagcgcgtcacacagtggaacctcgatttcatggatcacagcgagcaaggtgataggtaccgtgaattggcccatagggtggatgaggctcttgggttcatgactgcagcagggcttacagttgaccacccgataatgacgactactgacttctggacctcgcacgagtgccttctcttaccctacgagcagtctcttacccgtaaagactccaccagtggccttttctacgattgttcggcccacatgttgtgggttggtgagcgcactcgtcaactcgatggagcgcatgttgaattccttcgtggtgttgccaatcctcttggcataaaggtgagcgacaaaatgaaccccagtgacttggtgaagctgattgagattctgaacccttcaaacaaacctggaaggatcaccataattacaaggatgggggcagagaacatgagagtgaagttgcctcatctcatccgtgctgttcgcaatgctggattaattgtcacatggattactgatcctatgcatggaaacaccatcaaggccccttgtggcctgaagactcgtccattcgactcaattctggctgaagtgcgcgcattcttcgacgtgcatgatcaagaaggaagtcacccaggaggcatccaccttgaaatgactgggcagaacgtgaccgagtgcattggtggatcacggactgtgaccttcgatgacctgagcgaccgctaccacacccactgtgacccaaggctgaacgcctcccagtccctggagctcgccttcatcattgcagagaggctcaggaagaggaggatgcggtcggggctcaacaacagcctgcctctgccaccactggctttctaagtagccgaagctgaacagagaaggtagagggatagttgcggcgactcgaaagattacgcctgtttatttgttgatgcttggtgtggaggcctggtgggtgctcttggcacaagttacatgctggggagctataggagggtacctgttgcgttgtggaagacagtagctagtattatgtgttgtaattgtatgccttcgtttcatgttctgggtgcgtgacttgtcgactttgctgcttctggggttctgaccttggtaaggagagaataaagagataatatgagtgcgagatgcttgctgaactggtgctcagtaaattgatcccttgattgaatggttctgttctgttatcttttgccgcacttctccgaaaaagtttcaggataatctattacaggaaacttcgtcttcaagatacaagctcttctcctttatgacgaaggcatacaagataaagacagatcaaagaggataaaagtaaacgctgaagctatcaccagatagacagcttcggctcgcaatgaagatgatgaataatgatgatgatcgaaagaggaaaagactatttagtccttaataaattgtattacgatcatgtgtaaatgttgagagcataaatgtacttttgtccgggctgcgtcccgtgcctataaatagatgaacaataacactgtactgttcacgctgaattgtattcactttctcgcatccacacatttgagcaagccgaatgtattaatgtaatattaacattattgatattcatttatgttctatggaattgaag

SEQ ID NO: 70387 - DNA, 1675 bp, Zea Mays
ctcggaccaagcagcggcagcaaagccacgacagcagtcgaagcgcgcggcgcgcctgcctagccatcccggccacccggggccagggcccagggggaggggaaaccgaggcaggcggcggccgcagcagcggcagcgcagggcgcacgcgcttctcgtttcgtgtccccacaccccagccgagggggagttggagggaagtaaccggaggcgcagcttcaaggaggaggctggcggccgagcgttcgtgcggcatggggagggacgagctgctgcggcggagcctcgtggcgctggcggcggccgtggcgctcacgggcttggccacggcgtcgctgcgcaaggcggcggccacatacgggttcggcatcctcgccatcgctggcgtgctgctcccggactgggagttcttcgaccgggactactcccagtggctcacccccatgcccgcctcccgacgcacggccgcggccgcggccgccgaccgggagcacgacgtctggaaattcaagccctatcctctcagggtggccatgctgacgaccatctacgggttcggtcttcacaagtggtggacgtacgtatctagctagcggagtgggtcttcacagcatgaccgacgaacccgaaggtgatgggctctgatcatatccaggagaaggctgagctgctatacgctttgattaacgggaggcaactctgtactcttccaaaattgacccagccgacgcttataatctggggagagcaagatcgggtgttcccaatggagctggctcacagattgaacgggcatctagaggggaattctcgattagttgtcataaaaaatgctgggcacgcggtcaatatcgagaagcccaaggaagtgtgccggagcatcattgagttcttcaaggagcctgtcgctggagctgcaaatgcggacgacaaggtgtagtagcttccaccaatggcggacgtggataggttttcgctgggcatcggcagacggcacacccgcttgtggaacgcaaacacaaggcagatacgtggcattgtacatctacatccctctgccattgttctgatgtacttaaagggtgtatgtagagtcattgcagtagcgattcataaagcatgtaacggggaacagagggaaaccatagtggctcaaatccgagtgaaaccactgtgttgttgccgttctcggatccctgcccgtatcgcatttctcctgccatgacgaccacatggcaaatcgcgggtgacatccggcactcatgcggcaagcaggcaacgtgtcgcagaaactatggagtgttggtgcatggaatggaagcatacgagtacgatttgatcggtccctgtctaaaatccagcatatgatcccagcgactacaacgcgaccctcgcgtagtcgcgtgtaagagcagtcttttattcatgggccgccgcagtccattgttcgttgaacacacccgaccccacggcccgtcagcccaacaaagttaagctggaggacaaaaaaattatggggtgagagaggctcgaactctcgacctcaggataaactcaacttagctatgagacctacgcgctagccaactgcgccaccacccctttgtgataaagtgtactataaatttaatgtaactatataacaggccggagacattatgcttcagttaactcc

SEQ ID NO: 70388 - DNA, 3942 bp, Zea Mays
atggcgcgaagcaacagctggtacgttctgcacttctgctccacctccctaaaatcttggccgagctccgccactgaccatccccacttgtttccccagatacgctgccgcctcctatcgctccccttcctccgccgcggcatccactcctccgtgccaacttcggtcggcgccgctacagatgctacactcctgggtcgcctcacccgcctcctcctcctccaccgtttctctgccgtcgctcgcctcctctcctcctcggcccccctcacccctgcactcctccacgcggcgctgcgccgggtccgcctcgacgccgacgccgcggtgcacctcttccgcctcgcccctttccccccttccctcctcgcgcacgcccagctgctccacatcctcgtccgcgcccggcgctccgccgacgcccgcgcgatcctggcatccctcctctccgcacggcccccggctccgcctctctttccgcacctcgtcgaggtatataaggagttctccttctccgcagcctcattcgacctgctcctccgtgcacttgccaacgccggccaactcgacggcgccctccaggtgttcgacgaaatgcgaacgctcgggtgccgccttagcatgcggtcctgcaacagtatactcaacaggttagcacagactggggacctgggcgccacagtggcagtgtttgagcagatgcagcgtgcaggggctctgccagacaagttcacggtggcgattatggcaaaggcttactgcaaggttaagggggtggtgcatgcattggagttcgtggaggagatgacaaagatgggtgtggaggtgaacctagtggcgtaccatgcggtgatgaatggctattgtgaggtggggcagaccaacgatgcaagaaggatgttggactcgctgcctgggagaggtttttcaccgaatatagttacatatacattgcttgtgaagggatattgtaatgagaagaacatggaggaggctgagggggttgttcaggagattaggaagaataagcagcttgtggttgatgaggctgtttttggtgcagtgatcaatggctattgccaaatgggaagaatggaggatgcagctcgattattgaatgagatggtggattctaggctccaggttaatttgtttgtgtataacataatgattaatggatattgcaagttggggagaatggtggaagcacataacattttgcatgaaatgacaggtgttggtgtgaggcctgacacatacagttacaatagcctagttgatgggtattgcaaaaagggtttgatgaacaaggctttcgaaacatataatacaatgttaaggaatggattcgcggcgacgacattaacatataatgccctcctaaaaggtttttgctcgcttggctcaatcgatgatgcgctcagactttggttcctgatgttgaagaaaggtattgcacctaatgaaatcagttgtagcaccttgcttgatggtttcttcaagtcaggtaaaactgagaaggccttaaatctttggaaagaaaccttagcaaggggtttagcaaaaaatacaaccacatttaacacagttatcaatgggttgtgtaagattgagaggatgcctgaagcagaagagcttgttgacaaaatgaagcaatggagatgtcctcctgatattataacttacagaacattatttagtggttattgtaagataggtgacatggatagagctagccgcattctgaatgaactggaaaatttaggttttgctcctacaattgaatttttcaattctttgataactggacacttcatagctaagcaacatggaaaggtgaatgatatactctttgaaatgagtaataggggactttctcctaacacggtcgcatatggagctctgattgctggatggtgtaaagagggagatttgcatacagcctataacttatatcttgaaatgattgagaaaggtctggtaccaaatctttttatttgcagttctttagtgagttgtttctacaggaagggaaagtttgatgaggcaaatttagtgttgcaaaatcttgtgggtactgacatgattccagatatcagtgcgcccagacttgagatagggaaagtagcaaatttcattgataccgttgctggtggaaatcatcattctgcaaaaatcatgtggaacattgttatttttggtctatgcaaattgggaaggattgaagatgctaaaaacttgttggcagatctaaaagacaaggggtttgttgctgataatttcacttattctagcctcatccatggttgttctgcttcaggatttgttgatgtagcttttgatttgagggatacaatgttgagtgttggtctcactccaaatatagtaacctacaattctcttatatatggtctctgcaagtctggggagttatccagggctgtcagtctttttaagaagttgtggacaaagggtatatcccctaatgctatcacatataatacattaattgataagcattgcaaggatggttacataaccgaggcctttaaactaaagcaaaggatgatagaggaaggtattcatcctactgtgttcacctattctatactgattaatggtctctgtactcaaggctatatggaagaagcaatcaagcttcttgatcaaatgattgagaataatgtggatccaaattatgtcacatattggacactgattcaaggttatgttagatgtgaaagtgttgatgttccaataatgccactagatcaatcaaccatagttgttaaggcgtcgcctaggcgggcggtaaggcgccccggcagcgtaagtcgtcctgctcgccttactccagcacctaaggcgagtgggagagactatgtgctcaacatgcaagtctcaatcactttccagcaatataattgtctaattgtcttctgcgaaggggcctggtcatatcatgagaaatgtttccaacctccctcacatgtcagccaagtggtatcttctaactacaggctggattggctttctaagtgcagagacttgttgctggtgactttgccccttttatctggtacacgctacattccatcaatattgcagtccgtatcctatccacgattgttcttcatggatcaggctttaaggtggtgaagaaaccccattgacagaaagtggttcgagttactttggagctgactctggattctgtcaagaaacagtcttttggttccaagagaagcaatagttttagtttctctggtgcatcttctcactccatggagaggcatcgatatttgcagagaggaatgttgtcgtcatcaaaggcccttcgaactgcttttgaatcgaacattgcttcaaggtcagaaaagcaagcgcagccgctaaacagattgatttgaagtgaagttcagccgtatcatcagacatcatgcacacaaccatcatggtaaattcctgttcagcacgcacagtaggtctccgtgtgctctgtacggcctagtgctgctgcgctagctggttgggtgcgtccgtgcgtggacgcgctgtagcaaccagggcacccctgtccatggtcgcgatcgcggcctccgctggcctggcccttggcgtgtgcggggcgtagagacggaggagaatgttgtactatgtgcgggcgcggcgagcgaagccggctggaccagaccagaccacaccagggccagagccagggccacgtggcattggctcggcgtagagaacgtcctcccaatatctatgaatttactacaatatacgtctcattatttttagattcatatatgtatccatcacgggggcctccggcctcgttatagcaagtatgggctgactgtaatataatatccaactccgattcaaaactgtaatgtttattacaaaatttgacttagaagtagtgtctaaaaagtggca

SEQ ID NO: 70389 - DNA, 4123 bp, Zea Mays
aggacgcaaggcactagcgggctcctccctcccgcgcgggcaccaacggcgagcggaggactggcgctggcaatggctaatggcgcgaagcaacagctggtacgttctgcacttctgctccacctccctaaaatcttggccgagctccgccactgaccatccccacttgtttccccagatacgctgccgcctcctatcgctccccttcctccgccgcggcatccactcctccgtgccaacttcggtcggcgccgctacagatgctacactcctgggtcgcctcacccgcctcctcctcctccaccgtttctctgccgtcgctcgcctcctctcctcctcggcccccctcacccctgcactcctccacgcggcgctgcgccgggtccgcctcgacgccgacgccgcggtgcacctcttccgcctcgcccctttccccccttccctcctcgcgcacgcccagctgctccacatcctcgtccgcgcccggcgctccgccgacgcccgcgcgatcctggcatccctcctctccgcacggcccccggctccgcctctctttccgcacctcgtcgaggtatataaggagttctccttctccgcagcctcattcgacctgctcctccgtgcacttgccaacgccggccaactcgacggcgccctccaggtgttcgacgaaatgcgaacgctcgggtgccgccttagcatgcggtcctgcaacagtatactcaacaggttagcacagactggggacctgggcgccacagtggcagtgtttgagcagatgcagcgtgcaggggctctgccagacaagttcacggtggcgattatggcaaaggcttactgcaaggttaagggggtggtgcatgcattggagttcgtggaggagatgacaaagatgggtgtggaggtgaacctagtggcgtaccatgcggtgatgaatggctattgtgaggtggggcagaccaacgatgcaagaaggatgttggactcgctgcctgggagaggtttttcaccgaatatagttacatatacattgcttgtgaagggatattgtaatgagaagaacatggaggaggctgagggggttgttcaggagattaggaagaataagcagcttgtggttgatgaggctgtttttggtgcagtgatcaatggctattgccaaatgggaagaatggaggatgcagctcgattattgaatgagatggtggattctaggctccaggttaatttgtttgtgtataacataatgattaatggatattgcaagttggggagaatggtggaagcacataacattttgcatgaaatgacaggtgttggtgtgaggcctgacacatacagttacaatagcctagttgatgggtattgcaaaaagggtttgatgaacaaggctttcgaaacatataatacaatgttaaggaatggattcgcggcgacgacattaacatataatgccctcctaaaaggtttttgctcgcttggctcaatcgatgatgcgctcagactttggttcctgatgttgaagaaaggtattgcacctaatgaaatcagttgtagcaccttgcttgatggtttcttcaagtcaggtaaaactgagaaggccttaaatctttggaaagaaaccttagcaaggggtttagcaaaaaatacaaccacatttaacacagttatcaatgggttgtgtaagattgagaggatgcctgaagcagaagagcttgttgacaaaatgaagcaatggagatgtcctcctgatattataacttacagaacattatttagtggttattgtaagataggtgacatggatagagctagccgcattctgaatgaactggaaaatttaggttttgctcctacaattgaatttttcaattctttgataactggacacttcatagctaagcaacatggaaaggtgaatgatatactctttgaaatgagtaataggggactttctcctaacacggtcgcatatggagctctgattgctggatggtgtaaagagggagatttgcatacagcctataacttatatcttgaaatgattgagaaaggtctggtaccaaatctttttatttgcagttctttagtgagttgtttctacaggaagggaaagtttgatgaggcaaatttagtgttgcaaaatcttgtgggtactgacatgattccagatatcagtgcgcccagacttgagatagggaaagtagcaaatttcattgataccgttgctggtggaaatcatcattctgcaaaaatcatgtggaacattgttatttttggtctatgcaaattgggaaggattgaagatgctaaaaacttgttggcagatctaaaagacaaggggtttgttgctgataatttcacttattctagcctcatccatggttgttctgcttcaggatttgttgatgtagcttttgatttgagggatacaatgttgagtgttggtctcactccaaatatagtaacctacaattctcttatatatggtctctgcaagtctggggagttatccagggctgtcagtctttttaagaagttgtggacaaagggtatatcccctaatgctatcacatataatacattaattgataagcattgcaaggatggttacataaccgaggcctttaaactaaagcaaaggatgatagaggaaggtattcatcctactgtgttcacctattctatactgattaatggtctctgtactcaaggctatatggaagaagcaatcaagcttcttgatcaaatgattgagaataatgtggatccaaattatgtcacatattggacactgattcaaggttatgttagatgtgaaagtgttgatgttccaataatgccactagatcaatcaaccatagttgttaaggcgtcgcctaggcgggcggtaaggcgccccggcagcgtaagtcgtcctgctcgccttactccagcacctaaggcgagtgggagagactatgtgctcaacatgcaagtctcaatcactttccagcaatataattgtctaattgtcttctgcgaaggggcctggtcatatcatgagaaatgtttccaacctccctcacatgtcagccaagtggtatcttctaactacaggctggattggctttctaagtgcagagacttgttgctggtgactttgccccttttatctggtacacgctacattccatcaatattgcagtccgtatcctatccacgattgttcttcatggatcaggctttaagtatggttcatgctcaaatatatggcagcagagttcctactgaagtatatgacagtcccagaggtttaccctctttttatacctaggaaaaatgtttgcacaggtggtgaagaaaccccattgacagaaagtggttcgagttactttggagctgactctggattctgtcaagaaacagtcttttggttccaagagaagcaatagttttagtttctctggtgcatcttctcactccatggagaggcatcgatatttgcagagaggaatgttgtcgtcatcaaaggcccttcgaactgcttttgaatcgaacattgcttcaaggtcagaaaagcaagcgcagccgctaaacagattgatttgaagtgaagttcagccgtatcatcagacatcatgcacacaaccatcatggtaaattcctgttcagcacgcacagtaggtctccgtgtgctctgtacggcctagtgctgctgcgctagctggttgggtgcgtccgtgcgtggacgcgctgtagcaaccagggcacccctgtccatggtcgcgatcgcggcctccgctggcctggcccttggcgtgtgcggggcgtagagacggaggagaatgttgtactatgtgcgggcgcggcgagcgaagccggctggaccagaccagaccacaccagggccagagccagggccacgtggcattggctcggcgtagagaacgtcctcccaatatctatgaatttactacaatatacgtctcattatttttagattcatatatgtatccatcacgggggcctccggcctcgttatagcaagtatgggctgactgtaatataatatccaactccgattcaaaactgtaatgtttattacaaaatttgacttagaagtagtgtctaaaaagtggca

SEQ ID NO: 70390 - DNA, 4771 bp, Zea Mays
caggacgcaaggcactagcgggctcctccctcccgcgcgggcaccaacggcgagcggaggactggcgctggcaatggctaatggcgcgaagcaacagctggtacgttctgcacttctgctccacctccctaaaatcttggccgagctccgccactgaccatccccacttgtttccccagatacgctgccgcctcctatcgctccccttcctccgccgcggcatccactcctccgtgccaacttcggtcggcgccgctacagatgctacactcctgggtcgcctcacccgcctcctcctcctccaccgtttctctgccgtcgctcgcctcctctcctcctcggcccccctcacccctgcactcctccacgcggcgctgcgccgggtccgcctcgacgccgacgccgcggtgcacctcttccgcctcgcccctttccccccttccctcctcgcgcacgcccagctgctccacatcctcgtccgcgcccggcgctccgccgacgcccgcgcgatcctggcatccctcctctccgcacggcccccggctccgcctctctttccgcacctcgtcgaggtatataaggagttctccttctccgcagcctcattcgacctgctcctccgtgcacttgccaacgccggccaactcgacggcgccctccaggtgttcgacgaaatgcgaacgctcgggtgccgccttagcatgcggtcctgcaacagtatactcaacaggttagcacagactggggacctgggcgccacagtggcagtgtttgagcagatgcagcgtgcaggggctctgccagacaagttcacggtggcgattatggcaaaggcttactgcaaggttaagggggtggtgcatgcattggagttcgtggaggagatgacaaagatgggtgtggaggtgaacctagtggcgtaccatgcggtgatgaatggctattgtgaggtggggcagaccaacgatgcaagaaggatgttggactcgctgcctgggagaggtttttcaccgaatatagttacatatacattgcttgtgaagggatattgtaatgagaagaacatggaggaggctgagggggttgttcaggagattaggaagaataagcagcttgtggttgatgaggctgtttttggtgcagtgatcaatggctattgccaaatgggaagaatggaggatgcagctcgattattgaatgagatggtggattctaggctccaggttaatttgtttgtgtataacataatgattaatggatattgcaagttggggagaatggtggaagcacataacattttgcatgaaatgacaggtgttggtgtgaggcctgacacatacagttacaatagcctagttgatgggtattgcaaaaagggtttgatgaacaaggctttcgaaacatataatacaatgttaaggaatggattcgcggcgacgacattaacatataatgccctcctaaaaggtttttgctcgcttggctcaatcgatgatgcgctcagactttggttcctgatgttgaagaaaggtattgcacctaatgaaatcagttgtagcaccttgcttgatggtttcttcaagtcaggtaaaactgagaaggccttaaatctttggaaagaaaccttagcaaggggtttagcaaaaaatacaaccacatttaacacagttatcaatgggttgtgtaagattgagaggatgcctgaagcagaagagcttgttgacaaaatgaagcaatggagatgtcctcctgatattataacttacagaacattatttagtggttattgtaagataggtgacatggatagagctagccgcattctgaatgaactggaaaatttaggttttgctcctacaattgaatttttcaattctttgataactggacacttcatagctaagcaacatggaaaggtgaatgatatactctttgaaatgagtaataggggactttctcctaacacggtcgcatatggagctctgattgctggatggtgtaaagagggagatttgcatacagcctataacttatatcttgaaatgattgagaaaggtctggtaccaaatctttttatttgcagttctttagtgagttgtttctacaggaagggaaagtttgatgaggcaaatttagtgttgcaaaatcttgtgggtactgacatgattccagatatcagtgcgcccagacttgagatagggaaagtagcaaatttcattgataccgttgctggtggaaatcatcattctgcaaaaatcatgtggaacattgttatttttggtctatgcaaattgggaaggattgaagatgctaaaaacttgttggcagatctaaaagacaaggggtttgttgctgataatttcacttattctagcctcatccatggttgttctgcttcaggatttgttgatgtagcttttgatttgagggatacaatgttgagtgttggtctcactccaaatatagtaacctacaattctcttatatatggtctctgcaagtctggggagttatccagggctgtcagtctttttaagaagttgtggacaaagggtatatcccctaatgctatcacatataatacattaattgataagcattgcaaggatggttacataaccgaggcctttaaactaaagcaaaggatgatagaggaaggtattcatcctactgtgttcacctattctatactgattaatggtctctgtactcaaggctatatggaagaagcaatcaagcttcttgatcaaatgattgagaataatgtggatccaaattatgtcacatattggacactgattcaaggttatgttagatgtggtaacatgatagagatttcaaagatttatgataagatgcatatccatggacttctgcccaccaatgtttctggggatgtaaaacaatcatgtcctgctatacacaacccgaatagagaaacatgtcagatgaagatgcacagccagtgctagctgctatcacattctttgcatgtctacttcttttgaaagatggcagtgacttatgtttgtatgaggagcaaatcatgggacccatttctatcttgggatgatatccaatataattgtctaattgtcttctgcgaaggggcctggtcatatcatgagaaatgtttccaacctccctcacatgtcagccaagtggtatcttctaactacaggctggattggctttctaagtgcagagacttgttgctggtgactttgccccttttatctggacttaggaatggcaatactcagcttctgctgggaatttgctgggtatatcggctacaaactgtcaagccatcttaagtcttatcaagtgatagcatgcatatcggtcttctcgctgcagctgttcatgccgtttaaacaattagtcggcttacaattttctacagcccaaggcaagcccttcagattttgtcataccgcttgcaaagtctgttaagactgtatactataccagtgtatctgtggggatgtgtttcaagatgctttttgagacaggagagtctagcgtgaggagataagttcaaatctgtttgcaacatcacctcgtatgttttatttacctctgagttcattttccattttaatttacctctgtgtttcaagatgctttttgagacaggacagtctatccttgaattttctcgacccttcttagtgcaatgcctggggctgtctcttaccccccgcaggttattgaagtgggagaaacgaaagacgactagtctttttcgtggtctcgatccacattctattccagcagaagaactgtcggcatctttgaggtacacgctacattccatcaatattgcagtccgtatcctatccacgattgttcttcatggatcaggctttaagtatggttcatgctcaaatatatggcagcagagttcctactgaagtatatgacagtcccagagcaaggtttaccctctttttatacctaggaaaaatgtttgcacaggtggtgaagaaaccccattgacagaaagtggttcgagttactttggagctgactctggattctgtcaagaaacagtcttttggttccaagagaagcaatagttttagtttctctggtgcatcttctcactccatggagaggcatcgatatttgcagagaggaatgttgtcgtcatcaaaggcccttcgaactgcttttgaatcgaacattgcttcaaggtcagaaaagcaagcgcagccgctaaacagattgatttgaagtgaagttcagccgtatcatcagacatcatgcacacaaccatcatggtaaattcctgttcagcacgcacagtaggtctccgtgtgctctgtacggcctagtgctgctgcgctagctggttgggtgcgtccgtgcgtggacgcgctgtagcaaccagggcacccctgtccatggtcgcgatcgcggcctccgctggcctggcccttggcgtgtgcggggcgtagagacggaggagaatgttgtactatgtgcgggcgcggcgagcgaagccggctggaccagaccagaccacaccagggccagagccagggccacgtggcattggctcggcgtagagaacgtcctcccaatatctatgaatttactacaatatacgtctcattatttttagattcatatatgtatccatcacgggggcctccggcctcgttatagcaagtatgggctgactgtaatataatatccaactccgattcaaaactgtaatgtttattacaaaatttgacttagaagtagtgtctaaaaagtggca

SEQ ID NO: 70391 - DNA, 4147 bp, Zea Mays
caggacgcaaggcactagcgggctcctccctcccgcgcgggcaccaacggcgagcggaggactggcgctggcaatggctaatggcgcgaagcaacagctggtacgttctgcacttctgctccacctccctaaaatcttggccgagctccgccactgaccatccccacttgtttccccagatacgctgccgcctcctatcgctccccttcctccgccgcggcatccactcctccgtgccaacttcggtcggcgccgctacagatgctacactcctgggtcgcctcacccgcctcctcctcctccaccgtttctctgccgtcgctcgcctcctctcctcctcggcccccctcacccctgcactcctccacgcggcgctgcgccgggtccgcctcgacgccgacgccgcggtgcacctcttccgcctcgcccctttccccccttccctcctcgcgcacgcccagctgctccacatcctcgtccgcgcccggcgctccgccgacgcccgcgcgatcctggcatccctcctctccgcacggcccccggctccgcctctctttccgcacctcgtcgaggtatataaggagttctccttctccgcagcctcattcgacctgctcctccgtgcacttgccaacgccggccaactcgacggcgccctccaggtgttcgacgaaatgcgaacgctcgggtgccgccttagcatgcggtcctgcaacagtatactcaacaggttagcacagactggggacctgggcgccacagtggcagtgtttgagcagatgcagcgtgcaggggctctgccagacaagttcacggtggcgattatggcaaaggcttactgcaaggttaagggggtggtgcatgcattggagttcgtggaggagatgacaaagatgggtgtggaggtgaacctagtggcgtaccatgcggtgatgaatggctattgtgaggtggggcagaccaacgatgcaagaaggatgttggactcgctgcctgggagaggtttttcaccgaatatagttacatatacattgcttgtgaagggatattgtaatgagaagaacatggaggaggctgagggggttgttcaggagattaggaagaataagcagcttgtggttgatgaggctgtttttggtgcagtgatcaatggctattgccaaatgggaagaatggaggatgcagctcgattattgaatgagatggtggattctaggctccaggttaatttgtttgtgtataacataatgattaatggatattgcaagttggggagaatggtggaagcacataacattttgcatgaaatgacaggtgttggtgtgaggcctgacacatacagttacaatagcctagttgatgggtattgcaaaaagggtttgatgaacaaggctttcgaaacatataatacaatgttaaggaatggattcgcggcgacgacattaacatataatgccctcctaaaaggtttttgctcgcttggctcaatcgatgatgcgctcagactttggttcctgatgttgaagaaaggtattgcacctaatgaaatcagttgtagcaccttgcttgatggtttcttcaagtcaggtaaaactgagaaggccttaaatctttggaaagaaaccttagcaaggggtttagcaaaaaatacaaccacatttaacacagttatcaatgggttgtgtaagattgagaggatgcctgaagcagaagagcttgttgacaaaatgaagcaatggagatgtcctcctgatattataacttacagaacattatttagtggttattgtaagataggtgacatggatagagctagccgcattctgaatgaactggaaaatttaggttttgctcctacaattgaatttttcaattctttgataactggacacttcatagctaagcaacatggaaaggtgaatgatatactctttgaaatgagtaataggggactttctcctaacacggtcgcatatggagctctgattgctggatggtgtaaagagggagatttgcatacagcctataacttatatcttgaaatgattgagaaaggtctggtaccaaatctttttatttgcagttctttagtgagttgtttctacaggaagggaaagtttgatgaggcaaatttagtgttgcaaaatcttgtgggtactgacatgattccagatatcagtgcgcccagacttgagatagggaaagtagcaaatttcattgataccgttgctggtggaaatcatcattctgcaaaaatcatgtggaacattgttatttttggtctatgcaaattgggaaggattgaagatgctaaaaacttgttggcagatctaaaagacaaggggtttgttgctgataatttcacttattctagcctcatccatggttgttctgcttcaggatttgttgatgtagcttttgatttgagggatacaatgttgagtgttggtctcactccaaatatagtaacctacaattctcttatatatggtctctgcaagtctggggagttatccagggctgtcagtctttttaagaagttgtggacaaagggtatatcccctaatgctatcacatataatacattaattgataagcattgcaaggatggttacataaccgaggcctttaaactaaagcaaaggatgatagaggaaggtattcatcctactgtgttcacctattctatactgattaatggtctctgtactcaaggctatatggaagaagcaatcaagcttcttgatcaaatgattgagaataatgtggatccaaattatgtcacatattggacactgattcaaggttatgttagatgtggtaacatgatagagatttcaaagatttatgataagatgcatatccatggacttctgcccaccaatgtttctggggatgtaaaacaatcatgtcctgctatacacaacccgaatagagaaacatgtcagatgaagatgcacagccagtgctagctgctatcacattctttgcatgtctacttcttttgaaagatggcagtgacttatgtttgtatgaggagcaaatcatgggacccatttctatcttgggatgatatccaatataattgtctaattgtcttctgcgaaggggcctggtcatatcatgagaaatgtttccaacctccctcacatgtcagccaagtggtatcttctaactacaggctggattggctttctaagtgcagagacttgttgctggtgactttgccccttttatctggtacacgctacattccatcaatattgcagtccgtatcctatccacgattgttcttcatggatcaggctttaagcaaggtttaccctctttttatacctaggaaaaatgtttgcacaggtggtgaagaaaccccattgacagaaagtggttcgagttactttggagctgactctggattctgtcaagaaacagtcttttggttccaagagaagcaatagttttagtttctctggtgcatcttctcactccatggagaggcatcgatatttgcagagaggaatgttgtcgtcatcaaaggcccttcgaactgcttttgaatcgaacattgcttcaaggtcagaaaagcaagcgcagccgctaaacagattgatttgaagtgaagttcagccgtatcatcagacatcatgcacacaaccatcatggtaaattcctgttcagcacgcacagtaggtctccgtgtgctctgtacggcctagtgctgctgcgctagctggttgggtgcgtccgtgcgtggacgcgctgtagcaaccagggcacccctgtccatggtcgcgatcgcggcctccgctggcctggcccttggcgtgtgcggggcgtagagacggaggagaatgttgtactatgtgcgggcgcggcgagcgaagccggctggaccagaccagaccacaccagggccagagccagggccacgtggcattggctcggcgtagagaacgtcctcccaatatctatgaatttactacaatatacgtctcattatttttagattcatatatgtatccatcacgggggcctccggcctcgttatagcaagtatgggctgactgtaatataatatccaactccgattcaaaactgtaatgtttattacaaaatttgacttagaagtagtgtctaaaaagtggca

SEQ ID NO: 70392 - DNA, 4521 bp, Zea Mays
caggacgcaaggcactagcgggctcctccctcccgcgcgggcaccaacggcgagcggaggactggcgctggcaatggctaatggcgcgaagcaacagctggtacgttctgcacttctgctccacctccctaaaatcttggccgagctccgccactgaccatccccacttgtttccccagatacgctgccgcctcctatcgctccccttcctccgccgcggcatccactcctccgtgccaacttcggtcggcgccgctacagatgctacactcctgggtcgcctcacccgcctcctcctcctccaccgtttctctgccgtcgctcgcctcctctcctcctcggcccccctcacccctgcactcctccacgcggcgctgcgccgggtccgcctcgacgccgacgccgcggtgcacctcttccgcctcgcccctttccccccttccctcctcgcgcacgcccagctgctccacatcctcgtccgcgcccggcgctccgccgacgcccgcgcgatcctggcatccctcctctccgcacggcccccggctccgcctctctttccgcacctcgtcgaggtatataaggagttctccttctccgcagcctcattcgacctgctcctccgtgcacttgccaacgccggccaactcgacggcgccctccaggtgttcgacgaaatgcgaacgctcgggtgccgccttagcatgcggtcctgcaacagtatactcaacaggttagcacagactggggacctgggcgccacagtggcagtgtttgagcagatgcagcgtgcaggggctctgccagacaagttcacggtggcgattatggcaaaggcttactgcaaggttaagggggtggtgcatgcattggagttcgtggaggagatgacaaagatgggtgtggaggtgaacctagtggcgtaccatgcggtgatgaatggctattgtgaggtggggcagaccaacgatgcaagaaggatgttggactcgctgcctgggagaggtttttcaccgaatatagttacatatacattgcttgtgaagggatattgtaatgagaagaacatggaggaggctgagggggttgttcaggagattaggaagaataagcagcttgtggttgatgaggctgtttttggtgcagtgatcaatggctattgccaaatgggaagaatggaggatgcagctcgattattgaatgagatggtggattctaggctccaggttaatttgtttgtgtataacataatgattaatggatattgcaagttggggagaatggtggaagcacataacattttgcatgaaatgacaggtgttggtgtgaggcctgacacatacagttacaatagcctagttgatgggtattgcaaaaagggtttgatgaacaaggctttcgaaacatataatacaatgttaaggaatggattcgcggcgacgacattaacatataatgccctcctaaaaggtttttgctcgcttggctcaatcgatgatgcgctcagactttggttcctgatgttgaagaaaggtattgcacctaatgaaatcagttgtagcaccttgcttgatggtttcttcaagtcaggtaaaactgagaaggccttaaatctttggaaagaaaccttagcaaggggtttagcaaaaaatacaaccacatttaacacagttatcaatgggttgtgtaagattgagaggatgcctgaagcagaagagcttgttgacaaaatgaagcaatggagatgtcctcctgatattataacttacagaacattatttagtggttattgtaagataggtgacatggatagagctagccgcattctgaatgaactggaaaatttaggttttgctcctacaattgaatttttcaattctttgataactggacacttcatagctaagcaacatggaaaggtgaatgatatactctttgaaatgagtaataggggactttctcctaacacggtcgcatatggagctctgattgctggatggtgtaaagagggagatttgcatacagcctataacttatatcttgaaatgattgagaaaggtctggtaccaaatctttttatttgcagttctttagtgagttgtttctacaggaagggaaagtttgatgaggcaaatttagtgttgcaaaatcttgtgggtactgacatgattccagatatcagtgcgcccagacttgagatagggaaagtagcaaatttcattgataccgttgctggtggaaatcatcattctgcaaaaatcatgtggaacattgttatttttggtctatgcaaattgggaaggattgaagatgctaaaaacttgttggcagatctaaaagacaaggggtttgttgctgataatttcacttattctagcctcatccatggttgttctgcttcaggatttgttgatgtagcttttgatttgagggatacaatgttgagtgttggtctcactccaaatatagtaacctacaattctcttatatatggtctctgcaagtctggggagttatccagggctgtcagtctttttaagaagttgtggacaaagggtatatcccctaatgctatcacatataatacattaattgataagcattgcaaggatggttacataaccgaggcctttaaactaaagcaaaggatgatagaggaaggtattcatcctactgtgttcacctattctatactgattaatggtctctgtactcaaggctatatggaagaagcaatcaagcttcttgatcaaatgattgagaataatgtggatccaaattatgtcacatattggacactgattcaaggttatgttagatgtggtaacatgatagagatttcaaagatttatgataagatgcatatccatggacttctgcccaccaatgtttctggggatgtaaaacaatcatgtcctgctatacacaacccgaatagagaaacatgtcagatgaagatgcacagccagtgctagctgctatcacattctttgcatgtctacttcttttgaaagatggcagtgacttatgtttgtatgaggagcaaatcatgggacccatttctatcttgggatgatatccaatataattgtctaattgtcttctgcgaaggggcctggtcatatcatgagaaatgtttccaacctccctcacatgtcagccaagtggtatcttctaactacaggctggattggctttctaagtgcagagacttgttgctggtgactttgccccttttatctggacttaggaatggcaatactcagcttctgctgggaatttgctgggtatatcggctacaaactgtcaagccatcttaagtcttatcaagtgatagcatgcatatcggtcttctcgctgcagctgttcatgccgtttaaacaattagtcggcttacaattttctacagcccaaggcaagcccttcagattttgtcataccgcttgcaaagtctgttaagactgtatactataccagtgtatctgtggggatgtgtttcaagatgctttttgagacaggagagtctagcgtgaggagataagttcaaatctgtttgcaacatcacctcgttattgaagtgggagaaacgaaagacgactagtctttttcgtggtctcgatccacattctattccagcagaagaactgtcggcatctttgaggtacacgctacattccatcaatattgcagtccgtatcctatccacgattgttcttcatggatcaggctttaaggtggtgaagaaaccccattgacagaaagtggttcgagttactttggagctgactctggattctgtcaagaaacagtcttttggttccaagagaagcaatagttttagtttctctggtgcatcttctcactccatggagaggcatcgatatttgcagagaggaatgttgtcgtcatcaaaggcccttcgaactgcttttgaatcgaacattgcttcaaggtcagaaaagcaagcgcagccgctaaacagattgatttgaagtgaagttcagccgtatcatcagacatcatgcacacaaccatcatggtaaattcctgttcagcacgcacagtaggtctccgtgtgctctgtacggcctagtgctgctgcgctagctggttgggtgcgtccgtgcgtggacgcgctgtagcaaccagggcacccctgtccatggtcgcgatcgcggcctccgctggcctggcccttggcgtgtgcggggcgtagagacggaggagaatgttgtactatgtgcgggcgcggcgagcgaagccggctggaccagaccagaccacaccagggccagagccagggccacgtggcattggctcggcgtagagaacgtcctcccaatatctatgaatttactacaatatacgtctcattatttttagattcatatatgtatccatcacgggggcctccggcctcgttatagcaagtatgggctgactgtaatataatatccaactccgattcaaaactgtaatgtttattacaaaatttgacttagaagtagtgtctaaaaagtggca

SEQ ID NO: 70393 - DNA, 4627 bp, Zea Mays
caggacgcaaggcactagcgggctcctccctcccgcgcgggcaccaacggcgagcggaggactggcgctggcaatggctaatggcgcgaagcaacagctggtacgttctgcacttctgctccacctccctaaaatcttggccgagctccgccactgaccatccccacttgtttccccagatacgctgccgcctcctatcgctccccttcctccgccgcggcatccactcctccgtgccaacttcggtcggcgccgctacagatgctacactcctgggtcgcctcacccgcctcctcctcctccaccgtttctctgccgtcgctcgcctcctctcctcctcggcccccctcacccctgcactcctccacgcggcgctgcgccgggtccgcctcgacgccgacgccgcggtgcacctcttccgcctcgcccctttccccccttccctcctcgcgcacgcccagctgctccacatcctcgtccgcgcccggcgctccgccgacgcccgcgcgatcctggcatccctcctctccgcacggcccccggctccgcctctctttccgcacctcgtcgaggtatataaggagttctccttctccgcagcctcattcgacctgctcctccgtgcacttgccaacgccggccaactcgacggcgccctccaggtgttcgacgaaatgcgaacgctcgggtgccgccttagcatgcggtcctgcaacagtatactcaacaggttagcacagactggggacctgggcgccacagtggcagtgtttgagcagatgcagcgtgcaggggctctgccagacaagttcacggtggcgattatggcaaaggcttactgcaaggttaagggggtggtgcatgcattggagttcgtggaggagatgacaaagatgggtgtggaggtgaacctagtggcgtaccatgcggtgatgaatggctattgtgaggtggggcagaccaacgatgcaagaaggatgttggactcgctgcctgggagaggtttttcaccgaatatagttacatatacattgcttgtgaagggatattgtaatgagaagaacatggaggaggctgagggggttgttcaggagattaggaagaataagcagcttgtggttgatgaggctgtttttggtgcagtgatcaatggctattgccaaatgggaagaatggaggatgcagctcgattattgaatgagatggtggattctaggctccaggttaatttgtttgtgtataacataatgattaatggatattgcaagttggggagaatggtggaagcacataacattttgcatgaaatgacaggtgttggtgtgaggcctgacacatacagttacaatagcctagttgatgggtattgcaaaaagggtttgatgaacaaggctttcgaaacatataatacaatgttaaggaatggattcgcggcgacgacattaacatataatgccctcctaaaaggtttttgctcgcttggctcaatcgatgatgcgctcagactttggttcctgatgttgaagaaaggtattgcacctaatgaaatcagttgtagcaccttgcttgatggtttcttcaagtcaggtaaaactgagaaggccttaaatctttggaaagaaaccttagcaaggggtttagcaaaaaatacaaccacatttaacacagttatcaatgggttgtgtaagattgagaggatgcctgaagcagaagagcttgttgacaaaatgaagcaatggagatgtcctcctgatattataacttacagaacattatttagtggttattgtaagataggtgacatggatagagctagccgcattctgaatgaactggaaaatttaggttttgctcctacaattgaatttttcaattctttgataactggacacttcatagctaagcaacatggaaaggtgaatgatatactctttgaaatgagtaataggggactttctcctaacacggtcgcatatggagctctgattgctggatggtgtaaagagggagatttgcatacagcctataacttatatcttgaaatgattgagaaaggtctggtaccaaatctttttatttgcagttctttagtgagttgtttctacaggaagggaaagtttgatgaggcaaatttagtgttgcaaaatcttgtgggtactgacatgattccagatatcagtgcgcccagacttgagatagggaaagtagcaaatttcattgataccgttgctggtggaaatcatcattctgcaaaaatcatgtggaacattgttatttttggtctatgcaaattgggaaggattgaagatgctaaaaacttgttggcagatctaaaagacaaggggtttgttgctgataatttcacttattctagcctcatccatggttgttctgcttcaggatttgttgatgtagcttttgatttgagggatacaatgttgagtgttggtctcactccaaatatagtaacctacaattctcttatatatggtctctgcaagtctggggagttatccagggctgtcagtctttttaagaagttgtggacaaagggtatatcccctaatgctatcacatataatacattaattgataagcattgcaaggatggttacataaccgaggcctttaaactaaagcaaaggatgatagaggaaggtattcatcctactgtgttcacctattctatactgattaatggtctctgtactcaaggctatatggaagaagcaatcaagcttcttgatcaaatgattgagaataatgtggatccaaattatgtcacatattggacactgattcaaggttatgttagatgtggtaacatgatagagatttcaaagatttatgataagatgcatatccatggacttctgcccaccaatgtttctggggatgtaaaacaatcatgtcctgctatacacaacccgaatagagaaacatgtcagatgaagatgcacagccagtgctagctgctatcacattctttgcatgtctacttcttttgaaagatggcagtgacttatgtttgtatgaggagcaaatcatgggacccatttctatcttgggatgatatccaatataattgtctaattgtcttctgcgaaggggcctggtcatatcatgagaaatgtttccaacctccctcacatgtcagccaagtggtatcttctaactacaggctggattggctttctaagtgcagagacttgttgctggtgactttgccccttttatctggacttaggaatggcaatactcagcttctgctgggaatttgctgggtatatcggctacaaactgtcaagccatcttaagtcttatcaagtgatagcatgcatatcggtcttctcgctgcagctgttcatgccgtttaaacaattagtcggcttacaattttctacagcccaaggcaagcccttcagattttgtcataccgcttgcaaagtctgttaagactgtatactataccagtgtatctgtggggatgtgtttcaagatgctttttgagacaggagagtctagcgtgaggagataagttcaaatctgtttgcaacatcacctcgttattgaagtgggagaaacgaaagacgactagtctttttcgtggtctcgatccacattctattccagcagaagaactgtcggcatctttgaggtacacgctacattccatcaatattgcagtccgtatcctatccacgattgttcttcatggatcaggctttaagtatggttcatgctcaaatatatggcagcagagttcctactgaagtatatgacagtcccagagcaaggtttaccctctttttatacctaggaaaaatgtttgcacaggtggtgaagaaaccccattgacagaaagtggttcgagttactttggagctgactctggattctgtcaagaaacagtcttttggttccaagagaagcaatagttttagtttctctggtgcatcttctcactccatggagaggcatcgatatttgcagagaggaatgttgtcgtcatcaaaggcccttcgaactgcttttgaatcgaacattgcttcaaggtcagaaaagcaagcgcagccgctaaacagattgatttgaagtgaagttcagccgtatcatcagacatcatgcacacaaccatcatggtaaattcctgttcagcacgcacagtaggtctccgtgtgctctgtacggcctagtgctgctgcgctagctggttgggtgcgtccgtgcgtggacgcgctgtagcaaccagggcacccctgtccatggtcgcgatcgcggcctccgctggcctggcccttggcgtgtgcggggcgtagagacggaggagaatgttgtactatgtgcgggcgcggcgagcgaagccggctggaccagaccagaccacaccagggccagagccagggccacgtggcattggctcggcgtagagaacgtcctcccaatatctatgaatttactacaatatacgtctcattatttttagattcatatatgtatccatcacgggggcctccggcctcgttatagcaagtatgggctgactgtaatataatatccaactccgattcaaaactgtaatgtttattacaaaatttgacttagaagtagtgtctaaaaagtggca

SEQ ID NO: 70394 - DNA, 4556 bp, Zea Mays
tggaggtctccaggacgcaaggcactagcgggctcctccctcccgcgcgggcaccaacggcgagcggaggactggcgctggcaatggctaatggcgcgaagcaacagctggtacgttctgcacttctgctccacctccctaaaatcttggccgagctccgccactgaccatccccacttgtttccccagatacgctgccgcctcctatcgctccccttcctccgccgcggcatccactcctccgtgccaacttcggtcggcgccgctacagatgctacactcctgggtcgcctcacccgcctcctcctcctccaccgtttctctgccgtcgctcgcctcctctcctcctcggcccccctcacccctgcactcctccacgcggcgctgcgccgggtccgcctcgacgccgacgccgcggtgcacctcttccgcctcgcccctttccccccttccctcctcgcgcacgcccagctgctccacatcctcgtccgcgcccggcgctccgccgacgcccgcgcgatcctggcatccctcctctccgcacggcccccggctccgcctctctttccgcacctcgtcgaggtatataaggagttctccttctccgcagcctcattcgacctgctcctccgtgcacttgccaacgccggccaactcgacggcgccctccaggtgttcgacgaaatgcgaacgctcgggtgccgccttagcatgcggtcctgcaacagtatactcaacaggttagcacagactggggacctgggcgccacagtggcagtgtttgagcagatgcagcgtgcaggggctctgccagacaagttcacggtggcgattatggcaaaggcttactgcaaggttaagggggtggtgcatgcattggagttcgtggaggagatgacaaagatgggtgtggaggtgaacctagtggcgtaccatgcggtgatgaatggctattgtgaggtggggcagaccaacgatgcaagaaggatgttggactcgctgcctgggagaggtttttcaccgaatatagttacatatacattgcttgtgaagggatattgtaatgagaagaacatggaggaggctgagggggttgttcaggagattaggaagaataagcagcttgtggttgatgaggctgtttttggtgcagtgatcaatggctattgccaaatgggaagaatggaggatgcagctcgattattgaatgagatggtggattctaggctccaggttaatttgtttgtgtataacataatgattaatggatattgcaagttggggagaatggtggaagcacataacattttgcatgaaatgacaggtgttggtgtgaggcctgacacatacagttacaatagcctagttgatgggtattgcaaaaagggtttgatgaacaaggctttcgaaacatataatacaatgttaaggaatggattcgcggcgacgacattaacatataatgccctcctaaaaggtttttgctcgcttggctcaatcgatgatgcgctcagactttggttcctgatgttgaagaaaggtattgcacctaatgaaatcagttgtagcaccttgcttgatggtttcttcaagtcaggtaaaactgagaaggccttaaatctttggaaagaaaccttagcaaggggtttagcaaaaaatacaaccacatttaacacagttatcaatgggttgtgtaagattgagaggatgcctgaagcagaagagcttgttgacaaaatgaagcaatggagatgtcctcctgatattataacttacagaacattatttagtggttattgtaagataggtgacatggatagagctagccgcattctgaatgaactggaaaatttaggttttgctcctacaattgaatttttcaattctttgataactggacacttcatagctaagcaacatggaaaggtgaatgatatactctttgaaatgagtaataggggactttctcctaacacggtcgcatatggagctctgattgctggatggtgtaaagagggagatttgcatacagcctataacttatatcttgaaatgattgagaaaggtctggtaccaaatctttttatttgcagttctttagtgagttgtttctacaggaagggaaagtttgatgaggcaaatttagtgttgcaaaatcttgtgggtactgacatgattccagatatcagtgcgcccagacttgagatagggaaagtagcaaatttcattgataccgttgctggtggaaatcatcattctgcaaaaatcatgtggaacattgttatttttggtctatgcaaattgggaaggattgaagatgctaaaaacttgttggcagatctaaaagacaaggggtttgttgctgataatttcacttattctagcctcatccatggttgttctgcttcaggatttgttgatgtagcttttgatttgagggatacaatgttgagtgttggtctcactccaaatatagtaacctacaattctcttatatatggtctctgcaagtctggggagttatccagggctgtcagtctttttaagaagttgtggacaaagggtatatcccctaatgctatcacatataatacattaattgataagcattgcaaggatggttacataaccgaggcctttaaactaaagcaaaggatgatagaggaaggtattcatcctactgtgttcacctattctatactgattaatggtctctgtactcaaggctatatggaagaagcaatcaagcttcttgatcaaatgattgagaataatgtggatccaaattatgtcacatattggacactgattcaaggttatgttagatgtgaaagtgttgatgttccaataatgccactagatcaatcaaccatagttgttaaggcgtcgcctaggcgggcggtaaggcgccccggcagcgtaagtcgtcctgctcgccttactccagcacctaaggcgagtgggagagactatgtgctcaacatgcaagtctcaatcactttccagcaatataattgtctaattgtcttctgcgaaggggcctggtcatatcatgagaaatgtttccaacctccctcacatgtcagccaagtggtatcttctaactacaggctggattggctttctaagtgcagagacttgttgctggtgactttgccccttttatctggacttaggaatggcaatactcagcttctgctgggaatttgctgggtatatcggctacaaactgtcaagccatcttaagtcttatcaagtgatagcatgcatatcggtcttctcgctgcagctgttcatgccgtttaaacaattagtcggcttacaattttctacagcccaaggcaagcccttcagattttgtcataccgcttgcaaagtctgttaagactgtatactataccagtgtatctgtggggatgtgtttcaagatgctttttgagacaggagagtctagcgtgaggagataagttcaaatctgtttgcaacatcacctcgttattgaagtgggagaaacgaaagacgactagtctttttcgtggtctcgatccacattctattccagcagaagaactgtcggcatctttgaggtacacgctacattccatcaatattgcagtccgtatcctatccacgattgttcttcatggatcaggctttaagtatggttcatgctcaaatatatggcagcagagttcctactgaagtatatgacagtcccagagcaaggtttaccctctttttatacctaggaaaaatgtttgcacaggtggtgaagaaaccccattgacagaaagtggttcgagttactttggagctgactctggattctgtcaagaaacagtcttttggttccaagagaagcaatagttttagtttctctggtgcatcttctcactccatggagaggcatcgatatttgcagagaggaatgttgtcgtcatcaaaggcccttcgaactgcttttgaatcgaacattgcttcaaggtcagaaaagcaagcgcagccgctaaacagattgatttgaagtgaagttcagccgtatcatcagacatcatgcacacaaccatcatggtaaattcctgttcagcacgcacagtaggtctccgtgtgctctgtacggcctagtgctgctgcgctagctggttgggtgcgtccgtgcgtggacgcgctgtagcaaccagggcacccctgtccatggtcgcgatcgcggcctccgctggcctggcccttggcgtgtgcggggcgtagagacggaggagaatgttgtactatgtgcgggcgcggcgagcgaagccggctggaccagaccagaccacaccagggccagagccagggccacgtggcattggctcggcgtagagaacgtcctcccaatatctatgaatttactacaatatacgtctcattatttttagattcatatatgtatccatcacgggggcctccggcctcgttatagcaagtatgggctgactgtaatataatatccaactccgattcaaaactgtaatgtttattacaaaatttgacttagaagtagtgtctaaaaagtggca

SEQ ID NO: 70395 - DNA, 4575 bp, Zea Mays
gcggggtggaggtctccaggacgcaaggcactagcgggctcctccctcccgcgcgggcaccaacggcgagcggaggactggcgctggcaatggctaatggcgcgaagcaacagctggtacgttctgcacttctgctccacctccctaaaatcttggccgagctccgccactgaccatccccacttgtttccccagatacgctgccgcctcctatcgctccccttcctccgccgcggcatccactcctccgtgccaacttcggtcggcgccgctacagatgctacactcctgggtcgcctcacccgcctcctcctcctccaccgtttctctgccgtcgctcgcctcctctcctcctcggcccccctcacccctgcactcctccacgcggcgctgcgccgggtccgcctcgacgccgacgccgcggtgcacctcttccgcctcgcccctttccccccttccctcctcgcgcacgcccagctgctccacatcctcgtccgcgcccggcgctccgccgacgcccgcgcgatcctggcatccctcctctccgcacggcccccggctccgcctctctttccgcacctcgtcgaggtatataaggagttctccttctccgcagcctcattcgacctgctcctccgtgcacttgccaacgccggccaactcgacggcgccctccaggtgttcgacgaaatgcgaacgctcgggtgccgccttagcatgcggtcctgcaacagtatactcaacaggttagcacagactggggacctgggcgccacagtggcagtgtttgagcagatgcagcgtgcaggggctctgccagacaagttcacggtggcgattatggcaaaggcttactgcaaggttaagggggtggtgcatgcattggagttcgtggaggagatgacaaagatgggtgtggaggtgaacctagtggcgtaccatgcggtgatgaatggctattgtgaggtggggcagaccaacgatgcaagaaggatgttggactcgctgcctgggagaggtttttcaccgaatatagttacatatacattgcttgtgaagggatattgtaatgagaagaacatggaggaggctgagggggttgttcaggagattaggaagaataagcagcttgtggttgatgaggctgtttttggtgcagtgatcaatggctattgccaaatgggaagaatggaggatgcagctcgattattgaatgagatggtggattctaggctccaggttaatttgtttgtgtataacataatgattaatggatattgcaagttggggagaatggtggaagcacataacattttgcatgaaatgacaggtgttggtgtgaggcctgacacatacagttacaatagcctagttgatgggtattgcaaaaagggtttgatgaacaaggctttcgaaacatataatacaatgttaaggaatggattcgcggcgacgacattaacatataatgccctcctaaaaggtttttgctcgcttggctcaatcgatgatgcgctcagactttggttcctgatgttgaagaaaggtattgcacctaatgaaatcagttgtagcaccttgcttgatggtttcttcaagtcaggtaaaactgagaaggccttaaatctttggaaagaaaccttagcaaggggtttagcaaaaaatacaaccacatttaacacagttatcaatgggttgtgtaagattgagaggatgcctgaagcagaagagcttgttgacaaaatgaagcaatggagatgtcctcctgatattataacttacagaacattatttagtggttattgtaagataggtgacatggatagagctagccgcattctgaatgaactggaaaatttaggttttgctcctacaattgaatttttcaattctttgataactggacacttcatagctaagcaacatggaaaggtgaatgatatactctttgaaatgagtaataggggactttctcctaacacggtcgcatatggagctctgattgctggatggtgtaaagagggagatttgcatacagcctataacttatatcttgaaatgattgagaaaggtctggtaccaaatctttttatttgcagttctttagtgagttgtttctacaggaagggaaagtttgatgaggcaaatttagtgttgcaaaatcttgtgggtactgacatgattccagatatcagtgcgcccagacttgagatagggaaagtagcaaatttcattgataccgttgctggtggaaatcatcattctgcaaaaatcatgtggaacattgttatttttggtctatgcaaattgggaaggattgaagatgctaaaaacttgttggcagatctaaaagacaaggggtttgttgctgataatttcacttattctagcctcatccatggttgttctgcttcaggatttgttgatgtagcttttgatttgagggatacaatgttgagtgttggtctcactccaaatatagtaacctacaattctcttatatatggtctctgcaagtctggggagttatccagggctgtcagtctttttaagaagttgtggacaaagggtatatcccctaatgctatcacatataatacattaattgataagcattgcaaggatggttacataaccgaggcctttaaactaaagcaaaggatgatagaggaaggtattcatcctactgtgttcacctattctatactgattaatggtctctgtactcaaggctatatggaagaagcaatcaagcttcttgatcaaatgattgagaataatgtggatccaaattatgtcacatattggacactgattcaaggttatgttagatgtggtaacatgatagagatttcaaagatttatgataagatgcatatccatggacttctgcccaccaatgtttctggggatgtaaaacaatcatgtcctgctatacacaacccgaatagagaaacatgtcagatgaagatgcacagccagtgctagctgctatcacattctttgcatgtctacttcttttgaaagatggcagtgacttatgtttgtatgaggagcaaatcatgggacccatttctatcttgggatgatatcactatgtgctcaacatgcaagtctcaatcactttccagcaatataattgtctaattgtcttctgcgaaggggcctggtcatatcatgagaaatgtttccaacctccctcacatgtcagccaagtggtatcttctaactacaggctggattggctttctaagtgcagagacttgttgctggtgactttgccccttttatctggacttaggaatggcaatactcagcttctgctgggaatttgctgggtatatcggctacaaactgtcaagccatcttaagtcttatcaagtgatagcatgcatatcggtcttctcgctgcagctgttcatgccgtttaaacaattagtcggcttacaattttctacagcccaaggcaagcccttcagattttgtcataccgcttgcaaagtctgttaagactgtatactataccagtgtatctgtggggatgtgtttcaagatgctttttgagacaggagagtctagcgtgaggagataagttcaaatctgtttgcaacatcacctcgttattgaagtgggagaaacgaaagacgactagtctttttcgtggtctcgatccacattctattccagcagaagaactgtcggcatctttgaggtacacgctacattccatcaatattgcagtccgtatcctatccacgattgttcttcatggatcaggctttaaggtggtgaagaaaccccattgacagaaagtggttcgagttactttggagctgactctggattctgtcaagaaacagtcttttggttccaagagaagcaatagttttagtttctctggtgcatcttctcactccatggagaggcatcgatatttgcagagaggaatgttgtcgtcatcaaaggcccttcgaactgcttttgaatcgaacattgcttcaaggtcagaaaagcaagcgcagccgctaaacagattgatttgaagtgaagttcagccgtatcatcagacatcatgcacacaaccatcatggtaaattcctgttcagcacgcacagtaggtctccgtgtgctctgtacggcctagtgctgctgcgctagctggttgggtgcgtccgtgcgtggacgcgctgtagcaaccagggcacccctgtccatggtcgcgatcgcggcctccgctggcctggcccttggcgtgtgcggggcgtagagacggaggagaatgttgtactatgtgcgggcgcggcgagcgaagccggctggaccagaccagaccacaccagggccagagccagggccacgtggcattggctcggcgtagagaacgtcctcccaatatctatgaatttactacaatatacgtctcattatttttagattcatatatgtatccatcacgggggcctccggcctcgttatagcaagtatgggctgactgtaatataatatccaactccgattcaaaactgtaatgtttattacaaaatttgacttagaagtagtgtctaaaaagtggca

SEQ ID NO: 70396 - DNA, 4615 bp, Zea Mays
agggcggggtggaggtctccaggacgcaaggcactagcgggctcctccctcccgcgcgggcaccaacggcgagcggaggactggcgctggcaatggctaatggcgcgaagcaacagctggtacgttctgcacttctgctccacctccctaaaatcttggccgagctccgccactgaccatccccacttgtttccccagatacgctgccgcctcctatcgctccccttcctccgccgcggcatccactcctccgtgccaacttcggtcggcgccgctacagatgctacactcctgggtcgcctcacccgcctcctcctcctccaccgtttctctgccgtcgctcgcctcctctcctcctcggcccccctcacccctgcactcctccacgcggcgctgcgccgggtccgcctcgacgccgacgccgcggtgcacctcttccgcctcgcccctttccccccttccctcctcgcgcacgcccagctgctccacatcctcgtccgcgcccggcgctccgccgacgcccgcgcgatcctggcatccctcctctccgcacggcccccggctccgcctctctttccgcacctcgtcgaggtatataaggagttctccttctccgcagcctcattcgacctgctcctccgtgcacttgccaacgccggccaactcgacggcgccctccaggtgttcgacgaaatgcgaacgctcgggtgccgccttagcatgcggtcctgcaacagtatactcaacaggttagcacagactggggacctgggcgccacagtggcagtgtttgagcagatgcagcgtgcaggggctctgccagacaagttcacggtggcgattatggcaaaggcttactgcaaggttaagggggtggtgcatgcattggagttcgtggaggagatgacaaagatgggtgtggaggtgaacctagtggcgtaccatgcggtgatgaatggctattgtgaggtggggcagaccaacgatgcaagaaggatgttggactcgctgcctgggagaggtttttcaccgaatatagttacatatacattgcttgtgaagggatattgtaatgagaagaacatggaggaggctgagggggttgttcaggagattaggaagaataagcagcttgtggttgatgaggctgtttttggtgcagtgatcaatggctattgccaaatgggaagaatggaggatgcagctcgattattgaatgagatggtggattctaggctccaggttaatttgtttgtgtataacataatgattaatggatattgcaagttggggagaatggtggaagcacataacattttgcatgaaatgacaggtgttggtgtgaggcctgacacatacagttacaatagcctagttgatgggtattgcaaaaagggtttgatgaacaaggctttcgaaacatataatacaatgttaaggaatggattcgcggcgacgacattaacatataatgccctcctaaaaggtttttgctcgcttggctcaatcgatgatgcgctcagactttggttcctgatgttgaagaaaggtattgcacctaatgaaatcagttgtagcaccttgcttgatggtttcttcaagtcaggtaaaactgagaaggccttaaatctttggaaagaaaccttagcaaggggtttagcaaaaaatacaaccacatttaacacagttatcaatgggttgtgtaagattgagaggatgcctgaagcagaagagcttgttgacaaaatgaagcaatggagatgtcctcctgatattataacttacagaacattatttagtggttattgtaagataggtgacatggatagagctagccgcattctgaatgaactggaaaatttaggttttgctcctacaattgaatttttcaattctttgataactggacacttcatagctaagcaacatggaaaggtgaatgatatactctttgaaatgagtaataggggactttctcctaacacggtcgcatatggagctctgattgctggatggtgtaaagagggagatttgcatacagcctataacttatatcttgaaatgattgagaaaggtctggtaccaaatctttttatttgcagttctttagtgagttgtttctacaggaagggaaagtttgatgaggcaaatttagtgttgcaaaatcttgtgggtactgacatgattccagatatcagtgcgcccagacttgagatagggaaagtagcaaatttcattgataccgttgctggtggaaatcatcattctgcaaaaatcatgtggaacattgttatttttggtctatgcaaattgggaaggattgaagatgctaaaaacttgttggcagatctaaaagacaaggggtttgttgctgataatttcacttattctagcctcatccatggttgttctgcttcaggatttgttgatgtagcttttgatttgagggatacaatgttgagtgttggtctcactccaaatatagtaacctacaattctcttatatatggtctctgcaagtctggggagttatccagggctgtcagtctttttaagaagttgtggacaaagggtatatcccctaatgctatcacatataatacattaattgataagcattgcaaggatggttacataaccgaggcctttaaactaaagcaaaggatgatagaggaaggtattcatcctactgtgttcacctattctatactgattaatggtctctgtactcaaggctatatggaagaagcaatcaagcttcttgatcaaatgattgagaataatgtggatccaaattatgtcacatattggacactgattcaaggttatgttagatgtggtaacatgatagagatttcaaagatttatgataagatgcatatccatggacttctgcccaccaatgtttctggggatgtaaaacaatcatgtcctgctatacacaacccgaatagagaaacatgtcagatgaagatgcacagccagtgctagctgctatcacattctttgcatgtctacttcttttgaaagatggcagtgacttatgtttgtatgaggagcaaatcatgggacccatttctatcttgggatgatatcgggcctggtcatatcatgagaaatgtttccaacctccctcacatgtcagccaagtggtatcttctaactacaggctggattggctttctaagtgcagagacttgttgctggtgactttgccccttttatctggacttaggaatggcaatactcagcttctgctgggaatttgctgggtatatcggctacaaactgtcaagccatcttaagtcttatcaagtgatagcatgcatatcggtcttctcgctgcagctgttcatgccgtttaaacaattagtcggcttacaattttctacagcccaaggcaagcccttcagattttgtcataccgcttgcaaagtctgttaagactgtatactataccagtgtatctgtggggatgtgtttcaagatgctttttgagacaggagagtctagcgtgaggagataagttcaaatctgtttgcaacatcacctcgttattgaagtgggagaaacgaaagacgactagtctttttcgtggtctcgatccacattctattccagcagaagaactgtcggcatctttgaggtacacgctacattccatcaatattgcagtccgtatcctatccacgattgttcttcatggatcaggctttaagtatggttcatgctcaaatatatggcagcagagttcctactgaagtatatgacagtcccagagcaaggtttaccctctttttatacctaggaaaaatgtttgcacaggtggtgaagaaaccccattgacagaaagtggttcgagttactttggagctgactctggattctgtcaagaaacagtcttttggttccaagagaagcaatagttttagtttctctggtgcatcttctcactccatggagaggcatcgatatttgcagagaggaatgttgtcgtcatcaaaggcccttcgaactgcttttgaatcgaacattgcttcaaggtcagaaaagcaagcgcagccgctaaacagattgatttgaagtgaagttcagccgtatcatcagacatcatgcacacaaccatcatggtaaattcctgttcagcacgcacagtaggtctccgtgtgctctgtacggcctagtgctgctgcgctagctggttgggtgcgtccgtgcgtggacgcgctgtagcaaccagggcacccctgtccatggtcgcgatcgcggcctccgctggcctggcccttggcgtgtgcggggcgtagagacggaggagaatgttgtactatgtgcgggcgcggcgagcgaagccggctggaccagaccagaccacaccagggccagagccagggccacgtggcattggctcggcgtagagaacgtcctcccaatatctatgaatttactacaatatacgtctcattatttttagattcatatatgtatccatcacgggggcctccggcctcgttatagcaagtatgggctgactgtaatataatatccaactccgattcaaaactgtaatgtttattacaaaatttgacttagaagtagtgtctaaaaagtggca

SEQ ID NO: 70397 - DNA, 4712 bp, Zea Mays
cgcggggcacggtcgaggacggcggcgcagggcggggtggaggtctccaggacgcaaggcactagcgggctcctccctcccgcgcgggcaccaacggcgagcggaggactggcgctggcaatggctaatggcgcgaagcaacagctggtacgttctgcacttctgctccacctccctaaaatcttggccgagctccgccactgaccatccccacttgtttccccagatacgctgccgcctcctatcgctccccttcctccgccgcggcatccactcctccgtgccaacttcggtcggcgccgctacagatgctacactcctgggtcgcctcacccgcctcctcctcctccaccgtttctctgccgtcgctcgcctcctctcctcctcggcccccctcacccctgcactcctccacgcggcgctgcgccgggtccgcctcgacgccgacgccgcggtgcacctcttccgcctcgcccctttccccccttccctcctcgcgcacgcccagctgctccacatcctcgtccgcgcccggcgctccgccgacgcccgcgcgatcctggcatccctcctctccgcacggcccccggctccgcctctctttccgcacctcgtcgaggtatataaggagttctccttctccgcagcctcattcgacctgctcctccgtgcacttgccaacgccggccaactcgacggcgccctccaggtgttcgacgaaatgcgaacgctcgggtgccgccttagcatgcggtcctgcaacagtatactcaacaggttagcacagactggggacctgggcgccacagtggcagtgtttgagcagatgcagcgtgcaggggctctgccagacaagttcacggtggcgattatggcaaaggcttactgcaaggttaagggggtggtgcatgcattggagttcgtggaggagatgacaaagatgggtgtggaggtgaacctagtggcgtaccatgcggtgatgaatggctattgtgaggtggggcagaccaacgatgcaagaaggatgttggactcgctgcctgggagaggtttttcaccgaatatagttacatatacattgcttgtgaagggatattgtaatgagaagaacatggaggaggctgagggggttgttcaggagattaggaagaataagcagcttgtggttgatgaggctgtttttggtgcagtgatcaatggctattgccaaatgggaagaatggaggatgcagctcgattattgaatgagatggtggattctaggctccaggttaatttgtttgtgtataacataatgattaatggatattgcaagttggggagaatggtggaagcacataacattttgcatgaaatgacaggtgttggtgtgaggcctgacacatacagttacaatagcctagttgatgggtattgcaaaaagggtttgatgaacaaggctttcgaaacatataatacaatgttaaggaatggattcgcggcgacgacattaacatataatgccctcctaaaaggtttttgctcgcttggctcaatcgatgatgcgctcagactttggttcctgatgttgaagaaaggtattgcacctaatgaaatcagttgtagcaccttgcttgatggtttcttcaagtcaggtaaaactgagaaggccttaaatctttggaaagaaaccttagcaaggggtttagcaaaaaatacaaccacatttaacacagttatcaatgggttgtgtaagattgagaggatgcctgaagcagaagagcttgttgacaaaatgaagcaatggagatgtcctcctgatattataacttacagaacattatttagtggttattgtaagataggtgacatggatagagctagccgcattctgaatgaactggaaaatttaggttttgctcctacaattgaatttttcaattctttgataactggacacttcatagctaagcaacatggaaaggtgaatgatatactctttgaaatgagtaataggggactttctcctaacacggtcgcatatggagctctgattgctggatggtgtaaagagggagatttgcatacagcctataacttatatcttgaaatgattgagaaaggtctggtaccaaatctttttatttgcagttctttagtgagttgtttctacaggaagggaaagtttgatgaggcaaatttagtgttgcaaaatcttgtgggtactgacatgattccagatatcagtgcgcccagacttgagatagggaaagtagcaaatttcattgataccgttgctggtggaaatcatcattctgcaaaaatcatgtggaacattgttatttttggtctatgcaaattgggaaggattgaagatgctaaaaacttgttggcagatctaaaagacaaggggtttgttgctgataatttcacttattctagcctcatccatggttgttctgcttcaggatttgttgatgtagcttttgatttgagggatacaatgttgagtgttggtctcactccaaatatagtaacctacaattctcttatatatggtctctgcaagtctggggagttatccagggctgtcagtctttttaagaagttgtggacaaagggtatatcccctaatgctatcacatataatacattaattgataagcattgcaaggatggttacataaccgaggcctttaaactaaagcaaaggatgatagaggaaggtattcatcctactgtgttcacctattctatactgattaatggtctctgtactcaaggctatatggaagaagcaatcaagcttcttgatcaaatgattgagaataatgtggatccaaattatgtcacatattggacactgattcaaggttatgttagatgtggtaacatgatagagatttcaaagatttatgataagatgcatatccatggacttctgcccaccaatgtttctggggatgtaaaacaatcatgtcctgctatacacaacccgaatagagaaacatgtcagatgaagatgcacagccagtgctagctgctatcacattctttgcatgtctacttcttttgaaagatggcagtgacttatgtttgtatgaggagcaaatcatgggacccatttctatcttgggatgatatcactatgtgctcaacatgcaagtctcaatcactttccagcaatataattgtctaattgtcttctgcgaaggggcctggtcatatcatgagaaatgtttccaacctccctcacatgtcagccaagtggtatcttctaactacaggctggattggctttctaagtgcagagacttgttgctggtgactttgccccttttatctggacttaggaatggcaatactcagcttctgctgggaatttgctgggtatatcggctacaaactgtcaagccatcttaagtcttatcaagtgatagcatgcatatcggtcttctcgctgcagctgttcatgccgtttaaacaattagtcggcttacaattttctacagcccaaggcaagcccttcagattttgtcataccgcttgcaaagtctgttaagactgtatactataccagtgtatctgtggggatgtgtttcaagatgctttttgagacaggagagtctagcgtgaggagataagttcaaatctgtttgcaacatcacctcgttattgaagtgggagaaacgaaagacgactagtctttttcgtggtctcgatccacattctattccagcagaagaactgtcggcatctttgaggtacacgctacattccatcaatattgcagtccgtatcctatccacgattgttcttcatggatcaggctttaagtatggttcatgctcaaatatatggcagcagagttcctactgaagtatatgacagtcccagagcaaggtttaccctctttttatacctaggaaaaatgtttgcacaggtggtgaagaaaccccattgacagaaagtggttcgagttactttggagctgactctggattctgtcaagaaacagtcttttggttccaagagaagcaatagttttagtttctctggtgcatcttctcactccatggagaggcatcgatatttgcagagaggaatgttgtcgtcatcaaaggcccttcgaactgcttttgaatcgaacattgcttcaaggtcagaaaagcaagcgcagccgctaaacagattgatttgaagtgaagttcagccgtatcatcagacatcatgcacacaaccatcatggtaaattcctgttcagcacgcacagtaggtctccgtgtgctctgtacggcctagtgctgctgcgctagctggttgggtgcgtccgtgcgtggacgcgctgtagcaaccagggcacccctgtccatggtcgcgatcgcggcctccgctggcctggcccttggcgtgtgcggggcgtagagacggaggagaatgttgtactatgtgcgggcgcggcgagcgaagccggctggaccagaccagaccacaccagggccagagccagggccacgtggcattggctcggcgtagagaacgtcctcccaatatctatgaatttactacaatatacgtctcattatttttagattcatatatgtatccatcacgggggcctccggcctcgttatagcaagtatgggctgactgtaatataatatccaactccgattcaaaactgtaatgtttattacaaaatttgacttagaagtagtgtctaaaaagtggca

SEQ ID NO: 70398 - DNA, 4670 bp, Zea Mays
cctcctccgcacggacctgacgcggggcacggtcgaggacggcggcgcagggcggggtggaggtctccaggacgcaaggcactagcgggctcctccctcccgcgcgggcaccaacggcgagcggaggactggcgctggcaatggctaatggcgcgaagcaacagctggtacgttctgcacttctgctccacctccctaaaatcttggccgagctccgccactgaccatccccacttgtttccccagatacgctgccgcctcctatcgctccccttcctccgccgcggcatccactcctccgtgccaacttcggtcggcgccgctacagatgctacactcctgggtcgcctcacccgcctcctcctcctccaccgtttctctgccgtcgctcgcctcctctcctcctcggcccccctcacccctgcactcctccacgcggcgctgcgccgggtccgcctcgacgccgacgccgcggtgcacctcttccgcctcgcccctttccccccttccctcctcgcgcacgcccagctgctccacatcctcgtccgcgcccggcgctccgccgacgcccgcgcgatcctggcatccctcctctccgcacggcccccggctccgcctctctttccgcacctcgtcgaggtatataaggagttctccttctccgcagcctcattcgacctgctcctccgtgcacttgccaacgccggccaactcgacggcgccctccaggtgttcgacgaaatgcgaacgctcgggtgccgccttagcatgcggtcctgcaacagtatactcaacaggttagcacagactggggacctgggcgccacagtggcagtgtttgagcagatgcagcgtgcaggggctctgccagacaagttcacggtggcgattatggcaaaggcttactgcaaggttaagggggtggtgcatgcattggagttcgtggaggagatgacaaagatgggtgtggaggtgaacctagtggcgtaccatgcggtgatgaatggctattgtgaggtggggcagaccaacgatgcaagaaggatgttggactcgctgcctgggagaggtttttcaccgaatatagttacatatacattgcttgtgaagggatattgtaatgagaagaacatggaggaggctgagggggttgttcaggagattaggaagaataagcagcttgtggttgatgaggctgtttttggtgcagtgatcaatggctattgccaaatgggaagaatggaggatgcagctcgattattgaatgagatggtggattctaggctccaggttaatttgtttgtgtataacataatgattaatggatattgcaagttggggagaatggtggaagcacataacattttgcatgaaatgacaggtgttggtgtgaggcctgacacatacagttacaatagcctagttgatgggtattgcaaaaagggtttgatgaacaaggctttcgaaacatataatacaatgttaaggaatggattcgcggcgacgacattaacatataatgccctcctaaaaggtttttgctcgcttggctcaatcgatgatgcgctcagactttggttcctgatgttgaagaaaggtattgcacctaatgaaatcagttgtagcaccttgcttgatggtttcttcaagtcaggtaaaactgagaaggccttaaatctttggaaagaaaccttagcaaggggtttagcaaaaaatacaaccacatttaacacagttatcaatgggttgtgtaagattgagaggatgcctgaagcagaagagcttgttgacaaaatgaagcaatggagatgtcctcctgatattataacttacagaacattatttagtggttattgtaagataggtgacatggatagagctagccgcattctgaatgaactggaaaatttaggttttgctcctacaattgaatttttcaattctttgataactggacacttcatagctaagcaacatggaaaggtgaatgatatactctttgaaatgagtaataggggactttctcctaacacggtcgcatatggagctctgattgctggatggtgtaaagagggagatttgcatacagcctataacttatatcttgaaatgattgagaaaggtctggtaccaaatctttttatttgcagttctttagtgagttgtttctacaggaagggaaagtttgatgaggcaaatttagtgttgcaaaatcttgtgggtactgacatgattccagatatcagtgcgcccagacttgagatagggaaagtagcaaatttcattgataccgttgctggtggaaatcatcattctgcaaaaatcatgtggaacattgttatttttggtctatgcaaattgggaaggattgaagatgctaaaaacttgttggcagatctaaaagacaaggggtttgttgctgataatttcacttattctagcctcatccatggttgttctgcttcaggatttgttgatgtagcttttgatttgagggatacaatgttgagtgttggtctcactccaaatatagtaacctacaattctcttatatatggtctctgcaagtctggggagttatccagggctgtcagtctttttaagaagttgtggacaaagggtatatcccctaatgctatcacatataatacattaattgataagcattgcaaggatggttacataaccgaggcctttaaactaaagcaaaggatgatagaggaaggtattcatcctactgtgttcacctattctatactgattaatggtctctgtactcaaggctatatggaagaagcaatcaagcttcttgatcaaatgattgagaataatgtggatccaaattatgtcacatattggacactgattcaaggttatgttagatgtggtaacatgatagagatttcaaagatttatgataagatgcatatccatggacttctgcccaccaatgtttctggggatgtaaaacaatcatgtcctgctatacacaacccgaatagagaaacatgtcagatgaagatgcacagccagtgctagctgctatcacattctttgcatgtctacttcttttgaaagatggcagtgacttatgtttgtatgaggagcaaatcatgggacccatttctatcttgggatgatatcactatgtgctcaacatgcaagtctcaatcactttccagcaatataattgtctaattgtcttctgcgaaggggcctggtcatatcatgagaaatgtttccaacctccctcacatgtcagccaagtggtatcttctaactacaggctggattggctttctaagtgcagagacttgttgctggtgactttgccccttttatctggacttaggaatggcaatactcagcttctgctgggaatttgctgggtatatcggctacaaactgtcaagccatcttaagtcttatcaagtgatagcatgcatatcggtcttctcgctgcagctgttcatgccgtttaaacaattagtcggcttacaattttctacagcccaaggcaagcccttcagattttgtcataccgcttgcaaagtctgttaagactgtatactataccagtgtatctgtggggatgtgtttcaagatgctttttgagacaggagagtctagcgtgaggagataagttcaaatctgtttgcaacatcacctcgttattgaagtgggagaaacgaaagacgactagtctttttcgtggtctcgatccacattctattccagcagaagaactgtcggcatctttgaggtacacgctacattccatcaatattgcagtccgtatcctatccacgattgttcttcatggatcaggctttaagcaaggtttaccctctttttatacctaggaaaaatgtttgcacaggtggtgaagaaaccccattgacagaaagtggttcgagttactttggagctgactctggattctgtcaagaaacagtcttttggttccaagagaagcaatagttttagtttctctggtgcatcttctcactccatggagaggcatcgatatttgcagagaggaatgttgtcgtcatcaaaggcccttcgaactgcttttgaatcgaacattgcttcaaggtcagaaaagcaagcgcagccgctaaacagattgatttgaagtgaagttcagccgtatcatcagacatcatgcacacaaccatcatggtaaattcctgttcagcacgcacagtaggtctccgtgtgctctgtacggcctagtgctgctgcgctagctggttgggtgcgtccgtgcgtggacgcgctgtagcaaccagggcacccctgtccatggtcgcgatcgcggcctccgctggcctggcccttggcgtgtgcggggcgtagagacggaggagaatgttgtactatgtgcgggcgcggcgagcgaagccggctggaccagaccagaccacaccagggccagagccagggccacgtggcattggctcggcgtagagaacgtcctcccaatatctatgaatttactacaatatacgtctcattatttttagattcatatatgtatccatcacgggggcctccggcctcgttatagcaagtatgggctgactgtaatataatatccaactccgattcaaaactgtaatgtttattacaaaatttgacttagaagtagtgtctaaaaagtggca

SEQ ID NO: 70399 - DNA, 3310 bp, Zea Mays
atctctatgcctccgtccagatattcctcagatactactggaagctcagagtaggtggctgcggcccactgaaatctgccaaatattgtcaaactacaagaagttttccattgcgccagagccaccaaacagacctcaaagtggttcgctgtttctgtttgaccggaaaatattgagatacttccggaaggatggacacaactggagaaagaaaaaggacggaaagacagttaaagaagcacatgagaagctcaaagttggcagtgttgatgtacttcattgctattatgcccatggtgaagagaatgagaacttccaaagacgaacatattggctgcttgaagagggtttcatgaatattgttcttgttcactaccttgaaatcaagggtgccaaacaaagtttcaatcatgctaaagaagctgaagagactgcaggattatctaatgccgatagtcctgcatgctcaaactctttcgctagtcagagccaggtagcctcccgatctatggatgctgaaagcccaattagtggacagatttcggaatatgaagatgctgaaacagataattctcgagcaagctccagataccaccctttcactgagatgcagcagcctgtggatggtaccgtgatgggtaacttctttggcgcttcatctccaagtgtttctgtaaataatctaggttatcttggtgaaatgcaacctacgggagctaattttaccagtcattttgccactcgcaatgacatagctagtgtgttcaatgatactggctctgagttaggaggtggtcccaaaacttcaattgattcagtactgttgggtgaaccatttccagaatatccaggcggcttcatggagtcgacactctattcttctgttgcaacattgggtaacagtctggaagatggtttgcagacatttatgtctgaggctctctacaccaacaatctcactcaaaaggaagttgatgcacttggtgcagcaggcataacatcctcgaagacagagaatgatggttatacagatcaaagtgtcaggtatccacttttaaagcagtcatcatcagacctctttaagatggagccagatggtttgaaaaaattcgacagcttttcaaggtggatgagcaatgagcttccagaggttgttgatttggatatcaagtccagctctgatgctttctggagtactactgaaaccgtgaatgttgctgatggatctagtatacctattaatgagccattggatgtatttgtagtcagcccctcactttcccaagaccagctcttcagtattattgatgtatctccaagctgggcatacaatggcacaaaaaccaaggtcttaattactggtacattcttggcaaaaaaagaagatgtggaaaattgcagctggtcttgtatgtttggagactctgaagtctctgctgaagttttagtggatggctccctgcgttgctatacaccagtacaccattctggacgagtcccattttatgtgacatgttcaaatagagtagcttgtagtgaagtgcgagaatttgagttccgtgattctgagacccattatatggatatctcagataagcatactacaggcataaatgaaatgcatttacgtatccgccttgataagttactttccctggaaccagaagactatgaaaagtatgtcttgagtaatggaaataagtctgagctgatcaacactatcagttcattaatgcttgacaataatttgtctaatctggcattaccatctgatgagaaggaattgtgcactgtacaggatcagaatcttgagaaacaggtgaaagaaaagctatattactggcttatccataagatacatgatgatggaaaaggtccaaatgtcctaggcaaggaaggacaaggtgccattcatttagtagccgcacttggttatgattgggctatcaaaccaatagttgcggcaggagtaaatataaacttcagggatattcgtggatggactgcgcttcactgggctgcatgttgtggaagggagcggacagttggtgccctgatagcaagcggagctgcatctggtgctttaacagatccaacgcagcagtatccatctggaagaactcctgctgatttagcatcagaaaatggtcacaaaggcattgctggttttcttgcagagtctgctttgacaagtcacctctcagctcttacattaaaagagtcgccaagtggcaatgtggaagaaatatgtggattaacagcagctgaaggttttgcagcatcaagttcttcccagcttgcttgtgttaattctcaggaagagtccttaaaagattcacttggtgcagttcgtaaatcaactcaagcagcagccagaatatttcaagcttttagggtggaatcattccacagaaagaaggttattgaatatggagatgatgattgtggattgtctgatgaacgcacactttcacttgtttcccttagaaacccgaaatctggacacggtgattcacattctgctgctgttcgtattcaaaacaagttcagaggatggaaaggaagaaaagagtttatgcttatccggcagaaaattgtgaagatacaggcccatgtacgtggacatcaggtaaggaaaaactatcggaaggtagtctggtctgttggcatcgtggagaaagtcatactgaggtggaggagaaagggaaggggtctgcgaggtttccaacctgagaaacaacttgaaggtccatcatggcagatccaacctgcaaaggctgaggctgaggatgaatatgacttcttgaaggatggcaggaaacaggctacaggcaggttggatagagcactggctcgtgtgcgttccatgaatcagtatcctgaagcaagagaccagtaccgcaggctgcaagcctgtgttaacagcctacgagagtcccaggcgatgcaggacaggatgctggctgattcagctggcaccgatgggggtgatttcatgactgaattggaggagctatgccgggatgatggcgatgccccgatgtcgactatttcttgacatggagcttactatagatcagttaggcagtgacatgttctttaccagactagatgtaaattgttgttactaaatggtctctactcaccgttgaacaccataatataatgatatataccagctaatacatggacttctacagattatgataattgatcagtataatttgtggaattattatattttaaagcaaattaaggtttaacataataaaagtaagcgatatacaattgattcaggtaaaataaatat

SEQ ID NO: 70400 - DNA, 3317 bp, Zea Mays
gatctctatgcctccgtccagatattcctcagatactactggaagctcagagtaggtggctgcggcccactgaaatctgccaaatattgtcaaactacaagaagttttccattgcgccagagccaccaaacagacctcaaagtggttcgctgtttctgtttgaccggaaaatattgagatacttccggaaggatggacacaactggagaaagaaaaaggacggaaagacagttaaagaagcacatgagaagctcaaagttggcagtgttgatgtacttcattgctattatgcccatggtgaagagaatgagaacttccaaagacgaacatattggctgcttgaagagggtttcatgaatattgttcttgttcactaccttgaaatcaagggtgccaaacaaagtttcaatcatgctaaagaagctgaagagactgcaggattatctaatgccgatagtcctgcatgctcaaactctttcgctagtcagagccaggtagcctcccgatctatggatgctgaaagcccaattagtggacagatttcggaatatgaagatgctgaaacagataattctcgagcaagctccagataccaccctttcactgagatgcagcagcctgtggatggtaccgtgatgggtaacttctttggcgcttcatctccaagtgtttctgtaaataatctagctgcaggttatcttggtgaaatgcaacctacgggagctaattttaccagtcattttgccactcgcaatgacatagctagtgtgttcaatgatactggctctgagttaggaggtggtcccaaaacttcaattgattcagtactgttgggtgaaccatttccagaatatccaggcggcttcatggagtcgacactctattcttctgttgcaacattgggtaacagtctggaagatggtttgcagacatttatgtctgaggctctctacaccaacaatctcactcaaaaggaagttgatgcacttggtgcagcaggcataacatcctcgaagacagagaatgatggttatacagatcaaagtgtcaggtatccacttttaaagcagtcatcatcagacctctttaagatggagccagatggtttgaaaaaattcgacagcttttcaaggtggatgagcaatgagcttccagaggttgttgatttggatatcaagtccagctctgatgctttctggagtactactgaaaccgtgaatgttgctgatggatctagtatacctattaatgagccattggatgtatttgtagtcagcccctcactttcccaagaccagctcttcagtattattgatgtatctccaagctgggcatacaatggcacaaaaaccaaggtcttaattactggtacattcttggcaaaaaaagaagatgtggaaaattgcagctggtcttgtatgtttggagactctgaagtctctgctgaagttttagtggatggctccctgcgttgctatacaccagtacaccattctggacgagtcccattttatgtgacatgttcaaatagagtagcttgtagtgaagtgcgagaatttgagttccgtgattctgagacccattatatggatatctcagataagcatactacaggcataaatgaaatgcatttacgtatccgccttgataagttactttccctggaaccagaagactatgaaaagtatgtcttgagtaatggaaataagtctgagctgatcaacactatcagttcattaatgcttgacaataatttgtctaatctggcattaccatctgatgagaaggaattgtgcactgtacaggatcagaatcttgagaaacaggtgaaagaaaagctatattactggcttatccataagatacatgatgatggaaaaggtccaaatgtcctaggcaaggaaggacaaggtgccattcatttagtagccgcacttggttatgattgggctatcaaaccaatagttgcggcaggagtaaatataaacttcagggatattcgtggatggactgcgcttcactgggctgcatgttgtggaagggagcggacagttggtgccctgatagcaagcggagctgcatctggtgctttaacagatccaacgcagcagtatccatctggaagaactcctgctgatttagcatcagaaaatggtcacaaaggcattgctggttttcttgcagagtctgctttgacaagtcacctctcagctcttacattaaaagagtcgccaagtggcaatgtggaagaaatatgtggattaacagcagctgaaggttttgcagcatcaagttcttcccagcttgcttgtgttaattctcaggaagagtccttaaaagattcacttggtgcagttcgtaaatcaactcaagcagcagccagaatatttcaagcttttagggtggaatcattccacagaaagaaggttattgaatatggagatgatgattgtggattgtctgatgaacgcacactttcacttgtttcccttagaaacccgaaatctggacacggtgattcacattctgctgctgttcgtattcaaaacaagttcagaggatggaaaggaagaaaagagtttatgcttatccggcagaaaattgtgaagatacaggcccatgtacgtggacatcaggtaaggaaaaactatcggaaggtagtctggtctgttggcatcgtggagaaagtcatactgaggtggaggagaaagggaaggggtctgcgaggtttccaacctgagaaacaacttgaaggtccatcatggcagatccaacctgcaaaggctgaggctgaggatgaatatgacttcttgaaggatggcaggaaacaggctacaggcaggttggatagagcactggctcgtgtgcgttccatgaatcagtatcctgaagcaagagaccagtaccgcaggctgcaagcctgtgttaacagcctacgagagtcccaggcgatgcaggacaggatgctggctgattcagctggcaccgatgggggtgatttcatgactgaattggaggagctatgccgggatgatggcgatgccccgatgtcgactatttcttgacatggagcttactatagatcagttaggcagtgacatgttctttaccagactagatgtaaattgttgttactaaatggtctctactcaccgttgaacaccataatataatgatatataccagctaatacatggacttctacagattatgataattgatcagtataatttgtggaattattatattttaaagcaaattaaggtttaacataataaaagtaagcgatatacaattgattcaggtaaaataaatat

SEQ ID NO: 70401 - DNA, 3293 bp, Zea Mays
tccaatccgacggcgccgtgtctcaaatcccgtgaagtgcctcgccgcgcagacaaaaaaaaaaaatccccaaatccccttgagaggcctgcaatttttagcctcctgaaccctgcgattggagccggcggtggcggcgccagcgcccgcggtcggatcgtcgcatggccgagattcgcaagtacgccatgtccaaccagcccccagatattcctcagatactactggaagctcagagtaggtggctgcggcccactgaaatctgccaaatattgtcaaactacaagaagttttccattgcgccagagccaccaaacagacctcaaagtggttcgctgtttctgtttgaccggaaaatattgagatacttccggaaggatggacacaactggagaaagaaaaaggacggaaagacagttaaagaagcacatgagaagctcaaagttggcagtgttgatgtacttcattgctattatgcccatggtgaagagaatgagaacttccaaagacgaacatattggctgcttgaagagggtttcatgaatattgttcttgttcactaccttgaaatcaagggtgccaaacaaagtttcaatcatgctaaagaagctgaagagactgcaggattatctaatgccgatagtcctgcatgctcaaactctttcgctagtcagagccaggtagcctcccgatctatggatgctgaaagcccaattagtggacagatttcggaatatgaagatgctgaaacagataattctcgagcaagctccagataccaccctttcactgagatgcagcagcctgtggatggtaccgtgatggaatatccaggcggcttcatggagtcgacactctattcttctgttgcaacattgggtaacagtctggaagatggtttgcagacatttatgtctgaggctctctacaccaacaatctcactcaaaaggaagttgatgcacttggtgcagcaggcataacatcctcgaagacagagaatgatggttatacagatcaaagtgtcaggtatccacttttaaagcagtcatcatcagacctctttaagatggagccagatggtttgaaaaaattcgacagcttttcaaggtggatgagcaatgagcttccagaggttgttgatttggatatcaagtccagctctgatgctttctggagtactactgaaaccgtgaatgttgctgatggatctagtatacctattaatgagccattggatgtatttgtagtcagcccctcactttcccaagaccagctcttcagtattattgatgtatctccaagctgggcatacaatggcacaaaaaccaaggtcttaattactggtacattcttggcaaaaaaagaagatgtggaaaattgcagctggtcttgtatgtttggagactctgaagtctctgctgaagttttagtggatggctccctgcgttgctatacaccagtacaccattctggacgagtcccattttatgtgacatgttcaaatagagtagcttgtagtgaagtgcgagaatttgagttccgtgattctgagacccattatatggatatctcagataagcatactacaggcataaatgaaatgcatttacgtatccgccttgataagttactttccctggaaccagaagactatgaaaagtatgtcttgagtaatggaaataagtctgagctgatcaacactatcagttcattaatgcttgacaataatttgtctaatctggcattaccatctgatgagaaggaattgtgcactgtacaggatcagaatcttgagaaacaggtgaaagaaaagctatattactggcttatccataagatacatgatgatggaaaaggtccaaatgtcctaggcaaggaaggacaaggtgccattcatttagtagccgcacttggttatgattgggctatcaaaccaatagttgcggcaggagtaaatataaacttcagggatattcgtggatggactgcgcttcactgggctgcatgttgtggaagggagcggacagttggtgccctgatagcaagcggagctgcatctggtgctttaacagatccaacgcagcagtatccatctggaagaactcctgctgatttagcatcagaaaatggtcacaaaggcattgctggttttcttgcagagtctgctttgacaagtcacctctcagctcttacattaaaagagtcgccaagtggcaatgtggaagaaatatgtggattaacagcagctgaaggttttgcagcatcaagttcttcccagcttgcttgtgttaattctcaggaagagtccttaaaagattcacttggtgcagttcgtaaatcaactcaagcagcagccagaatatttcaagcttttagggtggaatcattccacagaaagaaggttattgaatatggagatgatgattgtggattgtctgatgaacgcacactttcacttgtttcccttagaaacccgaaatctggacacggtgattcacattctgctgctgttcgtattcaaaacaagttcagaggatggaaaggaagaaaagagtttatgcttatccggcagaaaattgtgaagatacaggcccatgtacgtggacatcaggtaaggaaaaactatcggaaggtagtctggtctgttggcatcgtggagaaagtcatactgaggtggaggagaaagggaaggggtctgcgaggtttccaacctgagaaacaacttgaaggtccatcatggcagatccaacctgcaaaggctgaggctgaggatgaatatgacttcttgaaggatggcaggaaacaggctacaggcaggttggatagagcactggctcgtgtgcgttccatgaatcagtatcctgaagcaagagaccagtaccgcaggctgcaagcctgtgttaacagcctacgagagtcccaggcgatgcaggacaggatgctggctgattcagctggcaccgatgggggtgatttcatgactgaattggaggagctatgccgggatgatggcgatgccccgatgtcgactatttcttgacatggagcttactatagatcagttaggcagtgacatgttctttaccagactagatgtaaattgttgttactaaatggtctctactcaccgttgaacaccataatataatgatatataccagctaatacatggacttctacagattatgataattgatcagtataatttgtggaattattatattttaaagcaaattaaggtttaacataataaaagtaagcgatatacaattgattcaggtaaaataaatat

SEQ ID NO: 70402 - DNA, 3499 bp, Zea Mays
tccaatccgacggcgccgtgtctcaaatcccgtgaagtgcctcgccgcgcagacaaaaaaaaaaaatccccaaatccccttgagaggcctgcaatttttagcctcctgaaccctgcgattggagccggcggtggcggcgccagcgcccgcggtcggatcgtcgcatggccgagattcgcaagtacgccatgtccaaccagcccccagatattcctcagatactactggaagctcagagtaggtggctgcggcccactgaaatctgccaaatattgtcaaactacaagaagttttccattgcgccagagccaccaaacagacctcaaagtggttcgctgtttctgtttgaccggaaaatattgagatacttccggaaggatggacacaactggagaaagaaaaaggacggaaagacagttaaagaagcacatgagaagctcaaagttggcagtgttgatgtacttcattgctattatgcccatggtgaagagaatgagaacttccaaagacgaacatattggctgcttgaagagggtttcatgaatattgttcttgttcactaccttgaaatcaagggtgccaaacaaagtttcaatcatgctaaagaagctgaagagactgcaggattatctaatgccgatagtcctgcatgctcaaactctttcgctagtcagagccaggtagcctcccgatctatggatgctgaaagcccaattagtggacagatttcggaatatgaagatgctgaaacagataattctcgagcaagctccagataccaccctttcactgagatgcagcagcctgtggatggtaccgtgatgggtaacttctttggcgcttcatctccaagtgtttctgtaaataatctagctgcaggttatcttggtgaaatgcaacctacgggagctaattttaccagtcattttgccactcgcaatgacatagctagtgtgttcaatgatactggctctgagttaggaggtggtcccaaaacttcaattgattcagtactgttgggtgaaccatttccagaatatccaggcggcttcatggagtcgacactctattcttctgttgcaacattgggtaacagtctggaagatggtttgcagacatttatgtctgaggctctctacaccaacaatctcactcaaaaggaagttgatgcacttggtgcagcaggcataacatcctcgaagagaatgatggttatacagatcaaagtgtcaggtatccacttttaaagcagtcatcatcagacctctttaagatggagccagatggtttgaaaaaattcgacagcttttcaaggtggatgagcaatgagcttccagaggttgttgatttggatatcaagtccagctctgatgctttctggagtactactgaaaccgtgaatgttgctgatggatctagtatacctattaatgagccattggatgtatttgtagtcagcccctcactttcccaagaccagctcttcagtattattgatgtatctccaagctgggcatacaatggcacaaaaaccaaggtcttaattactggtacattcttggcaaaaaaagaagatgtggaaaattgcagctggtcttgtatgtttggagactctgaagtctctgctgaagttttagtggatggctccctgcgttgctatacaccagtacaccattctggacgagtcccattttatgtgacatgttcaaatagagtagcttgtagtgaagtgcgagaatttgagttccgtgattctgagacccattatatggatatctcagataagcatactacaggcataaatgaaatgcatttacgtatccgccttgataagttactttccctggaaccagaagactatgaaaagtatgtcttgagtaatggaaataagtctgagctgatcaacactatcagttcattaatgcttgacaataatttgtctaatctggcattaccatctgatgagaaggaattgtgcactgtacaggatcagaatcttgagaaacaggtgaaagaaaagctatattactggcttatccataagatacatgatgatggaaaaggtccaaatgtcctaggcaaggaaggacaaggtgccattcatttagtagccgcacttggttatgattgggctatcaaaccaatagttgcggcaggagtaaatataaacttcagggatattcgtggatggactgcgcttcactgggctgcatgttgtggaagggagcggacagttggtgccctgatagcaagcggagctgcatctggtgctttaacagatccaacgcagcagtatccatctggaagaactcctgctgatttagcatcagaaaatggtcacaaaggcattgctggttttcttgcagagtctgctttgacaagtcacctctcagctcttacattaaaagagtcgccaagtggcaatgtggaagaaatatgtggattaacagcagctgaaggttttgcagcatcaagttcttcccagcttgcttgtgttaattctcaggaagagtccttaaaagattcacttggtgcagttcgtaaatcaactcaagcagcagccagaatatttcaagcttttagggtggaatcattccacagaaagaaggttattgaatatggagatgatgattgtggattgtctgatgaacgcacactttcacttgtttcccttagaaacccgaaatctggacacggtgattcacattctgctgctgttcgtattcaaaacaagttcagaggatggaaaggaagaaaagagtttatgcttatccggcagaaaattgtgaagatacaggcccatgtacgtggacatcaggtaaggaaaaactatcggaaggtagtctggtctgttggcatcgtggagaaagtcatactgaggtggaggagaaagggaaggggtctgcgaggtttccaacctgagaaacaacttgaaggtccatcatggcagatccaacctgcaaaggctgaggctgaggatgaatatgacttcttgaaggatggcaggaaacaggctacaggcaggttggatagagcactggctcgtgtgcgttccatgaatcagtatcctgaagcaagagaccagtaccgcaggctgcaagcctgtgttaacagcctacgagagtcccaggcgatgcaggacaggatgctggctgattcagctggcaccgatgggggtgatttcatgactgaattggaggagctatgccgggatgatggcgatgccccgatgtcgactatttcttgacatggagcttactatagatcagttaggcagtgacatgttctttaccagactagatgtaaattgttgttactaaatggtctctactcaccgttgaacaccataatataatgatatataccagctaatacatggacttctacagattatgataattgatcagtataatttgtggaattattatattttaaagcaaattaaggtttaacataataaaagtaagcgatatacaattgattcaggtaaaataaatat

SEQ ID NO: 70403 - DNA, 3582 bp, Zea Mays
ttccaatccgacggcgccgtgtctcaaatcccgtgaagtgcctcgccgcgcagacaaaaaaaaaaaatccccaaatccccttgagaggcctgcaatttttagcctcctgaaccctgcgattggagccggcggtggcggcgccagcgcccgcggtcggatcgtcgcatggccgagattcgcaagtacgccatgtccaaccagcccccagatattcctcagatactactggaagctcagagtaggtggctgcggcccactgaaatctgccaaatattgtcaaactacaagaagttttccattgcgccagagccaccaaacagacctcaaagtggttcgctgtttctgtttgaccggaaaatattgagatacttccggaaggatggacacaactggagaaagaaaaaggacggaaagacagttaaagaagcacatgagaagctcaaagttggcagtgttgatgtacttcattgctattatgcccatggtgaagagaatgagaacttccaaagacgaacatattggctgcttgaagagggtttcatgaatattgttcttgttcactaccttgaaatcaagggtgccaaacaaagtttcaatcatgctaaagaagctgaagagactgcaggattatctaatgccgatagtcctgcatgctcaaactctttcgctagtcagagccaggtagcctcccgatctatggatgctgaaagcccaattagtggacagatttcggaatatgaagatgctgaaacagataattctcgagcaagctccagataccaccctttcactgagatgcagcagcctgtggatggtaccgtgatgggtaacttctttggcgcttcatctccaagtgtttctgtaaataatctagctgcaggttatcttggtgaaatgcaacctacgggagctaattttaccagtcattttgccactcgcaatgacatagctagtgtgttcaatgatactggctctgagttaggaggtggtcccaaaacttcaattgattcagtactgttgggtgaaccatttccagaatatccaggcggcttcatggagtcgacactctattcttctgttgcaacattgggtaacagtctggaagatggtttgcagacatttatgtctgaggctctctacaccaacaatctcactcaaaaggaagttgatgcacttggtgcagcaggcataacatcctcgaagtatcttaagaatgatgccgtagggcattggagtttacctatttccatgagctggtatgatgtaaccctttattttcagacagagaatgatggttatacagatcaaagtgtcaggtatccacttttaaagcagtcatcatcagacctctttaagatggagccagatggtttgaaaaaattcgacagcttttcaaggtggatgagcaatgagcttccagaggttgttgatttggatatcaagtccagctctgatgctttctggagtactactgaaaccgtgaatgttgctgatggatctagtatacctattaatgagccattggatgtatttgtagtcagcccctcactttcccaagaccagctcttcagtattattgatgtatctccaagctgggcatacaatggcacaaaaaccaaggtcttaattactggtacattcttggcaaaaaaagaagatgtggaaaattgcagctggtcttgtatgtttggagactctgaagtctctgctgaagttttagtggatggctccctgcgttgctatacaccagtacaccattctggacgagtcccattttatgtgacatgttcaaatagagtagcttgtagtgaagtgcgagaatttgagttccgtgattctgagacccattatatggatatctcagataagcatactacaggcataaatgaaatgcatttacgtatccgccttgataagttactttccctggaaccagaagactatgaaaagtatgtcttgagtaatggaaataagtctgagctgatcaacactatcagttcattaatgcttgacaataatttgtctaatctggcattaccatctgatgagaaggaattgtgcactgtacaggatcagaatcttgagaaacaggtgaaagaaaagctatattactggcttatccataagatacatgatgatggaaaaggtccaaatgtcctaggcaaggaaggacaaggtgccattcatttagtagccgcacttggttatgattgggctatcaaaccaatagttgcggcaggagtaaatataaacttcagggatattcgtggatggactgcgcttcactgggctgcatgttgtggaagggagcggacagttggtgccctgatagcaagcggagctgcatctggtgctttaacagatccaacgcagcagtatccatctggaagaactcctgctgatttagcatcagaaaatggtcacaaaggcattgctggttttcttgcagagtctgctttgacaagtcacctctcagctcttacattaaaagagtcgccaagtggcaatgtggaagaaatatgtggattaacagcagctgaaggttttgcagcatcaagttcttcccagcttgcttgtgttaattctcaggaagagtccttaaaagattcacttggtgcagttcgtaaatcaactcaagcagcagccagaatatttcaagcttttagggtggaatcattccacagaaagaaggttattgaatatggagatgatgattgtggattgtctgatgaacgcacactttcacttgtttcccttagaaacccgaaatctggacacggtgattcacattctgctgctgttcgtattcaaaacaagttcagaggatggaaaggaagaaaagagtttatgcttatccggcagaaaattgtgaagatacaggcccatgtacgtggacatcaggtaaggaaaaactatcggaaggtagtctggtctgttggcatcgtggagaaagtcatactgaggtggaggagaaagggaaggggtctgcgaggtttccaacctgagaaacaacttgaaggtccatcatggcagatccaacctgcaaaggctgaggctgaggatgaatatgacttcttgaaggatggcaggaaacaggctacaggcaggttggatagagcactggctcgtgtgcgttccatgaatcagtatcctgaagcaagagaccagtaccgcaggctgcaagcctgtgttaacagcctacgagagtcccaggcgatgcaggacaggatgctggctgattcagctggcaccgatgggggtgatttcatgactgaattggaggagctatgccgggatgatggcgatgccccgatgtcgactatttcttgacatggagcttactatagatcagttaggcagtgacatgttctttaccagactagatgtaaattgttgttactaaatggtctctactcaccgttgaacaccataatataatgatatataccagctaatacatggacttctacagattatgataattgatcagtataatttgtggaattattatattttaaagcaaattaaggtttaacataataaaagtaagcgatatacaattgattcaggtaaaataaatat

SEQ ID NO: 70404 - DNA, 3461 bp, Zea Mays
aaatattccaatccgacggcgccgtgtctcaaatcccgtgaagtgcctcgccgcgcagacaaaaaaaaaaaatccccaaatccccttgagaggcctgcaatttttagcctcctgaaccctgcgattggagccggcggtggcggcgccagcgcccgcggtcggatcgtcgcatggccgagattcgcaagtacgccatgtccaaccagcccccagatattcctcagatactactggaagctcagagtaggtggctgcggcccactgaaatctgccaaatattgtcaaactacaagaagttttccattgcgccagagccaccaaacagacctcaaagtggttcgctgtttctgtttgaccggaaaatattgagatacttccggaaggatggacacaactggagaaagaaaaaggacggaaagacagttaaagaagcacatgagaagctcaaagttggcagtgttgatgtacttcattgctattatgcccatggtgaagagaatgagaacttccaaagacgaacatattggctgcttgaagagggtttcatgaatattgttcttgttcactaccttgaaatcaagggtgccaaacaaagtttcaatcatgctaaagaagctgaagagactgcaggattatctaatgccgatagtcctgcatgctcaaactctttcgctagtcagagccaggtagcctcccgatctatggatgctgaaagcccaattagtggacagatttcggaatatgaagatgctgaaacagataattctcgagcaagctccagataccaccctttcactgagatgcagcagcctgtggatggtaccgtgatggctgcaggttatcttggtgaaatgcaacctacgggagctaattttaccagtcattttgccactcgcaatgacatagctagtgtgttcaatgatactggctctgagttaggaggtggtcccaaaacttcaattgattcagtactgttgggtgaaccatttccagaatatccaggcggcttcatggagtcgacactctattcttctgttgcaacattgggtaacagtctggaagatggtttgcagacatttatgtctgaggctctctacaccaacaatctcactcaaaaggaagttgatgcacttggtgcagcaggcataacatcctcgaagacagagaatgatggttatacagatcaaagtgtcaggtatccacttttaaagcagtcatcatcagacctctttaagatggagccagatggtttgaaaaaattcgacagcttttcaaggtggatgagcaatgagcttccagaggttgttgatttggatatcaagtccagctctgatgctttctggagtactactgaaaccgtgaatgttgctgatggatctagtatacctattaatgagccattggatgtatttgtagtcagcccctcactttcccaagaccagctcttcagtattattgatgtatctccaagctgggcatacaatggcacaaaaaccaaggtcttaattactggtacattcttggcaaaaaaagaagatgtggaaaattgcagctggtcttgtatgtttggagactctgaagtctctgctgaagttttagtggatggctccctgcgttgctatacaccagtacaccattctggacgagtcccattttatgtgacatgttcaaatagagtagcttgtagtgaagtgcgagaatttgagttccgtgattctgagacccattatatggatatctcagataagcatactacaggcataaatgaaatgcatttacgtatccgccttgataagttactttccctggaaccagaagactatgaaaagtatgtcttgagtaatggaaataagtctgagctgatcaacactatcagttcattaatgcttgacaataatttgtctaatctggcattaccatctgatgagaaggaattgtgcactgtacaggatcagaatcttgagaaacaggtgaaagaaaagctatattactggcttatccataagatacatgatgatggaaaaggtccaaatgtcctaggcaaggaaggacaaggtgccattcatttagtagccgcacttggttatgattgggctatcaaaccaatagttgcggcaggagtaaatataaacttcagggatattcgtggatggactgcgcttcactgggctgcatgttgtggaagggagcggacagttggtgccctgatagcaagcggagctgcatctggtgctttaacagatccaacgcagcagtatccatctggaagaactcctgctgatttagcatcagaaaatggtcacaaaggcattgctggttttcttgcagagtctgctttgacaagtcacctctcagctcttacattaaaagagtcgccaagtggcaatgtggaagaaatatgtggattaacagcagctgaaggttttgcagcatcaagttcttcccagcttgcttgtgttaattctcaggaagagtccttaaaagattcacttggtgcagttcgtaaatcaactcaagcagcagccagaatatttcaagcttttagggtggaatcattccacagaaagaaggttattgaatatggagatgatgattgtggattgtctgatgaacgcacactttcacttgtttcccttagaaacccgaaatctggacacggtgattcacattctgctgctgttcgtattcaaaacaagttcagaggatggaaaggaagaaaagagtttatgcttatccggcagaaaattgtgaagatacaggcccatgtacgtggacatcaggtaaggaaaaactatcggaaggtagtctggtctgttggcatcgtggagaaagtcatactgaggtggaggagaaagggaaggggtctgcgaggtttccaacctgagaaacaacttgaaggtccatcatggcagatccaacctgcaaaggctgaggctgaggatgaatatgacttcttgaaggatggcaggaaacaggctacaggcaggttggatagagcactggctcgtgtgcgttccatgaatcagtatcctgaagcaagagaccagtaccgcaggctgcaagcctgtgttaacagcctacgagagtcccaggcgatgcaggacaggatgctggctgattcagctggcaccgatgggggtgatttcatgactgaattggaggagctatgccgggatgatggcgatgccccgatgtcgactatttcttgacatggagcttactatagatcagttaggcagtgacatgttctttaccagactagatgtaaattgttgttactaaatggtctctactcaccgttgaacaccataatataatgatatataccagctaatacatggacttctacagattatgataattgatcagtataatttgtggaattattatattttaaagcaaattaaggtttaacataataaaagtaagcgatatacaattgattcaggtaaaataaatat

SEQ ID NO: 70405 - DNA, 3490 bp, Zea Mays
agcaaatattccaatccgacggcgccgtgtctcaaatcccgtgaagtgcctcgccgcgcagacaaaaaaaaaaaatccccaaatccccttgagaggcctgcaatttttagcctcctgaaccctgcgattggagccggcggtggcggcgccagcgcccgcggtcggatcgtcgcatggccgagattcgcaagtacgccatgtccaaccagcccccagatattcctcagatactactggaagctcagagtaggtggctgcggcccactgaaatctgccaaatattgtcaaactacaagaagttttccattgcgccagagccaccaaacagacctcaaagtggttcgctgtttctgtttgaccggaaaatattgagatacttccggaaggatggacacaactggagaaagaaaaaggacggaaagacagttaaagaagcacatgagaagctcaaagttggcagtgttgatgtacttcattgctattatgcccatggtgaagagaatgagaacttccaaagacgaacatattggctgcttgaagagggtttcatgaatattgttcttgttcactaccttgaaatcaagggtgccaaacaaagtttcaatcatgctaaagaagctgaagagactgcaggattatctaatgccgatagtcctgcatgctcaaactctttcgctagtcagagccaggtagcctcccgatctatggatgctgaaagcccaattagtggacagatttcggaatatgaagatgctgaaacagataattctcgagcaagctccagataccaccctttcactgagatgcagcagcctgtggatggtaccgtgatgggtaacttctttggcgcttcatctccaagtgtttctgtaaataatctagctgcaggttatcttggtgaaatgcaacctacgggagctaattttaccagtcattttgccactcgcaatgacatagctagtgtgttcaatgatactggctctgagttaggaggtggtcccaaaacttcaattgattcagtactgttgggtgaaccatttccagaatatccaggcggcttcatggagtcgacactctattcttctgttgcaacattgggtaacagtctggaagatggtttgcagacatttatgtctgaggctctctacaccaacaatctcactcaaaaggaagttgatgcacttggtgcagcaggcataacatcctcgaagatcaaagtgtcaggtatccacttttaaagcagtcatcatcagacctctttaagatggagccagatggtttgaaaaaattcgacagcttttcaaggtggatgagcaatgagcttccagaggttgttgatttggatatcaagtccagctctgatgctttctggagtactactgaaaccgtgaatgttgctgatggatctagtatacctattaatgagccattggatgtatttgtagtcagcccctcactttcccaagaccagctcttcagtattattgatgtatctccaagctgggcatacaatggcacaaaaaccaaggtcttaattactggtacattcttggcaaaaaaagaagatgtggaaaattgcagctggtcttgtatgtttggagactctgaagtctctgctgaagttttagtggatggctccctgcgttgctatacaccagtacaccattctggacgagtcccattttatgtgacatgttcaaatagagtagcttgtagtgaagtgcgagaatttgagttccgtgattctgagacccattatatggatatctcagataagcatactacaggcataaatgaaatgcatttacgtatccgccttgataagttactttccctggaaccagaagactatgaaaagtatgtcttgagtaatggaaataagtctgagctgatcaacactatcagttcattaatgcttgacaataatttgtctaatctggcattaccatctgatgagaaggaattgtgcactgtacaggatcagaatcttgagaaacaggtgaaagaaaagctatattactggcttatccataagatacatgatgatggaaaaggtccaaatgtcctaggcaaggaaggacaaggtgccattcatttagtagccgcacttggttatgattgggctatcaaaccaatagttgcggcaggagtaaatataaacttcagggatattcgtggatggactgcgcttcactgggctgcatgttgtggaagggagcggacagttggtgccctgatagcaagcggagctgcatctggtgctttaacagatccaacgcagcagtatccatctggaagaactcctgctgatttagcatcagaaaatggtcacaaaggcattgctggttttcttgcagagtctgctttgacaagtcacctctcagctcttacattaaaagagtcgccaagtggcaatgtggaagaaatatgtggattaacagcagctgaaggttttgcagcatcaagttcttcccagcttgcttgtgttaattctcaggaagagtccttaaaagattcacttggtgcagttcgtaaatcaactcaagcagcagccagaatatttcaagcttttagggtggaatcattccacagaaagaaggttattgaatatggagatgatgattgtggattgtctgatgaacgcacactttcacttgtttcccttagaaacccgaaatctggacacggtgattcacattctgctgctgttcgtattcaaaacaagttcagaggatggaaaggaagaaaagagtttatgcttatccggcagaaaattgtgaagatacaggcccatgtacgtggacatcaggtaaggaaaaactatcggaaggtagtctggtctgttggcatcgtggagaaagtcatactgaggtggaggagaaagggaaggggtctgcgaggtttccaacctgagaaacaacttgaaggtccatcatggcagatccaacctgcaaaggctgaggctgaggatgaatatgacttcttgaaggatggcaggaaacaggctacaggcaggttggatagagcactggctcgtgtgcgttccatgaatcagtatcctgaagcaagagaccagtaccgcaggctgcaagcctgtgttaacagcctacgagagtcccaggcgatgcaggacaggatgctggctgattcagctggcaccgatgggggtgatttcatgactgaattggaggagctatgccgggatgatggcgatgccccgatgtcgactatttcttgacatggagcttactatagatcagttaggcagtgacatgttctttaccagactagatgtaaattgttgttactaaatggtctctactcaccgttgaacaccataatataatgatatataccagctaatacatggacttctacagattatgataattgatcagtataatttgtggaattattatattttaaagcaaattaaggtttaacataataaaagtaagcgatatacaattgattcaggtaaaataaatat

SEQ ID NO: 70406 - DNA, 3526 bp, Zea Mays
ccaggggcgataacggtaatttcccactagccccctttcttctacgactgcaccctttttcccactcgtcacactcaccgccgtcgcagcaaatattccaatccgacggcgccgtgtctcaaatcccgtgaagtgcctcgccgcgcagacaaaaaaaaaaaatccccaaatccccttgagaggcctgcaatttttagcctcctgaaccctgcgattggagccggcggtggcggcgccagcgcccgcggtcggatcgtcgcatggccgagattcgcaagtacgccatgtccaaccagcccccagatattcctcagatactactggaagctcagagtaggtggctgcggcccactgaaatctgccaaatattgtcaaactacaagaagttttccattgcgccagagccaccaaacagacctcaaagtggttcgctgtttctgtttgaccggaaaatattgagatacttccggaaggatggacacaactggagaaagaaaaaggacggaaagacagttaaagaagcacatgagaagctcaaagttggcagtgttgatgtacttcattgctattatgcccatggtgaagagaatgagaacttccaaagacgaacatattggctgcttgaagagggtttcatgaatattgttcttgttcactaccttgaaatcaagggtgccaaacaaagtttcaatcatgctaaagaagctgaagagactgcaggattatctaatgccgatagtcctgcatgctcaaactctttcgctagtcagagccagataattctcgagcaagctccagataccaccctttcactgagatgcagcagcctgtggatggtaccgtgatgggtaacttctttggcgcttcatctccaagtgtttctgtaaataatctagctgcaggttatcttggtgaaatgcaacctacgggagctaattttaccagtcattttgccactcgcaatgacatagctagtgtgttcaatgatactggctctgagttaggaggtggtcccaaaacttcaattgattcagtactgttgggtgaaccatttccagaatatccaggcggcttcatggagtcgacactctattcttctgttgcaacattgggtaacagtctggaagatggtttgcagacatttatgtctgaggctctctacaccaacaatctcactcaaaaggaagttgatgcacttggtgcagcaggcataacatcctcgaagacagagaatgatggttatacagatcaaagtgtcaggtatccacttttaaagcagtcatcatcagacctctttaagatggagccagatggtttgaaaaaattcgacagcttttcaaggtggatgagcaatgagcttccagaggttgttgatttggatatcaagtccagctctgatgctttctggagtactactgaaaccgtgaatgttgctgatggatctagtatacctattaatgagccattggatgtatttgtagtcagcccctcactttcccaagaccagctcttcagtattattgatgtatctccaagctgggcatacaatggcacaaaaaccaaggtcttaattactggtacattcttggcaaaaaaagaagatgtggaaaattgcagctggtcttgtatgtttggagactctgaagtctctgctgaagttttagtggatggctccctgcgttgctatacaccagtacaccattctggacgagtcccattttatgtgacatgttcaaatagagtagcttgtagtgaagtgcgagaatttgagttccgtgattctgagacccattatatggatatctcagataagcatactacaggcataaatgaaatgcatttacgtatccgccttgataagttactttccctggaaccagaagactatgaaaagtatgtcttgagtaatggaaataagtctgagctgatcaacactatcagttcattaatgcttgacaataatttgtctaatctggcattaccatctgatgagaaggaattgtgcactgtacaggatcagaatcttgagaaacaggtgaaagaaaagctatattactggcttatccataagatacatgatgatggaaaaggtccaaatgtcctaggcaaggaaggacaaggtgccattcatttagtagccgcacttggttatgattgggctatcaaaccaatagttgcggcaggagtaaatataaacttcagggatattcgtggatggactgcgcttcactgggctgcatgttgtggaagggagcggacagttggtgccctgatagcaagcggagctgcatctggtgctttaacagatccaacgcagcagtatccatctggaagaactcctgctgatttagcatcagaaaatggtcacaaaggcattgctggttttcttgcagagtctgctttgacaagtcacctctcagctcttacattaaaagagtcgccaagtggcaatgtggaagaaatatgtggattaacagcagctgaaggttttgcagcatcaagttcttcccagcttgcttgtgttaattctcaggaagagtccttaaaagattcacttggtgcagttcgtaaatcaactcaagcagcagccagaatatttcaagcttttagggtggaatcattccacagaaagaaggttattgaatatggagatgatgattgtggattgtctgatgaacgcacactttcacttgtttcccttagaaacccgaaatctggacacggtgattcacattctgctgctgttcgtattcaaaacaagttcagaggatggaaaggaagaaaagagtttatgcttatccggcagaaaattgtgaagatacaggcccatgtacgtggacatcaggtaaggaaaaactatcggaaggtagtctggtctgttggcatcgtggagaaagtcatactgaggtggaggagaaagggaaggggtctgcgaggtttccaacctgagaaacaacttgaaggtccatcatggcagatccaacctgcaaaggctgaggctgaggatgaatatgacttcttgaaggatggcaggaaacaggctacaggcaggttggatagagcactggctcgtgtgcgttccatgaatcagtatcctgaagcaagagaccagtaccgcaggctgcaagcctgtgttaacagcctacgagagtcccaggcgatgcaggacaggatgctggctgattcagctggcaccgatgggggtgatttcatgactgaattggaggagctatgccgggatgatggcgatgccccgatgtcgactatttcttgacatggagcttactatagatcagttaggcagtgacatgttctttaccagactagatgtaaattgttgttactaaatggtctctactcaccgttgaacaccataatataatgatatataccagctaatacatggacttctacagattatgataattgatcagtataatttgtggaattattatattttaaagcaaattaaggtttaacataataaaagtaagcgatatacaattgattcaggtaaaataaatat

SEQ ID NO: 70407 - DNA, 3620 bp, Zea Mays
cagagtcggataggccgtaggcgccaccccaattttcgtcttgttttttttctctcgtcgggtgatttctgcttttcggtttcccaataccagtaccaggggcgataacgcaaatattccaatccgacggcgccgtgtctcaaatcccgtgaagtgcctcgccgcgcagacaaaaaaaaaaaatccccaaatccccttgagaggcctgcaatttttagcctcctgaaccctgcgattggagccggcggtggcggcgccagcgcccgcggtcggatcgtcgcatggccgagattcgcaagtacgccatgtccaaccagcccccagatattcctcagatactactggaagctcagagtaggtggctgcggcccactgaaatctgccaaatattgtcaaactacaagaagttttccattgcgccagagccaccaaacagacctcaaagtggttcgctgtttctgtttgaccggaaaatattgagatacttccggaaggatggacacaactggagaaagaaaaaggacggaaagacagttaaagaagcacatgagaagctcaaagttggcagtgttgatgtacttcattgctattatgcccatggtgaagagaatgagaacttccaaagacgaacatattggctgcttgaagagggtttcatgaatattgttcttgttcactaccttgaaatcaagggtgccaaacaaagtttcaatcatgctaaagaagctgaagagactgcaggattatctaatgccgatagtcctgcatgctcaaactctttcgctagtcagagccaggtagcctcccgatctatggatgctgaaagcccaattagtggacagatttcggaatatgaagatgctgaaacagataattctcgagcaagctccagataccaccctttcactgagatgcagcagcctgtggatggtaccgtgatgggtaacttctttggcgcttcatctccaagtgtttctgtaaataatctagctgcaggttatcttggtgaaatgcaacctacgggagctaattttaccagtcattttgccactcgcaatgacatagctagtgtgttcaatgatactggctctgagttaggaggtggtcccaaaacttcaattgattcagtactgttgggtgaaccatttccagaatatccaggcggcttcatggagtcgacactctattcttctgttgcaacattgggtaacagtctggaagatggtttgcagacatttatgtctgaggctctctacaccaacaatctcactcaaaaggaagttgatgcacttggtgcagcaggcataacatcctcgaagacagagaatgatggttatacagatcaaagtgtcaggtatccacttttaaagcagtcatcatcagacctctttaagatggagccagatggtttgaaaaaattcgacagcttttcaaggtggatgagcaatgagcttccagaggttgttgatttggatatcaagtccagctctgatgctttctggagtactactgaaaccgtgaatgttgctgatggatctagtatacctattaatgagccattggatgtatttgtagtcagcccctcactttcccaagaccagctcttcagtattattgatgtatctccaagctgggcatacaatggcacaaaaaccaaggtcttaattactggtacattcttggcaaaaaaagaagatgtggaaaattgcagctggtcttgtatgtttggagactctgaagtctctgctgaagttttagtggatggctccctgcgttgctatacaccagtacaccattctggacgagtcccattttatgtgacatgttcaaatagagtagcttgtagtgaagtgcgagaatttgagttccgtgattctgagacccattatatggatatctcagataagcatactacaggcataaatgaaatgcatttacgtatccgccttgataagttactttccctggaaccagaagactatgaaaagtatgtcttgagtaatggaaataagtctgagctgatcaacactatcagttcattaatgcttgacaataatttgtctaatctggcattaccatctgatgagaaggaattgtgcactgtacaggatcagaatcttgagaaacaggtgaaagaaaagctatattactggcttatccataagatacatgatgatggaaaaggtccaaatgtcctaggcaaggaaggacaaggtgccattcatttagtagccgcacttggttatgattgggctatcaaaccaatagttgcggcaggagtaaatataaacttcagggatattcgtggatggactgcgcttcactgggctgcatgttgtggaagggagcggacagttggtgccctgatagcaagcggagctgcatctggtgctttaacagatccaacgcagcagtatccatctggaagaactcctgctgatttagcatcagaaaatggtcacaaaggcattgctggttttcttgcagagtctgctttgacaagtcacctctcagctcttacattaaaagagtcgccaagtggcaatgtggaagaaatatgtggattaacagcagctgaaggttttgcagcatcaagttcttcccagcttgcttgtgttaattctcaggaagagtccttaaaagattcacttggtgcagttcgtaaatcaactcaagcagcagccagaatatttcaagcttttagggtggaatcattccacagaaagaaggttattgaatatggagatgatgattgtggattgtctgatgaacgcacactttcacttgtttcccttagaaacccgaaatctggacacggtgattcacattctgctgctgttcgtattcaaaacaagttcagaggatggaaaggaagaaaagagtttatgcttatccggcagaaaattgtgaagatacaggcccatgtacgtggacatcaggtaaggaaaaactatcggaaggtagtctggtctgttggcatcgtggagaaagtcatactgaggtggaggagaaagggaaggggtctgcgaggtttccaacctgagaaacaacttgaaggtccatcatggcagatccaacctgcaaaggctgaggctgaggatgaatatgacttcttgaaggatggcaggaaacaggctacaggcaggttggatagagcactggctcgtgtgcgttccatgaatcagtatcctgaagcaagagaccagtaccgcaggctgcaagcctgtgttaacagcctacgagagtcccaggcgatgcaggacaggatgctggctgattcagctggcaccgatgggggtgatttcatgactgaattggaggagctatgccgggatgatggcgatgccccgatgtcgactatttcttgacatggagcttactatagatcagttaggcagtgacatgttctttaccagactagatgtaaattgttgttactaaatggtctctactcaccgttgaacaccataatataatgatatataccagctaatacatggacttctacagattatgataattgatcagtataatttgtggaattattatattttaaagcaaattaaggtttaacataataaaagtaagcgatatacaattgattcaggtaaaataaatat

SEQ ID NO: 70408 - DNA, 2908 bp, Zea Mays
tccaatccgacggcgccgtgtctcaaatcccgtgaagtgcctcgccgcgcagacaaaaaaaaaaaatccccaaatccccttgagaggcctgcaatttttagcctcctgaaccctgcgattggagccggcggtggcggcgccagcgcccgcggtcggatcgtcgcatggccgagattcgcaagtacgccatgtccaaccagcccccagatattcctcagatactactggaagctcagagtaggtggctgcggcccactgaaatctgccaaatattgtcaaactacaagaagttttccattgcgccagagccaccaaacagacctcaaagtggttcgctgtttctgtttgaccggaaaatattgagatacttccggaaggatggacacaactggagaaagaaaaaggacggaaagacagttaaagaagcacatgagaagctcaaagttggcagtgttgatgtacttcattgctattatgcccatggtgaagagaatgagaacttccaaagacgaacatattggctgcttgaagagggtttcatgaatattgttcttgttcactaccttgaaatcaagggtgccaaacaaagtttcaatcatgctaaagaagctgaagagactgcaggattatctaatgccgatagtcctgcatgctcaaactctttcgctagtcagagccaggtagcctcccgatctatggatgctgaaagcccaattagtggacagatttcggaatatgaagatgctgaaacagataattctcgagcaagctccagataccaccctttcactgagatgcagcagcctgtggatggtaccgtgatgggtaacttctttggcgcttcatctccaagtgtttctgtaaataatctaggcaagcttttcactccaccttcaaatattatatataaatataggcatttagctcatgtttgactttctacagctgcaggttatcttggtgaaatgcaacctacgggagctaattttaccagtcattttgccactcgcaatgacatagctagtgtgttcaatgatactggctctgagttaggaggtggtcccaaaacttcaattgattcagtactgttgggtgaaccatttccagaatatccaggcggcttcatggagtcgacactctattcttctgttgcaacattgggtaacagtctggaagatggtttgcagacatttatgtctgaggctctctacaccaacaatctcactcaaaaggaagttgatgcacttggtgcagcaggcataacatcctcgaagatcaaagtgtcaggtatccacttttaaagcagtcatcatcagacctctttaagatggagccagatggtttgaaaaaattcgacagcttttcaaggtggatgagcaatgagcttccagaggttgttgatttggatatcaagtccagctctgatgctttctggagtactactgaaaccgtgaatgttgctgatggatctagtatacctattaatgagccattggatgtatttgtagtcagcccctcactttcccaagaccagctcttcagtattattgatgtatctccaagctgggcatacaatggcacaaaaaccaaggtcttaattactggtacattcttggcaaaaaaagaagatgtggaaaattgcagctggtcttgtatgtttggagactctgaagtctctgctgaagttttagtggatggctccctgcgttgctatacaccagtacaccattctggacgagtcccattttatgtgacatgttcaaatagagtagcttgtagtgaagtgcgagaatttgagttccgtgattctgagacccattatatggatatctcagataagcatactacaggcataaatgaaatgcatttacgtatccgccttgataagttactttccctggaaccagaagactatgaaaagtatgtcttgagtaatggaaataagtctgagctgatcaacactatcagttcattaatgcttgacaataatttgtctaatctggcattaccatctgatgagaaggaattgtgcactgtacaggatcagaatcttgagaaacaggtgaaagaaaagctatattactggcttatccataagatacatgatgatggaaaaggtccaaatgtcctaggcaaggaaggacaaggtgccattcatttagtagccgcacttggttatgattgggctatcaaaccaatagttgcggcaggagtaaatataaacttcagggatattcgtggatggactgcgcttcactgggctgcatgttgtggaagggagcggacagttggtgccctgatagcaagcggagctgcatctggtgctttaacagatccaacgcagcagtatccatctggaagaactcctgctgatttagcatcagaaaatggtcacaaaggcattgctggttttcttgcagagtctgctttgacaagtcacctctcagctcttacattaaaagagtcgccaagtggcaatgtggaagaaatatgtggattaacagcagctgaaggttttgcagcatcaagttcttcccagcttgcttgtgttaattctcaggaagagtccttaaaagattcacttggtgcagttcgtaaatcaactcaagcagcagccagaatatttcaagcttttagggtggaatcattccacagaaagaaggttattgaatatggagatgatgattgtggattgtctgatgaacgcacactttcacttgtttcccttagaaacccgaaatctggacacggtgattcacattctgctgctgttcgtattcaaaacaagttcagaggatggaaaggaagaaaagagtttatgcttatccggcagaaaattgtgaagatacaggcgaaaatcaaagtatgtggtggtggtggtcgtagttatttgaggcgcacttctttt

SEQ ID NO: 70409 - DNA, 1825 bp, Zea Mays
ggggctaacctccgagcggcgaggatgaggggcggcggcaggatgattgacgatgaagagcgggtgggccacgcggagatcccgaccagcttcggccccgagctgcgcgcctgcctccgatgccgcctcgtcaagacctacgactaggaacccttctccgctggcgccgctcccctcccccctcctcacgcctaggcctgcggtctaggttcaccagccttccgttgaagggacggttcgaggactgggggtttcgtttctcctggtgcggtccgttctcggcggcggctaagttcaggcagaacggctgaacgtcgtcaactgcaccacccccaacttcaccagaattatctctttgatggaccccagtaggagttgggcagctcgttggttgagaattggtaggttcattccgggttgctacacacttgctgtttcggaggaacttcaagaagagtatcaggggatttgccaagacaacaacgtgtagtatgtgccacccaagcgatgtctagagctcctgaagcagtatgaataatttagcttatataaaatggtgcatgtgcttgttgccaagcgaactgccctgctttgttgtatctgagtgctaatcaggacccctaattaaccctttcgtgctacgaatgggttttttagccaagatggcataaaacattagcacaaatgtcagacacatgaccaagacaagttcataggccagcaattctgttcaacaaacacctcgtcttcgtcgtacacggatgtggataccaatttgcagattgcgagccacgagcccatctaccagtagcctctccagtgtccatactgagaaatttatcgcaccagcaccactgtcacaatacaatggtacaggtactgcaccgtgcacgtgcccacaagctttcgacatctgcgtgtcagcatcggttatcatcaatcaccaagaatgactggaccgtggcgcgctggtcctctgcgctggtcctccgggaggtcagatgatacgggcgtaacttatctaagaacaatcaaataaataatttaattcggctgagcacaaagtaacatttgacccgattaataatccaacagtcaatgtttaccagtactttaaagagaagaacacagcactaccaaatgctgaagtaattcacacaaacagatcaaaagctagtcttacaaaaccatcggtagttacacagcttgatcggtcgacggactccacaaatgacacggtacgaagtctttgcggcaaatcatcagcattcagatccaggtcaatcgaccagtcagcgattctgttgctagaacctctcccacgccttctattgctgaagaagggtaacgagcaccaaaaaatacaaatactcgcatgcggcatgcaatcatacctttcctactctagatgcattagtgcagtatttcatgcaaaacatgaaccattaacttgcaagcctacgtgggtatgttcaaagaacagttggggtagccagataaggatacccttttatgaccataagcatgtcaataaacttgaattgcgtcacaagtgtgtatacagctttaatactcacctgcttaagacatgcgcttatgcattctcgataagacatgtttggcaaaccgcagaaatgaattgacagcacatccagtgcatgcaacgattaattgtgcacatgcagaccttatgatccaaaaacccaaaacaggactatgatagatcagtgcagacacatctaaatccaaatactataatgggggttaacacctatagcatgtagatgcatggggcgatgcataaatcattggaatcttacttgtc

SEQ ID NO: 70410 - DNA, 1822 bp, Zea Mays
ggggctaacctccgagcggcgaggatgaggggcggcggcaggatgattgacgatgaagagcgggtgggccacgcggagatcccgaccagcttcggccccgagctgcgcgcctgcctccgatgccgcctcgtcaagacctacgactaggaacccttctccgctggcgccgctcccctcccccctcctcacgcctaggcctgcggtctaggttcaccagccttccgttgaagggacggttcgaggactgggggtttcgtttctcctggtgcggtccgttctcggcggcggctaagaattatctctttgatggaccccagtaggagttgggcagctcgttggttgagaattggtgacccttgttctcgtgtatcctgcagtttgtttgcctcttcaatctagtgcgttcattccgggttgctacacacttgctgtttcggaggaacttcaagaagagtatcaggggatttgccaagacaacaacgtgtagtatgtgccacccaagcgatgtctagagctcctgaagcagtatgaataatttagcttatataaaatggtgcatgtgcttgttgccaagcgaactgccctgctttgttgtatctgagtgctaatcaggacccctaattaaccctttcgtgctacgaatgggttttttagccaagatggcataaaacattagcacaaatgtcagacacatgaccaagacaagttcataggccagcaattctgttcaacaaacacctcgtcttcgtcgtacacggatgtggataccaatttgcagattgcgagccacgagcccatctaccagtagcctctccagtgtccatactgagaaatttatcgcaccagcaccactgtcacaatacaatggtacaggtactgcaccgtgcacgtgcccacaagctttcgacatctgcgtgtcagcatcggttatcatcaatcaccaagaatgactggaccgtggcgcgctggtcctctgcgctggtcctccgggaggtcagatgatacgggcgtaacttatctaagaacaatcaaataaataatttaattcggctgagcacaaagtaacatttgacccgattaataatccaacagtcaatgtttaccagtactttaaagagaagaacacagcactaccaaatgctgaagtaattcacacaaacagatcaaaagctagtcttacaaaaccatcggtagttacacagcttgatcggtcgacggactccacaaatgacacggtacgaagtctttgcggcaaatcatcagcattcagatccaggtcaatcgaccagtcagcgattctgttgctagaacctctcccacgccttctattgctgaagaagggtaacgagcaccaaaaaatacaaatactcgcatgcggcatgcaatcatacctttcctactctagatgcattagtgcagtatttcatgcaaaacatgaaccattaacttgcaagcctacgtgggtatgttcaaagaacagttggggtagccagataaggatacccttttatgaccataagcatgtcaataaacttgaattgcgtcacaagtgtgtatacagctttaatactcacctgcttaagacatgcgcttatgcattctcgataagacatgtttggcaaaccgcagaaatgaattgacagcacatccagtgcatgcaacgattaattgtgcacatgcagaccttatgatccaaaaacccaaaacaggactatgatagatcagtgcagacacatctaaatccaaatactataatgggggttaacacctatagcatgtagatgcatggggcgatgcataaatcattggaatcttacttgtc

SEQ ID NO: 70411 - DNA, 1881 bp, Zea Mays
ggaagcaggggctaacctccgagcggcgaggatgaggggcggcggcaggatgattgacgatgaagagcgggtgggccacgcggagatcccgaccagcttcggccccgagctgcgcgcctgcctccgatgccgcctcgtcaagacctacgactaggaacccttctccgctggcgccgctcccctcccccctcctcacgcctaggcctgcggtctaggttcaccagccttccgttgaagggacggttcgaggactgggggtttcgtttctcctggtgcggtccgttctcggcggcggctaagttcaggcagaacggctgaacgtcgtcaactgcaccacccccaacttcaccagaattatctctttgatggaccccagtaggagttgggcagctcgttggttgagaattggtgacccttgttctcgtgtatcctgcagtttgtttgcctcttcaatctagtaggttcattccgggttgctacacacttgctgtttcggaggaacttcaagaagagtatcaggggatttgccaagacaacaacgtgtagtatgtgccacccaagcgatgtctagagctcctgaagcagtatgaataatttagcttatataaaatggtgcatgtgcttgttgccaagcgaactgccctgctttgttgtatctgagtgctaatcaggacccctaattaaccctttcgtgctacgaatgggttttttagccaagatggcataaaacattagcacaaatgtcagacacatgaccaagacaagttcataggccagcaattctgttcaacaaacacctcgtcttcgtcgtacacggatgtggataccaatttgcagattgcgagccacgagcccatctaccagtagcctctccagtgtccatactgagaaatttatcgcaccagcaccactgtcacaatacaatggtacaggtactgcaccgtgcacgtgcccacaagctttcgacatctgcgtgtcagcatcggttatcatcaatcaccaagaatgactggaccgtggcgcgctggtcctctgcgctggtcctccgggaggtcagatgatacgggcgtaacttatctaagaacaatcaaataaataatttaattcggctgagcacaaagtaacatttgacccgattaataatccaacagtcaatgtttaccagtactttaaagagaagaacacagcactaccaaatgctgaagtaattcacacaaacagatcaaaagctagtcttacaaaaccatcggtagttacacagcttgatcggtcgacggactccacaaatgacacggtacgaagtctttgcggcaaatcatcagcattcagatccaggtcaatcgaccagtcagcgattctgttgctagaacctctcccacgccttctattgctgaagaagggtaacgagcaccaaaaaatacaaatactcgcatgcggcatgcaatcatacctttcctactctagatgcattagtgcagtatttcatgcaaaacatgaaccattaacttgcaagcctacgtgggtatgttcaaagaacagttggggtagccagataaggatacccttttatgaccataagcatgtcaataaacttgaattgcgtcacaagtgtgtatacagctttaatactcacctgcttaagacatgcgcttatgcattctcgataagacatgtttggcaaaccgcagaaatgaattgacagcacatccagtgcatgcaacgattaattgtgcacatgcagaccttatgatccaaaaacccaaaacaggactatgatagatcagtgcagacacatctaaatccaaatactataatgggggttaacacctatagcatgtagatgcatggggcgatgcataaatcattggaatcttacttgtc

SEQ ID NO: 70412 - DNA, 2699 bp, Zea Mays
ggaagcaggaagcaggggctaacctccgagcggcgaggatgaggggcggcggcaggatgattgacgatgaagagcgggtgggccacgcggagatcccgaccagcttcggccccgagctgcgcgcctgcctccgatgccgcctcgtcaagacctacgactaggaacccttctccgctggcgccgctcccctcccccctcctcacgcctaggcctgcggtctaggttcaccagccttccgttgaagggacggttcgaggactgggggtttcgtttctcctggtgcggtccgttctcggcggcggctaagaattatctctttgatggaccccagtaggagttgggcagctcgttggttgagaattggtgacccttgttctcgtgtatcctgcagtttgtttgcctcttcaatctagtgcgttcatttttgtctttttttttcttcactcgtgcaagggtttagtattttgaactgtgagcgaagtctcacatcaggtgcagtttatattaaatgttgtttatgtagtaactcccttggtttacatggttttccagattagagagcaacatctgtaggaaaggcacttttattttcagttgtcgttcatagcaaaactgcacagctaaggttacctcatgtggcagtgtaaaaagtaaaagagatgaaaaatacatgtttgcattttacttttgtcataacttttaggtggcacctctgtttctgtgcaatacgaattaagagatgttatagtttctacatgatcagcatgtcagttccaaataagtgcctgatgtttatgtttgagcttgtatttagagctaaataaaatcaaggccttgcatcagtttgtttaaagttcacttctgttcttggttcatagtagaatttatttatggatacgtctattcgttgcgctgtggcattattaaccgggatcatgcaaatctgcaggtaggttcattccgggttgctacacacttgctgtttcggaggaacttcaagaagagtatcaggtgaaaactacatacctccattttagaaacggcgatgactaatatacaagcagttatgtgcaagcgtgcaagtagatctctttccgttagatatagatctaaccatatgtcatatttagcatttaaatcctctcactaccgccttaactttataaaaaagctcctaataaaccaaagctcctaataaaccacgattgcacatacggttggatcttagaacggacaaagagggctacttgcacggcttgcatatttgtcactgcctttagaaacacactctacgatttaatgcactactcgagacacgtcgttgttcatcactgcaggggatttgccaagacaacaacgtgtagtatgtgccacccaagcgatgtctagagctcctgaagcagtatgaataatttagcttatataaaatggtgcatgtgcttgttgccaagcgaactgccctgctttgttgtatctgagtgctaatcaggacccctaattaaccctttcgtgctacgaatgggttttttagccaagatggcataaaacattagcacaaatgtcagacacatgaccaagacaagttcataggccagcaattctgttcaacaaacacctcgtcttcgtcgtacacggatgtggataccaatttgcagattgcgagccacgagcccatctaccagtagcctctccagtgtccatactgagaaatttatcgcaccagcaccactgtcacaatacaatggtacaggtactgcaccgtgcacgtgcccacaagctttcgacatctgcgtgtcagcatcggttatcatcaatcaccaagaatgactggaccgtggcgcgctggtcctctgcgctggtcctccgggaggtcagatgatacgggcgtaacttatctaagaacaatcaaataaataatttaattcggctgagcacaaagtaacatttgacccgattaataatccaacagtcaatgtttaccagtactttaaagagaagaacacagcactaccaaatgctgaagtaattcacacaaacagatcaaaagctagtcttacaaaaccatcggtagttacacagcttgatcggtcgacggactccacaaatgacacggtacgaagtctttgcggcaaatcatcagcattcagatccaggtcaatcgaccagtcagcgattctgttgctagaacctctcccacgccttctattgctgaagaagggtaacgagcaccaaaaaatacaaatactcgcatgcggcatgcaatcatacctttcctactctagatgcattagtgcagtatttcatgcaaaacatgaaccattaacttgcaagcctacgtgggtatgttcaaagaacagttggggtagccagataaggatacccttttatgaccataagcatgtcaataaacttgaattgcgtcacaagtgtgtatacagctttaatactcacctgcttaagacatgcgcttatgcattctcgataagacatgtttggcaaaccgcagaaatgaattgacagcacatccagtgcatgcaacgattaattgtgcacatgcagaccttatgatccaaaaacccaaaacaggactatgatagatcagtgcagacacatctaaatccaaatactataatgggggttaacacctatagcatgtagatgcatggggcgatgcataaatcattggaatcttacttgtc

SEQ ID NO: 70413 - DNA, 2758 bp, Zea Mays
ggaagccggaagcaggaagcaggggctaacctccgagcggcgaggatgaggggcggcggcaggatgattgacgatgaagagcgggtgggccacgcggagatcccgaccagcttcggccccgagctgcgcgcctgcctccgatgccgcctcgtcaagacctacgactaggaacccttctccgctggcgccgctcccctcccccctcctcacgcctaggcctgcggtctaggttcaccagccttccgttgaagggacggttcgaggactgggggtttcgtttctcctggtgcggtccgttctcggcggcggctaagttcaggcagaacggctgaacgtcgtcaactgcaccacccccaacttcaccagaattatctctttgatggaccccagtaggagttgggcagctcgttggttgagaattggtgacccttgttctcgtgtatcctgcagtttgtttgcctcttcaatctagtgcgttcatttttgtctttttttttcttcactcgtgcaagggtttagtattttgaactgtgagcgaagtctcacatcaggtgcagtttatattaaatgttgtttatgtagtaactcccttggtttacatggttttccagattagagagcaacatctgtaggaaaggcacttttattttcagttgtcgttcatagcaaaactgcacagctaaggttacctcatgtggcagtgtaaaaagtaaaagagatgaaaaatacatgtttgcattttacttttgtcataacttttaggtggcacctctgtttctgtgcaatacgaattaagagatgttatagtttctacatgatcagcatgtcagttccaaataagtgcctgatgtttatgtttgagcttgtatttagagctaaataaaatcaaggccttgcatcagtttgtttaaagttcacttctgttcttggttcatagtagaatttatttatggatacgtctattcgttgcgctgtggcattattaaccgggatcatgcaaatctgcaggtaggttcattccgggttgctacacacttgctgtttcggaggaacttcaagaagagtatcaggtgaaaactacatacctccattttagaaacggcgatgactaatatacaagcagttatgtgcaagcgtgcaagtagatctctttccgttagatatagatctaaccatatgtcatatttagcatttaaatcctctcactaccgccttaactttataaaaaagctcctaataaaccaaagctcctaataaaccacgattgcacatacggttggatcttagaacggacaaagagggctacttgcacggcttgcatatttgtcactgcctttagaaacacactctacgatttaatgcactactcgagacacgtcgttgttcatcactgcaggggatttgccaagacaacaacgtgtagtatgtgccacccaagcgatgtctagagctcctgaagcagtatgaataatttagcttatataaaatggtgcatgtgcttgttgccaagcgaactgccctgctttgttgtatctgagtgctaatcaggacccctaattaaccctttcgtgctacgaatgggttttttagccaagatggcataaaacattagcacaaatgtcagacacatgaccaagacaagttcataggccagcaattctgttcaacaaacacctcgtcttcgtcgtacacggatgtggataccaatttgcagattgcgagccacgagcccatctaccagtagcctctccagtgtccatactgagaaatttatcgcaccagcaccactgtcacaatacaatggtacaggtactgcaccgtgcacgtgcccacaagctttcgacatctgcgtgtcagcatcggttatcatcaatcaccaagaatgactggaccgtggcgcgctggtcctctgcgctggtcctccgggaggtcagatgatacgggcgtaacttatctaagaacaatcaaataaataatttaattcggctgagcacaaagtaacatttgacccgattaataatccaacagtcaatgtttaccagtactttaaagagaagaacacagcactaccaaatgctgaagtaattcacacaaacagatcaaaagctagtcttacaaaaccatcggtagttacacagcttgatcggtcgacggactccacaaatgacacggtacgaagtctttgcggcaaatcatcagcattcagatccaggtcaatcgaccagtcagcgattctgttgctagaacctctcccacgccttctattgctgaagaagggtaacgagcaccaaaaaatacaaatactcgcatgcggcatgcaatcatacctttcctactctagatgcattagtgcagtatttcatgcaaaacatgaaccattaacttgcaagcctacgtgggtatgttcaaagaacagttggggtagccagataaggatacccttttatgaccataagcatgtcaataaacttgaattgcgtcacaagtgtgtatacagctttaatactcacctgcttaagacatgcgcttatgcattctcgataagacatgtttggcaaaccgcagaaatgaattgacagcacatccagtgcatgcaacgattaattgtgcacatgcagaccttatgatccaaaaacccaaaacaggactatgatagatcagtgcagacacatctaaatccaaatactataatgggggttaacacctatagcatgtagatgcatggggcgatgcataaatcattggaatcttacttgtc

SEQ ID NO: 70414 - DNA, 1065 bp, Zea Mays
gtttcatattttttcccctgtatgagtaggcaatcagtactataagccacatctcatttgccgaggaagaaagcatctctccaaagaagccaacttcgatatcagaggtcgcaaagcagcgcgagctaagcggcacgcttctgagcgaggacgacagcaagatgaagaggcagatatcggacctgaaatccaaggagctcagcggccacgacatctttgcccctccggaggatcccaggccacgcaactcggagaacggctcgacctcgcagactccgggcaaaaatgcacacgtcctgacctctgactctgaactcaccctcatcataattacatgaaccaaaccaacccagttacaaaaaagctgcagtgttgcttactgttggttgtcgtgctcgcaacaggtaagcaacttcaagttcggcgaggccgacgaggacagcgcggtgaagaccgcgaagaagatccccaccaagaagttcaccgacctcgcgggcaatatcttcaagggcgacgacgaggcacccgggacggcggagaagcaccacctgagcacggcgaagctgaaggagatgaccggcagcgacatcttcgcggacggggaggccccctcccgggactacctgggcggaatccgcaagccgcccggcggggagagcagcatcgcgctggtttaacagcagggacaaacaaccagatggacatagcagcccctcccctacatcattcgtttcttcctcatcgccgtcgccgtcgccatcttaggagtgatcttttattagggagttttttttttcgttcattggaggactgatcgattggaacccctggcttgctttcctgtttcccgtgactttcgtcaggttttcgttggtaatcccctccgatggtggtgttgtgtgggtatgacaacaacgatggttatctctaatttaacattgatttggcttgggcttacctgatgcaacaacaaccgccagtggtgcgttgtctgatttccgtgactggatgtctcagctgctgcagagtgcagagggccgggggcgtgacgacgaccacgatgac

SEQ ID NO: 70415 - DNA, 1832 bp, Zea Mays
cgttacggcatgtcccgtcccgtcccagagagagaaaccacgaccaaggccaaggagcaccgctccccgtacatccccagcaggagagggagagagacagagaaggctgtgcgaagggaagaagacccggcgggagagaagggcgacatggagaggccggcgcccgtgaggaagtcccacacgtcgacggcggacctgctggtctggccggaaggtgcgccgcaggagttgcccgccgggtccacgccgccatccaaccgccggccgcaccagccgtcggaggcgctcaggaaggtggtgttcggcgggcaggtgacggaggcggaggccgagagcctcaacaagaggtgagcttccgggcgttttgcccctgccatgttctcttgccggagtggtgggattttttgctctgtttcttgttgtgtcgcctggcgacgagcttctggccttggccactagatctccagagatttacggccccaacactgcggaggtgttctttttctttttttttttgcgcgccgttgttgatctatgcagctgcgggttgagaacttcgttggatttgtttgaggtttgctgcgatatgcgccctagagtcttttaactcggttcttgaagagtttcttttttcagttctggtctataggctccggaaaaggaatggctagtagtgttaccgtaatgtgactatggtttagcccttcatggaattgccatctcaccaactatgttggagtactgcaaactgaccgtagccatcaaaatgctccccgtaaggaaaccatgctctgctcccaagtggaaggagatgacaggaagcggtatatttgcagctgggggcgagggtgaagaagatgaatccgccaatgtctctgcaacttccgtccggacggctccaaagaattatcaggcaatcagtactataagccacatctcatttgccgaggaagaaagcatctctccaaagaagccaacttcgatatcagaggtcgcaaagcagcgcgagctaagcggcacgcttctgagcgaggacgacagcaagatgaagaggcagatatcggacctgaaatccaaggagctcagcggccacgacatctttgcccctccggaggatcccaggccacgcaactcggagaacggctcgacctcgcagactccgggcaaaaatgtaagcaacttcaagttcggcgaggccgacgaggacagcgcggtgaagaccgcgaagaagatccccaccaagaagttcaccgacctcgcgggcaatatcttcaagggcgacgacgaggcacccgggacggcggagaagcaccacctgagcacggcgaagctgaaggagatgaccggcagcgacatcttcgcggacggggaggccccctcccgggactacctgggcggaatccgcaagccgcccggcggggagagcagcatcgcgctggtttaacagcagggacaaacaaccagatggacatagcagcccctcccctacatcattcgtttcttcctcatcgccgtcgccgtcgccatcttaggagtgatcttttattagggagttttttttttcgttcattggaggactgatcgattggaacccctggcttgctttcctgtttcccgtgactttcgtcaggttttcgttggtaatcccctccgatggtggtgttgtgtgggtatgacaacaacgatggttatctctaatttaacattgatttggcttgggcttacctgatgcaacaacaaccgccagtggtgcgttgtctgatttccgtgactggatgtctcagctgctgcagagtgcagagggccgggggcgtgacgacgaccacgatgac

SEQ ID NO: 70416 - DNA, 1885 bp, Zea Mays
cgttacggcatgtcccgtcccgtcccagagagagaaaccacggctgcgcacagcgagttagatagagagagagagagagagagaccaagaccaaggccaaggagcaccgctccccgtacatccccagcaggagagggagagagacagagaaggctgtgcgaagggaagaagacccggcgggagagaagggcgacatggagaggccggcgcccgtgaggaagtcccacacgtcgacggcggacctgctggtctggccggaaggtgcgccgcaggagttgcccgccgggtccacgccgccatccaaccgccggccgcaccagccgtcggaggcgctcaggaaggtggtgttcggcgggcaggtgacggaggcggaggccgagagcctcaacaagaggtgagcttccgggcgttttgcccctgccatgttctcttgccggagtggtgggattttttgctctgtttcttgttgtgtcgcctggcgacgagcttctggccttggccactagatctccagagatttacggccccaacactgcggaggtgttctttttctttttttttttgcgcgccgttgttgatctatgcagctgcgggttgagaacttcgttggatttgtttgaggtttgctgcgatatgcgccctagagtcttttaactcggttcttgaagagtttcttttttcagttctggtctataggctccggaaaaggaatggctagtagtgttaccgtaatgtgactatggtttagcccttcatggaattgccatctcaccaactatgttggagtactgcaaactgaccgtagccatcaaaatgctccccgtaaggaaaccatgctctgctcccaagtggaaggagatgacaggaagcggtatatttgcagctgggggcgagggtgaagaagatgaatccgccaatgtctctgcaacttccgtccggacggctccaaagaattatcaggcaatcagtactataagccacatctcatttgccgaggaagaaagcatctctccaaagaagccaacttcgatatcagaggtcgcaaagcagcgcgagctaagcggcacgcttctgagcgaggacgacagcaagatgaagaggcagatatcggacctgaaatccaaggagctcagcggccacgacatctttgcccctccggaggatcccaggccacgcaactcggagaacggctcgacctcgcagactccgggcaaaaatgcacacgtaagcaacttcaagttcggcgaggccgacgaggacagcgcggtgaagaccgcgaagaagatccccaccaagaagttcaccgacctcgcgggcaatatcttcaagggcgacgacgaggcacccgggacggcggagaagcaccacctgagcacggcgaagctgaaggagatgaccggcagcgacatcttcgcggacggggaggccccctcccgggactacctgggcggaatccgcaagccgcccggcggggagagcagcatcgcgctggtttaacagcagggacaaacaaccagatggacatagcagcccctcccctacatcattcgtttcttcctcatcgccgtcgccgtcgccatcttaggagtgatcttttattagggagttttttttttcgttcattggaggactgatcgattggaacccctggcttgctttcctgtttcccgtgactttcgtcaggttttcgttggtaatcccctccgatggtggtgttgtgtgggtatgacaacaacgatggttatctctaatttaacattgatttggcttgggcttacctgatgcaacaacaaccgccagtggtgcgttgtctgatttccgtgactggatgtctcagctgctgcagagtgcagagggccgggggcgtgacgacgaccacgatgac

SEQ ID NO: 70417 - DNA, 1920 bp, Zea Mays
cgttacggcatgtcccgtcccgtcccagagagagaaaccacggctgcgcacagcgagttagatagagagagagagagagagagaccaagaccaaggccaaggagcaccgctccccgtacatccccagcaggagagggagagagacagagaaggctgtgcgaagggaagaagacccggcgggagagaagggcgacatggagaggccggcgcccgtgaggaagtcccacacgtcgacggcggacctgctggtctggccggaaggtgcgccgcaggagttgcccgccgggtccacgccgccatccaaccgccggccgcaccagccgtcggaggcgctcaggaaggtggtgttcggcgggcaggtgacggaggcggaggccgagagcctcaacaagaggtgagcttccgggcgttttgcccctgccatgttctcttgccggagtggtgggattttttgctctgtttcttgttgtgtcgcctggcgacgagcttctggccttggccactagatctccagagatttacggccccaacactgcggaggtgttctttttctttttttttttgcgcgccgttgttgatctatgcagctgcgggttgagaacttcgttggatttgtttgaggtttgctgcgatatgcgccctagagtcttttaactcggttcttgaagagtttcttttttcagttctggtctataggctccggaaaaggaatggctagtagtgttaccgtaatgtgactatggtttagcccttcatggaattgccatctcaccaactatgttggagtactgcaaactgaccgtagccatcaaaatgctccccgtaagcgctcctggtctgtgtatgtttcggcaagttctgcgaaaccatgctctgctcccaagtggaaggagatgacaggaagcggtatatttgcagctgggggcgagggtgaagaagatgaatccgccaatgtctctgcaacttccgtccggacggctccaaagaattatcaggcaatcagtactataagccacatctcatttgccgaggaagaaagcatctctccaaagaagccaacttcgatatcagaggtcgcaaagcagcgcgagctaagcggcacgcttctgagcgaggacgacagcaagatgaagaggcagatatcggacctgaaatccaaggagctcagcggccacgacatctttgcccctccggaggatcccaggccacgcaactcggagaacggctcgacctcgcagactccgggcaaaaatgcacacgtaagcaacttcaagttcggcgaggccgacgaggacagcgcggtgaagaccgcgaagaagatccccaccaagaagttcaccgacctcgcgggcaatatcttcaagggcgacgacgaggcacccgggacggcggagaagcaccacctgagcacggcgaagctgaaggagatgaccggcagcgacatcttcgcggacggggaggccccctcccgggactacctgggcggaatccgcaagccgcccggcggggagagcagcatcgcgctggtttaacagcagggacaaacaaccagatggacatagcagcccctcccctacatcattcgtttcttcctcatcgccgtcgccgtcgccatcttaggagtgatcttttattagggagttttttttttcgttcattggaggactgatcgattggaacccctggcttgctttcctgtttcccgtgactttcgtcaggttttcgttggtaatcccctccgatggtggtgttgtgtgggtatgacaacaacgatggttatctctaatttaacattgatttggcttgggcttacctgatgcaacaacaaccgccagtggtgcgttgtctgatttccgtgactggatgtctcagctgctgcagagtgcagagggccgggggcgtgacgacgaccacgatgac

SEQ ID NO: 70418 - DNA, 1741 bp, Zea Mays
cgttacggcatgtcccgtcccgtcccagagagagaaaccacggctgcgcacagcgagttagatagagagagagagagagagagaccaagaccaaggccaaggagcaccgctccccgtacatccccagcaggagagggagagagacagagaaggctgtgcgaagggaagaagacccggcgggagagaagggcgacatggagaggccggcgcccgtgaggaagtcccacacgtcgacggcggacctgctggtctggccggaaggtgcgccgcaggagttgcccgccgggtccacgccgccatccaaccgccggccgcaccagccgtcggaggcgctcaggaaggtggtgttcggcgggcaggtgacggaggcggaggccgagagcctcaacaagagttctggtctataggctccggaaaaggaatggctagtagtgttaccgtaatgtgactatggtttagcccttcatggaattgccatctcaccaactatgttggagtactgcaaactgaccgtagccatcaaaatgctccccgtaaggtatgctgactaacgatgagctgtgaaaccaatagttccatttgagatcacttgcactctttaaacgacaacgactaatctggctttcgtgcactatcgatgaacgtcgatcacagcgctcctggtctgtgtatgtttcggcaagttctgcgaaaccatgctctgctcccaagtggaaggagatgacaggaagcggtatatttgcagctgggggcgagggtgaagaagatgaatccgccaatgtctctgcaacttccgtccggacggctccaaagaattatcaggcaatcagtactataagccacatctcatttgccgaggaagaaagcatctctccaaagaagccaacttcgatatcagaggtcgcaaagcagcgcgagctaagcggcacgcttctgagcgaggacgacagcaagatgaagaggcagatatcggacctgaaatccaaggagctcagcggccacgacatctttgcccctccggaggatcccaggccacgcaactcggagaacggctcgacctcgcagactccgggcaaaaaggtaagcaacttcaagttcggcgaggccgacgaggacagcgcggtgaagaccgcgaagaagatccccaccaagaagttcaccgacctcgcgggcaatatcttcaagggcgacgacgaggcacccgggacggcggagaagcaccacctgagcacggcgaagctgaaggagatgaccggcagcgacatcttcgcggacggggaggccccctcccgggactacctgggcggaatccgcaagccgcccggcggggagagcagcatcgcgctggtttaacagcagggacaaacaaccagatggacatagcagcccctcccctacatcattcgtttcttcctcatcgccgtcgccgtcgccatcttaggagtgatcttttattagggagttttttttttcgttcattggaggactgatcgattggaacccctggcttgctttcctgtttcccgtgactttcgtcaggttttcgttggtaatcccctccgatggtggtgttgtgtgggtatgacaacaacgatggttatctctaatttaacattgatttggcttgggcttacctgatgcaacaacaaccgccagtggtgcgttgtctgatttccgtgactggatgtctcagctgctgcagagtgcagagggccgggggcgtgacgacgaccacgatgac

SEQ ID NO: 70419 - DNA, 1914 bp, Zea Mays
cgttacggcatgtcccgtcccgtcccagagagagaaaccacggctgcgcacagcgagttagatagagagagagagagagagagaccaagaccaaggccaaggagcaccgctccccgtacatccccagcaggagagggagagagacagagaaggctgtgcgaagggaagaagacccggcgggagagaagggcgacatggagaggccggcgcccgtgaggaagtcccacacgtcgacggcggacctgctggtctggccggaaggtgcgccgcaggagttgcccgccgggtccacgccgccatccaaccgccggccgcaccagccgtcggaggcgctcaggaaggtggtgttcggcgggcaggtgacggaggcggaggccgagagcctcaacaagaggtgagcttccgggcgttttgcccctgccatgttctcttgccggagtggtgggattttttgctctgtttcttgttgtgtcgcctggcgacgagcttctggccttggccactagatctccagagatttacggccccaacactgcggaggtgttctttttctttttttttttgcgcgccgttgttgatctatgcagctgcgggttgagaacttcgttggatttgtttgaggtttgctgcgatatgcgccctagagtcttttaactcggttcttgaagagtttcttttttcagttctggtctataggctccggaaaaggaatggctagtagtgttaccgtaatgtgactatggtttagcccttcatggaattgccatctcaccaactatgttggagtactgcaaactgaccgtagccatcaaaatgctccccgtaagcgctcctggtctgtgtatgtttcggcaagttctgcgaaaccatgctctgctcccaagtggaaggagatgacaggaagcggtatatttgcagctgggggcgagggtgaagaagatgaatccgccaatgtctctgcaacttccgtccggacggctccaaagaattatcaggcaatcagtactataagccacatctcatttgccgaggaagaaagcatctctccaaagaagccaacttcgatatcagaggtcgcaaagcagcgcgagctaagcggcacgcttctgagcgaggacgacagcaagatgaagaggcagatatcggacctgaaatccaaggagctcagcggccacgacatctttgcccctccggaggatcccaggccacgcaactcggagaacggctcgacctcgcagactccgggcaaaaatgtaagcaacttcaagttcggcgaggccgacgaggacagcgcggtgaagaccgcgaagaagatccccaccaagaagttcaccgacctcgcgggcaatatcttcaagggcgacgacgaggcacccgggacggcggagaagcaccacctgagcacggcgaagctgaaggagatgaccggcagcgacatcttcgcggacggggaggccccctcccgggactacctgggcggaatccgcaagccgcccggcggggagagcagcatcgcgctggtttaacagcagggacaaacaaccagatggacatagcagcccctcccctacatcattcgtttcttcctcatcgccgtcgccgtcgccatcttaggagtgatcttttattagggagttttttttttcgttcattggaggactgatcgattggaacccctggcttgctttcctgtttcccgtgactttcgtcaggttttcgttggtaatcccctccgatggtggtgttgtgtgggtatgacaacaacgatggttatctctaatttaacattgatttggcttgggcttacctgatgcaacaacaaccgccagtggtgcgttgtctgatttccgtgactggatgtctcagctgctgcagagtgcagagggccgggggcgtgacgacgaccacgatgac

SEQ ID NO: 70420 - DNA, 1016 bp, Zea Mays
cgatctctcggggtagattatgtgaggtttgacaattcaaccatgagacacccaattatggatgttggaacagtttttaccgatgtgaagcaatttagagcagcactaaagaatttgatcatttgtgagggtagagaagttatgagacctaagaatgatcctatgcaagtttcagcaaagtgcaaaattgtagactgtgcttggtatatatatgcctctagacttccagatggtcgttccttcaagatcaagaagtatgtaaaggaacacacttgtgggaaaagtcacacggtgaagcaaatggatgctaaatggattggcacagagtatgagcattttttcagaagtgagaaagattggcgagttaagtcccttagggacaccgtccttagggacacacaagtggggatatcacttaccaaagcctatagagcgaagagatacgcagtgcagaagattggtggtgagtaccatgaacaatacaggaggatacaagattatgctcacacagtgttatctgctaatcctggaagttgcatagtgataaaatgttttgtggatccaacacaagcaataaatcctagattcgagaggatgtatgtgtcctttgatgctcaagtaaaaggattcctagctggttgtagacctttctttgggttagatggcacccatgtcaaactaccaaatggaggacaaattctaacagcacaaggaagagatgcaaacaacaatctttttcctatagcattcgctttggtagggtctgaaaatgctaattcgtggacatggtttttggagttgctggtgcagtccattgggcaaggagagcattgtggtggctggactattatgagtgatagacaaaagggtctaaaagatggtgttagggccattttcccacatgcagagcatagatattgtttgaggcacttgtatgctaacttttcaaaggctgggttcaagggtccccgactaaaagagctaatggatagggctgcctatgcgtacaaggagtt

SEQ ID NO: 70421 - DNA, 2166 bp, Zea Mays
gtacagtcattcatgcatcagaaactactaaaaagcaaaatgaaaagttaatctatgtagattttgcattgcattcccctcaaccaagcaagcatccagaggaacgaaggacaaatgttattcaattttgtattgctttcccctcaaccaagcaagcagcccaaagaacaacaaatggcattcccatgagagaaaaaaaaaatacttgtaggtggggccaccctcccctacctatatatacccctgttcacgccgttcccaagaccacaccaccagtccatccatcctgcgctgcgctgcgctcgtgacaagcatcgcaagcagctcctcctcctccccctgtagccaacaccttcctgttccgggcgcagtagcggctgtcggccctcgatctgacgagccatgacgaagcacgccgcctactccagcgaggacgtggtcgcggccgtggcggcgccggcgccggccggccggcatttcacgtcgttccaggcgctgaagggcgcgcccctcgactgcaagaagcacgccgccgtggacctgtccgcgtccggggcggccgtcgtgggcggcggcccctggtttgagtccatgaaggcttcgtcgccgcggcgcgccgccgacgccgagcacggcgactggatggagaagcacccgtccgcattggcccagttcgagccgctgcttgccgccgccaaggggaagcagatcgtgatgttcctggactacgacggcaccctgtcaccgatcgtcgaggaccccgaccgcgccgtcatgtcggaggagatgagagaagccgtgcggcgcgtcgccgagcacttccccaccgcgattgtgagcggaagatgcagggacaaggtgctcaacttcgtgaagctgacggagctgtactacgccgggagccatggcatggacatccagggccccgccgcctgcaggcagcccaaccacgtccagcaggcaaatgtttccctctcacatgcatgatgcattgtcgatcgtaacccccttgactgactgaccttcaggtcgtacacacgcaggctgaagccgcagctgtccattaccaagctgcgagtgagttcctgccggtcatcgaagaggtgttccgcacgctgacggccaagatggagtccatcgccggcgccagggtggagcacaacaagtactgcctgtccgtccacttccgctgcgtccgggaggaggaatggaatgccgtgaacgaggaggtcaggtcggtgctcagggagtacccgaacctcaagctcactcacggcagaaaggtgaggaggcatcgtacgtgctggagattcgtccgtccatcaagtgggacaagggcaaggccctcgagttcttgctcaagtctcttggctatgctgggcgcaacgacgtcttcccgatttacatcggagatgatcgcactgacgaggacgctttcaaggtgctccgcaacatggggcagggcatcggaatcctggtgtccaagcttcctaaggagacggcggcatcctactcgctgagtgaccctgccgaggtcaaggagttcctccgcaagctggccaataagaagggggcgcgccaaccatgaaaatgaagacgacctcgtgcatgcatgtagctaagctaggcatggcgtggacgatggatggatggacgagcacaacagcaaagaggcgcttattagctacaactactggccttttttgttgttttctttttgctcctacctatgcatagatagtagtctctactctctactctctacctagcaacaacaacaacctagctgatgcgcgcatgcatgcatgcattggtcgtcgcttactacatgcatggccattcagtgcagtgcgtgtgtgcgatggcggagaaacaacctagctagctagctgctcgatcgatcgatcggccttgtcttggaagaaggcggcagggagggggtccctgtgtaactgctggggatccgatatatcgatctgtccttccggccggcaagatcttgtaattagccgctgtggtactagctagcagctagagagaaatggataacaaaacaaataacatgcgtcgtcgtcttcgtctccgttcattctcgtccctctggatcctagagcctgtatgtacatgcgtggtcagacgacggtcgatctgttggcaacgcgcgca

SEQ ID NO: 70422 - DNA, 1994 bp, Zea Mays
gtacagtcattcatgcatcagaaactactaaaaagcaaaatgaaaagttaatctatgtagattttgcattgcattcccctcaaccaagcaagcatccagaggaacgaaggacaaatgttattcaattttgtattgctttcccctcaaccaagcaagcagcccaaagaacaacaaatggcattcccatgagagaaaaaaaaaatacttgtaggtggggccaccctcccctacctatatatacccctgttcacgccgttcccaagaccacaccaccagtccatccatcctgcgctgcgctgcgctcgtgacaagcatcgcaagcagctcctcctcctccccctgtagccaacaccttcctgttccgggcgcagtagcggctgtcggccctcgatctgacgagccatgacgaagcacgccgcctactccagcgaggacgtggtcgcggccgtggcggcgccggcgccggccggccggcatttcacgtcgttccaggcgctgaagggcgcgcccctcgactgcaagaagcacgccgccgtggacctgtccgcgtccggggcggccgtcgtgggcggcggcccctggtttgagtccatgaaggcttcgtcgccgcggcgcgccgccgacgccgagcacggcgactggatggagaagcacccgtccgcattggcccagttcgagccgctgcttgccgccgccaaggggaagcagatcgtgatgttcctggactacgacggcaccctgtcaccgatcgtcgaggaccccgaccgcgccgtcatgtcggaggaggtgctcaacttcgtgaagctgacggagctgtactacgccgggagccatggcatggacatccagggccccgccgcctgcaggcagcccaaccacgtccagcaggctgaagccgcagctgtccattaccaagctgcgagtgagttcctgccggtcatcgaagaggtgttccgcacgctgacggccaagatggagtccatcgccggcgccagggtggagcacaacaagtactgcctgtccgtccacttccgctgcgtccgggaggaggaatggaatgccgtgaacgaggaggtcaggtcggtgctcagggagtacccgaacctcaagctcactcacggcagaaaggtgctggagattcgtccgtccatcaagtgggacaagggcaaggccctcgagttcttgctcaagtctcttggctatgctgggcgcaacgacgtcttcccgatttacatcggagatgatcgcactgacgaggacgctttcaaggtgctccgcaacatggggcagggcatcggaatcctggtgtccaagcttcctaaggagacggcggcatcctactcgctgagtgaccctgccgaggtcaaggagttcctccgcaagctggccaataagaagggggcgcgccaaccatgaaaatgaagacgacctcgtgcatgcatgtagctaagctaggcatggcgtggacgatggatggatggacgagcacaacagcaaagaggcgcttattagctacaactactggccttttttgttgttttctttttgctcctacctatgcatagatagtagtctctactctctactctctacctagcaacaacaacaacctagctgatgcgcgcatgcatgcatgcattggtcgtcgcttactacatgcatggccattcagtgcagtgcgtgtgtgcgatggcggagaaacaacctagctagctagctgctcgatcgatcgatcggccttgtcttggaagaaggcggcagggagggggtccctgtgtaactgctggggatccgatatatcgatctgtccttccggccggcaagatcttgtaattagccgctgtggtactagctagcagctagagagaaatggataacaaaacaaataacatgcgtcgtcgtcttcgtctccgttcattctcgtccctctggatcctagagcctgtatgtacatgcgtggtcagacgacggtcgatctgttggcaacgcgcgca

SEQ ID NO: 70423 - DNA, 2200 bp, Zea Mays
cacaaatatactctagcatgacggtaatataatgggatatatataccctcataaatcatggatactatttgtaaggactttggtatttgtacagtcattcatgcatcagaaactactaaaaagcaaaatgaaaagttaatctatgtagattttgcattgcattcccctcaaccaagcaagcatccagaggaacgaaggacaaatgttattcaattttgtattgctttcccctcaaccaagcaagcagcccaaagaacaacaaatggcattcccatgagagaaaaaaaaaatacttgtaggtggggccaccctcccctacctatatatacccctgttcacgccgttcccaagaccacaccaccagtccatccatcctgcgctgcgctgcgctcgtgacaagcatcgcaagcagctcctcctcctccccctgtagccaacaccttcctgttccgggcgcagtagcggctgtcggccctcgatctgacgagccatgacgaagcacgccgcctactccagcgaggacgtggtcgcggccgtggcggcgccggcgccggccggccggcatttcacgtcgttccaggcgctgaagggcgcgcccctcgactgcaagaagcacgccgccgtggacctgtccgcgtccggggcggccgtcgtgggcggcggcccctggtttgagtccatgaaggcttcgtcgccgcggcgcgccgccgacgccgagcacggcgactggatggagaagcacccgtccgcattggcccagttcgagccgctgcttgccgccgccaaggggaagcagatcgtgatgttcctggactacgacggcaccctgtcaccgatcgtcgaggaccccgaccgcgccgtcatgtcggaggagatgagagaagccgtgcggcgcgtcgccgagcacttccccaccgcgattgtgagcggaagatgcagggacaaggtgctcaacttcgtgaagctgacggagctgtactacgccgggagccatggcatggacatccagggccccgccgcctgcaggcagcccaaccacgtccagcaggtcgtacacacgcaggctgaagccgcagctgtccattaccaagctgcgagtgagttcctgccggtcatcgaagaggtgttccgcacgctgacggccaagatggagtccatcgccggcgccagggtggagcacaacaagtactgcctgtccgtccacttccgctgcgtccgggaggaggaatggaatgccgtgaacgaggaggtcaggtcggtgctcagggagtacccgaacctcaagctcactcacggcagaaaggtgctggagattcgtccgtccatcaagtgggacaagggcaaggccctcgagttcttgctcaagtctcttggctatgctgggcgcaacgacgtcttcccgatttacatcggagatgatcgcactgacgaggacgctttcaaggtaaaaaataaaaaaagaagctagcagaaaggtgctccgcaacatggggcagggcatcggaatcctggtgtccaagcttcctaaggagacggcggcatcctactcgctgagtgaccctgccgaggtcaaggagttcctccgcaagctggccaataagaagggggcgcgccaaccatgaaaatgaagacgacctcgtgcatgcatgtagctaagctaggcatggcgtggacgatggatggatggacgagcacaacagcaaagaggcgcttattagctacaactactggccttttttgttgttttctttttgctcctacctatgcatagatagtagtctctactctctactctctacctagcaacaacaacaacctagctgatgcgcgcatgcatgcatgcattggtcgtcgcttactacatgcatggccattcagtgcagtgcgtgtgtgcgatggcggagaaacaacctagctagctagctgctcgatcgatcgatcggccttgtcttggaagaaggcggcagggagggggtccctgtgtaactgctggggatccgatatatcgatctgtccttccggccggcaagatcttgtaattagccgctgtggtactagctagcagctagagagaaatggataacaaaacaaataacatgcgtcgtcgtcttcgtctccgttcattctcgtccctctggatcctagagcctgtatgtacatgcgtggtcagacgacggtcgatctgttggcaacgcgcgca

SEQ ID NO: 70424 - DNA, 822 bp, Zea Mays
agccctgtctcgaacccgaaccagctcgagcctcgaaccctaacccccaccacgtaactccttggaattaccgaaatgccactcttcttctccaaattcgcaccattggtcccccgcgtccgccgcctttccatcgccgcggcgacagccgccggcgaggaccctaagctgtctcgaatcgcggatgagctcctcgccctatcccccgccgagctggacgactacgcggcgctcctgcgcctcaagctccgcctgtcgctcacctccagcgcagctgctggagcctctccggccggggccggggacgccgcggctgcagccgtggaggccgccgcggcggtgaagacggcgttcgacttgaagatcgagaagtacgaggccgcggcgaagattaagatcatcaaggaggtgcgcgcgatgacggacctgggtctgaaggaggcaaaggagctcgtggagaaggcgcccgtagtggtgcgcgcggggttgcctaaagaggaggccgaggcgctcgccgctaagctcaaggccgccggtgccgctgttgcactcgagtgatcccacgaaggtataaagaatgaagtgatctcaagtatcaaattgaatttaaggtatccgttaccatggatatgtacagattgcatgtttatagttttgtttcacagttctaaatagttctgtccaaagacatagcttatatgaaggtggtgtatcattgataaaggtgaaaaatacaggacatctatcgttacgtgttacataaatgatataatgtgcagctgtgtgctacttcttactagtcatggtttgcttatgcttaat

SEQ ID NO: 70425 - DNA, 1049 bp, Zea Mays
tcccctcgtttacgtgtcgggaaaatacgtctctttttcttcaagccctgtctcgaacccgaaccagctcgagcctcgaaccctaacccccaccacgtaactccttggaattaccgaaatgccactcttcttctccaaattcgcaccattggtcccccgcgtccgccgcctttccatcgccgcggcgacagccgccggcgaggaccctaagctgtctcgaatcgcggatgagctcctcgccctatcccccgccgagctggacgactacgcggcgctcctgcgcctcaagctccgcctgtcgctcacctccagcgcagctgctggagcctctccggccggggccggggacgccgcggctgcagccgtggaggccgccgcggcggtgaagacggcgttcgacttgaagatcgagaagtacgaggccgcggcgaagattaagatcatcaaggaggtgcgcgcgatgacggacctgggtctgaaggaggcaaaggagctcgtggagaaggcgcccgtagtggtgcgcgcggggttgcctaaagaggaggccgaggcgctcgccgctaagctcaaggccgccggtgccgctgttgcactcgagtgatcccacgaaggggtataaagaggatgcaacgtatgctctacttgcgttgttgtagcttcggataagcctcaagcctaatcactgatacgagtgacagcattttcctgaatcgcacaataaggtgttcctgcacaatgttctatattactggcctggattggtttgaacagccaaccttcagtagttagtggtggtgttactgtaaaaggtggctagaatatgctagcttggattacttgttcatttcaagtggtgctcaactgaaatgtgtccattatctttattctggtgcatgaaactgtttgtggtcatatcattaagggtaaagcttatgttctcttagtatccaccgtaggttctgtccatttcatgtgctgtttgaaagcgattttttatggttagcctggcaatgaaaacgatgtttgaaaattaccccgaaatgaatgat

SEQ ID NO: 70426 - DNA, 2596 bp, Zea Mays
atcgactattgtgaatgtatatcttgatgtttgaacatgcatcctctaatttttcagggtcagtgccaactgtgaattctacgactttgaaggtgttgaatctctcttccaatgttctatcaggatcattaccagccaccatgggcaaatgtacctcagttgatctgagcgggaaccagttttcaggggaattagctatattgcgttcctgggatgggattgttgaggtcattgacttgagctcaaacaaactggtgggaagctacccaaatgatgtctcccagtttcagaacctagtgtccctcaaactacgaaacaattcattgtcaggatctctcccttcggtgttgggcacctatcagaagttatctgtccttgatctgagtcagaacgcaatcgagggatctgtgttacctaccttcttcatgtcaccaactttgactgtgttaaatctttctggaaacaaattttctggaactattccatttcagagcacccattcaacggaatcgatacttctttcatctcaatcggctctcaggattgtggatctgtccagcaattcattggctggaccattgccaccagatatctctaatctgcaaaaacttgagttccttattcttatgatgaatgaattatctggggagattcccagtgagataagcaagcttcaagcactggagtatcttgacttatcacataaccacctcacaggcagaattccggatatgcctcaaaatggcctgaaggtgttcaatgtatcttacaataatctagaaggaactgttcctaaaagtgttgaaaagtttcctttatcttgcttccgacctggaaatgacatgttagttttcccagatggccttcctgctggaaatgatgattacaccggagttgatcagggccaaacatctcatggacataaggctggtgttcgagttgctcttattattggctgcattggagctgtcttgctagttatctccatagccctagcattctatttggtaaggtctcaagagctttgcggaagaaatggatttagaggtcaaattactatcagggatctaaaggggagaataagccgtccaaatctgttcaggtcccccaaagacaacgttataccaagtaaaacaagcttctcaaatgaccatctcttaagagccgcaactagatcgatgtctgcgcagaaagagttattggctgaagcctctgtcgaatatggctacacagatccaaaggaagttgccgagtccacaagtttaggtgtgactgagacttcatctgcgatccaggctcacgagtctcctccacggtctgcattgccagcagcaccacattttgctgactctagattcctcgaggaacctgtagcttttgaagtgtactctccagaccggctggttggagaactgatcttcacggacagcactttggttttcacagctgaggatctgtcgcgtgcaccagcggaagttcttggaaggagcagccatggaacgacatataaagctgttctacaaagcgggcatgtcctgacagtgaaatggctgcgtgttggccttgtgaagcataaaaaggaattcacaaaggagataaagaggatcggcactatcaggcatccaaatatagttccatggagagccttctattggggccctaaggagcaagagaggttaattatttctgattatgtcagtggtgatagcttggcactctacctctacgagtcgactccaagaagatactcccgcctgtcggtttcgcagcgtctcaggatcgccatcgacctagctcgctgcctccagttcctacaccacgagaagggcctgcctcacggcaacctgaagccgactaacatattcctgactggtcctgatctcactccaaagctggtggattacggcctgcacaggttcatgactccaagtggcgccgccgagcagatactgaacctaggagcgctagggtaccgagcaccggagctggcgaacgcggggaaggcggcaccgacgttcaaggcggacgtgtacgctttcggggtggtggtcatggagatgctgacgcggaggagcgcgggagacatcatctcggggcagtccggcgcggtcgacctgaccgactgggtccagatgtgcagcagggaagggcggggagccgactgcttcgaccgcgacatcgccggcctggaagagcgccccggggtgatggaggagctgctggcggtctcgctcaggtgtatcctccctgtaaatgagaggcctaacatgaagacagtctgcgatgacctgtgctccatcataacagcgtgagtttagtttccccttccttgccttgccttgccttgccccagtgtacatgtaaccgatcggttttcccgtccgttggttggtccctattttttctttctttctcccggtgggttttccggagcccgtgtagccagggtgggttcgtttgattggtaactgctagtgtaaagaggattcgattcgatccacccccattgattgattgatatcccaaccattgccgtcttgatgagttggaacacctctgttcgctggtcaagttcttcacactgagcattttccca

SEQ ID NO: 70427 - DNA, 2614 bp, Zea Mays
aagaaattgacatactatttcaatgctatggcatgagatcgactattgtgaatgtatatcttgatgtttgaacatggtcagtgccaactgtgaattctacgactttgaaggtgttgaatctctcttccaatgttctatcaggatcattaccagccaccatgggcaaatgtacctcagttgatctgagcgggaaccagttttcaggggaattagctatattgcgttcctgggatgggattgttgaggtcattgacttgagctcaaacaaactggtgggaagctacccaaatgatgtctcccagtttcagaacctagtgtccctcaaactacgaaacaattcattgtcaggatctctcccttcggtgttgggcacctatcagaagttatctgtccttgatctgagtcagaacgcaatcgagggatctgtgttacctaccttcttcatgtcaccaactttgactgtgttaaatctttctggaaacaaattttctggaactattccatttcagagcacccattcaacggaatcgatacttctttcatctcaatcggctctcaggattgtggatctgtccagcaattcattggctggaccattgccaccagatatctctaatctgcaaaaacttgagttccttattcttatgatgaatgaattatctggggagattcccagtgagataagcaagcttcaagcactggagtatcttgacttatcacataaccacctcacaggcagaattccggatatgcctcaaaatggcctgaaggtgttcaatgtatcttacaataatctagaaggaactgttcctaaaagtgttgaaaagtttcctttatcttgcttccgacctggaaatgacatgttagttttcccagatggccttcctgctggaaatgatgattacaccggagttgatcagggccaaacatctcatggacataaggctggtgttcgagttgctcttattattggctgcattggagctgtcttgctagttatctccatagccctagcattctatttggtaaggtctcaagagctttgcggaagaaatggatttagaggtcaaattactatcagggatctaaaggggagaataagccgtccaaatctgttcaggtcccccaaagacaacgttataccaagtaaaacaagcttctcaaatgaccatctcttaagagccgcaactagatcgatgtctgcgcagaaagagttattggctgaagcctctgtcgaatatggctacacagatccaaaggaagttgccgagtccacaagtttaggtgtgactgagacttcatctgcgatccaggctcacgagtctcctccacggtctgcattgccagcagcaccacattttgctgactctagattcctcgaggaacctgtagcttttgaagtgtactctccagaccggctggttggagaactgatcttcacggacagcactttggttttcacagctgaggatctgtcgcgtgcaccagcggaagttcttggaaggagcagccatggaacgacatataaagctgttctacaaagcgggcatgtcctgacagtgaaatggctgcgtgttggccttgtgaagcataaaaaggaattcacaaaggagataaagaggatcggcactatcaggcatccaaatatagttccatggagagccttctattggggccctaaggagcaagagaggttaattatttctgattatgtcagtggtgatagcttggcactctacctctacgagtcgactccaagaagatactcccgcctgtcggtttcgcagcgtctcaggatcgccatcgacctagctcgctgcctccagttcctacaccacgagaagggcctgcctcacggcaacctgaagccgactaacatattcctgactggtcctgatctcactccaaagctggtggattacggcctgcacaggttcatgactccaagtggcgccgccgagcagatactgaacctaggagcgctagggtaccgagcaccggagctggcgaacgcggggaaggcggcaccgacgttcaaggcggacgtgtacgctttcggggtggtggtcatggagatgctgacgcggaggagcgcgggagacatcatctcggggcagtccggcgcggtcgacctgaccgactgggtccagatgtgcagcagggaagggcggggagccgactgcttcgaccgcgacatcgccggcctggaagagcgccccggggtgatggaggagctgctggcggtctcgctcaggtgtatcctccctgtaaatgagaggcctaacatgaagacagtctgcgatgacctgtgctccatcataacagcgtgagtttagtttccccttccttgccttgccttgccttgccccagtgtacatgtaaccgatcggttttcccgtccgttggttggtccctattttttctttctttctcccggtgggttttccggagcccgtgtagccagggtgggttcgtttgattggtaactgctagtgtaaagaggattcgattcgatccacccccattgattgattgatatcccaaccattgccgtcttgatgagttggaacacctctgttcgctggtcaagttcttcacactgagcattttccca

SEQ ID NO: 70428 - DNA, 3340 bp, Zea Mays
tcctgttattactcacccatcccctcccatttctaaaaatttggcctttctctcgctcacccatctcctcactacccccagctcaccgctctctcccgtctccaatggcggccgccactcccacctccccttcctccgcccccgcctcccgcaagccccaaccctaggtaggtcgctccactccccacccccacacttctatggctgccctcctcgctctcgttctcctgctgctttccgggggcgctgccggcgacgacgtggcggcgctcctcgagttcaagaagggcatcgcggaccgagaccgggaccagttgctggggtcctggtccccgccggcggcgacggaggccggcaacggaggcggcggctgccccgcctcgtggcgaggcgttgtgtgcgacggcggcgcggtggttggcgtcgcgctcgacggcctcggcctcgccggggagctcaagctcgggactctctccggcatgcgcgcgctccagaacctctccctcgccgggaatgccttctccggccgcctgccccccggcatcggctccctctcctcgctacgccacctcgacctctccgggaaccgcttctacgggcccatcccgggccgcctcgccaacctctccagcctcgtccacctcaacctctcccacaacaacttcacgtccggcttccccaccgacgggatccagcagctgcagaacctgcgccgcttcgacgtccgcagcaacaacttctggggcaatgccaccgatctgctcgccaagctccgcaatgccgagcacgtcgacctcagcgacaacctcttcaccgggaccatcgatctggacatccaaagcctcgccagcatcgggaacacggtcaagtatctcaacctcagccacaacaagctggacggcggcttcttccggaatgagacggtggccgcgttcaagaacttggcggtccttgatttgagcaacaacgggcttggtgggatagtgccgaggctcgatgcgtggttctcactggagtttttcagtgtcgccgggaatgggctatttggaatgatgcccgaggcactcctccagaattctatgcgccttatcgaggttgatctcagcaggaacggcttctcagggtcagtgccaactgtgaattctacgactttgaaggtgttgaatctctcttccaatgttctatcaggatcattaccagccaccatgggcaaatgtacctcagttgatctgagcgggaaccagttttcaggggaattagctatattgcgttcctgggatgggattgttgaggtcattgacttgagctcaaacaaactggtgggaagctacccaaatgatgtctcccagtttcagaacctagtgtccctcaaactacgaaacaattcattgtcaggatctctcccttcggtgttgggcacctatcagaagttatctgtccttgatctgagtcagaacgcaatcgagggatctgtgttacctaccttcttcatgtcaccaactttgactgtgttaaatctttctggaaacaaattttctggaactattccatttcagagcacccattcaacggaatcgatacttctttcatctcaatcggctctcaggattgtggatctgtccagcaattcattggctggaccattgccaccagatatctctaatctgcaaaaacttgagttccttattcttatgatgaatgaattatctggggagattcccagtgagataagcaagcttcaagcactggagtatcttgacttatcacataaccacctcacaggcagaattccggatatgcctcaaaatggcctgaaggtgttcaatgtatcttacaataatctagaaggaactgttcctaaaagtgttgaaaagtttcctttatcttgcttccgacctggaaatgacatgttagttttcccagatggccttcctgctggaaatgatgattacaccggagttgatcagggccaaacatctcatggacataaggctggtgttcgagttgctcttattattggctgcattggagctgtcttgctagttatctccatagccctagcattctatttggtaaggtctcaagagctttgcggaagaaatggatttagaggtcaaattactatcagggatctaaaggggagaataagccgtccaaatctgttcaggtcccccaaagacaacgttataccaagtaaaacaagcttctcaaatgaccatctcttaagagccgcaactagatcgatgtctgcgcagaaagagttattggctgaagcctctgtcgaatatggctacacagatccaaaggaagttgccgagtccacaagtttaggtgtgactgagacttcatctgcgatccaggctcacgagtctcctccacggtctgcattgccagcagcaccacattttgctgactctagattcctcgaggaacctgtagcttttgaagtgtactctccagaccggctggttggagaactgatcttcacggacagcactttggttttcacagctgaggatctgtcgcgtgcaccagcggaagttcttggaaggagcagccatggaacgacatataaagctgttctacaaagcgggcatgtcctgacagtgaaatggctgcgtgttggccttgtgaagcataaaaaggaattcacaaaggagataaagaggatcggcactatcaggcatccaaatatagttccatggagagccttctattggggccctaaggagcaagagaggttaattatttctgattatgtcagtggtgatagcttggcactctacctctacgagtcgactccaagaagatactcccgcctgtcggtttcgcagcgtctcaggatcgccatcgacctagctcgctgcctccagttcctacaccacgagaagggcctgcctcacggcaacctgaagccgactaacatattcctgactggtcctgatctcactccaaagctggtggattacggcctgcacaggtgtatcctccctgtaaatgagaggcctaacatgaagacagtctgcgatgacctgtgctccatcataacagcgtgagtttagtttccccttccttgccttgccttgccttgccccagtgtacatgtaaccgatcggttttcccgtccgttggttggtccctattttttctttctttctcccggtgggttttccggagcccgtgtagccagggtgggttcgtttgattggtaactgctagtgtaaagaggattcgattcgatccacccccattgattgattgatatcccaaccattgccgtcttgatgagttggaacacctctgttcgctggtcaagttcttcacactgagcattttccca

SEQ ID NO: 70429 - DNA, 3899 bp, Zea Mays
tcctgttattactcacccatcccctcccatttctaaaaatttggcctttctctcgctcacccatctcctcactacccccagctcaccgctctctcccgtctccaatggcggccgccactcccacctccccttcctccgcccccgcctcccgcaagccccaaccctaggtaggtcgctccactccccacccccacacttctatggctgccctcctcgctctcgttctcctgctgctttccgggggcgctgccggcgacgacgtggcggcgctcctcgagttcaagaagggcatcgcggaccgagaccgggaccagttgctggggtcctggtccccgccggcggcgacggaggccggcaacggaggcggcggctgccccgcctcgtggcgaggcgttgtgtgcgacggcggcgcggtggttggcgtcgcgctcgacggcctcggcctcgccggggagctcaagctcgggactctctccggcatgcgcgcgctccagaacctctccctcgccgggaatgccttctccggccgcctgccccccggcatcggctccctctcctcgctacgccacctcgacctctccgggaaccgcttctacgggcccatcccgggccgcctcgccaacctctccagcctcgtccacctcaacctctcccacaacaacttcacgtccggcttccccaccgacgggatccagcagctgcagaacctgcgccgcttcgacgtccgcagcaacaacttctggggcaatgccaccgatctgctcgccaagctccgcaatgccgagcacgtcgacctcagcgacaacctcttcaccgggaccatcgatctggacatccaaagcctcgccagcatcgggaacacggtcaagtatctcaacctcagccacaacaagctggacggcggcttcttccggaatgagacggtggccgcgttcaagaacttggcggtccttgatttgagcaacaacgggcttggtgggatagtgccgaggctcgatgcgtggttctcactggagtttttcagtgtcgccgggaatgggctatttggaatgatgcccgaggcactcctccagaattctatgcgccttatcgaggttgatctcagcaggaacggcttctcagggtcagtgccaactgtgaattctacgactttgaaggtgttgaatctctcttccaatgttctatcaggatcattaccagccaccatgggcaaatgtacctcagttgatctgagcgggaaccagttttcaggggaattagctatattgcgttcctgggatgggattgttgaggtcattgacttgagctcaaacaaactggtgggaagctacccaaatgatgtctcccagtttcagaacctagtgtccctcaaactacgaaacaattcattgtcaggatctctcccttcggtgttgggcacctatcagaagttatctgtccttgatctgagtcagaacgcaatcgagggatctgtgttacctaccttcttcatgtcaccaactttgactgtgttaaatctttctggaaacaaattttctggaactattccatttcagagcacccattcaacggaatcgatacttctttcatctcaatcggctctcaggattgtggatctgtccagcaattcattggctggaccattgccaccagatatctctaatctgcaaaaacttgagttccttattcttatgatgaatgaattatctggggagattcccagtgagataagcaagcttcaagcactggagtatcttgacttatcacataaccacctcacaggcagaattccggatatgcctcaaaatggcctgaaggtgttcaatgtatcttacaataatctagaaggaactgttcctaaaagtgttgaaaagtttcctttatcttgcttccgacctggaaatgacatgttagttttcccagatggccttcctgctggaaatgatgattacaccggagttgatcagggccaaacatctcatggacataaggctggtgttcgagttgctcttattattggctgcattggagctgtcttgctagttatctccatagccctagcattctatttggtaaggtctcaagagctttgcggaagaaatggatttagaggtcaaattactatcagggatctaaaggggagaataagccgtccaaatctgttcaggtcccccaaagacaacgttataccaagtaaaacaagcttctcaaatgaccatctcttaagagccgcaactagatcgatgtctgcgcagaaagagttattggctgaagcctctgtcgaatatggctacacagatccaaaggaagttgccgagtccacaagtttaggtgtgactgagacttcatctgcgatccaggctcacgagtctcctccacggtctgcattgccagcagcaccacattttgctgactctagattcctcgaggaacctgtagcttttgaagtgtactctccagaccggctggttggagaactgatcttcacggacagcactttggttttcacagctgaggatctgtcgcgtgcaccagcggaagttcttggaaggagcagccatggaacgacatataaagctgttctacaaagcgggcatgtcctgacagtgaaatggctgcgtgttggccttgtgaagcataaaaaggaattcacaaaggagataaagaggatcggcactatcaggcatccaaatatagttccatggagagccttctattggggccctaaggagcaagagaggttaattatttctgattatgtcagtggtgatagcttggcactctacctctacggtaagcgttttagggttcatggccatcttcgttttagtcaacctgattattttggcttgttacattgctcatttagcctggagagtttttacacttacataattcctactgctgttactatcgtactgtgtatggatctaatgagctgcccctaaattctttagccctttctaaccagactcgaggtttacttcaaatcactgattatattttgttttttttttgtggactgatgcagagtcgactccaagaagatactcccgcctgtcggtttcgcagcgtctcaggatcgccatcgacctagctcgctgcctccagttcctacaccacgagaagggcctgcctcacggcaacctgaagccgactaacatattcctgactggtcctgatctcactccaaagctggtggattacggcctgcacaggttcatgactccaagtggcgccgccgagcagatactgaacctaggagcgctagggtaccgagcaccggagctggcgaacgcggggaaggcggcaccgacgttcaaggcggacgtgtacgctttcggggtggtggtcatggagatgctgacgcggaggagcgcgggagacatcatctcggggcagtccggcgcggtcgacctgaccgactgggtccagatgtgcagcagggaagggcggggagccgactgcttcgaccgcgacatcgccggcctggaagagcgccccggggtgatggaggagctgctggcggtctcgctcaggtgtatcctccctgtaaatgagaggcctaacatgaagacagtctgcgatgacctgtgctccatcataacagcgtgagtttagtttccccttccttgccttgccttgccttgccccagtgtacatgtaaccgatcggttttcccgtccgttggttggtccctattttttctttctttctcccggtgggttttccggagcccgtgtagccagggtgggttcgtttgattggtaactgctagtgtaaagaggattcgattcgatccacccccattgattgattgatatcccaaccattgccgtcttgatgagttggaacacctctgttcgctggtcaagttcttcacactgagcattttccca

SEQ ID NO: 70430 - DNA, 3422 bp, Zea Mays
ctcgtttcagtctttgacaggtgtttctttcccttgtgctgatgtgcagtacttatatatcattactttatttatgtaagaggataacgcgggtgccaccatcctctctacctggacctagcctacacacaccccgtcacatctcaccccacaggcagtatctccgatacggtctgcacacaaacaccaagtccatgcaagaatccaccatatccacaagcccatggaggagctcccagtaccagtagaccacccaattggggaaaccgccggccggcctcttcacgacgctggtcgctgcaagcgcaacacgcccatgcacgtccccgcaccccacctcctccccgcgccgcccaagccccactaccatgccgcgctccgcttcaccgtggccgcttccgcggcgccggcgagcccccgcaaagccgtcattgtaggcggcgggctcgcgggccttgccgcggcgactcacctgacgtcgctctccgtgccgttcacgctcgtcgaggcctccgaccgcctcggcggccgcgtcgccaccgacgtggtggacgggtaccgcctggacaggggtttccagatcttcctcaccgcgtacccggagtgccgtcgcctcctcgacttcccggagctcaggctccggccattctaccccggcgcgctcgtcttcgtcggcgccggggagccgttctacctgctctccgacccgttccgcctcccgctgcgttccctctccgcggtgttctcccccgtgggcaccctcaccgacaaggtcctcgtcgggctcacgcgcctccgggcggccgccaccccggacgacgtcatcctctcggcgccggagacgaccacgggggagcacttggcgcggctcggcttctcgccctccatcgtggagcggttcctgcggccgttcctcgcaggaatattcttcgaccctgcgctcgacacgtcgtcccgcctcttcgagctcgtgttcaagcgcctcgccctgggcgacaacgccctgccggaggacggcatcggcgccatcgcggcgcagctcgcggctcgcctgccagcgggctccgtccgcctcaacacccgcgccgtcggcatcgaccagtccggtgtgacgctggataccggcgaaaccgtcgccggcggactcggcgtcatcgtcgctgtcgagcagcctcaggccgagaagcttctgccgcagctaccagctcaaggaaaggccaagaaatcggagaggagcaccgtgtgcctctacttctccaccgaccgggcgccggtccaggaccccatcctgctgctcaacgggtcgggcaaggggatagtgaacaacatgttcttcgtcaccaacgtggcgccgtcgtacgcaccggcgggtaaggtgctggtgtccgtgtccctcgttggctcgttcgccgacagggaggacgccgatctggccgacgaagtggtccgggagcttggcgggtggttcggcgacggagaggtcgcgtcgtggacacacttgtcgacgtatcgcatcgggttcgcgcagccggaccagacgccgcccacgacaccggcggggagggacccgagagtgggtgacggattgtacgtctgcggtgaccactggtgctctgccacgttcgacggcgcgctggtcccacaaagtcataacgagttccggaccggaacttctaaagaacagatacgaaagcctaaaggccccatacagcccagaaggcccaaccccgaatcgctcacagtcacatctgatccgctccggctccgacgacgaatgggctctatggaagcgtcgaccgcgccggagaacggctccgccgccggtggcggagccggcaacggggcgggcgccgcgtcgaacggaggaggtgttgagaggaggctgaggtcctcggctgcgcccgcgtcgtgggcagcccagcttcccctggaggtgggcacacgcgtgatgtgccggtggcgcgaccagaagctccaccctgtcaaggtcatcgagcgccgcaagggctccgcttcctcttcccccgctgactacgagtactacgtccattacaccgagttcaatagaagacttgacgagtgggttaagcttgagcagcttgatcttgctactgtcgagaccgatgttgatgagaaagtcgaagataaggcaacaagcttaaagatgacacggcaccagaagcgtaaaattgatgaaacacatgtggagcaaggacacgaggagcttgatgcagccagcttgcgggaacatgaagaattcacaaaagtgaaaaatattgcaaagattgaacttgggagatatgagatagatacatgaagaagtgcgatcttaagcaccctccaggtgatgaaatctatagaagtggaactctttcgatgttcgaggttgatgggaagaagaacaaggtttatggacagaatctttgttatctggccaagctatttcttgatcacaagacattgtactatgatgttgatttattcttgttttatgttctctgcgaatgtgatgaccggggatgtcatatggtgggatatttctctaaggaaaaacactctgaagaatcttataatttggcttgcattctcactcttcccccataccaaagaaaaggatatgggaagttcctgattgctttctcatatgaactttccaagaaggaaggtaaagttgggacaccggagcgccctctttctgatcttggcctgctcagctatagaggttattggactagagtgcttctggaaattctaaagaaacataagggtaacatatctataaaggaactcagcgacatgacggcaataaaagccgatgacatcttgagcacgctgcagagcctggacctaatccagtatcgcaaagggcagcacgtcatctgcgcggacccgaaggtcctcgaccgccacctgaaggcggcgggtcggggaggcctggacgtggacgttagcaagctgatctggactccctacaaggagcaaggctaaaagcgcagctgctcccagccccagattagagtccctgtacataacgtttggtactaggatctcccctcagctctcacttcactcgtgtaccgtgaaaactgtacactgtaacaaccacattgctgtgtttgtgctgtctgccgcgatagtctccgaaatcgaaagaaacatcacccaactctttactcttggctcgcaactccccctttcacatcctacctttgatagccaaatcagggcttggagtggaaccagcagcgaagcgagactggtctccgtccccataattgaaagggaaacagctgtgcggctgatctgctgactgtgacgcctgagtgtccattgccagatacggatggttgcaaattctaattgctccgtccctaaccttcgaaaataaatgtgcatctcaattatcgaaaaataaatttttt

SEQ ID NO: 70431 - DNA, 4572 bp, Zea Mays
acgagcgatggcgacggaagcgaaggtgagactgagaatggcgagaggcgagtgggcggtggcggcgctgtgtgtgaatcggcgccggtaaaaagcaggcgagcgggcggacggggtgtgctccacgagcttaggctatccgcaaccgttacccctaaatatttccctctatatcacttttccctcctatttccccccctattttttcatccccgcagctgttccccctaaatactcccatataccccattaccactataaaatatcattttctataccaactatcaattttttatctactaacaattactcgtggacccacagcacagtgtttagggtgatgaacagtgacacgctagatctggggagagagaaggggaccgacacgtaggggcgctataggggacaccgctgcggtcatagggtgcccctacacgccgcatgcaaggggaggggaggtgcagcgtgcaccgctgcgctgcggctagtcttacacgtgcacacgtacgtggcccccggcgccggctagaagcgtccctatgttccacctcgtatctgacggtcggtacgacgatgggaggcgggacacgtggtgccggccgtctacagactgcagtgctcggcatatgtggacgtgactacgcgagcacgtgccaaggcgggaggtcatgtccattcgagacgcgcgcgtgttgtggctgccatcgccgctgccgcggacggtggcgcgacggcgcagacgatcgagccagcggcgtgctttggccgcaccgctcgctgcgcgcttccatgcacaccgaggagatcgaggtgctgctgtgctgactcgccagctgcgtggcccgttactgtcatggcgttctcgaacataggaaagcagcaattcagcataaatgcttgattgagcgctggaacagatgaacaagagtgggctgattactttggttggagaatgtcagcaggaagaaacttgctaaatcttcgtgcccatgctaccgctgaagtcatgatctctgctcgtagtttggtcgtcatcacaagcacttctctcgtttcagtctttgacaggtgtttctttcccttgtgctgatgtgcagtacttatatatcattactttatttatgtaagaggataacgcgggtgccaccatcctctctacctggacctagcctacacacaccccgtcacatctcaccccacaggcagtatctccgatacggtctgcacacaaacaccaagtccatgcaagaatccaccatatccacaagcccatggaggagctcccagtaccagtagaccacccaattggggaaaccgccggccggcctcttcacgacgctggtcgctgcaagcgcaacacgcccatgcacgtccccgcaccccacctcctccccgcgccgcccaagccccactaccatgccgcgctccgcttcaccgtggccgcttccgcggcgccggcgagcccccgcaaagccgtcattgtaggcggcgggctcgcgggccttgccgcggcgactcacctgacgtcgctctccgtgccgttcacgctcgtcgaggcctccgaccgcctcggcggccgcgtcgccaccgacgtggtggacgggtaccgcctggacaggggtttccagatcttcctcaccgcgtacccggagtgccgtcgcctcctcgacttcccggagctcaggctccggccattctaccccggcgcgctcgtcttcgtcggcgccggggagccgttctacctgctctccgacccgttccgcctcccgctgcgttccctctccgcggtgttctcccccgtgggcaccctcaccgacaaggtcctcgtcgggctcacgcgcctccgggcggccgccaccccggacgacgtcatcctctcggcgccggagacgaccacgggggagcacttggcgcggctcggcttctcgccctccatcgtggagcggttcctgcggccgttcctcgcaggaatattcttcgaccctgcgctcgacacgtcgtcccgcctcttcgagctcgtgttcaagcgcctcgccctgggcgacaacgccctgccggaggacggcatcggcgccatcgcggcgcagctcgcggctcgcctgccagcgggctccgtccgcctcaacacccgcgccgtcggcatcgaccagtccggtgtgacgctggataccggcgaaaccgtcgccggcggactcggcgtcatcgtcgctgtcgagcagcctcaggccgagaagcttctgccgcagctaccagctcaaggaaaggccaagaaatcggagaggagcaccgtgtgcctctacttctccaccgaccgggcgccggtccaggaccccatcctgctgctcaacgggtcgggcaaggggatagtgaacaacatgttcttcgtcaccaacgtggcgccgtcgtacgcaccggcgggtaaggtgctggtgtccgtgtccctcgttggctcgttcgccgacagggaggacgccgatctggccgacgaagtggtccgggagcttggcgggtggttcggcgacggagaggtcgcgtcgtggacacacttgtcgacgtatcgcatcgggttcgcgcagccggaccagacgccgcccacgacaccggcggggagggacccgagagtgggtgacggattgtacgtctgcggtgaccactggtgctctgccacgttcgacggcgcgctggtcccacaaagtcataacgagttccggaccggaacttctaaagaacagatacgaaagcctaaaggccccatacagcccagaaggcccaaccccgaatcgctcacagtcacatctgatccgctccggctccgacgacgaatgggctctatggaagcgtcgaccgcgccggagaacggctccgccgccggtggcggagccggcaacggggcgggcgccgcgtcgaacggaggaggtgttgagaggaggctgaggtcctcggctgcgcccgcgtcgtgggcagcccagcttcccctggaggtgggcacacgcgtgatgtgccggtggcgcgaccagaagctccaccctgtcaaggtcatcgagcgccgcaagggctccgcttcctcttcccccgctgactacgagtactacgtccattacaccgagttcaatagaagacttgacgagtgggttaagcttgagcagcttgatcttgctactgtcgagaccgatgttgatgagaaagtcgaagataaggcaacaagcttaaagatgacacggcaccagaagcgtaaaattgatgaaacacatgtggaggacacgaggagcttgatgcagccagcttgcgggaacatgaagaattcacaaaagtgaaaaatattgcaaagattgaacttgggagatatgagatagatacatggtatttctctccttttccaccagagtacaatgactgcccgaagctgtttttctgtgaattttgcctcaacttcatgaagcgcaaagaacagcttcagaggcacatgaagaagtgcgatcttaagcaccctccaggtgatgaaatctatagaagtggaactctttcgatgttcgaggttgatgggaagaagaacaaggtttatggacagaatctttgttatctggccaagctatttcttgatcacaagacattgtactatgatgttgatttattcttgttttatgttctctgcgaatgtgatgaccggggatgtcatatggtgggatatttctctaaggaaaaacactctgaagaatcttataatttggcttgcattctcactcttcccccataccaaagaaaaggatatgggaagttcctgattgctttctcatatgaactttccaagaaggaaggtaaagttgggacaccggagcgccctctttctgatcttggcctgctcagctatagaggttattggactagagtgcttctggaaattctaaagaaacataagggtaacatatctataaaggaactcagcgacatgacggcaataaaagccgatgacatcttgagcacgctgcagagcctggacctaatccagtatcgcaaagggcagcacgtcatctgcgcggacccgaaggtcctcgaccgccacctgaaggcggcgggtcggggaggcctggacgtggacgttagcaagctgatctggactccctacaaggagcaaggctaaaagcgcagctgctcccagccccagattagagtccctgtacataacgtttggtactaggatctcccctcagctctcacttcactcgtgtaccgtgaaaactgtacactgtaacaaccacattgctgtgtttgtgctgtctgccgcgatagtctccgaaatcgaaagaaacatcacccaactctttactcttggctcgcaactccccctttcacatcctacctttgatagccaaatcagggcttggagtggaaccagcagcgaagcgagactggtctccgtccccataattgaaagggaaacagctgtgcggctgatctgctgactgtgacgcctgagtgtccattgccagatacggatggttgcaaattctaattgctccgtccctaaccttcgaaaataaatgtgcatctcaattatcgaaaaataaatttttt

SEQ ID NO: 70432 - DNA, 465 bp, Zea Mays
caagcaatcttgtcttggccccttaacatctgacagctctaattgaagaacaacaaattttgattgaagatgttggtgtgggatcttctgcaccaataggagcaaataaacaaacaagtgaagatgacacaaagattccatattcggttcgttttctggagtgggcatgtgatttggagggttttgttctataaggctatggtgattctgccattgctcaaggatgttgtccagtcaatggaagaaacaatcaatagctagagaaggtgtcatgcagaggagcataatacgacacagaaggataggcatccagccatcacaaaacagaagcatgcgtgccaatctgcggttacgtgcaataaatataaccttctagggtaaaataaaccagcaacacttataatatagccgcacgcatgcacctgttctattttttgttggaatcagatgcatttatgatttaag

SEQ ID NO: 70433 - DNA, 736 bp, Zea Mays
ctggttttgttaccctagtggacgacgcctcaacgagctgttgcagtggcatcactgcttgctcaagcaccgatgcctgaggctgcccggcttactggcgcgccaggttttcagggttcagaaaaccacatttcttttgcctccccgccgcagacaagtagcaatattcctactacagttctgggcgcctccacctccaccaagcttcctgctgaactccagttgccagagggcagcgtcgtagcgaccaatgcagagctcaagacgccaggaccagaagctacgccttcaactctcaagccatctgctaatccagaaccacgcgtggatggcgatgacatcactgatgctctctacggtgaccatggtcatcgcaggctccctattttcagggagatctgtccagattgagtgtcagcctcagcattctcaacgtcgctgatggatgcatttcggccctagctgtatattctgtttatctatcttgtacccagggtcttggtagcaattactctggagggtcatttctagtttcctaaaggagaatctctcttctcttgatctattcataatcgagaaagctatgatataatttacttgattaagccagcaattgaccgttttgcttgacgttggttgtagatgaaccttgtcatatatatgaattgagccttggtttttttttgccttttgtaactgagttgcagggtttccatatccactcgatgactgtctt

SEQ ID NO: 70434 - DNA, 1047 bp, Zea Mays
atttttggttgtttgtgcatgagagtccagctccacctgagagatacgggctcgccgcgatggaattcgagtcagcggcgcggcggcggcagcgcagactctcttcgccgtcgttgaggacccacctcacgccggcttttgacgccgtggccggtggggagggcggcgtgtctgggtactcttcatcgtcgtcttccagcggtctcgaactcgggttcgacgcctctctcctccgcaaccgccgctccggtttcgccgccccctcggacctggacagccgtgtcctcctctactccccgcagtccgtgccgccgcagatgagggcggcgtacctggcagcggatgatggggtcagggcacctggcgtcaaccactacggatccaaatatgaggctgcccggcttactggcgcgccaggttttcagggttcagaaaaccacatttcttttgcctccccgccgcagacaagtagcaatattcctactacagttctgggcgcctccacctccaccaagcttcctgctgaactccagttgccagagggcagcgtcgtagcgaccaatgcagagctcaagacgccaggaccagaagctacgccttcaactctcaagccatctgctaatccagaaccacgcgtggatggcgatgacatcactgatgctctctacggtgaccatggtcatcgcaggctccctattttcagggagatctgtccagattgagtgtcagcctcagcattctcaacgtcgctgatggatgcatttcggccctagctgtatattctgtttatctatcttgtacccagggtcttggtagcaattactctggagggtcatttctagtttcctaaaggagaatctctcttctcttgatctattcataatcgagaaagctatgatataatttacttgattaagccagcaattgaccgttttgcttgacgttggttgtagatgaaccttgtcatatatatgaattgagccttggtttttttttgccttttgtaactgagttgcagggtttccatatccactcgatgactgtctt

SEQ ID NO: 70435 - DNA, 810 bp, Zea Mays
ttttcctatccgcatcgcttcgtgttcccttcccgcccggccgaagcgaacaagcaaccgccaccaatggctgcgtgaccttgcgggcgagggcgagggcggcggcggcggcggaaaggagcaaggaggcttccagaagctttcgtccatgcaaggctgcccggcttactggcgcgccaggttttcagggttcagaaaaccacatttcttttgcctccccgccgcagacaagtagcaatattcctactacagttctgggcgcctccacctccaccaagcttcctgctgaactccagttgccagagggcagcgtcgtagcgaccaatgcagagctcaagacgccaggaccagaagctacgccttcaactctcaagccatctgctaatccagaaccacgcgtggatggcgatgacatcactgatgctctctacggtgaccatggtcatcgcaggctccctattttcagggagatctgtccagattgagtgtcagcctcagcattctcaacgtcgctgatggatgcatttcggccctagctgtatattctgtttatctatcttgtacccagggtcttggtagcaattactctggagggtcatttctagtttcctaaaggagaatctctcttctcttgatctattcataatcgagaaagctatgatataatttacttgattaagccagcaattgaccgttttgcttgacgttggttgtagatgaaccttgtcatatatatgaattgagccttggtttttttttgccttttgtaactgagttgcagggtttccatatccactcgatgactgtctt

SEQ ID NO: 70436 - DNA, 1174 bp, Zea Mays
ctttttcctatccgcatcgcttcgtgttcccttcccgcccggccgaagcgaacaagcaaccgccaccaatggctgcgtgaccttgcgggcgagggcgagggcggcggcggcggcggaaaggagcaaggaggcttccagaagctttcgtccatgcaagctccacctgagagatacgggctcgccgcgatggaattcgagtcagcggcgcggcggcggcagcgcagactctcttcgccgtcgttgaggacccacctcacgccggcttttgacgccgtggccggtggggagggcggcgtgtctgggtactcttcatcgtcgtcttccagcggtctcgaactcgggttcgacgcctctctcctccgcaaccgccgctccggtttcgccgccccctcggacctggacagccgtgtcctcctctactccccgcagtccgtgccgccgcagatgagggcggcgtacctggcagcggatgatggggtcagggcacctggcgtcaaccactacggatccaaatatgaggctgcccggcttactggcgcgccaggttttcagggttcagaaaaccacatttcttttgcctccccgccgcagacaagtagcaatattcctactacagttctgggcgcctccacctccaccaagcttcctgctgaactccagttgccagagggcagcgtcgtagcgaccaatgcagagctcaagacgccaggaccagaagctacgccttcaactctcaagccatctgctaatccagaaccacgcgtggatggcgatgacatcactgatgctctctacggtgaccatggtcatcgcaggctccctattttcagggagatctgtccagattgagtgtcagcctcagcattctcaacgtcgctgatggatgcatttcggccctagctgtatattctgtttatctatcttgtacccagggtcttggtagcaattactctggagggtcatttctagtttcctaaaggagaatctctcttctcttgatctattcataatcgagaaagctatgatataatttacttgattaagccagcaattgaccgttttgcttgacgttggttgtagatgaaccttgtcatatatatgaattgagccttggtttttttttgccttttgtaactgagttgcagggtttccatatccactcgatgactgtctt

SEQ ID NO: 70437 - DNA, 4658 bp, Zea Mays
tgccccacggatcagcgagacagagatctcagttccttctcccgctccggttcttcttcctgccgcgccgtgggccccgcccttgtcccctttcttctccgtctcctccctgcctatcccatcccatcatcgtcgtctccctaccgcaatcgaagaaagggccgggctcaaccgagccctcaaatcgccgcatcgcgcccctagctctctccgtctccctcatcctgacctcgattcgagctagtttcgggaagcaaaggtaccggatcaacccccttgatcacccatggtgcccagggatagggcgcacagcgccgctgctgccaccgcgcccccgacggagaagcccgttcaagggcctatccagaacaacaagtgcgaaaagaaggctccaaagaaggtgcataaatctgagagagagaaacgtaagcgggacaagcagaatgatctctttggtgagctgggaaacatgctagaacctgatagacagaacaatggaaaggcatgcatattaagtgacactacacgaatacttaaagatctactttcacaagtagaatctcttcgaaaggagaacaacacgctgaagaatgagtctcattatgtaagtgagctcctcttagtttctgaaatctgaccatatcataattcggggaattttaattaaatttgtatggacttctgattaacttgatgctctgtatactttaagaaagagaaaaatctgtgccctgtgggtggtaatttttcctattcagaaaaacctgtgagtagtattatttgtttttgtatccagaagaatttgctcgcccaagggcctaattttacttgtgtaatattgaaggttccattatgtgtaacatcatttgcgaagatatccgcaaataaaacttacaacaccacttgaaaagatttgctataccctagccactgattcaacatatgcttctttcattgtacaaaacaggtcgctttggagagaaatgaactactggatgaaaccaatatgatccgtggcgaaatatcagaccttcaaaacgagatgaggatgcggctagaagacaactctatctggagtcatgacacttctagaccaaatcttacagcaccccatccagcgaccacagtatttacattgcagcattcaccacatccacaagtcattgcaacaatgacacttcctctgcaacagccagcagtcgttgagcaatcttacgctgccccacggcgggagctacagctattccctgaagctgcacccactgaagatactgagccaccacaaaacgaggggacctctaatcatgtgatgcggccgcaggcgaggtacccaccagcaatgaccactttgcctgggcatgtatatccagtccttccaagagtggaagatgagcaacgcagcagcggcactactggtagcagagaggaaggcggggtaggcaaccgttaacagctcgagtacaaaacgagagatctggctcacagtttgaaaagttctcgtagtttcaactttaatgtttccattctagctgatgtgctaaagaaaccttaaaacctatgcggctgtgcctgcacatgtaaatatcattccactctgtattacccgaacttaatcttcaactagttacttcgatgggagcaatctatctttgttagttcgtccacttcgtagtttatctgtagtacttgtaccaagcagaagttcaaggagtacctgattcgagaaaacatgttaatcactctttgtatctatagttctgtacaagcttggataactccgagcaaacgctagtctgcctgatgtaccactgtacagttacaatttttctcactggaaatcccaccttgagtatggttgcttaaattcagcaagtctggatacatcagcaagcaacaataacggagctgcagcctgcttccttcttcacagagattttctgtgtttctgaatccctcacttgagctatctcatcccaccggccttctgatgcgtatgtgttcgacagcagaatggcatctgaaggatggtagtggccaatggcgtccaactgtgcctgcaccatcctccccagcttcgcattgccatacactctgcaggcggcaagcaacgctctccacgccgtagcatcaccatgggatgacactctctgtatgagttcataggcttcatgtagacgccctgctcgtcccaggagatcgatgacgcagctgtagtgctcagggctgggagatatgccgtatcgctgcaccattgtctcgaggaattccttcccttcctgcaccaacccgccatggctacaagcagttagcagggctaggaaggtgaccccgttaggagccacaccgtcttccatcatcctgtagaacaaggagacggcggagcctggctgcccattaactccaaatcccatgaccatcgctgtccatgccttcacgtccctatctcgtattgcatcgaagactgcagctgcctcactggggcacccgcacttgaagtacatgtccatgatcgctgtcccgagcgtgctgtcaagctcgagccgtgcctcttcagcaagctcatggacagagcgaccggctgccaatgccccagacgctccacacgcagagagaacgcccacaagcgtcccagaactaggtctcatcccaagctgtctcattccaccaatcaagtccatcgcctcctggatctgcccagcctttgcatagccatccgccatacaattacacagcaccaagtctcttctagctgtctcatgaaacaccttgcttgcacactcaatgctgccctccctcacatacatcctcaccattgctgccgcaaccttcacatcgtcgcataaccctgccttagcgcagaagccatgcactgactccccttgccagccacacccaatcaaggtgatcaccacggtcacgttgacatccactccagaccacctcattgccgtgaacatctgaaccgctgtgcccacatcccctacattgacgtagcctccgatcatcgtgttccacgacacagcgtccttctcaggcatttccgcgaacatcctccgcgcgtccgccatgctcccgctgctgcagtagaagtggcacagcacattccgtaggctcacaatgtccaggaacccgtactgcagcacgagcgcgtgcacctgcttgccaatcgaagctgcctcggcgtcattggggattttcgcgcagagcgcgagcagcggctggaacgcgaactcgttgagctcggggaggcgcgcccgcgcggaggcgaggaccgagagggatgcggcgagggaggtcgcggaggggcacgacgagagcgcgcggaggatggcggtgtggtggaagagcgtgggccgcggcacggcggcgaagagggagagcgcgtaggggagcggcgcgagcggggaggcgatgagcctagcggtggggaacgcgtggtgcgggaagtgggagcatttcagcatcagggcgtggagctggagcaagtgccctggccgcgtcgccgacttgagcagcgccgtcagcggcttccgcggtagcatcgcccttggttgggagggcacgagctcgccggctcgttcgcatgagaggagacgtgtggactgttcgtcaggcgcgcgtgcgcgtgtcgccagtgcaaaaaaaataacgtaggctcagcggcgttcggggtgtccatctagcgaaaaaagcccagagcgggccgatgacactttacattactgaaccattactgaacatatagaatttagtgaagcccggcccatctaatcaaagctagggtttcttcgtccactccacccccccggctccgtctctcacgttagtttctaccgcaactatgggaagactttcaagaagccacgacgtccgtactagaaggagcgcctagatgctgagttgaagctggttggtgagtatggcctccgctgcaagcgtgagctgtggcgcgtgcagtatgccctgagccgtatcaggaatgcagccagggagctgctcaccctggatgagaagaacccacgccgtatctttgagggcgaggcactcctccgccgcatgaaccgacatggtctccttggtgagggacagaacaagcttgattatgtgctttgccctcactgttgagaactttctccagcgccgcctccagaccatcgtcttcaagaatggcatggccaagtccatccaccatgctcgtgttctgatcaggtagcgccatatcagggtggggaggcagcccgtcaacattccctcgttcatggtcagggtcgagtcagagaagcacatcgacttctccctcaccagtcctctgggtggtggtcctgctggaagggtgaagcgcaagaaccagaaggcctctggcggcggtggcggcggcgatggcgaggaggacgacgagtagtgctacgtaggattctgcgacatcaattggttgaaaatgtgagatggacactctagattattgtgtggtcttcaattcagaaatcctgcgatggtaaacaattttgcagcccgctactgacactcttgtttaattcaagcattggcatcgtgtccggacaccatgaattgtattcttgtttgcgtggctatttgctcgtctagcctttaggtcaatgtttaagactgaatcaaattggtagccaagtttgcattct

SEQ ID NO: 70438 - DNA, 1287 bp, Zea Mays
cccgctcccgttccccaatcccagcaccgatccccgcccctccgacgcgccggcggccatggacatgtcgtcgatcgccgcgaacctcggtctctcggggtcccgccccgtcatccgcaaggccggcgagctccgccgcctctgcgacgtcaacttcgattcttctgtcctcggcatcggcgaggtctgcaaggccatcatctgcctggagatcgccgcgtccaagttacaggtgatatttgaccgggcggaggctgtgcgtatgagcgggatgtctgagaaggcgtacatcagatcattcaattcgctccaaaatggtcttggtgtcaagacgactttggatgtgcgtgaattgggcatccagtttggctgtgtcaggctgatacctttcgttcagaagggattgtcactgtttcaacatcaatgacagacctctgctttgatgtttttgggatagccaaggagaagaaggatccaaagtccatcaaagggaacagagaactgctggatgttttgccaagcaaaaggaaacatgaagatggcggtgattcatctgcatccgatgaatcctcagacaacgatcaagacgagctagatttaccaactcacaagaggcgcaagaagatggagagagaagcatacaaggactggaagtcgtccgttctctcctcgaacaagaaaaccaaaccagaccctgccaagcctaggaggcaagctcaactcaacttcaagaagccggcagaagtacctcctgcagccaactagatgagtacgaaccctcttcgcaacaaatgcagtttgctgagactgaaagtggtgtatttgctccatcctcatctatgttccttctgaacgcatatgggaaaaaaaagcccggacgcctttttgctccttgtttttgtttatctttgtgacgtaagttattcatgaaagtgctgttgtgcggcatacatactagtgtaaatgacgacatgtttatattctagtgttacatagagagagagagagagatgtgttggaggatgactagctggtctgttatctcatctcatatctagtcttcttggtgctgtcagcccaattggcgccacttgcaccctgacgccctggcgcctacgcgtgcccatgtggtcatctggcaggctccaggtattctttaaagaatacgagatagcgataccaaaatatctcttcaagtgatcaaatcgtcaaggaacagagtcacccgggttgaaaagtaggagtggaaagtgcttctgacgtccgttgcgcttaacctaatgcagg

SEQ ID NO: 70439 - DNA, 1581 bp, Zea Mays
cccaaatccgcctcccgctcccgttccccaatcccagcaccgatccccgcccctccgacgcgccggcggccatggacatgtcgtcgatcgccgcgaacctcggtctctcggggtcccgccccgtcatccgcaaggccggcgagctccgccgcctctgcgacgtcaacttcgattcttctgtcctcggcatcggcgaggtctgcaaggccatcatctgcctggagatcgccgcgtccaagttacaggtgatatttgaccgggcggaggctgtgcgtatgagcgggatgtctgagaaggcgtacatcagatcattcaattcgctccaaaatggtcttggtgtcaagacgactttggatgtgcgtgaattgggcatccagtttggctgtgtcaggctgatacctttcgttcagaagggattgtcactctataaggagcgcttccttgctgcattgccaccttcacgccgggcaagcactgactttggtcggccagtgtttactgcagcagcattctacttatgtgcgaggaggcacaagctcaaagttgacaaactaaagctgatcgatctatgtggcacatcgagcgccgaatttacaacgaggaacaacaggcatcaaaatccgagccgctgtgggttgtcgcgctttcagacactctgacgcttaggcgatggaacctctgtggggattagggtttcgtggtgaggtttcaacatcaatgacagacctctgctttgatgtttttgggatagccaaggagaagaaggatccaaagtccatcaaagggaacagagaactgctggatgttttgccaagcaaaaggaaacatgaagatggcggtgattcatctgcatccgatgaatcctcagacaacgatcaagacgagctagatttaccaactcacaagaggcgcaagaagatggagagagaagcatacaaggactggaagtcgtccgttctctcctcgaacaagaaaaccaaaccagaccctgccaagcctaggaggcaagctcaactcaacttcaagaagccggcagaagtacctcctgcagccaactagatgagtacgaaccctcttcgcaacaaatgcagtttgctgagactgaaagtggtgtatttgctccatcctcatctatgttccttctgaacgcatatgggaaaaaaaagcccggacgcctttttgctccttgtttttgtttatctttgtgacgtaagttattcatgaaagtgctgttgtgcggcatacatactagtgtaaatgacgacatgtttatattctagtgttacatagagagagagagagagatgtgttggaggatgactagctggtctgttatctcatctcatatctagtcttcttggtgctgtcagcccaattggcgccacttgcaccctgacgccctggcgcctacgcgtgcccatgtggtcatctggcaggctccaggtattctttaaagaatacgagatagcgataccaaaatatctcttcaagtgatcaaatcgtcaaggaacagagtcacccgggttgaaaagtaggagtggaaagtgcttctgacgtccgttgcgcttaacctaatgcagg

SEQ ID NO: 70440 - DNA, 1484 bp, Zea Mays
ccgccatttccctcgcccgccaaaacggccccgaaaccgcccagatcgccactatttgtccccgccaaaatgcccaaatccgcctcccgctcccgttccccaatcccagcaccgatccccgcccctccgacgcgccggcggccatggacatgtcgtcgatcgccgcgaacctcggtctctcggggtcccgccccgtcatccgcaaggccggcgagctccgccgcctctgcgacgtcaacttcgattcttctgtcctcggcatcggcgaggtctgcaaggccatcatctgcctggagatcgccgcgtccaagttacaggtgatatttgaccgggcggaggctgtgcgtatgagcgggatgtctgagaaggcgtacatcagatcattcaattcgctccaaaatggtcttggtgtcaagacgactttggatgtgcgtgaattgggcatccagtttggctgtgtcaggctgatacctttcgttcagaagggattgtcactctataaggagcgcttccttgctgcattgccaccttcacgccgggcaagcactgactttggtcggccagtgtttactgcagcagcattctacttatgtgcgaggaggcacaaggtttcaacatcaatgacagacctctgctttgatgtttttgggatagccaaggagaagaaggatccaaagtccatcaaagggaacagagaactgctggatgttttgccaagcaaaaggaaacatgaagatggcggtgattcatctgcatccgatgaatcctcagacaacgatcaagacgagctagatttaccaactcacaagaggcgcaagaagatggagagagaagcatacaaggactggaagtcgtccgttctctcctcgaacaagaaaaccaaaccagaccctgccaagcctaggaggcaagctcaactcaacttcaagaagccggcagaagtacctcctgcagccaactagatgagtacgaaccctcttcgcaacaaatgcagtttgctgagactgaaagtggtgtatttgctccatcctcatctatgttccttctgaacgcatatgggaaaaaaaagcccggacgcctttttgctccttgtttttgtttatctttgtgacgtaagttattcatgaaagtgctgttgtgcggcatacatactagtgtaaatgacgacatgtttatattctagtgttacatagagagagagagagagatgtgttggaggatgactagctggtctgttatctcatctcatatctagtcttcttggtgctgtcagcccaattggcgccacttgcaccctgacgccctggcgcctacgcgtgcccatgtggtcatctggcaggctccaggtattctttaaagaatacgagatagcgataccaaaatatctcttcaagtgatcaaatcgtcaaggaacagagtcacccgggttgaaaagtaggagtggaaagtgcttctgacgtccgttgcgcttaacctaatgcagg

SEQ ID NO: 70441 - DNA, 841 bp, Zea Mays
ccctgtcctcaacctcaagccgccacgctccaccaacacgcgcgcgctggcttcttcaacctcggttgcttgctcgcaacaagacacggatcgtcagagcaagagctctggtgacctgacgattctgctcttgttctcgtacggcgccggtgcctagcgtctgtagcctttttgtgtgtgttttttcgcccatatctccccaccaccaccaccaccaacctcagccgcagttcacccgcgtcaccgcacgagtacacgagcaatccgcaagcgataacctgcaagctgaggggaaaggaaggtgaaggccagctgttttgctcacggagaaagaggttcgtcgttgatcaacacggacacaccatggtgaggccgccgtgctgcgacaaggagggcgtcaagaaggggccatggacgccggaggaggacctcgtcctcgtctcctacatccaggagcacggccccggcaactggcgcgccgtcccggccagaaccggtatgtgctttactgcatgcttatttccatcacgctttccactatcagtatcagtatagtttttcttttttctttttttgaactactccgtaaagagcaagagctgatcggtggaggatttttcgcgcagggctgatgcggtgcagcaagagctgccgtctgcggtggaccaactacctccggccgggcatcaagcgcggcaacttcaccgagcaggaggagaagctcatcgtgcacctccaggccctcctcggcaacaggattaataatagcagtccgacatgtgtgatgggcttgacgactcccagtcccagcgacggcgacgacgacgacaccgggacgcag

SEQ ID NO: 70442 - DNA, 736 bp, Zea Mays
cagttctagaatttatcactccactgactgcagcagtgcgatggaatcacagtgtaacatttccagtacccttaaaggactggatcctcaacctggatcaaagaggaaatgcccacacctcaaatccaatgaagaggatgtagagctttcggatagctttacgcgctctgtccatcttacaccaataaagcgactcaaggaaagccatgacgccagatatggagcgggggaatccgccaaaactacccatttctctaatagttcctctggtggttaccacgaggatatgaatttacacaactcaagaggttgccttcagaactccccctgtaatgttgaggatgccctgtccaaagggtttgagggttgtatttcgatgaaatgtccattttgatgtaacaaatttcgtgtcagcccagaagctatacattcccttttagcggcaaaatcatcctgtgtgtgtatctagtcattttgtgcaaaaaaaatgcagtaattgaatgcattttttttaaaatgctttaaagtgtattgatcagcatcggacctgtttttagaggcatcggtatgaagggagggctgttggttgtgtttgcttgacagcaaatccctcccattcaataccccgcactttctgaaaattgcgacttccatattcccttcctttgagctttgttaagacagtattgtattacaagatctgaatcgctgcaagcgtgcagaataatgaatgcca

SEQ ID NO: 70443 - DNA, 1493 bp, Zea Mays
ctccctctcgtctccctctcaacttcttgccttctcgcgctcgcctccgtttcgtgtcggctcgctctaaacgtgagatcggggaggtggtggacttggggtcgttgtggtatcggcggcgagccgcgggggcctagggtttcctgccttcctggtttggatccgcgccctggcccatgggatccggaggcttcgcggccgcggtggccgcgtgcccctccgccgccgaggccttccttaagtactatggtattgtatcaggaggtacaagtgcggagtcaagacaagcattggttgagctttcactagctatagacggaattgaaggaatgagggatgtgatatttgctgatattccaaagctcattccatttattgatctggaggatatgagcctattcagttgcttctacgattttgttttcttcatctgccgtgaaaagggtcaaaagagtgtcactattcagagagctgtagcagcatggaggattgttctaagtggaaggttccgtttgcttgatcgatggtgtaacttcgttgagtaccaacgccataacatatccgaggatacttggcagcagctgctagctttcagcaggtgtgtaaatgaagatctggaaggttatgacccacgaggtgcttggcctgttctgattgatgattttgttgagcaaatgcacagggttttcaactctagcctaccctaacttctttgggactaaaaggctttgttgttgttaaagctctgcatattgtccaaggctctaatttatcactccactgactgcagcagtgcgatggaatcacagtgtaacatttccagtacccttaaaggactggatcctcaacctggatcaaagaggaaatgcccacacctcaaatccaatgaagaggatgtagagctttcggatagctttacgcgctctgtccatcttacaccaataaagcgactcaaggaaagccatgacgccagatatggagcgggggaatccgccaaaactacccatttctctaatagttcctctggtggttaccacgaggatatgaatttacacaactcaagaggttgccttcagaactccccctgtaatgttgaggatgccctgtccaaagggtttgagggttgtatttcgatgaaatgtccattttgatgtaacaaatttcgtgtcagcccagaagctatacattcccttttagcggcaaaatcatcctgtgtgtgtatctagtcattttgtgcaaaaaaaatgcagtaattgaatgcattttttttaaaatgctttaaagtgtattgatcagcatcggacctgtttttagaggcatcggtatgaagggagggctgttggttgtgtttgcttgacagcaaatccctcccattcaataccccgcactttctgaaaattgcgacttccatattcccttcctttgagctttgttaagacagtattgtattacaagatctgaatcgctgcaagcgtgcagaataatgaatgcca

SEQ ID NO: 70444 - DNA, 1285 bp, Zea Mays
atctctggagggactggacaaagtttgagagatcctataatagggtccaccattgatctctgtctaggtccatccaaccgtcgaacgacctttccaccatggacatctcgggaggaggctggcgagtattgtatcaggaggtacaagtgcggagtcaagacaagcattggttgagctttcactagctatagacggaattgaaggaatgagggatgtgatatttgctgatattccaaagctcattccatttattgatctggaggatatgagcctattcagttgcttctacgattttgttttcttcatctgccgtgaaaagggtcaaaagagtgtcactattcagagagctgtagcagcatggaggattgttctaagtggaaggttccgtttgcttgatcgatggtgtaacttcgttgagtaccaacgccataacatatccgaggatacttggcagcagctgctagctttcagcaggtgtgtaaatgaagatctggaaggttatgacccacgaggtgcttggcctgttctgattgatgattttgttgagcaaatgcacagaatttatcactccactgactgcagcagtgcgatggaatcacagtgtaacatttccagtacccttaaaggactggatcctcaacctggatcaaagaggaaatgcccacacctcaaatccaatgaagaggatgtagagctttcggatagctttacgcgctctgtccatcttacaccaataaagcgactcaaggaaagccatgacgccagatatggagcgggggaatccgccaaaactacccatttctctaatagttcctctggtggttaccacgaggatatgaatttacacaactcaagaggttgccttcagaactccccctgtaatgttgaggatgccctgtccaaagggtttgagggttgtatttcgatgaaatgtccattttgatgtaacaaatttcgtgtcagcccagaagctatacattcccttttagcggcaaaatcatcctgtgtgtgtatctagtcattttgtgcaaaaaaaatgcagtaattgaatgcattttttttaaaatgctttaaagtgtattgatcagcatcggacctgtttttagaggcatcggtatgaagggagggctgttggttgtgtttgcttgacagcaaatccctcccattcaataccccgcactttctgaaaattgcgacttccatattcccttcctttgagctttgttaagacagtattgtattacaagatctgaatcgctgcaagcgtgcagaataatgaatgcca

SEQ ID NO: 70445 - DNA, 552 bp, Zea Mays
caaggaaaagactcagatacgcacgtacgctccggcggtttcgatcgagcgaggtgggcggaaggagaaggcatggcgaggctcctggtgatgatcttgctcgctctgtttctcctcgccgtcgcgcccgctcaagcggctcgcttcacaaatcacgcagggggcttgagagcgaggatcggcgaggctccggcgctagaggctgcgcaagtttcagcagagcgaacgacacaggaggggcagatctggcggtctttgcttcgaatcgtcggtgttgacgcctctgttttcttccggatgccggtgaagaagaccggcatgggagcggccggtgaatttacctacgcttcattggagaagaccgacgtgggtttggagggaggcatcgcgcgctccgtcggtggacgagggggcgggcacggcggtgggatgggtggggtgcgggtgagatttgctggggaggctggcgcaagggggcagggctggggctgcgggtgcggggcgggggcaagcgggggcacggagctatggacaacctccttagcttcttaa

SEQ ID NO: 70446 - DNA, 1482 bp, Zea Mays
cttctaggtttctgcttgctgattggttatatttgtgctgcagtgctgtaaatattgactggccactagctgatgcggagggcgcaaagaggcagcccatgattgagctgctcaaggagcacggtggattgacatatgggaaaactggaagccattttgaaccaaagacgattccaccacctctaacaaataaggctgactgggagattaacccacttgaattggacttcacaaaagcaactgttatcggaaagggctctttcggtgaaattctgaaagcaaattggcgaggaacacctattgctgtcaagcgcattcttccatccttatctgatgacaggctggtgatccaagattttaagcatgaagtcaacttgctaataaagctgagacatccaaatgttgtccagttccttggagcagttacagaaaccaagcctctaatgctaattactgagtttctacgaggaggtgatcttcatcaatatctgaaggacaaaggtgcactcaacccacttaccgctgttaattttgcactggatattgcaagaggaatggcatatcttcataatgagcctaatgttgtgattcaccgagatttaaaaccaagaaacattcttctggtgaattctgctgccaaccacttgaaggttggagacttcggccttagcaagatcatcaaagcgcagcatgcgaatgatgtatacaagatgactggagagacaggaagctatcggtacatggcccctgaagttttcaagcaccggaaatatgacaagaaagttgatatcttctcttttgccatgattctatatgagatgctggaaggtgattcacccttctccaactacgaaccttatgaggctgctaagtacgtggcagatgggcatcgtccggttttccgtaaaaatcataccactgagttgaaggatttggttgagctatgttggtctggggacatcagtctgaggccatctttcttggagatcctcaagaggcttgagaagctcaaggagcattattcacacgagaaccactggcatttgttccagtagcagtgcgtatatttttttactatgactgttgtcatgattggggatttctcgggagatctgacattgatgaatgtacaaaattgggtgcctctagaaaggtccactgagactgaaaatcttcttgctgttttacgtttatgctatttctggtaaaaaaaacagaagctttctttgtaccacatcctctacaactttgtctttaggcttctctccgtaaatgatggaaaatcttgaactatgttctgcagcatttaggttgatgtggtgttctatatagatcggttgattttctttttctattcttttctgttgccaggatctttatatgcttagactcattggctatgggaagtgtttttaccgtgcatattctgcaagtgttacttgtcatagaagttactgtaaactttataaagggaaatatttg

SEQ ID NO: 70447 - DNA, 1471 bp, Zea Mays
gtcaaatgtgccgttgctacaatgatcggttcattccgctctttaaagcatccactagctgatgcggagggcgcaaagaggcagcccatgattgagctgctcaaggagcacggtggattgacatatgggaaaactggaagccattttgaaccaaagacgattccaccacctctaacaaataaggctgactgggagattaacccacttgaattggacttcacaaaagcaactgttatcggaaagggctctttcggtgaaattctgaaagcaaattggcgaggaacacctattgctgtcaagcgcattcttccatccttatctgatgacaggctggtgatccaagattttaagcatgaagtcaacttgctaataaagctgagacatccaaatgttgtccagttccttggagcagttacagaaaccaagcctctaatgctaattactgagtttctacgaggaggtgatcttcatcaatatctgaaggacaaaggtgcactcaacccacttaccgctgttaattttgcactggatattgcaagaggaatggcatatcttcataatgagcctaatgttgtgattcaccgagatttaaaaccaagaaacattcttctggtgaattctgctgccaaccacttgaaggttggagacttcggccttagcaagatcatcaaagcgcagcatgcgaatgatgtatacaagatgactggagagacaggaagctatcggtacatggcccctgaagttttcaagcaccggaaatatgacaagaaagttgatatcttctcttttgccatgattctatatgagatgctggaaggtgattcacccttctccaactacgaaccttatgaggctgctaagtacgtggcagatgggcatcgtccggttttccgtaaaaatcataccactgagttgaaggatttggttgagctatgttggtctggggacatcagtctgaggccatctttcttggagatcctcaagaggcttgagaagctcaaggagcattattcacacgagaaccactggcatttgttccagtagcagtgcgtatatttttttactatgactgttgtcatgattggggatttctcgggagatctgacattgatgaatgtacaaaattgggtgcctctagaaaggtccactgagactgaaaatcttcttgctgttttacgtttatgctatttctggtaaaaaaaacagaagctttctttgtaccacatcctctacaactttgtctttaggcttctctccgtaaatgatggaaaatcttgaactatgttctgcagcatttaggttgatgtggtgttctatatagatcggttgattttctttttctattcttttctgttgccaggatctttatatgcttagactcattggctatgggaagtgtttttaccgtgcatattctgcaagtgttacttgtcatagaagttactgtaaactttataaagggaaatatttg

SEQ ID NO: 70448 - DNA, 1542 bp, Zea Mays
gtcaaatgtgccgttgctacaatgatcggttcattccgctctttaaagcatccactagctgatgcggagggcgcaaagaggcagcccatgattgagctgctcaaggagcacggtggattgacatatgtatgtggtcgataacttgatttaacaggtattccaattccacctgtcactgtatggtatggatttagtgggggaaaactggaagccattttgaaccaaagacgattccaccacctctaacaaataaggctgactgggagattaacccacttgaattggacttcacaaaagcaactgttatcggaaagggctctttcggtgaaattctgaaagcaaattggcgaggaacacctattgctgtcaagcgcattcttccatccttatctgatgacaggctggtgatccaagattttaagcatgaagtcaacttgctaataaagctgagacatccaaatgttgtccagttccttggagcagttacagaaaccaagcctctaatgctaattactgagtttctacgaggaggtgatcttcatcaatatctgaaggacaaaggtgcactcaacccacttaccgctgttaattttgcactggatattgcaagaggaatggcatatcttcataatgagcctaatgttgtgattcaccgagatttaaaaccaagaaacattcttctggtgaattctgctgccaaccacttgaaggttggagacttcggccttagcaagatcatcaaagcgcagcatgcgaatgatgtatacaagatgactggagagacaggaagctatcggtacatggcccctgaagttttcaagcaccggaaatatgacaagaaagttgatatcttctcttttgccatgattctatatgagatgctggaaggtgattcacccttctccaactacgaaccttatgaggctgctaagtacgtggcagatgggcatcgtccggttttccgtaaaaatcataccactgagttgaaggatttggttgagctatgttggtctggggacatcagtctgaggccatctttcttggagatcctcaagaggcttgagaagctcaaggagcattattcacacgagaaccactggcatttgttccagtagcagtgcgtatatttttttactatgactgttgtcatgattggggatttctcgggagatctgacattgatgaatgtacaaaattgggtgcctctagaaaggtccactgagactgaaaatcttcttgctgttttacgtttatgctatttctggtaaaaaaaacagaagctttctttgtaccacatcctctacaactttgtctttaggcttctctccgtaaatgatggaaaatcttgaactatgttctgcagcatttaggttgatgtggtgttctatatagatcggttgattttctttttctattcttttctgttgccaggatctttatatgcttagactcattggctatgggaagtgtttttaccgtgcatattctgcaagtgttacttgtcatagaagttactgtaaactttataaagggaaatatttg

SEQ ID NO: 70449 - DNA, 1504 bp, Zea Mays
ggcttgtcaaatgtgccgttgctacaatgatcggttcattccgctctttaaagcatccactagctgatgcggagggcgcaaagaggcagcccatgattgagctgctcaaggagcacggtggattgacatatgtatgtggtcgataacttgatttaacaggggaaaactggaagccattttgaaccaaagacgattccaccacctctaacaaataaggctgactgggagattaacccacttgaattggacttcacaaaagcaactgttatcggaaagggctctttcggtgaaattctgaaagcaaattggcgaggaacacctattgctgtcaagcgcattcttccatccttatctgatgacaggctggtgatccaagattttaagcatgaagtcaacttgctaataaagctgagacatccaaatgttgtccagttccttggagcagttacagaaaccaagcctctaatgctaattactgagtttctacgaggaggtgatcttcatcaatatctgaaggacaaaggtgcactcaacccacttaccgctgttaattttgcactggatattgcaagaggaatggcatatcttcataatgagcctaatgttgtgattcaccgagatttaaaaccaagaaacattcttctggtgaattctgctgccaaccacttgaaggttggagacttcggccttagcaagatcatcaaagcgcagcatgcgaatgatgtatacaagatgactggagagacaggaagctatcggtacatggcccctgaagttttcaagcaccggaaatatgacaagaaagttgatatcttctcttttgccatgattctatatgagatgctggaaggtgattcacccttctccaactacgaaccttatgaggctgctaagtacgtggcagatgggcatcgtccggttttccgtaaaaatcataccactgagttgaaggatttggttgagctatgttggtctggggacatcagtctgaggccatctttcttggagatcctcaagaggcttgagaagctcaaggagcattattcacacgagaaccactggcatttgttccagtagcagtgcgtatatttttttactatgactgttgtcatgattggggatttctcgggagatctgacattgatgaatgtacaaaattgggtgcctctagaaaggtccactgagactgaaaatcttcttgctgttttacgtttatgctatttctggtaaaaaaaacagaagctttctttgtaccacatcctctacaactttgtctttaggcttctctccgtaaatgatggaaaatcttgaactatgttctgcagcatttaggttgatgtggtgttctatatagatcggttgattttctttttctattcttttctgttgccaggatctttatatgcttagactcattggctatgggaagtgtttttaccgtgcatattctgcaagtgttacttgtcatagaagttactgtaaactttataaagggaaatatttg

SEQ ID NO: 70450 - DNA, 1463 bp, Zea Mays
cgcgatcagctggctccgcagcttttcaacctactattggctgccactagctgatgcggagggcgcaaagaggcagcccatgattgagctgctcaaggagcacggtggattgacatatgggaaaactggaagccattttgaaccaaagacgattccaccacctctaacaaataaggctgactgggagattaacccacttgaattggacttcacaaaagcaactgttatcggaaagggctctttcggtgaaattctgaaagcaaattggcgaggaacacctattgctgtcaagcgcattcttccatccttatctgatgacaggctggtgatccaagattttaagcatgaagtcaacttgctaataaagctgagacatccaaatgttgtccagttccttggagcagttacagaaaccaagcctctaatgctaattactgagtttctacgaggaggtgatcttcatcaatatctgaaggacaaaggtgcactcaacccacttaccgctgttaattttgcactggatattgcaagaggaatggcatatcttcataatgagcctaatgttgtgattcaccgagatttaaaaccaagaaacattcttctggtgaattctgctgccaaccacttgaaggttggagacttcggccttagcaagatcatcaaagcgcagcatgcgaatgatgtatacaagatgactggagagacaggaagctatcggtacatggcccctgaagttttcaagcaccggaaatatgacaagaaagttgatatcttctcttttgccatgattctatatgagatgctggaaggtgattcacccttctccaactacgaaccttatgaggctgctaagtacgtggcagatgggcatcgtccggttttccgtaaaaatcataccactgagttgaaggatttggttgagctatgttggtctggggacatcagtctgaggccatctttcttggagatcctcaagaggcttgagaagctcaaggagcattattcacacgagaaccactggcatttgttccagtagcagtgcgtatatttttttactatgactgttgtcatgattggggatttctcgggagatctgacattgatgaatgtacaaaattgggtgcctctagaaaggtccactgagactgaaaatcttcttgctgttttacgtttatgctatttctggtaaaaaaaacagaagctttctttgtaccacatcctctacaactttgtctttaggcttctctccgtaaatgatggaaaatcttgaactatgttctgcagcatttaggttgatgtggtgttctatatagatcggttgattttctttttctattcttttctgttgccaggatctttatatgcttagactcattggctatgggaagtgtttttaccgtgcatattctgcaagtgttacttgtcatagaagttactgtaaactttataaagggaaatatttg

SEQ ID NO: 70451 - DNA, 2342 bp, Zea Mays
ccgattcagatctcgcgcacagcacgcgagccgagggggacaaatagtaggatttccagagagacagaaacaaacggagacgcagagaaaccctttccacccagattcgttcggttcggttcggttccgaccacgcgggcgcgggagagagtggggagatgagcgcggctgcggaggacgcggctgcggccgaagggggatccggaggcgggagcagcggcgcggggtcgtcggaagggggcgcgcggcgccggttcgacgacaagggcctcgtcgcccgcacctcgctcatcctgtggcacacgcaccagaacgacgtcggcgccgtgcggaagctgctggaggaggacgccgcgctcgtcaacgcccgggactacgacagccgcacgccgctccacgtcgccgcgctccacggctggcacgacgtcgccgagtgcctcgtcgccaacggcgccgacgtcaacgcccaggaccgctggcagaacacgccactagctgatgcggagggcgcaaagaggcagcccatgattgagctgctcaaggagcacggtggattgacatatgtatgtggtcgataacttgatttaacaggtattccaattccacctgtcactgtatggtatggatttagtgggtgagtcccccctgtatattgctctgcagctgttatcgcctttattggtgcaatgtttctaaatacatgtccaggacgcatggtccccaatattgttgttggaagtagaggtgtcatttcttttctttggcagcatattaggtgacctaaggggatattatgtaggacttggagagcttgataatttacacatgcctctgttgatattttggtgcaccttttgcttgcaactaaattaatcatgctctatttgactaagagtttttaaactggccattgtagatataatatgattttgtaggttgatgcatcgtttgatctttcttatctccttcgaatttgttctgtgtatacattatgtaggggaaaactggaagccattttgaaccaaagacgattccaccacctctaacaaataaggctgactgggagattaacccacttgaattggacttcacaaaagcaactgttatcggaaagggctctttcggtgaaattctgaaagcaaattggcgaggaacacctattgctgtcaagcgcattcttccatccttatctgatgacaggctggtgatccaagattttaagcatgaagtcaacttgctaataaagctgagacatccaaatgttgtccagttccttggagcagttacagaaaccaagcctctaatgctaattactgagtttctacgaggaggtgatcttcatcaatatctgaaggacaaaggtgcactcaacccacttaccgctgttaattttgcactggatattgcaagaggaatggcatatcttcataatgagcctaatgttgtgattcaccgagatttaaaaccaagaaacattcttctggtgaattctgctgccaaccacttgaaggttggagacttcggccttagcaagatcatcaaagcgcagcatgcgaatgatgtatacaagatgactggagagacaggaagctatcggtacatggcccctgaagttttcaagcaccggaaatatgacaagaaagttgatatcttctcttttgccatgattctatatgagatgctggaaggtgattcacccttctccaactacgaaccttatgaggctgctaagtacgtggcagatgggcatcgtccggttttccgtaaaaatcataccactgagttgaaggatttggttgagctatgttggtctggggacatcagtctgaggccatctttcttggagatcctcaagaggcttgagaagctcaaggagcattattcacacgagaaccactggcatttgttccagtagcagtgcgtatatttttttactatgactgttgtcatgattggggatttctcgggagatctgacattgatgaatgtacaaaattgggtgcctctagaaaggtccactgagactgaaaatcttcttgctgttttacgtttatgctatttctggtaaaaaaaacagaagctttctttgtaccacatcctctacaactttgtctttaggcttctctccgtaaatgatggaaaatcttgaactatgttctgcagcatttaggttgatgtggtgttctatatagatcggttgattttctttttctattcttttctgttgccaggatctttatatgcttagactcattggctatgggaagtgtttttaccgtgcatattctgcaagtgttacttgtcatagaagttactgtaaactttataaagggaaatatttg

SEQ ID NO: 70452 - DNA, 1958 bp, Zea Mays
gtcagatccgattcagatctcgcgcacagcacgcgagccgagggggacaaatagtaggatttccagagagacagaaacaaacggagacgcagagaaaccctttccacccagattcgttcggttcggttcggttccgaccacgcgggcgcgggagagagtggggagatgagcgcggctgcggaggacgcggctgcggccgaagggggatccggaggcgggagcagcggcgcggggtcgtcggaagggggcgcgcggcgccggttcgacgacaagggcctcgtcgcccgcacctcgctcatcctgtggcacacgcaccagaacgacgtcggcgccgtgcggaagctgctggaggaggacgccgcgctcgtcaacgcccgggactacgacagccgcacgccgctccacgtcgccgcgctccacggctggcacgacgtcgccgagtgcctcgtcgccaacggcgccgacgtcaacgcccaggaccgctggcagaacacgccactagctgatgcggagggcgcaaagaggcagcccatgattgagctgctcaaggagcacggtggattgacatatgtattccaattccacctgtcactgtatggtatggatttagtgggggaaaactggaagccattttgaaccaaagacgattccaccacctctaacaaataaggctgactgggagattaacccacttgaattggacttcacaaaagcaactgttatcggaaagggctctttcggtgaaattctgaaagcaaattggcgaggaacacctattgctgtcaagcgcattcttccatccttatctgatgacaggctggtgatccaagattttaagcatgaagtcaacttgctaataaagctgagacatccaaatgttgtccagttccttggagcagttacagaaaccaagcctctaatgctaattactgagtttctacgaggaggtgatcttcatcaatatctgaaggacaaaggtgcactcaacccacttaccgctgttaattttgcactggatattgcaagaggaatggcatatcttcataatgagcctaatgttgtgattcaccgagatttaaaaccaagaaacattcttctggtgaattctgctgccaaccacttgaaggttggagacttcggccttagcaagatcatcaaagcgcagcatgcgaatgatgtatacaagatgactggagagacaggaagctatcggtacatggcccctgaagttttcaagcaccggaaatatgacaagaaagttgatatcttctcttttgccatgattctatatgagatgctggaaggtgattcacccttctccaactacgaaccttatgaggctgctaagtacgtggcagatgggcatcgtccggttttccgtaaaaatcataccactgagttgaaggatttggttgagctatgttggtctggggacatcagtctgaggccatctttcttggagatcctcaagaggcttgagaagctcaaggagcattattcacacgagaaccactggcatttgttccagtagcagtgcgtatatttttttactatgactgttgtcatgattggggatttctcgggagatctgacattgatgaatgtacaaaattgggtgcctctagaaaggtccactgagactgaaaatcttcttgctgttttacgtttatgctatttctggtaaaaaaaacagaagctttctttgtaccacatcctctacaactttgtctttaggcttctctccgtaaatgatggaaaatcttgaactatgttctgcagcatttaggttgatgtggtgttctatatagatcggttgattttctttttctattcttttctgttgccaggatctttatatgcttagactcattggctatgggaagtgtttttaccgtgcatattctgcaagtgttacttgtcatagaagttactgtaaactttataaagggaaatatttg

SEQ ID NO: 70453 - DNA, 1206 bp, Zea Mays
atgaacttttcagttattcaagaggatggcattagcctgatagagagcgcccatggtatcaaggacttctcgattacaagcatgaaaggaggttaccgccgcgtactccaacgccctattgattttgaatgggacctgatgacttacacagatgacaatacacctttagtaccaactgatttagatgttctatcagaaacccagttatcagaaacaaatgagccattatctgatgggacttgcagttgtccatcaagtgattccaggttgcaagttttattggacacctctggaccaaccattgaagctagctcagtagaaaccaaatcaattggcatctcagatctgtcaccagagaaactggctgtgaaattagaatttactctaccagcatcatcttatgctacaatggccataagggagttgacgaaaacttcaacttcggtgacttcctgttcaattcttttttttggttttgtaaatacttaaattatctttgctactcttttttttcatcttttggtcattgaaccgaaccatttgagctccaccacgatcacataattttctttagggcatctcactcaatggtttctctttgacagactattatcgtacaaaacaatgtattcagtttgcactccaatgcttgaactcatccaccaacatcctctcttatagccataatgttatgttttcctttggtaatgtacaggttgcttgccagaaaacattaaacggctgaccaagccttgcagtgtaaaatgctttcttcgcaagctggtatccattgtgacaaaacacaccatgtgggtttaactgggcccaggggatggaaccaagcttcggaaaagaaggaacatttcggttctttgctctcactaggaatgatgttccatgattttttagaaaactggaacaggtgttggtctgacatacatggatgtaaacttagatgactgaaaagtagctttaccttttgcagacagatctttttgtctttagtttatgcatcgtatattgtgatgtctgaactggggtcgcaacctcgtgggcatgcacgtatggccatgcacttctttgaggcgtgcactacctcataacgttcacgtccttaccagcactgggtcattttgtggacggcaatcatatcctgaaagaatatgcatagcgagcaacagaagctatccattctgtgttcgctct

SEQ ID NO: 70454 - DNA, 1317 bp, Zea Mays
cccttttattgctagtatgtaatgaagaatgtggtacatcacttttatgtatgtacatagctaccagagttacttatggaatcatgctgcaagtatgagagtggaaaagtatggtatttcacaagttgtagaaggtgacttagtttacaaaactgggtcctcccttggagaagcaattaccacagatacatttgatgacgatgatagccacgttaattcacctgaaatggaaatgtcttgtgaaacacttactgaagaaatgatccaatctgtgaaggtagttgattctgaagatttattgaaggcagtctattcgtttgaggatgttgttctccctttgcctgggtcagaaacattgtttcctgggaatgaagttactatgatttatcatgaaatagccaagaaggatggcattagcctgatagagagcgcccatggtatcaaggacttctcgattacaagcatgaaaggaggttaccgccgcgtactccaacgccctattgattttgaatgggacctgatgacttacacagatgacaatacacctttagtaccaactgatttagatgttctatcagaaacccagttatcagaaacaaatgagccattatctgatgggacttgcagttgtccatcaagtgattccaggttgcaagttttattggacacctctggaccaaccattgaagctagctcagtagaaaccaaatcaattggcatctcagatctgtcaccagagaaactggctgtgaaattagaatttactctaccagcatcatcttatgctacaatggccataagggagttgacgaaaacttcaacttcggttgcttgccagaaaacattaaacggctgaccaagccttgcagtgtaaaatgctttcttcgcaagctggtatccattgtgacaaaacacaccatgtgggtttaactgggcccaggggatggaaccaagcttcggaaaagaaggaacatttcggttctttgctctcactaggaatgatgttccatgattttttagaaaactggaacaggtgttggtctgacatacatggatgtaaacttagatgactgaaaagtagctttaccttttgcagacagatctttttgtctttagtttatgcatcgtatattgtgatgtctgaactggggtcgcaacctcgtgggcatgcacgtatggccatgcacttctttgaggcgtgcactacctcataacgttcacgtccttaccagcactgggtcattttgtggacggcaatcatatcctgaaagaatatgcatagcgagcaacagaagctatccattctgtgttcgctct

SEQ ID NO: 70455 - DNA, 2951 bp, Zea Mays
gccgattgcttccccgaatctcttcccccaatccggcgcccggcagaatgcgaggccgccacctcctaaaacccatgcccgtcctcctcaacactaccccttcccggctccccgccgcccacttccgcgtccgtgacgcagcccgcccgcccgcgccgctggcagagcccgacgtcggcatctctcgcttcgcctcctccatcccgggcttccgcggcgcgctgaagcagcgctactccgacttcatcgtccacgaggtcgcctgcgacggcgccctcgtccgcctcacttccttcgatctccccgacatcgaggagagtggagataatgcggaggacggtgattccgacgccaccgcggatccatcgcgggcgctcgagtcgttccggctgctctgcggcgaagcggattaccacgccttgaggggattcctggagagggtttcggagggaggtgatggttatttgtcgccaatcattctgtcagctgatgcagataaggcacatcgatccgaggtgcacgagttcatcaagaggaatttcaagttcctgaacacggatacagttgagcacaatgatggtattcagaaatgcattagggtgcgcttgggttcagggccacgctgtggtaggggaaggaacaggagaggcatggacacttcaggctggagagatgacaagccgtttgacagtagaggctctacattctggccttatcacctggggaagttcctgaggtttcacctttataaggagaacaaggacacgcatgaggcactaggggttataggaaaattggcaggggttcagccaagatcgtttggatttgcagggacaaaggataaacgtgctgttacaacccaacaggtgacagtttttaaagtgcatgctagcaggctggctgctcttaatagcaaactcacaggtatcagagttggagactttagttacgtgaaggagggccttgctcttggtcgactcagagggaaccactttgcaattactttgaggaatgttattgcagaatcggccgatgatataaatgctgcagttaatggtctaagtaaaaatggatttatcaattactatggcttacagcgctttggcagcggttctgtacctacccactttgttggtgctgctttgctcagaggagaatggagacatgctgttagcttgattcttggtacaagggtacattataaatggcatgttgatgttgatgcagcacttaggggcatgccccgacatctcacagtggagagagctattcttcagagattgaagaactaccctggcaactatctacaagcactaatggctatacctaaagcactgaggctgatgtatgtacatagctaccagagttacttatggaatcatgctgcaagtatgagagtggaaaagtatggtatttcacaagttgtagaaggtgacttagtttacaaaactgggtcctcccttggagaagcaattaccacagatacatttgatgacgatgatagccacgttaattcacctgaaatggaaatgtcttgtgaaacacttactgaagaaatgatccaatctgtgaaggtagttgattctgaagatttattgaaggcagtctattcgtttgaggatgttgttctccctttgcctgggtcagaaacattgtttcctgggaatgaagttactatgatttatcatgaaatagccaagaaggatggcattagcctgatagagagcgcccatggtatcaaggacttctcgattacaagcatgaaaggaggttaccgccgcgtactccaacgccctattgattttgaatgggacctgatgacttacacagatgacaatacacctttagtaccaactgatttagatgttctatcagaaacccagttatcagaaacaaatgagccattatctgatgggacttgcagttgtccatcaagtgattccaggttgcaagttttattggacacctctggaccaaccattgaagctagctcagtagaaaccaaatcaattggcatctcagatctgtcaccagagaaactggctgtgaaattagaatttactctaccagcatcatcttatgctacaatggccataagggagttgacgaaaacttcaacttcggtgacttcctgttcaattcttttttttggttttgtaaatacttaaattatctttgctactcttttttttcatcttttggtcattgaaccgaaccatttgagctccaccacgatcacataattttctttagggcatctcactcaatggtttctctttgacagactattatcgtacaaaacaatgtattcagtttgcactccaatgcttgaactcatccaccaacatcctctcttatagccataatgttatgttttcctttggtaatgtacaggttgcttgccagaaaacattaaacggctgaccaagccttgcagtgtaaaatgctttcttcgcaagctggtatccattgtgacaaaacacaccatgtgggtttaactgatattttcttttctgaatcatacaacttggaggatttctctacttatggagcttctaaaacagatgggcccaggggatggaaccaagcttcggaaaagaaggaacatttcggttctttgctctcactaggaatgatgttccatgattttttagaaaactggaacaggtgttggtctgacatacatggatgtaaacttagatgactgaaaagtagctttaccttttgcagacagatctttttgtctttagtttatgcatcgtatattgtgatgtctgaactggggtcgcaacctcgtgggcatgcacgtatggccatgcacttctttgaggcgtgcactacctcataacgttcacgtccttaccagcactgggtcattttgtggacggcaatcatatcctgaaagaatatgcatagcgagcaacagaagctatccattctgtgttcgctct

SEQ ID NO: 70456 - DNA, 2794 bp, Zea Mays
gccgattgcttccccgaatctcttcccccaatccggcgcccggcagaatgcgaggccgccacctcctaaaacccatgcccgtcctcctcaacactaccccttcccggctccccgccgcccacttccgcgtccgtgacgcagcccgcccgcccgcgccgctggcagagcccgacgtcggcatctctcgcttcgcctcctccatcccgggcttccgcggcgcgctgaagcagcgctactccgacttcatcgtccacgaggtcgcctgcgacggcgccctcgtccgcctcacttccttcgatctccccgacatcgaggagagtggagataatgcggaggacggtgattccgacgccaccgcggatccatcgcgggcgctcgagtcgttccggctgctctgcggcgaagcggattaccacgccttgaggggattcctggagagggtttcggagggaggtgatggttatttgtcgccaatcattctgtcagctgatgcagataaggcacatcgatccgaggtgcacgagttcatcaagaggaatttcaagttcctgaacacggatacagttgagcacaatgatggtattcagaaatgcattagggtgcgcttgggttcagggccacgctgtggtaggggaaggaacaggagaggcatggacacttcaggctggagagatgacaagccgtttgacagtagaggctctacattctggccttatcacctggggaagttcctgaggtttcacctttataaggagaacaaggacacgcatgaggcactaggggttataggaaaattggcaggggttcagggacaaaggataaacgtgctgttacaacccaacaggtgacagtttttaaagtgcatgctagcaggctggctgctcttaatagcaaactcacaggtatcagagttggagactttagttacgtgaaggagggccttgctcttggtcgactcagagggaaccactttgcaattactttgaggaatgttattgcagaatcggccgatgatataaatgctgcagttaatggtctaagtaaaaatggatttatcaattactatggcttacagcgctttggcagcggttctgtacctacccactttgttggtgctgctttgctcagaggagaatggagacatgctgttagcttgattcttggtacaagggtacattataaatggcatgttgatgttgatgcagcacttaggggcatgccccgacatctcacagtggagagagctattcttcagagattgaagaactaccctggcaactatctacaagcactaatggctatacctaaagcactgaggctgatgtatgtacatagctaccagagttacttatggaatcatgctgcaagtatgagagtggaaaagtatggtatttcacaagttgtagaaggtgacttagtttacaaaactgggtcctcccttggagaagcaattaccacagatacatttgatgacgatgatagccacgttaattcacctgaaatggaaatgtcttgtgaaacacttactgaagaaatgatccaatctgtgaaggtagttgattctgaagatttattgaaggcagtctattcgtttgaggatgttgttctccctttgcctgggtcagaaacattgtttcctgggaatgaagttactatgatttatcatgaaatagccaagaaggatggcattagcctgatagagagcgcccatggtatcaaggacctgatgacttacacagatgacaatacacctttagtaccaactgatttagatgttctatcagaaacccagttatcagaaacaaatgagccattatctgatgggacttgcagttgtccatcaagtgattccaggttgcaagttttattggacacctctggaccaaccattgaagctagctcagtagaaaccaaatcaattggcatctcagatctgtcaccagagaaactggctgtgaaattagaatttactctaccagcatcatcttatgctacaatggccataagggagttgacgaaaacttcaacttcggtgacttcctgttcaattcttttttttggttttgtaaatacttaaattatctttgctactcttttttttcatcttttggtcattgaaccgaaccatttgagctccaccacgatcacataattttctttagggcatctcactcaatggtttctctttgacagactattatcgtacaaaacaatgtattcagtttgcactccaatgcttgaactcatccaccaacatcctctcttatagccataatgttatgttttcctttggtaatgtacaggttgcttgccagaaaacattaaacggctgaccaagccttgcagtgtaaaatgctttcttcgcaagctggtatccattgtgacaaaacacaccatgtgggtttaactgggcccaggggatggaaccaagcttcggaaaagaaggaacatttcggttctttgctctcactaggaatgatgttccatgattttttagaaaactggaacaggtgttggtctgacatacatggatgtaaacttagatgactgaaaagtagctttaccttttgcagacagatctttttgtctttagtttatgcatcgtatattgtgatgtctgaactggggtcgcaacctcgtgggcatgcacgtatggccatgcacttctttgaggcgtgcactacctcataacgttcacgtccttaccagcactgggtcattttgtggacggcaatcatatcctgaaagaatatgcatagcgagcaacagaagctatccattctgtgttcgctct

SEQ ID NO: 70457 - DNA, 2592 bp, Zea Mays
gccgattgcttccccgaatctcttcccccaatccggcgcccggcagaatgcgaggccgccacctcctaaaacccatgcccgtcctcctcaacactaccccttcccggctccccgccgcccacttccgcgtccgtgacgcagcccgcccgcccgcgccgctggcagagcccgacgtcggcatctctcgcttcgcctcctccatcccgggcttccgcggcgcgctgaagcagcgctactccgacttcatcgtccacgaggtcgcctgcgacggcgccctcgtccgcctcacttccttcgatctccccgacatcgaggagagtggagataatgcggaggacggtgattccgacgccaccgcggatccatcgcgggcgctcgagtcgttccggctgctctgcggcgaagcggattaccacgccttgaggggattcctggagagggtttcggagggaggtgatggttatttgtcgccaatcattctgtcagctgatgcagataaggcacatcgatccgaggtgcacgagttcatcaagaggaatttcaagttcctgaacacggatacagttgagcacaatgatggtattcagaaatgcattagggtgcgcttgggttcagggccacgctgtggtaggggaaggaacaggagaggcatggacacttcaggctggagagatgacaagccgtttgacagtagaggctctacattctggccttatcacctggggaagttcctgaggtttcacctttataaggagaacaaggacacgcatgaggcactaggggttataggaaaattggcaggggttcagccaagatcgtttggatttgcagggacaaaggataaacgtgctgttacaacccaacaggtgacagtttttaaagtgcatgctagcaggctggctgctcttaatagcaaactcacagttacgtgaaggagggccttgctcttggtcgactcagagggaaccactttgcaattactttgaggaatgttattgcagaatcggccgatgatataaatgctgcagttaatggtctaagtaaaaatggatttatcaattactatggcttacagcgctttggcagcggttctgtacctacccactttgttggtgctgctttgctcagaggagaatggagacatgctgttagcttgattcttggtacaagggtacattataaatggcatgttgatgttgatgcagcacttaggggcatgccccgacatctcacagtggagagagctattcttcagagattgaagaactaccctggcaactatctacaagcactaatggctatacctaaagcactgaggctgatgtatgtacatagctaccagagttacttatggaatcatgctgcaagtatgagagtggaaaagtatggtatttcacaagttgtagaaggtgacttagtttacaaaactgggtcctcccttggagaagcaattaccacagatacatttgatgacgatgatagccacgttaattcacctgaaatggaaatgtcttgtgaaacacttactgaagaaatgatccaatctgtgaaggtagttgattctgaagatttattgaaggcagtctattcgtttgaggatgttgttctccctttgcctgggtcagaaacattgtttcctgggaatgaagttactatgatttatcatgaaatagccaagaaggatggcattagcctgatagagagcgcccatggtatcaaggacttctcgattacaagcatgaaaggaggttaccgccgcgtactccaacgccctattgattttgaatgggacctgatgacttacacagatgacaatacacctttagtaccaactgatttagatgttctatcagaaacccagttatcagaaacaaatgagccattatctgatgggacttgcagttgtccatcaagtgattccaggttgcaagttttattggacacctctggaccaaccattgaagctagctcagtagaaaccaaatcaattggcatctcagatctgtcaccagagaaactggctgtgaaattagaatttactctaccagcatcatcttatgctacaatggccataagggagttgacgaaaacttcaacttcggttgcttgccagaaaacattaaacggctgaccaagccttgcagtgtaaaatgctttcttcgcaagctggtatccattgtgacaaaacacaccatgtgggtttaactgggcccaggggatggaaccaagcttcggaaaagaaggaacatttcggttctttgctctcactaggaatgatgttccatgattttttagaaaactggaacaggtgttggtctgacatacatggatgtaaacttagatgactgaaaagtagctttaccttttgcagacagatctttttgtctttagtttatgcatcgtatattgtgatgtctgaactggggtcgcaacctcgtgggcatgcacgtatggccatgcacttctttgaggcgtgcactacctcataacgttcacgtccttaccagcactgggtcattttgtggacggcaatcatatcctgaaagaatatgcatagcgagcaacagaagctatccattctgtgttcgctct

SEQ ID NO: 70458 - DNA, 2870 bp, Zea Mays
gcggacagccgattgcttccccgaatctcttcccccaatccggcgcccggcagaatgcgaggccgccacctcctaaaacccatgcccgtcctcctcaacactaccccttcccggctccccgccgcccacttccgcgtccgtgacgcagcccgcccgcccgcgccgctggcagagcccgacgtcggcatctctcgcttcgcctcctccatcccgggcttccgcggcgcgctgaagcagcgctactccgacttcatcgtccacgaggtcgcctgcgacggcgccctcgtccgcctcacttccttcgatctccccgacatcgaggagagtggagataatgcggaggacggtgattccgacgccaccgcggatccatcgcgggcgctcgagtcgttccggctgctctgcggcgaagcggattaccacgccttgaggggattcctggagagggtttcggagggaggtgatggttatttgtcgccaatcattctgtcagctgatgcagataaggcacatcgatccgaggtgcacgagttcatcaagaggaatttcaagttcctgaacacggatacagttgagcacaatgatggtattcagaaatgcattagggtgcgcttgggttcagggccacgctgtggtaggggaaggaacaggagaggcatggacacttcaggctggagagatgacaagccgtttgacagtagaggctctacattctggccttatcacctggggaagttcctgaggtttcacctttataaggagaacaaggacacgcatgaggcactaggggttataggaaaattggcaggggttcagccaagatcgtttggatttgcagggacaaaggataaacgtgctgttacaacccaacaggtgacagtttttaaagtgcatgctagcaggctggctgctcttaatagcaaactcacagttacgtgaaggagggccttgctcttggtcgactcagagggaaccactttgcaattactttgaggaatgttattgcagaatcggccgatgatataaatgctgcagttaatggtctaagtaaaaatggatttatcaattactatggcttacagcgctttggcagcggttctgtacctacccactttgttggtgctgctttgctcagaggagaatggagacatgctgttagcttgattcttggtacaagggtacattataaatggcatgttgatgttgatgcagcacttaggggcatgccccgacatctcacagtggagagagctattcttcagagattgaagaactaccctggcaactatctacaagcactaatggctatacctaaagcactgaggctgatgtatgtacatagctaccagagttacttatggaatcatgctgcaagtatgagagtggaaaagtatggtatttcacaagttgtagaaggtgacttagtttacaaaactgggtcctcccttggagaagcaattaccacagatacatttgatgacgatgatagccacgttaattcacctgaaatggaaatgtcttgtgaaacacttactgaagaaatgatccaatctgtgaaggtagttgattctgaagatttattgaaggcagtctattcgtttgaggatgttgttctccctttgcctgggtcagaaacattgtttcctgggaatgaagttactatgatttatcatgaaatagccaagaaggatggcattagcctgatagagagcgcccatggtatcaaggacttctcgattacaagcatgaaaggaggttaccgccgcgtactccaacgccctattgattttgaatgggacctgatgacttacacagatgacaatacacctttagtaccaactgatttagatgttctatcagaaacccagttatcagaaacaaatgagccattatctgatgggacttgcagttgtccatcaagtgattccaggttgcaagttttattggacacctctggaccaaccattgaagctagctcagtagaaaccaaatcaattggcatctcagatctgtcaccagagaaactggctgtgaaattagaatttactctaccagcatcatcttatgctacaatggccataagggagttgacgaaaacttcaacttcggtgacttcctgttcaattcttttttttggttttgtaaatacttaaattatctttgctactcttttttttcatcttttggtcattgaaccgaaccatttgagctccaccacgatcacataattttctttagggcatctcactcaatggtttctctttgacagactattatcgtacaaaacaatgtattcagtttgcactccaatgcttgaactcatccaccaacatcctctcttatagccataatgttatgttttcctttggtaatgtacaggttgcttgccagaaaacattaaacggctgaccaagccttgcagtgtaaaatgctttcttcgcaagctggtatccattgtgacaaaacacaccatgtgggtttaactgggcccaggggatggaaccaagcttcggaaaagaaggaacatttcggttctttgctctcactaggaatgatgttccatgattttttagaaaactggaacaggtgttggtctgacatacatggatgtaaacttagatgactgaaaagtagctttaccttttgcagacagatctttttgtctttagtttatgcatcgtatattgtgatgtctgaactggggtcgcaacctcgtgggcatgcacgtatggccatgcacttctttgaggcgtgcactacctcataacgttcacgtccttaccagcactgggtcattttgtggacggcaatcatatcctgaaagaatatgcatagcgagcaacagaagctatccattctgtgttcgctct

SEQ ID NO: 70459 - DNA, 2293 bp, Zea Mays
gccgattgcttccccgaatctcttcccccaatccggcgcccggcagaatgcgaggccgccacctcctaaaacccatgcccgtcctcctcaacactaccccttcccggctccccgccgcccacttccgcgtccgtgacgcagcccgcccgcccgcgccgctggcagagcccgacgtcggcatctctcgcttcgcctcctccatcccgggcttccgcggcgcgctgaagcagcgctactccgacttcatcgtccacgaggtcgcctgcgacggcgccctcgtccgcctcacttccttcgatctccccgacatcgaggagagtggagataatgcggaggacggtgattccgacgccaccgcggatccatcgcgggcgctcgagtcgttccggctgctctgcggcgaagcggattaccacgccttgaggggattcctggagagggtttcggagggaggtgatggttatttgtcgccaatcattctgtcagctgatgcagataaggcacatcgatccgaggtgcacgagttcatcaagaggaatttcaagttcctgaacacggatacagttgagcacaatgatggtattcagaaatgcattagggtgcgcttgggttcagggccacgctgtggtaggggaaggaacaggagaggcatggacacttcaggctggagagatgacaagccgtttgacagtagaggctctacattctggccttatcacctggggaagttcctgaggtttcacctttataaggagaacaaggacacgcatgaggcactaggggttataggaaaattggcaggggttcagccaagatcgtttggatttgcagggacaaaggataaacgtgctgttacaacccaacaggtgacagtttttaaagtgcatgctagcaggctggctgctcttaatagcaaactcacaggtatcagagttggagactttagttacgtgaaggagggccttgctcttggtcgactcagagggaaccactttgcaattactttgaggaatgttattgcagaatcggccgatgatataaatgctgcagttaatggtctaagtaaaaatggatttatcaattactatggcttacagcgctttggcagcggttctgtacctacccactttgttggtgctgctttgctcagaggagaatggagacatgctgttagcttgattcttggtacaagggtacattataaatggcatgttgatgttgatgcagcacttaggggcatgccccgacatctcacagtggagagagctattcttcagagattgaagaactaccctggcaactatctacaagcactaatggctatacctaaagcactgaggctgatgtatgtacatagctaccagagttacttatggaatcatgctgcaagtatgagagtggaaaagtatggtatttcacaagttgtagaaggtgacttagtttacaaaactgggtcctcccttggagaagcaattaccacagatacatttgatgacgatgatagccacgttaattcacctgaaatggaaatgtcttgtgaaacacttactgaagaaatgatccaatctgtgaaggtagttgattctgaagatttattgaaggcagtctattcgtttgaggatgttgttctccctttgcctgggtcagaaacattgtttcctgggaatgaagttactatgatttatcatgaaatagccaagaaggatggcattagcctgatagagagcgcccatggtatcaaggacttctcgattacaagcatgaaaggaggttaccgccgcgtactccaacgccctattgattttgaatgggacctgatgacttacacagatgacaatacacctttagtaccaactgatttagatgttctatcagaaacccagttatcagaaacaaatgagccattatctgatgggacttgcagttgtccatcaagtgattccaggttgcaagttttattggacacctctggaccaaccattgaagctagctcagtagaaaccaaatcaattggcatctcagatctgtcaccagagaaactggctgtgaaattagaatttactctaccagcatcatcttatgctacaatggccataagggagttgacgaaaacttcaacttcggttgcttgccagaaaacattaaacggctgaccaagccttgcagtgtaaaatgctttcttcgcaagctggtatccattgtgacaaaacacaccatgtgggtttaactgatattttcttttctgaatcatacaacttggaggatttctctacttatggagcttctaaaacag

SEQ ID NO: 70460 - DNA, 2240 bp, Zea Mays
cgcgcacaagcggacagccgattgcttccccgaatctcttcccccaatccggcgcccggcagaatgcgaggccgccacctcctaaaacccatgcccgtcctcctcaacactaccccttcccggctccccgccgcccacttccgcgtccgtgacgcagcccgcccgcccgcgccgctggcagagcccgacgtcggcatctctcgcttcgcctcctccatcccgggcttccgcggcgcgctgaagcagcgctactccgacttcatcgtccacgaggtcgcctgcgacggcgccctcgtccgcctcacttccttcgatctccccgacatcgaggagagtggagataatgcggaggacggtgattccgacgccaccgcggatccatcgcgggcgctcgagtcgttccggctgctctgcggcgaagcggattaccacgccttgaggggattcctggagagggtttcggagggaggtgatggttatttgtcgccaatcattctgtcagctgatgcagataaggcacatcgatccgaggtgcacgagttcatcaagaggaatttcaagttcctgaacacggatacagttgagcacaatgatggtattcagaaatgcattagggtgcgcttgggttcagggccacgctgtggtaggggaaggaacaggagaggcatggacacttcaggctggagagatgacaagccgtttgacagtagaggctctacattctggccttatcacctggggaagttcctgaggtttcacctttataaggagaacaaggacacgcatgaggcactaggggttataggaaaattggcaggggttcagccaagatcgtttggatttgcagggacaaaggataaacgtgctgttacaacccaacaggtgacagtttttaaagtgcatgctagcaggctggctgctcttaatagcaaactcacaggtatcagagttggagactttagttacgtgaaggagggccttgctcttggtcgactcagagggaaccactttgcaattactttgaggaatgttattgcagaatcggccgatgatataaatgctgcagttaatggtctaagtaaaaatggatttatcaattactatggcttacagcgctttggcagcggttctgtacctacccactttgttggtgctgctttgctcagaggagaatggagacatgctgttagcttgattcttggtacaagggtacattataaatggcatgttgatgttgatgcagcacttaggggcatgccccgacatctcacagtggagagagctattcttcagagattgaagaactaccctggcaactatctacaagcactaatggctatacctaaagcactgaggctgatgtatgtacatagctaccagagttacttatggaatcatgctgcaagtatgagagtggaaaagtatggtatttcacaagttgtagaaggtgacttagtttacaaaactgggtcctcccttggagaagcaattaccacagatacatttgatgacgatgatagccacgttaattcacctgaaatggaaatgtcttgtgaaacacttactgaagaaatgatccaatctgtgaaggtagttgattctgaagatttattgaaggcagtctattcgtttgaggatgttgttctccctttgcctgggtcagaaacattgtttcctgggaatgaagttactatgatttatcatgaaatagccaagaaggatggcattagcctgatagagagcgcccatggtatcaaggacctgatgacttacacagatgacaatacacctttagtaccaactgatttagatgttctatcagaaacccagttatcagaaacaaatgagccattatctgatgggacttgcagttgtccatcaagtgattccaggttgcaagttttattggacacctctggaccaaccattgaagctagctcagtagaaaccaaatcaattggcatctcagatctgtcaccagagaaactggctgtgaaattagaatttactctaccagcatcatcttatgctacaatggccataagggagttgacgaaaacttcaacttcggttgcttgccagaaaacattaaacggctgaccaagccttgcagtgtaaaatgctttcttcgcaagctggtatccattgtgacaaaacacaccatgtgggtttaactgatattttcttttctgaatcatacaacttggaggatttctctacttatggagcttctaaaacag

SEQ ID NO: 70461 - DNA, 948 bp, Zea Mays
attcatgcccacaaattccttccaaacagaaacagcaccagactcctttccttttcctctcgctccctcgctctttctcccgcaactcggcgtcggcgaccgctgccgctgccctactacgccaggtgcactgctgctggtctagtagcctcgtcggtcccttcgacaggttttcttcgggtcttcgccggcgacgagcacccgccagcaggtggccaatgataatgttggcggtcagagggctgaacagtaaaatgctggagaaaagactgcacggatgcctgctcctgctcgtcttccttctggcagacgtatcaggctcggggcagtgcgtcttcacaggaagctccatggcaggaggcggcacgccggctgcgagcgcccccagcggcctctccccgccgtcgtcgttcacgccgggcattgggagcccctccaacaccctgatccctctggacggcgccgagagcctggtgtccagcgtctggtcggcgatttgcgccccgctgctggcgttgccgctcttcttcctctgaccaccagcggcggcagatgagtggccggtgcttgctagtagagcgcttattatgtttttttgttcttgttcctgggtagatcgctctcgtgtggcggtgttgatgtacatgtcagagtcgtgttggatgcgctgggatgggagattacataagatgctacagagatctattcatacgtagaaagtggaccggactccaccgtgtttccgtgtgttctggtctcagatctgttcgtggcagaaaccagatgtaaatgtatcatgttcactactctctgtgcacagaccaagggaagctgcagtccactgaccacacacacaccacgctaggattcagactcagaggcttcgtctctgtccgatgccgtcgcgcccagcgtcggcgtggccctggacgctgctgccttctcccg

SEQ ID NO: 70462 - DNA, 1288 bp, Zea Mays
attcatgcccacaaattccttccaaacagaaacagcaccagactcctttccttttcctctcgctccctcgctctttctcccgcaactcggcgtcggcgaccgctgccgctgccctactacgccaggtgcactgctgctggtctagtagcctcgtcggtcccttcgacaggttttcttcgggtcttcgccggcgacgagcacccgccaggtggccaatgataatgttggcggtcagagggctgaacagtaaaatgctggagaaaagactgcacggatgcctgctcctgctcgtcttccttctggcagacgtatcagtaaagatgtacgtggagcctgcatgagggcagccgtgctgaaactgccgtcgatctgggtccagactcggaggacggcagcaagaggaggtcgctggccaccaccatgttctgtgtggcgaaacagggcgcggacgcgacggcgctgcaggcagggctcaactgggcgtgcgggcagggccgagcgaactgtgcgcccatccagcccggcgggccgtgctacaagcagaacgacctggaggcgctagcgtcctacgcctacaacgactactaccagaagaactttgctaccggcggctcctgcggcttcaacggcacagctacgaccaccaccagtgatcccagctcggggcagtgcgtcttcacaggaagctccatggcaggaggcggcacgccggctgcgagcgcccccagcggcctctccccgccgtcgtcgttcacgccgggcattgggagcccctccaacaccctgatccctctggacggcgccgagagcctggtgtccagcgtctggtcggcgatttgcgccccgctgctggcgttgccgctcttcttcctctgaccaccagcggcggcagatgagtggccggtgcttgctagtagagcgcttattatgtttttttgttcttgttcctgggtagatcgctctcgtgtggcggtgttgatgtacatgtcagagtcgtgttggatgcgctgggatgggagattacataagatgctacagagatctattcatacgtagaaagtggaccggactccaccgtgtttccgtgtgttctggtctcagatctgttcgtggcagaaaccagatgtaaatgtatcatgttcactactctctgtgcacagaccaagggaagctgcagtccactgaccacacacacaccacgctaggattcagactcagaggcttcgtctctgtccgatgccgtcgcgcccagcgtcggcgtggccctggacgctgctgccttctcccg

SEQ ID NO: 70463 - DNA, 2196 bp, Zea Mays
gtctcggcttgcctctccaaacctccgcatcctggaacccgccccgccacgccaccgccatctccccgcgccgccggcctaaaacctagccaagccatctcccccgcccgaaccttccaacgccggccgcttcctatctcaaccactcgccgctccgtctggtcttccttcacaccgattacgtggcgcacctactcgtgctcctcacctacgtctccagcgcttctgctctccgccgccacttccgtcgctcggtcaccgttgactgctgctacggctagctgggtgttaactgaatcgtaggaatttaggaatatagttggcacagcccgccacggcatggaggtcgacggcgaggcacaacatttccgcctcttctccaagagggccaagcccaagctcaagcccgaggtccagccccagccggagccggaacccccaagccgtgaccccgccgccgccgaagcctacctcgaccctgctcccacaatcgtgaccgagaccggccaggccgacgacgcggcggacgctgccggcacggcgccggcgaccttcgcggaccttggcctatcgcagtggctggtggatgcgtgcgaagccctgggcatgcggcgccccacggcggtgcagcgccggtgcattccgcgcgcgctcgcgggggcggacgtgctcgggatcgccgagacggggagcggcaagacggccgcgttcgcgctgcccatcctgcaccgcctcggggaggacccctatggcgtggccgcgctcgcgctcgcccccacgcgcgagctcgcggcgcagctcgccgagcagttccgcgcgctcggggcgccgctcggcctcaggtgcctcgcggccatcggaggattcgactcgctcgcgcaggccaaagggctctcgcgccgcccccacgtcgtcgtcgccaccccaggacgcattgcgacgctcgtcaaaaacgatcctgacctcgccaaagtattctcccgcacaaagtttcttgtgttggacgaggccgatagaattctagatgttaattttgaagaggaacttcgtgtcatatttggctgtctaccaaagaagcggcaaacctttttgttttcagcaacaatgtcagacaatctgagatctttgcttgaactttcggggaacaaatcatacttttttgaagcatacgaaggtttcaagacagtggagaccttaaagcaacaatacatccatgttcctccacagggaaaagagcttcatctttggcatcttttgtcagttatgaagggaaaaacggaagaccctattcgttcagccattgtatttgtctctacttgcaaagactgccaatatttagatctgctgctggaagaacttcgttatcctgcggttgctttgaactctcacaagtctcaggcacagcggctctcagcacttaaccggtttaaatccggtctccacgtgattacatccaccgggttggacgaactgcaagagcttcaaggggagggctcgctataagctttgttacacagaaggatatatgtcttttacacgagatagaagatgttgtggaaaagcagttggaggcctatgagtgcagtgataaagaagttactaaagatattacaaaggtgttcaaagcaatacgtctctcgaaaatgaggaggagggacgagggacatgatgagaaagtagaagcaagaaaagaacagaagagaagagatcgggcaagaaagaggaaacatgaagactaaaacccatagaaggacgaatgttgaaggccgctgtgcccgatctaaaacgttaaacatgagaggcagttgcttgttcagtctagcgagtagctttaacctggaggagtcgatgatgactcgctccagtgagcccattcagtcgactgctctcagttttgccggcgttgtgctgtggatgtataaatttagggggtggctcggcagatgtgccactgaattcgtggcgcagcagtaatggacgaaacttcaccattgcttgtcagtacttactttgttctaaaggaattataattctcgctctttgacgagttaatctatctctgattaggtgaaacaaatatataatcaatatttacaatataaaatagatatgttataaaagatatatttctttggtattaaaatggttttctttggtattatgctagaatcatattctttctcagacagatggttg

SEQ ID NO: 70464 - DNA, 2351 bp, Zea Mays
gtctcggcttgcctctccaaacctccgcatcctggaacccgccccgccacgccaccgccatctccccgcgccgccggcctaaaacctagccaagccatctcccccgcccgaaccttccaacgccggccgcttcctatctcaaccactcgccgctccgtctggtcttccttcacaccgattacgtggcgcacctactcgtgctcctcacctacgtctccagcgcttctgctctccgccgccacttccgtcgctcggtcaccgttgactgctgctacggctagctgggtgttaactgaatcgtaggaatttaggaatatagttggcacagcccgccacggcatggaggtcgacggcgaggcacaacatttccgcctcttctccaagagggccaagcccaagctcaagcccgaggtccagccccagccggagccggaacccccaagccgtgaccccgccgccgccgaagcctacctcgaccctgctcccacaatcgtgaccgagaccggccaggccgacgacgcggcggacgctgccggcacggcgccggcgaccttcgcggaccttggcctatcgcagtggctggtggatgcgtgcgaagccctgggcatgcggcgccccacggcggtgcagcgccggtgcattccgcgcgcgctcgcgggggcggacgtgctcgggatcgccgagacggggagcggcaagacggccgcgttcgcgctgcccatcctgcaccgcctcggggaggacccctatggcgtggccgcgctcgcgctcgcccccacgcgcgagctcgcggcgcagctcgccgagcagttccgcgcgctcggggcgccgctcggcctcaggtgcctcgcggccatcggaggattcgactcgctcgcgcaggccaaagggctctcgcgccgcccccacgtcgtcgtcgccaccccaggacgcattgcgacgctcgtcaaaaacgatcctgacctcgccaaagtattctcccgcacaaagtttcttgtgttggacgaggccgatagaattctagatgttaattttgaagaggaacttcgtgtcatatttggctgtctaccaaagaagcggcaaacctttttgttttcagcaacaatgtcagacaatctgagatctttgcttgaactttcggggaacaaatcatacttttttgaagcatacgaaggtttcaagacagtggagaccttaaagcaacaatacatccatgttcctccacagggaaaagagcttcatctttggcatcttttgtcagttatgaagggaaaaacggaagaccctattcgttcagccattgtatttgtctctacttgcaaagactgccaatatttagatctgctgctggaagaacttcgttatcctgcggttgctttgaactctcacaagtctcaggcacagcggctctcagcacttaaccggtttaaatccggtcaggttcctgtattgcttgccactgatgtgggcagtcgtgggttagatatccagacagttgatcttgttatcaactacgacatgccgatgtctccacgtgattacatccaccgggttggacgaactgcaagagcttcaaggggagggctcgctataagctttgttacacagtttttccgcagctctctgtcagtcaaggaggaacagcagttgtgggaaatggcgggagctaaggaaggatatatgtcttttacacgagatagaagatgttgtggaaaagcagttggaggcctatgagtgcagtgataaagaagttactaaagatattacaaaggtgttcaaagcaatacgtctctcgaaaatgaggaggagggacgagggacatgatgagaaagtagaagcaagaaaagaacagaagagaagagatcgggcaagaaagaggaaacatgaagactaaaacccatagaaggacgaatgttgaaggccgctgtgcccgatctaaaacgttaaacatgagaggcagttgcttgttcagtctagcgagtagctttaacctggaggagtcgatgatgactcgctccagtgagcccattcagtcgactgctctcagttttgccggcgttgtgctgtggatgtataaatttagggggtggctcggcagatgtgccactgaattcgtggcgcagcagtaatggacgaaacttcaccattgcttgtcagtacttactttgttctaaaggaattataattctcgctctttgacgagttaatctatctctgattaggtgaaacaaatatataatcaatatttacaatataaaatagatatgttataaaagatatatttctttggtattaaaatggttttctttggtattatgctagaatcatattctttctcagacagatggttg

SEQ ID NO: 70465 - DNA, 1955 bp, Zea Mays
gtctcggcttgcctctccaaacctccgcatcctggaacccgccccgccacgccaccgccatctccccgcgccgccggcctaaaacctagccaagccatctcccccgcccgaaccttccaacgccggccgcttcctatctcaaccactcgccgctccgtctggtcttccttcacaccgattacgtggcgcacctactcgtgctcctcacctacgtctccagcgcttctgctctccgccgccacttccgtcgctcggtcaccgttgactgctgctacggctagctgggtgttaactgaatcgtaggaatttaggaatatagttggcacagcccgccacggcatggaggtcgacggcgaggcacaacatttccgcctcttctccaagagggccaagcccaagctcaagcccgaggtccagccccagccggagccggaacccccaagccgtgaccccgccgccgccgaagcctacctcgaccctgctcccacaatcgtgaccgagaccggccaggccgacgacgcggcggacgctgccggcacggcgccggcgaccttcgcggaccttggcctatcgcagtggctggtggatgcgtgcgaagccctgggcatgcggcgccccacggcggtgcagcgccggtgcattccgcgcgcgctcgcgggggcggacgtgctcgggatcgccgagacggggagcggcaagacggccgcgttcgcgctgcccatcctgcaccgcctcggggaggacccctatggcgtggccgcgctcgcgctcgcccccacgcgcgagctcgcggcgcagctcgccgagcagttccgcgcgctcggggcgccgctcggcctcaggtgcctcgcggccatcggaggattcgactcgctcgcgcaggccaaagggctctcgcgccgcccccacgtcgtcgtcgccaccccaggacgcattgcgacgctcgtcaaaaacgatcctgacctcgccaaagtattctcccgcacaaagagactgccaatatttagatctgctgctggaagaacttcgttatcctgcggttgctttgaactctcacaagtctcaggcacagcggctctcagcacttaaccggtttaaatccggtcaggttcctgtattgcttgccactgatgtgggcagtcgtgggttagatatccagacagttgatcttgttatcaactacgacatgccgatgtctccacgtgattacatccaccgggttggacgaactgcaagagcttcaaggggagggctcgctataagctttgttacacagaaggatatatgtcttttacacgagatagaagatgttgtggaaaagcagttggaggcctatgagtgcagtgataaagaagttactaaagatattacaaaggtgttcaaagcaatacgtctctcgaaaatgaggaggagggacgagggacatgatgagaaagtagaagcaagaaaagaacagaagagaagagatcgggcaagaaagaggaaacatgaagactaaaacccatagaaggacgaatgttgaaggccgctgtgcccgatctaaaacgttaaacatgagaggcagttgcttgttcagtctagcgagtagctttaacctggaggagtcgatgatgactcgctccagtgagcccattcagtcgactgctctcagttttgccggcgttgtgctgtggatgtataaatttagggggtggctcggcagatgtgccactgaattcgtggcgcagcagtaatggacgaaacttcaccattgcttgtcagtacttactttgttctaaaggaattataattctcgctctttgacgagttaatctatctctgattaggtgaaacaaatatataatcaatatttacaatataaaatagatatgttataaaagatatatttctttggtattaaaatggttttctttggtattatgctagaatcatattctttctcagacagatggttg

SEQ ID NO: 70466 - DNA, 2620 bp, Zea Mays
caaaatctgggcctcaataccagcatccaaacgcagtataaaacaaatttacgatattaaaatgtaatcaaacacacctaagggcttgtttgggtaatcttagattggagtggattgaggtggtataaggtgtattgaagtgtaatatgaactaatttccctttcaatctacttcaatccctctttatccaaacaacaaacaaggcctaaagagtcggacttgccacgcggtcggtcgcggcttcctgggctagcaggcttcttctagatacgtgggctgcgcaactccctcaggcccaagcttaagcatagctaggcagcacgcagcagcccgtctcggcttgcctctccaaacctccgcatcctggaacccgccccgccacgccaccgccatctccccgcgccgccggcctaaaacctagccaagccatctcccccgcccgaaccttccaacgccggccgcttcctatctcaaccactcgccgctccgtctggtcttccttcacaccgattacgtggcgcacctactcgtgctcctcacctacgtctccagcgcttctgctctccgccgccacttccgtcgctcggtcaccgttgactgctgctacggctagctgggtgttaactgaatcgtaggaatttaggaatatagttggcacagcccgccacggcatggaggtcgacggcgaggcacaacatttccgcctcttctccaagagggccaagcccaagctcaagcccgaggtccagccccagccggagccggaacccccaagccgtgaccccgccgccgccgaagcctacctcgaccctgctcccacaatcgtgaccgagaccggccaggccgacgacgcggcggacgctgccggcacggcgccggcgaccttcgcggaccttggcctatcgcagtggctggtggatgcgtgcgaagccctgggcatgcggcgccccacggcggtgcagcgccggtgcattccgcgcgcgctcgcgggggcggacgtgctcgggatcgccgagacggggagcggcaagacggccgcgttcgcgctgcccatcctgcaccgcctcggggaggacccctatggcgtggccgcgctcgcgctcgcccccacgcgcgagctcgcggcgcagctcgccgagcagttccgcgcgctcggggcgccgctcggcctcaggtgcctcgcggccatcggaggattcgactcgctcgcgcaggccaaagggctctcgcgccgcccccacgtcgtcgtcgccaccccaggacgcattgcgacgctcgtcaaaaacgatcctgacctcgccaaagtattctcccgcacaaagtttcttgtgttggacgaggccgatagaattctagatgttaattttgaagaggaacttcgtgtcatatttggctgtctaccaaagaagcggcaaacctttttgttttcagcaacaatgtcagacaatctgagatctttgcttgaactttcggggaacaaatcatacttttttgaagcatacgaaggtttcaagacagtggagaccttaaagcaacaatacatccatgttcctccacagggaaaagagcttcatctttggcatcttttgtcagttatgaagggaaaaacggaagaccctattcgttcagccattgtatttgtctctacttgcaaagactgccaatatttagatctgctgctggaagaacttcgttatcctgcggttgctttgaactctcacaagtctcaggcacagcggctctcagcacttaaccggtttaaatccggtcaggttcctgtattgcttgccactgatgtgggcagtcgtgggttagatatccagacagttgatcttgttatcaactacgacatgccgatgtctccacgtgattacatccaccgggttggacgaactgcaagagcttcaaggggagggctcgctataagctttgttacacagaaggatatatgtcttttacacgagatagaagatgttgtggaaaagcagttggaggcctatgagtgcagtgataaagaagttactaaagatattacaaaggtgttcaaagcaatacgtctctcgaaaatgaggaggagggacgagggacatgatgagaaagtagaagcaagaaaagaacagaagagaagagatcgggcaagaaagaggaaacatgaagactaaaacccatagaaggacgaatgttgaaggccgctgtgcccgatctaaaacgttaaacatgagaggcagttgcttgttcagtctagcgagtagctttaacctggaggagtcgatgatgactcgctccagtgagcccattcagtcgactgctctcagttttgccggcgttgtgctgtggatgtataaatttagggggtggctcggcagatgtgccactgaattcgtggcgcagcagtaatggacgaaacttcaccattgcttgtcagtacttactttgttctaaaggaattataattctcgctctttgacgagttaatctatctctgattaggtgaaacaaatatataatcaatatttacaatataaaatagatatgttataaaagatatatttctttggtattaaaatggttttctttggtattatgctagaatcatattctttctcagacagatggttg

SEQ ID NO: 70467 - DNA, 2021 bp, Zea Mays
atttcgcgcggcgccgacacaacacaacaaacacagaagacaggcagggcggcagcgcccacctccatctcccagccccgctccccaaatctcagccccgctccttcccagtcccagtcccagatccaggatgtcctcctccgacccggacgacgcccccgacgggggcgaggactcgcccctcttccgccgcagcggggggccgtcctccggcggcaccgttggcgacgtccccgtctcgcagtcgctcatcaaggcggcaagcaacgtgtgcttctccctcttcgtgctcgccgtccttgtcgtcaccgtcgtcgccgtcacataccagccgccggacccctggctccagtcctccgccgccatcaccacctcgctctcccgcgtcctccccaactccaccttcctcgtccccgacgactcgctcctccccaccggcgaggatttcaactcctccaccgccgtcccagccccgcgtgtcgccgccgcctgtcgatgcggagatcaatgacacaatccctgtcgtcggatcagaggcagagttcaagaagggaaagtacttgtactacatgagaggaggtgaccattgcaagagcatgaaccagttcgtctggagcttcttgtgtggactcggcgaagccaagttcctcaaccggacgttcgtgatggatctgaacatctgtttgtccggggcacacacggtcgacgggaaggatgtggatgggaaagatttccggtactatttcgatttcgagcacttgaaggagagtgtgccggtggtggaggaaggggacttcctgaaggattggaagcgttgggataagaagaagggcccaggacggatcacagtgcggaaggttccatcgtacaaggtaacaccaatgcagctgaagagggacaagagcaacatcatctggaggcaatttaatggccatgagcccgagaattactggtaccgagtttgcgaaggacgagctgccaaagtcatccaaaggccttggtatgctatctggaagtccaagagactgatgaacattgtgactgagattgcaggtaggatggattgggattacgacggtttacatgttgtccgagggtggaaggcgcagaacaagcaaatgtatccaaacctggattccgacacgtcgcctgatgcgctcgttgataaggtgaccaagcttgttaagccgatgagagatctctacatcgcaactaatgagccattctataactacttcgacaagctcaggtcacacttccatgtccatttgcttgatgattacaaggagctttggtcaaacactagtgaatggtacaacgagacaacaacacttagtcggggtaaaccagttccattcgacgcctacatgagggtgattgtggacactgaggtattttacagatcgaagacacaggttgagacgttcaacaacttgacaagggattgcaaagatggaatcaatacgtgcaacttgtgacacatgagttcacgcttcggatcatttgttggtgttcaatatacccttctagtggctggcacatcagaactcagtggaactcatccaggtttatgtactactcttccagagtccagacgtccgaaaaatttgtatttagtgggcaatctgcaacatctatgctctctgtacccgcactaaattaagtgagaactatagcttcacctttacagtgtatctgttttcacgagtcacacgcttcttgcccgaatatttggaggaaatgaatttgtcagtgagcttatatgacactagagcaatgtaaagatatattgtgcccatcaaagtatgaaattactatctatgctcagcctgtgtaacctagaacatacttgccttcattgtggtcatctgaaattgctaagttagtcaggggttaagccattcgagttaatgttgtgtgcaggcatatagcacaagggacagagccacaagttcaagcagaattttaggtatagcttttgttgggtgacaggtggcatcgtccacttgtgcaggttattt

SEQ ID NO: 70468 - DNA, 2264 bp, Zea Mays
aaaaaaactgccatgacagcccagtccatccaacgcaacgcagctgtggcctgtgtctgtctgcgccgtctgtctgcgccgcgcctcgccttcctctcccgccgccgtcgtggtcgtggacgccatgggccgaggccgcaaccgcaagccccgcaacttcgccacgttccgcctctgcccgcgccccggggctgccgatgcctccgaacgcgtcttcgtacgcgtcgacgacaacccctactccgtccccgggttcgcagacgatgatggtctctcgtcctccaccgccgtcaggggagacggcggcgagcccgacccgtcctcctccacctcgaccgacgagggcgggtcccccctgcccgagcacgtccgccgagagatcatggagctcggcctccccgacgacggctacgactacctcgcccacctccgcgagctccgcccctccctctcctccaccggcggcgggggttcttcggccgtattcctccccagccgccgcctcgcacgctccggccttcccgtggacgtgaaggcgtacgacttcactagtaccccgcttggttccggggaggttgcggtggtcgcggctagtcgggctgaggaggctattgacctggatgtcaccaggctgcttgacgggagcgattcgacggccgttgagtcgggggatgaggatttggaggaggactttgttatccttgcgaatgagccagatgagaagcaggagagcgaggaagagaatgttgctggaagcaaggagaaagctctgcagctgcctggcgatcagtttgtttcggtgagctcagcgtctgcttcatgatcatactgtctgcgaagaaagagctgttgatctacctgcaatgagtcactctactagctctgctcactgcagatatcaaatagcacgtttgctgtttaacctctgaatttcctcatgtcaacacttcagtgactaagcttccatcactaatctaacatggatgtgagattcttgcattctaactttttgggtttgcttgtgagcattcacgtgcgcagatttgacattatttctacttgtgattcaaattccatacggaatacattgatctgttgaccttttattcacctgcaaaccagtgttcaaggttttgacttgtgtgtgatatgcaattcacagcttgctttcgaagaatatgcggacagtggagttggttgttgtgttcaagatgcaaagcatgaactgtcccaggaggttacagataaactgaaaccgcctcacagcgaaaccttcgatgctgataaaagatgcagggcacccacaccacaatatgttgctcaccggatactagagtcaaacgagcaaattgatgcgtcttctaatgccatctccgaacatgttcagtacgctgaaacatatgaagtcagcgaagaagaacaagcgattcttgctccagaaagtagcaaggggtctgcggttatgtactctactgccacggtttctggatcatatctcgatgttaaattgaagtttccaaaacattcccctggagaaacaagtatgaaaaaatccatcatcagaaaaggaatagagaagcttcctgcagggtattcacctcagaggaacactccgactggtgaaactaaacagggaccctacaaaggaacgagacaggaagggacagaaagctaggggtggctatatttgtagggctgctggtcatctgattggaatcggaatcaggcactagactatcacttgtcatcccaatgcagaccagatgtattgtcacccaaatgtctgctgaggaggaaacagtgaaaagaaacaaagatgtactgggtagctgaagggactacagtggcgagcttggttgaaaccaaaagatggttctgctaactggagatttgacggcagtgtaccatggaaggtactatcaactgctggaaaccatccagatcactgtcagacgtgccagtagtacaaggttcagatccgctacgttttgtttcatgagatgagatgggactggaactggtgtgcgtgctgtgcatcagtgcatgagatatatagaacgtagaggtggtgcagtgatgcatctgcacgactgcaccgtacctatagggatgatcggtgctttgtaactttaaaatacgggaattcttctctttttttttgaaaataaactgattccgttaaaatttctgcattccaaaagggccctagagcctattctagtcgcctttcatggtttctgttaggctccaatcattcggtgcag

SEQ ID NO: 70469 - DNA, 2558 bp, Zea Mays
aaaaaaactgccatgacagcccagtccatccaacgcaacgcagctgtggcctgtgtctgtctgcgccgtctgtctgcgccgcgcctcgccttcctctcccgccgccgtcgtggtcgtggacgccatgggccgaggccgcaaccgcaagccccgcaacttcgccacgttccgcctctgcccgcgccccggggctgccgatgcctccgaacgcgtcttcgtacgcgtcgacgacaacccctactccgtccccgggttcgcagacgatgatggtctctcgtcctccaccgccgtcaggggagacggcggcgagcccgacccgtcctcctccacctcgaccgacgagggcgggtcccccctgcccgagcacgtccgccgagagatcatggagctcggcctccccgacgacggctacgactacctcgcccacctccgcgagctccgcccctccctctcctccaccgccgccgcctcgcacgctccggccttcccgtggacgtgaaggcgtacgacttcactagtaccccgcttggttccggggaggttgcggtggtcgcggctagtcgggctgaggaggctattgacctggatgtcaccaggctgcttgacgggagcgattcgacggccgttgagtcgggggatgaggatttggaggaggactttgttatccttgcgaatgagccagatgagaagcaggagagcgaggaagagaatgttgctggaagcaaggagaaagctctgcagctgcctggcgatcagtttgtttcggtgagctcagcgtctgcttcatgatcatactgtctgcgaagaaagagctgttgatctacctgcaatgagtcactctactagctctgctcactgcagatatcaaatagcacgtttgctgtttaacctctgaatttcctcatgtcaacacttcagtgactaagcttccatcactaatctaacatggatcttgctttcgaagaatatgcggacagtggagttggttgttgtgttcaagatgcaaagcatgaactgtcccaggaggttacagataaactgaaaccgcctcacagcgaaaccttcgatgctgataaaagatgcagggcacccacaccacaatatgttgctcaccggatactagagtcaaacgagcaaattgatgcgtcttctaatgccatctccgaacatgttcagtacgctgaaacatatgaagtcagcgaagaagaacaagcgattcttgctccagaaagtagcaaggggtctgcggttatgtactctactgccacggtttctggatcatatctcgatgttaaattgaagtttccaaaacattcccctggagaaacaagtatgaaaaaatccatcatcagaaaaggaatagagaagcttcctgcagggtattcacctcagaggaacactccgactggtgaaactaaacagggaccctacaaaggaacgagacaggaagggacagaaagctagatccaggaccagacctactgcgttttaaaaaaaatgttttaaagaagcagatcatcgagggtgtgttgttcggcttcgttatcaactgaccatgggcttccaccggatgcttaatacaatgatatttactggcgtggcttcccttttttttctaaaggaacttcttttcttgggatctcccttttatgctttccatgccatcattggtaccgataattttgtctcctaggctacaatggaagatcatgccatcattgttactcataattttgtctcctaggctacattgaaagatcaaagtatgcactcatactcactggaccatgttttgtacatcttatgtatgtatttgttatgtaaatctgaaacttgaaccgtgtactttcaagcttgaagagaactgtagaagcgaaaagatggacgccatattgtacagagctgttaatagtttgacgtgaggttttatctcaaggattgtaggctgacattagattgcacgttttaggggtggctatatttgtagggctgctggtcatctgattggaatcggaatcaggcactagactatcacttgtcatcccaatgcagaccagatgtattgtcacccaaatgtctgctgaggaggaaacagtgaaaagaaacaaagatgtactgggtagctgaagggactacagtggcgagcttggttgaaaccaaaagatggttctgctaactggagatttgacggcagtgtaccatggaaggtactatcaactgctggaaaccatccagatcactgtcagacgtgccagtagtacaaggttcagatccgctacgttttgtttcatgagatgagatgggactggaactggtgtgcgtgctgtgcatcagtgcatgagatatatagaacgtagaggtggtgcagtgatgcatctgcacgactgcaccgtacctatagggatgatcggtgctttgtaactttaaaatacgggaattcttctctttttttttgaaaataaactgattccgttaaaatttctgcattccaaaagggccctagagcctattctagtcgcctttcatggtttctgttaggctccaatcattcggtgcag

SEQ ID NO: 70470 - DNA, 2366 bp, Zea Mays
aaaaaaactgccatgacagcccagtccatccaacgcaacgcagctgtggcctgtgtctgtctgcgccgtctgtctgcgccgcgcctcgccttcctctcccgccgccgtcgtggtcgtggacgccatgggccgaggccgcaaccgcaagccccgcaacttcgccacgttccgcctctgcccgcgccccggggctgccgatgcctccgaacgcgtcttcgtacgcgtcgacgacaacccctactccgtccccgggttcgcagacgatgatggtctctcgtcctccaccgccgtcaggggagacggcggcgagcccgacccgtcctcctccacctcgaccgacgagggcgggtcccccctgcccgagcacgtccgccgagagatcatggagctcggcctccccgacgacggctacgactacctcgcccacctccgcgagctccgcccctccctctcctccaccggcggcgggggttcttcggccgtattcctccccagccgccgcctcgcacgctccggccttcccgtggacgtgaaggtccatccgtatctgcttccatcagcatcccgcgctgtttcgtgtgccttccgaggctgcttgacgggagcgattcgacggccgttgagtcgggggatgaggatttggaggaggactttgttatccttgcgaatgagccagatgagaagcaggagagcgaggaagagaatgttgctggaagcaaggagaaagctctgcagctgcctggcgatcagtttgtttcgcttgctttcgaagaatatgcggacagtggagttggttgttgtgttcaagatgcaaagcatgaactgtcccaggaggttacagataaactgaaaccgcctcacagcgaaaccttcgatgctgataaaagatgcagggcacccacaccacaatatgttgctcaccggatactagagtcaaacgagcaaattgatgcgtcttctaatgccatctccgaacatgttcagtacgctgaaacatatgaagtcagcgaagaagaacaagcgattcttgctccagaaagtagcaaggggtctgcggttatgtactctactgccacggtttctggatcatatctcgatgttaaattgaagtttccaaaacattcccctggagaaacaagtatgaaaaaatccatcatcagaaaaggaatagagaagcttcctgcagggtattcacctcagaggaacactccgactggtgaaactaaacagggaccctacaaaggaacgagacaggaagggacagaaagctagatccaggaccagacctactgcgttttaaaaaaaatgttttaaagaagcagatcatcgagggtgtgttgttcggcttcgttatcaactgaccatgggcttccaccggatgcttaatacaatgatatttactggcgtggcttcccttttttttctaaaggaacttcttttcttgggatctcccttttatgctttccatgccatcattggtaccgataattttgtctcctaggctacaatggaagatcatgccatcattgttactcataattttgtctcctaggctacattgaaagatcaaagtatgcactcatactcactggaccatgttttgtacatcttatgtatgtatttgttatgtaaatctgaaacttgaaccgtgtactttcaagcttgaagagaactgtagaagcgaaaagatggacgccatattgtacagagctgttaatagtttgacgtgaggttttatctcaaggattgtaggctgacattagattgcacgttttaggggtggctatatttgtagggctgctggtcatctgattggaatcggaatcaggcactagactatcacttgtcatcccaatgcagaccagatgtattgtcacccaaatgtctgctgaggaggaaacagtgaaaagaaacaaagatgtactgggtagctgaagggactacagtggcgagcttggttgaaaccaaaagatggttctgctaactggagatttgacggcagtgtaccatggaaggtactatcaactgctggaaaccatccagatcactgtcagacgtgccagtagtacaaggttcagatccgctacgttttgtttcatgagatgagatgggactggaactggtgtgcgtgctgtgcatcagtgcatgagatatatagaacgtagaggtggtgcagtgatgcatctgcacgactgcaccgtacctatagggatgatcggtgctttgtaactttaaaatacgggaattcttctctttttttttgaaaataaactgattccgttaaaatttctgcattccaaaagggccctagagcctattctagtcgcctttcatggtttctgttaggctccaatcattcggtgcag

SEQ ID NO: 70471 - DNA, 1596 bp, Zea Mays
ctctatgtgtgttcattatttatttttcggattcctgttgctttcagtagattccattcacaaaagcccctgcacttttttaccgactgcgattgtgattgtgattgctaatcaatttcagttctaggagattttcagtcccgcgcaagattttctgaactcttttttcgcaacaatttcgctatctgatttgtttcttccagatttgcgcgattccccttccaaaaagaaccaatcggtttgctactagatcggtgcgcgaggctagactttttctgggaattcaaccggcgaatgggcagggacggcggccgcgtgcgcatgagccgcgtattggcaactggggatgagcgcggcatgggcgaggtagcaggcgtggagcgcgccgcctgcaagcgcccgcgcggcgcgctcgacggcggcgggtcggggtctgcggccgcgtggccggcgtgccgggtggcgcgcgccgcggccggcggcaaggaccgccacagtaaggtggtgacggcgcgggggctccgggaccgccgcgtccgcctctcggtgcccacggccatccagttctacgacatccaggaccgcctcggcgtcgaccagcccagcaaggccatcgagtggctcatccgcgccgccgccgccgccatcgacggcctcccgtcgctcgactgctccttcgtcttcccccacgccgccgcatctccgccgggcggcgctgccgacgacgccgagctcagcacctccgagaccagcaagagctccgttctctcgcttgccaacgccccggttgacaacaccgccgctcactctcagcaagacagtcacgcctacaacaacaacgccgccgccggtggtggcgcgttcgccgacctgatcctgcactgctccgccaacaacagcagcaagccagtgcagcagcagccgacgctcgcttactacgccacccagcccccgaacgcgcactccgcgtcggccatatccttcgagacgatgctgccccacttctccttccttcaggagcagcctcaccacgcaatcgccttcgaccggggcacacttcagtccaatgccgccgttgctgcgccgctgtggccgacgtctcagcatgcgtgcctgctgcagaggttcgccgcttctccagctgatgccaccggactgccgtcgttctttcttggaagcggtgctgctggtgcttctccggtggtgccggccaatgcagagccgaggcttcagctctgggacttcaagcaggaacggaagacctgaacagtggcacccagagcttggcgtttcataagactatttctcagagtgtgtagactgcaactgcgcctgggactgaagacctgcagaaaccaacgcatcagccgcatctttcattcgtcagtagcttccgggcttgtctgtgacatctgctgtgatgagaagccattcttttttttttcttttatttcttcatgggttttgtactctggtatctacatcccactcggacaaaacgtgaaggttgacttggttggctgattgattgtcacacgaatcttcttgactgccagtgtctcggtattgaatctcacccgtgcaccaaacggaagc

SEQ ID NO: 70472 - DNA, 397 bp, Zea Mays
ggcaggagaggaggagagctcagcactgcacgcgcgctcccctccccttcccttgctggccaaatcgatcggtccccttcaggctccaggctccggagcttgctttacttcagtgtgtagactgcaactgcgcctgggactgaagacctgcagaaaccaacgcatcagccgcatctttcattcgtcagtagcttccgggcttgtctgtgacatctgctgtgatgagaagccattcttttttttttcttttatttcttcatgggttttgtactctggtatctacatcccactcggacaaaacgtgaaggttgacttggttggctgattgattgtcacacgaatcttcttgactgccagtgtctcggtattgaatctcacccgtgcaccaaacggaagc

SEQ ID NO: 70473 - DNA, 1430 bp, Zea Mays
ggataagcccagcaggtaaagcaggcaggagaggaggagagctcagcactgcacgcgcgctcccctccccttcccttgctggccaaatcgatcggtccccttcaggctccaggctccggagcttgctttacttcagggacggcggccgcgtgcgcatgagccgcgtattggcaactggggatgagcgcggcatgggcgaggtagcaggcgtggagcgcgccgcctgcaagcgcccgcgcggcgcgctcgacggcggcgggtcggggtctgcggccgcgtggccggcgtgccgggtggcgcgcgccgcggccggcggcaaggaccgccacagtaaggtggtgacggcgcgggggctccgggaccgccgcgtccgcctctcggtgcccacggccatccagttctacgacatccaggaccgcctcggcgtcgaccagcccagcaaggccatcgagtggctcatccgcgccgccgccgccgccatcgacggcctcccgtcgctcgactgctccttcgtcttcccccacgccgccgcatctccgccgggcggcgctgccgacgacgccgagctcagcacctccgagaccagcaagagctccgttctctcgcttgccaacgccccggttgacaacaccgccgctcactctcagcaagacagtcacgcctacaacaacaacgccgccgccggtggtggcgcgttcgccgacctgatcctgcactgctccgccaacaacagcagcaagccagtgcagcagcagccgacgctcgcttactacgccacccagcccccgaacgcgcactccgcgtcggccatatccttcgagacgatgctgccccacttctccttccttcaggagcagcctcaccacgcaatcgccttcgaccggggcacacttcagtccaatgccgccgttgctgcgccgctgtggccgacgtctcagcatgcgtgcctgctgcagaggttcgccgcttctccagctgatgccaccggactgccgtcgttctttcttggaagcggtgctgctggtgcttctccggtggtgccggccaatgcagagccgaggcttcagctctgggacttcaagcaggaacggaagacctgaacagtggcacccagagcttggcgtttcataagactatttctcagagtgtgtagactgcaactgcgcctgggactgaagacctgcagaaaccaacgcatcagccgcatctttcattcgtcagtagcttccgggcttgtctgtgacatctgctgtgatgagaagccattcttttttttttcttttatttcttcatgggttttgtactctggtatctacatcccactcggacaaaacgtgaaggttgacttggttggctgattgattgtcacacgaatcttcttgactgccagtgtctcggtattgaatctcacccgtgcaccaaacggaagc

SEQ ID NO: 70474 - DNA, 1600 bp, Zea Mays
ggcccgagtactccgctgtccgctcccactccactccggcccagctgcgtgctgctccggcaccggcaggcggataagcccagcaggtaaagcaggcaggagaggaggagagctcagcactgcacgcgcgctcccctccccttcccttgctggccaaatcgatcggtccccttcaggctccaggctccggagcttgctttacttcagatttgcgcgattccccttccaaaaagaaccaatcggtttgctactagatcggtgcgcgaggctagactttttctgggaattcaaccggcgaatgggcagggacggcggccgcgtgcgcatgagccgcgtattggcaactggggatgagcgcggcatgggcgaggtagcaggcgtggagcgcgccgcctgcaagcgcccgcgcggcgcgctcgacggcggcgggtcggggtctgcggccgcgtggccggcgtgccgggtggcgcgcgccgcggccggcggcaaggaccgccacagtaaggtggtgacggcgcgggggctccgggaccgccgcgtccgcctctcggtgcccacggccatccagttctacgacatccaggaccgcctcggcgtcgaccagcccagcaaggccatcgagtggctcatccgcgccgccgccgccgccatcgacggcctcccgtcgctcgactgctccttcgtcttcccccacgccgccgcatctccgccgggcggcgctgccgacgacgccgagctcagcacctccgagaccagcaagagctccgttctctcgcttgccaacgccccggttgacaacaccgccgctcactctcagcaagacagtcacgcctacaacaacaacgccgccgccggtggtggcgcgttcgccgacctgatcctgcactgctccgccaacaacagcagcaagccagtgcagcagcagccgacgctcgcttactacgccacccagcccccgaacgcgcactccgcgtcggccatatccttcgagacgatgctgccccacttctccttccttcaggagcagcctcaccacgcaatcgccttcgaccggggcacacttcagtccaatgccgccgttgctgcgccgctgtggccgacgtctcagcatgcgtgcctgctgcagaggttcgccgcttctccagctgatgccaccggactgccgtcgttctttcttggaagcggtgctgctggtgcttctccggtggtgccggccaatgcagagccgaggcttcagctctgggacttcaagcaggaacggaagacctgaacagtggcacccagagcttggcgtttcataagactatttctcagagtgtgtagactgcaactgcgcctgggactgaagacctgcagaaaccaacgcatcagccgcatctttcattcgtcagtagcttccgggcttgtctgtgacatctgctgtgatgagaagccattcttttttttttcttttatttcttcatgggttttgtactctggtatctacatcccactcggacaaaacgtgaaggttgacttggttggctgattgattgtcacacgaatcttcttgactgccagtgtctcggtattgaatctcacccgtgcaccaaacggaagc

SEQ ID NO: 70475 - DNA, 1384 bp, Zea Mays
ccaggatcttgaaaataggtattcaaattcaaaatacaaaggactgtaaaaaaataacagccttatgttttgtatatataaataccacatagaatgtatacaatactccctcaaactgttttcaagtcgtccgattaatcgcgattagtcacgattagtcgtctaagtcggtttggaccaatcgcgattaattgaccaagtcgtccgactaatcgtgattaatcgcgacgcccaagtcggtcagccagaacgactagcaagtcgtccgacttgaaaacaatgctccctctgttcgctccctccgttccaatatattaatcattttggcactttatttctttgtccatattcaaatggatgacaatgaatctagacacatataaaacatatacattaaatattgtatggatccattaacaccagagggggtatatagcagatgtaacacataattgagcatggtttcatatcttttagcattgagcgcatctgaaatatatggacaagtttgcaatatctggttacatttcgatctgtagttattgcattctcgtacaaaacactgcggcttgtttgggtctctctttttatttccatggttattaaagcggtaaaacaataaaacgttaggaaccacgttttcaacatttaaacattgaaactaatgttggaacgtcttttcagacttggcataaaacaacacgatagaatatgttcatactcataagttgattatttgagttcacaaaataaatagcataaaaggaagcagatcaagttcaacacacaaatctatgcaattaagcaagttagaacttgcatctaggatcagtaatcatcatccaactcatcaatatcaagagcatgagcatccatgtcttgatcatcaccatcttttccactgttgcttgctggaaacaatgtatgtgctggaaacagagcctaacaattgagtgactgatagccttgattcataatatcagatgtccagatcagtagaccacttaccaaatagagcagctgcaggagacgttggaacttcgtggttgtagctgaaactctggaactctggaatgcagctgcaggcaacgttggctgctagaggacctatcgggcgatgggccaacgtcagaccgactctggacgtgggagaggggagggggtgctcgggcgctggaagagggaggcgggccctagagatggaggagggggtggaggagaggacagaggagggaggtgcgtggcggtggacgatcgggagcgggcgacgctggaggagaggagggaggtgggcgacggcgtagcaggcgctggaggctggagtaggctgttcgcgatcctcgctgtgctgcacaagttaagacctagttttttgggcctttga

SEQ ID NO: 70476 - DNA, 3280 bp, Zea Mays
cgactctgcccctgcttaactgtggacctccagccatcaggccgcatgcactcaagggtaagctgacggagaaggaagggaggaaactgttccagcagctgatagacgccgtgggatactgccacgagaagggggtttgtcacagggacctcaagcctgagaatgtcctcgttgatgcaaagggaaacataaaggtttctgattttggactaagcgcccttccgcaaaaccaacgaaaagatggtttgttgcataccacatgtggcagccctaactacatagccccggaggtccttctgaacaaaggttacgatggctcggtatctgacgtgtggtcctgtggtgttattctatatgtaatgcttacagggagtcttccatttgacgaccaaaatatggttgtcctctatcagaagattctgaaagggaatgctcacattccaaagtggctctctcaaggtgcccaagatctactgcgaaagatcctggatcctaacccgatcacgcgcgtagatgtggatgggataagggcacacgattggttcaagcaaggctacgctccttctgcgccgtttaatgatgacgaagaagatatcaacgtggatgaagaagacagcctaaatatgactgagaatggcattcaagacaagatagcaatcaaccaaatcaatgctttccagctcattgggatgtcctcctgccttgatctatccggattttttgagaaagagtttgtaggatgcttctgaaaggaaaatcagattcgcatcaaattatcccccagcttacttgtttgagaagatcgagagcattgtcagaaaaatgggtttccaggtacacaagagcaacggcaaggtaagtgaccacctatcatgtgtattcatgtctacagacttccagctctgtgcgttcgggattagggtgctgagagtcattgtcacgtcctgcagctaaaagtgatccaagattgtaagggactagcaaatttaagagggaaagagtcattattaatttctgctgaggtgtttgagattaatgaatccctttacgttgtcgagctaaaaaagtcatctggagactgctccctgtacagaaagttgtgtgagacgctctcggaggacttgggcacatgcaaaagccagcaatttttaaagcaggattctatcagacaagagataggtagacataacagtagcttttaactaagagcccccttgttaaataggctatagacacaaactaacacaaacaatatactgaatttaaaacagtatattgggcatgcacctattacagatgtgctctctcatgccttttgtcatgaaaccttaagagacttagactatgaaaaattggcaactgacaatgtatcgaactccaaagggataatatgatgatgtaaacaagtaaaatacgcatataagtgattcagagctacctggtctctatgtttctcttatatattgattgatattggaacgtaagattgtttgcttttgaagcccctggctgacttccatggctccagaaagaaagtgcgatgtgttgttcgtaaaaagaagccctttcagatgcatgttcaactaaacgattgcctgtgaagaccatggatataggagaacggctcggtacaagtttgaaagtttgccaatcaccagtacagtccttgcatgagcattgtccttcactgaaatggtggaaacggttgcagtctctagtgatcaacttgtgctcgtgcaacaaggaaataagctaaacagttgtcttcacaggctctgaggttctttgttattcggagagctgagcctgcttctcactattttcaaccgatgcaccttcccttaggcactgttcggtttccagacattggagctccggaatgattcctagctggattatttctctaatttatataattttgatgagctggaacgaatcccggttcattcctgtacaagcgaacgggcccttagattgctcatcaatgtgttgttgcaagatcttccaacattttgtagatctccttggaccttgggtgcgatcaatcgccagaatcgagcttcttccaggaattaatcatctggatgctctccctccaaagcgacctcctcatttctgcaacaccttccgtttgtgcattttgctttggaaaaagctactgcaatgcaagttgcaagcagcaaggtattcactgtggtgtggtgtgcgctgatgagtcgtgtctcgtccatcctttgcttgcagagttgcaggaagaagatgagggagtaggatggaagttcatgttgtgcgttctggtgttccgactggccacggaagatcgaataaacattggtgaaagccccatttctactcataatgtttgcggctgtttcttttggtgcatgtgcatcagggtaacctgcacttataactttccattttctttcaattatttttagtaagtcctttttttcatagtcaatgggatcattctggatttgcatgtcgacggcaaaaaggagttgcgttcctcccagaaccccttcctattatgatagaagacattgggctccgtccataatcatccattggcgacaaagtttcttgtacattgtacacatgtaaaacaatcacaccaccatgaaccagccgccatcagtgttttctgatttcattgtttcagacttcaaagcattgtaaaatcagtttgtgatggtttgctgactttgtctgccttgttgctacgttcagtcgacctttcccttctttataagctaatttgtgcagtactccttatgttctagctttatcaaacattactatcttttttaaaaaaattcacaccatataaattatatattattaaattatttcttacgccccgtttggatcattggaattaaatttcattataataatagtaatttagacatatatcaattaagttaattcagttttatgcaaaatatatttatatactattattagcaagatattggagatatttatgtgctacatttttactatagatgaatgagacaaagagtgtcatgtaagttacaaagtagaaacaaattctactcatgcataaaattattttccatcctccaccttataaatttgagataggcttatatcttaattttagaaagtggtggaatgtcaaattccaaactaaataagttactttattgagtgaattctagttcctctaaaatgaagggatccagacgccccgttacagtaaatctaaatatatataaatataacatgactctagattttttttataaaaaac

SEQ ID NO: 70477 - DNA, 3671 bp, Zea Mays
ccgcggcctccccgatcgccatcgacggtcccgtataaacccgcctccctgcgcttgggcagcttccctcccctcccctcccctccccacctaacgttaccggccggtcagcctctagtccacccgagcgcggccggccgcgtggacgcccgccgacgagcgagcagcgacgacgacgagcgagcaccggcggcggaggcggatggggaagtacgagatggggcggacgctcggggagggccacttcgggaaggtgaggctggcgcgggacgcgggcacgggccggtccttcgccatcaagatcctcgaccggcagcgcatcctcgccatgaagatcgacgagcagatcaagagggagatcgcgacgctgaagctgctcaagcaccccaacgtcgtccgcctgtacgagcctgagaatgtcctcgttgatgcaaagggaaacataaaggtttctgattttggactaagcgcccttccgcaaaaccaacgaatggtttgttgcataccacatgtggcagccctaactacatagccccggaggtccttctgaacaaaggttacgatggctcggtatctgacgtgtggtcctgtggtgttattctatatgtaatgcttacagggagtcttccatttgacgaccaaaatatggttgtcctctatcagaagattctgaaagggaatgctcacattccaaagtggctctctcaaggtgcccaagatctactgcgaaagatcctggatcctaacccgatcacgcgcgtagatgtggatgggataagggcacacgattggttcaagcaaggctacgctccttctgcgccgtttaatgatgacgaagaagatatcaacgtggatgaagaagacagcctaaatatgactgagcagaatggcattcaagacaagatagcaatcaaccaaatcaatgctttccagctcattgggatgtcctcctgccttgatctatccggattttttgagaaagaggatgcttctgaaaggaaaatcagattcgcatcaaattatcccccagcttacttgtttgagaagatcgagagcattgtcagaaaaatgggtttccaggtacacaagagcaacggcaaggtaagtgaccacctatcatgtgtattcatgtctacagacttccagctctgtgcgttcgggattagggtgctgagagtcattgtcacgtcctgcagctaaaagtgatccaagattgtaagggactagcaaatttaagagggaaagagtcattattaatttctgctgaggtatttatagtgcatagcatacttgtagttcaacgcagctgtctcccgtggtgcctagtgtatttctattagacttgtagcttctttttttatgttgtttcgattggaaattcatgttattaaccttgtggtattatgattccaggtgtttgagattaatgaatccctttacgttgtcgagctaaaaaagtcatctggagactgctccctgtacagaaagttgtgtgagacgctctcggaggacttgggcacatgcaaaagccagcaatttttaaagcaggattctatcagacaagagataggtagacataacagtagcttttaactaagagcccccttgttaaataggctatagacacaaactaacacaaacaatatactgaatttaaaacagtatattgggcatgcacctattacagatgtgctctctcatgccttttgtcatgaaaccttaagagacttagactatgaaaaattggcaactgacaatgtatcgaactccaaagggataatatgatgatgtaaacaagtaaaatacgcatataagtgattcagagctacctggtctctatgtttctcttatatattgattgatattggaacgtaagattgtttgcttttgaagcccctggctgacttccatggctccagaaagaaagtgcgatgtgttgttcgtaaaaagaagccctttcagatgcatgttcaactaaacgattgcctgtgaagaccatggatataggagaacggctcggtacaagtttgaaagtttgccaatcaccagtacagtccttgcatgagcattgtccttcactgaaatggtggaaacggttgcagtctctagtgatcaacttgtgctcgtgcaacaaggaaataagctaaacagttgtcttcacaggctctgaggttctttgttattcggagagctgagcctgcttctcactattttcaaccgatgcaccttcccttaggcactgttcggtttccagacattggagctccggaatgattcctagctggattatttctctaatttatataattttgatgagctggaacgaatcccggttcattcctgtacaagcgaacgggcccttagattgctcatcaatgtgttgttgcaagatcttccaacattttgtagatctccttggaccttgggtgcgatcaatcgccagaatcgagcttcttccaggaattaatcatctggatgctctccctccaaagcgacctcctcatttctgcaacaccttccgtttgtgcattttgctttggaaaaagctactgcaatgcaagttgcaagcagcaaggtattcactgtggtgtggtgtgcgctgatgagtcgtgtctcgtccatcctttgcttgcagagttgcaggaagaagatgagggagtaggatggaagttcatgttgtgcgttctggtgttccgactggccacggaagatcgaataaacattggtgaaagccccatttctactcataatgtttgcggctgtttcttttggtgcatgtgcatcagggtaacctgcacttataactttccattttctttcaattatttttagtaagtcctttttttcatagtcaatgggatcattctggatttgcatgtcgacggcaaaaaggagttgcgttcctcccagaaccccttcctattatgatagaagacattgggctccgtccataatcatccattggcgacaaagtttcttgtacattgtacacatgtaaaacaatcacaccaccatgaaccagccgccatcagtgttttctgatttcattgtttcagacttcaaagcattgtaaaatcagtttgtgatggtttgctgactttgtctgccttgttgctacgttcagtcgacctttcccttctttataagctaatttgtgcagtactccttatgttctagctttatcaaacattactatcttttttaaaaaaattcacaccatataaattatatattattaaattatttcttacgccccgtttggatcattggaattaaatttcattataataatagtaatttagacatatatcaattaagttaattcagttttatgcaaaatatatttatatactattattagcaagatattggagatatttatgtgctacatttttactatagatgaatgagacaaagagtgtcatgtaagttacaaagtagaaacaaattctactcatgcataaaattattttccatcctccaccttataaatttgagataggcttatatcttaattttagaaagtggtggaatgtcaaattccaaactaaataagttactttattgagtgaattctagttcctctaaaatgaagggatccagacgccccgttacagtaaatctaaatatatataaatataacatgactctagattttttttataaaaaac

SEQ ID NO: 70478 - DNA, 3666 bp, Zea Mays
ccgcggcctccccgatcgccatcgacggtcccgtataaacccgcctccctgcgcttgggcagcttccctcccctcccctcccctccccacctaacgttaccggccggtcagcctctagtccacccgagcgcggccggccgcgtggacgcccgccgacgagcgagcagcgacgacgacgagcgagcaccggcggcggaggcggatggggaagtacgagatggggcggacgctcggggagggccacttcgggaaggtgaggctggcgcgggacgcgggcacgggccggtccttcgccatcaagatcctcgaccggcagcgcatcctcgccatgaagatcgacgagcagatcaagagggagatcgcgacgctgaagctgctcaagcaccccaacgtcgtccgcctgtacgaggtttcagctagcaagaccaagatatacatggtcctcgagtacgtgaacggaggagagctatttgacaaaatcgtaacgactctgcccctgcttaactgtggacctccagccatcaggccgcatgcactcaagggtaagctgacggagaaggaagggaggaaactgttccagcagctgatagacgccgtgggatactgccacgagaagggggtttgtcacagggacctcaagcctgagaatgtcctcgttgatgcaaagggaaacataaaggtttctgattttggactaagcgcccttccgcaaaaccaacgaaaagatggtttgttgcataccacatgtggcagccctaactacatagccccggaggtccttctgaacaaaggttacgatggctcggtatctgacgtgtggtcctgtggtgttattctatatgtaatgcttacagggagtcttccatttgacgaccaaaatatggttgtcctctatcagaagattctgaaagggaatgctcacattccaaagtggctctctcaaggtgcccaagatctactgcgaaagatcctggatcctaacccgatcacgcgcgtagatgtggatgggataagggcacacgattggttcaagcaaggctacgctccttctgcgccgtttaatgatgacgaagaagatatcaacgtggatgaagaagacagcctaaatatgactgagcagaatggcattcaagacaagatagcaatcaaccaaatcaatgctttccagctcattgggatgtcctcctgccttgatctatccggattttttgagaaagaggatgcttctgaaaggaaaatcagattcgcatcaaattatcccccagcttacttgtttgagaagatcgagagcattgtcagaaaaatgggtttccaggtacacaagagcaacggcaagctaaaagtgatccaagattgtaagggactagcaaatttaagagggaaagagtcattattaatttctgctgaggtgtttgagattaatgaatccctttacgttgtcgagctaaaaaagtcatctggagactgctccctgtacagaaagttgtgtgagacgctctcggaggacttgggcacatgcaaaagccagcaatttttaaagcaggattctatcagacaagagataggtagacataacagtagcttttaactaagagcccccttgttaaataggctatagacacaaactaacacaaacaatatactgaatttaaaacagtatattgggcatgcacctattacagatgtgctctctcatgccttttgtcatgaaaccttaagagacttagactatgaaaaattggcaactgacaatgtatcgaactccaaagggataatatgatgatgtaaacaagtaaaatacgcatataagtgattcagagctacctggtctctatgtttctcttatatattgattgatattggaacgtaagattgtttgcttttgaagcccctggctgacttccatggctccagaaagaaagtgcgatgtgttgttcgtaaaaagaagccctttcagatgcatgttcaactaaacgattgcctgtgaagaccatggatataggagaacggctcggtacaagtttgaaagtttgccaatcaccagtacagtccttgcatgagcattgtccttcactgaaatggtggaaacggttgcagtctctagtgatcaacttgtgctcgtgcaacaaggaaataagctaaacagttgtcttcacaggctctgaggttctttgttattcggagagctgagcctgcttctcactattttcaaccgatgcaccttcccttaggcactgttcggtttccagacattggagctccggaatgattcctagctggattatttctctaatttatataattttgatgagctggaacgaatcccggttcattcctgtacaagcgaacgggcccttagattgctcatcaatgtgttgttgcaagatcttccaacattttgtagatctccttggaccttgggtgcgatcaatcgccagaatcgagcttcttccaggaattaatcatctggatgctctccctccaaagcgacctcctcatttctgcaacaccttccgtttgtgcattttgctttggaaaaagctactgcaatgcaagttgcaagcagcaaggtattcactgtggtgtggtgtgcgctgatgagtcgtgtctcgtccatcctttgcttgcagagttgcaggaagaagatgagggagtaggatggaagttcatgttgtgcgttctggtgttccgactggccacggaagatcgaataaacattggtgaaagccccatttctactcataatgtttgcggctgtttcttttggtgcatgtgcatcagggtaacctgcacttataactttccattttctttcaattatttttagtaagtcctttttttcatagtcaatgggatcattctggatttgcatgtcgacggcaaaaaggagttgcgttcctcccagaaccccttcctattatgatagaagacattgggctccgtccataatcatccattggcgacaaagtttcttgtacattgtacacatgtaaaacaatcacaccaccatgaaccagccgccatcagtgttttctgatttcattgtttcagacttcaaagcattgtaaaatcagtttgtgatggtttgctgactttgtctgccttgttgctacgttcagtcgacctttcccttctttataagctaatttgtgcagtactccttatgttctagctttatcaaacattactatcttttttaaaaaaattcacaccatataaattatatattattaaattatttcttacgccccgtttggatcattggaattaaatttcattataataatagtaatttagacatatatcaattaagttaattcagttttatgcaaaatatatttatatactattattagcaagatattggagatatttatgtgctacatttttactatagatgaatgagacaaagagtgtcatgtaagttacaaagtagaaacaaattctactcatgcataaaattattttccatcctccaccttataaatttgagataggcttatatcttaattttagaaagtggtggaatgtcaaattccaaactaaataagttactttattgagtgaattctagttcctctaaaatgaagggatccagacgccccgttacagtaaatctaaatatatataaatataacatgactctagattttttttataaaaaac

SEQ ID NO: 70479 - DNA, 3855 bp, Zea Mays
ccgcggcctccccgatcgccatcgacggtcccgtataaacccgcctccctgcgcttgggcagcttccctcccctcccctcccctccccacctaacgttaccggccggtcagcctctagtccacccgagcgcggccggccgcgtggacgcccgccgacgagcgagcagcgacgacgacgagcgagcaccggcggcggaggcggatggggaagtacgagatggggcggacgctcggggagggccacttcgggaaggtgaggctggcgcgggacgcgggcacgggccggtccttcgccatcaagatcctcgaccggcagcgcatcctcgccatgaagatcgacgagcagatcaagagggagatcgcgacgctgaagctgctcaagcaccccaacgtcgtccgcctgtacgaggtttcagctagcaagaccaagatatacatggtcctcgagtacgtgaacggaggagagctatttgacaaaatcgcactcaagggtaagctgacggagaaggaagggaggaaactgttccagcagctgatagacgccgtgggatactgccacgagaagggggtttgtcacagggacctcaaggaacggtagacaaagccatagccacagagtcccagatcgatagggtcgaggaacgtgctacactacttcctgagaatgtcctcgttgatgcaaagggaaacataaaggtttctgattttggactaagcgcccttccgcaaaaccaacgagtatgcatgacgtcctccctcatgccagatcattctgaatcattttgtctgtgatgactctcttttttttcttccagaaagatggtttgttgcataccacatgtggcagccctaactacatagccccggaggtccttctgaacaaaggttacgatggctcggtatctgacgtgtggtcctgtggtgttattctatatgtaatgcttacagggagtcttccatttgacgaccaaaatatggttgtcctctatcagaagattctgaaagggaatgctcacattccaaagtggctctctcaaggtgcccaagatctactgcgaaagatcctggatcctaacccgatcacgcgcgtagatgtggatgggataagggcacacgattggttcaagcaaggctacgctccttctgcgccgtttaatgatgacgaagaagatatcaacgtggatgaagaagacagcctaaatatgactgagcagaatggcattcaagacaagatagcaatcaaccaaatcaatgctttccagctcattgggatgtcctcctgccttgatctatccggattttttgagaaagaggatgcttctgaaaggaaaatcagattcgcatcaaattatcccccagcttacttgtttgagaagatcgagagcattgtcagaaaaatgggtttccaggtacacaagagcaacggcaaggtaagtgaccacctatcatgtgtattcatgtctacagacttccagctctgtgcgttcgggattagggtgctgagagtcattgtcacgtcctgcagctaaaagtgatccaagattgtaagggactagcaaatttaagagggaaagagtcattattaatttctgctgaggtgtttgagattaatgaatccctttacgttgtcgagctaaaaaagtcatctggagactgctccctgtacagaaagttgtgtgagacgctctcggaggacttgggcacatgcaaaagccagcaatttttaaagcaggattctatcagacaagagataggtagacataacagtagcttttaactaagagcccccttgttaaataggctatagacacaaactaacacaaacaatatactgaatttaaaacagtatattgggcatgcacctattacagatgtgctctctcatgccttttgtcatgaaaccttaagagacttagactatgaaaaattggcaactgacaatgtatcgaactccaaagggataatatgatgatgtaaacaagtaaaatacgcatataagtgattcagagctacctggtctctatgtttctcttatatattgattgatattggaacgtaagattgtttgcttttgaagcccctggctgacttccatggctccagaaagaaagtgcgatgtgttgttcgtaaaaagaagccctttcagatgcatgttcaactaaacgattgcctgtgaagaccatggatataggagaacggctcggtacaagtttgaaagtttgccaatcaccagtacagtccttgcatgagcattgtccttcactgaaatggtggaaacggttgcagtctctagtgatcaacttgtgctcgtgcaacaaggaaataagctaaacagttgtcttcacaggctctgaggttctttgttattcggagagctgagcctgcttctcactattttcaaccgatgcaccttcccttaggcactgttcggtttccagacattggagctccggaatgattcctagctggattatttctctaatttatataattttgatgagctggaacgaatcccggttcattcctgtacaagcgaacgggcccttagattgctcatcaatgtgttgttgcaagatcttccaacattttgtagatctccttggaccttgggtgcgatcaatcgccagaatcgagcttcttccaggaattaatcatctggatgctctccctccaaagcgacctcctcatttctgcaacaccttccgtttgtgcattttgctttggaaaaagctactgcaatgcaagttgcaagcagcaaggtattcactgtggtgtggtgtgcgctgatgagtcgtgtctcgtccatcctttgcttgcagagttgcaggaagaagatgagggagtaggatggaagttcatgttgtgcgttctggtgttccgactggccacggaagatcgaataaacattggtgaaagccccatttctactcataatgtttgcggctgtttcttttggtgcatgtgcatcagggtaacctgcacttataactttccattttctttcaattatttttagtaagtcctttttttcatagtcaatgggatcattctggatttgcatgtcgacggcaaaaaggagttgcgttcctcccagaaccccttcctattatgatagaagacattgggctccgtccataatcatccattggcgacaaagtttcttgtacattgtacacatgtaaaacaatcacaccaccatgaaccagccgccatcagtgttttctgatttcattgtttcagacttcaaagcattgtaaaatcagtttgtgatggtttgctgactttgtctgccttgttgctacgttcagtcgacctttcccttctttataagctaatttgtgcagtactccttatgttctagctttatcaaacattactatcttttttaaaaaaattcacaccatataaattatatattattaaattatttcttacgccccgtttggatcattggaattaaatttcattataataatagtaatttagacatatatcaattaagttaattcagttttatgcaaaatatatttatatactattattagcaagatattggagatatttatgtgctacatttttactatagatgaatgagacaaagagtgtcatgtaagttacaaagtagaaacaaattctactcatgcataaaattattttccatcctccaccttataaatttgagataggcttatatcttaattttagaaagtggtggaatgtcaaattccaaactaaataagttactttattgagtgaattctagttcctctaaaatgaagggatccagacgccccgttacagtaaatctaaatatatataaatataacatgactctagattttttttataaaaaac

SEQ ID NO: 70480 - DNA, 3956 bp, Zea Mays
ccgcggcctccccgatcgccatcgacggtcccgtataaacccgcctccctgcgcttgggcagcttccctcccctcccctcccctccccacctaacgttaccggccggtcagcctctagtccacccgagcgcggccggccggtccgtccgtccgccgcagcagagcctctagcctgtagccagttggttccccgcccgcggccggcgacagatcgatgcggcgtgcgtggacgcccgccgacgagcgagcagcgacgacgacgagcgagcaccggcggcggaggcggatggggaagtacgagatggggcggacgctcggggagggccacttcgggaaggtgaggctggcgcgggacgcgggcacgggccggtccttcgccatcaagatcctcgaccggcagcgcatcctcgccatgaagatcgacgagcaggtgcgcgcggtgtgcctgcctgccgtctgagtcgttttccgatcgtacgtcgtacttactccggtgctgaccgactgtgcggccgggtcaccgggcgcagatcaagagggagatcgcgacgctgaagctgctcaagcaccccaacgtcgtccgcctgtacgaggtttcagctagcaagaccaagatatacatggtcctcgagtacgtgaacggaggagagctatttgacaaaatcgcactcaagggtaagctgacggagaaggaagggaggaaactgttccagcagctgatagacgccgtgggatactgccacgagaagggggtttgtcacagggacctcaagcctgagaatgtcctcgttgatgcaaagggaaacataaaggtttctgattttggactaagcgcccttccgcaaaaccaacgaatggtttgttgcataccacatgtggcagccctaactacatagccccggagggagtcttccatttgacgaccaaaatatggttgtcctctatcagaagattctgaaagggaatgctcacattccaaagtggctctctcaaggtgcccaagatctactgcgaaagatcctggatcctaacccgatcacgcgcgtagatgtggatgggataagggcacacgattggttcaagcaaggctacgctccttctgcgccgtttaatgatgacgaagaagatatcaacgtggatgaagaagacagcctaaatatgactgagcagaatggcattcaagacaagatagcaatcaaccaaatcaatgctttccagctcattgggatgtcctcctgccttgatctatccggattttttgagaaagaggatgcttctgaaaggaaaatcagattcgcatcaaattatcccccagcttacttgtttgagaagatcgagagcattgtcagaaaaatgggtttccaggtacacaagagcaacggcaaggtaagtgaccacctatcatgtgtattcatgtctacagacttccagctctgtgcgttcgggattagggtgctgagagtcattgtcacgtcctgcagctaaaagtgatccaagattgtaagggactagcaaatttaagagggaaagagtcattattaatttctgctgaggtatttatagtgcatagcatacttgtagttcaacgcagctgtctcccgtggtgcctagtgtatttctattagacttgtagcttctttttttatgttgtttcgattggaaattcatgttattaaccttgtggtattatgattccaggtgtttgagattaatgaatccctttacgttgtcgagctaaaaaagtcatctggagactgctccctgtacagaaagttgtgtgagacgctctcggaggacttgggcacatgcaaaagccagcaatttttaaagcaggattctatcagacaagagataggtagacataacagtagcttttaactaagagcccccttgttaaataggctatagacacaaactaacacaaacaatatactgaatttaaaacagtatattgggcatgcacctattacagatgtgctctctcatgccttttgtcatgaaaccttaagagacttagactatgaaaaattggcaactgacaatgtatcgaactccaaagggataatatgatgatgtaaacaagtaaaatacgcatataagtgattcagagctacctggtctctatgtttctcttatatattgattgatattggaacgtaagattgtttgcttttgaagcccctggctgacttccatggctccagaaagaaagtgcgatgtgttgttcgtaaaaagaagccctttcagatgcatgttcaactaaacgattgcctgtgaagaccatggatataggagaacggctcggtacaagtttgaaagtttgccaatcaccagtacagtccttgcatgagcattgtccttcactgaaatggtggaaacggttgcagtctctagtgatcaacttgtgctcgtgcaacaaggaaataagctaaacagttgtcttcacaggctctgaggttctttgttattcggagagctgagcctgcttctcactattttcaaccgatgcaccttcccttaggcactgttcggtttccagacattggagctccggaatgattcctagctggattatttctctaatttatataattttgatgagctggaacgaatcccggttcattcctgtacaagcgaacgggcccttagattgctcatcaatgtgttgttgcaagatcttccaacattttgtagatctccttggaccttgggtgcgatcaatcgccagaatcgagcttcttccaggaattaatcatctggatgctctccctccaaagcgacctcctcatttctgcaacaccttccgtttgtgcattttgctttggaaaaagctactgcaatgcaagttgcaagcagcaaggtattcactgtggtgtggtgtgcgctgatgagtcgtgtctcgtccatcctttgcttgcagagttgcaggaagaagatgagggagtaggatggaagttcatgttgtgcgttctggtgttccgactggccacggaagatcgaataaacattggtgaaagccccatttctactcataatgtttgcggctgtttcttttggtgcatgtgcatcagggtaacctgcacttataactttccattttctttcaattatttttagtaagtcctttttttcatagtcaatgggatcattctggatttgcatgtcgacggcaaaaaggagttgcgttcctcccagaaccccttcctattatgatagaagacattgggctccgtccataatcatccattggcgacaaagtttcttgtacattgtacacatgtaaaacaatcacaccaccatgaaccagccgccatcagtgttttctgatttcattgtttcagacttcaaagcattgtaaaatcagtttgtgatggtttgctgactttgtctgccttgttgctacgttcagtcgacctttcccttctttataagctaatttgtgcagtactccttatgttctagctttatcaaacattactatcttttttaaaaaaattcacaccatataaattatatattattaaattatttcttacgccccgtttggatcattggaattaaatttcattataataatagtaatttagacatatatcaattaagttaattcagttttatgcaaaatatatttatatactattattagcaagatattggagatatttatgtgctacatttttactatagatgaatgagacaaagagtgtcatgtaagttacaaagtagaaacaaattctactcatgcataaaattattttccatcctccaccttataaatttgagataggcttatatcttaattttagaaagtggtggaatgtcaaattccaaactaaataagttactttattgagtgaattctagttcctctaaaatgaagggatccagacgccccgttacagtaaatctaaatatatataaatataacatgactctagattttttttataaaaaac

SEQ ID NO: 70481 - DNA, 3935 bp, Zea Mays
ccgcggcctccccgatcgccatcgacggtcccgtataaacccgcctccctgcgcttgggcagcttccctcccctcccctcccctccccacctaacgttaccggccggtcagcctctagtccacccgagcgcggccggccggtccgtccgtccgccgcagcagagcctctagcctgtagccagttggttccccgcccgcggccggcgacagatcgatgcggcgtgcgtggacgcccgccgacgagcgagcagcgacgacgacgagcgagcaccggcggcggaggcggatggggaagtacgagatggggcggacgctcggggagggccacttcgggaaggtgaggctggcgcgggacgcgggcacgggccggtccttcgccatcaagatcctcgaccggcagcgcatcctcgccatgaagatcgacgagcagatcaagagggagatcgcgacgctgaagctgctcaagcaccccaacgtcgtccgcctgtacgaggtttcagctagcaagaccaagatatacatggtcctcgagtacgtgaacggaggagagctatttgacaaaatcgcactcaagggtaagctgacggagaaggaagggaggaaactgttccagcagctgatagacgccgtgggatactgccacgagaagggggtttgtcacagggacctcaagcctgagaatgtcctcgttgatgcaaagggaaacataaaggtttctgattttggactaagcgcccttccgcaaaaccaacgaatggtttgttgcataccacatgtggcagccctaactacatagccccggaggtccttctgaacaaaggttacgatggctcggtatctgacgtgtggtcctgtggtgttattctatatgtaatgcttacagggagtcttccatttgacgaccaaaatatggttgtcctctatcagaagattctgaaagggaatgctcacattccaaagtggctctctcaaggtgcccaagatctactgcgaaagatcctggatcctaacccgatcacgcgcgtagatgtggatgggataagggcacacgattggttcaagcaaggctacgctccttctgcgccgtttaatgatgacgaagaagatatcaacgtggatgaagaagacagcctaaatatgactgagcagaatggcattcaagacaagatagcaatcaaccaaatcaatgctttccagctcattgggatgtcctcctgccttgatctatccggattttttgagaaagaggatgcttctgaaaggaaaatcagattcgcatcaaattatcccccagcttacttgtttgagaagatcgagagcattgtcagaaaaatgggtttccaggtacacaagagcaacggcaaggtaagtgaccacctatcatgtgtattcatgtctacagacttccagctctgtgcgttcgggattagggtgctgagagtcattgtcacgtcctgcagctaaaagtgatccaagattgtaagggactagcaaatttaagagggaaagagtcattattaatttctgctgaggtatttatagtgcatagcatacttgtagttcaacgcagctgtctcccgtggtgcctagtgtatttctattagacttgtagcttctttttttatgttgtttcgattggaaattcatgttattaaccttgtggtattatgattccaggtgtttgagattaatgaatccctttacgttgtcgagctaaaaaagtcatctggagactgctccctgtacagaaagttgtgtgagacgctctcggaggacttgggcacatgcaaaagccagcaatttttaaagcaggattctatcagacaagagataggtagacataacagtagcttttaactaagagcccccttgttaaataggctatagacacaaactaacacaaacaatatactgaatttaaaacagtatattgggcatgcacctattacagatgtgctctctcatgccttttgtcatgaaaccttaagagacttagactatgaaaaattggcaactgacaatgtatcgaactccaaagggataatatgatgatgtaaacaagtaaaatacgcatataagtgattcagagctacctggtctctatgtttctcttatatattgattgatattggaacgtaagattgtttgcttttgaagcccctggctgacttccatggctccagaaagaaagtgcgatgtgttgttcgtaaaaagaagccctttcagatgcatgttcaactaaacgattgcctgtgaagaccatggatataggagaacggctcggtacaagtttgaaagtttgccaatcaccagtacagtccttgcatgagcattgtccttcactgaaatggtggaaacggttgcagtctctagtgatcaacttgtgctcgtgcaacaaggaaataagctaaacagttgtcttcacaggctctgaggttctttgttattcggagagctgagcctgcttctcactattttcaaccgatgcaccttcccttaggcactgttcggtttccagacattggagctccggaatgattcctagctggattatttctctaatttatataattttgatgagctggaacgaatcccggttcattcctgtacaagcgaacgggcccttagattgctcatcaatgtgttgttgcaagatcttccaacattttgtagatctccttggaccttgggtgcgatcaatcgccagaatcgagcttcttccaggaattaatcatctggatgctctccctccaaagcgacctcctcatttctgcaacaccttccgtttgtgcattttgctttggaaaaagctactgcaatgcaagttgcaagcagcaaggtattcactgtggtgtggtgtgcgctgatgagtcgtgtctcgtccatcctttgcttgcagagttgcaggaagaagatgagggagtaggatggaagttcatgttgtgcgttctggtgttccgactggccacggaagatcgaataaacattggtgaaagccccatttctactcataatgtttgcggctgtttcttttggtgcatgtgcatcagggtaacctgcacttataactttccattttctttcaattatttttagtaagtcctttttttcatagtcaatgggatcattctggatttgcatgtcgacggcaaaaaggagttgcgttcctcccagaaccccttcctattatgatagaagacattgggctccgtccataatcatccattggcgacaaagtttcttgtacattgtacacatgtaaaacaatcacaccaccatgaaccagccgccatcagtgttttctgatttcattgtttcagacttcaaagcattgtaaaatcagtttgtgatggtttgctgactttgtctgccttgttgctacgttcagtcgacctttcccttctttataagctaatttgtgcagtactccttatgttctagctttatcaaacattactatcttttttaaaaaaattcacaccatataaattatatattattaaattatttcttacgccccgtttggatcattggaattaaatttcattataataatagtaatttagacatatatcaattaagttaattcagttttatgcaaaatatatttatatactattattagcaagatattggagatatttatgtgctacatttttactatagatgaatgagacaaagagtgtcatgtaagttacaaagtagaaacaaattctactcatgcataaaattattttccatcctccaccttataaatttgagataggcttatatcttaattttagaaagtggtggaatgtcaaattccaaactaaataagttactttattgagtgaattctagttcctctaaaatgaagggatccagacgccccgttacagtaaatctaaatatatataaatataacatgactctagattttttttataaaaaac

SEQ ID NO: 70482 - DNA, 3714 bp, Zea Mays
ccgcggcctccccgatcgccatcgacggtcccgtataaacccgcctccctgcgcttgggcagcttccctcccctcccctcccctccccacctaacgttaccggccggtcagcctctagtccacccgagcgcggccggccgcgtggacgcccgccgacgagcgagcagcgacgacgacgagcgagcaccggcggcggaggcggatggggaagtacgagatggggcggacgctcggggagggccacttcgggaaggtgaggctggcgcgggacgcgggcacgggccggtccttcgccatcaagatcctcgaccggcagcgcatcctcgccatgaagatcgacgagcagatcaagagggagatcgcgacgctgaagctgctcaagcaccccaacgtcgtccgcctgtacgaggtttcagctagcaagaccaagatatacatggtcctcgagtacgtgaacggaggagagctatttgacaaaatcgcactcaagggtaagctgacggagaaggaagggaggaaactgttccagcagctgatagacgccgtgggatactgccacgagaagggggtttgtcacagggacctcaagcctgagaatgtcctcgttgatgcaaagggaaacataaaggtttctgattttggactaagcgcccttccgcaaaaccaacgaaaagatggtttgttgcataccacatgtggcagccctaactacatagccccggaggtccttctgaacaaaggttacgatggctcggtatctgacgtgtggtcctgtggtgttattctatatgtaatgcttacagggagtcttccatttgacgaccaaaatatggttgtcctctatcagaagattctgaaagggaatgctcacattccaaagtggctctctcaaggtgcccaagatctactgcgaaagatcctggatcctaacccgatcacgcgcgtagatgtggatgggataagggcacacgattggttcaagcaaggctacgctccttctgcgccgtttaatgatgacgaagaagatatcaacgtggatgaagaagacagcctaaatatgactgagaatggcattcaagacaagatagcaatcaaccaaatcaatgctttccagctcattgggatgtcctcctgccttgatctatccggattttttgagaaagagtttgtaggatgcttctgaaaggaaaatcagattcgcatcaaattatcccccagcttacttgtttgagaagatcgagagcattgtcagaaaaatgggtttccaggtacacaagagcaacggcaaggtaagtgaccacctatcatgtgtattcatgtctacagacttccagctctgtgcgttcgggattagggtgctgagagtcattgtcacgtcctgcagctaaaagtgatccaagattgtaagggactagcaaatttaagagggaaagagtcattattaatttctgctgaggtgtttgagattaatgaatccctttacgttgtcgagctaaaaaagtcatctggagactgctccctgtacagaaagttgtgtgagacgctctcggaggacttgggcacatgcaaaagccagcaatttttaaagcaggattctatcagacaagagataggtagacataacagtagcttttaactaagagcccccttgttaaataggctatagacacaaactaacacaaacaatatactgaatttaaaacagtatattgggcatgcacctattacagatgtgctctctcatgccttttgtcatgaaaccttaagagacttagactatgaaaaattggcaactgacaatgtatcgaactccaaagggataatatgatgatgtaaacaagtaaaatacgcatataagtgattcagagctacctggtctctatgtttctcttatatattgattgatattggaacgtaagattgtttgcttttgaagcccctggctgacttccatggctccagaaagaaagtgcgatgtgttgttcgtaaaaagaagccctttcagatgcatgttcaactaaacgattgcctgtgaagaccatggatataggagaacggctcggtacaagtttgaaagtttgccaatcaccagtacagtccttgcatgagcattgtccttcactgaaatggtggaaacggttgcagtctctagtgatcaacttgtgctcgtgcaacaaggaaataagctaaacagttgtcttcacaggctctgaggttctttgttattcggagagctgagcctgcttctcactattttcaaccgatgcaccttcccttaggcactgttcggtttccagacattggagctccggaatgattcctagctggattatttctctaatttatataattttgatgagctggaacgaatcccggttcattcctgtacaagcgaacgggcccttagattgctcatcaatgtgttgttgcaagatcttccaacattttgtagatctccttggaccttgggtgcgatcaatcgccagaatcgagcttcttccaggaattaatcatctggatgctctccctccaaagcgacctcctcatttctgcaacaccttccgtttgtgcattttgctttggaaaaagctactgcaatgcaagttgcaagcagcaaggtattcactgtggtgtggtgtgcgctgatgagtcgtgtctcgtccatcctttgcttgcagagttgcaggaagaagatgagggagtaggatggaagttcatgttgtgcgttctggtgttccgactggccacggaagatcgaataaacattggtgaaagccccatttctactcataatgtttgcggctgtttcttttggtgcatgtgcatcagggtaacctgcacttataactttccattttctttcaattatttttagtaagtcctttttttcatagtcaatgggatcattctggatttgcatgtcgacggcaaaaaggagttgcgttcctcccagaaccccttcctattatgatagaagacattgggctccgtccataatcatccattggcgacaaagtttcttgtacattgtacacatgtaaaacaatcacaccaccatgaaccagccgccatcagtgttttctgatttcattgtttcagacttcaaagcattgtaaaatcagtttgtgatggtttgctgactttgtctgccttgttgctacgttcagtcgacctttcccttctttataagctaatttgtgcagtactccttatgttctagctttatcaaacattactatcttttttaaaaaaattcacaccatataaattatatattattaaattatttcttacgccccgtttggatcattggaattaaatttcattataataatagtaatttagacatatatcaattaagttaattcagttttatgcaaaatatatttatatactattattagcaagatattggagatatttatgtgctacatttttactatagatgaatgagacaaagagtgtcatgtaagttacaaagtagaaacaaattctactcatgcataaaattattttccatcctccaccttataaatttgagataggcttatatcttaattttagaaagtggtggaatgtcaaattccaaactaaataagttactttattgagtgaattctagttcctctaaaatgaagggatccagacgccccgttacagtaaatctaaatatatataaatataacatgactctagattttttttataaaaaac

SEQ ID NO: 70483 - DNA, 1486 bp, Zea Mays
gtctccgtcccgtgtcctcgtggcttggcagtgtcgatcgctgatcccaccggctgatagagttggcggccgggagagtgagtcagggatggcgtcggagccggtggcgcgggcggtggcggaggaggtgggccgctggggcagcatgaagcagacgggggtgaccctgcggtacatgatggagttcggctcccgccccacccagcgcaacctgctcctctccgcgcagttcctgcacaaggagctccccatccgcttcgcgcgccgcgcgctcgagctcgactcgctgcccttcggcctctccaacaagcccgccatcctcaaggtgcgggactggtacttggactcattccgggacatcagatacttccctgaagtgaggagccggaacgacgagctcgctttcacgcagatgatcaatatggtcaaggtgcggcataacaatgtggttccaaccatggccttgggagtgcagcagctgaagaaggagctgggccgctcaaggaaggttccattcgagttcgatgagatcgacgagttccttgaccggttctacatgtcaaggattggcatccgcatgctgatagggcagcatgtggctttgcatgaccctaaaccggagcctggtgttataggcctcatcaatacaagattatccccaatccaggtggctcaagctgcttgtgaagatgcccgttctgtctgtttaagggaatatggatcagctcctgatattaacatttatggcgatccaaattttacgtttccatacgtcacattacacctacacctgatgttatttgaattggtgaagaactctctccgcgcggtgcaagaacggtatatgaactctgataaagatgttcccccggttagaattatagttgctgatggagaagaggatgttactatcaaggttagcgatgaaggtggcgggataccaagaagcggcctcccgagaattttcacgtatctgtacagcaccgcaaagaatcctcctgagctagatagacctaatactgaaggggtaactatggctgggtatggtttcgggctcccgatcagccgactctacgctcggtattttggcggcgacctgcaaatcatctcgatggaaggatacggtaccgatgcttacctccacttgtcgcggctgggagattcagaggagcccttgccttgacgacatatttttgtggacctccagtaccactcttctcctgtaactatgtggctcgatcttcttgtaatccagtgctggcctcgacctatatatatatagctatagttggcctcgaccttatttcactgcctgctctgctgcattgtgaacacagcactgctacgtcctgcttacttccgccatgtactatgatctctctgccggccttcaacaggaaaaaagaaaggacgagggaaatcatggggagcagctaggcggatgagcgcattctcggggaagaagccaccaggattgtcacggaca

SEQ ID NO: 70484 - DNA, 2977 bp, Zea Mays
taactatgcatgcatctggtgtgagtagcgtgaaatatcatttgcctatagacaaatctattacagctgaaatcgaagtcaaagcttgatagtgtgatgcatcttgtcgaggacaaatcaaataaggttctggccttattttcaaattttgaggcagctcatgaaaccatggaagaggctgaactcatgctttcagctttgctgaaggccaatgaaggattgaaacttgagagagataattgcaggcaagcggtggaattgttgttgtctgagaaaagttctctgatcggtgagttgaaggaacttgaagcatcaagctcttgtacatcccagaagtatgacaaattgcatcaacagataaatgagtgtgttacagagatgacaaagctcgctgctacaataaggaagtcgttccagcaaattcaaagtgtttctacagtagaactctttgctctttgctcagagattattacttttggccaagacttgaaaagatatataattgactcaaggtcatatatagcaaacatggtatcacttatagaagaaaaaagcagatctatagagcagttccatcacctaagtacacatgcttgtgggtctgctcgccaacaggtagagtcgaattcatgccagtggggtagcagaaaactttctcaatctgattatagtacagactatgcatcactcagaagagaatttaacaggaagagcaatgttgttgaaggattgtcttttgatcttaaactactgcaagagtctgcctcaaacgcgaaagatatgaaagataaagctgatgaaatatctattgcccttagcaatactcaaagagaactagatatgaaaacttccacaatggaaaccatgttgaaaaaacaaaaggtacttgaggaagaactagctgaaaatggtgccagactcattaatttaagattagagttagagcaatctcaaagtttatcatcagcattattgaaggagaacaaaggtctgagagtgatgttggaagatgaaactatgaagaatagtgaaacaaaagtgctgttggaagaaaaagttaaggtcatagagggactggagagccaaatactatttctaaatcgttgtgaagtggggcagttgatgtcagatattgaagaattaaacaatagcattaaaataatgagtagtgacagagacaatctccaggcagagatatttaagttaagggacaagcttgagatggcattggctttagctgaggaaaatgaagctgctgctattgaagttcgtcaaactgcagagattagtaaaatttatgctgaggaaaaagaagaggaggttaagattcttgaacgatctgtcgaggaacttgaaggaacagtaactgttcttgaggaagaggtatgcaaccttaaagaggaagtaaggaactatcaaatacataaacaatctgaagcccaatttcaagctattaatgacatgcttgctgaagaaaaagcatcaaaatgtgatgctgctgaggaatcgtgtcaagcgaaatgtcatctagaaaagagattgcaagctgagattcttgcacatcaaggtgtcagaaagaagattgaaggtctcaaattggaagcaaagcgtaaagatgatgagattggacaatacaaagagcatattgctgagttggtcctgcattcagaagcacagtccttgttgtttcaggagaagtacaatgaaatggaacacatggtttctagacagaggtttggtccgcatgaatcttattctgagactgtccccaagactgaaaagccttcagggcgagcaagaggatccagctcccctttccggtgcatatctagcattattcaacaaatgaactctgagagagatcaagaaatcttggtggcacgccaacgaattgaagaactagaaggtttggttagttgcaaacagaaagagatatgcttgctaacatcaagactagctgctgtggataccatgacgcatgatattataagagaactacttggtgtcaaactagacatgacaaactatgctaatttggttgaccaagaagagctgcaaaagttgctcatagcatcccagcaacagattgaacaatcaaaggcgaaggatacagagctcgaagcgctgaaggaacaacttggccatcttattctggaaagggacagcttgcttgatgacatggaccaaagaaagacggacctattggaggctcaactgctcgttgaacagctcgagcaacgggagcagatgctagaagcgcagattgaaatgttgcagctggagaaagacagccttcagcaaaagaccttggagatggacgagacaatcgagcttctagccagatcaaaccaaccagatataaatccacgaatgggcgacaaccaccatcgcggcagcagtgagttcagcaggcggctcgctcagtccgacatgctcctctcccacgcgaggcatgagcattctcgcaggcacgcggccggaagctcgaggacgcaccacggccggcaccgatgaagctcgaggatgcttgctagtagaatgctggtgcgtcagccgccagacaccgcttgtgtttgtagcggactagcggcgcggcttctctggccgggactgtacagaagctgcaccgaatggcagtggccagaagaaacttcccacgtctgtaagatctgcgcgcctgtaaatctgatagtgcaatgtacgcgttgttgtcatttgggccattgtatgttcttccgcgaggcttttcagcgagatctccctgaaagaagacaaacaactgaaaagtgacataatcccacagatttgtttctactttaccgagggttagctagggttatgtgccgagtcatatctaaatggatcaatcatcgtgccgagtcataatcccttgtaaggaggcgcatatatttacatgctccaattgtttttttctaaaaagcgcgccattgttttcagtttttttaaaggaaggttt

SEQ ID NO: 70485 - DNA, 4105 bp, Zea Mays
ataggacccaaagggtaaatgtacattggtgaagtaaataagctgcgctgtgaacttatacaataccagaaagcctgcacaaatcaagttgctcctgaggaaaaggagaatgttgtggccacaagcaccaatgcaatgcaacatgatcaagccgggaagaatttttcatatttgtcaacagatgatgttaacaggcagttcatgcaagcagagatcacaactaatatttcagaatcatttcaacttgaattaccttatgaaattgacagtgaagatccggactctcctcatttgcatgatcctgaaacacatgactttagggatcctagaacagcatcagagtatgatggtgtattgtctcagtgcttaaacttagctatggcgtcttcacatgatgttcttaacaaaagtactattctaactgatctgaattttctagagaaggatgacacatatcatgtccatgaaaagcctccatttaggggtatacatttgcatgatgagactttatcgtgccaagagattgaaacagtgaactcaagtaaacatctatcacaggatgaattggaaaaccttaaaagaacaaatgaagagctcaaagagaagctgtttattatggctgaagaaagcaataagctttcagagattattgttgcaaaagatgtagaaattgcttctttatctgaagaatgggaggctgcaatttttgatctaacaagcttcttaacagatggatgtagatcactggatgatgcatatcagaacattgataatatgattagctcatttcctcacagtaacagttctgtaagtgaacatgttgagaaggctatgaaaattagcattgagaaagaaaagatgatattcaaacttcaaactgaactacaaactgcacaaaaaattggcagggaagtgaaggaaaagctgcatattttaaaaggtgcaacccttgctataactgaagctcagcagttggataatgaagaaaactctcaggaagaactacagctagtgggactattgcaccaaaaggattgtataatacaagaactaaggaacaatttgaaaccagaaaaatttgtatttgcagaaagagcaaaagggcattctcgtgatgacctactgttgcctggtagttcagttgacatgattgaggatcatgatgaaaatcaaccagcagccagtcaagctagtccagattatcagtcaaagcttgatagtgtgatgcatcttgtcgaggacaaatcaaataaggttctggccttattttcaaattttgaggcagctcatgaaaccatggaagaggctgaactcatgctttcagctttgctgaaggccaatgaaggattgaaacttgagagagataattgcaggcaagcggtggaattgttgttgtctgagaaaagttctctgatcggtgagttgaaggaacttgaagcatcaagctcttgtacatcccagaagtatgacaaattgcatcaacagataaatgagtgtgttacagagatgacaaagctcgctgctacaataaggaagtcgttccagcaaattcaaagtgtttctacagtagaactctttgctctttgctcagagattattacttttggccaagacttgaaaagatatataattgactcaaggtcatatatagcaaacatggtatcacttatagaagaaaaaagcagatctatagagcagttccatcacctaagtacacatgcttgtgggtctgctcgccaacaggtagagtcgaattcatgccagtggggtagcagaaaactttctcaatctgattatagtacagactatgcatcactcagaagagaatttaacaggaagagcaatgttgttgaaggattgtcttttgatcttaaactactgcaagagtctgcctcaaacgcgaaagatatgaaagataaagctgatgaaatatctattgcccttagcaatactcaaagagaactagatatgaaaacttccacaatggaaaccatgttgaaaaaacaaaaggtacttgaggaagaactagctgaaaatggtgccagactcattaatttaagattagagttagagcaatctcaaagtttatcatcagcattattgaaggagaacaaaggtctgagagtgatgttggaagatgaaactatgaagaatagtgaaacaaaagtgctgttggaagaaaaagttaaggtcatagagggactggagagccaaatactatttctaaatcgttgtgaagtggggcagttgatgtcagatattgaagaattaaacaatagcattaaaataatgagtagtgacagagacaatctccaggcagagatatttaagttaagggacaagcttgagatggcattggctttagctgaggaaaatgaagctgctgctattgaagttcgtcaaactgcagagattagtaaaatttatgctgaggaaaaagaagaggaggttaagattcttgaacgatctgtcgaggaacttgaaggaacagtaactgttcttgaggaagaggtatgcaaccttaaagaggaagtaaggaactatcaaatacataaacaatctgaagcccaatttcaagctattaatgacatgcttgctgaagaaaaagcatcaaaatgtgatgctgctgaggaatcgtgtcaagcgaaatgtcatctagaaaagagattgcaagctgagattcttgcacatcaaggtgtcagaaagaagattgaaggtctcaaattggaagcaaagcgtaaagatgatgagattggacaatacaaagagcatattgctgagttggtcctgcattcagaagcacagtccttgttgtttcaggagaagtacaatgaaatggaacacatggtttctagacagaggtttggtccgcatgaatcttattctgagactgtccccaagactgaaaagccttcagggcgagcaagaggatccagctcccctttccggtgcatatctagcattattcaacaaatgaactctgagagagatcaagaaatcttggtggcacgccaacgaattgaagaactagaaggtttggttagttgcaaacagaaagagatatgcttgctaacatcaagactagctgctgtggataccatgacgcatgatattataagagaactacttggtgtcaaactagacatgacaaactatgctaatttggttgaccaagaagagctgcaaaagttgctcatagcatcccagcaacagattgaacaatcaaaggcgaaggatacagagctcgaagcgctgaaggaacaacttggccatcttattctggaaagggacagcttgcttgatgacatggaccaaagaaagacggacctattggaggctcaactgctcgttgaacagctcgagcaacgggagcagatgctagaagcgcagattgaaatgttgcagctggagaaagacagccttcagcaaaagaccttggagatggacgagacaatcgagcttctagccagatcaaaccaaccagatataaatccacgaatgggcgacaaccaccatcgcggcagcagtgagttcagcaggcggctcgctcagtccgacatgctcctctcccacgcgaggcatgagcattctcgcaggcacgcggccggaagctcgaggacgcaccacggccggcaccgatgaagctcgaggatgcttgctagtagaatgctggtgcgtcagccgccagacaccgcttgtgtttgtagcggactagcggcgcggcttctctggccgggactgtacagaagctgcaccgaatggcagtggccagaagaaacttcccacgtctgtaagatctgcgcgcctgtaaatctgatagtgcaatgtacgcgttgttgtcatttgggccattgtatgttcttccgcgaggcttttcagcgagatctccctgaaagaagacaaacaactgaaaagtgacataatcccacagatttgtttctactttaccgagggttagctagggttatgtgccgagtcatatctaaatggatcaatcatcgtgccgagtcataatcccttgtaaggaggcgcatatatttacatgctccaattgtttttttctaaaaagcgcgccattgttttcagtttttttaaaggaaggttt

SEQ ID NO: 70486 - DNA, 6146 bp, Zea Mays
atggccgcacccggcgccggcgcgggcggccggcgcgcctccacctcgcgcacccgccgcgcgtccacggcggcggcggagtccaatgagaacgaagacaacgccgccgcgccctcctcgtcctcatccgcgttcgccctcccctctgctccgcatttctcgctgcccccgaggtcgccgctctcggccatcgcggatcccgggcggaaccctcggtccgcgccggcgacgcccaagtcgctggccggcacgcccagggcctccgcggcggggtcgggggccaaggaccggacctgttcggttggggcggcgaagagggtgttcgatcagagggatgtcgcggccgcggaggtgcccctggaggtgccgcacttcgagctcgacgaggaccccgcgttctggaaggatcgcaatgtgcaggttctgatacgaataagaccaattagtgacgctgagaatgcgactcatggtcagaaaagatgcttactgcaggatagctcaaagacattgagctggacagggcatccggaaaccatgttcacgtttgaccatgttgcatgcgaaacaatatcacaggaaaagctattcagagttgtgggtctgccaatggtggagaactgcatgtcaggatacaatggctgtctgtttgcctatggtcagacgggaagtgggaaaacttacacaatgatgggagaactttcaaagttgggcaatgagcttagtaaagatgctggattgacacctcgcatttttgaatatctttttcggcggataaatgaggaagaagagcgccggagagaagaaaagcttaaatatatctgcaaatgctcttttctagagatttacaatgaacaaataactgatctacttgaaccctcatcaaccaatcttcagatccgtgaagatataaagaaaggggtatatgttgaaaatctgatggaatgttacgtgtcatctgttaatgatgttatgttgctattgctacaggcagaaaagctcaggtgccgaaggagaacgcttgaaagaagctgcaaacattaatagatcgttgtcaacccttgggcttgttattatgactctggtggatgttgcaaatgggagaagccgtcatgttccttatagagattcaaggcttacatttctacttcaggattccctaggagggaactctaaaacaacaattgtttccaatgttagcccatctatatgttcttccagtgagacattgagtaccttgaagtttgcccaacgtgcaaagttgattcaaaataatgcaaaagtaaatgaagacgcttcaggagatgttattgctttacaaaggcagatagaggaactaaaggatcaactgacatgcttgaagaagcaaaaagattgtcctggatcacctagcttgttgcttaattcatactttgccaatgaattcaaaacttcgtgtggagtagatgaacaactagactgtgatctcaatatcctaaagcaaaaggttagccatctagaagatgtcttggttagaagcctcaggagagagaaatcagcagagaccaagattgggaaactggaagcagaaatacaacacttgaaccgtttggtcaacctgatggagtctgacgcacatcgcttgaggaagagactcgaacttcgtggtgaaaaacaaagattacactcgattggtgaaaatgctgcattgtccatggagattcagttgttgcaagaacaaatcaatgaaaatcctcaattgactcacttcgctttggaaaacaagagattgattgaggaacttacaacgcttcataacttctacaagcaaggggaaagagatatgttattgacagaaatatctcttttgcggaatcatttcctccatattcttgagcagaaatacacaacaactcgtaaagaagtagaacctcagggtgatgagctcatcaaggagcttgacagttgcaggaaggaattggatgcgtgcttagaaaacaatgttctattagctcgtgaagtaaataagctgcgctgtgaacttatacaataccagaaagcctgcacaaatcaagttgctcctgaggaaaaggagaatgttgtggccacaagcaccaatgcaatgcaacatgatcaagccgggaagaatttttcatatttgtcaacagatgatgttaacaggcagttcatgcaagcagagatcacaactaatatttcagaatcatttcaacttgaattaccttatgaaattgacagtgaagatccggactctcctcatttgcatgatcctgaaacacatgactttagggatcctagaacagcatcagagtatgatggtgtattgtctcagtgcttaaacttagctatggcgtcttcacatgatgttcttaacaaaagtactattctaactgatctgaattttctagagaaggatgacacatatcatgtccatgaaaagcctccatttaggggtatacatttgcatgatgagactttatcgtgccaagagattgaaacagtgaactcaagtaaacatctatcacaggatgaattggaaaaccttaaaagaacaaatgaagagctcaaagagaagctgtttattatggctgaagaaagcaataagctttcagagattattgttgcaaaagatgtagaaattgcttctttatctgaagaatgggaggctgcaatttttgatctaacaagcttcttaacagatggatgtagatcactggatgatgcatatcagaacattgataatatgattagctcatttcctcacagtaacagttctgtaagtgaacatgttgagaaggctatgaaaattagcattgagaaagaaaagatgatattcaaacttcaaactgaactacaaactgcacaaaaaattggcagggaagtgaaggaaaagctgcatattttaaaaggtgcaacccttgctataactgaagctcagcagttggataatgaagaaaactctcaggaagaactacagctagtgggactattgcaccaaaaggattgtataatacaagaactaaggaacaatttgaaaccagaaaaatttgtatttgcagaaagagcaaaagggcattctcgtgatgacctactgttgcctggtagttcagttgacatgattgaggatcatgatgaaaatcaaccagcagccagtcaagctagtccagattatcagtcaaagcttgatagtgtgatgcatcttgtcgaggacaaatcaaataaggttctggccttattttcaaattttgaggcagctcatgaaaccatggaagaggctgaactcatgctttcagctttgctgaaggccaatgaaggattgaaacttgagagagataattgcaggcaagcggtggaattgttgttgtctgagaaaagttctctgatcggtgagttgaaggaacttgaagcatcaagctcttgtacatcccagaagtatgacaaattgcatcaacagataaatgagtgtgttacagagatgacaaagctcgctgctacaataaggaagtcgttccagcaaattcaaagtgtttctacagtagaactctttgctctttgctcagagattattacttttggccaagacttgaaaagatatataattgactcaaggtcatatatagcaaacatggtatcacttatagaagaaaaaagcagatctatagagcagttccatcacctaagtacacatgcttgtgggtctgctcgccaacaggtagagtcgaattcatgccagtggggtagcagaaaactttctcaatctgattatagtacagactatgcatcactcagaagagaatttaacaggaagagcaatgttgttgaaggattgtcttttgatcttaaactactgcaagagtctgcctcaaacgcgaaagatatgaaagataaagctgatgaaatatctattgcccttagcaatactcaaagagaactagatatgaaaacttccacaatggaaaccatgttgaaaaaacaaaaggtacttgaggaagaactagctgaaaatggtgccagactcattaatttaagattagagttagagcaatctcaaagtttatcatcagcattattgaaggagaacaaaggtctgagagtgatgttggaagatgaaactatgaagaatagtgaaacaaaagtgctgttggaagaaaaagttaaggtcatagagggactggagagccaaatactatttctaaatcgttgtgaagtggggcagttgatgtcagatattgaagaattaaacaatagcattaaaataatgagtagtgacagagacaatctccaggcagagatatttaagttaagggacaagcttgagatggcattggctttagctgaggaaaatgaagctgctgctattgaagttcgtcaaactgcagagattagtaaaatttatgctgaggaaaaagaagaggaggttaagattcttgaacgatctgtcgaggaacttgaaggaacagtaactgttcttgaggaagaggtatgcaaccttaaagaggaagtaaggaactatcaaatacataaacaatctgaagcccaatttcaagctattaatgacatgcttgctgaagaaaaagcatcaaaatgtgatgctgctgaggaatcgtgtcaagcgaaatgtcatctagaaaagagattgcaagctgagattcttgcacatcaaggtgtcagaaagaagattgaaggtctcaaattggaagcaaagcgtaaagatgatgagattggacaatacaaagagcatattgctgagttggtcctgcattcagaagcacagtccttgttgtttcaggagaaggtatggtacgctacctatatagttcttttttgtgtgtctatttctgctgtctatgtgctaataaatcttgccgtgcagtacaatgaaatggaacacatggtttctagacagaggtttggtccgcatgaatcttattctgagactgtccccaagactgaaaagccttcagggcgagcaagaggatccagctcccctttccggtgcatatctagcattattcaacaaatgaactctgagagagatcaagaaatcttggtggcacgccaacgaattgaagaactagaaggtttggttagttgcaaacagaaagagatatgcttgctaacatcaagactagctgctgtggataccatgacgcatgatattataagagaactacttggtgtcaaactagacatgacaaactatgctaatttggttgaccaagaagagctgcaaaagttgctcatagcatcccagcaacagattgaacaatcaaaggcgaaggatacagagctcgaagcgctgaaggaacaacttggccatcttattctggaaagggacagcttgcttgatgacatggaccaaagaaagacggacctattggaggctcaactgctcgttgaacagctcgagcaacgggagcagatgctagaagcgcagattgaaatgttgcagctggagaaagacagccttcagcaaaagaccttggagatggacgagacaatcgagcttctagccagatcaaaccaaccagatataaatccacgaatgggcgacaaccaccatcgcggcagcagtgagttcagcaggcggctcgctcagtccgacatgctcctctcccacgcgaggcatgagcattctcgcaggcacgcggccggaagctcgaggacgcaccacggccggcaccgatgaagctcgaggatgcttgctagtagaatgctggtgcgtcagccgccagacaccgcttgtgtttgtagcggactagcggcgcggcttctctggccgggactgtacagaagctgcaccgaatggcagtggccagaagaaacttcccacgtctgtaagatctgcgcgcctgtaaatctgatagtgcaatgtacgcgttgttgtcatttgggccattgtatgttcttccgcgaggcttttcagcgagatctccctgaaagaagacaaacaactgaaaagtgacataatcccacagatttgtttctactttaccgagggttagctagggttatgtgccgagtcatatctaaatggatcaatcatcgtgccgagtcataatcccttgtaaggaggcgcatatatttacatgctccaattgtttttttctaaaaagcgcgccattgttttcagtttttttaaaggaaggttt

SEQ ID NO: 70487 - DNA, 6337 bp, Zea Mays
atcagatccagctcatcgccgacgtcgccgtcgcagttcaaaatttgaattggagcggagagaacccaaggggagaccccatcgaccgtttctggtcgcctctgcgtctctggctctcggcccaccccgctcccactcacgctctcgccacctcactcactcactgctccgcccgccacctccatggccgcacccggcgccggcgcgggcggccggcgcgcctccacctcgcgcacccgccgcgcgtccacggcggcggcggagtccaatgagaacgaagacaacgccgccgcgccctcctcgtcctcatccgcgttcgccctcccctctgctccgcatttctcgctgcccccgaggtcgccgctctcggccatcgcggatcccgggcggaaccctcggtccgcgccggcgacgcccaagtcgctggccggcacgcccagggcctccgcggcggggtcgggggccaaggaccggacctgttcggttggggcggcgaagagggtgttcgatcagagggatgtcgcggccgcggaggtgcccctggaggtgccgcacttcgagctcgacgaggaccccgcgttctggaaggatcgcaatgtgcaggttctgatacgaataagaccaattagtgacgctgagaatgcgactcatggtcagaaaagatgcttactgcaggatagctcaaagacattgagctggacagggcatccggaaaccatgttcacgtttgaccatgttgcatgcgaaacaatatcacaggaaaagctattcagagttgtgggtctgccaatggtggagaactgcatgtcaggatacaatggctgtctgtttgcctatggtcagacgggaagtgggaaaacttacacaatgatgggagaactttcaaagttgggcaatgagcttagtaaagatgctggattgacacctcgcatttttgaatatctttttcggcggataaatgaggaagaagagcgccggagagaagaaaagcttaaatatatctgcaaatgctcttttctagagatttacaatgaacaaataactgatctacttgaaccctcatcaaccaatcttcagatccgtgaagatataaagaaaggggtatatgttgaaaatctgatggaatgttacgtgtcatctgttaatgatgttatgttgctattgctacagggagttgcaaataggaaaatggctgccacaaatatgaacagcgagagcagccgctcacatagtgtttttacttgtgtaattgagagtcgttgggaaagtgattcgatgacacacctccggtttgggaggttgaatttggttgatcttgccggttctgagaggcttgttattatgactctggtggatgttgcaaatgggagaagccgtcatgttccttatagagattcaaggcttacatttctacttcaggattccctaggagggaactctaaaacaacaattgtttccaatgttagcccatctatatgttcttccagtgagacattgagtaccttgaagtttgcccaacgtgcaaagttgattcaaaataatgcaaaagtaaatgaagacgcttcaggagatgttattgctttacaaaggcagatagaggaactaaaggatcaactgacatgcttgaagaagcaaaaagattgtcctggatcacctagcttgttgcttaattcatactttgccaatgaattcaaaacttcgtgtggagtagatgaacaactagactgtgatctcaatatcctaaagcaaaaggttagccatctagaagatgtcttggttagaagcctcaggagagagaaatcagcagagaccaagattgggaaactggaagcagaaatacaacacttgaaccgtttggtcaacctgatggagtctgacgcacatcgcttgaggaagagactcgaacttcgtggtgaaaaacaaagattacactcgattggtgaaaatgctgcattgtccatggagattcagttgttgcaagaacaaatcaatgaaaatcctcaattgactcacttcgctttggaaaacaagagattgattgaggaacttacaacgcttcataacttctacaagcaaggggaaagagatatgttattgacagaaatatctcttttgcggaatcatttcctccatattcttgagcagaaatacacaacaactcgtaaagaagtagaacctcagggtgatgagctcatcaaggagcttgacagttgcaggaaggaattggatgcgtgcttagaaaacaatgttctattagctcgtgaagtaaataagctgcgctgtgaacttatacaataccagaaagcctgcacaaatcaagttgctcctgaggaaaaggagaatgttgtggccacaagcaccaatgcaatgcaacatgatcaagccgggaagaatttttcatatttgtcaacagatgatgttaacaggcagttcatgcaagcagagatcacaactaatatttcagaatcatttcaacttgaattaccttatgaaattgacagtgaagatccggactctcctcatttgcatgatcctgaaacacatgactttagggatcctagaacagcatcagagtatgatggtgtattgtctcagtgcttaaacttagctatggcgtcttcacatgatgttcttaacaaaagtactattctaactgatctgaattttctagagaaggatgacacatatcatgtccatgaaaagcctccatttaggggtatacatttgcatgatgagactttatcgtgccaagagattgaaacagtgaactcaagtaaacatctatcacaggatgaattggaaaaccttaaaagaacaaatgaagagctcaaagagaagctgtttattatggctgaagaaagcaataagctttcagagattattgttgcaaaagatgtagaaattgcttctttatctgaagaatgggaggctgcaatttttgatctaacaagcttcttaacagatggatgtagatcactggatgatgcatatcagaacattgataatatgattagctcatttcctcacagtaacagttctgtaagtgaacatgttgagaaggctatgaaaattagcattgagaaagaaaagatgatattcaaacttcaaactgaactacaaactgcacaaaaaattggcagggaagtgaaggaaaagctgcatattttaaaaggtgcaacccttgctataactgaagctcagcagttggataatgaagaaaactctcaggaagaactacagctagtgggactattgcaccaaaaggattgtataatacaagaactaaggaacaatttgaaaccagaaaaatttgtatttgcagaaagagcaaaagggcattctcgtgatgacctactgttgcctggtagttcagttgacatgattgaggatcatgatgaaaatcaaccagcagccagtcaagctagtccagattatcagtcaaagcttgatagtgtgatgcatcttgtcgaggacaaatcaaataaggttctggccttattttcaaattttgaggcagctcatgaaaccatggaagaggctgaactcatgctttcagctttgctgaaggccaatgaaggattgaaacttgagagagataattgcaggcaagcggtggaattgttgttgtctgagaaaagttctctgatcggtgagttgaaggaacttgaagcatcaagctcttgtacatcccagaagtatgacaaattgcatcaacagataaatgagtgtgttacagagatgacaaagctcgctgctacaataaggaagtcgttccagcaaattcaaagtgtttctacagtagaactctttgctctttgctcagagattattacttttggccaagacttgaaaagatatataattgactcaaggtcatatatagcaaacatggtatcacttatagaagaaaaaagcagatctatagagcagttccatcacctaagtacacatgcttgtgggtctgctcgccaacaggtagagtcgaattcatgccagtggggtagcagaaaactttctcaatctgattatagtacagactatgcatcactcagaagagaatttaacaggaagagcaatgttgttgaaggattgtcttttgatcttaaactactgcaagagtctgcctcaaacgcgaaagatatgaaagataaagctgatgaaatatctattgcccttagcaatactcaaagagaactagatatgaaaacttccacaatggaaaccatgttgaaaaaacaaaaggtacttgaggaagaactagctgaaaatggtgccagactcattaatttaagattagagttagagcaatctcaaagtttatcatcagcattattgaaggagaacaaaggtctgagagtgatgttggaagatgaaactatgaagaatagtgaaacaaaagtgctgttggaagaaaaagttaaggtcatagagggactggagagccaaatactatttctaaatcgttgtgaagtggggcagttgatgtcagatattgaagaattaaacaatagcattaaaataatgagtagtgacagagacaatctccaggcagagatatttaagttaagggacaagcttgagatggcattggctttagctgaggaaaatgaagctgctgctattgaagttcgtcaaactgcagagattagtaaaatttatgctgaggaaaaagaagaggaggttaagattcttgaacgatctgtcgaggaacttgaaggaacagtaactgttcttgaggaagaggtatgcaaccttaaagaggaagtaaggaactatcaaatacataaacaatctgaagcccaatttcaagctattaatgacatgcttgctgaagaaaaagcatcaaaatgtgatgctgctgaggaatcgtgtcaagcgaaatgtcatctagaaaagagattgcaagctgagattcttgcacatcaaggtgtcagaaagaagattgaaggtctcaaattggaagcaaagcgtaaagatgatgagattggacaatacaaagagcatattgctgagttggtcctgcattcagaagcacagtccttgttgtttcaggagaagtacaatgaaatggaacacatggtttctagacagaggtttggtccgcatgaatcttattctgagactgtccccaagactgaaaagccttcagggcgagcaagaggatccagctcccctttccggtgcatatctagcattattcaacaaatgaactctgagagagatcaagaaatcttggtggcacgccaacgaattgaagaactagaaggtttggttagttgcaaacagaaagagatatgcttgctaacatcaagactagctgctgtggataccatgacgcatgatattataagagaactacttggtgtcaaactagacatgacaaactatgctaatttggttgaccaagaagagctgcaaaagttgctcatagcatcccagcaacagattgaacaatcaaaggcgaaggatacagagctcgaagcgctgaaggaacaacttggccatcttattctggaaagggacagcttgcttgatgacatggaccaaagaaagacggacctattggaggctcaactgctcgttgaacagctcgagcaacgggagcagatgctagaagcgcagattgaaatgttgcagctggagaaagacagccttcagcaaaagaccttggagatggacgagacaatcgagcttctagccagatcaaaccaaccagatataaatccacgaatgggcgacaaccaccatcgcggcagcagtgagttcagcaggcggctcgctcagtccgacatgctcctctcccacgcgaggcatgagcattctcgcaggcacgcggccggaagctcgaggacgcaccacggccggcaccgatgaagctcgaggatgcttgctagtagaatgctggtgcgtcagccgccagacaccgcttgtgtttgtagcggactagcggcgcggcttctctggccgggactgtacagaagctgcaccgaatggcagtggccagaagaaacttcccacgtctgtaagatctgcgcgcctgtaaatctgatagtgcaatgtacgcgttgttgtcatttgggccattgtatgttcttccgcgaggcttttcagcgagatctccctgaaagaagacaaacaactgaaaagtgacataatcccacagatttgtttctactttaccgagggttagctagggttatgtgccgagtcatatctaaatggatcaatcatcgtgccgagtcataatcccttgtaaggaggcgcatatatttacatgctccaattgtttttttctaaaaagcgcgccattgttttcagtttttttaaaggaaggttt

SEQ ID NO: 70488 - DNA, 6436 bp, Zea Mays
atcagatccagctcatcgccgacgtcgccgtcgcagttcaaaatttgaattggagcggagagaacccaaggggagaccccatcgaccgtttctggtcgcctctgcgtctctggctctcggcccaccccgctcccactcacgctctcgccacctcactcactcactgctccgcccgccacctccatggccgcacccggcgccggcgcgggcggccggcgcgcctccacctcgcgcacccgccgcgcgtccacggcggcggcggagtccaatgagaacgaagacaacgccgccgcgccctcctcgtcctcatccgcgttcgccctcccctctgctccgcatttctcgctgcccccgaggtcgccgctctcggccatcgcggatcccgggcggaaccctcggtccgcgccggcgacgcccaagtcgctggccggcacgcccagggcctccgcggcggggtcgggggccaaggaccggacctgttcggttggggcggcgaagagggtgttcgatcagagggatgtcgcggccgcggaggtgcccctggaggtgccgcacttcgagctcgacgaggaccccgcgttctggaaggatcgcaatgtgcaggttctgatacgaataagaccaattagtgacgctgagaatgcgactcatggtcagaaaagatgcttactgcaggatagctcaaagacattgagctggacagggcatccggaaaccatgttcacgtttgaccatgttgcatgcgaaacaatatcacaggaaaagctattcagagttgtgggtctgccaatggtggagaactgcatgtcaggatacaatggctgtctgtttgcctatggtcagacgggaagtgggaaaacttacacaatgatgggagaactttcaaagttgggcaatgagcttagtaaagatgctggattgacacctcgcatttttgaatatctttttcggcggataaatgaggaagaagagcgccggagagaagaaaagcttaaatatatctgcaaatgctcttttctagagatttacaatgaacaaataactgatctacttgaaccctcatcaaccaatcttcagatccgtgaagatataaagaaaggggtatatgttgaaaatctgatggaatgttacgtgtcatctgttaatgatgttatgttgctattgctacagggagttgcaaataggaaaatggctgccacaaatatgaacagcgagagcagccgctcacatagtgtttttacttgtgtaattgagagtcgttgggaaagtgattcgatgacacacctccggtttgggaggttgaatttggttgatcttgccggttctgagaggcagaaaagctcaggtgccgaaggagaacgcttgaaagaagctgcaaacattaatagatcgttgtcaacccttgggcttgttattatgactctggtggatgttgcaaatgggagaagccgtcatgttccttatagagattcaaggcttacatttctacttcaggattccctaggagggaactctaaaacaacaattgtttccaatgttagcccatctatatgttcttccagtgagacattgagtaccttgaagtttgcccaacgtgcaaagttgattcaaaataatgcaaaagtaaatgaagacgcttcaggagatgttattgctttacaaaggcagatagaggaactaaaggatcaactgacatgcttgaagaagcaaaaagattgtcctggatcacctagcttgttgcttaattcatactttgccaatgaattcaaaacttcgtgtggagtagatgaacaactagactgtgatctcaatatcctaaagcaaaaggttagccatctagaagatgtcttggttagaagcctcaggagagagaaatcagcagagaccaagattgggaaactggaagcagaaatacaacacttgaaccgtttggtcaacctgatggagtctgacgcacatcgcttgaggaagagactcgaacttcgtggtgaaaaacaaagattacactcgattggtgaaaatgctgcattgtccatggagattcagttgttgcaagaacaaatcaatgaaaatcctcaattgactcacttcgctttggaaaacaagagattgattgaggaacttacaacgcttcataacttctacaagcaaggggaaagagatatgttattgacagaaatatctcttttgcggaatcatttcctccatattcttgagcagaaatacacaacaactcgtaaagaagtagaacctcagggtgatgagctcatcaaggagcttgacagttgcaggaaggaattggatgcgtgcttagaaaacaatgttctattagctcgtgaagtaaataagctgcgctgtgaacttatacaataccagaaagcctgcacaaatcaagttgctcctgaggaaaaggagaatgttgtggccacaagcaccaatgcaatgcaacatgttggatttttactctttcattgtgatcaagccgggaagaatttttcatatttgtcaacagatgatgttaacaggcagttcatgcaagcagagatcacaactaatatttcagaatcatttcaacttgaattaccttatgaaattgacagtgaagatccggactctcctcatttgcatgatcctgaaacacatgactttagggatcctagaacagcatcagagtatgatggtgtattgtctcagtgcttaaacttagctatggcgtcttcacatgatgttcttaacaaaagtactattctaactgatctgaattttctagagaaggatgacacatatcatgtccatgaaaagcctccatttaggggtatacatttgcatgatgagactttatcgtgccaagagattgaaacagtgaactcaagtaaacatctatcacaggatgaattggaaaaccttaaaagaacaaatgaagagctcaaagagaagctgtttattatggctgaagaaagcaataagctttcagagattattgttgcaaaagatgtagaaattgcttctttatctgaagaatgggaggctgcaatttttgatctaacaagcttcttaacagatggatgtagatcactggatgatgcatatcagaacattgataatatgattagctcatttcctcacagtaacagttctgtaagtgaacatgttgagaaggctatgaaaattagcattgagaaagaaaagatgatattcaaacttcaaactgaactacaaactgcacaaaaaattggcagggaagtgaaggaaaagctgcatattttaaaaggtgcaacccttgctataactgaagctcagcagttggataatgaagaaaactctcaggaagaactacagctagtgggactattgcaccaaaaggattgtataatacaagaactaaggaacaatttgaaaccagaaaaatttgtatttgcagaaagagcaaaagggcattctcgtgatgacctactgttgcctggtagttcagttgacatgattgaggatcatgatgaaaatcaaccagcagccagtcaagctagtccagattatcagtcaaagcttgatagtgtgatgcatcttgtcgaggacaaatcaaataaggttctggccttattttcaaattttgaggcagctcatgaaaccatggaagaggctgaactcatgctttcagctttgctgaaggccaatgaaggattgaaacttgagagagataattgcaggcaagcggtggaattgttgttgtctgagaaaagttctctgatcggtgagttgaaggaacttgaagcatcaagctcttgtacatcccagaagtatgacaaattgcatcaacagataaatgagtgtgttacagagatgacaaagctcgctgctacaataaggaagtcgttccagcaaattcaaagtgtttctacagtagaactctttgctctttgctcagagattattacttttggccaagacttgaaaagatatataattgactcaaggtcatatatagcaaacatggtatcacttatagaagaaaaaagcagatctatagagcagttccatcacctaagtacacatgcttgtgggtctgctcgccaacaggtagagtcgaattcatgccagtggggtagcagaaaactttctcaatctgattatagtacagactatgcatcactcagaagagaatttaacaggaagagcaatgttgttgaaggattgtcttttgatcttaaactactgcaagagtctgcctcaaacgcgaaagatatgaaagataaagctgatgaaatatctattgcccttagcaatactcaaagagaactagatatgaaaacttccacaatggaaaccatgttgaaaaaacaaaaggtacttgaggaagaactagctgaaaatggtgccagactcattaatttaagattagagttagagcaatctcaaagtttatcatcagcattattgaaggagaacaaaggtctgagagtgatgttggaagatgaaactatgaagaatagtgaaacaaaagtgctgttggaagaaaaagttaaggtcatagagggactggagagccaaatactatttctaaatcgttgtgaagtggggcagttgatgtcagatattgaagaattaaacaatagcattaaaataatgagtagtgacagagacaatctccaggcagagatatttaagttaagggacaagcttgagatggcattggctttagctgaggaaaatgaagctgctgctattgaagttcgtcaaactgcagagattagtaaaatttatgctgaggaaaaagaagaggaggttaagattcttgaacgatctgtcgaggaacttgaaggaacagtaactgttcttgaggaagaggtatgcaaccttaaagaggaagtaaggaactatcaaatacataaacaatctgaagcccaatttcaagctattaatgacatgcttgctgaagaaaaagcatcaaaatgtgatgctgctgaggaatcgtgtcaagcgaaatgtcatctagaaaagagattgcaagctgagattcttgcacatcaaggtgtcagaaagaagattgaaggtctcaaattggaagcaaagcgtaaagatgatgagattggacaatacaaagagcatattgctgagttggtcctgcattcagaagcacagtccttgttgtttcaggagaagtacaatgaaatggaacacatggtttctagacagaggtttggtccgcatgaatcttattctgagactgtccccaagactgaaaagccttcagggcgagcaagaggatccagctcccctttccggtgcatatctagcattattcaacaaatgaactctgagagagatcaagaaatcttggtggcacgccaacgaattgaagaactagaaggtttggttagttgcaaacagaaagagatatgcttgctaacatcaagactagctgctgtggataccatgacgcatgatattataagagaactacttggtgtcaaactagacatgacaaactatgctaatttggttgaccaagaagagctgcaaaagttgctcatagcatcccagcaacagattgaacaatcaaaggcgaaggatacagagctcgaagcgctgaaggaacaacttggccatcttattctggaaagggacagcttgcttgatgacatggaccaaagaaagacggacctattggaggctcaactgctcgttgaacagctcgagcaacgggagcagatgctagaagcgcagattgaaatgttgcagctggagaaagacagccttcagcaaaagaccttggagatggacgagacaatcgagcttctagccagatcaaaccaaccagatataaatccacgaatgggcgacaaccaccatcgcggcagcagtgagttcagcaggcggctcgctcagtccgacatgctcctctcccacgcgaggcatgagcattctcgcaggcacgcggccggaagctcgaggacgcaccacggccggcaccgatgaagctcgaggatgcttgctagtagaatgctggtgcgtcagccgccagacaccgcttgtgtttgtagcggactagcggcgcggcttctctggccgggactgtacagaagctgcaccgaatggcagtggccagaagaaacttcccacgtctgtaagatctgcgcgcctgtaaatctgatagtgcaatgtacgcgttgttgtcatttgggccattgtatgttcttccgcgaggcttttcagcgagatctccctgaaagaagacaaacaactgaaaagtgacataatcccacagatttgtttctactttaccgagggttagctagggttatgtgccgagtcatatctaaatggatcaatcatcgtgccgagtcataatcccttgtaaggaggcgcatatatttacatgctccaattgtttttttctaaaaagcgcgccattgttttcagtttttttaaaggaaggttt

SEQ ID NO: 70489 - DNA, 6444 bp, Zea Mays
aacaatggcacgcggccgagacgaaagcctccatcagatccagctcatcgccgacgtcgccgtcgcagttcaaaatttgaattggagcggagagaacccaaggggagaccccatcgaccgtttctggtcgcctctgcgtctctggctctcggcccaccccgctcccactcacgctctcgccacctcactcactcactgctccgcccgccacctccatggccgcacccggcgccggcgcgggcggccggcgcgcctccacctcgcgcacccgccgcgcgtccacggcggcggcggagtccaatgagaacgaagacaacgccgccgcgccctcctcgtcctcatccgcgttcgccctcccctctgctccgcatttctcgctgcccccgaggtcgccgctctcggccatcgcggatcccgggcggaaccctcggtccgcgccggcgacgcccaagtcgctggccggcacgcccagggcctccgcggcggggtcgggggccaaggaccggacctgttcggttggggcggcgaagagggtgttcgatcagagggatgtcgcggccgcggaggtgcccctggaggtgccgcacttcgagctcgacgaggaccccgcgttctggaaggatcgcaatgtgcaggttctgatacgaataagaccaattagtgacgctgagaatgcgactcatggtcagaaaagatgcttactgcaggatagctcaaagacattgagctggacagggcatccggaaaccatgttcacgtttgaccatgttgcatgcgaaacaatatcacaggaaaagctattcagagttgtgggtctgccaatggtggagaactgcatgtcaggatacaatggctgtctgtttgcctatggtcagacgggaagtgggaaaacttacacaatgatgggagaactttcaaagttgggcaatgagcttagtaaagatgctggattgacacctcgcatttttgaatatctttttcggcggataaatgaggaagaagagcgccggagagaagaaaagcttaaatatatctgcaaatgctcttttctagagatttacaatgaacaaataactgatctacttgaaccctcatcaaccaatcttcagatccgtgaagatataaagaaaggggtatatgttgaaaatctgatggaatgttacgtgtcatctgttaatgatgttatgttgctattgctacagggagttgcaaataggaaaatggctgccacaaatatgaacagcgagagcagccgctcacatagtgtttttacttgtgtaattgagagtcgttgggaaagtgattcgatgacacacctccggtttgggaggttgaatttggttgatcttgccggttctgagaggcagaaaagctcaggtgccgaaggagaacgcttgaaagaagctgcaaacattaatagatcgttgtcaacccttgggcttgttattatgactctggtggatgttgcaaatgggagaagccgtcatgttccttatagagattcaaggcttacatttctacttcaggattccctaggagggaactctaaaacaacaattgtttccaatgttagcccatctatatgttcttccagtgagacattgagtaccttgaagtttgcccaacgtgcaaagttgattcaaaataatgcaaaagtaaatgaagacgcttcaggagatgttattgctttacaaaggcagatagaggaactaaaggatcaactgacatgcttgaagaagcaaaaagattgtcctggatcacctagcttgttgcttaattcatactttgccaatgaattcaaaacttcgtgtggagtagatgaacaactagactgtgatctcaatatcctaaagcaaaaggttagccatctagaagatgtcttggttagaagcctcaggagagagaaatcagcagagaccaagattgggaaactggaagcagaaatacaacacttgaaccgtttggtcaacctgatggagtctgacgcacatcgcttgaggaagagactcgaacttcgtggtgaaaaacaaagattacactcgattggtgaaaatgctgcattgtccatggagattcagttgttgcaagaacaaatcaatgaaaatcctcaattgactcacttcgctttggaaaacaagagattgattgaggaacttacaacgcttcataacttctacaagcaaggggaaagagatatgttattgacagaaatatctcttttgcggaatcatttcctccatattcttgagcagaaatacacaacaactcgtaaagaagtagaacctcagggtgatgagctcatcaaggagcttgacagttgcaggaaggaattggatgcgtgcttagaaaacaatgttctattagctcgtgaagtaaataagctgcgctgtgaacttatacaataccagaaagcctgcacaaatcaagttgctcctgaggaaaaggagaatgttgtggccacaagcaccaatgcaatgcaacatgatcaagccgggaagaatttttcatatttgtcaacagatgatgttaacaggcagttcatgcaagcagagatcacaactaatatttcagaatcatttcaacttgaattaccttatgaaattgacagtgaagatccggactctcctcatttgcatgatcctgaaacacatgactttagggatcctagaacagcatcagagtatgatggtgtattgtctcagtgcttaaacttagctatggcgtcttcacatgatgttcttaacaaaagtactattctaactgatctgaattttctagagaaggatgacacatatcatgtccatgaaaagcctccatttaggggtatacatttgcatgatgagactttatcgtgccaagagattgaaacagtgaactcaagtaaacatctatcacaggatgaattggaaaaccttaaaagaacaaatgaagagctcaaagagaagctgtttattatggctgaagaaagcaataagctttcagagattattgttgcaaaagatgtagaaattgcttctttatctgaagaatgggaggctgcaatttttgatctaacaagcttcttaacagatggatgtagatcactggatgatgcatatcagaacattgataatatgattagctcatttcctcacagtaacagttctgtaagtgaacatgttgagaaggctatgaaaattagcattgagaaagaaaagatgatattcaaacttcaaactgaactacaaactgcacaaaaaattggcagggaagtgaaggaaaagctgcatattttaaaaggtgcaacccttgctataactgaagctcagcagttggataatgaagaaaactctcaggaagaactacagctagtgggactattgcaccaaaaggattgtataatacaagaactaaggaacaatttgaaaccagaaaaatttgtatttgcagaaagagcaaaagggcattctcgtgatgacctactgttgcctggtagttcagttgacatgattgaggatcatgatgaaaatcaaccagcagccagtcaagctagtccagattatcagtcaaagcttgatagtgtgatgcatcttgtcgaggacaaatcaaataaggttctggccttattttcaaattttgaggcagctcatgaaaccatggaagaggctgaactcatgctttcagctttgctgaaggccaatgaaggattgaaacttgagagagataattgcaggcaagcggtggaattgttgttgtctgagaaaagttctctgatcggtgagttgaaggaacttgaagcatcaagctcttgtacatcccagaagtatgacaaattgcatcaacagataaatgagtgtgttacagagatgacaaagctcgctgctacaataaggaagtcgttccagcaaattcaaagtgtttctacagtagaactctttgctctttgctcagagattattacttttggccaagacttgaaaagatatataattgactcaaggtcatatatagcaaacatggtatcacttatagaagaaaaaagcagatctatagagcagttccatcacctaagtacacatgcttgtgggtctgctcgccaacaggtagagtcgaattcatgccagtggggtagcagaaaactttctcaatctgattatagtacagactatgcatcactcagaagagaatttaacaggaagagcaatgttgttgaaggattgtcttttgatcttaaactactgcaagagtctgcctcaaacgcgaaagatatgaaagataaagctgatgaaatatctattgcccttagcaatactcaaagagaactagatatgaaaacttccacaatggaaaccatgttgaaaaaacaaaaggtacttgaggaagaactagctgaaaatggtgccagactcattaatttaagattagagttagagcaatctcaaagtttatcatcagcattattgaaggagaacaaaggtctgagagtgatgttggaagatgaaactatgaagaatagtgaaacaaaagtgctgttggaagaaaaagttaaggtcatagagggactggagagccaaatactatttctaaatcgttgtgaagtggggcagttgatgtcagatattgaagaattaaacaatagcattaaaataatgagtagtgacagagacaatctccaggcagagatatttaagttaagggacaagcttgagatggcattggctttagctgaggaaaatgaagctgctgctattgaagttcgtcaaactgcagagattagtaaaatttatgctgaggaaaaagaagaggaggttaagattcttgaacgatctgtcgaggaacttgaaggaacagtaactgttcttgaggaagaggtatgcaaccttaaagaggaagtaaggaactatcaaatacataaacaatctgaagcccaatttcaagctattaatgacatgcttgctgaagaaaaagcatcaaaatgtgatgctgctgaggaatcgtgtcaagcgaaatgtcatctagaaaagagattgcaagctgagattcttgcacatcaaggtgtcagaaagaagattgaaggtctcaaattggaagcaaagcgtaaagatgatgagattggacaatacaaagagcatattgctgagttggtcctgcattcagaagcacagtccttgttgtttcaggagaagtacaatgaaatggaacacatggtttctagacagaggtttggtccgcatgaatcttattctgagactgtccccaagactgaaaagccttcagggcgagcaagaggatccagctcccctttccggtgcatatctagcattattcaacaaatgaactctgagagagatcaagaaatcttggtggcacgccaacgaattgaagaactagaaggtttggttagttgcaaacagaaagagatatgcttgctaacatcaagactagctgctgtggataccatgacgcatgatattataagagaactacttggtgtcaaactagacatgacaaactatgctaatttggttgaccaagaagagctgcaaaagttgctcatagcatcccagcaacagattgaacaatcaaaggcgaaggatacagagctcgaagcgctgaaggaacaacttggccatcttattctggaaagggacagcttgcttgatgacatggaccaaagaaagacggacctattggaggctcaactgctcgttgaacagctcgagcaacgggagcagatgctagaagcgcagattgaaatgttgcagctggagaaagacagccttcagcaaaagaccttggagatggacgagacaatcgagcttctagccagatcaaaccaaccagatataaatccacgaatgggcgacaaccaccatcgcggcagcagtgagttcagcaggcggctcgctcagtccgacatgctcctctcccacgcgaggcatgagcattctcgcaggcacgcggccggaagctcgaggacgcaccacggccggcaccgatgaagctcgaggatgcttgctagtagaatgctggtgcgtcagccgccagacaccgcttgtgtttgtagcggactagcggcgcggcttctctggccgggactgtacagaagctgcaccgaatggcagtggccagaagaaacttcccacgtctgtaagatctgcgcgcctgtaaatctgatagtgcaatgtacgcgttgttgtcatttgggccattgtatgttcttccgcgaggcttttcagcgagatctccctgaaagaagacaaacaactgaaaagtgacataatcccacagatttgtttctactttaccgagggttagctagggttatgtgccgagtcatatctaaatggatcaatcatcgtgccgagtcataatcccttgtaaggaggcgcatatatttacatgctccaattgtttttttctaaaaagcgcgccattgttttcagtttttttaaaggaaggttt

SEQ ID NO: 70490 - DNA, 7233 bp, Zea Mays
aagccctcttcgctttctattcatcagaccatatcgaatcaagtcagattcagggaggggaaggcaaaaccctaacctctctcactccgccgccaccgggggagcgcgaggaggacccttcatcgacccgccgcacgaacaaagctcccatggccaacctcggcggtggcgccgaggcgcacgcgcgattcaagcagtacgagtatcgcgccaactccagcctcgtcctcaccacagactcccgcccgcgcgacacccacgagcccaccggagagcccgagacgctctggggcaggatcgaccccaggtccttcggcgaccgcgccgtccagaacaggccgcccgagctcgaggagaagctctccaagtcgcgcaccaaaaagtctaagcgcgacgctgctgccgcgctcgactccgccgacctcccccgtcgcgacgccaagcgcaggcgccgcgctgcttccgcccaggaggtctccgtcctctccctcaccgacgacgccgtgtacaagccccagaccaaggagacgcgtgccgcctatgaggccttgctcagcctcatccaacagcagcttggcggccagcccctcgatgtccttgctggggcagctgatgaggtgctcgctacactcaagaatgacaaggtcaagaaccctgataagaagaaggacattgagcagctgctcaaccctatctccagccagctctttgatcagcttgtctccattggcaagctcatcaccgacttccatgatgcggcagctggtgatgcttccggtgcgccttccgccgacgctgtggacaccactctggatgatgatgttggtgttgctgttgagtttgaagaagacgaagacgaggagagtgattttgatcaggtgcaagacgagctggatgaggatgaggaagatgacatggctgagttgaatggtcctggaggtatgcagatgggtggtgagttagacgacgatgacatgcagaacgccaatcaggggctgaccgtcaatgttcaggacatcgatgcttactggctccagaggaagatatcccaggcatacggggatggggacattgatgctcaacagagccagaagcttgctgaggatatcttgaagatcattgccgagggtgacgacagagacgtcgagaatcgccttgtcatgctcttggactatgagaagtttgatctcattaagttgttgctgcgcaaccgtctcaagattgtttggtgcacccgcttagccagggccgaagatcaggaacagaggaagaatatagaggaagagatggcaagtgacccaagtttggctccgatattggagcagctacatgcaaccagagcatccgcaaaggagaggcagaagaacctggagaaaagcatcagggatgaggccaagaggctcctcaacaatgatgctgctgctgctggtgctgatggtgccagggaccacagggcagccgagtgggacatggagagtggatggctgaaaggacagaggcagttgcttgatcttgaaagcctctcgttccatcagggtggtctctttatggctaacaagaaatgtgaacttccgactggatcgtttagaacccctcataagggatatgaggaggttcatgtgccagcactgaaggctaagccctatgaaacaggagagaagattgtgaagatatctgatatgccagagtgggcacggtcagcttttgatgggatgacacagctgaacagagttcagagcagggtctatgatactgctcttttcaaaccagacaatatccttctctgtgctccgactggtgctggcaaaacaaatgtggctgtgcttaccatccttcagcagattggtctgcatatgcaggatggagagtttgataataccaagtacaaaattgtctatgtggccccgatgaaagcattggttgctgaagtcgttggaaacctgtctaagcgtttggcaggttacaatgttactgttagggagctcagtggagaccagaacttgaccaagcaacagattgatgaaacacagattattgtcacaacacctgagaaatgggacattgtgaccaggaaatcaggggacagaacctatacccaaatggtgaagctgttaatcattgatgagattcatctgctacacgataacagagggcctgttctggagagcattgttgctaggacagtcaggcagattgagacgacaaaggagaatattcgtctggttgggctctctgcgactctaccaaactatgaagatgttgcattattcttgcgcgttcgcaaagaaagcctcttctattttgacaacagttaccgaccttgccctcttgcccagcaatacattgggatcactgttaggaagccactacagaggatgcagttgatgaatgagatttgttatgagaaggttatggctgccgctggtaagcatcaagtgcttatatttgtacactcaaggaaggagacggcaaagactgccaaagccatcagagatacggcgttggcaaatgacactgtcagccgctttctgaagaatgagagtgcaagccaagagatccttggcactcatgctgaacttgtcaaaaacaatgatcttaaagaccttttgccttatggatttgctattcatcatgctgggatggcaagggttgaccgtgagcttgttgaagaactttttgctgacaagcatattcaagtacttgtatccactgctacccttgcatggggtgtcaatttgcctgcacatactgttatcataaagggtacacagatttacaatccagaaaaaggtgcttggacagaactaagccctctggatgttatgcagatgcttggtcgtgcaggaaggcctcagtatgatacgcatggagaggggataatcttgactggccacagtgaattgcagttctacctgtctcttatgaaccagcagctgcctattgagagtcagttcatatccaaattggctgatcaattgaatgcagagattgttctggggactattcagaatgctcgtgaagcatgctcgtggcttggctatacttacctctatattcggatgctccgcaatccaacattgtatggtttgccagcagatatcttggagagtgataaaacacttgatgaaaggagagctgatttggtttccattaagggcgggcctggtgcagcggtagagcctaccgtctgtaaccggaagatacattccgctgcaaatctactggataggaacaatctgataaagtatgacaggaaaacaggatacttccaagttactgacctgggaaggattgccagttattattatatcagtcatggaactatttcaacatacaatgagtacttaaaacctacaatgggtgatatcgaactgtgccgactgttttctctgagtgaagaatttaagtatgtaggtgtcaggcttgatgagaaaatggaactggcaaagcttttggatcgtgtgccaatacctgtgaaagagagcttggaggaacccagtgcaaagatcaatgttctgctgcaagcatatatttctaggttgaaactggaaggcctttctcttagttctgatatggtctacatcagacagagtgctggacgtctcttacgggcactattcgagattgttttgaagaggggatgggctcaactagcggagaaagcactgaatctttgcaagatggttgataaacaaatgtggagtgtccaaactcccttgaggcagtttactggaattcctaaggagatcttgatgaaacttgagaagaaggagttggcttgggagaggtactatgatctgtcctcacaagaaattggtgagctgatccgctatcccaagatggggaggccgctgcacaagtgcatccaccagttaccaaagctgaatctttcagcccatgtccagcccattactcgtacagttttgggttttgagctgacaattacacctgatttccagtgggatgataaggtacatggatatgtggagcccttttgggttattgttgaggataatgatggcgagtacattcttcaccatgaatatttcatgcttaagaaacagtatgttgacgaagatcatacattgaacttcacagtgccgatatatgagccgctgcctcctcagtatttcatacgtgttgtgtctgacaagtggcttggttctcagacaattctccctgtctgctttaggcatttaattctaccagaaaaatatgctccaccaactgaattgcttgatctgcagcctcttcctgttagtgcattgagaaatgcaagatatgagggcctctatagtgcttttaagcatttcaatcccatccagactcaagtattcactgtcttgtataacagcgatgacagcgtgttggtcgctgcgccaacaggcagtgggaagacgatatgtgcagagtttgctatactaaggaaccaccagaaggcattgtctggcgagagcaacatgcgggttgtttatatagctcccattgaagctctcgcaaaagaaagatacagggactgggagcggaaatttggagagtttgccaaggtagttgagctcactggtgaaacggcagctgatttgaagcttctggataaaggtgaaatcataatcagtactcctgaaaagtgggatgcattgtctcgccggtggaaacagcgaaagcacatccaacaggtcagcttattcatagttgatgaacttcatctacttggatctgataagggacatgttttggaagtcattgtatctaggatgaggcgtatttccagtcatattggcagtaacatacggatcgtagcactttcagcatcacttgctaatgctaaagatcttggtgaatggattggtgccacctctcatggccttttcaacttccctccagcagtgagacctgtgccactggaaattcacatccagggtgtggatatagcgaactttgaggcaaggatgcaagcaatgacaaagcctacctacactgccatcacacagcatgcaaagaacaataaacctgccctggtgtatgtaccgacaaggaagcatgcaaggttgactgcattggacttgtgtgcgtactctagtgttgagggtgctggaactccatttcttcttgggtcaggagatgagatggatactttcaccagaggtgttgaagaagagactcttaagaatacacttaaatgtggtgttggctatttgcatgagggtctaagtgagcttgatcaggaacttgtaacccagctgttccttggtgggaggatccaagtgtgtgttgcaagcagcacaatgtgttggggaagaccattgcctgctcatttggtcgttgtcatggggactcagtattatgatgggcgggagaatgctcacaccgactatccaattacagatctgcttcaaatgatgggtcatgccagtagaccacttcaagataactcagggaaatgtgttatattgtgtcatgcacctcgcaaagagtactacaagaagtttctttttgaggccttccctgtcgaaagcaatcttcaccatttcttgcatgatcacatgaatgctgaggtggtggttggtgttgtagagaataagcaagatgctgtggattatcttacttggacgttcatgtatcggcggctagctaagaatcctaacttctacaatcttcagggtgtaagtcacaggcatctttcagaccatctttctgagctagttgagactattctgaatgatcttgaatcgagcaagtgtgtggctatagaggaggacatgtacctgaagcccctcaaccttggccttattgcttcatactactatattagctacacaactattgagcgttttagttctatgctgacccagaagactaaggtgaaaggactcctagagattctagcatctgcctcagaatatgcagagcttccgggtcgtcctggtgaggaagaattcattgagaggcttgttcgtcaccagaggttctctatcgagaaacccaagtatggggatccacatgtgaaggccaatgctctgctgcaagcccatttttcaaggcacacagtggtcggaaatctggcagctgatcagcgcgagattctcctttctgctcataggttgctccaggcaatggttgatgttatatccagcaatggttggcttagtcttgctcttagtacaatggagctgagtcaaatggtgacacaaggcatgtgggatcgggattctgtgctgcttcaagttccacacttcacaaaagacttggctcggaggtgccaggaaaatgaagggaagcccatcgagagtatctttgatctagctgagatggctgtcgatgagatgcgggatctcttacaactatcgaactctcagctgcaagacatcattgaattcatcaagcggttccccaatgttgatatgacctatgaggtccgtgagggtgatgatataagcgctggtgacaatgtaaccgtgcaggtaactctggagcgtgacatgactaacgtttcatctgaggttggtccagtccatgcgccaaggtttcccaagcctaaggaagaaggctggtggctggtgattggggacagctccacaaaccagttactggcaatcaaaagagtggcactccagaagagggcgagagtgaaacttgagttctctgctccggcagaggctgggagaaaggactacatgatttacttgatgtcagactcttacttgggctgcgatcaggagtatgaattcaccgttgatgtcaaggatgctggaggggattgatgatgaagactgtgacactatgtcgcatagaagtagaattgagtgtgtactgtaacgcgatattggaacattctgtgttgtaacctcgaacatgtggaagctgtaacttattttgcatgttgaccggtgcactttgggcgttgctgtgttatcctattctagtattgttgtaaggattgcgctcggttacacttgagccacagtattttggatcaacttgttgcttctataagcttgctgatgctataatgtttgatcgacctgttgatgcactaatggtgtgttgatgttttaacctgttctattggcaggacaggcagtaggctagttcgaaaactcaaacctcatgggggattaaggccccgttcggttccctctcagtccattgtggtttgctcactatatttactcttataattacatttatctacttgtataatatttgctcaactagctttgtatagattataac

SEQ ID NO: 70491 - DNA, 7250 bp, Zea Mays
cgtcggttcgtcggtctccaaccgacctcgtctcgtctcgtcaagcatcatctgctttctgcgactctgccgcgaagccctcttcgctttctattcatcagaccatatcgaatcaagtcagattcagggaggggaaggcaaaaccctaacctctctcactccgccgccaccgggggagcgcgaggaggacccttcatcgacccgccgcacgaacaaagctcccatggccaacctcggcggtggcgccgaggcgcacgcgcgattcaagcagtacgagtatcgcgccaactccagcctcgtcctcaccacagactcccgcccgcgcgacacccacgagcccaccggagagcccgagacgctctggggcaggatcgaccccaggtccttcggcgaccgcgccgtccagaacaggccgcccgagctcgaggagaagctctccaagtcgcgcaccaaaaagtctaagcgcgacgctgctgccgcgctcgactccgccgacctcccccgtcgcgacgccaagcgcaggcgccgcgctgcttccgcccaggaggtctccgtcctctccctcaccgacgacgccgtgtacaagccccagaccaaggagacgcgtgccgcctatgaggccttgctcagcctcatccaacagcagcttggcggccagcccctcgatgtccttgctggggcagctgatgaggtgctcgctacactcaagaatgacaaggtcaagaaccctgataagaagaaggacattgagcagctgctcaaccctatctccagccagctctttgatcagcttgtctccattggcaagctcatcaccgacttccatgatgcggcagctggtgatgcttccggtgcgccttccgccgacgctgtggacaccactctggatgatgatgttggtgttgctgttgagtttgaagaagacgaagacgaggagagtgattttgatcaggtgcaagacgagctggatgaggatgaggaagatgacatggctgagttgaatggtcctggaggtatgcagatgggtggtgagttagacgacgatgacatgcagaacgccaatcaggggctgaccgtcaatgttcaggacatcgatgcttactggctccagaggaagatatcccaggcatacggggatggggacattgatgctcaacagagccagaagcttgctgaggatatcttgaagatcattgccgagggtgacgacagagacgtcgagaatcgccttgtcatgctcttggactatgagaagtttgatctcattaagttgttgctgcgcaaccgtctcaagattgtttggtgcacccgcttagccagggccgaagatcaggaacagaggaagaatatagaggaagagatggcaagtgacccaagtttggctccgatattggagcagctacatgcaaccagagcatccgcaaaggagaggcagaagaacctggagaaaagcatcagggatgaggccaagaggctcctcaacaatgatgctgctgctgctggtgctgatggtgccagggaccacagggcagccgagtgggacatggagagtggatggctgaaaggacagaggcagttgcttgatcttgaaagcctctcgttccatcagggtggtctctttatggctaacaagaaatgtgaacttccgactggatcgtttagaacccctcataagggatatgaggaggttcatgtgccagcactgaaggctaagccctatgaaacaggagagaagattgtgaagatatctgatatgccagagtgggcacggtcagcttttgatgggatgacacagctgaacagagttcagagcagggtctatgatactgctcttttcaaaccagacaatatccttctctgtgctccgactggtgctggcaaaacaaatgtggctgtgcttaccatccttcagcagattggtctgcatatgcaggatggagagtttgataataccaagtacaaaattgtctatgtggccccgatgaaagcattggttgctgaagtcgttggaaacctgtctaagcgtttggcaggttacaatgttactgttagggagctcagtggagaccagaacttgaccaagcaacagattgatgaaacacagattattgtcacaacacctgagaaatgggacattgtgaccaggaaatcaggggacagaacctatacccaaatggtgaagctgttaatcattgatgagattcatctgctacacgataacagagggcctgttctggagagcattgttgctaggacagtcaggcagattgagacgacaaaggagaatattcgtctggttgggctctctgcgactctaccaaactatgaagatgttgcattattcttgcgcgttcgcaaagaaagcctcttctattttgacaacagttaccgaccttgccctcttgcccagcaatacattgggatcactgttaggaagccactacagaggatgcagttgatgaatgagatttgttatgagaaggttatggctgccgctggtaagcatcaagtgcttatatttgtacactcaaggaaggagacggcaaagactgccaaagccatcagagatacggcgttggcaaatgacactgtcagccgctttctgaagaatgagagtgcaagccaagagatccttggcactcatgctgaacttgtcaaaaacaatgatcttaaagaccttttgccttatggatttgctattcatcatgctgggatggcaagggttgaccgtgagcttgttgaagaactttttgctgacaagcatattcaagtacttgtatccactgctacccttgcatggggtgtcaatttgcctgcacatactgttatcataaagggtacacagatttacaatccagaaaaaggtgcttggacagaactaagccctctggatgttatgcagatgcttggtcgtgcaggaaggcctcagtatgatacgcatggagaggggataatcttgactggccacagtgaattgcagttctacctgtctcttatgaaccagcagctgcctattgagagtcagttcatatccaaattggctgatcaattgaatgcagagattgttctggggactattcagaatgctcgtgaagcatgctcgtggcttggctatacttacctctatattcggatgctccgcaatccaacattgtatggtttgccagcagatatcttggagagtgataaaacacttgatgaaaggagagctgatttgatacattccgctgcaaatctactggataggaacaatctgataaagtatgacaggaaaacaggatacttccaagttactgacctgggaaggattgccagttattattatatcagtcatggaactatttcaacatacaatgagtacttaaaacctacaatgggtgatatcgaactgtgccgactgttttctctgagtgaagaatttaagtatgtaggtgtcaggcttgatgagaaaatggaactggcaaagcttttggatcgtgtgccaatacctgtgaaagagagcttggaggaacccagtgcaaagatcaatgttctgctgcaagcatatatttctaggttgaaactggaaggcctttctcttagttctgatatggtctacatcagacagagtgctggacgtctcttacgggcactattcgagattgttttgaagaggggatgggctcaactagcggagaaagcactgaatctttgcaagatggttgataaacaaatgtggagtgtccaaactcccttgaggcagtttactggaattcctaaggagatcttgatgaaacttgagaagaaggagttggcttgggagaggtactatgatctgtcctcacaagaaattggtgagctgatccgctatcccaagatggggaggccgctgcacaagtgcatccaccagttaccaaagctgaatctttcagcccatgtccagcccattactcgtacagttttgggttttgagctgacaattacacctgatttccagtgggatgataaggtacatggatatgtggagcccttttgggttattgttgaggataatgatggcgagtacattcttcaccatgaatatttcatgcttaagaaacagtatgttgacgaagatcatacattgaacttcacagtgccgatatatgagccgctgcctcctcagtatttcatacgtgttgtgtctgacaagtggcttggttctcagacaattctccctgtctgctttaggcatttaattctaccagaaaaatatgctccaccaactgaattgcttgatctgcagcctcttcctgttagtgcattgagaaatgcaagatatgagggcctctatagtgcttttaagcatttcaatcccatccagactcaagtattcactgtcttgtataacagcgatgacagcgtgttggtcgctgcgccaacaggcagtgggaagacgatatgtgcagagtttgctatactaaggaaccaccagaaggcattgtctggcgagagcaacatgcgggttgtttatatagctcccattgaagctctcgcaaaagaaagatacagggactgggagcggaaatttggagagtttgccaaggtagttgagctcactggtgaaacggcagctgatttgaagcttctggataaaggtgaaatcataatcagtactcctgaaaagtgggatgcattgtctcgccggtggaaacagcgaaagcacatccaacaggtcagcttattcatagttgatgaacttcatctacttggatctgataagggacatgttttggaagtcattgtatctaggatgaggcgtatttccagtcatattggcagtaacatacggatcgtagcactttcagcatcacttgctaatgctaaagatcttggtgaatggattggtgccacctctcatggccttttcaacttccctccagcagtgagacctgtgccactggaaattcacatccagggtgtggatatagcgaactttgaggcaaggatgcaagcaatgacaaagcctacctacactgccatcacacagcatgcaaagaacaataaacctgccctggtgtatgtaccgacaaggaagcatgcaaggttgactgcattggacttgtgtgcgtactctagtgttgagggtgctggaactccatttcttcttgggtcaggagatgagatggatactttcaccagaggtgttgaagaagagactcttaagaatacacttaaatgtggtgttggctatttgcatgagggtctaagtgagcttgatcaggaacttgtaacccagctgttccttggtgggaggatccaagtgtgtgttgcaagcagcacaatgtgttggggaagaccattgcctgctcatttggtcgttgtcatggggactcagtattatgatgggcgggagaatgctcacaccgactatccaattacagatctgcttcaaatgatgggtcatgccagtagaccacttcaagataactcagggaaatgtgttatattgtgtcatgcacctcgcaaagagtactacaagaagtttctttttgaggccttccctgtcgaaagcaatcttcaccatttcttgcatgatcacatgaatgctgaggtggtggttggtgttgtagagaataagcaagatgctgtggattatcttacttggacgttcatgtatcggcggctagctaagaatcctaacttctacaatcttcagggtgtaagtcacaggcatctttcagaccatctttctgagctagttgagactattctgaatgatcttgaatcgagcaagtgtgtggctatagaggaggacatgtacctgaagcccctcaaccttggccttattgcttcatactactatattagctacacaactattgagcgttttagttctatgctgacccagaagactaaggtgaaaggactcctagagattctagcatctgcctcagaatatgcagagcttccgggtcgtcctggtgaggaagaattcattgagaggcttgttcgtcaccagaggttctctatcgagaaacccaagtatggggatccacatgtgaaggccaatgctctgctgcaagcccatttttcaaggcacacagtggtcggaaatctggcagctgatcagcgcgagattctcctttctgctcataggttgctccaggcaatggttgatgttatatccagcaatggttggcttagtcttgctcttagtacaatggagctgagtcaaatggtgacacaaggcatgtgggatcgggattctgtgctgcttcaagttccacacttcacaaaagacttggctcggaggtgccaggaaaatgaagggaagcccatcgagagtatctttgatctagctgagatggctgtcgatgagatgcgggatctcttacaactatcgaactctcagctgcaagacatcattgaattcatcaagcggttccccaatgttgatatgacctatgaggtccgtgagggtgatgatataagcgctggtgacaatgtaaccgtgcaggtaactctggagcgtgacatgactaacgtttcatctgaggttggtccagtccatgcgccaaggtttcccaagcctaaggaagaaggctggtggctggtgattggggacagctccacaaaccagttactggcaatcaaaagagtggcactccagaagagggcgagagtgaaacttgagttctctgctccggcagaggctgggagaaaggactacatgatttacttgatgtcagactcttacttgggctgcgatcaggagtatgaattcaccgttgatgtcaaggatgctggaggggattgatgatgaagactgtgacactatgtcgcatagaagtagaattgagtgtgtactgtaacgcgatattggaacattctgtgttgtaacctcgaacatgtggaagctgtaacttattttgcatgttgaccggtgcactttgggcgttgctgtgttatcctattctagtattgttgtaaggattgcgctcggttacacttgagccacagtattttggatcaacttgttgcttctataagcttgctgatgctataatgtttgatcgacctgttgatgcactaatggtgtgttgatgttttaacctgttctattggcaggacaggcagtaggctagttcgaaaactcaaacctcatgggggattaaggccccgttcggttccctctcagtccattgtggtttgctcactatatttactcttataattacatttatctacttgtataatatttgctcaactagctttgtatagattataac

SEQ ID NO: 70492 - DNA, 3125 bp, Zea Mays
aagttcgatggaatagctggatccgtgaccgtgcaaccacctcaaccgcatttcaggggcaaggtcttcatcccgaatcctcggcctcgtctcccatctcgtgccctacataaaatccagacgccccgctttaccccgttcacgacggctccgcgcttggggctgttgaagccgcctccagtgttgggcgaggtgccggatgtgcgttggtcagtctgcggccgccactgtctccacactggtgtcgtgcttggtttggtgacattgaagattatctctggggcacgacgatgtcgttcatcgctgctgcagcttggttgcctccgatggctgcttgtcaagcgccggggcctcacgcctcgggacaacttgcgcgtcgtcatcatccaactccattcccgtcgcagtcacgtgaaccagttgaaccatgtcgtccaggcgccgtgcggcactgcggccaggcagtcgggcaccgtgcggccaggcgaaactgcggtccgcggagggacgcaggcagccgccagcccgccgcgccactgcttgacgcctcgtcggccgttgctcgtcgcctcgtcgggctgctcgccgtcgttgccgactgcctctgtccctggtcggctgctccactcggtcactcggagacagcggctggcgtctctaagcctgttgccctaatcttttagggggcggtccaaggtattgcctaggcaatactgggccatactgcccctgtgcactgctcatcggagatgctctgccatgggaaaaaatcagcgccgccgtggccggctgctgagggttgacgacgcgctcacgaccatcggatcgtgcgtgcggtggagattagaaaattgtgtaaccgttcggaattgatctggaccttaggattgatgatggagggcgcataatggttcatgtcgcggttgtctctcggtcgtcgatctctggatcaacgatcctggtcgcgtgctagtgcagattgcacctgatctaatctcgcgcgtccaaccttgattgcgcggctcgcattcacccttacctcttcagcctggagacttttcaaaagagcccctcggcttgttctgactcaacccgccatcctcgggttgagtgaattcatacgccagagtctgtggaacttactttttaaaccctaaatttatagaatatcctactcgccgtccttagacttttgtaaaacatataaataaacctgaaaaaggatttatagtagaaaaataaacccataaacttgtttaattcatatttaatctattttaattctttttttaccaattctagttgcattaaattcataataatattgtttatcatctagaaaccttactttgttatgaaacttagattaagaattatacacttagtttcttttaatccaacacttaaaacttcagaaatccataacttcttcgttttaattccgttttgacccgttccagttgcgttaactttgcataaatatttactacgcagtaacaacattaattataccatgtcgcatacttttatatttatttatcctatgtctactagattagctcttctaaaccaaatctaacatgtccataattatagtttgattaaaatctgatctctagtcaagttataattaaaactaatgttgagttaattatttatagaataatccctcatatgatttacactaaccaagttataacatagtttaatggttaaatcacatagatctcccataaatcataactccttcaccgtgactccgatcttagtagttcccgatcccacgatctcgtaagtgacacatagattattattatacaatttatttttatgtttaatatgatgttaattttgtctataccatattttgttcgtattgctacgactagcgtgaggtcacgtgtaatttgaagatcattctcgtacctggaatctaaagtcccaggcaagttgtgcccttgatcacttttatttacccaataatgttctgtataatcattttatcatgcataggtttaattttgatgggacccaataggtcaccctagtttggttatcttgttaccttgtttacctctgaactatttgagtagttttgctattgctctacatgattttgggtttaatattacattatgtccatgttccaattattctgttattttatttattattcatgtcaagatcactatttttaattgaaacatggagcttaacttgataaacacgtgccaccacaagggtggaatgggatgcccttggctgactaactaggaaagctagtggaggactaccttatccgataggagcaagggcagtaggggagtaggtatgtagggaggttctcgggttgattttgctgcgatggaggtcagacgaggattcatgcattgcttttcctagactgtagcgggttttctaaagctagtgaaactttgtaaaggcctcatagtggatccctagtcattcacctcggaagtgtctaatggtcttgcaaaccctggtgacatgggatacacgactgtgggtatagggtacaacctctgcagagtgtaaaaatggtatactagtcgtgctcgcgatcatgagcagctcatgactctcgcatgattaaattatggaactaaatttaatttatcatttgcattgtatgagatttattattagttttgttctattattattattattattattattatggtttggtatttacttacattcagtaactgctaataaaatttgaccaacttattaaaagcaatgcccagctttaacccctattattgatcagtcttacacattatatgaacttccacctttggtgagttcatgcacattattccccataacttgttgagcgatcaacatatgtgagctcacccttgctgtctcacaccccccacaggtcaagaacaggtaccacaggatgaggggcatggaggtggctgcgatgtgttcgtgagaggtctaggtcgtcgtctcccagtcaactttgggttgctggatcgttgtctccttacgatgtatttatttattttatatagaactccttttatatagtaaagttgtgacattcgtttctgtactatgattcatgatatgcgtgagacttttggtttcag

SEQ ID NO: 70493 - DNA, 629 bp, Zea Mays
aagttcgatggaatagctggatccgtgaccgtgcaaccacctcaaccgcatttcaggggcaaggtcttcatcccgaatcctcggcctcgtctcccatctcgtgccctacataaaatccagacgccccgctttaccccgttcacgacggctccgcgcttggggctgttgaagccgcctccagtgttgggcgaggtgccggatgtgcgttggtcagtctgcggccgccactgtctccacactggtgtcgtgcttggtttggtgacattgaagattatctctggggcacgacgatgtcgttcatcgctgctgcagcttggttgcctccgatggctgcttgtcaagcgccggggcctcacgcctcgggacaacttgcgcgtcgtcatcatccaactccattcccgtcgcagtcacggtcaagaacaggtaccacaggatgaggggcatggaggtggctgcgatgtgttcgtgagaggtctaggtcgtcgtctcccagtcaactttgggttgctggatcgttgtctccttacgatgtatttatttattttatatagaactccttttatatagtaaagttgtgacattcgtttctgtactatgattcatgatatgcgtgagacttttggtttcag

SEQ ID NO: 70494 - DNA, 967 bp, Zea Mays
attgaagtgatttttctttgacagtcaaaacacatgtattagcatgttcataacagatgcacacttaagatagtagaagtaatgcattctattgacttactaggcatcatatgaacctagctcatttcctaacacgaactgtttttagttcgactctttgataaagttcatacaataattgacaattcacaatctgatttagttttcagttcacacaatctgactcacacaatttgactaagttttctagactgaatcagcattagattcattgttctggactgaatgtaacaaggttgtggtacacacgaattctgaagattatacaatggccaagtgctgtgaaaaacagactgacgactgctggagattatactatggccatgcagatgtgtgccaagatgatctatataaccatcaaaactactaaatgagggctctatccttagtaggaagccaaggcagctgcatcagggaatgagacacctgcaggagcaagttctgatgcaccacccttttcaatgataccaaagttctcacacataatgcattcaccaacaattattgggttccatagcataatgcattgaggaaatctgctactggttgcattcaacaacagttttcaaacacaatctgtagctttattggcaactacaatcaggtttacatcaggtttcgtagatataatgtccagcgaatgttcgttgatgttcgattgatgatcgaggcgtgggtgctagctttcaggaggtggttggtggagttggaggggtcgattggggaagagggggagaggatgaagacaactgcactggtgcactggagctcgacaacctcgagagggtcaggcaagtctgatgttgaaaggatcttcaagaaagtcttcgaggacctgtcagacaagaacacggggctcctggacatcaactcccgccacgtcgctaccctcatggtttacaagtga

SEQ ID NO: 70495 - DNA, 757 bp, Zea Mays
atggcggagctcggcagtagacctcaccgtggactcaggagaccggcatccccaatcgtagcgagagggacgaccagcgggacacagtccaagcggcaaggcttccccatgcgtgatcctgcccgaggagatttcaaaggtcttggaaatccagccatcgccgtcgggtatcccacccccgagcctgcgcccccaccaaccccgcccccgagttcacccgccaccaagctcgtcgccggctttattggcaactacaatcaggtttacatcaggtttcgtagatataatgtacagctataacatgcttcatctttttttttctgtcttgtactctttatgcagtccaagatgagaatacatctcaatttcacatgggctatatataaggtcaaaattcataagcaaagtaagcaagtgatgtagaaaaaaatgcaaacaatatgctactgtaagtctttcctaattttaacttattagaagtcagtaagcattttttaacaattgtggttgacaacaaaataaagaatgagctttggacccttggaatttatgtccaaagtttcaatggtgatttactttatgagccatgtcatgtttatgatgagactgggcatgcatttacaacctttaacaaaaacagggagaaatgtatgaacctacctattgagatatcacaatatattgcacctacgaggttggtggcaacattaggttttttttgccataacatcatttctgttttcatgagcatctgtag

SEQ ID NO: 70496 - DNA, 1880 bp, Zea Mays
tcatcccgctctcacagtcacgctctgttccgttcactctgcaactaaacaaaaaacagagccactccgttccagattaccaaacacagaacagagcggcttcgttcctagaatcagggatggaacggctccgttctactaatgaagcggtatcattcatcgagattgctgggagcggagcagacgcgtggatgatgacatgcacccagtaggtgatcggagacggtcagacggcgtccaccgctgtgtccgctcgctctcgtctcgggcgcgtcgttgccttccacgtctcggcaggcagcaggcgatcggagcaaactaagaagcgaacaggccgcccgtcgacgccatggcgccggatctggtgaacggcgtgctcaactgggtggggacgccggccatggtggccagcctgctgctcttctacccgccctactatctcttcaagacatgctactccttcctttcctggctcttccccgaggacctcgccggcaaggtcgtcctcatcactggcgcttcctccggcatcggcgagcaactggcctaccagtacgcgctgaatcgggcgtccctcgccctcgtcgcgagaagggagtcgagcctccggcacgtcgccgaccgagcactcgagctcggcgcgcgcgacgtcgtcgtcctcccaggcgacgtctccacccccgacgactgcgacaggttcgttcggaccgcgatcagtcactacgaccgattggaccatctcgtgtgcaatgctggcgtcgcgagcgtcggcgcgttcgaggagatcccggacgtcaccagctacagctcccagcttgacgtcaatttctggggttccgttcaaacaaccttcgctgccctgcctcacctgaagaggagccgaggaagaatcgtggtgacggcatctgcgaccggatggaacccagttcctagaatgagcatctacaacgtgcgtagctagggagacatatcgactacatagtacatacatctcatatcatgctagtagctgtggaagaaacacagtggcaatcaacttcatgtgcatgctatagcttcatcgatctgctgtctatacatatgatggtgtatgttcaggctgccaacgctgcgctcatcaacttcttcgagacgctgcggaccgagctagggaaccaggtcgggatcacggtggtgacgcccgggtgggtggagtccgagatgtccagagggaagttcctcaaggagcacggccaagtggaggtcgatcaagagatgcgcgacatcggcctgttcccggtggagtacgccaagaactgcgccaaggccatggtgcaggcggcgcggcaaggcgagcggtacctcaccgtgccggcgtggttcggggcgatgtacctgtggcggctgttcgcgccggaggtggtggaggcctgctaccgcctcctgtacatgcacggccatggcgccaggcaggccgacgcgcccagcaggaccatggccgaggcgggtggcaagcagctgctgtacccgacctcgctgcgctctgacgagattaaggagtgaccaaactgccaactggtgtgtgtgtgtgtgtgtttgtgtgtgcagcagagctctcagaacacctggggtcatgtttaatatgtgctagctgtgtgccttgacaatgaataagctgctgctctctcttttgcatagtttaaatctacagttctgtagtcgatataattgttttgtttgaagctgttgaagtctacaattctgcagttgataattgttttgtatcaagttgtttagagcatcggatataacgttctatttttcaagattttagaatttgaattgaaagtttcccaaataacatcaaatgttgacatggtcaatattaaagttgtattggc

SEQ ID NO: 70497 - DNA, 1770 bp, Zea Mays
tcatcccgctctcacagtcacgctctgttccgttcactctgcaactaaacaaaaaacagagccactccgttccagattaccaaacacagaacagagcggcttcgttcctagaatcagggatggaacggctccgttctactaatgaagcggtatcattcatcgagattgctgggagcggagcagacgcgtggatgatgacatgcacccagtaggtgatcggagacggtcagacggcgtccaccgctgtgtccgctcgctctcgtctcgggcgcgtcgttgccttccacgtctcggcaggcagcaggctcgtgccgctcgtggtcgtacgctgcagcaggcgatcggagcaaactaagaagcgaacaggccgcccgtcgacgccatggcgccggatctggtgaacggcgtgctcaactgggtggggacgccggccatggtggccagcctgctgctcttctacccgccctactatctcttcaagacatgctactccttcctttcctggctcttccccgaggacctcgccggcaaggtcgtcctcatcactggcgcttcctccggcatcggcgagcaactggcctaccagtacgcgctgaatcgggcgtccctcgccctcgtcgcgagaagggagtcgagcctccggcacgtcgccgaccgagcactcgagctcggcgcgcgcgacgtcgtcgtcctcccaggcgacgtctccacccccgacgactgcgacaggttcgttcggaccgcgatcagtcactacgaccgattggaccatctcgtgtgcaatgctggcgtcgcgagcgtcggcgcgttcgaggagatcccggacgtcaccagctacagctcccagcttgacgtcaatttctggggttccgttcaaacaaccttcgctgccctgcctcacctgaagaggagccgaggaagaatcgtggtgacggcatctgcgaccggatggaacccagttcctagaatgagcatctacaacgctgccaacgctgcgctcatcaacttcttcgagacgctgcggaccgagctagggaaccaggtcgggatcacggtggtgacgcccgggtgggtggagtccgagatgtccagagggaagttcctcaaggagcacggccaagtggaggtcgatcaagagatgcgcgacgctcagatcggcctgttcccggtggagtacgccaagaactgcgccaaggccatggtgcaggcggcgcggcaaggcgagcggtacctcaccgtgccggcgtggttcggggcgatgtacctgtggcggctgttcgcgccggaggtggtggaggcctgctaccgcctcctgtacatgcacggccatggcgccaggcaggccgacgcgcccagcaggaccatggccgaggcgggtggcaagcagctgctgtacccgacctcgctgcgctctgacgagattaaggagtgaccaaactgccaactggtgtgtgtgtgtgtgtgtttgtgtgtgcagcagagctctcagaacacctggggtcatgtttaatatgtgctagctgtgtgccttgacaatgaataagctgctgctctctcttttgcatagtttaaatctacagttctgtagtcgatataattgttttgtttgaagctgttgaagtctacaattctgcagttgataattgttttgtatcaagttgtttagagcatcggatataacgttctatttttcaagattttagaatttgaattgaaagtttcccaaataacatcaaatgttgacatggtcaatattaaagttgtattggc

SEQ ID NO: 70498 - DNA, 3330 bp, Zea Mays
aaccccaccaccccattccccctcaccaaagcacagcacagcacaacacacagggctagaaaagagaagggagggaggagacgaccaaaagaaactggagaaaaagaaaagagctcaaaagctagtcgaggcctcctccgccccttttttttctccccctcccaatcgacacaggattcactcgcccgcccagttgtttcttttagtgccgcccccattccgctctgatccgagcctttcgctcaaagcctccagcttttccaattgtttggtcacttcgggaaccaaggaataagttcttgcgctgtgcgcgatagagagcctgatccatccttccccatatcctattcctgtggcatttcgctgcgcttgcgccctgtgcgtggccactgcaggggaaggattttggcctggtttctctcttcttggggttccaagttttcgggcgagatcttcgcctcaaggcggttccttgcttttctggtattggcgcggctcttgttgctcccctacaagtccaaggaaagaatttggaggccgtgggggggtcccttgcgaccggttctggtcgatttctcgggcagctccagctgaattcaagatgccgctgtgacccaccgctgcctggtttcttggaggaaggaaattttgcttcaattgggccgttgggcgtcgttgagctagacccctcctccagctcttgatccggtccatggggctctgccatggcaagccgacgcaaatcccggaggccgaggctgaggaggatccccacgtagcctccggcgcgggcgacggcggggacggggcgacctcgccgtcggcggcggcgcccgcggcgaagccaggcacgccgaaacagcccaagttcccgttctacctgccgagcccgctcccgccgtccagctacaagggctcgccggcaaactcgagcgtctcgtccaccccggcgcgcggcgggctcaagcgcccgttcccgccgccgtcgcctgccaagcacatccgcgctctcctcgcgcggcggcacggctcggtcaagcccaacgaggtgtccattcccgagggcggcgagccggagctcggcctggacaagagcttcggcttctccaagcacttcttcgctaagtacgacctcggcgaggagatcggccgcggccacttcggctacacgtgctccgccaaggccaagaagggcgagcacaagggccaggacgtcgccgtcaaagtcatccccaaggccaagatgacaacagctatcgccattgaagatgtgagaagagaagtgagaatactgagttctctgacaggtcacagtaacctagtgcagttctacgatgcttttgaggatgaagataacgtgtatatagttatggaattatgtaaaggaggtgaactgctggacaggatattggctaggggtggaaagtactctgaagaggatgcaaaggttgttatggtacaaattttgggtgtcgtatcattttgccatcttcaaggtgttgttcatcgtgatctgaagccggagaatttccttttctcttcaaaggacgaaaactctcccttgaaggtcatagattttggcctgtctgactttgtgaagccagacgaaagactaaatgatattgttggaagtgcatactacgttgctccagaggtgctccaccgatcttacggcactgaggcagatatgtggagcatcggagtaatcgcctacatcttgctatgcgggagccgacctttctgggcgcgcacggagtcaggaatcttccgggctgtcttgaaggcggaaccgagtttcgatgaggccccatggcccactctcacagctgaagctaaagatttcgtaaaaaggcttcttaacaaggattaccgcaagaggatgacagccgcgcaagctctgagccatccgtggatccgtaatgctcaacaagtgaaagttcctttggatatgatcatctataagctaatgagagcttacatcagctcgtcttcgctgcggaagtccgctttgagggccctagccaagacgctgacgacgaaccaactcttttatgtaagggagcagtttgaactgctgggcccaaacaagaacggctatatctcattgcaaaatctgaaatcggctttagtgaagaactccactgacgcgatgaaggactctagggttgttgactttgttaacacggtgtgcactcttcagtacaggaagctggacttcgaagagttcgccgcttccgccatcagcgtttaccagatggaagccttggagacgtgggagcagcacgcgcggcgtgcgtacgagctgttcgacaaggaaggaaaccggcccatcgtgatcgaagagcttgcatcgaggactggatccggcacgccgacgggaagctgagcttcctggggttcataaagctcttgcacggggtgtcgtcgcgctcgatccccaaggcctagccatgcgccatccattactcatccctgcgcatccatatccatcaagaaccaaggagatgatgaccggtggctaagccagtctctggctggtgcgtgcgtgcgtgcgtgccgtgtgtattgtgttctgttcgagagtggctggagggtggtggacggcctgaaaccgttgcatgatgaggagagatgcttggtagtcctgtgaggtaaaagaggcagtaacaaggctggtgcctgtgccttgtaccacttgtaccccatcccttgccacgtggattgatggctgtcgtcgtcgttgtactgaagtaaggtgctgtgtagacgagtgtacagatgatggaggataggagaaaatgagtactacgatggaagggccgtaagatttgcggctgctgtgctgtttgtcaatcgccaatgggcaatggctgcttgcagtgcagctgtggcctgtgtcgagctctctcctctttgcctgcgccgtcagagaacaggaacgtcgcagcgcgtcactgcaggtctctctgttcatggcggcgggcgacgacgacgcaggcgctgtacgtgagcttgctgctggtgtgtaggttgccgtgcatgcagcggtgtcgccacacggcgctggtcctggacgtacgtacggcggagcaggtccggtcgagcccggccgccggggtgcggggccattgacagctagagcggcaggaggaggaccacacggccggggacccaaattaaaacctctttcccgtgagtcagtcagacagactaccaaatgcgaaaataaaataaaaaactcagattatacgtatatagctagaatatggtttaaagctatagtaccacaagacaaagttaataagtaactaaacatgctcttctttagtc

SEQ ID NO: 70499 - DNA, 4850 bp, Zea Mays
aaatccaatcaacagccaacgtaaactagagagcattgcaaccagggacagagtggcgaacacaatattagggaaccattttaaacgcaaaagttcgcttgcaacaagaagcaggcaattatgatgtttcatcacaaaatctatgacatcacgacagttcagagttcttagggattttgatcccagaatctgatactacgcatctcacactagaagtctagaaccaacgactagtgacaggcttgctgatgctctgaatcagtccacaagtgtgcccaaaatgtcgtgctctctgaagaggaggtacctgaagatttttcagaagaggttaaatggcattaaacagaaggaaaaaaacaatcttcaatgataagaatccaacaaacagttgacttggtatttgcgaccacaactgattgtgttgccagttagcgaacaaaggttaagatgcatcattttttttctaagtcgcaaaaggcatagttgacatgcagtatcaaacagcctatcaccaacacaacatttgacacaattaaaacagtcactatcatgattccacatcatatcatgggtttgcctgttcagcatatattttgatgatttcataggacagcaaataatacagctgcaagacattttttataagtgcaacagttctattgtgtgcctaattgagaaattaatcatgcactagcagtataacacgacgtacgtactgaaacagagaagaatggttttcttactctttatcagctgcaagcttaacttcagttccaccatactctggcaggagaacagtgtcaccttccttcagagcaactgggatcagattgcctgccttgtcgcgctcaccagggccaacagccaccactttagcagcattcagctgcaacaagagcaacattgtcaagcagagaattgattctacacccacaataattagtttctccagtcgaacacaccaaaatacagtgctgaattgaatgctaattgataagtaaaatccttatttgaattctgaaagacaagaaataccgtcaaacaggaaatcaatgggatcccacagacaatagcaagtcatgtatcttactgaggtacattttcaggtaaaaacttgaaaatagcaagtaatgtatcttactgagatcccacagacaatgcggtcaaaacaatgggacagaacagtttggaactgcaggtagccataaacatgctagtatttcacaagtactctagtatataaatctacccttaataaaaaaacataacatgactgcttgaacgataaaattgttatagctaaagttaagaatggcagcctaaaccaagcaatctgaataacatagagctaatcacaacccaaacatacataaattcaccagagggaggaagcatggtgagaaatttttagctgcttacaactattggtaacctacaaaagcgatccaaatcgcccaactgctgcagccgttttcagttcggcaagcgacggcgcggaacaccttgcccgacaccatgatctaaacgtcccgccggaaactgaatcccctaaactactaaaaaacaacgtagcggacgatggtgctacctgcttggatgtttccgggaggaggatgccgccggcggtcttcttgggctgcaccagcttctcaaccagcacccggttcagagatgggagcagcctcttcgccatcgccgccgtcctcttgttacccttcttcttgcgcagtaagccaaaaggaagaaaaaaaaaactcgaagcttccactcgcctcaacaccaaccgatcagccggaggttttagggttttatggacagacgccggcgcagcggaaaaattacgagcctgcccctttgagatcgttcgccgcgccaacgcaacgtgcgccggcctctcgggtgccctctagaacgttcctcgttaactgatctgggccgagcctcatgtatccaggtggcccactgtcaagcgttttggagcccgctaagcatgagcttctgcttattgatgtgtcgttgaaagcccacggaccatttatccagcggcccaatccagcaggtgggttaagcttgggagttgggagtgacaccgcggcacctccactgcagtagtcttgttgccggcggcggcggcggcggcggcgcggagaaattcggcgaacgatggcggactccggaagcctgaggaagcgggaggagaaggaagaggaggacgacattgtctgcctggatccttccttcttcgtggaccgcagctacgagatgacgaccttcaccttcggatcccacgagttgcgcctcctctgcctccgcgccgcttccaattataaagaaaaatatagagttgcagtcatgttctgagaatgcacatgcagtgttgacagccgagaaactagagtggggaaactcagatcatttaagcggtattattgaaaaacatcctggtggatttgatcttgttcttggagctgatatttgcttccagcaatctagcatttcctgcctctttgatactgtagagaggattgttcgtattcaagctggtaaatgcagattcatattggcttatgtatcccgaactaaagtcatggatgcactagtactcaaggaagctgaaaagcatggaatgcgtgttgaagaagtgaacggaacaagaacaaccatctcgaatcttgaaggagtcatatttgacattaccctgaaatgacagtccgtccttcgactctcctttgtcgaagtgcttgagtggttattcgtcatgaagtcctgtgtaacttccttttagcgggaaaatcgaagttccgcatcatgatgagctggagttgtgtcagttgtatctctgtagaggaggaggcaccacagtaagaacattagccgatgatggtctttgattcatgcgcccatttggtgtggctttctactgttcaactgctccatcctttaagctaatatataagatgtaagatgcgtgctacaactttctcggactatctatctatctatcggtgagatgaccagactgtgaaagttcctgtgacaaggagttgctgaaagcagtgccatcatgtatgggttgcagatgcttggtctgaactctgtaaaaggctctggattaccatgagtttttcgtgcttggtgcagtagcatgtaagtaagcaccaactgaacagaagaaaccttcagcacccccttcaacacatgtcccatgtagcatggttccaattttttgccttgttctctagcctgctgctgttggctccttgctatatttgtaagcttgctgcgacagcttgtcaaggcctccctgagacaaccttgtcacataggcgcagtgccacagttttttcggcttttcttggacgcagcctgaaatgggagctcctgccgtatgtggccatgttccgtatgaaccaggactgtcagtgatgcatgagctgcaggctgaacgggtctgatcctgagtgacctcgtgctgaacaatgccaaaaaaatttttatgaagagtgatgatagatatgcatatcgttttcattgattggttctactcgtgtccacaggctgggcgacgggaggttggaactggggcccggatgtgtacccgtgcctgggagctcaacagcactccaactaataagatgttgcaactaacgcatttaaagatgcatctggacattgtttcgctgtataatctcgggaactgacacgtgacctgggtgttcatggtcactgaatatatatatatatatagaactgtgcctttcatgatcatgcaagaaaacggcattacaactgatgagtttctttttagcctttcctttccttttttttacagcgcatccgatgctgggaggtgaggtcaaaggggaggaggatgccaagaaagagggctgcatccatccaagcacctgaaaggatacgaaagaaaggtgaggttggcatgaagaaaatccatctggccccggccggcatagcgacaggaaggctaccggccggctcgccggcgcccgcggccggccggttgggcaaaaaggttagcaaacctggtctttgctcatgtaccagagtcctctggacggaaaagttggggacatcgacataaattatgtggaaaagatgattgggggaactgaaaattttgtatgattcggacgtgagcttttggaggcgacagtggcatggcatggacgccacagtgatgatgaacttgtgaccttcacactgcaaacctgtggggctcaaacgatctacaagtacttgaaaagtgatctttgccgtttcttgctgtgcttagcagtgcaactaacaaggccactgaattcaggatggagaatttgacatggcgtgaggccattttcctatggttcttgcattggtagtttggtagtcaccagtgactggagtgctcaactcaaccatctgccgtggcagcttgcaaataaatataacaggtcaatgagttgagcttgtttaggactggctggaagaactaaacatatcttcttcaattcatcacttgaatgggtcccagtgcaagttcatatgagctgtgcctccctctcctgtactgctgtacaagaatatatcatatcatatatacacgtagttgcgtacatgtccaacaggatggacaactaccctccttcctctgtgatgaagtacccttagtctgtacagctacaacacctaacagaaagagttctcttttagtagagaaaagctacaggtagatcgctaggtcgtcttctcagttgggattttaatgcctgatcatgttcatgcatgctttgtttaatctacctgtagctgtttattagctaggtcgtctgaattggtagcagtgttaggttttt

SEQ ID NO: 70500 - DNA, 5739 bp, Zea Mays
aaatccaatcaacagccaacgtaaactagagagcattgcaaccagggacagagtggcgaacacaatattagggaaccattttaaacgcaaaagttcgcttgcaacaagaagcaggcaattatgatgtttcatcacaaaatctatgacatcacgacagttcagagttcttagggattttgatcccagaatctgatactacgcatctcacactagaagtctagaaccaacgactagtgacaggcttgctgatgctctgaatcagtccacaagtgtgcccaaaatgtcgtgctctctgaagaggaggtacctgaagatttttcagaagaggttaaatggcattaaacagaaggaaaaaaacaatcttcaatgataagaatccaacaaacagttgacttggtatttgcgaccacaactgattgtgttgccagttagcgaacaaaggttaagatgcatcattttttttctaagtcgcaaaaggcatagttgacatgcagtatcaaacagcctatcaccaacacaacatttgacacaattaaaacagtcactatcatgattccacatcatatcatgggtttgcctgttcagcatatattttgatgatttcataggacagcaaataatacagctgcaagacattttttataagtgcaacagttctattgtgtgcctaattgagaaattaatcatgcactagcagtataacacgacgtacgtactgaaacagagaagaatggttttcttactctttatcagctgcaagcttaacttcagttccaccatactctggcaggagaacagtgtcaccttccttcagagcaactgggatcagattgcctgccttgtcgcgctcaccagggccaacagccaccactttagcagcattcagctgcaacaagagcaacattgtcaagcagagaattgattctacacccacaataattagtttctccagtcgaacacaccaaaatacagtgctgaattgaatgctaattgataagtaaaatccttatttgaattctgaaagacaagaaataccgtcaaacaggaaatcaatgggatcccacagacaatagcaagtcatgtatcttactgaggtacattttcaggtaaaaacttgaaaatagcaagtaatgtatcttactgagatcccacagacaatgcggtcaaaacaatgggacagaacagtttggaactgcaggtagccataaacatgctagtatttcacaagtactctagtatataaatctacccttaataaaaaaacataacatgactgcttgaacgataaaattgttatagctaaagttaagaatggcagcctaaaccaagcaatctgaataacatagagctaatcacaacccaaacatacataaattcaccagagggaggaagcatggtgagaaatttttagctgcttacaactattggtaacctacaaaagcgatccaaatcgcccaactgctgcagccgttttcagttcggcaagcgacggcgcggaacaccttgcccgacaccatgatctaaacgtcccgccggaaactgaatcccctaaactactaaaaaacaacgtagcggacgatggtgctacctgcttggatgtttccgggaggaggatgccgccggcggtcttcttgggctgcaccagcttctcaaccagcacccggttcagagatgggagcagcctcttcgccatcgccgccgtcctcttgttacccttcttcttgcgcagtaagccaaaaggaagaaaaaaaaaactcgaagcttccactcgcctcaacaccaaccgatcagccggaggttttagggttttatggacagacgccggcgcagcggaaaaattacgagcctgcccctttgagatcgttcgccgcgccaacgcaacgtgcgccggcctctcgggtgccctctagaacgttcctcgttaactgatctgggccgagcctcatgtatccaggtggcccactgtcaagcgttttggagcccgctaagcatgagcttctgcttattgatgtgtcgttgaaagcccacggaccatttatccagcggcccaatccagcaggtgggttaagcttgggagttgggagtgacaccgcggcacctccactgcagtagtcttgttgccggcggcggcggcggcggcggcgcggagaaattcggcgaacgatggcggactccggaagcctgaggaagcgggaggagaaggaagaggaggacgacattgtctgcctggatccttccttcttcgtggaccgcagctacgagatgacgaccttcaccttcggatcccacgagttgcgcctcctctgcctccgcgccgcttccactgattttgatcttactggacagttagtgtggccaggggcagtccttatgaacaactacctatctcaacaccctgaaattgtgaagggatgttcagtagttgagctaggatctgggattggcattactggcatattgtgtagccgtttctgcaaggaggttgtcttgactgatcacaatgatgaagttctggagattataaagaaaaatatagagttgcagtcatgttctgagaatgcacatgcagtgttgacagccgagaaactagagtggggaaactcagatcatttaagcggtattattgaaaaacatcctggtggatttgatcttgttcttggagctgatatttgcttccagcaatctagcatttcctgcctctttgatactgtagagaggattgttcgtattcaagctggtaaatgcagattcatattggcttatgtatcccgaactaaagtcatggatgcactagtactcaaggaagctgaaaagcatggaatgcgtgttgaagaagtgaacggaacaagaacaaccatctcgaatcttgaaggagtcatatttgacattaccctgaaatgacagtccgtccttcgactctcctttgtcgaagtgcttgagtggttattcgtcatgaagtcctgtgtaacttccttttagcgggaaaatcgaagttccgcatcatgatgagctggagttgtgtcagttgtatctctgtagaggaggaggcaccacagtaagaacattagccgatgatggtctttgattcatgcgcccatttggtgtggctttctactgttcaactgctccatcctttaagctaatatataagatgtaagatgcgtgctacaactttctcggactatctatctatctatcggtgagatgaccagactgtgaaagttcctgtgacaaggagttgctgaaagcagtgccatcatgtatgggttgcagatgcttggtctgaactctgtaaaaggctctggattaccatgagtttttcgtgcttggtgcagtagcatgtaagtaagcaccaactgaacagaagaaaccttcagcacccccttcaacacatgtcccatgtagcatggttccaattttttgccttgttctctagcctgctgctgttggctccttgctatatttgtaagcttgctgcgacagcttgtcaaggcctccctgagacaaccttgtcacataggcgcagtgccacagttttttcggcttttcttggacgcagcctgaaatgggagctcctgccgtatgtggccatgttccgtatgaaccaggactgtcagtgatgcatgagctgcaggctgaacgggtctgatcctgagtgacctcgtgctgaacaatgccaaaaaaatttttatgaagagtgatgatagatatgcatatcgttttcattgattggttctactcgtgtccacaggctgggcgacgggaggttggaactggggcccggatgtgtacccgtgcctgggagctcaacagcactccaactaataagatgttgcaactaacgcatttaaagatgcatctggacattgtttcgctgtataatctcgggaactgacacgtgacctgggtgttcatggtcactgaatatatatatatatatagaactgtgcctttcatgatcatgcaagaaaacggcattacaactgatgagtttctttttagcctttcctttccttttttttacagcgcatccgatgctgggaggtgaggtcaaaggggaggaggatgccaagaaagagggctgcatccatccaagcacctgaaaggatacgaaagaaaggtgcacaaaaagaagagcaaaacttactggagggtactgggcctaaaaagcaaaagtgaaaaaaggggagggagcagcaatgagatctctctatcttcaccagagactgttgcatctgcagcattgaattggtttcaggtttcttccattgtttactcgctttccatgactactggcccgcagagaagagattccattgcaaaaggcccagagcatgctagcacgtaaaaacacgtagagactaaagagaggttgattgggtggccaatgattgggggtgcataatccacatgagaggagaattccattccattccatgccattacattacattatgcaaggcacatgcctgcctcccggaagaccggaacaaacatgctcgttgtttataccggttcctctgcattacagttcttgactgacggtaacaaagccatgcaagcaatacagtgttgcattgcaaattgaatgcatggttgtcttgtcccacataatggccacacagcctccctcttgtcagggatacataccgtacatgcacggagaatccctgcacgcacgtacatgcagtacgccagtagctggctggctactggttgaagtagccaagtaggcaccgaactctgatgcccaaataccaactgactgatctgatcaacatcgcaggcaacatctattggttactttgtggagaggtgaggttggcatgaagaaaatccatctggccccggccggcatagcgacaggaaggctaccggccggctcgccggcgcccgcggccggccggttgggcaaaaaggttagcaaacctggtctttgctcatgtaccagagtcctctggacggaaaagttggggacatcgacataaattatgtggaaaagatgattgggggaactgaaaattttgtatgattcggacgtgagcttttggaggcgacagtggcatggcatggacgccacagtgatgatgaacttgtgaccttcacactgcaaacctgtggggctcaaacgatctacaagtacttgaaaagtgatctttgccgtttcttgctgtgcttagcagtgcaactaacaaggccactgaattcaggatggagaatttgacatggcgtgaggccattttcctatggttcttgcattggtagtttggtagtcaccagtgactggagtgctcaactcaaccatctgccgtggcagcttgcaaataaatataacaggtcaatgagttgagcttgtttaggactggctggaagaactaaacatatcttcttcaattcatcacttgaatgggtcccagtgcaagttcatatgagctgtgcctccctctcctgtactgctgtacaagaatatatcatatcatatatacacgtagttgcgtacatgtccaacaggatggacaactaccctccttcctctgtgatgaagtacccttagtctgtacagctacaacacctaacagaaagagttctcttttagtagagaaaagctacaggtagatcgctaggtcgtcttctcagttgggattttaatgcctgatcatgttcatgcatgctttgtttaatctacctgtagctgtttattagctaggtcgtctgaattggtagcagtgttaggttttt

SEQ ID NO: 70501 - DNA, 3393 bp, Zea Mays
aaatccaatcaacagccaacgtaaactagagagcattgcaaccagggacagagtggcgaacacaatattagggaaccattttaaacgcaaaagttcgcttgcaacaagaagcaggcaattatgatgtttcatcacaaaatctatgacatcacgacagttcagagttcttagggattttgatcccagaatctgatactacgcatctcacactagaagtctagaaccaacgactagtgacaggcttgctgatgctctgaatcagtccacaagtgtgcccaaaatgtcgtgctctctgaagaggaggtacctgaagatttttcagaagaggttaaatggcattaaacagaaggaaaaaaacaatcttcaatgataagaatccaacaaacagttgacttggtatttgcgaccacaactgattgtgttgccagttagcgaacaaaggttaagatgcatcattttttttctaagtcgcaaaaggcatagttgacatgcagtatcaaacagcctatcaccaacacaacatttgacacaattaaaacagtcactatcatgattccacatcatatcatgggtttgcctgttcagcatatattttgatgatttcataggacagcaaataatacagctgcaagacattttttataagtgcaacagttctattgtgtgcctaattgagaaattaatcatgcactagcagtataacacgacgtacgtactgaaacagagaagaatggttttcttactctttatcagctgcaagcttaacttcagttccaccatactctggcaggagaacagtgtcaccttccttcagagcaactgggatcagattgcctgccttgtcgcgctcaccagggccaacagccaccactttagcagcattcagctgcaacaagagcaacattgtcaagcagagaattgattctacacccacaataattagtttctccagtcgaacacaccaaaatacagtgctgaattgaatgctaattgataagtaaaatccttatttgaattctgaaagacaagaaataccgtcaaacaggaaatcaatgggatcccacagacaatagcaagtcatgtatcttactgaggtacattttcaggtaaaaacttgaaaatagcaagtaatgtatcttactgagatcccacagacaatgcggtcaaaacaatgggacagaacagtttggaactgcaggtagccataaacatgctagtatttcacaagtactctagtatataaatctacccttaataaaaaaacataacatgactgcttgaacgataaaattgttatagctaaagttaagaatggcagcctaaaccaagcaatctgaataacatagagctaatcacaacccaaacatacataaattcaccagagggaggaagcatggtgagaaatttttagctgcttacaactattggtaacctacaaaagcgatccaaatcgcccaactgctgcagccgttttcagttcggcaagcgacggcgcggaacaccttgcccgacaccatgatctaaacgtcccgccggaaactgaatcccctaaactactaaaaaacaacgtagcggacgatggtgctacctgcttggatgtttccgggaggaggatgccgccggcggtcttcttgggctgcaccagcttctcaaccagcacccggttcagagatgggagcagcctcttcgccatcgccgccgtcctcttgttacccttcttcttgcgcagtaagccaaaaggaagaaaaaaaaaactcgaagcttccactcgcctcaacaccaaccgatcagccggaggttttagggttttatggacagacgccggcgcagcggaaaaattacgagcctgcccctttgagatcgttcgccgcgccaacgcaacgtgcgccggcctctcgggtgccctctagaacgttcctcgttaactgatctgggccgagcctcatgtatccaggtggcccactgtcaagcgttttggagcccgctaagcatgagcttctgcttattgatgtgtcgttgaaagcccacggaccatttatccagcggcccaatccagcaggtgggttaagcttgggagttgggagtgacaccgcggcacctccactgcagtagtcttgttgccggcggcggcggcggcggcggcgcggagaaattcggcgaacgatggcggactccggaagcctgaggaagcgggaggagaaggaagaggaggacgacattgtctgcctggatccttccttcttcgtggaccgcagctacgagatgacgaccttcaccttcggatcccacgagttgcgcctcctctgcctccgcgccgcttccactgattttgatcttactggacagttagtgtggccaggggcagtccttatgaacaactacctatctcaacaccctgaaattgtgaagggatgttcagtagttgagctaggatctgggattggcattactggcatattgtgtagccgtttctgcaaggaggttgtcttgactgatcacaatgatgaagttctggagattataaagaaaaatatagagttgcagtcatgttctgagaatgcacatgcagtgttgacagccgagaaactagagtggggaaactcagatcatttaagcggtattattgaaaaacatcctggtggatttgatcttgttcttggagctgatatttgcttccagcaatctagcatttcctgcctctttgatactgtagagaggattgttcgtattcaagctggtaaatgcagattcatattggcttatgtatcccgaactaaagtcatggatgcactagtactcaaggaagctgaaaagcatggaatgcgtgttgaagaagtgaacggaacaagaacaaccatctcgaatcttgaaggagtcatatttgacattaccctgaaatgacagtccgtccttcgactctcctttgtcgaagtgcttgagtggttattcgtcatgaagtcctgtgtaacttccttttagcgggaaaatcgaagttccgcatcatgatgagctggagttgtgtcagttgtatctctgtagaggaggaggcaccacagtaagaacattagccgatgatggtctttgattcatgcgcccatttggtgtggctttctactgttcaactgctccatcctttaagctaatatataagatgtaagatgcgtgctacaactttctcggactatctatctatctatcggtgagatgaccagactgtgaaagttcctgtgacaaggagttgctgaaagcagtgccatcatgtatgggttgcagatgcttggtctgaactctgtaaaaggctctggattaccatgagtttttcgtgcttggtgcagtagcatgctgggcgacgggaggttggaactggggcccggatgtgtacccgtgcctggg

SEQ ID NO: 70502 - DNA, 1398 bp, Zea Mays
ttgtgaggaagaggaaaaataaattggggcacaaaaaactggcccggttaaatacccaccagaaaacccaaacgtaccgctcatatttccatgaaggacatgctttatcacagcgctaattgttagtagcctactctgtaccagtaccactcccttctctgttcagtgttcaccactgaaggttgggaaaaattatttgcatactggatgcaaacttacttctttgcagtctctcacatccactacatagaggcccacatgaatagaagaaaaaaaaatcaaacggttaagttgcagattttgatctgtttgtgtgggccttcaggtggtggatgtgagatgtgaggggctgcaaaggagtggatttgtatctggtatgtagagaattattttctgaaggttgtgacctaggtcttttgtggttatgctcgtggagctcctgttggtctgagtagctgagggttgagagaaatacttttggaggattggctaggagctgacaatattttggtataggtcgtcaaagtatatgctgttgttttccatgttttttttgttcgtgtcccattctattttcttttttcctcattctagtggttttacccattctattttcttttttcctcattctagtggttttacggaagtgaaaccagtgtcaccataaattgatctcgatgtacacccgaaaagctgttgtaaaagctttacaacatgtggttgttcattggaacttcattttagaagttaggcaacattgattggtcgtcttggcttccttgcttgttagatgggtctaccatttgatgtctatggcagtagcatcactactggctactgccacaactacctttgtttgactatatatttggttagtattgtatggttgttgcacgctgccactactctcatggttgccatatttctgtttgtcacaattgccatctttgttggaatacatctttggccaacattaactatctggcaaagttcaggcacaatttttcatggtggtttaataaattattttgtctcacactatggcagattggagcgacaaaggcagagttcttctgcaagacattcgaagaagttcatgagaaacttgttcacagagagctgaatttggatgctgctaagaagttcctgagcgcatatgagagctgatgatgaacaataggtagatgctgttgagcgcatactgataccgcctgattggttcaccgatcgcccgtagccagctcgtatgcagccaggctgtccagagactgttatttgggccgtagaagtggatgcactcaaaataaatgttgcgtttactcgtgcagcctcacgtcttttacgtgcatgcaattaaacatatgctcaataaaatcaatgcatgtgatggtttagaat

SEQ ID NO: 70503 - DNA, 2214 bp, Zea Mays
cgccttctctctcctccctgccctctcatttcgtctccctcttgtggacttatgggggcaggggataggcagatagccactggtagacaggacaagcatcagaattactagtcaccagcagagggacgacgggagaaggaaacccttcgccctcgctgccgccttctccttccccggtcgcgtcttgttggggctctctcgtggtctcgacccgccggccgagttctcgcgtccaagcgtggcaatccacatatctctgtctccctctctcgctcacccctgtatccccgtctaaccgaagagcccaatcaatcgaatcggatcgaaacagaccgtgtattcaatctgctactagggaagggggaagcgcgagcgtgcttgcgtgcgtgcgttccttcgttcgtgacaaggcggcccggccggccggccgatcgatcggcgatggcgccgccgtcgagggactactggctgggcttcttccgcggcgcaggggacaacgtgttcgacgccatcgacgcggccatcacggtcgccgcgtccgaccacccggccgccctccgggagcgccgcgacggcatcgccgagcgcctcttcaccgcgctcctggtgaccggcgccgcgggggcgggggcggcggcgggccagggagggtccgcggggagaacccccgtgcccagcctctgcagctccgaccgcgccgaggccgtcaccgacgacggcgcgccgcgcggagacgatcccgtcctcgccgagacggagcgcatcaaggccgtcctcctcggcggccatgacaagtcggagtccgagttgctggagctactccggcggctgcaggagctggacctcgcgttcgacaccttggatgtgagccgccgccgccatataccaacttctctaaccttataagtacgtaactcatcaccatctctatctaacccgtgttcaattcaatccactcgttatgctcgataggtcactgcgatcggcaaagcggtgtccaacttccggaagcacagctcgaagcagatccggacactcgtgagatcgctcatcgagtacgtttccatgtgaggctggaaacgcacggttgacatgtggatcgctcggcgcagagaggccgtcgtagatcaaacgccccagtccatgggtccgtccagcctggaggatcaggaggatcgaggggcagctttcacccacatggatgaaggcgacctcttcgcaacgccaagcactacgattcggctgtccgaggaaaacccaggttccaagttctccgacgcaacggagggggatggaggcatggtgaacaacaccagcagggattgcggcgagcggtacccatcgaaccaaggggggccagctagaaggcctccgccgatgggccagcagcggtacgatccagggccgtgctggaggcaagaaccgagcagcgggcagacgaaggagcagttcgtcgcggagatgctcgctaggccctcgagtgcggcggggtcgggccccgggagaccgcagcaggcgaggcccaggcagcagcgtcaggaggacgcctcctccccagctcaaggcagcaggccgcagtctgtcggctgcttctgataaaccggtggcgcaggagcaacctgacgcgaactctgtgcgagcgaagctcgagctcgccaagaacgccaagctcgaggcggccaagaggaagctccaggaaggctaccaagagtttgataacggtaatgcgtgctgttcctcctggataataggtagtatcttgctcgctgttgatcatggatttatctgcctgcagcaaagaagcagagaagcatacagatggttgatccccagaacctgcccaagcaagcaaacggcacccggaatttccaacctagcggcaagccaaggaatggcagcagcaggaattggtagcagttccaattccttttgagcgccaccagggatcatagacttcaaatcccctcctccctctttcttcctttggttcttgatcggctactaaagattttttttagaccatgcgagtacagaaaacagcaataaggctagtttcgaaagtctattgaaagttctggtcaattttgacgaacttgtttgagagctcgtcaatctgcttgtgctgtgtgcctgtgtcctctgtggctttgcagcttccaggcaacaggattctttcgtgtgaacaccattttgacttgcagtgcggcgctggcg

SEQ ID NO: 70504 - DNA, 2005 bp, Zea Mays
ctggccccgccttctctctcctccctgccctctcatttcgtctccctcttgtggacttatgggggcaggggataggcagatagccactggtagacaggacaagcatcagaattactagtcaccagcagagggacgacgggagaaggaaacccttcgccctcgctgccgccttctccttccccggtcgcgtcttgttggggctctctcgtggtctcgacccgccggccgagttctcgcgtccaagcgtggcaatccacatatctctgtctccctctctcgctcacccctgtatccccgtctaaccgaagagcccaatcaatcgaatcggatcgaaacagaccgtgtattcaatctgctactagggaagggggaagcgcgagcgtgcttgcgtgcgtgcgttccttcgttcgtgacaaggcggcccggccggccggccgatcgatcggcgatggcgccgccgtcgagggactactggctgggcttcttccgcggcgcaggggacaacgtgttcgacgccatcgacgcggccatcacggtcgccgcgtccgaccacccggccgccctccgggagcgccgcgacggcatcgccgagcgcctcttcaccgcgctcctggtgaccggcgccgcgggggcgggggcggcggcgggccagggagggtccgcggggagaacccccgtgcccagcctctgcagctccgaccgcgccgaggccgtcaccgacgacggcgcgccgcgcggagacgatcccgtcctcgccgagacggagcgcatcaaggccgtcctcctcggcggccatgacaagtcggagtccgagttgctggagctactccggcggctgcaggagctggacctcgcgttcgacaccttggatcggtgtccaacttccggaagcacagctcgaagcagatccggacactcgtgagatcgctcatcgaaggctggaaacgcacggttgacatgtggatcgctcggcgcagagaggccgtcgtagatcaaacgccccagtccatgggtccgtccagcctggaggatcaggaggatcgaggggcagctttcacccacatggatgaaggcgacctcttcgcaacgccaagcactacgattcggctgtccgaggaaaacccaggttccaagttctccgacgcaacggagggggatggaggcatggtgaacaacaccagcagggattgcggcgagcggtacccatcgaaccaaggggggccagctagaaggcctccgccgatgggccagcagcggtacgatccagggccgtgctggaggcaagaaccgagcagcgggcagacgaaggagcagttcgtcgcggagatgctcgctaggccctcgagtgcggcggggtcgggccccgggagaccgcagcaggcgaggcccaggcagcagcgtcaggaggacgcctcctccccagctcaaggcagcaggccgcagtctgtcggctgcttctgataaaccggtggcgcaggagcaacctgacgcgaactctgtgcgagcgaagctcgagctcgccaagaacgccaagctcgaggcggccaagaggaagctccaggaaggctaccaagagtttgataacgcaaagaagcagagaagcatacagatggttgatccccagaacctgcccaagcaagcaaacggcacccggaatttccaacctagcggcaagccaaggaatggcagcagcaggaattggtagcagttccaattccttttgagcgccaccagggatcatagacttcaaatcccctcctccctctttcttcctttggttcttgatcggctactaaagattttttttagaccatgcgagtacagaaaacagcaataaggctagtttcgaaagtctattgaaagttctggtcaattttgacgaacttgtttgagagctcgtcaatctgcttgtgctgtgtgcctgtgtcctctgtggctttgcagcttccaggcaacaggattctttcgtgtgaacaccattttgacttgcagtgcggcgctggcg

SEQ ID NO: 70505 - DNA, 1126 bp, Zea Mays
ttgaatgctgttttcagtttcaaggcatcgtacaatcatgaatatttttgagaaagagccaaggatccatagagatgtgtttgttgctcccagtgcagcagtcattggggatgttgagattggtcatggatcgtcaatctggtacggatccatattgagaggtgatgtcaacagcattcatattggatctggtactaatatacaagacaattcccttgtacatgtttcaaaagctaacattagcgggaaggtcctcccaaccataattggaagcaacgtgacagtggtgctgtattacatgcatgtaccattgaggatgaagcttttgttggtatgggtgccactctgcttgatggagtggtggttgaaaagcacagcatggttggtgcaggatctcttgttaagcagaatacaaggattccttctggagaggtctgggtcggtaatcctgccaagttcctaaggaagcttacagaagaggagattgcgttcatcgctcaatcagcaaccaactatatcaacctagcccaggtccatgcagccgagaacgccaagagcttcgacgagattgagctcgagaagatgctgaggaagaagtacgcgcacaaagacgaggagtacgactcgatgcttggggtggtccgcgagatcccgccccagctcatccttcccgataacatcctcccacacaatgctcagaaggcggttgcccgctgaaccttttctcaacccatgcttggcgttgttgcctgttgtcttggagcattttgacacgcgttcgttctctgtttttttatgaagcccaataagattgggtcgagcactgttttaggatcgaccgcacacaacaccacctctattttaaactgcaatggacaagaagctcagggtctcatttactcatctttgacttctctctgtggagcacttgtaatcgaagatcgtgccctgttttctgtactatttcaaactgcatgcagactcctgggttccgttgcttttgctttgcttcatagatattcctttggtccttcatacaatgctcgttttatgttcaaggcactattataatttaaggatagttttggaaccttatttttttaagagatttctatctcatttttct

SEQ ID NO: 70506 - DNA, 1113 bp, Zea Mays
ttgaatgctgttttcagtttcaaggcatcgtacaatcatgaatatttttgagaaagagccaaggatccatagagatgtgtttgttgctcccagtgcagcagtcattggggatgttgagattggtcatggatcgtcaatctggtgatgtcaacagcattcatattggatctggtactaatatacaagacaattcccttgtacatgtttcaaaagctaacattagcgggaaggtcctcccaaccataattggaagcaacgtgacagtgggtcacagtgctgtattacatgcatgtaccattgaggatgaagcttttgttggtatgggtgccactctgcttgatggagtggtggttgaaaagcacagcatggttggtgcaggatctcttgttaagcagaatacaaggattccttctggagaggtctgggtcggtaatcctgccaagttcctaaggaagcttacagaagaggagattgcgttcatcgctcaatcagcaaccaactatatcaacctagcccaggtccatgcagccgagaacgccaagagcttcgacgagattgagctcgagaagatgctgaggaagaagtacgcgcacaaagacgaggagtacgactcgatgcttggggtggtccgcgagatcccgccccagctcatccttcccgataacatcctcccacacaatgctcagaaggcggttgcccgctgaaccttttctcaacccatgcttggcgttgttgcctgttgtcttggagcattttgacacgcgttcgttctctgtttttttatgaagcccaataagattgggtcgagcactgttttaggatcgaccgcacacaacaccacctctattttaaactgcaatggacaagaagctcagggtctcatttactcatctttgacttctctctgtggagcacttgtaatcgaagatcgtgccctgttttctgtactatttcaaactgcatgcagactcctgggttccgttgcttttgctttgcttcatagatattcctttggtccttcatacaatgctcgttttatgttcaaggcactattataatttaaggatagttttggaaccttatttttttaagagatttctatctcatttttct

SEQ ID NO: 70507 - DNA, 1007 bp, Zea Mays
ttgaatgctgttttcagtttcaaggcatcgtacaatcatgaatatttttgagaaagagccaaggatccatagagatgtgtttgttgctcccagtgcagcagtcattggggatgttgagattggtcatggatcgtcaatctggtacggatccatattgagaggtcacagtgctgtattacatgcatgtaccattgaggatgaagcttttgttggtatgggtgccactctgcttgatggagtggtggttgaaaagcacagcatggttggtgcaggatctcttgttaagcagaatacaaggattccttctggagaggtctgggtcggtaatcctgccaagttcctaaggaagcttacagaagaggagattgcgttcatcgctcaatcagcaaccaactatatcaacctagcccaggtccatgcagccgagaacgccaagagcttcgacgagattgagctcgagaagatgctgaggaagaagtacgcgcacaaagacgaggagtacgactcgatgcttggggtggtccgcgagatcccgccccagctcatccttcccgataacatcctcccacacaatgctcagaaggcggttgcccgctgaaccttttctcaacccatgcttggcgttgttgcctgttgtcttggagcattttgacacgcgttcgttctctgtttttttatgaagcccaataagattgggtcgagcactgttttaggatcgaccgcacacaacaccacctctattttaaactgcaatggacaagaagctcagggtctcatttactcatctttgacttctctctgtggagcacttgtaatcgaagatcgtgccctgttttctgtactatttcaaactgcatgcagactcctgggttccgttgcttttgctttgcttcatagatattcctttggtccttcatacaatgctcgttttatgttcaaggcactattataatttaaggatagttttggaaccttatttttttaagagatttctatctcatttttct

SEQ ID NO: 70508 - DNA, 1421 bp, Zea Mays
gtctgttctacgccgtcgcggtcacctccagccctagcgccatctgctctgtacccccaccgctaacctcctcagctctggcctgcccgcgctcctcctcgttgcctggatccggcagcccctccatgctcatccgcccctttcccgctctctcctcgaccggctcgctcccgcttgcaaccacccacaccctgttctgctccagagacagtcctggcggcgctgaaggaggagacgcagcagcggatggatgacgcatcgattggaggtcattggtggccactcacgcctcctcagacctcaccctcacttcgtcgtcagcgcaggtttggccaacggcccccgaccggatcgcaggtcctcctcacggtgaggcacagagtcgagccggacatcacaaccatgaccatgaggcatcgtcgcagcagtcggagtcatttttgctgccccctcccgacacctgtaaattttgtatgccttcacgccgtgaagccacatttgcggccattggcaatggctgtatccactgtttcgatccatatatttggtgatgtcccttcttcacctcttgttgggctgcttcaggacaaaatcaataactggagggagacatctcttatattgacatccatccttttcgctgcagttgtgttctggttcattggtgtgtctgaggctgcacaagatgctcttgatcatcttttcaaccaaggccacaatctcgtaacagaaaatgagatttctgatacctttactaggctggttgaaaggctaccacaagtggtacttggaagcgaggagacaaccacactttcacatgctaggatgttgttggctctgaccttttatgctggtccctagtttctgataaatcatcttcactgttctcctgtattgctgctcgtttctttgattgtttgggtttatgcataggtcatagctcacagttttctggttccatggacaagctaattgtatcaaagccactatctatcgggtatctttattcagttgctgagttgaagagtggcgcctattctaaagatacaactaacatatctctgcatgccacgtcaacatttgcagcctccaaaatatctgttatccatgataatgctttgccaaattcattacttggtacagttgaatatgagttgccccatgtgcctccatggtttattcatgctggtatccagaagctttatggggttcttgctggaataattagacttgttggcctatcaacagtgtcagtgggctggtgtggtctgcttagcagcaggtcctacatacatgatgacgacccgcttgcatgtgtccactctgttgctgactcctacacaggcatggcctttcgatgctttcgagctctgcttagcagcaggtccatgaaaaagaccaaagttgaagaccacgcttga

SEQ ID NO: 70509 - DNA, 1761 bp, Zea Mays
ctcgcatcgtcgtcttcgcagataaaaaataaatgaaaccgaacggaaccctatcgcgagttcatcctggcgctgtctgttctacgccgtcgcggtcacctccagccctagcgccatctgctctgtacccccaccgctaacctcctcagctctggcctgcccgcgctcctcctcgttgcctggatccggcagcccctccatgctcatccgcccctttcccgctctctcctcgaccggctcgctcccgcttgcaaccacccacaccctgttctgctccagagacagtcctggcggcgctgaaggaggagacgcagcagcggatggatgacgcatcgattggaggtcattggtggccactcacgcctcctcagacctcaccctcacttcgtcgtcagcgcaggtttggccaacggcccccgaccggatcgcaggtcctcctcacggtgaggcacagagtcgagccggacatcacaaccatgaccatgaggcatcgtcgcagcagtcggagtcatttttgctgccccctcccgacacctgtaaattttgtatgccttcacgccgtgaagccacatttgcggccattggcaatggctgtatccactgtttcgatccatatatttggtgatgtcccttcttcacctcttgttgggctgcttcaggacaaaatcaataactggagggagacatctcttatattgacatccatccttttcgctgcagttgtgttctggttcattggtgtgtctgaggctgcacaagatgctcttgatcatcttttcaaccaaggccacaatctcgtaacagaaaatgagatttctgatacctttactaggctggttgaaaggctaccacaagtggtacttggaagcgaggagacaaccacactttcacatgctaggatgttgttggctctgaccttttatgctggtccctagtttctgataaatcatcttcactgttctcctgtgagctcactctctcttggatgtcctcgacatttcttacatagatatatggttcccctgttgacttttaatttgattccttgtgtggatctgccatttttctgttgactttgaaattgattaccctggcaggtattgctgctcgtttctttgattgtttgggtttatgcataggtcatagctcacagttttctggttccatggacaagctaattgtatcaaagccactatctatcgggtatctttattcagttgctgagttgaagagtggcgcctattctaaagatacaactaacatatctctgcatgccacgtcaacatttgcagcctccaaaatatctgttatccatgataatgctttgccaaattcattacttggtacagttgaatatgagttgccccatgtgcctccatggtttattcatgctggtatccagaagctttatggggttcttgctggaataattagacttgttggcctatcaacagtgtcaggatagcatactcatacagtaatattgttgcatgtcgctcttaacaaatttcatttaggaaccgggccatgttgatgttcaaaagagttgtcagaagttcatgacatctggtatttattatatcttcttttgtagtgggctggtgtggtctgcttagcagcaggtcctacatacatgatgacgacccgcttgcatgtgtccactctgttgctgactcctacacaggcatggcctttcgatgctttcgagctctgcttagcagcaggtccatgaaaaagaccaaagttgaagaccacgcttga

SEQ ID NO: 70510 - DNA, 1258 bp, Zea Mays
gccctccaccgccaccatcagctcgcatcgtcgtcttcgcagagacagtcctggcggcgctgaaggaggagacgcagcagcggatggatgacgcatcgattggaggtcattggtggccactcacgcctcctcagacctcaccctcacttcgtcgtcagcgcaggtttggccaacggcccccgaccggatcgcaggtcctcctcacggtgaggcacagagtcgagccggacatcacaaccatgaccatgaggcatcgtcgcagcagtcggagtcatttttgctgccccctcccgacacctgtaaattttgtatgccttcacgccgtgaagccacatttgcggccattggcaatggctgtatccactgtttcgatccatatatttggtgatgtcccttcttcacctcttgttgggctgcttcaggacaaaatcaataactggagggagacatctcttatattgacatccatccttttcgctgcagttgtgttctggttcattggtgtgtctgaggctgcacaagatgctcttgatcatcttttcaaccaaggccacaatctcgtaacagaaaatgagatttctgatacctttactaggctggttgaaaggctaccacaagtggtacttggaagcgaggagacaaccacactttcacatgctaggatgttgttggctctgaccttttatgctggtccctagtttctgataaatcatcttcactgttctcctgtattgctgctcgtttctttgattgtttgggtttatgcataggtcatagctcacagttttctggttccatggacaagctaattgtatcaaagccactatctatcgggtatctttattcagttgctgagttgaagagtggcgcctattctaaagatacaactaacatatctctgcatgccacgtcaacatttgcagcctccaaaatatctgttatccatgataatgctttgccaaattcattacttggtacagttgaatatgagttgccccatgtgcctccatggtttattcatgctggtatccagaagctttatggggttcttgctggaataattagacttgttggcctatcaacagtgtcagtgggctggtgtggtctgcttagcagcaggtcctacatacatgatgacgacccgcttgcatgtgtccactctgttgctgactcctacacaggcatggcctttcgatgctttcgagctctgcttagcagcaggtccatgaaaaagaccaaagttgaagaccacgcttga

SEQ ID NO: 70511 - DNA, 1599 bp, Zea Mays
gtctgttctacgccgtcgcggtcacctccagccctagcgccatctgctctgtacccccaccgctaacctcctcagctctggcctgcccgcgctcctcctcgttgcctggatccggcagcccctccatgctcatccgcccctttcccgctctctcctcgaccggctcgctcccgcttgcaaccacccacaccctgttctgctccagagacagtcctggcggcgctgaaggaggagacgcagcagcggatggatgacgcatcgattggaggtcattggtggccactcacgcctcctcagacctcaccctcacttcgtcgtcagcgcaggtttggccaacggcccccgaccggatcgcaggtcctcctcacggtgaggcacagcccacagagtcgagccggacatcacaaccatgaccatgaggcatcgtcgcagcagtcggagtcatttttgctgccccctcccgacacctgtaaattttgtatgccttcacgccgtgaagccacatttgcggccattggcaatggctgtatccactgtttcgatccatatatttggtgatgtcccttcttcacctcttgttgggctgcttcaggacaaaatcaataactggagggagacatctcttatattgacatccatccttttcgctgcagttgtgttctggttcattggtgtgtctgaggctgcacaagatgctcttgatcatcttttcaaccaaggccacaatctcgtaacagaaaatgagatttctgatacctttactaggctggttgaaaggctaccacaagtggtacttggaagcgaggagacaaccacactttcacatgctaggatgttgttggctctgaccttttatgctggtcatagctcacagttttctggttccatggacaagctaattgtatcaaagccactatctatcgggtatctttattcagttgctgagttgaagagtggcgcctattctaaagatacaactaacatatctctgcatgccacgtcaacatttgcagcctccaaaatatctgttatccatgataatgctttgccaaattcattacttggtacagttgaatatgagttgccccatgtgcctccatggtttattcatgctggtatccagaagctttatggggttcttgctggaataattagacttgttggcctatcaacagtgtcagtgggctggtgtggtctgcttagcagcaggtagcactacaaccagcaatgtatggatgaattgaaggtagtaaagaacgcatgcaatcttatagaaactctacatcttgaaactggcatgattgacaaagaagctggatgcatcctttggattggtgtcttcttatcatcaagcagtaatgtgaagcaagttcatttgttgactaagaacagatgagcacaaatcagtgaagagttcattgcactagagatggaggatggataggtggtagatttcaatatggctttgatactattgtttctctttacaatctttgtacataacaagaaaaatgacgttgtatgtggatactattgtaattcaagaatttatttctgaataataaatatatttgtttataatttgtgtatgggtttggt

SEQ ID NO: 70512 - DNA, 1679 bp, Zea Mays
gtctgttctacgccgtcgcggtcacctccagccctagcgccatctgctctgtacccccaccgctaacctcctcagctctggcctgcccgcgctcctcctcgttgcctggatccggcagcccctccatgctcatccgcccctttcccgctctctcctcgaccggctcgctcccgcttgcaaccacccacaccctgttctgctccagagacagtcctggcggcgctgaaggaggagacgcagcagcggatggatgacgcatcgattggaggtcattggtggccactcacgcctcctcagacctcaccctcacttcgtcgtcagcgcaggtttggccaacggcccccgaccggatcgcaggtcctcctcacggtgaggcacagcccacagagtcgagccggacatcacaaccatgaccatgaggcatcgtcgcagcagtcggagtcatttttgctgccccctcccgacacctgtaaattttgtatgccttcacgccgtgaagccacatttgcggccattggcaatggctgtatccactgtttcgatccatatatttggtgatgtcccttcttcacctcttgttgggctgcttcaggacaaaatcaataactggagggagacatctcttatattgacatccatccttttcgctgcagttgtgttctggttcattggtgtgtctgaggctgcacaagatgctcttgatcatcttttcaaccaaggccacaatctcgtaacagaaaatgagatttctgatacctttactaggctggttgaaaggctaccacaagtggtacttggaagcgaggagacaaccacactttcacatgctaggatgttgttggctctgaccttttatgctggtccctagtttctgataaatcatcttcactgttctcctgtattgctgctcgtttctttgattgtttgggtttatgcataggtcatagctcacagttttctggttccatggacaagctaattgtatcaaagccactatctatcgggtatctttattcagttgctgagttgaagagtggcgcctattctaaagatacaactaacatatctctgcatgccacgtcaacatttgcagcctccaaaatatctgttatccatgataatgctttgccaaattcattacttggtacagttgaatatgagttgccccatgtgcctccatggtttattcatgctggtatccagaagctttatggggttcttgctggaataattagacttgttggcctatcaacagtgtcagtgggctggtgtggtctgcttagcagcaggtagcactacaaccagcaatgtatggatgaattgaaggtagtaaagaacgcatgcaatcttatagaaactctacatcttgaaactggcatgattgacaaagaagctggatgcatcctttggattggtgtcttcttatcatcaagcagtaatgtgaagcaagttcatttgttgactaagaacagatgagcacaaatcagtgaagagttcattgcactagagatggaggatggataggtggtagatttcaatatggctttgatactattgtttctctttacaatctttgtacataacaagaaaaatgacgttgtatgtggatactattgtaattcaagaatttatttctgaataataaatatatttgtttataatttgtgtatgggtttggt

SEQ ID NO: 70513 - DNA, 1602 bp, Zea Mays
atcgcgagttcatcctggcgctgtctgttctacgccgtcgcggtcacctccagccctagcgccatctgctctgtacccccaccgctaacctcctcagctctggcctgcccgcgctcctcctcgttgcctggatccggcagcccctccatgctcatccgcccctttcccgctctctcctcgaccggctcgctcccgcttgcaaccacccacaccctgttctgctccagagacagtcctggcggcgctgaaggaggagacgcagcagcggatggatgacgcatcgattggaggtcattggtggccactcacgcctcctcagacctcaccctcacttcgtcgtcagcgcaggtttggccaacggcccccgaccggatcgcaggtcctcctcacggtgaggcacagagtcgagccggacatcacaaccatgaccatgaggcatcgtcgcagcagtcggagtcatttttgctgccccctcccgacacctgtaaattttgtatgccttcacgccgtgaagccacatttgcggccattggcaatggctgtatccactgtttcgatccatatatttggtgatgtcccttcttcacctcttgttgggctgcttcaggacaaaatcaataactggagggagacatctcttatattgacatccatccttttcgctgcagttgtgttctggttcattggtgtgtctgaggctgcacaagatgctcttgatcatcttttcaaccaaggccacaatctcgtaacagaaaatgagatttctgatacctttactaggctggttgaaaggctaccacaagtggtacttggaagcgaggagacaaccacactttcacatgctaggatgttgttggctctgaccttttatgctggtcatagctcacagttttctggttccatggacaagctaattgtatcaaagccactatctatcggcctccaaaatatctgttatccatgataatgctttgccaaattcattacttggtacagttgaatatgagttgccccatgtgcctccatggtttattcatgctggtatccagaagctttatggggttcttgctggaataattagacttgttggcctatcaacagtgtcaggaaccgggccatgttgatgttcaaaagagttgtcagaagttcatgacatctggtatttattatatcttcttttgtagtgggctggtgtggtctgcttagcagcaggtagcactacaaccagcaatgtatggatgaattgaaggtagtaaagaacgcatgcaatcttatagaaactctacatcttgaaactggcatgattgacaaagaagctggatgcatcctttggattggtgtcttcttatcatcaagcagtaatgtgaagcaagttcatttgttgactaagaacagatgagcacaaatcagtgaagagttcattgcactagagatggaggatggataggtggtagatttcaatatggctttgatactattgtttctctttacaatctttgtacataacaagaaaaatgacgttgtatgtggatactattgtaattcaagaatttatttctgaataataaatatatttgtttataatttgtgtatgggtttggt

SEQ ID NO: 70514 - DNA, 2209 bp, Zea Mays
catttctccagcactacaacacaaatccccctatagcaacgcatccgtagcaacacatggttttttgcgttgtaaaaagttagcgagcaacacttaatatgcgttgcaaccatcatctgttacgttattagggtgatggcaacgcttaatatgtgttactagcaccatccgttcattaactaggatgtagaaacacttaatatgtgttgctagtggcatctgttgtttaaatagaatgcaacaacacttaatatacattgctagaggaatgtattgattaatatattctcacttattaaaagcagcctttcatgtttttttcttaaacaatccaccgttcgtccaatcctagataaaaaataaatgaaaccgaacggaaccctatcgcgagttcatcctggcgctgtctgttctacgccgtcgcggtcacctccagccctagcgccatctgctctgtacccccaccgctaacctcctcagctctggcctgcccgcgctcctcctcgttgcctggatccggcagcccctccatgctcatccgcccctttcccgctctctcctcgaccggctcgctcccgcttgcaaccacccacaccctgttctgctccagagacagtcctggcggcgctgaaggaggagacgcagcagcggatggatgacgcatcgattggaggtcattggtggccactcacgcctcctcagacctcaccctcacttcgtcgtcagcgcaggtttggccaacggcccccgaccggatcgcaggtcctcctcacggtgaggcacagagtcgagccggacatcacaaccatgaccatgaggcatcgtcgcagcagtcggagtcatttttgctgccccctcccgacacctgtaaattttgtatgccttcacgccgtgaagccacatttgcggccattggcaatggctgtatccactgtttcgatccatatatttggtgatgtcccttcttcacctcttgttgggctgcttcaggacaaaatcaataactggagggagacatctcttatattgacatccatccttttcgctgcagttgtgttctggttcattggtgtgtctgaggctgcacaagatgctcttgatcatcttttcaaccaaggccacaatctcgtaacagaaaatgagatttctgatacctttactaggctggttgaaaggctaccacaagtggtacttggaagcgaggagacaaccacactttcacatgctaggatgttgttggctctgaccttttatgctggtccctagtttctgataaatcatcttcactgttctcctgtgagctcactctctcttggatgtcctcgacatttcttacatagatatatggttcccctgttgacttttaatttgattccttgtgtggatctgccatttttctgttgactttgaaattgattaccctggcaggtattgctgctcgtttctttgattgtttgggtttatgcataggtcatagctcacagttttctggttccatggacaagctaattgtatcaaagccactatctatcgggtatctttattcagttgctgagttgaagagtggcgcctattctaaagatacaactaacatatctctgcatgccacgtcaacatttgcagcctccaaaatatctgttatccatgataatgctttgccaaattcattacttggtacagttgaatatgagttgccccatgtgcctccatggtttattcatgctggtatccagaagctttatggggttcttgctggaataattagacttgttggcctatcaacagtgtcagtgggctggtgtggtctgcttagcagcaggtagcactacaaccagcaatgtatggatgaattgaaggtagtaaagaacgcatgcaatcttatagaaactctacatcttgaaactggcatgattgacaaagaagctggatgcatcctttggattggtgtcttcttatcatcaagcagtaatgtgaagcaagttcatttgttgactaagaacagatgagcacaaatcagtgaagagttcattgcactagagatggaggatggataggtggtagatttcaatatggctttgatactattgtttctctttacaatctttgtacataacaagaaaaatgacgttgtatgtggatactattgtaattcaagaatttatttctgaataataaatatatttgtttataatttgtgtatgggtttggt

SEQ ID NO: 70515 - DNA, 2122 bp, Zea Mays
catttctccagcactacaacacaaatccccctatagcaacgcatccgtagcaacacatggttttttgcgttgtaaaaagttagcgagcaacacttaatatgcgttgcaaccatcatctgttacgttattagggtgatggcaacgcttaatatgtgttactagcaccatccgttcattaactaggatgtagaaacacttaatatgtgttgctagtggcatctgttgtttaaatagaatgcaacaacacttaatatacattgctagaggaatgtattgattaatatattctcacttattaaaagcagcctttcatgtttttttcttaaacaatccaccgttcgtccaatcctagataaaaaataaatgaaaccgaacggaaccctatcgcgagttcatcctggcgctgtctgttctacgccgtcgcggtcacctccagccctagcgccatctgctctgtacccccaccgctaacctcctcagctctggcctgcccgcgctcctcctcgttgcctggatccggcagcccctccatgctcatccgcccctttcccgctctctcctcgaccggctcgctcccgcttgcaaccacccacaccctgttctgctccagagacagtcctggcggcgctgaaggaggagacgcagcagcggatggatgacgcatcgattggaggtcattggtggccactcacgcctcctcagacctcaccctcacttcgtcgtcagcgcaggtttggccaacggcccccgaccggatcgcaggtcctcctcacggtgaggcacagagtcgagccggacatcacaaccatgaccatgaggcatcgtcgcagcagtcggagtcatttttgctgccccctcccgacacctgtaaattttgtatgccttcacgccgtgaagccacatttgcggccattggcaatggctgtatccactgtttcgatccatatatttggtgatgtcccttcttcacctcttgttgggctgcttcaggacaaaatcaataactggagggagacatctcttatattgacatccatccttttcgctgcagttgtgttctggttcattggtgtgtctgaggctgcacaagatgctcttgatcatcttttcaaccaaggccacaatctcgtaacagaaaatgagatttctgatacctttactaggctggttgaaaggctaccacaagtggtacttggaagcgaggagacaaccacactttcacatgctaggatgttgttggctctgaccttttatgctggtccctagtttctgataaatcatcttcactgttctcctgtattgctgctcgtttctttgattgtttgggtttatgcataggtcatagctcacagttttctggttccatggacaagctaattgtatcaaagccactatctatcggcctccaaaatatctgttatccatgataatgctttgccaaattcattacttggtacagttgaatatgagttgccccatgtgcctccatggtttattcatgctggtatccagaagctttatggggttcttgctggaataattagacttgttggcctatcaacagtgtcaggatagcatactcatacagtaatattgttgcatgtcgctcttaacaaatttcatttaggaaccgggccatgttgatgttcaaaagagttgtcagaagttcatgacatctggtatttattatatcttcttttgtagtgggctggtgtggtctgcttagcagcaggtagcactacaaccagcaatgtatggatgaattgaaggtagtaaagaacgcatgcaatcttatagaaactctacatcttgaaactggcatgattgacaaagaagctggatgcatcctttggattggtgtcttcttatcatcaagcagtaatgtgaagcaagttcatttgttgactaagaacagatgagcacaaatcagtgaagagttcattgcactagagatggaggatggataggtggtagatttcaatatggctttgatactattgtttctctttacaatctttgtacataacaagaaaaatgacgttgtatgtggatactattgtaattcaagaatttatttctgaataataaatatatttgtttataatttgtgtatgggtttggt

SEQ ID NO: 70516 - DNA, 2218 bp, Zea Mays
catttctccagcactacaacacaaatccccctatagcaacgcatccgtagcaacacatggttttttgcgttgtaaaaagttagcgagcaacacttaatatgcgttgcaaccatcatctgttacgttattagggtgatggcaacgcttaatatgtgttactagcaccatccgttcattaactaggatgtagaaacacttaatatgtgttgctagtggcatctgttgtttaaatagaatgcaacaacacttaatatacattgctagaggaatgtattgattaatatattctcacttattaaaagcagcctttcatgtttttttcttaaacaatccaccgttcgtccaatcctagataaaaaataaatgaaaccgaacggaaccctatcgcgagttcatcctggcgctgtctgttctacgccgtcgcggtcacctccagccctagcgccatctgctctgtacccccaccgctaacctcctcagctctggcctgcccgcgctcctcctcgttgcctggatccggcagcccctccatgctcatccgcccctttcccgctctctcctcgaccggctcgctcccgcttgcaaccacccacaccctgttctgctccagagacagtcctggcggcgctgaaggaggagacgcagcagcggatggatgacgcatcgattggaggtcattggtggccactcacgcctcctcagacctcaccctcacttcgtcgtcagcgcaggtttggccaacggcccccgaccggatcgcaggtcctcctcacggtgaggcacagcccacagagtcgagccggacatcacaaccatgaccatgaggcatcgtcgcagcagtcggagtcatttttgctgccccctcccgacacctgtaaattttgtatgccttcacgccgtgaagccacatttgcggccattggcaatggctgtatccactgtttcgatccatatatttggtgatgtcccttcttcacctcttgttgggctgcttcaggacaaaatcaataactggagggagacatctcttatattgacatccatccttttcgctgcagttgtgttctggttcattggtgtgtctgaggctgcacaagatgctcttgatcatcttttcaaccaaggccacaatctcgtaacagaaaatgagatttctgatacctttactaggctggttgaaaggctaccacaagtggtacttggaagcgaggagacaaccacactttcacatgctaggatgttgttggctctgaccttttatgctggtccctagtttctgataaatcatcttcactgttctcctgtattgctgctcgtttctttgattgtttgggtttatgcataggtcatagctcacagttttctggttccatggacaagctaattgtatcaaagccactatctatcgggtatctttattcagttgctgagttgaagagtggcgcctattctaaagatacaactaacatatctctgcatgccacgtcaacatttgcagcctccaaaatatctgttatccatgataatgctttgccaaattcattacttggtacagttgaatatgagttgccccatgtgcctccatggtttattcatgctggtatccagaagctttatggggttcttgctggaataattagacttgttggcctatcaacagtgtcaggatagcatactcatacagtaatattgttgcatgtcgctcttaacaaatttcatttaggaaccgggccatgttgatgttcaaaagagttgtcagaagttcatgacatctggtatttattatatcttcttttgtagtgggctggtgtggtctgcttagcagcaggtagcactacaaccagcaatgtatggatgaattgaaggtagtaaagaacgcatgcaatcttatagaaactctacatcttgaaactggcatgattgacaaagaagctggatgcatcctttggattggtgtcttcttatcatcaagcagtaatgtgaagcaagttcatttgttgactaagaacagatgagcacaaatcagtgaagagttcattgcactagagatggaggatggataggtggtagatttcaatatggctttgatactattgtttctctttacaatctttgtacataacaagaaaaatgacgttgtatgtggatactattgtaattcaagaatttatttctgaataataaatatatttgtttataatttgtgtatgggtttggt

SEQ ID NO: 70517 - DNA, 2174 bp, Zea Mays
gtacgcccttccatctcctccatttctccagcactacaacacaaatccccctatagcaacgcatccgtagcaacacatggttttttgcgttgtaaaaagttagcgagcaacacttaatatgcgttgcaaccatcatctgttacgttattagggtgatggcaacgcttaatatgtgttactagcaccatccgttcattaactaggatgtagaaacacttaatatgtgttgctagtggcatctgttgtttaaatagaatgcaacaacacttaatatacattgctagaggaatgtattgattaatatattctcacttattaaaagcagcctttcatgtttttttcttaaacaatccaccgttcgtccaatcctagataaaaaataaatgaaaccgaacggaaccctatcgcgagttcatcctggcgctgtctgttctacgccgtcgcggtcacctccagccctagcgccatctgctctgtacccccaccgctaacctcctcagctctggcctgcccgcgctcctcctcgttgcctggatccggcagcccctccatgctcatccgcccctttcccgctctctcctcgaccggctcgctcccgcttgcaaccacccacaccctgttctgctccagagacagtcctggcggcgctgaaggaggagacgcagcagcggatggatgacgcatcgattggaggtcattggtggccactcacgcctcctcagacctcaccctcacttcgtcgtcagcgcaggtttggccaacggcccccgaccggatcgcaggtcctcctcacggtgaggcacagagtcgagccggacatcacaaccatgaccatgaggcatcgtcgcagcagtcggagtcatttttgctgccccctcccgacacctgtaaattttgtatgccttcacgccgtgaagccacatttgcggccattggcaatggctgtatccactgtttcgatccatatatttggtgatgtcccttcttcacctcttgttgggctgcttcaggacaaaatcaataactggagggagacatctcttatattgacatccatccttttcgctgcagttgtgttctggttcattggtgtgtctgaggctgcacaagatgctcttgatcatcttttcaaccaaggccacaatctcgtaacagaaaatgagatttctgatacctttactaggctggttgaaaggctaccacaagtggtacttggaagcgaggagacaaccacactttcacatgctaggatgttgttggctctgaccttttatgctggtccctagtttctgataaatcatcttcactgttctcctgtattgctgctcgtttctttgattgtttgggtttatgcataggtcatagctcacagttttctggttccatggacaagctaattgtatcaaagccactatctatcgggtatctttattcagttgctgagttgaagagtggcgcctattctaaagatacaactaacatatctctgcatgccacgtcaacatttgcagcctccaaaatatctgttatccatgataatgctttgccaaattcattacttggtacagttgaatatgagttgccccatgtgcctccatggtttattcatgctggtatccagaagctttatggggttcttgctggaataattagacttgttggcctatcaacagtgtcaggaaccgggccatgttgatgttcaaaagagttgtcagaagttcatgacatctggtatttattatatcttcttttgtagtgggctggtgtggtctgcttagcagcaggtagcactacaaccagcaatgtatggatgaattgaaggtagtaaagaacgcatgcaatcttatagaaactctacatcttgaaactggcatgattgacaaagaagctggatgcatcctttggattggtgtcttcttatcatcaagcagtaatgtgaagcaagttcatttgttgactaagaacagatgagcacaaatcagtgaagagttcattgcactagagatggaggatggataggtggtagatttcaatatggctttgatactattgtttctctttacaatctttgtacataacaagaaaaatgacgttgtatgtggatactattgtaattcaagaatttatttctgaataataaatatatttgtttataatttgtgtatgggtttggt

SEQ ID NO: 70518 - DNA, 2254 bp, Zea Mays
ctcgcatcgtcgtcttcgcagagacagtcctggcggcgctgaaggaggagacgcagcagcggatggatgacgcatcgattggaggtcattggtggccactcacgcctcctcagacctcaccctcacttcgtcgtcagcgcaggtttggccaacggcccccgaccggatcgcaggtcctcctcacggtgaggcacagagtcgagccggacatcacaaccatgaccatgaggcatcgtcgcagcagtcggagtcatttttgctgccccctcccgacacctgtaaattttgtatgccttcacgccgtgaagccacatttgcggccattggcaatggctgtatccactgtttcgatccatatatttggtgatgtcccttcttcacctcttgttgggctgcttcaggacaaaatcaataactggagggagacatctcttatattgacatccatccttttcgctgcagttgtgttctggttcattggtgtgtctgaggctgcacaagatgctcttgatcatcttttcaaccaaggccacaatctcgtaacagaaaatgagatttctgatacctttactaggctggttgaaaggctaccacaagtggtacttggaagcgaggagacaaccacactttcacatgctaggatgttgttggctctgaccttttatgctggtccctagtttctgataaatcatcttcactgttctcctgtgagctcactctctcttggatgtcctcgacatttcttacatagatatatggttcccctgttgacttttaatttgattccttgtgtggatctgccatttttctgttgactttgaaattgattaccctggcaggtattgctgctcgtttctttgattgtttgggtttatgcataggtcatagctcacagttttctggttccatggacaagctaattgtatcaaagccactatctatcgggtatctttattcagttgctgagttgaagagtggcgcctattctaaagatacaactaacatatctctgcatgccacgtcaacatttgcagcctccaaaatatctgttatccatgataatgctttgccaaattcattacttggtacagttgaatatgagttgccccatgtgcctccatggtttattcatgctggtatccagaagctttatggggttcttgctggaataattagacttgttggcctatcaacagtgtcaggtaccttgtgaattattttgcttgtcaaatctacgattcatggactgttctattttttcatgctgagtcagtactaaaccaaagatcataacccgttcctaagaggaacccaacaatatgtaactaaaatttattatcagttccattatctttatctgttcatgactttgcttattgtttcctactcaagatggtcgtgcatggagcattatattacaatatgcagttgatgggttcgattccttaaagctaacagtagtggtcactagcccttgaaaaataaattttggatagcagctttgactactattgaagttgatctttttactactttagattgtcgttgatgtaaatgttcttagtggtgctttgagatgactaaggatctatatttgtcttaagatttgtcttttccttacaagtgaagagattgcgtggttcaatgaagtattaacctatgatttatgggccaggtctttgatgagtaccttaacttgcaggatagcatactcatacagtaatattgttgcatgtcgctcttaacaaatttcatttaggaaccgggccatgttgatgttcaaaagagttgtcagaagttcatgacatctggtatttattatatcttcttttgtagtgggctggtgtggtctgcttagcagcaggtagcactacaaccagcaatgtatggatgaattgaaggtagtaaagaacgcatgcaatcttatagaaactctacatcttgaaactggcatgattgacaaagaagctggatgcatcctttggattggtgtcttcttatcatcaagcagtaatgtgaagcaagttcatttgttgactaagaacagatgagcacaaatcagtgaagagttcattgcactagagatggaggatggataggtggtagatttcaatatggctttgatactattgtttctctttacaatctttgtacataacaagaaaaatgacgttgtatgtggatactattgtaattcaagaatttatttctgaataataaatatatttgtttataatttgtgtatgggtttggt

SEQ ID NO: 70519 - DNA, 1580 bp, Zea Mays
ctcgcatcgtcgtcttcgcagagacagtcctggcggcgctgaaggaggagacgcagcagcggatggatgacgcatcgattggaggtcattggtggccactcacgcctcctcagacctcaccctcacttcgtcgtcagcgcaggtttggccaacggcccccgaccggatcgcaggtcctcctcacggtgaggcacagagtcgagccggacatcacaaccatgaccatgaggcatcgtcgcagcagtcggagtcatttttgctgccccctcccgacacctgtaaattttgtatgccttcacgccgtgaagccacatttgcggccattggcaatggctgtatccactgtttcgatccatatatttggtgatgtcccttcttcacctcttgttgggctgcttcaggacaaaatcaataactggagggagacatctcttatattgacatccatccttttcgctgcagttgtgttctggttcattggtgtgtctgaggctgcacaagatgctcttgatcatcttttcaaccaaggccacaatctcgtaacagaaaatgagatttctgatacctttactaggctggttgaaaggctaccacaagtggtacttggaagcgaggagacaaccacactttcacatgctaggatgttgttggctctgaccttttatgctggtccctagtttctgataaatcatcttcactgttctcctgtcatagctcacagttttctggttccatggacaagctaattgtatcaaagccactatctatcgggtatctttattcagttgctgagttgaagagtggcgcctattctaaagatacaactaacatatctctgcatgccacgtcaacatttgcagcctccaaaatatctgttatccatgataatgctttgccaaattcattacttggtacagttgaatatgagttgccccatgtgcctccatggtttattcatgctggtatccagaagctttatggggttcttgctggaataattagacttgttggcctatcaacagtgtcaggatagcatactcatacagtaatattgttgcatgtcgctcttaacaaatttcatttaggaaccgggccatgttgatgttcaaaagagttgtcagaagttcatgacatctggtatttattatatcttcttttgtagtgggctggtgtggtctgcttagcagcaggtagcactacaaccagcaatgtatggatgaattgaaggtagtaaagaacgcatgcaatcttatagaaactctacatcttgaaactggcatgattgacaaagaagctggatgcatcctttggattggtgtcttcttatcatcaagcagtaatgtgaagcaagttcatttgttgactaagaacagatgagcacaaatcagtgaagagttcattgcactagagatggaggatggataggtggtagatttcaatatggctttgatactattgtttctctttacaatctttgtacataacaagaaaaatgacgttgtatgtggatactattgtaattcaagaatttatttctgaataataaatatatttgtttataatttgtgtatgggtttggt

SEQ ID NO: 70520 - DNA, 1837 bp, Zea Mays
ccatcagctcgcatcgtcgtcttcgcagataaaaaataaatgaaaccgaacggaaccctatcgcgagttcatcctggcgctgtctgttctacgccgtcgcggtcacctccagccctagcgccatctgctctgtacccccaccgctaacctcctcagctctggcctgcccgcgctcctcctcgttgcctggatccggcagcccctccatgctcatccgcccctttcccgctctctcctcgaccggctcgctcccgcttgcaaccacccacaccctgttctgctccagagacagtcctggcggcgctgaaggaggagacgcagcagcggatggatgacgcatcgattggaggtcattggtggccactcacgcctcctcagacctcaccctcacttcgtcgtcagcgcaggtttggccaacggcccccgaccggatcgcaggtcctcctcacggtgaggcacagcccacagagtcgagccggacatcacaaccatgaccatgaggcatcgtcgcagcagtcggagtcatttttgctgccccctcccgacacctgtaaattttgtatgccttcacgccgtgaagccacatttgcggccattggcaatggctgtatccactgtttcgatccatatatttggtgatgtcccttcttcacctcttgttgggctgcttcaggacaaaatcaataactggagggagacatctcttatattgacatccatccttttcgctgcagttgtgttctggttcattggtgtgtctgaggctgcacaagatgctcttgatcatcttttcaaccaaggccacaatctcgtaacagaaaatgagatttctgatacctttactaggctggttgaaaggctaccacaagtggtacttggaagcgaggagacaaccacactttcacatgctaggatgttgttggctctgaccttttatgctggtccctagtttctgataaatcatcttcactgttctcctgtattgctgctcgtttctttgattgtttgggtttatgcataggtcatagctcacagttttctggttccatggacaagctaattgtatcaaagccactatctatcgggtatctttattcagttgctgagttgaagagtggcgcctattctaaagatacaactaacatatctctgcatgccacgtcaacatttgcagcctccaaaatatctgttatccatgataatgctttgccaaattcattacttggtacagttgaatatgagttgccccatgtgcctccatggtttattcatgctggtatccagaagctttatggggttcttgctggaataattagacttgttggcctatcaacagtgtcaggaaccgggccatgttgatgttcaaaagagttgtcagaagttcatgacatctggtatttattatatcttcttttgtagtgggctggtgtggtctgcttagcagcaggtagcactacaaccagcaatgtatggatgaattgaaggtagtaaagaacgcatgcaatcttatagaaactctacatcttgaaactggcatgattgacaaagaagctggatgcatcctttggattggtgtcttcttatcatcaagcagtaatgtgaagcaagttcatttgttgactaagaacagatgagcacaaatcagtgaagagttcattgcactagagatggaggatggataggtggtagatttcaatatggctttgatactattgtttctctttacaatctttgtacataacaagaaaaatgacgttgtatgtggatactattgtaattcaagaatttatttctgaataataaatatatttgtttataatttgtgtatgggtttggt

SEQ ID NO: 70521 - DNA, 1898 bp, Zea Mays
ctccaccgccaccatcagctcgcatcgtcgtcttcgcagataaaaaataaatgaaaccgaacggaaccctatcgcgagttcatcctggcgctgtctgttctacgccgtcgcggtcacctccagccctagcgccatctgctctgtacccccaccgctaacctcctcagctctggcctgcccgcgctcctcctcgttgcctggatccggcagcccctccatgctcatccgcccctttcccgctctctcctcgaccggctcgctcccgcttgcaaccacccacaccctgttctgctccagagacagtcctggcggcgctgaaggaggagacgcagcagcggatggatgacgcatcgattggaggtcattggtggccactcacgcctcctcagacctcaccctcacttcgtcgtcagcgcaggtttggccaacggcccccgaccggatcgcaggtcctcctcacggtgaggcacagagtcgagccggacatcacaaccatgaccatgaggcatcgtcgcagcagtcggagtcatttttgctgccccctcccgacacctgtaaattttgtatgccttcacgccgtgaagccacatttgcggccattggcaatggctgtatccactgtttcgatccatatatttggtgatgtcccttcttcacctcttgttgggctgcttcaggacaaaatcaataactggagggagacatctcttatattgacatccatccttttcgctgcagttgtgttctggttcattggtgtgtctgaggctgcacaagatgctcttgatcatcttttcaaccaaggccacaatctcgtaacagaaaatgagatttctgatacctttactaggctggttgaaaggctaccacaagtggtacttggaagcgaggagacaaccacactttcacatgctaggatgttgttggctctgaccttttatgctggtccctagtttctgataaatcatcttcactgttctcctgtattgctgctcgtttctttgattgtttgggtttatgcataggtcatagctcacagttttctggttccatggacaagctaattgtatcaaagccactatctatcgggtatctttattcagttgctgagttgaagagtggcgcctattctaaagatacaactaacatatctctgcatgccacgtcaacatttgcagcctccaaaatatctgttatccatgataatgctttgccaaattcattacttggtacagttgaatatgagttgccccatgtgcctccatggtttattcatgctggtatccagaagctttatggggttcttgctggaataattagacttgttggcctatcaacagtgtcaggatagcatactcatacagtaatattgttgcatgtcgctcttaacaaatttcatttaggaaccgggccatgttgatgttcaaaagagttgtcagaagttcatgacatctggtatttattatatcttcttttgtagtgggctggtgtggtctgcttagcagcaggtagcactacaaccagcaatgtatggatgaattgaaggtagtaaagaacgcatgcaatcttatagaaactctacatcttgaaactggcatgattgacaaagaagctggatgcatcctttggattggtgtcttcttatcatcaagcagtaatgtgaagcaagttcatttgttgactaagaacagatgagcacaaatcagtgaagagttcattgcactagagatggaggatggataggtggtagatttcaatatggctttgatactattgtttctctttacaatctttgtacataacaagaaaaatgacgttgtatgtggatactattgtaattcaagaatttatttctgaataataaatatatttgtttataatttgtgtatgggtttggt

SEQ ID NO: 70522 - DNA, 1469 bp, Zea Mays
ccgccctccaccgccaccatcagctcgcatcgtcgtcttcgcagacacctgtaaattttgtatgccttcacgccgtgaagccacatttgcggccattggcaatggctgtatccactgtttcgatccatatatttggtgatgtcccttcttcacctcttgttgggctgcttcaggacaaaatcaataactggagggagacatctcttatattgacatccatccttttcgctgcagttgtgttctggttcattggtgtgtctgaggctgcacaagatgctcttgatcatcttttcaaccaaggccacaatctcgtaacagaaaatgagatttctgatacctttactaggctggttgaaaggctaccacaagtggtacttggaagcgaggagacaaccacactttcacatgctaggatgttgttggctctgaccttttatgctggtccctagtttctgataaatcatcttcactgttctcctgtgagctcactctctcttggatgtcctcgacatttcttacatagatatatggttcccctgttgacttttaatttgattccttgtgtggatctgccatttttctgttgactttgaaattgattaccctggcaggtattgctgctcgtttctttgattgtttgggtttatgcataggtcatagctcacagttttctggttccatggacaagctaattgtatcaaagccactatctatcgggtatctttattcagttgctgagttgaagagtggcgcctattctaaagatacaactaacatatctctgcatgccacgtcaacatttgcagcctccaaaatatctgttatccatgataatgctttgccaaattcattacttggtacagttgaatatgagttgccccatgtgcctccatggtttattcatgctggtatccagaagctttatggggttcttgctggaataattagacttgttggcctatcaacagtgtcaggaaccgggccatgttgatgttcaaaagagttgtcagaagttcatgacatctggtatttattatatcttcttttgtagtgggctggtgtggtctgcttagcagcaggtagcactacaaccagcaatgtatggatgaattgaaggtagtaaagaacgcatgcaatcttatagaaactctacatcttgaaactggcatgattgacaaagaagctggatgcatcctttggattggtgtcttcttatcatcaagcagtaatgtgaagcaagttcatttgttgactaagaacagatgagcacaaatcagtgaagagttcattgcactagagatggaggatggataggtggtagatttcaatatggctttgatactattgtttctctttacaatctttgtacataacaagaaaaatgacgttgtatgtggatactattgtaattcaagaatttatttctgaataataaatatatttgtttataatttgtgtatgggtttggt

SEQ ID NO: 70523 - DNA, 1588 bp, Zea Mays
ccgccctccaccgccaccatcagctcgcatcgtcgtcttcgcagagacagtcctggcggcgctgaaggaggagacgcagcagcggatggatgacgcatcgattggaggtcattggtggccactcacgcctcctcagacctcaccctcacttcgtcgtcagcgcaggtttggccaacggcccccgaccggatcgcaggtcctcctcacggtgaggcacagagtcgagccggacatcacaaccatgaccatgaggcatcgtcgcagcagtcggagtcatttttgctgccccctcccgacacctgtaaattttgtatgccttcacgccgtgaagccacatttgcggccattggcaatggctgtatccactgtttcgatccatatatttggtgatgtcccttcttcacctcttgttgggctgcttcaggacaaaatcaataactggagggagacatctcttatattgacatccatccttttcgctgcagttgtgttctggttcattggtgtgtctgaggctgcacaagatgctcttgatcatcttttcaaccaaggccacaatctcgtaacagaaaatgagatttctgatacctttactaggctggttgaaaggctaccacaagtggtacttggaagcgaggagacaaccacactttcacatgctaggatgttgttggctctgaccttttatgctggtccctagtttctgataaatcatcttcactgttctcctgtattgctgctcgtttctttgattgtttgggtttatgcataggtcatagctcacagttttctggttccatggacaagctaattgtatcaaagccactatctatcgggtatctttattcagttgctgagttgaagagtggcgcctattctaaagatacaactaacatatctctgcatgccacgtcaacatttgcagcctccaaaatatctgttatccatgataatgctttgccaaattcattacttggtacagttgaatatgagttgccccatgtgcctccatggtttattcatgctggtatccagaagctttatggggttcttgctggaataattagacttgttggcctatcaacagtgtcaggaaccgggccatgttgatgttcaaaagagttgtcagaagttcatgacatctggtatttattatatcttcttttgtagtgggctggtgtggtctgcttagcagcaggtagcactacaaccagcaatgtatggatgaattgaaggtagtaaagaacgcatgcaatcttatagaaactctacatcttgaaactggcatgattgacaaagaagctggatgcatcctttggattggtgtcttcttatcatcaagcagtaatgtgaagcaagttcatttgttgactaagaacagatgagcacaaatcagtgaagagttcattgcactagagatggaggatggataggtggtagatttcaatatggctttgatactattgtttctctttacaatctttgtacataacaagaaaaatgacgttgtatgtggatactattgtaattcaagaatttatttctgaataataaatatatttgtttataatttgtgtatgggtttggt

SEQ ID NO: 70524 - DNA, 1647 bp, Zea Mays
ccccgccctccaccgccaccatcagctcgcatcgtcgtcttcgcagagacagtcctggcggcgctgaaggaggagacgcagcagcggatggatgacgcatcgattggaggtcattggtggccactcacgcctcctcagacctcaccctcacttcgtcgtcagcgcaggtttggccaacggcccccgaccggatcgcaggtcctcctcacggtgaggcacagagtcgagccggacatcacaaccatgaccatgaggcatcgtcgcagcagtcggagtcatttttgctgccccctcccgacacctgtaaattttgtatgccttcacgccgtgaagccacatttgcggccattggcaatggctgtatccactgtttcgatccatatatttggtgatgtcccttcttcacctcttgttgggctgcttcaggacaaaatcaataactggagggagacatctcttatattgacatccatccttttcgctgcagttgtgttctggttcattggtgtgtctgaggctgcacaagatgctcttgatcatcttttcaaccaaggccacaatctcgtaacagaaaatgagatttctgatacctttactaggctggttgaaaggctaccacaagtggtacttggaagcgaggagacaaccacactttcacatgctaggatgttgttggctctgaccttttatgctggtccctagtttctgataaatcatcttcactgttctcctgtattgctgctcgtttctttgattgtttgggtttatgcataggtcatagctcacagttttctggttccatggacaagctaattgtatcaaagccactatctatcgggtatctttattcagttgctgagttgaagagtggcgcctattctaaagatacaactaacatatctctgcatgccacgtcaacatttgcagcctccaaaatatctgttatccatgataatgctttgccaaattcattacttggtacagttgaatatgagttgccccatgtgcctccatggtttattcatgctggtatccagaagctttatggggttcttgctggaataattagacttgttggcctatcaacagtgtcaggatagcatactcatacagtaatattgttgcatgtcgctcttaacaaatttcatttaggaaccgggccatgttgatgttcaaaagagttgtcagaagttcatgacatctggtatttattatatcttcttttgtagtgggctggtgtggtctgcttagcagcaggtagcactacaaccagcaatgtatggatgaattgaaggtagtaaagaacgcatgcaatcttatagaaactctacatcttgaaactggcatgattgacaaagaagctggatgcatcctttggattggtgtcttcttatcatcaagcagtaatgtgaagcaagttcatttgttgactaagaacagatgagcacaaatcagtgaagagttcattgcactagagatggaggatggataggtggtagatttcaatatggctttgatactattgtttctctttacaatctttgtacataacaagaaaaatgacgttgtatgtggatactattgtaattcaagaatttatttctgaataataaatatatttgtttataatttgtgtatgggtttggt

SEQ ID NO: 70525 - DNA, 2415 bp, Zea Mays
ccccgccctccaccgccaccatcagctcgcatcgtcgtcttcgcagtagataaaaaataaatgaaaccgaacggaaccctatcgcgagttcatcctggcgctgtctgttctacgccgtcgcggtcacctccagccctagcgccatctgctctgtacccccaccgctaacctcctcagctctggcctgcccgcgctcctcctcgttgcctggatccggcagcccctccatgctcatccgcccctttcccgctctctcctcgaccggctcgctcccgcttgcaaccacccacaccctgttctgctccagagacagtcctggcggcgctgaaggaggagacgcagcagcggatggatgacgcatcgattggaggtcattggtggccactcacgcctcctcagacctcaccctcacttcgtcgtcagcgcaggtttggccaacggcccccgaccggatcgcaggtcctcctcacggtgaggcacagcccacagagtcgagccggacatcacaaccatgaccatgaggcatcgtcgcagcagtcggagtcatttttgctgccccctcccgacacctgtaaattttgtatgccttcacgccgtgaagccacatttgcggccattggcaatggctgtatccactgtttcgatccatatatttggtgatgtcccttcttcacctcttgttgggctgcttcaggacaaaatcaataactggagggagacatctcttatattgacatccatccttttcgctgcagttgtgttctggttcattggtgtgtctgaggctgcacaagatgctcttgatcatcttttcaaccaaggccacaatctcgtaacagaaaatgagatttctgatacctttactaggctggttgaaaggctaccacaagtggtacttggaagcgaggagacaaccacactttcacatgctaggatgttgttggctctgaccttttatgctggtccctagtttctgataaatcatcttcactgttctcctgtattgctgctcgtttctttgattgtttgggtttatgcataggtcatagctcacagttttctggttccatggacaagctaattgtatcaaagccactatctatcgggtatctttattcagttgctgagttgaagagtggcgcctattctaaagatacaactaacatatctctgcatgccacgtcaacatttgcagcctccaaaatatctgttatccatgataatgctttgccaaattcattacttggtacagttgaatatgagttgccccatgtgcctccatggtttattcatgctggtatccagaagctttatggggttcttgctggaataattagacttgttggcctatcaacagtgtcaggtaccttgtgaattattttgcttgtcaaatctacgattcatggactgttctattttttcatgctgagtcagtactaaaccaaagatcataacccgttcctaagaggaacccaacaatatgtaactaaaatttattatcagttccattatctttatctgttcatgactttgcttattgtttcctactcaagatggtcgtgcatggagcattatattacaatatgcagttgatgggttcgattccttaaagctaacagtagtggtcactagcccttgaaaaataaattttggatagcagctttgactactattgaagttgatctttttactactttagattgtcgttgatgtaaatgttcttagtggtgctttgagatgactaaggatctatatttgtcttaagatttgtcttttccttacaagtgaagagattgcgtggttcaatgaagtattaacctatgatttatgggccaggtctttgatgagtaccttaacttgcaggatagcatactcatacagtaatattgttgcatgtcgctcttaacaaatttcatttaggaaccgggccatgttgatgttcaaaagagttgtcagaagttcatgacatctggtatttattatatcttcttttgtagtgggctggtgtggtctgcttagcagcaggtagcactacaaccagcaatgtatggatgaattgaaggtagtaaagaacgcatgcaatcttatagaaactctacatcttgaaactggcatgattgacaaagaagctggatgcatcctttggattggtgtcttcttatcatcaagcagtaatgtgaagcaagttcatttgttgactaagaacagatgagcacaaatcagtgaagagttcattgcactagagatggaggatggataggtggtagatttcaatatggctttgatactattgtttctctttacaatctttgtacataacaagaaaaatgacgttgtatgtggatactattgtaattcaagaatttatttctgaataataaatatatttgtttataatttgtgtatgggtttggt

SEQ ID NO: 70526 - DNA, 1848 bp, Zea Mays
ccccgccctccaccgccaccatcagctcgcatcgtcgtcttcgcagataaaaaataaatgaaaccgaacggaaccctatcgcgagttcatcctggcgctgtctgttctacgccgtcgcggtcacctccagccctagcgccatctgctctgtacccccaccgctaacctcctcagctctggcctgcccgcgctcctcctcgttgcctggatccggcagcccctccatgctcatccgcccctttcccgctctctcctcgaccggctcgctcccgcttgcaaccacccacaccctgttctgctccagagacagtcctggcggcgctgaaggaggagacgcagcagcggatggatgacgcatcgattggaggtcattggtggccactcacgcctcctcagacctcaccctcacttcgtcgtcagcgcaggtttggccaacggcccccgaccggatcgcaggtcctcctcacggtgaggcacagagtcgagccggacatcacaaccatgaccatgaggcatcgtcgcagcagtcggagtcatttttgctgccccctcccgacacctgtaaattttgtatgccttcacgccgtgaagccacatttgcggccattggcaatggctgtatccactgtttcgatccatatatttggtgatgtcccttcttcacctcttgttgggctgcttcaggacaaaatcaataactggagggagacatctcttatattgacatccatccttttcgctgcagttgtgttctggttcattggtgtgtctgaggctgcacaagatgctcttgatcatcttttcaaccaaggccacaatctcgtaacagaaaatgagatttctgatacctttactaggctggttgaaaggctaccacaagtggtacttggaagcgaggagacaaccacactttcacatgctaggatgttgttggctctgaccttttatgctggtccctagtttctgataaatcatcttcactgttctcctgtattgctgctcgtttctttgattgtttgggtttatgcataggtcatagctcacagttttctggttccatggacaagctaattgtatcaaagccactatctatcgggtatctttattcagttgctgagttgaagagtggcgcctattctaaagatacaactaacatatctctgcatgccacgtcaacatttgcagcctccaaaatatctgttatccatgataatgctttgccaaattcattacttggtacagttgaatatgagttgccccatgtgcctccatggtttattcatgctggtatccagaagctttatggggttcttgctggaataattagacttgttggcctatcaacagtgtcaggaaccgggccatgttgatgttcaaaagagttgtcagaagttcatgacatctggtatttattatatcttcttttgtagtgggctggtgtggtctgcttagcagcaggtagcactacaaccagcaatgtatggatgaattgaaggtagtaaagaacgcatgcaatcttatagaaactctacatcttgaaactggcatgattgacaaagaagctggatgcatcctttggattggtgtcttcttatcatcaagcagtaatgtgaagcaagttcatttgttgactaagaacagatgagcacaaatcagtgaagagttcattgcactagagatggaggatggataggtggtagatttcaatatggctttgatactattgtttctctttacaatctttgtacataacaagaaaaatgacgttgtatgtggatactattgtaattcaagaatttatttctgaataataaatatatttgtttataatttgtgtatgggtttggt

SEQ ID NO: 70527 - DNA, 2040 bp, Zea Mays
ccccgccctccaccgccaccatcagctcgcatcgtcgtcttcgcagtagataaaaaataaatgaaaccgaacggaaccctatcgcgagttcatcctggcgctgtctgttctacgccgtcgcggtcacctccagccctagcgccatctgctctgtacccccaccgctaacctcctcagctctggcctgcccgcgctcctcctcgttgcctggatccggcagcccctccatgctcatccgcccctttcccgctctctcctcgaccggctcgctcccgcttgcaaccacccacaccctgttctgctccagagacagtcctggcggcgctgaaggaggagacgcagcagcggatggatgacgcatcgattggaggtcattggtggccactcacgcctcctcagacctcaccctcacttcgtcgtcagcgcaggtttggccaacggcccccgaccggatcgcaggtcctcctcacggtgaggcacagagtcgagccggacatcacaaccatgaccatgaggcatcgtcgcagcagtcggagtcatttttgctgccccctcccgacacctgtaaattttgtatgccttcacgccgtgaagccacatttgcggccattggcaatggctgtatccactgtttcgatccatatatttggtgatgtcccttcttcacctcttgttgggctgcttcaggacaaaatcaataactggagggagacatctcttatattgacatccatccttttcgctgcagttgtgttctggttcattggtgtgtctgaggctgcacaagatgctcttgatcatcttttcaaccaaggccacaatctcgtaacagaaaatgagatttctgatacctttactaggctggttgaaaggctaccacaagtggtacttggaagcgaggagacaaccacactttcacatgctaggatgttgttggctctgaccttttatgctggtccctagtttctgataaatcatcttcactgttctcctgtgagctcactctctcttggatgtcctcgacatttcttacatagatatatggttcccctgttgacttttaatttgattccttgtgtggatctgccatttttctgttgactttgaaattgattaccctggcaggtattgctgctcgtttctttgattgtttgggtttatgcataggtcatagctcacagttttctggttccatggacaagctaattgtatcaaagccactatctatcgggtatctttattcagttgctgagttgaagagtggcgcctattctaaagatacaactaacatatctctgcatgccacgtcaacatttgcagcctccaaaatatctgttatccatgataatgctttgccaaattcattacttggtacagttgaatatgagttgccccatgtgcctccatggtttattcatgctggtatccagaagctttatggggttcttgctggaataattagacttgttggcctatcaacagtgtcaggatagcatactcatacagtaatattgttgcatgtcgctcttaacaaatttcatttaggaaccgggccatgttgatgttcaaaagagttgtcagaagttcatgacatctggtatttattatatcttcttttgtagtgggctggtgtggtctgcttagcagcaggtagcactacaaccagcaatgtatggatgaattgaaggtagtaaagaacgcatgcaatcttatagaaactctacatcttgaaactggcatgattgacaaagaagctggatgcatcctttggattggtgtcttcttatcatcaagcagtaatgtgaagcaagttcatttgttgactaagaacagatgagcacaaatcagtgaagagttcattgcactagagatggaggatggataggtggtagatttcaatatggctttgatactattgtttctctttacaatctttgtacataacaagaaaaatgacgttgtatgtggatactattgtaattcaagaatttatttctgaataataaatatatttgtttataatttgtgtatgggtttggt

SEQ ID NO: 70528 - DNA, 1912 bp, Zea Mays
ccccgccctccaccgccaccatcagctcgcatcgtcgtcttcgcagataaaaaataaatgaaaccgaacggaaccctatcgcgagttcatcctggcgctgtctgttctacgccgtcgcggtcacctccagccctagcgccatctgctctgtacccccaccgctaacctcctcagctctggcctgcccgcgctcctcctcgttgcctggatccggcagcccctccatgctcatccgcccctttcccgctctctcctcgaccggctcgctcccgcttgcaaccacccacaccctgttctgctccagagacagtcctggcggcgctgaaggaggagacgcagcagcggatggatgacgcatcgattggaggtcattggtggccactcacgcctcctcagacctcaccctcacttcgtcgtcagcgcaggtttggccaacggcccccgaccggatcgcaggtcctcctcacggtgaggcacagcccacagagtcgagccggacatcacaaccatgaccatgaggcatcgtcgcagcagtcggagtcatttttgctgccccctcccgacacctgtaaattttgtatgccttcacgccgtgaagccacatttgcggccattggcaatggctgtatccactgtttcgatccatatatttggtgatgtcccttcttcacctcttgttgggctgcttcaggacaaaatcaataactggagggagacatctcttatattgacatccatccttttcgctgcagttgtgttctggttcattggtgtgtctgaggctgcacaagatgctcttgatcatcttttcaaccaaggccacaatctcgtaacagaaaatgagatttctgatacctttactaggctggttgaaaggctaccacaagtggtacttggaagcgaggagacaaccacactttcacatgctaggatgttgttggctctgaccttttatgctggtccctagtttctgataaatcatcttcactgttctcctgtattgctgctcgtttctttgattgtttgggtttatgcataggtcatagctcacagttttctggttccatggacaagctaattgtatcaaagccactatctatcgggtatctttattcagttgctgagttgaagagtggcgcctattctaaagatacaactaacatatctctgcatgccacgtcaacatttgcagcctccaaaatatctgttatccatgataatgctttgccaaattcattacttggtacagttgaatatgagttgccccatgtgcctccatggtttattcatgctggtatccagaagctttatggggttcttgctggaataattagacttgttggcctatcaacagtgtcaggatagcatactcatacagtaatattgttgcatgtcgctcttaacaaatttcatttaggaaccgggccatgttgatgttcaaaagagttgtcagaagttcatgacatctggtatttattatatcttcttttgtagtgggctggtgtggtctgcttagcagcaggtagcactacaaccagcaatgtatggatgaattgaaggtagtaaagaacgcatgcaatcttatagaaactctacatcttgaaactggcatgattgacaaagaagctggatgcatcctttggattggtgtcttcttatcatcaagcagtaatgtgaagcaagttcatttgttgactaagaacagatgagcacaaatcagtgaagagttcattgcactagagatggaggatggataggtggtagatttcaatatggctttgatactattgtttctctttacaatctttgtacataacaagaaaaatgacgttgtatgtggatactattgtaattcaagaatttatttctgaataataaatatatttgtttataatttgtgtatgggtttggt

SEQ ID NO: 70529 - DNA, 2586 bp, Zea Mays
aaccccgccctccaccgccaccatcagctcgcatcgtcgtcttcgcagcctttcatgtttttttcttaaacaatccaccgttcgtccaatcctagataaaaaataaatgaaaccgaacggaaccctatcgcgagttcatcctggcgctgtctgttctacgccgtcgcggtcacctccagccctagcgccatctgctctgtacccccaccgctaacctcctcagctctggcctgcccgcgctcctcctcgttgcctggatccggcagcccctccatgctcatccgcccctttcccgctctctcctcgaccggctcgctcccgcttgcaaccacccacaccctgttctgctccagagacagtcctggcggcgctgaaggaggagacgcagcagcggatggatgacgcatcgattggaggtcattggtggccactcacgcctcctcagacctcaccctcacttcgtcgtcagcgcaggtttggccaacggcccccgaccggatcgcaggtcctcctcacggtgaggcacagagtcgagccggacatcacaaccatgaccatgaggcatcgtcgcagcagtcggagtcatttttgctgccccctcccgacacctgtaaattttgtatgccttcacgccgtgaagccacatttgcggccattggcaatggctgtatccactgtttcgatccatatatttggtgatgtcccttcttcacctcttgttgggctgcttcaggacaaaatcaataactggagggagacatctcttatattgacatccatccttttcgctgcagttgtgttctggttcattggtgtgtctgaggctgcacaagatgctcttgatcatcttttcaaccaaggccacaatctcgtaacagaaaatgagatttctgatacctttactaggctggttgaaaggctaccacaagtggtacttggaagcgaggagacaaccacactttcacatgctaggatgttgttggctctgaccttttatgctggtccctagtttctgataaatcatcttcactgttctcctgtgagctcactctctcttggatgtcctcgacatttcttacatagatatatggttcccctgttgacttttaatttgattccttgtgtggatctgccatttttctgttgactttgaaattgattaccctggcaggtattgctgctcgtttctttgattgtttgggtttatgcataggtcatagctcacagttttctggttccatggacaagctaattgtatcaaagccactatctatcgggtatctttattcagttgctgagttgaagagtggcgcctattctaaagatacaactaacatatctctgcatgccacgtcaacatttgcagcctccaaaatatctgttatccatgataatgctttgccaaattcattacttggtacagttgaatatgagttgccccatgtgcctccatggtttattcatgctggtatccagaagctttatggggttcttgctggaataattagacttgttggcctatcaacagtgtcaggtaccttgtgaattattttgcttgtcaaatctacgattcatggactgttctattttttcatgctgagtcagtactaaaccaaagatcataacccgttcctaagaggaacccaacaatatgtaactaaaatttattatcagttccattatctttatctgttcatgactttgcttattgtttcctactcaagatggtcgtgcatggagcattatattacaatatgcagttgatgggttcgattccttaaagctaacagtagtggtcactagcccttgaaaaataaattttggatagcagctttgactactattgaagttgatctttttactactttagattgtcgttgatgtaaatgttcttagtggtgctttgagatgactaaggatctatatttgtcttaagatttgtcttttccttacaagtgaagagattgcgtggttcaatgaagtattaacctatgatttatgggccaggtctttgatgagtaccttaacttgcaggatagcatactcatacagtaatattgttgcatgtcgctcttaacaaatttcatttaggaaccgggccatgttgatgttcaaaagagttgtcagaagttcatgacatctggtatttattatatcttcttttgtagtgggctggtgtggtctgcttagcagcaggtagcactacaaccagcaatgtatggatgaattgaaggtagtaaagaacgcatgcaatcttatagaaactctacatcttgaaactggcatgattgacaaagaagctggatgcatcctttggattggtgtcttcttatcatcaagcagtaatgtgaagcaagttcatttgttgactaagaacagatgagcacaaatcagtgaagagttcattgcactagagatggaggatggataggtggtagatttcaatatggctttgatactattgtttctctttacaatctttgtacataacaagaaaaatgacgttgtatgtggatactattgtaattcaagaatttatttctgaataataaatatatttgtttataatttgtgtatgggtttggt

SEQ ID NO: 70530 - DNA, 2157 bp, Zea Mays
gaaccccgccctccaccgccaccatcagctcgcatcgtcgtcttcgcagagacagtcctggcggcgctgaaggaggagacgcagcagcggatggatgacgcatcgattggaggtcattggtggccactcacgcctcctcagacctcaccctcacttcgtcgtcagcgcaggtttggccaacggcccccgaccggatcgcaggtcctcctcacggtgaggcacagcccacagagtcgagccggacatcacaaccatgaccatgaggcatcgtcgcagcagtcggagtcatttttgctgccccctcccgacacctgtaaattttgtatgccttcacgccgtgaagccacatttgcggccattggcaatggctgtatccactgtttcgatccatatatttggtgatgtcccttcttcacctcttgttgggctgcttcaggacaaaatcaataactggagggagacatctcttatattgacatccatccttttcgctgcagttgtgttctggttcattggtgtgtctgaggctgcacaagatgctcttgatcatcttttcaaccaaggccacaatctcgtaacagaaaatgagatttctgatacctttactaggctggttgaaaggctaccacaagtggtacttggaagcgaggagacaaccacactttcacatgctaggatgttgttggctctgaccttttatgctggtccctagtttctgataaatcatcttcactgttctcctgtattgctgctcgtttctttgattgtttgggtttatgcataggtcatagctcacagttttctggttccatggacaagctaattgtatcaaagccactatctatcgggtatctttattcagttgctgagttgaagagtggcgcctattctaaagatacaactaacatatctctgcatgccacgtcaacatttgcagcctccaaaatatctgttatccatgataatgctttgccaaattcattacttggtacagttgaatatgagttgccccatgtgcctccatggtttattcatgctggtatccagaagctttatggggttcttgctggaataattagacttgttggcctatcaacagtgtcaggtaccttgtgaattattttgcttgtcaaatctacgattcatggactgttctattttttcatgctgagtcagtactaaaccaaagatcataacccgttcctaagaggaacccaacaatatgtaactaaaatttattatcagttccattatctttatctgttcatgactttgcttattgtttcctactcaagatggtcgtgcatggagcattatattacaatatgcagttgatgggttcgattccttaaagctaacagtagtggtcactagcccttgaaaaataaattttggatagcagctttgactactattgaagttgatctttttactactttagattgtcgttgatgtaaatgttcttagtggtgctttgagatgactaaggatctatatttgtcttaagatttgtcttttccttacaagtgaagagattgcgtggttcaatgaagtattaacctatgatttatgggccaggtctttgatgagtaccttaacttgcaggatagcatactcatacagtaatattgttgcatgtcgctcttaacaaatttcatttaggaaccgggccatgttgatgttcaaaagagttgtcagaagttcatgacatctggtatttattatatcttcttttgtagtgggctggtgtggtctgcttagcagcaggtagcactacaaccagcaatgtatggatgaattgaaggtagtaaagaacgcatgcaatcttatagaaactctacatcttgaaactggcatgattgacaaagaagctggatgcatcctttggattggtgtcttcttatcatcaagcagtaatgtgaagcaagttcatttgttgactaagaacagatgagcacaaatcagtgaagagttcattgcactagagatggaggatggataggtggtagatttcaatatggctttgatactattgtttctctttacaatctttgtacataacaagaaaaatgacgttgtatgtggatactattgtaattcaagaatttatttctgaataataaatatatttgtttataatttgtgtatgggtttggt

SEQ ID NO: 70531 - DNA, 1956 bp, Zea Mays
tgaaccccgccctccaccgccaccatcagctcgcatcgtcgtcttcgcagcctttcatgtttttttcttaaacaatccaccgttcgtccaatcctagataaaaaataaatgaaaccgaacggaaccctatcgcgagttcatcctggcgctgtctgttctacgccgtcgcggtcacctccagccctagcgccatctgctctgtacccccaccgctaacctcctcagctctggcctgcccgcgctcctcctcgttgcctggatccggcagcccctccatgctcatccgcccctttcccgctctctcctcgaccggctcgctcccgcttgcaaccacccacaccctgttctgctccagagacagtcctggcggcgctgaaggaggagacgcagcagcggatggatgacgcatcgattggaggtcattggtggccactcacgcctcctcagacctcaccctcacttcgtcgtcagcgcaggtttggccaacggcccccgaccggatcgcaggtcctcctcacggtgaggcacagagtcgagccggacatcacaaccatgaccatgaggcatcgtcgcagcagtcggagtcatttttgctgccccctcccgacacctgtaaattttgtatgccttcacgccgtgaagccacatttgcggccattggcaatggctgtatccactgtttcgatccatatatttggtgatgtcccttcttcacctcttgttgggctgcttcaggacaaaatcaataactggagggagacatctcttatattgacatccatccttttcgctgcagttgtgttctggttcattggtgtgtctgaggctgcacaagatgctcttgatcatcttttcaaccaaggccacaatctcgtaacagaaaatgagatttctgatacctttactaggctggttgaaaggctaccacaagtggtacttggaagcgaggagacaaccacactttcacatgctaggatgttgttggctctgaccttttatgctggtccctagtttctgataaatcatcttcactgttctcctgtattgctgctcgtttctttgattgtttgggtttatgcataggtcatagctcacagttttctggttccatggacaagctaattgtatcaaagccactatctatcgggtatctttattcagttgctgagttgaagagtggcgcctattctaaagatacaactaacatatctctgcatgccacgtcaacatttgcagcctccaaaatatctgttatccatgataatgctttgccaaattcattacttggtacagttgaatatgagttgccccatgtgcctccatggtttattcatgctggtatccagaagctttatggggttcttgctggaataattagacttgttggcctatcaacagtgtcaggatagcatactcatacagtaatattgttgcatgtcgctcttaacaaatttcatttaggaaccgggccatgttgatgttcaaaagagttgtcagaagttcatgacatctggtatttattatatcttcttttgtagtgggctggtgtggtctgcttagcagcaggtagcactacaaccagcaatgtatggatgaattgaaggtagtaaagaacgcatgcaatcttatagaaactctacatcttgaaactggcatgattgacaaagaagctggatgcatcctttggattggtgtcttcttatcatcaagcagtaatgtgaagcaagttcatttgttgactaagaacagatgagcacaaatcagtgaagagttcattgcactagagatggaggatggataggtggtagatttcaatatggctttgatactattgtttctctttacaatctttgtacataacaagaaaaatgacgttgtatgtggatactattgtaattcaagaatttatttctgaataataaatatatttgtttataatttgtgtatgggtttggt

SEQ ID NO: 70532 - DNA, 2411 bp, Zea Mays
tttgaaccccgccctccaccgccaccatcagctcgcatcgtcgtcttcgcagataaaaaataaatgaaaccgaacggaaccctatcgcgagttcatcctggcgctgtctgttctacgccgtcgcggtcacctccagccctagcgccatctgctctgtacccccaccgctaacctcctcagctctggcctgcccgcgctcctcctcgttgcctggatccggcagcccctccatgctcatccgcccctttcccgctctctcctcgaccggctcgctcccgcttgcaaccacccacaccctgttctgctccagagacagtcctggcggcgctgaaggaggagacgcagcagcggatggatgacgcatcgattggaggtcattggtggccactcacgcctcctcagacctcaccctcacttcgtcgtcagcgcaggtttggccaacggcccccgaccggatcgcaggtcctcctcacggtgaggcacagagtcgagccggacatcacaaccatgaccatgaggcatcgtcgcagcagtcggagtcatttttgctgccccctcccgacacctgtaaattttgtatgccttcacgccgtgaagccacatttgcggccattggcaatggctgtatccactgtttcgatccatatatttggtgatgtcccttcttcacctcttgttgggctgcttcaggacaaaatcaataactggagggagacatctcttatattgacatccatccttttcgctgcagttgtgttctggttcattggtgtgtctgaggctgcacaagatgctcttgatcatcttttcaaccaaggccacaatctcgtaacagaaaatgagatttctgatacctttactaggctggttgaaaggctaccacaagtggtacttggaagcgaggagacaaccacactttcacatgctaggatgttgttggctctgaccttttatgctggtccctagtttctgataaatcatcttcactgttctcctgtattgctgctcgtttctttgattgtttgggtttatgcataggtcatagctcacagttttctggttccatggacaagctaattgtatcaaagccactatctatcgggtatctttattcagttgctgagttgaagagtggcgcctattctaaagatacaactaacatatctctgcatgccacgtcaacatttgcagcctccaaaatatctgttatccatgataatgctttgccaaattcattacttggtacagttgaatatgagttgccccatgtgcctccatggtttattcatgctggtatccagaagctttatggggttcttgctggaataattagacttgttggcctatcaacagtgtcaggtaccttgtgaattattttgcttgtcaaatctacgattcatggactgttctattttttcatgctgagtcagtactaaaccaaagatcataacccgttcctaagaggaacccaacaatatgtaactaaaatttattatcagttccattatctttatctgttcatgactttgcttattgtttcctactcaagatggtcgtgcatggagcattatattacaatatgcagttgatgggttcgattccttaaagctaacagtagtggtcactagcccttgaaaaataaattttggatagcagctttgactactattgaagttgatctttttactactttagattgtcgttgatgtaaatgttcttagtggtgctttgagatgactaaggatctatatttgtcttaagatttgtcttttccttacaagtgaagagattgcgtggttcaatgaagtattaacctatgatttatgggccaggtctttgatgagtaccttaacttgcaggatagcatactcatacagtaatattgttgcatgtcgctcttaacaaatttcatttaggaaccgggccatgttgatgttcaaaagagttgtcagaagttcatgacatctggtatttattatatcttcttttgtagtgggctggtgtggtctgcttagcagcaggtagcactacaaccagcaatgtatggatgaattgaaggtagtaaagaacgcatgcaatcttatagaaactctacatcttgaaactggcatgattgacaaagaagctggatgcatcctttggattggtgtcttcttatcatcaagcagtaatgtgaagcaagttcatttgttgactaagaacagatgagcacaaatcagtgaagagttcattgcactagagatggaggatggataggtggtagatttcaatatggctttgatactattgtttctctttacaatctttgtacataacaagaaaaatgacgttgtatgtggatactattgtaattcaagaatttatttctgaataataaatatatttgtttataatttgtgtatgggtttggt

SEQ ID NO: 70533 - DNA, 1659 bp, Zea Mays
gtttgaaccccgccctccaccgccaccatcagctcgcatcgtcgtcttcgcagagacagtcctggcggcgctgaaggaggagacgcagcagcggatggatgacgcatcgattggaggtcattggtggccactcacgcctcctcagacctcaccctcacttcgtcgtcagcgcaggtttggccaacggcccccgaccggatcgcaggtcctcctcacggtgaggcacagcccacagagtcgagccggacatcacaaccatgaccatgaggcatcgtcgcagcagtcggagtcatttttgctgccccctcccgacacctgtaaattttgtatgccttcacgccgtgaagccacatttgcggccattggcaatggctgtatccactgtttcgatccatatatttggtgatgtcccttcttcacctcttgttgggctgcttcaggacaaaatcaataactggagggagacatctcttatattgacatccatccttttcgctgcagttgtgttctggttcattggtgtgtctgaggctgcacaagatgctcttgatcatcttttcaaccaaggccacaatctcgtaacagaaaatgagatttctgatacctttactaggctggttgaaaggctaccacaagtggtacttggaagcgaggagacaaccacactttcacatgctaggatgttgttggctctgaccttttatgctggtccctagtttctgataaatcatcttcactgttctcctgtgagctcactctctcttggatgtcctcgacatttcttacatagatatatggttcccctgttgacttttaatttgattccttgtgtggatctgccatttttctgttgactttgaaattgattaccctggcaggtattgctgctcgtttctttgattgtttgggtttatgcataggtcatagctcacagttttctggttccatggacaagctaattgtatcaaagccactatctatcgggtatctttattcagttgctgagttgaagagtggcgcctattctaaagatacaactaacatatctctgcatgccacgtcaacatttgcagcctccaaaatatctgttatccatgataatgctttgccaaattcattacttggtacagttgaatatgagttgccccatgtgcctccatggtttattcatgctggtatccagaagctttatggggttcttgctggaataattagacttgttggcctatcaacagtgtcagtgggctggtgtggtctgcttagcagcaggtagcactacaaccagcaatgtatggatgaattgaaggtagtaaagaacgcatgcaatcttatagaaactctacatcttgaaactggcatgattgacaaagaagctggatgcatcctttggattggtgtcttcttatcatcaagcagtaatgtgaagcaagttcatttgttgactaagaacagatgagcacaaatcagtgaagagttcattgcactagagatggaggatggataggtggtagatttcaatatggctttgatactattgtttctctttacaatctttgtacataacaagaaaaatgacgttgtatgtggatactattgtaattcaagaatttatttctgaataataaatatatttgtttataatttgtgtatgggtttggt

SEQ ID NO: 70534 - DNA, 1323 bp, Zea Mays
gtttgaaccccgccctccaccgccaccatcagctcgcatcgtcgtcttcgcaggtttggccaacggcccccgaccggatcgcaggtcctcctcacggtgaggcacaggtgaagtcgagccggacatcacaaccatgaccatgaggcatcgtcgcagcagtcggagtcatttttgctgccccctcccgacacctgtaaattttgtatgccttcacgccgtgaagccacatttgcggccattggcaatggctgtatccactgtttcgatccatatatttggtgatgtcccttcttcacctcttgttgggctgcttcaggacaaaatcaataactggagggagacatctcttatattgacatccatccttttcgctgcagttgtgttctggttcattggtgtgtctgaggctgcacaagatgctcttgatcatcttttcaaccaaggccacaatctcgtaacagaaaatgagatttctgatacctttactaggctggttgaaaggctaccacaagtggtacttggaagcgaggagacaaccacactttcacatgctaggatgttgttggctctgaccttttatgctggtcatagctcacagttttctggttccatggacaagctaattgtatcaaagccactatctatcgggtatctttattcagttgctgagttgaagagtggcgcctattctaaagatacaactaacatatctctgcatgccacgtcaacatttgcagcctccaaaatatctgttatccatgataatgctttgccaaattcattacttggtacagttgaatatgagttgccccatgtgcctccatggtttattcatgctggtatccagaagctttatggggttcttgctggaataattagacttgttggcctatcaacagtgtcagtgggctggtgtggtctgcttagcagcaggtagcactacaaccagcaatgtatggatgaattgaaggtagtaaagaacgcatgcaatcttatagaaactctacatcttgaaactggcatgattgacaaagaagctggatgcatcctttggattggtgtcttcttatcatcaagcagtaatgtgaagcaagttcatttgttgactaagaacagatgagcacaaatcagtgaagagttcattgcactagagatggaggatggataggtggtagatttcaatatggctttgatactattgtttctctttacaatctttgtacataacaagaaaaatgacgttgtatgtggatactattgtaattcaagaatttatttctgaataataaatatatttgtttataatttgtgtatgggtttggt

SEQ ID NO: 70535 - DNA, 1699 bp, Zea Mays
ggtttgaaccccgccctccaccgccaccatcagctcgcatcgtcgtcttcgcagataaaaaataaatgaaaccgaacggaaccctatcgcgagttcatcctggcgctgtctgttctacgccgtcgcggtcacctccagccctagcgccatctgctctgtacccccaccgctaacctcctcagctctggcctgcccgcgctcctcctcgttgcctggatccggcagcccctccatgctcatccgcccctttcccgctctctcctcgaccggctcgctcccgcttgcaaccacccacaccctgttctgctccagagacagtcctggcggcgctgaaggaggagacgcagcagcggatggatgacgcatcgattggaggtcattggtggccactcacgcctcctcagacctcaccctcacttcgtcgtcagcgcaggtttggccaacggcccccgaccggatcgcaggtcctcctcacggtgaggcacagagtcgagccggacatcacaaccatgaccatgaggcatcgtcgcagcagtcggagtcatttttgctgccccctcccgacacctgtaaattttgtatgccttcacgccgtgaagccacatttgcggccattggcaatggctgtatccactgtttcgatccatatatttggtgatgtcccttcttcacctcttgttgggctgcttcaggacaaaatcaataactggagggagacatctcttatattgacatccatccttttcgctgcagttgtgttctggttcattggtgtgtctgaggctgcacaagatgctcttgatcatcttttcaaccaaggccacaatctcgtaacagaaaatgagatttctgatacctttactaggctggttgaaaggctaccacaagtggtacttggaagcgaggagacaaccacactttcacatgctaggatgttgttggctctgaccttttatgctggtcatagctcacagttttctggttccatggacaagctaattgtatcaaagccactatctatcgggtatctttattcagttgctgagttgaagagtggcgcctattctaaagatacaactaacatatctctgcatgccacgtcaacatttgcagcctccaaaatatctgttatccatgataatgctttgccaaattcattacttggtacagttgaatatgagttgccccatgtgcctccatggtttattcatgctggtatccagaagctttatggggttcttgctggaataattagacttgttggcctatcaacagtgtcagtgggctggtgtggtctgcttagcagcaggtagcactacaaccagcaatgtatggatgaattgaaggtagtaaagaacgcatgcaatcttatagaaactctacatcttgaaactggcatgattgacaaagaagctggatgcatcctttggattggtgtcttcttatcatcaagcagtaatgtgaagcaagttcatttgttgactaagaacagatgagcacaaatcagtgaagagttcattgcactagagatggaggatggataggtggtagatttcaatatggctttgatactattgtttctctttacaatctttgtacataacaagaaaaatgacgttgtatgtggatactattgtaattcaagaatttatttctgaataataaatatatttgtttataatttgtgtatgggtttggt

SEQ ID NO: 70536 - DNA, 1611 bp, Zea Mays
ctttagggtttgaaccccgccctccaccgccaccatcagctcgcatcgtcgtcttcgcagagacagtcctggcggcgctgaaggaggagacgcagcagcggatggatgacgcatcgattggaggtcattggtggccactcacgcctcctcagacctcaccctcacttcgtcgtcagcgcaggtttggccaacggcccccgaccggatcgcaggtcctcctcacggtgaggcacagcccacagagtcgagccggacatcacaaccatgaccatgaggcatcgtcgcagcagtcggagtcatttttgctgccccctcccgacacctgtaaattttgtatgccttcacgccgtgaagccacatttgcggccattggcaatggctgtatccactgtttcgatccatatatttggtgatgtcccttcttcacctcttgttgggctgcttcaggacaaaatcaataactggagggagacatctcttatattgacatccatccttttcgctgcagttgtgttctggttcattggtgtgtctgaggctgcacaagatgctcttgatcatcttttcaaccaaggccacaatctcgtaacagaaaatgagatttctgatacctttactaggctggttgaaaggctaccacaagtggtacttggaagcgaggagacaaccacactttcacatgctaggatgttgttggctctgaccttttatgctggtccctagtttctgataaatcatcttcactgttctcctgtattgctgctcgtttctttgattgtttgggtttatgcataggtcatagctcacagttttctggttccatggacaagctaattgtatcaaagccactatctatcgggtatctttattcagttgctgagttgaagagtggcgcctattctaaagatacaactaacatatctctgcatgccacgtcaacatttgcagcctccaaaatatctgttatccatgataatgctttgccaaattcattacttggtacagttgaatatgagttgccccatgtgcctccatggtttattcatgctggtatccagaagctttatggggttcttgctggaataattagacttgttggcctatcaacagtgtcaggaaccgggccatgttgatgttcaaaagagttgtcagaagttcatgacatctggtatttattatatcttcttttgtagtgggctggtgtggtctgcttagcagcaggtagcactacaaccagcaatgtatggatgaattgaaggtagtaaagaacgcatgcaatcttatagaaactctacatcttgaaactggcatgattgacaaagaagctggatgcatcctttggattggtgtcttcttatcatcaagcagtaatgtgaagcaagttcatttgttgactaagaacagatgagcacaaatcagtgaagagttcattgcactagagatggaggatggataggtggtagatttcaatatggctttgatactattgtttctctttacaatctttgtacataacaagaaaaatgacgttgtatgtggatactattgtaattcaagaatttatttctgaataataaatatatttgtttataatttgtgtatgggtttggt

SEQ ID NO: 70537 - DNA, 1250 bp, Zea Mays
cgacagcaacgcctcattgaattcgtaatggaagcaggcgccggggaagcagcaccaagcgcgccgcgcagactgaccctgccgtggaaggtgcggctcctgctcctctgcctcgatgtcgtcgccggtctctcgatgcgtcgcgacggcaccatcaaccgctccatcttcaacctcttcgaccttcgtgccaccgccagcacgcgcccggacaggcagggcgtccggtccgccgacgtggacgcgtcgcgcggcctgtgggcgcgcgtgttctggccgtcgccggagtcgtccgcggccccgctcccagtcgtggtatacttccacggcggcgccttcacgctgctctctgcggcctcgtacgtctacgacgccatgtgccgccggttctgccgcgagctgggcgccgtcgtcgtgtccgtcaactaccgcctcgcacccgagcaccgctggcccgccgcgtacgaggacggcgtcgccatgcttcgatacctcgcctccgcgggtctccccgacagcgtcgacgtccccgtggacctctcccgctgcttcctcgccggggacagcgccggcgccaacatcgcccaccacgtggcgcagcgctggacgacggcctcctccccgccgcggtccatccccgtccacctcgctggcgccatcctggtgcagccgtactttggcggcgaggagcggacggaagctgaggtcaggctggatgggaacgtgccggtggtgaccgtgcgtggctcggactggatgtggcgggcgttcctgccggaaggcgccgatcggaaccactccgccgcgcacgtgacagacgacaacgccgacctggcggacggctttccgccggtgatggtggtgatcggtggcttcgacccgctgcaggagtggcagaggcggtacgccgacgtgctgcggaggagggggaaggaggtaagggtggtggagttcccggacgccattcacactttcttcctcttccccgagctcaccgatcatggtacgctcgtggaggcgatgaaggcgttcatacgcgagcaacgcatctgatctaattctgcctcacggtcacggatcaccaacctacgtggacctacatggtccgtgcaaataattttgtttcccatgcacgtaatggtccctacatggtccgtgcaaataatttctctataaaccactattcaagtctcccatatatttattcagttcatcgagcatctcttctagatcttaattctggatcgtca

SEQ ID NO: 70538 - DNA, 1042 bp, Zea Mays
aaatgatcgtgatggaggtttctatttagcgccttttgctagaccacgatctcaaggaatcagatggaattcgacctttcacaatgcctcttatgaagcttgcttgcactgcattggagagagttcctttgacacgcagaaaagtgattgacaatttgatgaagaaatttcatcaagatttggtattttgccgctcacctgctgatagtgaactgaccattggagttcatcaaaagcagaaggagaaaatcgatccgattctggagtgggtagacactgaatttgggttcaaacccgttgtctacacaagcttctttggggggaagcaagacgagggccttgctaaagctgtagaaactgttctgaagaaagcaactgactgtgagttggcatccattgatgctatggctgcagcagcccattccttggtgatccctcttgcaatatttagagaaaggttgggtattgaggaggccattgagttgatcaggcttgaagaagaccaccaggttgatcgatggggcttggtggaaggaggtcatgacgttgatatcgcggatcttaaagtgcagatgtcctcggctgttgtatttcttggactttcacggggactgtgaatgtttcttacctatatggctagttgtttatttccaagcttgtatgaatctgagaccaagagttgtagagaataattgccgcggaaggtcgatagcaaaccaagtatctgtactgtattcagcaatcagcagttctgatgttcgattttggattgagtccagaaaatgctgttgaggtttgaactagggagcccagcattcctctggctttgtactgttgtgagagtaagaacatatctaggaactagtattgcagtggcagtcactgagtcgatatatctacttctgcacctttcagctccagcagcacaagttgcatgatcgtattgaccggtcatttttagccatgctcaatttgctgtaacaaatagtgctgctaggtaccagtccatattggtcctaaaattaaattaaaaaaacacaaa

SEQ ID NO: 70539 - DNA, 1426 bp, Zea Mays
agggtactagtaagcgacagactgggaggaagaagcccaggtgaaaccggcatggcgacggtcgcagcccgccgcctcctccagccgcgatgggtggccggtgggcggtgccggctgctgggcaccgcagcggaggcttctccgggcggagagggcgcgcgaggagggggaggtggatccggcgacgcgatctttgtgaagaagccggcggccgccgcggccgtgatgacgagggacgagacgtcggtggcgatgccgacgtcgttcatgaccgggtctgtggtcggtaagcgcttctaccgcgacgccaccgtacggcgcgccgacgatggcaatgggtggaccgtgatgctggactaccgcacgctcaagtcgccggccaagcgggtcctcaagctgccctcgcgcgccctcgccatggccatcgccgccgagtgggagtaccagatggaattcgacctttcacaatgcctcttatgaagcttgcttgcactgcattggagagagttcctttgacacgcagaaaagtgattgacaatttgatgaagaaatttcatcaagatttggtattttgccgctcacctgctgatagtgaactgaccattggagttcatcaaaagcagaaggagaaaatcgatccgattctggagtgggtagacactgaatttgggttcaaacccgttgtctacacaagcttctttggggggaagcaagacgagggccttgctaaagctgtagaaactgttctgaagaaagcaactgactgtgagttggcatccattgatgctatggctgcagcagcccattccttggtgatccctcttgcaatatttagagaaaggttgggtattgaggaggccattgagttgatcaggcttgaagaagaccaccaggttgatcgatggggcttggtggaaggaggtcatgacgttgatatcgcggatcttaaagtgcagatgtcctcggctgttgtatttcttggactttcacggggactgtgaatgtttcttacctatatggctagttgtttatttccaagcttgtatgaatctgagaccaagagttgtagagaataattgccgcggaaggtcgatagcaaaccaagtatctgtactgtattcagcaatcagcagttctgatgttcgattttggattgagtccagaaaatgctgttgaggtttgaactagggagcccagcattcctctggctttgtactgttgtgagagtaagaacatatctaggaactagtattgcagtggcagtcactgagtcgatatatctacttctgcacctttcagctccagcagcacaagttgcatgatcgtattgaccggtcatttttagccatgctcaatttgctgtaacaaatagtgctgctaggtaccagtccatattggtcctaaaattaaattaaaaaaacacaaa

SEQ ID NO: 70540 - DNA, 1395 bp, Zea Mays
cgcggccgccgccgttcccgctcggtcccggggttccgtaggggcaggcgtcctatcttgccctagtggttaccttccaggggcaccgcgtgctggtggaggtctccaacggtagtgtccgtggaagacagttactcggcgccgtcatggcggcggccggtggcggaagggaagccaccacatccggctgtggtctcaagcgccgctacgcaccacacgaccaggaggaggagacgatgaatcaagatcagccttctaaggaagatcggtgtgggcgaatttggagtgggatcgacttgctcaaggacgtcactgaaaacaagcatgtcctacctactggacttgaaggcattgacagacttcttgggggcgggctgcgccaaggtcagctcacagaggttactggaccatcatcttctggtaaaacacaggttttgacttgctgtctaaggagaggctcaagactgtgatgcaaagcatcatctgcgagtctgtgtttgatatatttggtatgtttgaagtactacatcaacttgaagtttctctactgaatgaaaaggtaataggtgatggcaggagaatttgcttacttataattgactcaatatcatccttacttgctcccattattggaggcaagtatccacaagggcgatcgatgatgatatcactggcgatgatcctaaagaagttagcctatgagcataatctagctgttctggtgaccaatcatatggtttcagctggcaatggtgctgtcaagcctgctcttggtgagagctggaaatctgttccacatgtccgcctgatgatatctcgtgaacatagtagtaatatctgcacgggaactgtgctgaagcacacactactggcttctggccgtactgcaaaattcgtgctgccctgataacctttcagacgaggtgatgataagttgccgttaagaactgatagacgattgatggttcatactctaagaacccacggcgaatgtcttctctgttcttcttggttgtacatatacggtgtatgtagtgtatactaagttgttggagtagcccttgcattttattttccttttgcaacaaatggtcaaatgtatcttatcacatgataaagtacatcttatgttgttttgtgcatgcttggttggttactagagattgcaacggagaaatccccgtcggtgaatagctctccatccctatccccgtaaagaagtttatatgatcgcaaaacttatccaatgatcaaaccataatgcatatgcgtactttctgtcctaaaatatttgatctccacgaatattttagggtctgattgggaacatagtttctcaaaatcacagtttataataccatagtttaatgtatgtcataacataattataatata

SEQ ID NO: 70541 - DNA, 1327 bp, Zea Mays
cgcggccgccgccgttcccgctcggtcccggggttccgtaggggcaggcgtcctatcttgccctagtggttaccttccaggggcaccgcgtgctggtggaggtctccaacggtagtgtccgtggaagacagttactcggcgccgtcatggcggcggccggtggcggaagggaagccaccacatccggctgtggtctcaagcgccgctacgcaccacacgaccaggaggtttgtctacattctgcttcacatgctccagtgaagcatacgggtgtggttatgtacttggatactagtaattctttctctcctagtcgtattgccaccataattgatggaactaacgacctatctgatcaaaaaggttttgacttgctgtctaaggagaggctcaagactgtgatgcaaagcatcatctgcgagtctgtgtttgatatatttggtatgtttgaagtactacatcaacttgaagtttctctactgaatgaaaaggtaataggtgatggcaggagaatttgcttacttataattgactcaatatcatccttacttgctcccattattggaggcaagtatccacaagggcgatcgatgatgatatcactggcgatgatcctaaagaagttagcctatgagcataatctagctgttctggtgaccaatcatatggtttcagctggcaatggtgctgtcaagcctgctcttggtgagagctggaaatctgttccacatgtccgcctgatgatatctcgtgaacatagtagtaatatctgcacgggaactgtgctgaagcacacactactggcttctggccgtactgcaaaattcgtgctgccctgataacctttcagacgaggtgatgataagttgccgttaagaactgatagacgattgatggttcatactctaagaacccacggcgaatgtcttctctgttcttcttggttgtacatatacggtgtatgtagtgtatactaagttgttggagtagcccttgcattttattttccttttgcaacaaatggtcaaatgtatcttatcacatgataaagtacatcttatgttgttttgtgcatgcttggttggttactagagattgcaacggagaaatccccgtcggtgaatagctctccatccctatccccgtaaagaagtttatatgatcgcaaaacttatccaatgatcaaaccataatgcatatgcgtactttctgtcctaaaatatttgatctccacgaatattttagggtctgattgggaacatagtttctcaaaatcacagtttataataccatagtttaatgtatgtcataacataattataatata

SEQ ID NO: 70542 - DNA, 1553 bp, Zea Mays
cgcggccgccgccgttcccgctcggtcccggggttccgtaggggcaggcgtcctatcttgccctagtggttaccttccaggggcaccgcgtgctggtggaggtctccaacggtagtgtccgtggaagacagttactcggcgccgtcatggcggcggccggtggcggaagggaagccaccacatccggctgtggtctcaagcgccgctacgcaccacacgaccaggaggaggagacgatgaatcaagatcagccttctaaggaagatcggtgtgggcgaatttggagtgggatcgacttgctcaaggacgtcactgaaaacaagcatgtcctacctactggacttgaaggcatgtggtctttcaattgacagcattgacagacttcttgggggcgggctgcgccaaggtcagctcacagaggttactggaccatcatcttctggtaaaacacaggtttgtctacattctgcttcacatgctccagtgaagcatacgggtgtggttatgtacttggatactagtaattctttctctcctagtcgtattgccaccataattgatggaactaacgacctatctgatcaaaaaggttttgacttgctgtctaaggagaggctcaagactgtgatgcaaagcatcatctgcgagtctgtgtttgatatatttggtatgtttgaagtactacatcaacttgaagtttctctactgaatgaaaaggtaataggtgatggcaggagaatttgcttacttataattgactcaatatcatccttacttgctcccattattggaggcaagtatccacaagggcgatcgatgatgatatcactggcgatgatcctaaagaagttagcctatgagcataatctagctgttctggtgaccaatcatatggtttcagctggcaatggtgctgtcaagcctgctcttggtgagagctggaaatctgttccacatgtccgcctgatgatatctcgtgaacatagtagtaatatctgcacgggaactgtgctgaagcacacactactggcttctggccgtactgcaaaattcgtgctgccctgataacctttcagacgaggtgatgataagttgccgttaagaactgatagacgattgatggttcatactctaagaacccacggcgaatgtcttctctgttcttcttggttgtacatatacggtgtatgtagtgtatactaagttgttggagtagcccttgcattttattttccttttgcaacaaatggtcaaatgtatcttatcacatgataaagtacatcttatgttgttttgtgcatgcttggttggttactagagattgcaacggagaaatccccgtcggtgaatagctctccatccctatccccgtaaagaagtttatatgatcgcaaaacttatccaatgatcaaaccataatgcatatgcgtactttctgtcctaaaatatttgatctccacgaatattttagggtctgattgggaacatagtttctcaaaatcacagtttataataccatagtttaatgtatgtcataacataattataatata

SEQ ID NO: 70543 - DNA, 1511 bp, Zea Mays
cgcggccgccgccgttcccgctcggtcccggggttccgtaggggcaggcgtcctatcttgccctagtggttaccttccaggggcaccgcgtgctggtggaggtctccaacggtagtgtccgtggaagacagttactcggcgccgtcatggcggcggccggtggcggaagggaagccaccacatccggctgtggtctcaagcgccgctacgcaccacacgaccaggaggaggagacgatgaatcaagatcagccttctaaggaagatcggtgtgggcgaatttggagtgggatcgacttgctcaaggacgtcactgaaaacaagcatgtcctacctactggacttgaaggcattgacagacttcttgggggcgggctgcgccaaggtcagctcacagaggttactggaccatcatcttctggtaaaacacaggtttgtctacattctgcttcacatgctccagtgaagcatacgggtgtggttatgtacttggatactagtaattctttctctcctagtcgtattgccaccataattgatggaactaacgacctatctgatcaaaaaggagaggctcaagactgtgatgcaaagcatcatctgcgagtctgtgtttgatatatttggtatgtttgaagtactacatcaacttgaagtttctctactgaatgaaaaggtaataggtgatggcaggagaatttgcttacttataattgactcaatatcatccttacttgctcccattattggaggcaagtatccacaagggcgatcgatgatgatatcactggcgatgatcctaaagaagttagcctatgagcataatctagctgttctggtgaccaatcatatggtttcagctggcaatggtgctgtcaagcctgctcttggtgagagctggaaatctgttccacatgtccgcctgatgatatctcgtgaacatagtagtaatatctgcacgggaactgtgctgaagcacacactactggcttctggccgtactgcaaaattcgtgctgccctgataacctttcagacgaggtgatgataagttgccgttaagaactgatagacgattgatggttcatactctaagaacccacggcgaatgtcttctctgttcttcttggttgtacatatacggtgtatgtagtgtatactaagttgttggagtagcccttgcattttattttccttttgcaacaaatggtcaaatgtatcttatcacatgataaagtacatcttatgttgttttgtgcatgcttggttggttactagagattgcaacggagaaatccccgtcggtgaatagctctccatccctatccccgtaaagaagtttatatgatcgcaaaacttatccaatgatcaaaccataatgcatatgcgtactttctgtcctaaaatatttgatctccacgaatattttagggtctgattgggaacatagtttctcaaaatcacagtttataataccatagtttaatgtatgtcataacataattataatata

SEQ ID NO: 70544 - DNA, 1650 bp, Zea Mays
ctcagtctcggcttcttcgttttccttcgcccgacgcggccgccgccgttcccgctcggtcccggggttccgtaggggcaggcgtcctatcttgccctagtggttaccttccaggggcaccgcgtgctggtggaggtctccaacggtagtgtccgtggaagacagttactcggcgccgtcatggcggcggccggtggcggaagggaagccaccacatccggctgtggtctcaagcgccgctacgcaccacacgaccaggaggaggagacgatgaatcaagatcagccttctaaggaagatcggtgtgggcgaatttggagtgggatcgacttgctcaaggacgtcactgaaaacaagcatgtcctacctactggacttgaaggcattgacagacttcttgggggcgggctgcgccaaggtcagctcacagaggttactggaccatcatcttctggtaaaacacaggtttgtctacattctgcttcacatgctccagtgaagcatacgggtgtggttatgtacttggatactagtaattctttctctcctagtcgtattgccaccataattgatggaactaacgacctatctgatcaaaaaggtagacaatcaaccatatgtctagcctactcttgccttttgtcattctttgagttctcataatttatttcaattctccagcagtttcttggcaaaagttttaccatatgttttatatatagcttaagatctacagtaatcaggttttgacttgctgtctaaggagaggctcaagactgtgatgcaaagcatcatctgcgagtctgtgtttgatatatttggtgatggcaggagaatttgcttacttataattgactcaatatcatccttacttgctcccattattggaggcaagtatccacaagggcgatcgatgatgatatcactggcgatgatcctaaagaagttagcctatgagcataatctagctgttctggtgaccaatcatatggtttcagctggcaatggtgctgtcaagcctgctcttggtgagagctggaaatctgttccacatgtccgcctgatgatatctcgtgaacatagtagtaatatctgcacgggaactgtgctgaagcacacactactggcttctggccgtactgcaaaattcgtgctgccctgataacctttcagacgaggtgatgataagttgccgttaagaactgatagacgattgatggttcatactctaagaacccacggcgaatgtcttctctgttcttcttggttgtacatatacggtgtatgtagtgtatactaagttgttggagtagcccttgcattttattttccttttgcaacaaatggtcaaatgtatcttatcacatgataaagtacatcttatgttgttttgtgcatgcttggttggttactagagattgcaacggagaaatccccgtcggtgaatagctctccatccctatccccgtaaagaagtttatatgatcgcaaaacttatccaatgatcaaaccataatgcatatgcgtactttctgtcctaaaatatttgatctccacgaatattttagggtctgattgggaacatagtttctcaaaatcacagtttataataccatagtttaatgtatgtcataacataattataatata

SEQ ID NO: 70545 - DNA, 1436 bp, Zea Mays
gcggctgctgctgagggggatgagcctgtccaaatgaaagtgcacaaatctttgaaactgtggagcttttatgttgatctggaggagagcctcggaaccttagactctacccgtgcggtttatgagagaatattggatttacgaattgccactccacagataattctcaattatgcatatctcctcgaggagcacaagtatttcgaagatgcatttaaagtgtatgaaaggggcgtgaaaatattcaagtatccccacgttaaggccatctgggtgacctaccttacaaagtttgtacatagatacaagcgaagcaagttagagcgagcaagagagcttttccatgaagctgtccaacaggctcctgcagaggaaaagaagcccctatatttacaatgggcaaaactggaggaagactatggtcttgcaaaacgtgctatgaatgtatatgatgaggctgtaagagctgttcctaactctgaaaaaatggccatgtacgaaatctatatagcacgcgctgccgaactctttggtgttccaaggacaagacaaatatatgagcaagcaattgaatctggcctcccagacagagatgtgctgacaatgtgcatgaaattcgctgagctagagagaagtcttggggaaatcgatcgttcgcgtgccatctatgtgcatgcatccaactatgctgatccaaacaatcctgacttttggaagaagtggaatgattttgagattcagcacggtaacgaagatacattcagggagatgcttcgtatcaaacgcacagtggctgctagccgcagtcagacacatttcatactgccagagtacttgatgcagagggatcagaagttaaacctggacgaagcagttgacactctgaagcgtgctggcgtccctgaggacgagatggcagctttggaaaggcaactggctaccggaccatctactgccccaccagcagcaccaagcactgccccagcctctgctaacaggatgatgaactttgtcagtgctggagtagaggcccaggtcgagagcagcaggcaacaggctgctaacaatgaggacattgagctgcccgatgagagtgacgatgaggaacccgatgtccaaattgcggagaagagcgttcctgctgcggtatttggtgagctcggcaagagagctgccgagaacaatgaggaaagctcaggtgcccaagggaatgagcagctgggcgccctcgagaggataaagagacgacgccaatagtctgcctctgctaagatgagagcccatgtgtgcaccatgacatccgtacgatctttagcgatgttgtacttgtaaacattttttcgagtggaattttactcctgtgcaaagcatttacgtaagttgttcgggggtatacccgctgctaatatgatgccgaaacgttattatctttggtc

SEQ ID NO: 70546 - DNA, 3174 bp, Zea Mays
ccatgctctccactgtcgcctgcgagacgcccacctagcagcgacgccactggggccgcccgctccatcgcgtcgacgtcgaggacgccgcgccgccaatcaccgccccgctccctcctctccaccgcttacaatccccagaaggcggtcgccggtctccccctcgcgccctacccgcctccatcgcctgctagcgcgccaggccggactcttaaaccctagcgaggctcggccaatccccgcgtcaggatgccgtcagcgtcgggtccggtggccgtggcgtcggcgccggcgccggtgaagtccgcaccgtccctggccgtcgggatctcgccggacttgtacccaacggaggacgacctgccgtacgaggaggagatcctgcgggagcccttcaagctcaaggggtggtggcgctacctcgtggcccgcgcgaccgcgccgtttgccaagcgcgccgtcatctacgagcgcgcgctcaaggcgctcccgggaagctacaagctctggcacgcctacctccgcgaccgcctcgaccacgcgcgcccgcaccccatcgaccacccggcctactcctccctcaacaacacattcgagcgggcgctggccaccatgcacaagatgccgcgcgtctgggtcctctacctcacctcgctgctcgaccagcgcctgctcacgcgcgcgcgccgcgccttcgaccgcgcgctccgggcgctccccgtcacgcagcatgaccgcatctggccgctgtaccttcgcctcgcttcgcttccggcctgccccgtcgagacgtcgctccgagtcttccgccgatacctccaatttgacccctcccacgctgaggacttcatcaatttcctcatatcagccaaccactggcaggaggccgccaaccgtctagcttctgtgctcaacgacgacgggttccgctcagttaaggggaaaacgaggcaccagctctggcttgagctctgtgagatcctcaccaagcacgctgatgaggttgctggcctcaaggtggacgccatcttgcgtggtgggatacgcaagttcactgatgaggtcggcaagctgtggacctcactggctgattactatgtcaggagaggcctttttgaaaaagctagggatgtgtttgaggagggtgtttcttcagtggttaccgtcaaggagttcagtgtggtgtttgaggcatatacacagtttgagcagagtatgcttgcggcaaagcttgaggctgctgaggaagaaggggctgaggatgagaacgagggagggggcaggaagagtgggatggataagttatcgaagaaattcctcaatgaattctggttgaacgatgaggatgatactgatttgaggatggcaaggtttgagcggctgttggatcgcagaccagagcttcttagcagtgtgctgctgcgacagaatccacacaatgtggaggaatggcacaggagggtgaaactctttgaaaaggatcctgcaaggcaagtagcgacatatgttgaggccgtgaaaactgtagacccaatgaaggcagttgggaaaccacatactctgtgggtggcatttgcaaagatgtatgagaaacacagtcgtctagatagtgctgaagatatcttcaaacgggctactcaagttaattataaggcagttgaccatttagctagtatctggtgtgagtgggcagagatggagttgcgccacaacaattttgacaaggctattgaactgatgagctgctgctgagggggatgagcctgtccaaatgaaagtgcacaaatctttgaaactgtggagcttttatgttgatctggaggagagcctcggaaccttagactctacccgtgcggtttatgagagaatattggatttacgaattgccactccacagataattctcaattatgcatatctcctcgaggagcacaagtatttcgaagatgcatttaaagtgtatgaaaggggcgtgaaaatattcaagtatccccacgttaaggccatctgggtgacctaccttacaaagtttgtacatagatacaagcgaagcaagttagagcgagcaagagagcttttccatgaagctgtccaacaggctcctgcagaggaaaagaagcccctatatttacaatgggcaaaactggaggaagactatggtcttgcaaaacgtgctatgaatgtatatgatgaggctgtaagagctgttcctaactctgaaaaaatggccatgtacgaaatctatatagcacgcgctgccgaactctttggtgttccaaggacaagacaaatatatgagcaagcaattgaatctggcctcccagacagagatgtgctgacaatgtgcatgaaattcgctgagctagagagaagtcttggggaaatcgatcgttcgcgtgccatctatgtgcatgcatccaactatgctgatccaaacaatcctgacttttggaagaagtggaatgattttgagattcagcacggtaacgaagatacattcagggagatgcttcgtatcaaacgcacagtggctgctagccgcagtcagacacatttcatactgccagagtacttgatgcagagggatcagaagttaaacctggacgaagcagttgacactctgaagcgtgctggcgtccctgaggacgagatggcagctttggaaaggcaactggctaccggaccatctactgccccaccagcagcaccaagcactgccccagcctctgctaacaggatgatgaactttgtcagtgctggagtagaggcccaggtcgagagcagcaggcaacaggctgctaacaatgaggacattgagctgcccgatgagagtgacgatgaggaacccgatgtccaaattgcggagaagagcgttcctgctgcggtatttggtgagctcggcaagagagctgccgagaacaatgaggaaagctcaggtgcccaagggaatgagcagctgggcgccctcgagaggataaagagacgacgccaatagtctgcctctgctaagatgagagcccatgtgtgcaccatgacatccgtacgatctttagcgatgttgtacttgtaaacattttttcgagtggaattttactcctgtgcaaagcatttacgtaagttgttcgggggtatacccgctgctaatatgatgccgaaacgttattatctttggtc

SEQ ID NO: 70547 - DNA, 8200 bp, Zea Mays
  misc_feature (8199)..(8200): n is a, c, g, or t
tcgccctcgtcttcctccaagtccgtccccgtctctacccccaccccaaaccctcggctcgcgagcgcgagggagaccccttcctccgagtccataacacggggttgccattcgcgtcgggggaaacgagcccgcgcctcctgcccctgcactcttacggtcctacctccagccatccgctcctccgcccagctcgcggagtcttcccagcgccgatcttcaaaaccctaagctctggcgcggtaaggttggagccggacgcgcacgggcggggcgcccgccatggcgcccatcaacagcggcaacatggagcagcactcgcagcggctcctcgagcccgacctccctgtgcaagtccgactgcagcttgccatggaagttcgggacagcctggagatgacgcacactccagactacctcaactttcttcgctgctatttcagagccttctcagcaattctcaccgcttacaccaagccacaggccacagagaatgctgagcacaagctacggaatgttgtgatcgagatactcaaccgccttccacacagcgaggtgctcagaccatttgtgcaggatctgctcaagctttctctccgtgtgttgacacaggacaacgaggacaatgctctccttgccatccgaattgtgtttgacctcctccgtaacttccgccctactgtcgaggcggaggtgcagccatttcttgactttgtggttaacatataccataaatttcccacaaccgttagctacttcttcgataatcccaacacaagtgccagtatggctgcctccatgcccatgcagcatttggaccccactgccgatgcctcagtcatgatgcaagtgcctggtggtggtcaactcaacccaagcgcacgttccttcaagatagtcacagagagccctcttgttgtgatgtttctcttccagttgtatgcaaagcttgtgcagacaaatatcccgcacttgttgccactcatggtggcggccatctctatcaagggtcccgacaaggtgccgccacaccttaagacacccttcaacgatttaaagggtgcacaggtcaagaccttgtcatttctgacgtacctcctgaagagcaatgcagattacataaagtcatatgaggaaagcatatgcaagagcattgtgaacttgcttgttacgtgtcctcctgattctgtctccatcagaaaggagctattggttggtctgaaacaagttctcaacaccgagtacaagcgagggctgttccccttgattgacacacttcttgatgaaagggttctgattggcacaggtcgagtttgcatcgaaactttaagacctcttgcttacacccttcttgctgaattggtgcattatgttcgagaagatatttctcttccacaggttgagcccatatatcaaaaaggtgttgaccagcaaagcatggacgaagcacgagttttattggggcgcatattggatgcattcgttgggaagtttaggaccctgaagcgaacaatccctcagttgcttgaagaaggtgaggaagggaaggaacaaccgaatctgagaatgaagcttgaagtcccattacagactgtgctgaatttgcagcaacctttggagtatactaaggaaatcaacgattacaaaagtctgataaagactcttgctgtcgacaataatatggagcataacccatgctcactggccacgcccccagcaacaaaatcaacagtcttccaatttgtcacttcaacacttcagggggctgagggaggatgaggtgcggaagacatctggtgttctgaagtctggcgttcactgtctggctctttttaaggaaaaagacgatgatagggaaattctgcaatcattttcgcagatgctggctataatggaagctcgtgatattatggatatgttctccttttgcatgtctgacctctttgattctatgataaccaacaaccagctattgcacatattttcaacccttttgcaagctcccaaggttctgcggcctttcacagatgtattaattaatttccttgttagctcaaagcttgaagccctgaagcagccagattcacctgctgcaaagcttgttttgcaacttttccggttcttgttcattgctgcagctaaagctccagaaagctgtgaacgcacacttcagccacacgtgccggttataatggaagtctgcatgaggagtgccactgaagttgagaaacccctaggttacatgcaccttcttcgaaacatgtttcgtgcattgaacagtgctaaatttgattcattgatgcgtgatcttataccatctctgcaaccctgcctcaatatgttactctccatgcttgatgaagtcattcttgctttatggtctcatttaaggcctcctccatacacatggggcacaaagtctttggaacttttagggaagctggggggacgaaataggcgatttttgcgggagcctcttgcacttgaatccaaggaaaatccggagcatggattacgtttagttctgacttttgagcctgcgacaccttttttggttcctctggacagatgcatacaccaagctgttggtgcagttatgcaaggcaatggcttggaagcattctacaggaagaaggctcttcaattcattcgggtgtgcctcgattctttgttaaatctgagggaaaatgtacctggcgagggtgtgagccctggtgttctcggtacattgctaatctctaacctggatccctcaagacgtcggaatgatgcttcagatatgaagggagatttaggtgtgaagacaaaaacacaactactggctgaaaaatctgttttcaagactcttcttgtagctatcattgcagctaatgctgacaccagtcttcatgatgagaaggatgattatgttgtcgatatatgccggcattttgctatgcttttccatgttgactcaccatcctccagccaatctggatttatgcatcctattggttcttcactcccatctatcatcatgggatcaagatcaagatgcaacacttcatctaatctccgggagctggaccctttaatatttttggatgctttagttgaagtgctatccagcgaaaatcgtcaacatgcaaaagctgccctatctgctttgaatatttttgccgagacattaatctttcttgcacggatgaaacacactggtatgctaaggggaggtcctagcacccccatgctagtctctagtccatctttaaatccagtatattcacctcccccaagtgtgcgggttgctgtatttgaggaattgttacctcggttattgcattgttgctacagtagcacatggcaagctcagatgggtggtgtaatgggtctcggggcattggtcggtaaagtgtctgtggataccctatgcatttttcaggtcagagtcgtgcgtggtcttctttttgttcttaagaggttaccagtgcatgcaaacaaagagcaggaggagacaaatcatgtcctaacacaagtacttagagtagtaaacaacgcagatgaagcaaacagtgaacctcgacggcaaagttttcagggagttgttgaattccttgcacaggagttgtttaacccaaacgcttcaatggttgtgagaaagaacgtgcaggcttgcttatcactgcttgcaagcagaactggcagtgaggtttctgaattgcttgagcctctctatttgccattgcttcagcctctgatttcacgacctcttcgttcgaagaatattgagcaacaggtgggcaccgttactgctttgaacttctgtcttgcactcagaccaccccttctaaaactatctcctgaacttgtcaattttttgcaagaagcactacaaattgccgaggctgatgaaactatatgggtcactaggatgatgaatgcgaaagtagttctcacatggaacaaactcagaaccgcatgcattgaactactctgtactgcaatggcatggggagatctaaaagctcaaaatcatactgaattgcgagcaaagattatttcaatgtttttcaaatctctaacatgcagaacaacagagattgtcaatgttgctaaggagggacttcgtcaggtggttcaacagcaaaggatgccaaaggatcttctacagagcagcttaaggcccattctagtaaacttagcaaacacaaagagccttagcatgccattgctacaaggattggctcgcctgcttgaattactgtcaaattggtttaatgtcactttgggtgccaagctattggatcacttgaaaaaatggctggagccagaaaagcttgtccagactcaaaaatcttggaaggctggagatgaaccaaaaatagcagcagctatgatcgagctgtttcaccttcttcccccggcagcaagcaaattcttggatgaccttgttaccttggtaattgatctggaaagggcacttcctgaagatcagttttacagtgagatcaacagtccataccgtgctccactggcaaaatttttgaatcgttatgttctggaggctgttgactattttcttgctcgattaagccatccaaagtatttcaggaggtttatgtacataatctgctcggatactggggacctaagggatgcacttgcaaggtcacctcagaaaatacttgcaagtgccttttctcagttttactctcaaagtgaagcatctgctgctcaattatcttctgtaaaggatgaagcccttactggggctgtatctgagagtattactgtacaatcttcatcaaacatggttactacttctgagagttactttaatggattagagcttgtctcagcccttgtgaaattgatgccagagtggctccgtaacaaccgggttgtctttgacaccttgctacttgcttggaaatcacctgcaagacttgcgaggttgcagaacgagcaggatttgagtttaccccaggtgatggaaagcaagaggctgatcaaatgcttcctgaattacttaagacacgatcgaactgaagttggtgcactctttgatatgttatcagtattcttgtaccgcagtcgtatagattatagctttcttaaggaattttatgtcatagaggttgctgaaggatactccccgaatttgaagaaaactatccttaatcattttctgaacattttccagtcaaaacaatatggacaagatcatttagttgttaccatgcagattcttatacttccaatgctagctcattcatttcaaaatggacaaagttgggaagttgttgatcctactataattaaaactattgttgagaagcttcttgatcctccagaagaggtcagcgctgaatacgacgaaccattgaggatagaacttcttcagctagctacattacttttgaagtatctacagactgatcttgttcaccatcgaaaggaactcataaagtttggttggaatcatctcaagcgtgaagataactcgagcaaacagtgggcctttgtgaatgtttgtcatttcttagaggcctatcaagctcctgaaaagattattttacaggtcttcattgctctgctacggacatgccaaccagaaaacaagctgttggtgaagcaagctctcgatatcctcatgcctgccctacctaggagacttcctcctgaaaaaaatgatagccgcatgccgatatggatcagatacaccaagaaagttctcgtagaggaagggcattcaattccaaatatgattcacatattccagcttattgttcgccatgcggacctcttctatagttgcagagcccactttgttcctcagatggtcaactctcttagtcgccttggattaccatacaacacaacagcggaaaatagaaggcttgcaattgaacttgctgggttggtagtggcatgggaaagacagagacaaagtgagatgaaagtggcgcaggaaagtgagagccagaatcaattaggtgacatgcttaatccttctgttattggtggtgatccaaaacgctcctctgatgttccgtcgtttgctgatgatttgagtctacctgatgaggagtataaacctaatgcagcaatggaggagatgatcattaccttcctaattagggtatcacttgtgattgagcctaaggataaggaatctagctcaatgtacaagcaagctcttgatctactgactcaagctctggaagtctggccaaatgccaatgttaaattcaattatctggagaaattacttgggaatctgtcacccactcctcagtccaaggaccctgcatcagccctcgcacaaggacttgatgttatgaacaaagtcttggagaaacaaccccgtctcttcatccgaaataacatcaatcatatttctcaaatactggaaccttgctttggcaacaaaatgctggatgctggaaagtcactttgttccttgctcaagatggtgttcagtgcttttcctcttgaagcagcaacaacgccacaagatataaagttgttgcatcaaagggttcaagaactcattcacaagaatcttgctgctgttacaactcagcagatagcacttgagctcaacaatgctcactcaatcattagcttttcattgtttgtcctcaatgcacttgcagaagtacagaagaatttcattgacccgttcattggcttgcttttccgtgttctgcaacgtcttgcacgtgacatggggtcttctgctggcagccatatccgacaaggacagaggcctgaactggattcatcagttaactcacggtctaccatagattctactgtcatatctaacatgaagactgtcttaaaacttataagtgagagggtgatgtcctcttctgaccacagaaaatctatgggccaaatacttcaagctcttctttcagagaaaggcactgattccagcattcttctgtgcatgctagacatgataaaaacttggattgaggaagattgtaggcttgcttcatcaactggttctgttagttcacttaacccaaaggaaataataacttatcttcataagttatcattagttgacagaaaaagctttcctccagctgcacaagaagaatgggatgcaaaatacttgcagcttctttattcactgtgtgcagattcaaccaagtatccgttgtcttttcggcaagaatttttccataagattgagagacagtatatgcttggacttagagctaaagatccagaaatgaggaagcgattcttcaagctttaccatgatacagtgggaaaaacattattttctagattgcaatttataatacagttacaggactgggaagctgtgagtgatgttttctggttgaagcaaggtcttgatctcgttttggcaatattagtagaaaatgaaccaattacacttgcagcaaattctgctcgagtaccaacgcttatgatagctgggcctgttccagatcgcatcaccatgccacagcaggttcctgatgctcaggaaagcatggatggtacaacactatcgtttgactctcttgctgcaaggcatgctcagttcttaaatgacgcgaacaagcttgtggtggcagatatcatggctccattgaaggaacttgcatttgctgatcccaatgttgcatatcatttgtgggtgcttgttttcccaattgtttgggtcaccttacataaagaggaacaagttgccctagctaagccaataatcgcgcttctatcgaaagattaccacaagaggcagcagggctgcagacctaacgttgctcaggcacttcttgagggtcttcatttgagccatccccaaccacgcatgcctagtgagcttatcaaatatattggaaaaacttgcaatgtgtggtatattgcaattgcattactcgagagtcatatagtgcatatgaatgaggccaagtgctccgagtcattggctgagttatacagacttcttaatgaagacgacatgaggtgtggattatggaagagaaaatcaatcactgcagaaacaagggctggtctttcacttgcccagcatggttactggcaacaagcacaaaatctattttaccaggctatgattaaagctactcagggaacatacaataataccgtcccaaaggctgaaatgtgcctttgggaggaacagtggttgtcctgtgcgtctcatttaggtcagtgggaagtcttagctgnn

SEQ ID NO: 70548 - DNA, 8433 bp, Zea Mays
  misc_feature (8432)..(8433): n is a, c, g, or t
tcgccctcgtcttcctccaagtccgtccccgtctctacccccaccccaaaccctcggctcgcgagcgcgagggagaccccttcctccgagtccataacacggggttgccattcgcgtcgggggaaacgagcccgcgcctcctgcccctgcactcttacggtcctacctccagccatccgctcctccgcccagctcgcggagtcttcccagcgccgatcttcaaaaccctaagctctggcgcggtaaggttggagccggacgcgcacgggcggggcgcccgccatggcgcccatcaacagcggcaacatggagcagcactcgcagcggctcctcgagcccgacctccctgtgcaagtccgactgcagcttgccatggaagttcgggacagcctggagatgacgcacactccagactacctcaactttcttcgctgctatttcagagccttctcagcaattctcaccgcttacaccaagccacaggccacagagaatgctgagcacaagctacggaatgttgtgatcgagatactcaaccgccttccacacagcgaggtgctcagaccatttgtgcaggatctgctcaagctttctctccgtgtgttgacacaggacaacgaggacaatgctctccttgccatccgaattgtgtttgacctcctccgtaacttccgccctactgtcgaggcggaggtgcagccatttcttgactttgtggttaacatataccataaatttcccacaaccgttagctacttcttcgataatcccaacacaagtgccagtatggctgcctccatgcccatgcagcatttggaccccactgccgatgcctcagtcatgatgcaagtgcctggtggtggtcaactcaacccaagcgcacgttccttcaagatagtcacagagagccctcttgttgtgatgtttctcttccagttgtatgcaaagcttgtgcagacaaatatcccgcacttgttgccactcatggtggcggccatctctatcaagggtcccgacaaggtgccgccacaccttaagacacccttcaacgatttaaagggtgcacaggtcaagaccttgtcatttctgacgtacctcctgaagagcaatgcagattacataaagtcatatgaggaaagcatatgcaagagcattgtgaacttgcttgttacgtgtcctcctgattctgtctccatcagaaaggagctattggttggtctgaaacaagttctcaacaccgagtacaagcgagggctgttccccttgattgacacacttcttgatgaaagggttctgattggcacaggtcgagtttgcatcgaaactttaagacctcttgcttacacccttcttgctgaattggtgcattatgttcgagaagatatttctcttccacaggttgagcccatatatcaaaaaggtgttgaccagcaaagcatggacgaagcacgagttttattggggcgcatattggatgcattcgttgggaagtttaggaccctgaagcgaacaatccctcagttgcttgaagaaggtgaggaagggaaggaacaaccgaatctgagaatgaagcttgaagtcccattacagactgtgctgaatttgcagcaacctttggagtatactaaggaaatcaacgattacaaaagtctgataaagactcttgctgtcggaatgaagacaataatatggagcataacccatgctcactggccacgcccccagcaacaaaatcaacagtcttccaatttgtcacttcaacacttcagggggctgagggaggatgaggtgcggaagacatctggtgttctgaagtctggcgttcactgtctggctctttttaaggaaaaagacgatgatagggaaattctgcaatcattttcgcagatgctggctataatggaagctcgtgatattatggatatgttctccttttgcatgtctgacctctttgattctatgataaccaacaaccagctattgcacatattttcaacccttttgcaagctcccaaggttctgcggcctttcacagatgtattaattaatttccttgttagctcaaagcttgaagccctgaagcagccagattcacctgctgcaaagcttgttttgcaacttttccggttcttgttcattgctgcagctaaagctccagaaagctgtgaacgcacacttcagccacacgtgccggttataatggaagtctgcatgaggagtgccactgaagttgagaaacccctaggttacatgcaccttcttcgaaacatgtttcgtgcattgaacagtgctaaatttgattcattgatgcgtgatcttataccatctctgcaaccctgcctcaatatgttactctccatgcttgatggtccgataagtgaagatatgcgggacttgattttggagctttgcctgattttacctgcccgcttgagttctttattgccccacatacctcgtctaatgaaacctcttgttcttgctctaaaaggtagtgatgaccttgtgagcttagctctacgtacacttgagttctggattgatagtctgaatcctgactttttggaacctagcatggcaaatttaatgtcagaagtcattcttgctttatggtctcatttaaggcctcctccatacacatggggcacaaagtctttggaacttttagggaagctggggggacgaaataggcgatttttgcgggagcctcttgcacttgaatccaaggaaaatccggagcatggattacgtttagttctgacttttgagcctgcgacaccttttttggttcctctggacagatgcatacaccaagctgttggtgcagttatgcaaggcaatggcttggaagcattctacaggaagaaggctcttcaattcattcgggtgtgcctcgattctttgttaaatctgagggaaaatgtacctggcgagggtgtgagccctggtgttctcggtacattgctaatctctaacctggatccctcaagacgtcggaatgatgcttcagatatgaagggagatttaggtgtgaagacaaaaacacaactactggctgaaaaatctgttttcaagactcttcttgtagctatcattgcagctaatgctgacaccagtcttcatgatgagaaggatgattatgttgtcgatatatgccggcattttgctatgcttttccatgttgactcaccatcctccagccaatctggatttatgcatcctattggttcttcactcccatctatcatcatgggatcaagatcaagatgcaacacttcatctaatctccgggagctggaccctttaatatttttggatgctttagttgaagtgctatccagcgaaaatcgtcaacatgcaaaagctgccctatctgctttgaatatttttgccgagacattaatctttcttgcacggatgaaacacactggtatgctaaggggaggtcctagcacccccatgctagtctctagtccatctttaaatccagtatattcacctcccccaagtgtgcgggttgctgtatttgaggaattgttacctcggttattgcattgttgctacagtagcacatggcaagctcagatgggtggtgtaatgggtctcggggcattggtcggtaaagtgtctgtggataccctatgcatttttcaggtcagagtcgtgcgtggtcttctttttgttcttaagaggttaccagtgcatgcaaacaaagagcaggaggagacaaatcatgtcctaacacaagtacttagagtagtaaacaacgcagatgaagcaaacagtgaacctcgacggcaaagttttcagggagttgttgaattccttgcacaggagttgtttaacccaaacgcttcaatggttgtgagaaagaacgtgcaggcttgcttatcactgcttgcaagcagaactggcagtgaggtttctgaattgcttgagcctctctatttgccattgcttcagcctctgatttcacgacctcttcgttcgaagaatattgagcaacaggtgggcaccgttactgctttgaacttctgtcttgcactcagaccaccccttctaaaactatctcctgaacttgtcaattttttgcaagaagcactacaaattgccgaggctgatgaaactatatgggtcactaggatgatgaatgcgaaagtagttctcacatggaacaaactcagaaccgcatgcattgaactactctgtactgcaatggcatggggagatctaaaagctcaaaatcatactgaattgcgagcaaagattatttcaatgtttttcaaatctctaacatgcagaacaacagagattgtcaatgttgctaaggagggacttcgtcaggtggttcaacagcaaaggatgccaaaggatcttctacagagcagcttaaggcccattctagtaaacttagcaaacacaaagagccttagcatgccattgctacaaggattggctcgcctgcttgaattactgtcaaattggtttaatgtcactttgggtgccaagctattggatcacttgaaaaaatggctggagccagaaaagcttgtccagactcaaaaatcttggaaggctggagatgaaccaaaaatagcagcagctatgatcgagctgtttcaccttcttcccccggcagcaagcaaattcttggatgaccttgttaccttggtaattgatctggaaagggcacttcctgaagatcagttttacagtgagatcaacagtccataccgtgctccactggcaaaatttttgaatcgttatgttctggaggctgttgactattttcttgctcgattaagccatccaaagtatttcaggaggtttatgtacataatctgctcggatactggggacctaagggatgcacttgcaaggtcacctcagaaaatacttgcaagtgccttttctcagttttactctcaaagtgaagcatctgctgctcaattatcttctgtaaaggatgaagcccttactggggctgtatctgagagtattactgtacaatcttcatcaaacatggttactacttctgagagttactttaatggattagagcttgtctcagcccttgtgaaattgatgccagagtggctccgtaacaaccgggttgtctttgacaccttgctacttgcttggaaatcacctgcaagacttgcgaggttgcagaacgagcaggatttgagtttaccccaggtgatggaaagcaagaggctgatcaaatgcttcctgaattacttaagacacgatcgaactgaagttggtgcactctttgatatgttatcagtattcttgtaccgcagtcgtatagattatagctttcttaaggaattttatgtcatagaggttgctgaaggatactccccgaatttgaagaaaactatccttaatcattttctgaacattttccagtcaaaacaatatggacaagatcatttagttgttaccatgcagattcttatacttccaatgctagctcattcatttcaaaatggacaaagttgggaagttgttgatcctactataattaaaactattgttgagaagcttcttgatcctccagaagaggtcagcgctgaatacgacgaaccattgaggatagaacttcttcagctagctacattacttttgaagtatctacagactgatcttgttcaccatcgaaaggaactcataaagtttggttggaatcatctcaagcgtgaagataactcgagcaaacagtgggcctttgtgaatgtttgtcatttcttagaggcctatcaagctcctgaaaagattattttacaggtcttcattgctctgctacggacatgccaaccagaaaacaagctgttggtgaagcaagctctcgatatcctcatgcctgccctacctaggagacttcctcctgaaaaaaatgatagccgcatgccgatatggatcagatacaccaagaaagttctcgtagaggaagggcattcaattccaaatatgattcacatattccagcttattgttcgccatgcggacctcttctatagttgcagagcccactttgttcctcagatggtcaactctcttagtcgccttggattaccatacaacacaacagcggaaaatagaaggcttgcaattgaacttgctgggttggtagtggcatgggaaagacagagacaaagtgagatgaaagtggcgcaggaaagtgagagccagaatcaattaggtgacatgcttaatccttctgttattggtggtgatccaaaacgctcctctgatgttccgtcgtttgctgatgatttgagtctacctgatgaggagtataaacctaatgcagcaatggaggagatgatcattaccttcctaattagggtatcacttgtgattgagcctaaggataaggaatctagctcaatgtacaagcaagctcttgatctactgactcaagctctggaagtctggccaaatgccaatgttaaattcaattatctggagaaattacttgggaatctgtcacccactcctcagtccaaggaccctgcatcagccctcgcacaaggacttgatgttatgaacaaagtcttggagaaacaaccccgtctcttcatccgaaataacatcaatcatatttctcaaatactggaaccttgctttggcaacaaaatgctggatgctggaaagtcactttgttccttgctcaagatggtgttcagtgcttttcctcttgaagcagcaacaacgccacaagatataaagttgttgcatcaaagggttcaagaactcattcacaagaatcttgctgctgttacaactcagcagatagcacttgagctcaacaatgctcactcaatcattagcttttcattgtttgtcctcaatgcacttgcagaagtacagaagaatttcattgacccgttcattggcttgcttttccgtgttctgcaacgtcttgcacgtgacatggggtcttctgctggcagccatatccgacaaggacagaggcctgaactggattcatcagttaactcacggtctaccatagattctactgtcatatctaacatgaagactgtcttaaaacttataagtgagagggtgatgtcctcttctgaccacagaaaatctatgggccaaatacttcaagctcttctttcagagaaaggcactgattccagcattcttctgtgcatgctagacatgataaaaacttggattgaggaagattgtaggcttgcttcatcaactggttctgttagttcacttaacccaaaggaaataataacttatcttcataagttatcattagttgacagaaaaagctttcctccagctgcacaagaagaatgggatgcaaaatacttgcagcttctttattcactgtgtgcagattcaaccaagtatccgttgtcttttcggcaagaatttttccataagattgagagacagtatatgcttggacttagagctaaagatccagaaatgaggaagcgattcttcaagctttaccatgatacagtgggaaaaacattattttctagattgcaatttataatacagttacaggactgggaagctgtgagtgatgttttctggttgaagcaaggtcttgatctcgttttggcaatattagtagaaaatgaaccaattacacttgcagcaaattctgctcgagtaccaacgcttatgatagctgggcctgttccagatcgcatcaccatgccacagcaggttcctgatgctcaggaaagcatggatggtacaacactatcgtttgactctcttgctgcaaggcatgctcagttcttaaatgacgcgaacaagcttgtggtggcagatatcatggctccattgaaggaacttgcatttgctgatcccaatgttgcatatcatttgtgggtgcttgttttcccaattgtttgggtcaccttacataaagaggaacaagttgccctagctaagccaataatcgcgcttctatcgaaagattaccacaagaggcagcagggctgcagacctaacgttgctcaggcacttcttgagggtcttcatttgagccatccccaaccacgcatgcctagtgagcttatcaaatatattggaaaaacttgcaatgtgtggtatattgcaattgcattactcgagagtcatatagtgcatatgaatgaggccaagtgctccgagtcattggctgagttatacagacttcttaatgaagacgacatgaggtgtggattatggaagagaaaatcaatcactgcagaaacaagggctggtctttcacttgcccagcatggttactggcaacaagcacaaaatctattttaccaggctatgattaaagctactcagggaacatacaataataccgtcccaaaggctgaaatgtgcctttgggaggaacagtggttgtcctgtgcgtctcatttaggtcagtgggaagtcttagctgnn

SEQ ID NO: 70549 - DNA, 8309 bp, Zea Mays
  misc_feature (8308)..(8309): n is a, c, g, or t
tcgccctcgtcttcctccaagtccgtccccgtctctacccccaccccaaaccctcggctcgcgagcgcgagggagaccccttcctccgagtccataacacggggttgccattcgcgtcgggggaaacgagcccgcgcctcctgcccctgcactcttacggtcctacctccagccatccgctcctccgcccagctcgcggagtcttcccagcgccgatcttcaaaaccctaagctctggcgcggtaaggttggagccggacgcgcacgggcggggcgcccgccatggcgcccatcaacagcggcaacatggagcagcactcgcagcggctcctcgagcccgacctccctgtgcaagtccgactgcagcttgccatggaagttcgggacagcctggagatgacgcacactccagactacctcaactttcttcgctgctatttcagagccttctcagcaattctcaccgcttacaccaagccacaggccacagagaatgctgagcacaagctacggaatgttgtgatcgagatactcaaccgccttccacacagcgaggtgctcagaccatttgtgcaggatctgctcaagctttctctccgtgtgttgacacaggacaacgaggacaatgctctccttgccatccgaattgtgtttgacctcctccgtaacttccgccctactgtcgaggcggaggtgcagccatttcttgactttgtggttaacatataccataaatttcccacaaccgttagctacttcttcgataatcccaacacaagtgccagtatggctgcctccatgcccatgcagcatttggaccccactgccgatgcctcagtcatgatgcaagtgcctggtggtggtcaactcaacccaagcgcacgttccttcaagatagtcacagagagccctcttgttgtgatgtttctcttccagttgtatgcaaagcttgtgcagacaaatatcccgcacttgttgccactcatggtggcggccatctctatcaagggtcccgacaaggtgccgccacaccttaagacacccttcaacgatttaaagggtgcacaggtcaagaccttgtcatttctgacgtacctcctgaagagcaatgcagattacataaagtcatatgaggaaagcatatgcaagagcattgtgaacttgcttgttacgtgtcctcctgattctgtctccatcagaaaggagctattggttggtctgaaacaagttctcaacaccgagtacaagcgagggctgttccccttgattgacacacttcttgatgaaagggttctgattggcacaggtcgagtttgcatcgaaactttaagacctcttgcttacacccttcttgctgaattggtgcattatgttcgagaagatatttctcttccacagttgtcacggatcatctatttgttctctcggaatatgcatgattcttctttgacccttataattcatacaacatctgcccgcttgatgctgaacctggttgagcccatatatcaaaaaggtgttgaccagcaaagcatggacgaagcacgagttttattggggcgcatattggatgcattcgttgggaagtttaggaccctgaagcgaacaatccctcagttgcttgaagaaggtgaggaagggaaggaacaaccgaatctgagaatgaagcttgaagtcccattacagactgtgctgaatttgcagcaacctttggagtatactaaggaaatcaacgattacaaaagtctgataaagactcttgctgtcggaatgaagacaataatatggagcataacccatgctcactggccacgcccccagcaacaaaatcaacagtcttccaatttgtcacttcaacacttcagggggctgagggaggatgaggtgcggaagacatctggtgttctgaagtctggcgttcactgtctggctctttttaaggaaaaagacgatgatagggaaattctgcaatcattttcgcagatgctggctataatggaagctcgtgatattatggatatgttctccttttgcatgtctgacctctttgattctatgataaccaacaaccagctattgcacatattttcaacccttttgcaagctcccaaggttctgcggcctttcacagatgtattaattaatttccttgttagctcaaagcttgaagccctgaagcagccagattcacctgctgcaaagcttgttttgcaacttttccggttcttgttcattgctgcagctaaagctccagaaagctgtgaacgcacacttcagccacacgtgccggttataatggaagtctgcatgaggagtgccactgaagttgagaaacccctaggttacatgcaccttcttcgaaacatgtttcgtgcattgaacagtgctaaatttgattcattgatgcgtgatcttataccatctctgcaaccctgcctcaatatgttactctccatgcttgatgaagtcattcttgctttatggtctcatttaaggcctcctccatacacatggggcacaaagtctttggaacttttagggaagctggggggacgaaataggcgatttttgcgggagcctcttgcacttgaatccaaggaaaatccggagcatggattacgtttagttctgacttttgagcctgcgacaccttttttggttcctctggacagatgcatacaccaagctgttggtgcagttatgcaaggcaatggcttggaagcattctacaggaagaaggctcttcaattcattcgggtgtgcctcgattctttgttaaatctgagggaaaatgtacctggcgagggtgtgagccctggtgttctcggtacattgctaatctctaacctggatccctcaagacgtcggaatgatgcttcagatatgaagggagatttaggtgtgaagacaaaaacacaactactggctgaaaaatctgttttcaagactcttcttgtagctatcattgcagctaatgctgacaccagtcttcatgatgagaaggatgattatgttgtcgatatatgccggcattttgctatgcttttccatgttgactcaccatcctccagccaatctggatttatgcatcctattggttcttcactcccatctatcatcatgggatcaagatcaagatgcaacacttcatctaatctccgggagctggaccctttaatatttttggatgctttagttgaagtgctatccagcgaaaatcgtcaacatgcaaaagctgccctatctgctttgaatatttttgccgagacattaatctttcttgcacggatgaaacacactggtatgctaaggggaggtcctagcacccccatgctagtctctagtccatctttaaatccagtatattcacctcccccaagtgtgcgggttgctgtatttgaggaattgttacctcggttattgcattgttgctacagtagcacatggcaagctcagatgggtggtgtaatgggtctcggggcattggtcggtaaagtgtctgtggataccctatgcatttttcaggtcagagtcgtgcgtggtcttctttttgttcttaagaggttaccagtgcatgcaaacaaagagcaggaggagacaaatcatgtcctaacacaagtacttagagtagtaaacaacgcagatgaagcaaacagtgaacctcgacggcaaagttttcagggagttgttgaattccttgcacaggagttgtttaacccaaacgcttcaatggttgtgagaaagaacgtgcaggcttgcttatcactgcttgcaagcagaactggcagtgaggtttctgaattgcttgagcctctctatttgccattgcttcagcctctgatttcacgacctcttcgttcgaagaatattgagcaacagcactacaaattgccgaggctgatgaaactatatgggtcactaggatgatgaatgcgaaagtagttctcacatggaacaaactcagaaccgcatgcattgaactactctgtactgcaatggcatggggagatctaaaagctcaaaatcatactgaattgcgagcaaagattatttcaatgtttttcaaatctctaacatgcagaacaacagagattgtcaatgttgctaaggagggacttcgtcaggtggttcaacagcaaaggatgccaaaggatcttctacagagcagcttaaggcccattctagtaaacttagcaaacacaaagagccttagcatgccattgctacaaggattggctcgcctgcttgaattactgtcaaattggtttaatgtcactttgggtgccaagctattggatcacttgaaaaaatggctggagccagaaaagcttgtccagactcaaaaatcttggaaggctggagatgaaccaaaaatagcagcagctatgatcgagctgtttcaccttcttcccccggcagcaagcaaattcttggatgaccttgttaccttggtaattgatctggaaagggcacttcctgaagatcagttttacagtgagatcaacagtccataccgtgctccactggcaaaatttttgaatcgttatgttctggaggctgttgactattttcttgctcgattaagccatccaaagtatttcaggaggtttatgtacataatctgctcggatactggggacctaagggatgcacttgcaaggtcacctcagaaaatacttgcaagtgccttttctcagttttactctcaaagtgaagcatctgctgctcaattatcttctgtaaaggatgaagcccttactggggctgtatctgagagtattactgtacaatcttcatcaaacatggttactacttctgagagttactttaatggattagagcttgtctcagcccttgtgaaattgatgccagagtggctccgtaacaaccgggttgtctttgacaccttgctacttgcttggaaatcacctgcaagacttgcgaggttgcagaacgagcaggatttgagtttaccccaggtgatggaaagcaagaggctgatcaaatgcttcctgaattacttaagacacgatcgaactgaagttggtgcactctttgatatgttatcagtattcttgtaccgcagtcgtatagattatagctttcttaaggaattttatgtcatagaggttgctgaaggatactccccgaatttgaagaaaactatccttaatcattttctgaacattttccagtcaaaacaatatggacaagatcatttagttgttaccatgcagattcttatacttccaatgctagctcattcatttcaaaatggacaaagttgggaagttgttgatcctactataattaaaactattgttgagaagcttcttgatcctccagaagaggtcagcgctgaatacgacgaaccattgaggatagaacttcttcagctagctacattacttttgaagtatctacagactgatcttgttcaccatcgaaaggaactcataaagtttggttggaatcatctcaagcgtgaagataactcgagcaaacagtgggcctttgtgaatgtttgtcatttcttagaggcctatcaagctcctgaaaagattattttacaggtcttcattgctctgctacggacatgccaaccagaaaacaagctgttggtgaagcaagctctcgatatcctcatgcctgccctacctaggagacttcctcctgaaaaaaatgatagccgcatgccgatatggatcagatacaccaagaaagttctcgtagaggaagggcattcaattccaaatatgattcacatattccagcttattgttcgccatgcggacctcttctatagttgcagagcccactttgttcctcagatggtcaactctcttagtcgccttggattaccatacaacacaacagcggaaaatagaaggcttgcaattgaacttgctgggttggtagtggcatgggaaagacagagacaaagtgagatgaaagtggcgcaggaaagtgagagccagaatcaattaggtgacatgcttaatccttctgttattggtggtgatccaaaacgctcctctgatgttccgtcgtttgctgatgatttgagtaagagagtgaaagttgagcctggtttgcaacctctttgtgtaatgtcgccgggtggggcatctatacctaatattgaaacacctggatcttcaggtctacctgatgaggagtataaacctaatgcagcaatggaggagatgatcattaccttcctaattagggtatcacttgtgattgagcctaaggataaggaatctagctcaatgtacaagcaagctcttgatctactgactcaagctctggaagtctggccaaatgccaatgttaaattcaattatctggagaaattacttgggaatctgtcacccactcctcagtccaaggaccctgcatcagccctcgcacaaggacttgatgttatgaacaaagtcttggagaaacaaccccgtctcttcatccgaaataacatcaatcatatttctcaaatactggaaccttgctttggcaacaaaatgctggatgctggaaagtcactttgttccttgctcaagatggtgttcagtgcttttcctcttgaagcagcaacaacgccacaagatataaagttgttgcatcaaagggttcaagaactcattcacaagaatcttgctgctgttacaactcagcagatagcacttgagctcaacaatgctcactcaatcattagcttttcattgtttgtcctcaatgcacttgcagaagtacagaagaatttcattgacccgttcattggcttgcttttccgtgttctgcaacgtcttgcacgtgacatggggtcttctgctggcagccatatccgacaaggacagaggcctgaactggattcatcagttaactcacggtctaccatagattctactgtcatatctaacatgaagactgtcttaaaacttataagtgagagggtgatgtcctcttctgaccacagaaaatctatgggccaaatacttcaagctcttctttcagagaaaggcactgattccagcattcttctgtgcatgctagacatgataaaaacttggattgaggaagattgtaggcttgcttcatcaactggttctgttagttcacttaacccaaaggaaataataacttatcttcataagttatcattagttgacagaaaaagctttcctccagctgcacaagaagaatgggatgcaaaatacttgcagcttctttattcactgtgtgcagattcaaccaagtatccgttgtcttttcggcaagaatttttccataagattgagagacagtatatgcttggacttagagctaaagatccagaaatgaggaagcgattcttcaagctttaccatgatacagtgggaaaaacattattttctagattgcaatttataatacagttacaggactgggaagctgtgagtgatgttttctggttgaagcaaggtcttgatctcgttttggcaatattagtagaaaatgaaccaattacacttgcagcaaattctgctcgagtaccaacgcttatgatagctgggcctgttccagatcgcatcaccatgccacagcaggttcctgatgctcaggaaagcatggatggtacaacactatcgtttgactctcttgctgcaaggcatgctcagttcttaaatgacgcgaacaagcttgtggtggcagatatcatggctccattgaaggaacttgcatttgctgatcccaatgttgcatatcatttgtgggtgcttgttttcccaattgtttgggtcaccttacataaagaggaacaagttgccctagctaagccaataatcgcgcttctatcgaaagattaccacaagaggcagcagggctgcagacctaacgttgctcaggcacttcttgagggtcttcatttgagccatccccaaccacgcatgcctagtgagcttatcaaatatattggaaaaacttgcaatgtgtggtatattgcaattgcattactcgagagtcatatagtgcatatgaatgaggccaagtgctccgagtcattggctgagttatacagacttcttaatgaagacgacatgaggtgtggattatggaagagaaaatcaatcactgcagaaacaagggctggtctttcacttgcccagcatggttactggcaacaagcacaaaatctattttaccaggctatgattaaagctactcagggaacatacaataataccgtcccaaaggctgaaatgtgcctttgggaggaacagtggttgtcctgtgcgtctcatttaggtcagtgggaagtcttagctgnn

SEQ ID NO: 70550 - DNA, 7908 bp, Zea Mays
  misc_feature (7907)..(7908): n is a, c, g, or t
tcgccctcgtcttcctccaagtccgtccccgtctctacccccaccccaaaccctcggctcgcgagcgcgagggagaccccttcctccgagtccataacacggggttgccattcgcgtcgggggaaacgagcccgcgcctcctgcccctgcactcttacggtcctacctccagccatccgctcctccgcccagctcgcggagtcttcccagcgccgatcttcaaaaccctaagctctggcgcggtaaggttggagccggacgcgcacgggcggggcgcccgccatggcgcccatcaacagcggcaacatggagcagcactcgcagcggctcctcgagcccgacctccctgtgcaagtccgactgcagcttgccatggaagttcgggacagcctggagatgacgcacactccagactacctcaactttcttcgctgctatttcagagccttctcagcaattctcaccgcttacaccaagccacaggccacagagaatgctgagcacaagctacggaatgttgtgatcgagatactcaaccgccttccacacagcgaggtgctcagaccatttgtgcaggatctgctcaagctttctctccgtgtgttgacacaggacaacgaggacaatgctctccttgccatccgaattgtgtttgacctcctccgtaacttccgccctactgtcgaggcggaggtgcagccatttcttgactttgtggttaacatataccataaatttcccacaaccgttagctacttcttcgataatcccaacacaagtgccagtatggctgcctccatgcccatgcagcatttggaccccactgccgatgcctcagtcatgatgcaagtgcctggtggtggtcaactcaacccaagcgcacgttccttcaagatagtcacagagagccctcttgttgtgatgtttctcttccagttgtatgcaaagcttgtgcagacaaatatcccgcacttgttgccactcatggtggcggccatctctatcaagggtcccgacaaggtgccgccacaccttaagacacccttcaacgatttaaagggtgcacaggtcaagaccttgtcatttctgacgtacctcctgaagagcaatgcagattacataaagtcatatgaggaaagcatatgcaagagcattgtgaacttgcttgttacgtgtcctcctgattctgtctccatcagaaaggagctattggttggtctgaaacaagttctcaacaccgagtacaagcgagggctgttccccttgattgacacacttcttgatgaaagggttctgattggcacaggtcgagtttgcatcgaaactttaagacctcttgcttacacccttcttgctgaattggtgcattatgttcgagaagatatttctcttccacaggttgagcccatatatcaaaaaggtgttgaccagcaaagcatggacgaagcacgagttttattggggcgcatattggatgcattcgttgggaagtttaggaccctgaagcgaacaatccctcagttgcttgaagaaggtgaggaagggaaggaacaaccgaatctgagaatgaagcttgaagtcccattacagactgtgctgaatttgcagcaacctttggagtatactaaggaaatcaacgattacaaaagtctgataaagactcttgctgtcggaatgaagacaataatatggagcataacccatgctcactggccacgcccccaggtgcggaagacatctggtgttctgaagtctggcgttcactgtctggctctttttaaggaaaaagacgatgatagggaaattctgcaatcattttcgcagatgctggctataatggaagctcgtgatattatggatatgttctccttttgcatgtctgacctctttgattctatgataaccaacaaccagctattgcacatattttcaacccttttgcaagctcccaaggttctgcggcctttcacagatgtattaattaatttccttgttagctcaaagcttgaagccctgaagcagccagattcacctgctgcaaagcttgttttgcaacttttccggttcttgttcattgctgcagctaaagctccagaaagctgtgaacgcacacttcagccacacgtgccggttataatggaagtctgcatgaggagtgccactgaagttgagaaacccctaggttacatgcaccttcttcgaaacatgtttcgtgcattgaacagtgctaaatttgattcattgatgcgtgatcttataccatctctgcaaccctgcctcaatatgttactctccatgcttgatgaagtcattcttgctttatggtctcatttaaggcctcctccatacacatggggcacaaagtctttggaacttttagggaagctggggggacgaaataggcgatttttgcgggagcctcttgcacttgaatccaaggaaaatccggagcatggattacgtttagttctgacttttgagcctgcgacaccttttttggttcctctggacagatgcatacaccaagctgttggtgcagttatgcaaggcaatggcttggaagcattctacaggaagaaggctcttcaattcattcgggtgtgcctcgattctttgttaaatctgagggaaaatgtacctggcgagggtgtgagccctggtgttctcggtacattgctaatctctaacctggatccctcaagacgtcggaatgatgcttcagatatgaagggagatttaggtgtgaagacaaaaacacaactactggctgaaaaatctgttttcaagactcttcttgtagctatcattgcagctaatgctgacaccagtcttcatgatgagaaggatgattatgttgtcgatatatgccggcattttgctatgcttttccatgttgactcaccatcctccagccaatctggatttatgcatcctattggttcttcactcccatctatcatcatgggatcaagatcaagatgcaacacttcatctaatctccgggagctggaccctttaatatttttggatgctttagttgaagtgctatccagcgaaaatcgtcaacatgcaaaagctgccctatctgctttgaatatttttgccgagacattaatctttcttgcacggatgaaacacactggtatgctaaggggaggtcctagcacccccatgctagtctctagtccatctttaaatccagtatattcacctcccccaagtgtgcgggttgctgtatttgaggaattgttacctcggttattgcattgttgctacagtagcacatggcaagctcagatgggtggtgtaatgggtctcggggcattggtcggtaaagtgtctgtggataccctatgcatttttcaggtcagagtcgtgcgtggtcttctttttgttcttaagaggttaccagtgcatgcaaacaaagagcaggaggagacaaatcatgtcctaacacaagtacttagagtagtaaacaacgcagatgaagcaaacagtgaacctcgacggcaaagttttcagggagttgttgaattccttgcacaggagttgtttaacccaaacgcttcaatggttgtgagaaagaacgtgcaggcttgcttatcactgcttgcaagcagaactggcagtgaggtttctgaattgcttgagcctctctatttgccattgcttcagcctctgatttcacgacctcttcgttcgaagaatattgagcaacagcactacaaattgccgaggctgatgaaactatatgggtcactaggatgatgaatgcgaaagtagttctcacatggaacaaactcagaaccgcatgcattgaactactctgtactgcaatggcatggggagatctaaaagctcaaaatcatactgaattgcgagcaaagattatttcaatgtttttcaaatctctaacatgcagaacaacagagattgtcaatgttgctaaggagggacttcgtcaggtggttcaacagcaaaggatgccaaaggatcttctacagagcagcttaaggcccattctagtaaacttagcaaacacaaagagccttagcatgccattgctacaaggattggctcgcctgcttgaattactgtcaaattggtttaatgtcactttgggtgccaagctattggatcacttgaaaaaatggctggagccagaaaagcttgtccagactcaaaaatcttggaaggctggagatgaaccaaaaatagcagcagctatgatcgagctgtttcaccttcttcccccggcagcaagcaaattcttggatgaccttgttaccttggtaattgatctggaaagggcacttcctgaagatcagttttacagtgagatcaacagtccataccgtgctccactggcaaaatttttgaatcgttatgttctggaggctgttgactattttcttgctcgattaagccatccaaagtatttcaggaggtttatgtacataatctgctcggatactggggacctaagggatgcacttgcaaggtcacctcagaaaatacttgcaagtgccttttctcagttttactctcaaagtgaagcatctgctgctcaattatcttctgtaaaggatgaagcccttactggggctgtatctgagagtattactgtacaatcttcatcaaacatggttactacttctgagagttactttaatggattagagcttgtctcagcccttgtgaaattgatgccagagtggctccgtaacaaccgggttgtctttgacaccttgctacttgcttggaaatcacctgcaagacttgcgaggttgcagaacgagcaggatttgagtttaccccaggtgatggaaagcaagaggctgatcaaatgcttcctgaattacttaagacacgatcgaactgaagttggtgcactctttgatatgttatcagtattcttgtaccgcagtcgtatagattatagctttcttaaggaattttatgtcatagaggttgctgaaggatactccccgaatttgaagaaaactatccttaatcattttctgaacattttccagtcaaaacaatatggacaagatcatttagttgttaccatgcagattcttatacttccaatgctagctcattcatttcaaaatggacaaagttgggaagttgttgatcctactataattaaaactattgttgagaagcttcttgatcctccagaagaggtcagcgctgaatacgacgaaccattgaggatagaacttcttcagctagctacattacttttgaagtatctacagactgatcttgttcaccatcgaaaggaactcataaagtttggttggaatcatctcaagcgtgaagataactcgagcaaacagtgggcctttgtgaatgtttgtcatttcttagaggcctatcaagctcctgaaaagattattttacaggtcttcattgctctgctacggacatgccaaccagaaaacaagctgttggtgaagcaagctctcgatatcctcatgcctgccctacctaggagacttcctcctgaaaaaaatgatagccgcatgccgatatggatcagatacaccaagaaagttctcgtagaggaagggcattcaattccaaatatgattcacatattccagcttattgttcgccatgcggacctcttctatagttgcagagcccactttgttcctcagatggtcaactctcttagtcgccttggattaccatacaacacaacagcggaaaatagaaggcttgcaattgaacttgctgggttggtagtggcatgggaaagacagagacaaagtgagatgaaagtggcgcaggaaagtgagagccagaatcaattaggtatcacttgtgattgagcctaaggataaggaatctagctcaatgtacaagcaagctcttgatctactgactcaagctctggaagtctggccaaatgccaatgttaaattcaattatctggagaaattacttgggaatctgtcacccactcctcagtccaaggaccctgcatcagccctcgcacaaggacttgatgttatgaacaaagtcttggagaaacaaccccgtctcttcatccgaaataacatcaatcatatttctcaaatactggaaccttgctttggcaacaaaatgctggatgctggaaagtcactttgttccttgctcaagatggtgttcagtgcttttcctcttgaagcagcaacaacgccacaagatataaagttgttgcatcaaagggttcaagaactcattcacaagaatcttgctgctgttacaactcagcagatagcacttgagctcaacaatgctcactcaatcattagcttttcattgtttgtcctcaatgcacttgcagaagtacagaagaatttcattgacccgttcattggcttgcttttccgtgttctgcaacgtcttgcacgtgacatggggtcttctgctggcagccatatccgacaaggacagaggcctgaactggattcatcagttaactcacggtctaccatagattctactgtcatatctaacatgaagactgtcttaaaacttataagtgagagggtgatgtcctcttctgaccacagaaaatctatgggccaaatacttcaagctcttctttcagagaaaggcactgattccagcattcttctgtgcatgctagacatgataaaaacttggattgaggaagattgtaggcttgcttcatcaactggttctgttagttcacttaacccaaaggaaataataacttatcttcataagttatcattagttgacagaaaaagctttcctccagctgcacaagaagaatgggatgcaaaatacttgcagcttctttattcactgtgtgcagattcaaccaagtatccgttgtcttttcggcaagaatttttccataagattgagagacagtatatgcttggacttagagctaaagatccagaaatgaggaagcgattcttcaagctttaccatgatacagtgggaaaaacattattttctagattgcaatttataatacagttacaggactgggaagctgtgagtgatgttttctggttgaagcaaggtcttgatctcgttttggcaatattagtagaaaatgaaccaattacacttgcagcaaattctgctcgagtaccaacgcttatgatagctgggcctgttccagatcgcatcaccatgccacagcaggttcctgatgctcaggaaagcatggatggtacaacactatcgtttgactctcttgctgcaaggcatgctcagttcttaaatgacgcgaacaagcttgtggtggcagatatcatggctccattgaaggaacttgcatttgctgatcccaatgttgcatatcatttgtgggtgcttgttttcccaattgtttgggtcaccttacataaagaggaacaagttgccctagctaagccaataatcgcgcttctatcgaaagattaccacaagaggcagcagggctgcagacctaacgttgctcaggcacttcttgagggtcttcatttgagccatccccaaccacgcatgcctagtgagcttatcaaatatattggaaaaacttgcaatgtgtggtatattgcaattgcattactcgagagtcatatagtgcatatgaatgaggccaagtgctccgagtcattggctgagttatacagacttcttaatgaagacgacatgaggtgtggattatggaagagaaaatcaatcactgcagaaacaagggctggtctttcacttgcccagcatggttactggcaacaagcacaaaatctattttaccaggctatgattaaagctactcagggaacatacaataataccgtcccaaaggctgaaatgtgcctttgggaggaacagtggttgtcctgtgcgtctcatttaggtcagtgggaagtcttagctgnn

SEQ ID NO: 70551 - DNA, 8173 bp, Zea Mays
  misc_feature (8172)..(8173): n is a, c, g, or t
tcgccctcgtcttcctccaagtccgtccccgtctctacccccaccccaaaccctcggctcgcgagcgcgagggagaccccttcctccgagtccataacacggggttgccattcgcgtcgggggaaacgagcccgcgcctcctgcccctgcactcttacggtcctacctccagccatccgctcctccgcccagctcgcggagtcttcccagcgccgatcttcaaaaccctaagctctggcgcggtaaggttggagccggacgcgcacgggcggggcgcccgccatggcgcccatcaacagcggcaacatggagcagcactcgcagcggctcctcgagcccgacctccctgtgcaagtccgactgcagcttgccatggaagttcgggacagcctggagatgacgcacactccagactacctcaactttcttcgctgctatttcagagccttctcagcaattctcaccgcttacaccaagccacaggccacagagaatgctgagcacaagctacggaatgttgtgatcgagatactcaaccgccttccacacagcgaggtgctcagaccatttgtgcaggatctgctcaagctttctctccgtgtgttgacacaggacaacgaggacaatgctctccttgccatccgaattgtgtttgacctcctccgtaacttccgccctactgtcgaggcggaggtgcagccatttcttgactttgtggttaacatataccataaatttcccacaaccgttagctacttcttcgataatcccaacacaagtgccagtatggctgcctccatgcccatgcagcatttggaccccactgccgatgcctcagtcatgatgcaagtgcctggtggtggtcaactcaacccaagcgcacgttccttcaagatagtcacagagagccctcttgttgtgatgtttctcttccagttgtatgcaaagcttgtgcagacaaatatcccgcacttgttgccactcatggtggcggccatctctatcaagggtcccgacaaggtgccgccacaccttaagacacccttcaacgatttaaagggtgcacaggtcaagaccttgtcatttctgacgtacctcctgaagagcaatgcagattacataaagtcatatgaggaaagcatatgcaagagcattgtgaacttgcttgttacgtgtcctcctgattctgtctccatcagaaaggcaagatacgacctggagctattggttggtctgaaacaagttctcaacaccgagtacaagcgagggctgttccccttgattgacacacttcttgatgaaagggttctgattggcacaggtcgagtttgcatcgaaactttaagacctcttgcttacacccttcttgctgaattggtgcattatgttcgagaagatatttctcttccacagttgtcacggatcatctatttgttctctcggaatatgcatgattcttctttgacccttataattcatacaacatctgcccgcttgatgctgaacctggttgagcccatatatcaaaaaggtgttgaccagcaaagcatggacgaagcacgagttttattggggcgcatattggatgcattcgttgggaagtttaggaccctgaagcgaacaatccctcagttgcttgaagaaggtgaggaagggaaggaacaaccgaatctgagaatgaagcttgaagtcccattacagactgtgctgaatttgcagcaacctttggagtatactaaggaaatcaacgattacaaaagtctgataaagactcttgctgtcggaatgaagacaataatatggagcataacccatgctcactggccacgcccccagcaacaaaatcaacagtcttccaatttgtcacttcaacacttcagggggctgagggaggatgaggtgcggaagacatctggtgttctgaagtctggcgttcactgtctggctctttttaaggaaaaagacgatgatagggaaattctgcaatcattttcgcagatgctggctataatggaagctcgtgatattatggatatgttctccttttgcatgtctgacctctttgattctatgataaccaacaaccagctattgcacatattttcaacccttttgcaagctcccaaggttctgcggcctttcacagatgtattaattaatttccttgttagctcaaagcttgaagccctgaagcagccagattcacctgctgcaaagcttgttttgcaacttttccggttcttgttcattgctgcagctaaagctccagaaagctgtgaacgcacacttcagccacacgtgccggttataatggaagtctgcatgaggagtgccactgaagttgagaaacccctaggttacatgcaccttcttcgaaacatgtttcgtgcattgaacagtgctaaatttgattcattgatgcgtgatcttataccatctctgcaaccctgcctcaatatgttactctccatgcttgatgaagtcattcttgctttatggtctcatttaaggcctcctccatacacatggggcacaaagtctttggaacttttagggaagctggggggacgaaataggcgatttttgcgggagcctcttgcacttgaatccaaggaaaatccggagcatggattacgtttagttctgacttttgagcctgcgacaccttttttggttcctctggacagatgcatacaccaagctgttggtgcagttatgcaaggcaatggcttggaagcattctacaggaagaaggctcttcaattcattcgggtgtgcctcgattctttgttaaatctgagggaaaatgtacctggcgagggtgtgagccctggtgttctcggtacattgctaatctctaacctggatccctcaagacgtcggaatgatgcttcagatatgaagggagatttaggtgtgaagacaaaaacacaactactggctgaaaaatctgttttcaagactcttcttgtagctatcattgcagctaatgctgacaccagtcttcatgatgagaaggatgattatgttgtcgatatatgccggcattttgctatgcttttccatgttgactcaccatcctccagccaatctggatttatgcatcctattggttcttcactcccatctatcatcatgggatcaagatcaagatgcaacacttcatctaatctccgggagctggaccctttaatatttttggatgctttagttgaagtgctatccagcgaaaatcgtcaacatgcaaaagctgccctatctgctttgaatatttttgccgagacattaatctttcttgcacggatgaaacacactggtatgctaaggggaggtcctagcacccccatgctagtctctagtccatctttaaatccagtatattcacctcccccaagtgtgcgggttgctgtatttgaggaattgttacctcggttattgcattgttgctacagtagcacatggcaagctcagatgggtggtgtaatgggtctcggggcattggtcggtaaagtgtctgtggataccctatgcatttttcaggtcagagtcgtgcgtggtcttctttttgttcttaagaggttaccagtgcatgcaaacaaagagcaggaggagacaaatcatgtcctaacacaagtacttagagtagtaaacaacgcagatgaagcaaacagtgaacctcgacggcaaagttttcagggagttgttgaattccttgcacaggagttgtttaacccaaacgcttcaatggttgtgagaaagaacgtgcaggcttgcttatcactgcttgcaagcagaactggcagtgaggtttctgaattgcttgagcctctctatttgccattgcttcagcctctgatttcacgacctcttcgttcgaagaatattgagcaacaggtgggcaccgttactgctttgaacttctgtcttgcactcagaccaccccttctaaaactatctcctgaacttgtcaattttttgcaagaagcactacaaattgccgaggctgatgaaactatatgggtcactaggatgatgaatgcgaaagtagttctcacatggaacaaactcagaaccgcatgcattgaactactctgtactgcaatggcatggggagatctaaaagctcaaaatcatactgaattgcgagcaaagattatttcaatgtttttcaaatctctaacatgcagaacaacagagattgtcaatgttgctaaggagggacttcgtcaggtggttcaacagcaaaggatgccaaaggatcttctacagagcagcttaaggcccattctagtaaacttagcaaacacaaagagccttagcatgccattgctacaaggattggctcgcctgcttgaattactgtcaaattggtttaatgtcactttgggtgccaagctattggatcacttgaaaaaatggctggagccagaaaagcttgtccagactcaaaaatcttggaaggctggagatgaaccaaaaatagcagcagctatgatcgagctgtttcaccttcttcccccggcagcaagcaaattcttggatgaccttgttaccttggtaattgatctggaaagggcacttcctgaagatcagttttacagtgagatcaacagtccataccgtgctccactggcaaaatttttgaatcgttatgttctggaggctgttgactattttcttgctcgattaagccatccaaagtatttcaggaggtttatgtacataatctgctcggatactggggacctaagggatgcacttgcaaggtcacctcagaaaatacttgcaagtgccttttctcagttttactctcaaagtgaagcatctgctgctcaattatcttctgtaaaggatgaagcccttactggggctgtatctgagagtattactgtacaatcttcatcaaacatggttactacttctgagagttactttaatggattagagcttgtctcagcccttgtgaaattgatgccagagtggctccgtaacaaccgggttgtctttgacaccttgctacttgcttggaaatcacctgcaagacttgcgaggttgcagaacgagcaggatttgagtttaccccaggtgatggaaagcaagaggctgatcaaatgcttcctgaattacttaagacacgatcgaactgaagttggtgcactctttgatatgttatcagtattcttgtaccgcagtcgtatagattatagctttcttaaggaattttatgtcatagaggttgctgaaggatactccccgaatttgaagaaaactatccttaatcattttctgaacattttccagtcaaaacaatatggacaagatcatttagttgttaccatgcagattcttatacttccaatgctagctcattcatttcaaaatggacaaagttgggaagttgttgatcctactataattaaaactattgttgagaagcttcttgatcctccagaagaggtcagcgctgaatacgacgaaccattgaggatagaacttcttcagctagctacattacttttgaagtatctacagactgatcttgttcaccatcgaaaggaactcataaagtttggttggaatcatctcaagcgtgaagataactcgagcaaacagtgggcctttgtgaatgtttgtcatttcttagaggcctatcaagctcctgaaaagattattttacaggtcttcattgctctgctacggacatgccaaccagaaaacaagctgttggtgaagcaagctctcgatatcctcatgcctgccctacctaggagacttcctcctgaaaaaaatgatagccgcatgccgatatggatcagatacaccaagaaagttctcgtagaggaagggcattcaattccaaatatgattcacatattccagcttattgttcgccatgcggacctcttctatagttgcagagcccactttgttcctcagatggtcaactctcttagtcgccttggattaccatacaacacaacagcggaaaatagaaggcttgcaattgaacttgctgggttggtagtggcatgggaaagacagagacaaagtgagatgaaagtggcgcaggaaagtgagagccagaatcaattaggtatcacttgtgattgagcctaaggataaggaatctagctcaatgtacaagcaagctcttgatctactgactcaagctctggaagtctggccaaatgccaatgttaaattcaattatctggagaaattacttgggaatctgtcacccactcctcagtccaaggaccctgcatcagccctcgcacaaggacttgatgttatgaacaaagtcttggagaaacaaccccgtctcttcatccgaaataacatcaatcatatttctcaaatactggaaccttgctttggcaacaaaatgctggatgctggaaagtcactttgttccttgctcaagatggtgttcagtgcttttcctcttgaagcagcaacaacgccacaagatataaagttgttgcatcaaagggttcaagaactcattcacaagaatcttgctgctgttacaactcagcagatagcacttgagctcaacaatgctcactcaatcattagcttttcattgtttgtcctcaatgcacttgcagaagtacagaagaatttcattgacccgttcattggcttgcttttccgtgttctgcaacgtcttgcacgtgacatggggtcttctgctggcagccatatccgacaaggacagaggcctgaactggattcatcagttaactcacggtctaccatagattctactgtcatatctaacatgaagactgtcttaaaacttataagtgagagggtgatgtcctcttctgaccacagaaaatctatgggccaaatacttcaagctcttctttcagagaaaggcactgattccagcattcttctgtgcatgctagacatgataaaaacttggattgaggaagattgtaggcttgcttcatcaactggttctgttagttcacttaacccaaaggaaataataacttatcttcataagttatcattagttgacagaaaaagctttcctccagctgcacaagaagaatgggatgcaaaatacttgcagcttctttattcactgtgtgcagattcaaccaagtatccgttgtcttttcggcaagaatttttccataagattgagagacagtatatgcttggacttagagctaaagatccagaaatgaggaagcgattcttcaagctttaccatgatacagtgggaaaaacattattttctagattgcaatttataatacagttacaggactgggaagctgtgagtgatgttttctggttgaagcaaggtcttgatctcgttttggcaatattagtagaaaatgaaccaattacacttgcagcaaattctgctcgagtaccaacgcttatgatagctgggcctgttccagatcgcatcaccatgccacagcaggttcctgatgctcaggaaagcatggatggtacaacactatcgtttgactctcttgctgcaaggcatgctcagttcttaaatgacgcgaacaagcttgtggtggcagatatcatggctccattgaaggaacttgcatttgctgatcccaatgttgcatatcatttgtgggtgcttgttttcccaattgtttgggtcaccttacataaagaggaacaagttgccctagctaagccaataatcgcgcttctatcgaaagattaccacaagaggcagcagggctgcagacctaacgttgctcaggcacttcttgagggtcttcatttgagccatccccaaccacgcatgcctagtgagcttatcaaatatattggaaaaacttgcaatgtgtggtatattgcaattgcattactcgagagtcatatagtgcatatgaatgaggccaagtgctccgagtcattggctgagttatacagacttcttaatgaagacgacatgaggtgtggattatggaagagaaaatcaatcactgcagaaacaagggctggtctttcacttgcccagcatggttactggcaacaagcacaaaatctattttaccaggctatgattaaagctactcagggaacatacaataataccgtcccaaaggctgaaatgtgcctttgggaggaacagtggttgtcctgtgcgtctcatttaggtcagtgggaagtcttagctgnn

SEQ ID NO: 70552 - DNA, 8619 bp, Zea Mays
  misc_feature (8618)..(8619): n is a, c, g, or t
tcgccctcgtcttcctccaagtccgtccccgtctctacccccaccccaaaccctcggctcgcgagcgcgagggagaccccttcctccgagtccataacacggggttgccattcgcgtcgggggaaacgagcccgcgcctcctgcccctgcactcttacggtcctacctccagccatccgctcctccgcccagctcgcggagtcttcccagcgccgatcttcaaaaccctaagctctggcgcggtaaggttggagccggacgcgcacgggcggggcgcccgccatggcgcccatcaacagcggcaacatggagcagcactcgcagcggctcctcgagcccgacctccctgtgcaagtccgactgcagcttgccatggaagttcgggacagcctggagatgacgcacactccagactacctcaactttcttcgctgctatttcagagccttctcagcaattctcaccgcttacaccaagccacaggccacagagaatgctgagcacaagctacggaatgttgtgatcgagatactcaaccgccttccacacagcgaggtgctcagaccatttgtgcaggatctgctcaagctttctctccgtgtgttgacacaggacaacgaggacaatgctctccttgccatccgaattgtgtttgacctcctccgtaacttccgccctactgtcgaggcggaggtgcagccatttcttgactttgtggttaacatataccataaatttcccacaaccgttagctacttcttcgataatcccaacacaagtgccagtatggctgcctccatgcccatgcagcatttggaccccactgccgatgcctcagtcatgatgcaagtgcctggtggtggtcaactcaacccaagcgcacgttccttcaagatagtcacagagagccctcttgttgtgatgtttctcttccagttgtatgcaaagcttgtgcagacaaatatcccgcacttgttgccactcatggtggcggccatctctatcaagggtcccgacaaggtgccgccacaccttaagacacccttcaacgatttaaagggtgcacagaccttgtcatttctgacgtacctcctgaagagcaatgcagattacataaagtcatatgaggaaagcatatgcaagagcattgtgaacttgcttgttacgtgtcctcctgattctgtctccatcagaaaggagctattggttggtctgaaacaagttctcaacaccgagtacaagcgagggctgttccccttgattgacacacttcttgatgaaagggttctgattggcacaggtcgagtttgcatcgaaactttaagacctcttgcttacacccttcttgctgaattggtgcattatgttcgagaagatatttctcttccacagttgtcacggatcatctatttgttctctcggaatatgcatgattcttctttgacccttataattcatacaacatctgcccgcttgatgctgaacctggttgagcccatatatcaaaaaggtgttgaccagcaaagcatggacgaagcacgagttttattggggcgcatattggatgcattcgttgggaagtttaggaccctgaagcgaacaatccctcagttgcttgaagaaggtgaggaagggaaggaacaaccgaatctgagaatgaagcttgaagtcccattacagactgtgctgaatttgcagcaacctttggagtatactaaggaaatcaacgattacaaaagtctgataaagactcttgctgtcggaatgaagacaataatatggagcataacccatgctcactggccacgcccccagcaacaaaatcaacagtcttccaatttgtcacttcaacacttcagggggctgagggaggatgaggtgcggaagacatctggtgttctgaagtctggcgttcactgtctggctctttttaaggaaaaagacgatgatagggaaattctgcaatcattttcgcagatgctggctataatggaagctcgtgatattatggatatgttctccttttgcatgtctgacctctttgattctatgataaccaacaaccagctattgcacatattttcaacccttttgcaagctcccaaggttctgcggcctttcacagatgtattaattaatttccttgttagctcaaagcttgaagccctgaagcagccagattcacctgctgcaaagcttgttttgcaacttttccggttcttgttcattgctgcagctaaagctccagaaagctgtgaacgcacacttcagccacacgtgccggttataatggaagtctgcatgaggagtgccactgaagttgagaaacccctaggttacatgcaccttcttcgaaacatgtttcgtgcattgaacagtgctaaatttgattcattgatgcgtgatcttataccatctctgcaaccctgcctcaatatgttactctccatgcttgatggtccgataagtgaagatatgcgggacttgattttggagctttgcctgattttacctgcccgcttgagttctttattgccccacatacctcgtctaatgaaacctcttgttcttgctctaaaaggtagtgatgaccttgtgagcttagctctacgtacacttgagttctggattgatagtctgaatcctgactttttggaacctagcatggcaaatttaatgtcagaagtcattcttgctttatggtctcatttaaggcctcctccatacacatggggcacaaagtctttggaacttttagggaagctggggggacgaaataggcgatttttgcgggagcctcttgcacttgaatccaaggaaaatccggagcatggattacgtttagttctgacttttgagcctgcgacaccttttttggttcctctggacagatgcatacaccaagctgttggtgcagttatgcaaggcaatggcttggaagcattctacaggaagaaggctcttcaattcattcgggtgtgcctcgattctttgttaaatctgagggaaaatgtacctggcgagggtgtgagccctggtgttctcggtacattgctaatctctaacctggatccctcaagacgtcggaatgatgcttcagatatgaagggagatttaggtgtgaagacaaaaacacaactactggctgaaaaatctgttttcaagactcttcttgtagctatcattgcagctaatgctgacaccagtcttcatgatgagaaggatgattatgttgtcgatatatgccggcattttgctatgcttttccatgttgactcaccatcctccagccaatctggatttatgcatcctattggttcttcactcccatctatcatcatgggatcaagatcaagatgcaacacttcatctaatctccgggagctggaccctttaatatttttggatgctttagttgaagtgctatccagcgaaaatcgtcaacatgcaaaagctgccctatctgctttgaatatttttgccgagacattaatctttcttgcacggatgaaacacactggtatgctaaggggaggtcctagcacccccatgctagtctctagtccatctttaaatccagtatattcacctcccccaagtgtgcgggttgctgtatttgaggaattgttacctcggttattgcattgttgctacagtagcacatggcaagctcagatgggtggtgtaatgggtctcggggcattggtcggtaaagtgtctgtggataccctatgcatttttcaggtcagagtcgtgcgtggtcttctttttgttcttaagaggttaccagtgcatgcaaacaaagagcaggaggagacaaatcatgtcctaacacaagtacttagagtagtaaacaacgcagatgaagcaaacagtgaacctcgacggcaaagttttcagggagttgttgaattccttgcacaggagttgtttaacccaaacgcttcaatggttgtgagaaagaacgtgcaggcttgcttatcactgcttgcaagcagaactggcagtgaggtttctgaattgcttgagcctctctatttgccattgcttcagcctctgatttcacgacctcttcgttcgaagaatattgagcaacaggtgggcaccgttactgctttgaacttctgtcttgcactcagaccaccccttctaaaactatctcctgaacttgtcaattttttgcaagaagcactacaaattgccgaggctgatgaaactatatgggtcactaggatgatgaatgcgaaagtagttctcacatggaacaaactcagaaccgcatgcattgaactactctgtactgcaatggcatggggagatctaaaagctcaaaatcatactgaattgcgagcaaagattatttcaatgtttttcaaatctctaacatgcagaacaacagagattgtcaatgttgctaaggagggacttcgtcaggtggttcaacagcaaaggatgccaaaggatcttctacagagcagcttaaggcccattctagtaaacttagcaaacacaaagagccttagcatgccattgctacaaggattggctcgcctgcttgaattactgtcaaattggtttaatgtcactttgggtgccaagctattggatcacttgaaaaaatggctggagccagaaaagcttgtccagactcaaaaatcttggaaggctggagatgaaccaaaaatagcagcagctatgatcgagctgtttcaccttcttcccccggcagcaagcaaattcttggatgaccttgttaccttggtaattgatctggaaagggcacttcctgaagatcagttttacagtgagatcaacagtccataccgtgctccactggcaaaatttttgaatcgttatgttctggaggctgttgactattttcttgctcgattaagccatccaaagtatttcaggaggtttatgtacataatctgctcggatactggggacctaagggatgcacttgcaaggtcacctcagaaaatacttgcaagtgccttttctcagttttactctcaaagtgaagcatctgctgctcaattatcttctgtaaaggatgaagcccttactggggctgtatctgagagtattactgtacaatcttcatcaaacatggttactacttctgagagttactttaatggattagagcttgtctcagcccttgtgaaattgatgccagagtggctccgtaacaaccgggttgtctttgacaccttgctacttgcttggaaatcacctgcaagacttgcgaggttgcagaacgagcaggatttgagtttaccccaggtgatggaaagcaagaggctgatcaaatgcttcctgaattacttaagacacgatcgaactgaagttggtgcactctttgatatgttatcagtattcttgtaccgcagtcgtatagattatagctttcttaaggaattttatgtcatagaggttgctgaaggatactccccgaatttgaagaaaactatccttaatcattttctgaacattttccagtcaaaacaatatggacaagatcatttagttgttaccatgcagattcttatacttccaatgctagctcattcatttcaaaatggacaaagttgggaagttgttgatcctactataattaaaactattgttgagaagcttcttgatcctccagaagaggtcagcgctgaatacgacgaaccattgaggatagaacttcttcagctagctacattacttttgaagtatctacagactgatcttgttcaccatcgaaaggaactcataaagtttggttggaatcatctcaagcgtgaagataactcgagcaaacagtgggcctttgtgaatgtttgtcatttcttagaggcctatcaagctcctgaaaagattattttacaggtcttcattgctctgctacggacatgccaaccagaaaacaagctgttggtgaagcaagctctcgatatcctcatgcctgccctacctaggagacttcctcctgaaaaaaatgatagccgcatgccgatatggatcagatacaccaagaaagttctcgtagaggaagggcattcaattccaaatatgattcacatattccagcttattgttcgccatgcggacctcttctatagttgcagagcccactttgttcctcagatggtcaactctcttagtcgccttggattaccatacaacacaacagcggaaaatagaaggcttgcaattgaacttgctgggttggtagtggcatgggaaagacagagacaaagtgagatgaaagtggcgcaggaaagtgagagccagaatcaattaggtgacatgcttaatccttctgttattggtggtgatccaaaacgctcctctgatgttccgtcgtttgctgatgatttgagtaagagagtgaaagttgagcctggtttgcaacctctttgtgtaatgtcgccgggtggggcatctatacctaatattgaaacacctggatcttcaggtctacctgatgaggagtataaacctaatgcagcaatggaggagatgatcattaccttcctaattagggtatcacttgtgattgagcctaaggataaggaatctagctcaatgtacaagcaagctcttgatctactgactcaagctctggaagtctggccaaatgccaatgttaaattcaattatctggagaaattacttgggaatctgtcacccactcctcagtccaaggaccctgcatcagccctcgcacaaggacttgatgttatgaacaaagtcttggagaaacaaccccgtctcttcatccgaaataacatcaatcatatttctcaaatactggaaccttgctttggcaacaaaatgctggatgctggaaagtcactttgttccttgctcaagatggtgttcagtgcttttcctcttgaagcagcaacaacgccacaagatataaagttgttgcatcaaagggttcaagaactcattcacaagaatcttgctgctgttacaactcagcagatagcacttgagctcaacaatgctcactcaatcattagcttttcattgtttgtcctcaatgcacttgcagaagtacagaagaatttcattgacccgttcattggcttgcttttccgtgttctgcaacgtcttgcacgtgacatggggtcttctgctggcagccatatccgacaaggacagaggcctgaactggattcatcagttaactcacggtctaccatagattctactgtcatatctaacatgaagactgtcttaaaacttataagtgagagggtgatgtcctcttctgaccacagaaaatctatgggccaaatacttcaagctcttctttcagagaaaggcactgattccagcattcttctgtgcatgctagacatgataaaaacttggattgaggaagattgtaggcttgcttcatcaactggttctgttagttcacttaacccaaaggaaataataacttatcttcataagttatcattagttgacagaaaaagctttcctccagctgcacaagaagaatgggatgcaaaatacttgcagcttctttattcactgtgtgcagattcaaccaagtatccgttgtcttttcggcaagaatttttccataagattgagagacagtatatgcttggacttagagctaaagatccagaaatgaggaagcgattcttcaagctttaccatgatacagtgggaaaaacattattttctagattgcaatttataatacagttacaggactgggaagctgtgagtgatgttttctggttgaagcaaggtcttgatctcgttttggcaatattagtagaaaatgaaccaattacacttgcagcaaattctgctcgagtaccaacgcttatgatagctgggcctgttccagatcgcatcaccatgccacagcaggttcctgatgctcaggaaagcatggatggtacaacactatcgtttgactctcttgctgcaaggcatgctcagttcttaaatgacgcgaacaagcttgtggtggcagatatcatggctccattgaaggaacttgcatttgctgatcccaatgttgcatatcatttgtgggtgcttgttttcccaattgtttgggtcaccttacataaagaggaacaagttgccctagctaagccaataatcgcgcttctatcgaaagattaccacaagaggcagcagggctgcagacctaacgttgctcaggcacttcttgagggtcttcatttgagccatccccaaccacgcatgcctagtgagcttatcaaatatattggaaaaacttgcaatgtgtggtatattgcaattgcattactcgagagtcatatagtgcatatgaatgaggccaagtgctccgagtcattggctgagttatacagacttcttaatgaagacgacatgaggtgtggattatggaagagaaaatcaatcactgcagaaacaagggctggtctttcacttgcccagcatggttactggcaacaagcacaaaatctattttaccaggctatgattaaagctactcagggaacatacaataataccgtcccaaaggctgaaatgtgcctttgggaggaacagtggttgtcctgtgcgtctcatttaggtcagtgggaagtcttagctgnn

SEQ ID NO: 70553 - DNA, 8334 bp, Zea Mays
  misc_feature (8333)..(8334): n is a, c, g, or t
tcgccctcgtcttcctccaagtccgtccccgtctctacccccaccccaaaccctcggctcgcgagcgcgagggagaccccttcctccgagtccataacacggggttgccattcgcgtcgggggaaacgagcccgcgcctcctgcccctgcactcttacggtcctacctccagccatccgctcctccgcccagctcgcggagtcttcccagcgccgatcttcaaaaccctaagctctggcgcggtaaggttggagccggacgcgcacgggcggggcgcccgccatggcgcccatcaacagcggcaacatggagcagcactcgcagcggctcctcgagcccgacctccctgtgcaagtccgactgcagcttgccatggaagttcgggacagcctggagatgacgcacactccagactacctcaactttcttcgctgctatttcagagccttctcagcaattctcaccgcttacaccaagccacaggccacagagaatgctgagcacaagctacggaatgttgtgatcgagatactcaaccgccttccacacagcgaggtgctcagaccatttgtgcaggatctgctcaagctttctctccgtgtgttgacacaggacaacgaggacaatgctctccttgccatccgaattgtgtttgacctcctccgtaacttccgccctactgtcgaggcggaggtgcagccatttcttgactttgtggttaacatataccataaatttcccacaaccgttagctacttcttcgataatcccaacacaagtgccagtatggctgcctccatgcccatgcagcatttggaccccactgccgatgcctcagtcatgatgcaagtgcctggtggtggtcaactcaacccaagcgcacgttccttcaagatagtcacagagagccctcttgttgtgatgtttctcttccagttgtatgcaaagcttgtgcagacaaatatcccgcacttgttgccactcatggtggcggccatctctatcaagggtcccgacaaggtgccgccacaccttaagacacccttcaacgatttaaagggtgcacaggtcaagaccttgtcatttctgacgtacctcctgaagagcaatgcagattacataaagtcatatgaggaaagcatatgcaagagcattgtgaacttgcttgttacgtgtcctcctgattctgtctccatcagaaaggagctattggttggtctgaaacaagttctcaacaccgagtacaagcgagggctgttccccttgattgacacacttcttgatgaaagggttctgattggcacaggtcgagtttgcatcgaaactttaagacctcttgcttacacccttcttgctgaattggtgcattatgttcgagaagatatttctcttccacaggttgagcccatatatcaaaaaggtgttgaccagcaaagcatggacgaagcacgagttttattggggcgcatattggatgcattcgttgggaagtttaggaccctgaagcgaacaatccctcagttgcttgaagaaggtgaggaagggaaggaacaaccgaatctgagaatgaagcttgaagtcccattacagactgtgctgaatttgcagcaacctttggagtatactaaggaaatcaacgattacaaaagtctgataaagactcttgctgtcggaatgaagacaataatatggagcataacccatgctcactggccacgcccccagcaacaaaatcaacagtcttccaatttgtcacttcaacacttcagggggctgagggaggatgaggtgcggaagacatctggtgttctgaagtctggcgttcactgtctggctctttttaaggaaaaagacgatgatagggaaattctgcaatcattttcgcagatgctggctataatggaagctcgtgatattatggatatgttctccttttgcatgtctgacctctttgattctatgataaccaacaaccagctattgcacatattttcaacccttttgcaagctcccaaggttctgcggcctttcacagatgtattaattaatttccttgttagctcaaagcttgaagccctgaagcagccagattcacctgctgcaaagcttgttttgcaacttttccggttcttgttcattgctgcagctaaagctccagaaagctgtgaacgcacacttcagccacacgtgccggttataatggaagtctgcatgaggagtgccactgaagttgagaaacccctaggttacatgcaccttcttcgaaacatgtttcgtgcattgaacagtgctaaatttgattcattgatgcgtgatcttataccatctctgcaaccctgcctcaatatgttactctccatgcttgatggtccgataagtgaagatatgcgggacttgattttggagctttgcctgattttacctgcccgcttgagttctttattgccccacatacctcgtctaatgaaacctcttgttcttgctctaaaaggtagtgatgaccttgtgagcttagctctacgtacacttgagttctggattgatagtctgaatcctgactttttggaacctagcatggcaaatttaatgtcagaagtcattcttgctttatggtctcatttaaggcctcctccatacacatggggcacaaagtctttggaacttttagggaagctggggggacgaaataggcgatttttgcgggagcctcttgcacttgaatccaaggaaaatccggagcatggattacgtttagttctgacttttgagcctgcgacaccttttttggttcctctggacagatgcatacaccaagctgttggtgcagttatgcaaggcaatggcttggaagcattctacaggaagaaggctcttcaattcattcgggtgtgcctcgattctttgttaaatctgagggaaaatgtacctggcgagggtgtgagccctggtgttctcggtacattgctaatctctaacctggatccctcaagacgtcggaatgatgcttcagatatgaagggagatttaggtgtgaagacaaaaacacaactactggctgaaaaatctgttttcaagactcttcttgtagctatcattgcagctaatgctgacaccagtcttcatgatgagaaggatgattatgttgtcgatatatgccggcattttgctatgcttttccatgttgactcaccatcctccagccaatctggatttatgcatcctattggttcttcactcccatctatcatcatgggatcaagatcaagatgcaacacttcatctaatctccgggagctggaccctttaatatttttggatgctttagttgaagtgctatccagcgaaaatcgtcaacatgcaaaagctgccctatctgctttgaatatttttgccgagacattaatctttcttgcacggatgaaacacactggtatgctaaggggaggtcctagcacccccatgctagtctctagtccatctttaaatccagtatattcacctcccccaagtgtgcgggttgctgtatttgaggaattgttacctcggttattgcattgttgctacagtagcacatggcaagctcagatgggtggtgtaatgggtctcggggcattggtcggtaaagtgtctgtggataccctatgcatttttcaggtcagagtcgtgcgtggtcttctttttgttcttaagaggttaccagtgcatgcaaacaaagagcaggaggagacaaatcatgtcctaacacaagtacttagagtagtaaacaacgcagatgaagcaaacagtgaacctcgacggcaaagttttcagggagttgttgaattccttgcacaggagttgtttaacccaaacgcttcaatggttgtgagaaagaacgtgcaggcttgcttatcactgcttgcaagcagaactggcagtgaggtttctgaattgcttgagcctctctatttgccattgcttcagcctctgatttcacgacctcttcgttcgaagaatattgagcaacaggtgggcaccgttactgctttgaacttctgtcttgcactcagaccaccccttctaaaactatctcctgaacttgtcaattttttgcaagaagcactacaaattgccgaggctgatgaaactatatgggtcactaggatgatgaatgcgaaagtagttctcacatggaacaaactcagaaccgcatgcattgaactactctgtactgcaatggcatggggagatctaaaagctcaaaatcatactgaattgcgagcaaagattatttcaatgtttttcaaatctctaacatgcagaacaacagagattgtcaatgttgctaaggagggacttcgtcaggtggttcaacagcaaaggatgccaaaggatcttctacagagcagcttaaggcccattctagtaaacttagcaaacacaaagagccttagcatgccattgctacaaggattggctcgcctgcttgaattactgtcaaattggtttaatgtcactttgggtgccaagctattggatcacttgaaaaaatggctggagccagaaaagcttgtccagactcaaaaatcttggaaggctggagatgaaccaaaaatagcagcagctatgatcgagctgtttcaccttcttcccccggcagcaagcaaattcttggatgaccttgttaccttggtaattgatctggaaagggcacttcctgaagatcagttttacagtgagatcaacagtccataccgtgctccactggcaaaatttttgaatcgttatgttctggaggctgttgactattttcttgctcgattaagccatccaaagtatttcaggaggtttatgtacataatctgctcggatactggggacctaagggatgcacttgcaaggtcacctcagaaaatacttgcaagtgccttttctcagttttactctcaaagtgaagcatctgctgctcaattatcttctgtaaaggatgaagcccttactggggctgtatctgagagtattactgtacaatcttcatcaaacatggttactacttctgagagttactttaatggattagagcttgtctcagcccttgtgaaattgatgccagagtggctccgtaacaaccgggttgtctttgacaccttgctacttgcttggaaatcacctgcaagacttgcgaggttgcagaacgagcaggatttgagtttaccccaggtgatggaaagcaagaggctgatcaaatgcttcctgaattacttaagacacgatcgaactgaagttggtgcactctttgatatgttatcagtattcttgtaccgcagtcgtatagattatagctttcttaaggaattttatgtcatagaggttgctgaaggatactccccgaatttgaagaaaactatccttaatcattttctgaacattttccagtcaaaacaatatggacaagatcatttagttgttaccatgcagattcttatacttccaatgctagctcattcatttcaaaatggacaaagttgggaagttgttgatcctactataattaaaactattgttgagaagcttcttgatcctccagaagaggtcagcgctgaatacgacgaaccattgaggatagaacttcttcagctagctacattacttttgaagtatctacagactgatcttgttcaccatcgaaaggaactcataaagtttggttggaatcatctcaagcgtgaagataactcgagcaaacagtgggcctttgtgaatgtttgtcatttcttagaggcctatcaagctcctgaaaagattattttacagctgaagcttattgttcgccatgcggacctcttctatagttgcagagcccactttgttcctcagatggtcaactctcttagtcgccttggattaccatacaacacaacagcggaaaatagaaggcttgcaattgaacttgctgggttggtagtggcatgggaaagacagagacaaagtgagatgaaagtggcgcaggaaagtgagagccagaatcaattaggtgacatgcttaatccttctgttattggtggtgatccaaaacgctcctctgatgttccgtcgtttgctgatgatttgagtaagagagtgaaagttgagcctggtttgcaacctctttgtgtaatgtcgccgggtggggcatctatacctaatattgaaacacctggatcttcaggtctacctgatgaggagtataaacctaatgcagcaatggaggagatgatcattaccttcctaattagggtatcacttgtgattgagcctaaggataaggaatctagctcaatgtacaagcaagctcttgatctactgactcaagctctggaagtctggccaaatgccaatgttaaattcaattatctggagaaattacttgggaatctgtcacccactcctcagtccaaggaccctgcatcagccctcgcacaaggacttgatgttatgaacaaagtcttggagaaacaaccccgtctcttcatccgaaataacatcaatcatatttctcaaatactggaaccttgctttggcaacaaaatgctggatgctggaaagtcactttgttccttgctcaagatggtgttcagtgcttttcctcttgaagcagcaacaacgccacaagatataaagttgttgcatcaaagggttcaagaactcattcacaagaatcttgctgctgttacaactcagcagatagcacttgagctcaacaatgctcactcaatcattagcttttcattgtttgtcctcaatgcacttgcagaagtacagaagaatttcattgacccgttcattggcttgcttttccgtgttctgcaacgtcttgcacgtgacatggggtcttctgctggcagccatatccgacaaggacagaggcctgaactggattcatcagttaactcacggtctaccatagattctactgtcatatctaacatgaagactgtcttaaaacttataagtgagagggtgatgtcctcttctgaccacagaaaatctatgggccaaatacttcaagctcttctttcagagaaaggcactgattccagcattcttctgtgcatgctagacatgataaaaacttggattgaggaagattgtaggcttgcttcatcaactggttctgttagttcacttaacccaaaggaaataataacttatcttcataagttatcattagttgacagaaaaagctttcctccagctgcacaagaagaatgggatgcaaaatacttgcagcttctttattcactgtgtgcagattcaaccaagtatccgttgtcttttcggcaagaatttttccataagattgagagacagtatatgcttggacttagagctaaagatccagaaatgaggaagcgattcttcaagctttaccatgatacagtgggaaaaacattattttctagattgcaatttataatacagttacaggactgggaagctgtgagtgatgttttctggttgaagcaaggtcttgatctcgttttggcaatattagtagaaaatgaaccaattacacttgcagcaaattctgctcgagtaccaacgcttatgatagctgggcctgttccagatcgcatcaccatgccacagcaggttcctgatgctcaggaaagcatggatggtacaacactatcgtttgactctcttgctgcaaggcatgctcagttcttaaatgacgcgaacaagcttgtggtggcagatatcatggctccattgaaggaacttgcatttgctgatcccaatgttgcatatcatttgtgggtgcttgttttcccaattgtttgggtcaccttacataaagaggaacaagttgccctagctaagccaataatcgcgcttctatcgaaagattaccacaagaggcagcagggctgcagacctaacgttgctcaggcacttcttgagggtcttcatttgagccatccccaaccacgcatgcctagtgagcttatcaaatatattggaaaaacttgcaatgtgtggtatattgcaattgcattactcgagagtcatatagtgcatatgaatgaggccaagtgctccgagtcattggctgagttatacagacttcttaatgaagacgacatgaggtgtggattatggaagagaaaatcaatcactgcagaaacaagggctggtctttcacttgcccagcatggttactggcaacaagcacaaaatctattttaccaggctatgattaaagctactcagggaacatacaataataccgtcccaaaggctgaaatgtgcctttgggaggaacagtggttgtcctgtgcgtctcatttaggtcagtgggaagtcttagctgnn

SEQ ID NO: 70554 - DNA, 8640 bp, Zea Mays
  misc_feature (8639)..(8640): n is a, c, g, or t
tcgccctcgtcttcctccaagtccgtccccgtctctacccccaccccaaaccctcggctcgcgagcgcgagggagaccccttcctccgagtccataacacggggttgccattcgcgtcgggggaaacgagcccgcgcctcctgcccctgcactcttacggtcctacctccagccatccgctcctccgcccagctcgcggagtcttcccagcgccgatcttcaaaaccctaagctctggcgcggtaaggttggagccggacgcgcacgggcggggcgcccgccatggcgcccatcaacagcggcaacatggagcagcactcgcagcggctcctcgagcccgacctccctgtgcaagtccgactgcagcttgccatggaagttcgggacagcctggagatgacgcacactccagactacctcaactttcttcgctgctatttcagagccttctcagcaattctcaccgcttacaccaagccacaggccacagagaatgctgagcacaagctacggaatgttgtgatcgagatactcaaccgccttccacacagcgaggtgctcagaccatttgtgcaggatctgctcaagctttctctccgtgtgttgacacaggacaacgaggacaatgctctccttgccatccgaattgtgtttgacctcctccgtaacttccgccctactgtcgaggcggaggtgcagccatttcttgactttgtggttaacatataccataaatttcccacaaccgttagctacttcttcgataatcccaacacaagtgccagtatggctgcctccatgcccatgcagcatttggaccccactgccgatgcctcagtcatgatgcaagtgcctggtggtggtcaactcaacccaagcgcacgttccttcaagatagtcacagagagccctcttgttgtgatgtttctcttccagttgtatgcaaagcttgtgcagacaaatatcccgcacttgttgccactcatggtggcggccatctctatcaagggtcccgacaaggtgccgccacaccttaagacacccttcaacgatttaaagggtgcacaggtcaagaccttgtcatttctgacgtacctcctgaagagcaatgcagattacataaagtcatatgaggaaagcatatgcaagagcattgtgaacttgcttgttacgtgtcctcctgattctgtctccatcagaaaggcaagatacgacctggagctattggttggtctgaaacaagttctcaacaccgagtacaagcgagggctgttccccttgattgacacacttcttgatgaaagggttctgattggcacaggtcgagtttgcatcgaaactttaagacctcttgcttacacccttcttgctgaattggtgcattatgttcgagaagatatttctcttccacagttgtcacggatcatctatttgttctctcggaatatgcatgattcttctttgacccttataattcatacaacatctgcccgcttgatgctgaacctggttgagcccatatatcaaaaaggtgttgaccagcaaagcatggacgaagcacgagttttattggggcgcatattggatgcattcgttgggaagtttaggaccctgaagcgaacaatccctcagttgcttgaagaaggtgaggaagggaaggaacaaccgaatctgagaatgaagcttgaagtcccattacagactgtgctgaatttgcagcaacctttggagtatactaaggaaatcaacgattacaaaagtctgataaagactcttgctgtcggaatgaagacaataatatggagcataacccatgctcactggccacgcccccagcaacaaaatcaacagtcttccaatttgtcacttcaacacttcagggggctgagggaggatgaggtgcggaagacatctggtgttctgaagtctggcgttcactgtctggctctttttaaggaaaaagacgatgatagggaaattctgcaatcattttcgcagatgctggctataatggaagctcgtgatattatggatatgttctccttttgcatgtctgacctctttgattctatgataaccaacaaccagctattgcacatattttcaacccttttgcaagctcccaaggttctgcggcctttcacagatgtattaattaatttccttgttagctcaaagcttgaagccctgaagcagccagattcacctgctgcaaagcttgttttgcaacttttccggttcttgttcattgctgcagctaaagctccagaaagctgtgaacgcacacttcagccacacgtgccggttataatggaagtctgcatgaggagtgccactgaagttgagaaacccctaggttacatgcaccttcttcgaaacatgtttcgtgcattgaacagtgctaaatttgattcattgatgcgtgatcttataccatctctgcaaccctgcctcaatatgttactctccatgcttgatggtccgataagtgaagatatgcgggacttgattttggagctttgcctgattttacctgcccgcttgagttctttattgccccacatacctcgtctaatgaaacctcttgttcttgctctaaaaggtagtgatgaccttgtgagcttagctctacgtacacttgagttctggattgatagtctgaatcctgactttttggaacctagcatggcaaatttaatgtcagaagtcattcttgctttatggtctcatttaaggcctcctccatacacatggggcacaaagtctttggaacttttagggaagctggggggacgaaataggcgatttttgcgggagcctcttgcacttgaatccaaggaaaatccggagcatggattacgtttagttctgacttttgagcctgcgacaccttttttggttcctctggacagatgcatacaccaagctgttggtgcagttatgcaaggcaatggcttggaagcattctacaggaagaaggctcttcaattcattcgggtgtgcctcgattctttgttaaatctgagggaaaatgtacctggcgagggtgtgagccctggtgttctcggtacattgctaatctctaacctggatccctcaagacgtcggaatgatgcttcagatatgaagggagatttaggtgtgaagacaaaaacacaactactggctgaaaaatctgttttcaagactcttcttgtagctatcattgcagctaatgctgacaccagtcttcatgatgagaaggatgattatgttgtcgatatatgccggcattttgctatgcttttccatgttgactcaccatcctccagccaatctggatttatgcatcctattggttcttcactcccatctatcatcatgggatcaagatcaagatgcaacacttcatctaatctccgggagctggaccctttaatatttttggatgctttagttgaagtgctatccagcgaaaatcgtcaacatgcaaaagctgccctatctgctttgaatatttttgccgagacattaatctttcttgcacggatgaaacacactggtatgctaaggggaggtcctagcacccccatgctagtctctagtccatctttaaatccagtatattcacctcccccaagtgtgcgggttgctgtatttgaggaattgttacctcggttattgcattgttgctacagtagcacatggcaagctcagatgggtggtgtaatgggtctcggggcattggtcggtaaagtgtctgtggataccctatgcatttttcaggtcagagtcgtgcgtggtcttctttttgttcttaagaggttaccagtgcatgcaaacaaagagcaggaggagacaaatcatgtcctaacacaagtacttagagtagtaaacaacgcagatgaagcaaacagtgaacctcgacggcaaagttttcagggagttgttgaattccttgcacaggagttgtttaacccaaacgcttcaatggttgtgagaaagaacgtgcaggcttgcttatcactgcttgcaagcagaactggcagtgaggtttctgaattgcttgagcctctctatttgccattgcttcagcctctgatttcacgacctcttcgttcgaagaatattgagcaacaggtgggcaccgttactgctttgaacttctgtcttgcactcagaccaccccttctaaaactatctcctgaacttgtcaattttttgcaagaagcactacaaattgccgaggctgatgaaactatatgggtcactaggatgatgaatgcgaaagtagttctcacatggaacaaactcagaaccgcatgcattgaactactctgtactgcaatggcatggggagatctaaaagctcaaaatcatactgaattgcgagcaaagattatttcaatgtttttcaaatctctaacatgcagaacaacagagattgtcaatgttgctaaggagggacttcgtcaggtggttcaacagcaaaggatgccaaaggatcttctacagagcagcttaaggcccattctagtaaacttagcaaacacaaagagccttagcatgccattgctacaaggattggctcgcctgcttgaattactgtcaaattggtttaatgtcactttgggtgccaagctattggatcacttgaaaaaatggctggagccagaaaagcttgtccagactcaaaaatcttggaaggctggagatgaaccaaaaatagcagcagctatgatcgagctgtttcaccttcttcccccggcagcaagcaaattcttggatgaccttgttaccttggtaattgatctggaaagggcacttcctgaagatcagttttacagtgagatcaacagtccataccgtgctccactggcaaaatttttgaatcgttatgttctggaggctgttgactattttcttgctcgattaagccatccaaagtatttcaggaggtttatgtacataatctgctcggatactggggacctaagggatgcacttgcaaggtcacctcagaaaatacttgcaagtgccttttctcagttttactctcaaagtgaagcatctgctgctcaattatcttctgtaaaggatgaagcccttactggggctgtatctgagagtattactgtacaatcttcatcaaacatggttactacttctgagagttactttaatggattagagcttgtctcagcccttgtgaaattgatgccagagtggctccgtaacaaccgggttgtctttgacaccttgctacttgcttggaaatcacctgcaagacttgcgaggttgcagaacgagcaggatttgagtttaccccaggtgatggaaagcaagaggctgatcaaatgcttcctgaattacttaagacacgatcgaactgaagttggtgcactctttgatatgttatcagtattcttgtaccgcagtcgtatagattatagctttcttaaggaattttatgtcatagaggttgctgaaggatactccccgaatttgaagaaaactatccttaatcattttctgaacattttccagtcaaaacaatatggacaagatcatttagttgttaccatgcagattcttatacttccaatgctagctcattcatttcaaaatggacaaagttgggaagttgttgatcctactataattaaaactattgttgagaagcttcttgatcctccagaagaggtcagcgctgaatacgacgaaccattgaggatagaacttcttcagctagctacattacttttgaagtatctacagactgatcttgttcaccatcgaaaggaactcataaagtttggttggaatcatctcaagcgtgaagataactcgagcaaacagtgggcctttgtgaatgtttgtcatttcttagaggcctatcaagctcctgaaaagattattttacaggtcttcattgctctgctacggacatgccaaccagaaaacaagctgttggtgaagcaagctctcgatatcctcatgcctgccctacctaggagacttcctcctgaaaaaaatgatagccgcatgccgatatggatcagatacaccaagaaagttctcgtagaggaagggcattcaattccaaatatgattcacatattccagcttattgttcgccatgcggacctcttctatagttgcagagcccactttgttcctcagatggtcaactctcttagtcgccttggattaccatacaacacaacagcggaaaatagaaggcttgcaattgaacttgctgggttggtagtggcatgggaaagacagagacaaagtgagatgaaagtggcgcaggaaagtgagagccagaatcaattaggtgacatgcttaatccttctgttattggtggtgatccaaaacgctcctctgatgttccgtcgtttgctgatgatttgagtaagagagtgaaagttgagcctggtttgcaacctctttgtgtaatgtcgccgggtggggcatctatacctaatattgaaacacctggatcttcaggtctacctgatgaggagtataaacctaatgcagcaatggaggagatgatcattaccttcctaattagggtatcacttgtgattgagcctaaggataaggaatctagctcaatgtacaagcaagctcttgatctactgactcaagctctggaagtctggccaaatgccaatgttaaattcaattatctggagaaattacttgggaatctgtcacccactcctcagtccaaggaccctgcatcagccctcgcacaaggacttgatgttatgaacaaagtcttggagaaacaaccccgtctcttcatccgaaataacatcaatcatatttctcaaatactggaaccttgctttggcaacaaaatgctggatgctggaaagtcactttgttccttgctcaagatggtgttcagtgcttttcctcttgaagcagcaacaacgccacaagatataaagttgttgcatcaaagggttcaagaactcattcacaagaatcttgctgctgttacaactcagcagatagcacttgagctcaacaatgctcactcaatcattagcttttcattgtttgtcctcaatgcacttgcagaagtacagaagaatttcattgacccgttcattggcttgcttttccgtgttctgcaacgtcttgcacgtgacatggggtcttctgctggcagccatatccgacaaggacagaggcctgaactggattcatcagttaactcacggtctaccatagattctactgtcatatctaacatgaagactgtcttaaaacttataagtgagagggtgatgtcctcttctgaccacagaaaatctatgggccaaatacttcaagctcttctttcagagaaaggcactgattccagcattcttctgtgcatgctagacatgataaaaacttggattgaggaagattgtaggcttgcttcatcaactggttctgttagttcacttaacccaaaggaaataataacttatcttcataagttatcattagttgacagaaaaagctttcctccagctgcacaagaagaatgggatgcaaaatacttgcagcttctttattcactgtgtgcagattcaaccaagtatccgttgtcttttcggcaagaatttttccataagattgagagacagtatatgcttggacttagagctaaagatccagaaatgaggaagcgattcttcaagctttaccatgatacagtgggaaaaacattattttctagattgcaatttataatacagttacaggactgggaagctgtgagtgatgttttctggttgaagcaaggtcttgatctcgttttggcaatattagtagaaaatgaaccaattacacttgcagcaaattctgctcgagtaccaacgcttatgatagctgggcctgttccagatcgcatcaccatgccacagcaggttcctgatgctcaggaaagcatggatggtacaacactatcgtttgactctcttgctgcaaggcatgctcagttcttaaatgacgcgaacaagcttgtggtggcagatatcatggctccattgaaggaacttgcatttgctgatcccaatgttgcatatcatttgtgggtgcttgttttcccaattgtttgggtcaccttacataaagaggaacaagttgccctagctaagccaataatcgcgcttctatcgaaagattaccacaagaggcagcagggctgcagacctaacgttgctcaggcacttcttgagggtcttcatttgagccatccccaaccacgcatgcctagtgagcttatcaaatatattggaaaaacttgcaatgtgtggtatattgcaattgcattactcgagagtcatatagtgcatatgaatgaggccaagtgctccgagtcattggctgagttatacagacttcttaatgaagacgacatgaggtgtggattatggaagagaaaatcaatcactgcagaaacaagggctggtctttcacttgcccagcatggttactggcaacaagcacaaaatctattttaccaggctatgattaaagctactcagggaacatacaataataccgtcccaaaggctgaaatgtgcctttgggaggaacagtggttgtcctgtgcgtctcatttaggtcagtgggaagtcttagctgnn

SEQ ID NO: 70555 - DNA, 8481 bp, Zea Mays
  misc_feature (8480)..(8481): n is a, c, g, or t
tcgccctcgtcttcctccaagtccgtccccgtctctacccccaccccaaaccctcggctcgcgagcgcgagggagaccccttcctccgagtccataacacggggttgccattcgcgtcgggggaaacgagcccgcgcctcctgcccctgcactcttacggtcctacctccagccatccgctcctccgcccagctcgcggagtcttcccagcgccgatcttcaaaaccctaagctctggcgcggtaaggttggagccggacgcgcacgggcggggcgcccgccatggcgcccatcaacagcggcaacatggagcagcactcgcagcggctcctcgagcccgacctccctgtgcaagtccgactgcagcttgccatggaagttcgggacagcctggagatgacgcacactccagactacctcaactttcttcgctgctatttcagagccttctcagcaattctcaccgcttacaccaagccacaggccacagagaatgctgagcacaagctacggaatgttgtgatcgagatactcaaccgccttccacacagcgaggtgctcagaccatttgtgcaggatctgctcaagctttctctccgtgtgttgacacaggacaacgaggacaatgctctccttgccatccgaattgtgtttgacctcctccgtaacttccgccctactgtcgaggcggaggtgcagccatttcttgactttgtggttaacatataccataaatttcccacaaccgttagctacttcttcgataatcccaacacaagtgccagtatggctgcctccatgcccatgcagcatttggaccccactgccgatgcctcagtcatgatgcaagtgcctggtggtggtcaactcaacccaagcgcacgttccttcaagatagtcacagagagccctcttgttgtgatgtttctcttccagttgtatgcaaagcttgtgcagacaaatatcccgcacttgttgccactcatggtggcggccatctctatcaagggtcccgacaaggtgccgccacaccttaagacacccttcaacgatttaaagggtgcacaggtcaagaccttgtcatttctgacgtacctcctgaagagcaatgcagattacataaagtcatatgaggaaagcatatgcaagagcattgtgaacttgcttgttacgtgtcctcctgattctgtctccatcagaaaggcaagatacgacctggagctattggttggtctgaaacaagttctcaacaccgagtacaagcgagggctgttccccttgattgacacacttcttgatgaaagggttctgattggcacaggtcgagtttgcatcgaaactttaagacctcttgcttacacccttcttgctgaattggtgcattatgttcgagaagatatttctcttccacaggttgagcccatatatcaaaaaggtgttgaccagcaaagcatggacgaagcacgagttttattggggcgcatattggatgcattcgttgggaagtttaggaccctgaagcgaacaatccctcagttgcttgaagaaggtgaggaagggaaggaacaaccgaatctgagaatgaagcttgaagtcccattacagactgtgctgaatttgcagcaacctttggagtatactaaggaaatcaacgattacaaaagtctgataaagactcttgctgtcggaatgaagacaataatatggagcataacccatgctcactggccacgcccccaggtgcggaagacatctggtgttctgaagtctggcgttcactgtctggctctttttaaggaaaaagacgatgatagggaaattctgcaatcattttcgcagatgctggctataatggaagctcgtgatattatggatatgttctccttttgcatgtctgacctctttgattctatgataaccaacaaccagctattgcacatattttcaacccttttgcaagctcccaaggttctgcggcctttcacagatgtattaattaatttccttgttagctcaaagcttgaagccctgaagcagccagattcacctgctgcaaagcttgttttgcaacttttccggttcttgttcattgctgcagctaaagctccagaaagctgtgaacgcacacttcagccacacgtgccggttataatggaagtctgcatgaggagtgccactgaagttgagaaacccctaggttacatgcaccttcttcgaaacatgtttcgtgcattgaacagtgctaaatttgattcattgatgcgtgatcttataccatctctgcaaccctgcctcaatatgttactctccatgcttgatggtccgataagtgaagatatgcgggacttgattttggagctttgcctgattttacctgcccgcttgagttctttattgccccacatacctcgtctaatgaaacctcttgttcttgctctaaaaggtagtgatgaccttgtgagcttagctctacgtacacttgagttctggattgatagtctgaatcctgactttttggaacctagcatggcaaatttaatgtcagaagtcattcttgctttatggtctcatttaaggcctcctccatacacatggggcacaaagtctttggaacttttagggaagctggggggacgaaataggcgatttttgcgggagcctcttgcacttgaatccaaggaaaatccggagcatggattacgtttagttctgacttttgagcctgcgacaccttttttggttcctctggacagatgcatacaccaagctgttggtgcagttatgcaaggcaatggcttggaagcattctacaggaagaaggctcttcaattcattcgggtgtgcctcgattctttgttaaatctgagggaaaatgtacctggcgagggtgtgagccctggtgttctcggtacattgctaatctctaacctggatccctcaagacgtcggaatgatgcttcagatatgaagggagatttaggtgtgaagacaaaaacacaactactggctgaaaaatctgttttcaagactcttcttgtagctatcattgcagctaatgctgacaccagtcttcatgatgagaaggatgattatgttgtcgatatatgccggcattttgctatgcttttccatgttgactcaccatcctccagccaatctggatttatgcatcctattggttcttcactcccatctatcatcatgggatcaagatcaagatgcaacacttcatctaatctccgggagctggaccctttaatatttttggatgctttagttgaagtgctatccagcgaaaatcgtcaacatgcaaaagctgccctatctgctttgaatatttttgccgagacattaatctttcttgcacggatgaaacacactggtatgctaaggggaggtcctagcacccccatgctagtctctagtccatctttaaatccagtatattcacctcccccaagtgtgcgggttgctgtatttgaggaattgttacctcggttattgcattgttgctacagtagcacatggcaagctcagatgggtggtgtaatgggtctcggggcattggtcggtaaagtgtctgtggataccctatgcatttttcaggtcagagtcgtgcgtggtcttctttttgttcttaagaggttaccagtgcatgcaaacaaagagcaggaggagacaaatcatgtcctaacacaagtacttagagtagtaaacaacgcagatgaagcaaacagtgaacctcgacggcaaagttttcagggagttgttgaattccttgcacaggagttgtttaacccaaacgcttcaatggttgtgagaaagaacgtgcaggcttgcttatcactgcttgcaagcagaactggcagtgaggtttctgaattgcttgagcctctctatttgccattgcttcagcctctgatttcacgacctcttcgttcgaagaatattgagcaacaggtgggcaccgttactgctttgaacttctgtcttgcactcagaccaccccttctaaaactatctcctgaacttgtcaattttttgcaagaagcactacaaattgccgaggctgatgaaactatatgggtcactaggatgatgaatgcgaaagtagttctcacatggaacaaactcagaaccgcatgcattgaactactctgtactgcaatggcatggggagatctaaaagctcaaaatcatactgaattgcgagcaaagattatttcaatgtttttcaaatctctaacatgcagaacaacagagattgtcaatgttgctaaggagggacttcgtcaggtggttcaacagcaaaggatgccaaaggatcttctacagagcagcttaaggcccattctagtaaacttagcaaacacaaagagccttagcatgccattgctacaaggattggctcgcctgcttgaattactgtcaaattggtttaatgtcactttgggtgccaagctattggatcacttgaaaaaatggctggagccagaaaagcttgtccagactcaaaaatcttggaaggctggagatgaaccaaaaatagcagcagctatgatcgagctgtttcaccttcttcccccggcagcaagcaaattcttggatgaccttgttaccttggtaattgatctggaaagggcacttcctgaagatcagttttacagtgagatcaacagtccataccgtgctccactggcaaaatttttgaatcgttatgttctggaggctgttgactattttcttgctcgattaagccatccaaagtatttcaggaggtttatgtacataatctgctcggatactggggacctaagggatgcacttgcaaggtcacctcagaaaatacttgcaagtgccttttctcagttttactctcaaagtgaagcatctgctgctcaattatcttctgtaaaggatgaagcccttactggggctgtatctgagagtattactgtacaatcttcatcaaacatggttactacttctgagagttactttaatggattagagcttgtctcagcccttgtgaaattgatgccagagtggctccgtaacaaccgggttgtctttgacaccttgctacttgcttggaaatcacctgcaagacttgcgaggttgcagaacgagcaggatttgagtttaccccaggtgatggaaagcaagaggctgatcaaatgcttcctgaattacttaagacacgatcgaactgaagttggtgcactctttgatatgttatcagtattcttgtaccgcagtcgtatagattatagctttcttaaggaattttatgtcatagaggttgctgaaggatactccccgaatttgaagaaaactatccttaatcattttctgaacattttccagtcaaaacaatatggacaagatcatttagttgttaccatgcagattcttatacttccaatgctagctcattcatttcaaaatggacaaagttgggaagttgttgatcctactataattaaaactattgttgagaagcttcttgatcctccagaagaggtcagcgctgaatacgacgaaccattgaggatagaacttcttcagctagctacattacttttgaagtatctacagactgatcttgttcaccatcgaaaggaactcataaagtttggttggaatcatctcaagcgtgaagataactcgagcaaacagtgggcctttgtgaatgtttgtcatttcttagaggcctatcaagctcctgaaaagattattttacaggtcttcattgctctgctacggacatgccaaccagaaaacaagctgttggtgaagcaagctctcgatatcctcatgcctgccctacctaggagacttcctcctgaaaaaaatgatagccgcatgccgatatggatcagatacaccaagaaagttctcgtagaggaagggcattcaattccaaatatgattcacatattccagcttattgttcgccatgcggacctcttctatagttgcagagcccactttgttcctcagatggtcaactctcttagtcgccttggattaccatacaacacaacagcggaaaatagaaggcttgcaattgaacttgctgggttggtagtggcatgggaaagacagagacaaagtgagatgaaagtggcgcaggaaagtgagagccagaatcaattaggtgacatgcttaatccttctgttattggtggtgatccaaaacgctcctctgatgttccgtcgtttgctgatgatttgagtaagagagtgaaagttgagcctggtttgcaacctctttgtgtaatgtcgccgggtggggcatctatacctaatattgaaacacctggatcttcaggtctacctgatgaggagtataaacctaatgcagcaatggaggagatgatcattaccttcctaattagggtatcacttgtgattgagcctaaggataaggaatctagctcaatgtacaagcaagctcttgatctactgactcaagctctggaagtctggccaaatgccaatgttaaattcaattatctggagaaattacttgggaatctgtcacccactcctcagtccaaggaccctgcatcagccctcgcacaaggacttgatgttatgaacaaagtcttggagaaacaaccccgtctcttcatccgaaataacatcaatcatatttctcaaatactggaaccttgctttggcaacaaaatgctggatgctggaaagtcactttgttccttgctcaagatggtgttcagtgcttttcctcttgaagcagcaacaacgccacaagatataaagttgttgcatcaaagggttcaagaactcattcacaagaatcttgctgctgttacaactcagcagatagcacttgagctcaacaatgctcactcaatcattagcttttcattgtttgtcctcaatgcacttgcagaagtacagaagaatttcattgacccgttcattggcttgcttttccgtgttctgcaacgtcttgcacgtgacatggggtcttctgctggcagccatatccgacaaggacagaggcctgaactggattcatcagttaactcacggtctaccatagattctactgtcatatctaacatgaagactgtcttaaaacttataagtgagagggtgatgtcctcttctgaccacagaaaatctatgggccaaatacttcaagctcttctttcagagaaaggcactgattccagcattcttctgtgcatgctagacatgataaaaacttggattgaggaagattgtaggcttgcttcatcaactggttctgttagttcacttaacccaaaggaaataataacttatcttcataagttatcattagttgacagaaaaagctttcctccagctgcacaagaagaatgggatgcaaaatacttgcagcttctttattcactgtgtgcagattcaaccaagtatccgttgtcttttcggcaagaatttttccataagattgagagacagtatatgcttggacttagagctaaagatccagaaatgaggaagcgattcttcaagctttaccatgatacagtgggaaaaacattattttctagattgcaatttataatacagttacaggactgggaagctgtgagtgatgttttctggttgaagcaaggtcttgatctcgttttggcaatattagtagaaaatgaaccaattacacttgcagcaaattctgctcgagtaccaacgcttatgatagctgggcctgttccagatcgcatcaccatgccacagcaggttcctgatgctcaggaaagcatggatggtacaacactatcgtttgactctcttgctgcaaggcatgctcagttcttaaatgacgcgaacaagcttgtggtggcagatatcatggctccattgaaggaacttgcatttgctgatcccaatgttgcatatcatttgtgggtgcttgttttcccaattgtttgggtcaccttacataaagaggaacaagttgccctagctaagccaataatcgcgcttctatcgaaagattaccacaagaggcagcagggctgcagacctaacgttgctcaggcacttcttgagggtcttcatttgagccatccccaaccacgcatgcctagtgagcttatcaaatatattggaaaaacttgcaatgtgtggtatattgcaattgcattactcgagagtcatatagtgcatatgaatgaggccaagtgctccgagtcattggctgagttatacagacttcttaatgaagacgacatgaggtgtggattatggaagagaaaatcaatcactgcagaaacaagggctggtctttcacttgcccagcatggttactggcaacaagcacaaaatctattttaccaggctatgattaaagctactcagggaacatacaataataccgtcccaaaggctgaaatgtgcctttgggaggaacagtggttgtcctgtgcgtctcatttaggtcagtgggaagtcttagctgnn

SEQ ID NO: 70556 - DNA, 8337 bp, Zea Mays
  misc_feature (8336)..(8337): n is a, c, g, or t
tcgccctcgtcttcctccaagtccgtccccgtctctacccccaccccaaaccctcggctcgcgagcgcgagggagaccccttcctccgagtccataacacggggttgccattcgcgtcgggggaaacgagcccgcgcctcctgcccctgcactcttacggtcctacctccagccatccgctcctccgcccagctcgcggagtcttcccagcgccgatcttcaaaaccctaagctctggcgcggtaaggttggagccggacgcgcacgggcggggcgcccgccatggcgcccatcaacagcggcaacatggagcagcactcgcagcggctcctcgagcccgacctccctgtgcaagtccgactgcagcttgccatggaagttcgggacagcctggagatgacgcacactccagactacctcaactttcttcgctgctatttcagagccttctcagcaattctcaccgcttacaccaagccacaggccacagagaatgctgagcacaagctacggaatgttgtgatcgagatactcaaccgccttccacacagcgaggtgctcagaccatttgtgcaggatctgctcaagctttctctccgtgtgttgacacaggacaacgaggacaatgctctccttgccatccgaattgtgtttgacctcctccgtaacttccgccctactgtcgaggcggaggtgcagccatttcttgactttgtggttaacatataccataaatttcccacaaccgttagctacttcttcgataatcccaacacaagtgccagtatggctgcctccatgcccatgcagcatttggaccccactgccgatgcctcagtcatgatgcaagtgcctggtggtggtcaactcaacccaagcgcacgttccttcaagatagtcacagagagccctcttgttgtgatgtttctcttccagttgtatgcaaagcttgtgcagacaaatatcccgcacttgttgccactcatggtggcggccatctctatcaagggtcccgacaaggtgccgccacaccttaagacacccttcaacgatttaaagggtgcacaggtcaagagcaatgcagattacataaagtcatatgaggaaagcatatgcaagagcattgtgaacttgcttgttacgtgtcctcctgattctgtctccatcagaaaggagctattggttggtctgaaacaagttctcaacaccgagtacaagcgagggctgttccccttgattgacacacttcttgatgaaagggttctgattggcacaggtcgagtttgcatcgaaactttaagacctcttgcttacacccttcttgctgaattggtgcattatgttcgagaagatatttctcttccacagttgtcacggatcatctatttgttctctcggaatatgcatgattcttctttgacccttataattcatacaacatctgcccgcttgatgctgaacctggttgagcccatatatcaaaaaggtgttgaccagcaaagcatggacgaagcacgagttttattggggcgcatattggatgcattcgttgggaagtttaggaccctgaagcgaacaatccctcagttgcttgaagaaggtgaggaagggaaggaacaaccgaatctgagaatgaagcttgaagtcccattacagactgtgctgaatttgcagcaacctttggagtatactaaggaaatcaacgattacaaaagtctgataaagactcttgctgtcggaatgaagacaataatatggagcataacccatgctcactggccacgcccccaggtgcggaagacatctggtgttctgaagtctggcgttcactgtctggctctttttaaggaaaaagacgatgatagggaaattctgcaatcattttcgcagatgctggctataatggaagctcgtgatattatggatatgttctccttttgcatgtctgacctctttgattctatgataaccaacaaccagctattgcacatattttcaacccttttgcaagctcccaaggttctgcggcctttcacagatgtattaattaatttccttgttagctcaaagcttgaagccctgaagcagccagattcacctgctgcaaagcttgttttgcaacttttccggttcttgttcattgctgcagctaaagctccagaaagctgtgaacgcacacttcagccacacgtgccggttataatggaagtctgcatgaggagtgccactgaagttgagaaacccctaggttacatgcaccttcttcgaaacatgtttcgtgcattgaacagtgctaaatttgattcattgatgcgtgatcttataccatctctgcaaccctgcctcaatatgttactctccatgcttgatggtccgataagtgaagatatgcgggacttgattttggagctttgcctgattttacctgcccgcttgagttctttattgccccacatacctcgtctaatgaaacctcttgttcttgctctaaaaggtagtgatgaccttgtgagcttagctctacgtacacttgagttctggattgatagtctgaatcctgactttttggaacctagcatggcaaatttaatgtcagaagtcattcttgctttatggtctcatttaaggcctcctccatacacatggggcacaaagtctttggaacttttagggaagctggggggacgaaataggcgatttttgcgggagcctcttgcacttgaatccaaggaaaatccggagcatggattacgtttagttctgacttttgagcctgcgacaccttttttggttcctctggacagatgcatacaccaagctgttggtgcagttatgcaaggcaatggcttggaagcattctacaggaagaaggctcttcaattcattcgggtgtgcctcgattctttgttaaatctgagggaaaatgtacctggcgagggtgtgagccctggtgttctcggtacattgctaatctctaacctggatccctcaagacgtcggaatgatgcttcagatatgaagggagatttaggtgtgaagacaaaaacacaactactggctgaaaaatctgttttcaagactcttcttgtagctatcattgcagctaatgctgacaccagtcttcatgatgagaaggatgattatgttgtcgatatatgccggcattttgctatgcttttccatgttgactcaccatcctccagccaatctggatttatgcatcctattggttcttcactcccatctatcatcatgggatcaagatcaagatgcaacacttcatctaatctccgggagctggaccctttaatatttttggatgctttagttgaagtgctatccagcgaaaatcgtcaacatgcaaaagctgccctatctgctttgaatatttttgccgagacattaatctttcttgcacggatgaaacacactggtatgctaaggggaggtcctagcacccccatgctagtctctagtccatctttaaatccagtatattcacctcccccaagtgtgcgggttgctgtatttgaggaattgttacctcggttattgcattgttgctacagtagcacatggcaagctcagatgggtggtgtaatgggtctcggggcattggtcggtaaagtgtctgtggataccctatgcatttttcaggtcagagtcgtgcgtggtcttctttttgttcttaagaggttaccagtgcatgcaaacaaagagcaggaggagacaaatcatgtcctaacacaagtacttagagtagtaaacaacgcagatgaagcaaacagtgaacctcgacggcaaagttttcagggagttgttgaattccttgcacaggagttgtttaacccaaacgcttcaatggttgtgagaaagaacgtgcaggcttgcttatcactgcttgcaagcagaactggcagtgaggtttctgaattgcttgagcctctctatttgccattgcttcagcctctgatttcacgacctcttcgttcgaagaatattgagcaacaggtgggcaccgttactgctttgaacttctgtcttgcactcagaccaccccttctaaaactatctcctgaacttgtcaattttttgcaagaagcactacaaattgccgaggctgatgaaactatatgggtcactaggatgatgaatgcgaaagtagttctcacatggaacaaactcagaaccgcatgcattgaactactctgtactgcaatggcatggggagatctaaaagctcaaaatcatactgaattgcgagcaaagattatttcaatgtttttcaaatctctaacatgcagaacaacagagattgtcaatgttgctaaggagggacttcgtcaggtggttcaacagcaaaggatgccaaaggatcttctacagagcagcttaaggcccattctagtaaacttagcaaacacaaagagccttagcatgccattgctacaaggattggctcgcctgcttgaattactgtcaaattggtttaatgtcactttgggtgccaagctattggatcacttgaaaaaatggctggagccagaaaagcttgtccagactcaaaaatcttggaaggctggagatgaaccaaaaatagcagcagctatgatcgagctgtttcaccttcttcccccggcagcaagcaaattcttggatgaccttgttaccttggtaattgatctggaaagggcacttcctgaagatcagttttacagtgagatcaacagtccataccgtgctccactggcaaaatttttgaatcgttatgttctggaggctgttgactattttcttgctcgattaagccatccaaagtatttcaggaggtttatgtacataatctgctcggatactggggacctaagggatgcacttgcaaggtcacctcagaaaatacttgcaagtgccttttctcagttttactctcaaagtgaagcatctgctgctcaattatcttctgtaaaggatgaagcccttactggggctgtatctgagagtattactgtacaatcttcatcaaacatggttactacttctgagagttactttaatggattagagcttgtctcagcccttgtgaaattgatgccagagtggctccgtaacaaccgggttgtctttgacaccttgctacttgcttggaaatcacctgcaagacttgcgaggttgcagaacgagcaggatttgagtttaccccaggtgatggaaagcaagaggctgatcaaatgcttcctgaattacttaagacacgatcgaactgaagttggtgcactctttgatatgttatcagtattcttgtaccgcagtcgtatagattatagctttcttaaggaattttatgtcatagaggttgctgaaggatactccccgaatttgaagaaaactatccttaatcattttctgaacattttccagtcaaaacaatatggacaagatcatttagttgttaccatgcagattcttatacttccaatgctagctcattcatttcaaaatggacaaagttgggaagttgttgatcctactataattaaaactattgttgagaagcttcttgatcctccagaagaggtcagcgctgaatacgacgaaccattgaggatagaacttcttcagctagctacattacttttgaagtatctacagactgatcttgttcaccatcgaaaggaactcataaagtttggttggaatcatctcaagcgtgaagataactcgagcaaacagtgggcctttgtgaatgtttgtcatttcttagaggcctatcaagctcctgaaaagattattttacagctgaagcttattgttcgccatgcggacctcttctatagttgcagagcccactttgttcctcagatggtcaactctcttagtcgccttggattaccatacaacacaacagcggaaaatagaaggcttgcaattgaacttgctgggttggtagtggcatgggaaagacagagacaaagtgagatgaaagtggcgcaggaaagtgagagccagaatcaattaggtgacatgcttaatccttctgttattggtggtgatccaaaacgctcctctgatgttccgtcgtttgctgatgatttgagtaagagagtgaaagttgagcctggtttgcaacctctttgtgtaatgtcgccgggtggggcatctatacctaatattgaaacacctggatcttcaggtctacctgatgaggagtataaacctaatgcagcaatggaggagatgatcattaccttcctaattagggtatcacttgtgattgagcctaaggataaggaatctagctcaatgtacaagcaagctcttgatctactgactcaagctctggaagtctggccaaatgccaatgttaaattcaattatctggagaaattacttgggaatctgtcacccactcctcagtccaaggaccctgcatcagccctcgcacaaggacttgatgttatgaacaaagtcttggagaaacaaccccgtctcttcatccgaaataacatcaatcatatttctcaaatactggaaccttgctttggcaacaaaatgctggatgctggaaagtcactttgttccttgctcaagatggtgttcagtgcttttcctcttgaagcagcaacaacgccacaagatataaagttgttgcatcaaagggttcaagaactcattcacaagaatcttgctgctgttacaactcagcagatagcacttgagctcaacaatgctcactcaatcattagcttttcattgtttgtcctcaatgcacttgcagaagtacagaagaatttcattgacccgttcattggcttgcttttccgtgttctgcaacgtcttgcacgtgacatggggtcttctgctggcagccatatccgacaaggacagaggcctgaactggattcatcagttaactcacggtctaccatagattctactgtcatatctaacatgaagactgtcttaaaacttataagtgagagggtgatgtcctcttctgaccacagaaaatctatgggccaaatacttcaagctcttctttcagagaaaggcactgattccagcattcttctgtgcatgctagacatgataaaaacttggattgaggaagattgtaggcttgcttcatcaactggttctgttagttcacttaacccaaaggaaataataacttatcttcataagttatcattagttgacagaaaaagctttcctccagctgcacaagaagaatgggatgcaaaatacttgcagcttctttattcactgtgtgcagattcaaccaagtatccgttgtcttttcggcaagaatttttccataagattgagagacagtatatgcttggacttagagctaaagatccagaaatgaggaagcgattcttcaagctttaccatgatacagtgggaaaaacattattttctagattgcaatttataatacagttacaggactgggaagctgtgagtgatgttttctggttgaagcaaggtcttgatctcgttttggcaatattagtagaaaatgaaccaattacacttgcagcaaattctgctcgagtaccaacgcttatgatagctgggcctgttccagatcgcatcaccatgccacagcaggttcctgatgctcaggaaagcatggatggtacaacactatcgtttgactctcttgctgcaaggcatgctcagttcttaaatgacgcgaacaagcttgtggtggcagatatcatggctccattgaaggaacttgcatttgctgatcccaatgttgcatatcatttgtgggtgcttgttttcccaattgtttgggtcaccttacataaagaggaacaagttgccctagctaagccaataatcgcgcttctatcgaaagattaccacaagaggcagcagggctgcagacctaacgttgctcaggcacttcttgagggtcttcatttgagccatccccaaccacgcatgcctagtgagcttatcaaatatattggaaaaacttgcaatgtgtggtatattgcaattgcattactcgagagtcatatagtgcatatgaatgaggccaagtgctccgagtcattggctgagttatacagacttcttaatgaagacgacatgaggtgtggattatggaagagaaaatcaatcactgcagaaacaagggctggtctttcacttgcccagcatggttactggcaacaagcacaaaatctattttaccaggctatgattaaagctactcagggaacatacaataataccgtcccaaaggctgaaatgtgcctttgggaggaacagtggttgtcctgtgcgtctcatttaggtcagtgggaagtcttagctgnn

SEQ ID NO: 70557 - DNA, 8532 bp, Zea Mays
  misc_feature (8531)..(8532): n is a, c, g, or t
cagaggcccatcgccctcgtcttcctccaagtccgtccccgtctctacccccaccccaaaccctcggctcgcgagcgcgagggagaccccttcctccgagtccataacacggggttgccattcgcgtcgggggaaacgagcccgcgcctcctgcccctgcactcttacggtcctacctccagccatccgctcctccgcccagctcgcggagtcttcccagcgccgatcttcaaaaccctaagctctggcgcggtaaggttggagccggacgcgcacgggcggggcgcccgccatggcgcccatcaacagcggcaacatggagcagcactcgcagcggctcctcgagcccgacctccctgtgcaagtccgactgcagcttgccatggaagttcgggacagcctggagatgacgcacactccagactacctcaactttcttcgctgctatttcagagccttctcagcaattctcaccgcttacaccaagccacaggccacagagaatgctgagcacaagctacggaatgttgtgatcgagatactcaaccgccttccacacagcgaggtgctcagaccatttgtgcaggatctgctcaagctttctctccgtgtgttgacacaggacaacgaggacaatgctctccttgccatccgaattgtgtttgacctcctccgtaacttccgccctactgtcgaggcggaggtgcagccatttcttgactttgtggttaacatataccataaatttcccacaaccgttagctacttcttcgataatcccaacacaagtgccagtatggctgcctccatgcccatgcagcatttggaccccactgccgatgcctcagtcatgatgcaagtgcctggtggtggtcaactcaacccaagcgcacgttccttcaagatagtcacagagagccctcttgttgtgatgtttctcttccagttgtatgcaaagcttgtgcagacaaatatcccgcacttgttgccactcatggtggcggccatctctatcaagggtcccgacaaggtgccgccacaccttaagacacccttcaacgatttaaagggtgcacaggtcaagattacataaagtcatatgaggaaagcatatgcaagagcattgtgaacttgcttgttacgtgtcctcctgattctgtctccatcagaaaggagctattggttggtctgaaacaagttctcaacaccgagtacaagcgagggctgttccccttgattgacacacttcttgatgaaagggttctgattggcacaggtcgagtttgcatcgaaactttaagacctcttgcttacacccttcttgctgaattggtgcattatgttcgagaagatatttctcttccacagttgtcacggatcatctatttgttctctcggaatatgcatgattcttctttgacccttataattcatacaacatctgcccgcttgatgctgaacctggttgagcccatatatcaaaaaggtgttgaccagcaaagcatggacgaagcacgagttttattggggcgcatattggatgcattcgttgggaagtttaggaccctgaagcgaacaatccctcagttgcttgaagaaggtgaggaagggaaggaacaaccgaatctgagaatgaagcttgaagtcccattacagactgtgctgaatttgcagcaacctttggagtatactaaggaaatcaacgattacaaaagtctgataaagactcttgctgtcggaatgaagacaataatatggagcataacccatgctcactggccacgcccccaggtgcggaagacatctggtgttctgaagtctggcgttcactgtctggctctttttaaggaaaaagacgatgatagggaaattctgcaatcattttcgcagatgctggctataatggaagctcgtgatattatggatatgttctccttttgcatgtctgacctctttgattctatgataaccaacaaccagctattgcacatattttcaacccttttgcaagctcccaaggttctgcggcctttcacagatgtattaattaatttccttgttagctcaaagcttgaagccctgaagcagccagattcacctgctgcaaagcttgttttgcaacttttccggttcttgttcattgctgcagctaaagctccagaaagctgtgaacgcacacttcagccacacgtgccggttataatggaagtctgcatgaggagtgccactgaagttgagaaacccctaggttacatgcaccttcttcgaaacatgtttcgtgcattgaacagtgctaaatttgattcattgatgcgtgatcttataccatctctgcaaccctgcctcaatatgttactctccatgcttgatggtccgataagtgaagatatgcgggacttgattttggagctttgcctgattttacctgcccgcttgagttctttattgccccacatacctcgtctaatgaaacctcttgttcttgctctaaaaggtagtgatgaccttgtgagcttagctctacgtacacttgagttctggattgatagtctgaatcctgactttttggaacctagcatggcaaatttaatgtcagaagtcattcttgctttatggtctcatttaaggcctcctccatacacatggggcacaaagtctttggaacttttagggaagctggggggacgaaataggcgatttttgcgggagcctcttgcacttgaatccaaggaaaatccggagcatggattacgtttagttctgacttttgagcctgcgacaccttttttggttcctctggacagatgcatacaccaagctgttggtgcagttatgcaaggcaatggcttggaagcattctacaggaagaaggctcttcaattcattcgggtgtgcctcgattctttgttaaatctgagggaaaatgtacctggcgagggtgtgagccctggtgttctcggtacattgctaatctctaacctggatccctcaagacgtcggaatgatgcttcagatatgaagggagatttaggtgtgaagacaaaaacacaactactggctgaaaaatctgttttcaagactcttcttgtagctatcattgcagctaatgctgacaccagtcttcatgatgagaaggatgattatgttgtcgatatatgccggcattttgctatgcttttccatgttgactcaccatcctccagccaatctggatttatgcatcctattggttcttcactcccatctatcatcatgggatcaagatcaagatgcaacacttcatctaatctccgggagctggaccctttaatatttttggatgctttagttgaagtgctatccagcgaaaatcgtcaacatgcaaaagctgccctatctgctttgaatatttttgccgagacattaatctttcttgcacggatgaaacacactggtatgctaaggggaggtcctagcacccccatgctagtctctagtccatctttaaatccagtatattcacctcccccaagtgtgcgggttgctgtatttgaggaattgttacctcggttattgcattgttgctacagtagcacatggcaagctcagatgggtggtgtaatgggtctcggggcattggtcggtaaagtgtctgtggataccctatgcatttttcaggtcagagtcgtgcgtggtcttctttttgttcttaagaggttaccagtgcatgcaaacaaagagcaggaggagacaaatcatgtcctaacacaagtacttagagtagtaaacaacgcagatgaagcaaacagtgaacctcgacggcaaagttttcagggagttgttgaattccttgcacaggagttgtttaacccaaacgcttcaatggttgtgagaaagaacgtgcaggcttgcttatcactgcttgcaagcagaactggcagtgaggtttctgaattgcttgagcctctctatttgccattgcttcagcctctgatttcacgacctcttcgttcgaagaatattgagcaacaggtgggcaccgttactgctttgaacttctgtcttgcactcagaccaccccttctaaaactatctcctgaacttgtcaattttttgcaagaagcactacaaattgccgaggctgatgaaactatatgggtcactaggatgatgaatgcgaaagtagttctcacatggaacaaactcagaaccgcatgcattgaactactctgtactgcaatggcatggggagatctaaaagctcaaaatcatactgaattgcgagcaaagattatttcaatgtttttcaaatctctaacatgcagaacaacagagattgtcaatgttgctaaggagggacttcgtcaggtggttcaacagcaaaggatgccaaaggatcttctacagagcagcttaaggcccattctagtaaacttagcaaacacaaagagccttagcatgccattgctacaaggattggctcgcctgcttgaattactgtcaaattggtttaatgtcactttgggtgccaagctattggatcacttgaaaaaatggctggagccagaaaagcttgtccagactcaaaaatcttggaaggctggagatgaaccaaaaatagcagcagctatgatcgagctgtttcaccttcttcccccggcagcaagcaaattcttggatgaccttgttaccttggtaattgatctggaaagggcacttcctgaagatcagttttacagtgagatcaacagtccataccgtgctccactggcaaaatttttgaatcgttatgttctggaggctgttgactattttcttgctcgattaagccatccaaagtatttcaggaggtttatgtacataatctgctcggatactggggacctaagggatgcacttgcaaggtcacctcagaaaatacttgcaagtgccttttctcagttttactctcaaagtgaagcatctgctgctcaattatcttctgtaaaggatgaagcccttactggggctgtatctgagagtattactgtacaatcttcatcaaacatggttactacttctgagagttactttaatggattagagcttgtctcagcccttgtgaaattgatgccagagtggctccgtaacaaccgggttgtctttgacaccttgctacttgcttggaaatcacctgcaagacttgcgaggttgcagaacgagcaggatttgagtttaccccaggtgatggaaagcaagaggctgatcaaatgcttcctgaattacttaagacacgatcgaactgaagttggtgcactctttgatatgttatcagtattcttgtaccgcagtcgtatagattatagctttcttaaggaattttatgtcatagaggttgctgaaggatactccccgaatttgaagaaaactatccttaatcattttctgaacattttccagtcaaaacaatatggacaagatcatttagttgttaccatgcagattcttatacttccaatgctagctcattcatttcaaaatggacaaagttgggaagttgttgatcctactataattaaaactattgttgagaagcttcttgatcctccagaagaggtcagcgctgaatacgacgaaccattgaggatagaacttcttcagctagctacattacttttgaagtatctacagactgatcttgttcaccatcgaaaggaactcataaagtttggttggaatcatctcaagcgtgaagataactcgagcaaacagtgggcctttgtgaatgtttgtcatttcttagaggcctatcaagctcctgaaaagattattttacaggtcttcattgctctgctacggacatgccaaccagaaaacaagctgttggtgaagcaagctctcgatatcctcatgcctgccctacctaggagacttcctcctgaaaaaaatgatagccgcatgccgatatggatcagatacaccaagaaagttctcgtagaggaagggcattcaattccaaatatgattcacatattccagcttattgttcgccatgcggacctcttctatagttgcagagcccactttgttcctcagatggtcaactctcttagtcgccttggattaccatacaacacaacagcggaaaatagaaggcttgcaattgaacttgctgggttggtagtggcatgggaaagacagagacaaagtgagatgaaagtggcgcaggaaagtgagagccagaatcaattaggtgacatgcttaatccttctgttattggtggtgatccaaaacgctcctctgatgttccgtcgtttgctgatgatttgagtaagagagtgaaagttgagcctggtttgcaacctctttgtgtaatgtcgccgggtggggcatctatacctaatattgaaacacctggatcttcaggtctacctgatgaggagtataaacctaatgcagcaatggaggagatgatcattaccttcctaattagggtatcacttgtgattgagcctaaggataaggaatctagctcaatgtacaagcaagctcttgatctactgactcaagctctggaagtctggccaaatgccaatgttaaattcaattatctggagaaattacttgggaatctgtcacccactcctcagtccaaggaccctgcatcagccctcgcacaaggacttgatgttatgaacaaagtcttggagaaacaaccccgtctcttcatccgaaataacatcaatcatatttctcaaatactggaaccttgctttggcaacaaaatgctggatgctggaaagtcactttgttccttgctcaagatggtgttcagtgcttttcctcttgaagcagcaacaacgccacaagatataaagttgttgcatcaaagggttcaagaactcattcacaagaatcttgctgctgttacaactcagcagatagcacttgagctcaacaatgctcactcaatcattagcttttcattgtttgtcctcaatgcacttgcagaagtacagaagaatttcattgacccgttcattggcttgcttttccgtgttctgcaacgtcttgcacgtgacatggggtcttctgctggcagccatatccgacaaggacagaggcctgaactggattcatcagttaactcacggtctaccatagattctactgtcatatctaacatgaagactgtcttaaaacttataagtgagagggtgatgtcctcttctgaccacagaaaatctatgggccaaatacttcaagctcttctttcagagaaaggcactgattccagcattcttctgtgcatgctagacatgataaaaacttggattgaggaagattgtaggcttgcttcatcaactggttctgttagttcacttaacccaaaggaaataataacttatcttcataagttatcattagttgacagaaaaagctttcctccagctgcacaagaagaatgggatgcaaaatacttgcagcttctttattcactgtgtgcagattcaaccaagtatccgttgtcttttcggcaagaatttttccataagattgagagacagtatatgcttggacttagagctaaagatccagaaatgaggaagcgattcttcaagctttaccatgatacagtgggaaaaacattattttctagattgcaatttataatacagttacaggactgggaagctgtgagtgatgttttctggttgaagcaaggtcttgatctcgttttggcaatattagtagaaaatgaaccaattacacttgcagcaaattctgctcgagtaccaacgcttatgatagctgggcctgttccagatcgcatcaccatgccacagcaggttcctgatgctcaggaaagcatggatggtacaacactatcgtttgactctcttgctgcaaggcatgctcagttcttaaatgacgcgaacaagcttgtggtggcagatatcatggctccattgaaggaacttgcatttgctgatcccaatgttgcatatcatttgtgggtgcttgttttcccaattgtttgggtcaccttacataaagaggaacaagttgccctagctaagccaataatcgcgcttctatcgaaagattaccacaagaggcagcagggctgcagacctaacgttgctcaggcacttcttgagggtcttcatttgagccatccccaaccacgcatgcctagtgagcttatcaaatatattggaaaaacttgcaatgtgtggtatattgcaattgcattactcgagagtcatatagtgcatatgaatgaggccaagtgctccgagtcattggctgagttatacagacttcttaatgaagacgacatgaggtgtggattatggaagagaaaatcaatcactgcagaaacaagggctggtctttcacttgcccagcatggttactggcaacaagcacaaaatctattttaccaggctatgattaaagctactcagggaacatacaataataccgtcccaaaggctgaaatgtgcctttgggaggaacagtggttgtcctgtgcgtctcatttaggtcagtgggaagtcttagctgnn

SEQ ID NO: 70558 - DNA, 8539 bp, Zea Mays
  misc_feature (8538)..(8539): n is a, c, g, or t
cagaggcccatcgccctcgtcttcctccaagtccgtccccgtctctacccccaccccaaaccctcggctcgcgagcgcgagggagaccccttcctccgagtccataacacggggttgccattcgcgtcgggggaaacgagcccgcgcctcctgcccctgcactcttacggtcctacctccagccatccgctcctccgcccagctcgcggagtcttcccagcgccgatcttcaaaaccctaagctctggcgcggtaaggttggagccggacgcgcacgggcggggcgcccgccatggcgcccatcaacagcggcaacatggagcagcactcgcagcggctcctcgagcccgacctccctgtgcaagtccgactgcagcttgccatggaagttcgggacagcctggagatgacgcacactccagactacctcaactttcttcgctgctatttcagagccttctcagcaattctcaccgcttacaccaagccacaggccacagagaatgctgagcacaagctacggaatgttgtgatcgagatactcaaccgccttccacacagcgaggtgctcagaccatttgtgcaggatctgctcaagctttctctccgtgtgttgacacaggacaacgaggacaatgctctccttgccatccgaattgtgtttgacctcctccgtaacttccgccctactgtcgaggcggaggtgcagccatttcttgactttgtggttaacatataccataaatttcccacaaccgttagctacttcttcgataatcccaacacaagtgccagtatggctgcctccatgcccatgcagcatttggaccccactgccgatgcctcagtcatgatgcaagtgcctggtggtggtcaactcaacccaagcgcacgttccttcaagatagtcacagagagccctcttgttgtgatgtttctcttccagttgtatgcaaagcttgtgcagacaaatatcccgcacttgttgccactcatggtggcggccatctctatcaagggtcccgacaaggtgccgccacaccttaagacacccttcaacgatttaaagggtgcacaggtcaagaccttgtcatttctgacgtacctcctgaagagcaatgcagattacataaagtcatatgaggaaagcatatgcaagagcattgtgaacttgcttgttacgtgtcctcctgattctgtctccatcagaaaggagctattggttggtctgaaacaagttctcaacaccgagtacaagcgagggctgttccccttgattgacacacttcttgatgaaagggttctgattggcacaggtcgagtttgcatcgaaactttaagacctcttgcttacacccttcttgctgaattggtgcattatgttcgagaagatatttctcttccacagttgtcacggatcatctatttgttctctcggaatatgcatgattcttctttgacccttataattcatacaacatctgcccgcttgatgctgaacctggttgagcccatatatcaaaaaggtgttgaccagcaaagcatggacgaagcacgagttttattggggcgcatattggatgcattcgttgggaagtttaggaccctgaagcgaacaatccctcagttgcttgaagaaggtgaggaagggaaggaacaaccgaatctgagaatgaagcttgaagtcccattacagactgtgctgaatttgcagcaacctttggagtatactaaggaaatcaacgattacaaaagtctgataaagactcttgctgtcggaatgaagacaataatatggagcataacccatgctcactggccacgcccccagcaacaaaatcaacagtcttccaatttgtcacttcaacacttcagggggctgagggaggatgaggtgcggaagacatctggtgttctgaagtctggcgttcactgtctggctctttttaaggaaaaagacgatgatagggaaattctgcaatcattttcgcagatgctggctataatggaagctcgtgatattatggatatgttctccttttgcatgtctgacctctttgattctatgataaccaacaaccagctattgcacatattttcaacccttttgcaagctcccaaggttctgcggcctttcacagatgtattaattaatttccttgttagctcaaagcttgaagccctgaagcagccagattcacctgctgcaaagcttgttttgcaacttttccggttcttgttcattgctgcagctaaagctccagaaagctgtgaacgcacacttcagccacacgtgccggttataatggaagtctgcatgaggagtgccactgaagttgagaaacccctaggttacatgcaccttcttcgaaacatgtttcgtgcattgaacagtgctaaatttgattcattgatgcgtgatcttataccatctctgcaaccctgcctcaatatgttactctccatgcttgatggtccgataagtgaagatatgcgggacttgattttggagctttgcctgattttacctgcccgcttgagttctttattgccccacatacctcgtctaatgaaacctcttgttcttgctctaaaaggtagtgatgaccttgtgagcttagctctacgtacacttgagttctggattgatagtctgaatcctgactttttggaacctagcatggcaaatttaatgtcagaagtcattcttgctttatggtctcatttaaggcctcctccatacacatggggcacaaagtctttggaacttttagggaagctggggggacgaaataggcgatttttgcgggagcctcttgcacttgaatccaaggaaaatccggagcatggattacgtttagttctgacttttgagcctgcgacaccttttttggttcctctggacagatgcatacaccaagctgttggtgcagttatgcaaggcaatggcttggaagcattctacaggaagaaggctcttcaattcattcgggtgtgcctcgattctttgttaaatctgagggaaaatgtacctggcgagggtgtgagccctggtgttctcggtacattgctaatctctaacctggatccctcaagacgtcggaatgatgcttcagatatgaagggagatttaggtgtgaagacaaaaacacaactactggctgaaaaatctgttttcaagactcttcttgtagctatcattgcagctaatgctgacaccagtcttcatgatgagaaggatgattatgttgtcgatatatgccggcattttgctatgcttttccatgttgactcaccatcctccagccaatctggatttatgcatcctattggttcttcactcccatctatcatcatgggatcaagatcaagatgcaacacttcatctaatctccgggagctggaccctttaatatttttggatgctttagttgaagtgctatccagcgaaaatcgtcaacatgcaaaagctgccctatctgctttgaatatttttgccgagacattaatctttcttgcacggatgaaacacactggtatgctaaggggaggtcctagcacccccatgctagtctctagtccatctttaaatccagtatattcacctcccccaagtgtgcgggttgctgtatttgaggaattgttacctcggttattgcattgttgctacagtagcacatggcaagctcagatgggtggtgtaatgggtctcggggcattggtcggtaaagtgtctgtggataccctatgcatttttcaggtcagagtcgtgcgtggtcttctttttgttcttaagaggttaccagtgcatgcaaacaaagagcaggaggagacaaatcatgtcctaacacaagtacttagagtagtaaacaacgcagatgaagcaaacagtgaacctcgacggcaaagttttcagggagttgttgaattccttgcacaggagttgtttaacccaaacgcttcaatggttgtgagaaagaacgtgcaggcttgcttatcactgcttgcaagcagaactggcagtgaggtttctgaattgcttgagcctctctatttgccattgcttcagcctctgatttcacgacctcttcgttcgaagaatattgagcaacaggtgggcaccgttactgctttgaacttctgtcttgcactcagaccaccccttctaaaactatctcctgaacttgtcaattttttgcaagaagcactacaaattgccgaggctgatgaaactatatgggtcactaggatgatgaatgcgaaagtagttctcacatggaacaaactcagaaccgcatgcattgaactactctgtactgcaatggcatggggagatctaaaagctcaaaatcatactgaattgcgagcaaagattatttcaatgtttttcaaatctctaacatgcagaacaacagagattgtcaatgttgctaaggagggacttcgtcaggtggttcaacagcaaaggatgccaaaggatcttctacagagcagcttaaggcccattctagtaaacttagcaaacacaaagagccttagcatgccattgctacaaggattggctcgcctgcttgaattactgtcaaattggtttaatgtcactttgggtgccaagctattggatcacttgaaaaaatggctggagccagaaaagcttgtccagactcaaaaatcttggaaggctggagatgaaccaaaaatagcagcagctatgatcgagctgtttcaccttcttcccccggcagcaagcaaattcttggatgaccttgttaccttggtaattgatctggaaagggcacttcctgaagatcagttttacagtgagatcaacagtccataccgtgctccactggcaaaatttttgaatcgttatgttctggaggctgttgactattttcttgctcgattaagccatccaaagtatttcaggaggtttatgtacataatctgctcggatactggggacctaagggatgcacttgcaaggtcacctcagaaaatacttgcaagtgccttttctcagttttactctcaaagtgaagcatctgctgctcaattatcttctgtaaaggatgaagcccttactggggctgtatctgagagtattactgtacaatcttcatcaaacatggttactacttctgagagttactttaatggattagagcttgtctcagcccttgtgaaattgatgccagagtggctccgtaacaaccgggttgtctttgacaccttgctacttgcttggaaatcacctgcaagacttgcgaggttgcagaacgagcaggatttgagtttaccccaggtgatggaaagcaagaggctgatcaaatgcttcctgaattacttaagacacgatcgaactgaagttggtgcactctttgatatgttatcagtattcttgtaccgcagtcgtatagattatagctttcttaaggaattttatgtcatagaggttgctgaaggatactccccgaatttgaagaaaactatccttaatcattttctgaacattttccagtcaaaacaatatggacaagatcatttagttgttaccatgcagattcttatacttccaatgctagctcattcatttcaaaatggacaaagttgggaagttgttgatcctactataattaaaactattgttgagaagcttcttgatcctccagaagaggtcagcgctgaatacgacgaaccattgaggatagaacttcttcagctagctacattacttttgaagtatctacagactgatcttgttcaccatcgaaaggaactcataaagtttggttggaatcatctcaagcgtgaagataactcgagcaaacagtgggcctttgtgaatgtttgtcatttcttagaggcctatcaagctcctgaaaagattattttacaggtcttcattgctctgctacggacatgccaaccagaaaacaagctgttggtgaagcaagctctcgatatcctcatgcctgccctacctaggagacttcctcctgaaaaaaatgatagccgcatgccgatatggatcagatacaccaagaaagttctcgtagaggaagggcattcaattccaaatatgattcacatattccagcttattgttcgccatgcggacctcttctatagttgcagagcccactttgttcctcagatggtcaactctcttagtcgccttggattaccatacaacacaacagcggaaaatagaaggcttgcaattgaacttgctgggttggtagtggcatgggaaagacagagacaaagtgagatgaaagtggcgcaggaaagtgagagccagaatcaattaggtgacatgcttaatccttctgttattggtggtgatccaaaacgctcctctgatgttccgtcgtttgctgatgatttgagtctacctgatgaggagtataaacctaatgcagcaatggaggagatgatcattaccttcctaattagggtatcacttgtgattgagcctaaggataaggaatctagctcaatgtacaagcaagctcttgatctactgactcaagctctggaagtctggccaaatgccaatgttaaattcaattatctggagaaattacttgggaatctgtcacccactcctcagtccaaggaccctgcatcagccctcgcacaaggacttgatgttatgaacaaagtcttggagaaacaaccccgtctcttcatccgaaataacatcaatcatatttctcaaatactggaaccttgctttggcaacaaaatgctggatgctggaaagtcactttgttccttgctcaagatggtgttcagtgcttttcctcttgaagcagcaacaacgccacaagatataaagttgttgcatcaaagggttcaagaactcattcacaagaatcttgctgctgttacaactcagcagatagcacttgagctcaacaatgctcactcaatcattagcttttcattgtttgtcctcaatgcacttgcagaagtacagaagaatttcattgacccgttcattggcttgcttttccgtgttctgcaacgtcttgcacgtgacatggggtcttctgctggcagccatatccgacaaggacagaggcctgaactggattcatcagttaactcacggtctaccatagattctactgtcatatctaacatgaagactgtcttaaaacttataagtgagagggtgatgtcctcttctgaccacagaaaatctatgggccaaatacttcaagctcttctttcagagaaaggcactgattccagcattcttctgtgcatgctagacatgataaaaacttggattgaggaagattgtaggcttgcttcatcaactggttctgttagttcacttaacccaaaggaaataataacttatcttcataagttatcattagttgacagaaaaagctttcctccagctgcacaagaagaatgggatgcaaaatacttgcagcttctttattcactgtgtgcagattcaaccaagtatccgttgtcttttcggcaagaatttttccataagattgagagacagtatatgcttggacttagagctaaagatccagaaatgaggaagcgattcttcaagctttaccatgatacagtgggaaaaacattattttctagattgcaatttataatacagttacaggactgggaagctgtgagtgatgttttctggttgaagcaaggtcttgatctcgttttggcaatattagtagaaaatgaaccaattacacttgcagcaaattctgctcgagtaccaacgcttatgatagctgggcctgttccagatcgcatcaccatgccacagcaggttcctgatgctcaggaaagcatggatggtacaacactatcgtttgactctcttgctgcaaggcatgctcagttcttaaatgacgcgaacaagcttgtggtggcagatatcatggctccattgaaggaacttgcatttgctgatcccaatgttgcatatcatttgtgggtgcttgttttcccaattgtttgggtcaccttacataaagaggaacaagttgccctagctaagccaataatcgcgcttctatcgaaagattaccacaagaggcagcagggctgcagacctaacgttgctcaggcacttcttgagggtcttcatttgagccatccccaaccacgcatgcctagtgagcttatcaaatatattggaaaaacttgcaatgtgtggtatattgcaattgcattactcgagagtcatatagtgcatatgaatgaggccaagtgctccgagtcattggctgagttatacagacttcttaatgaagacgacatgaggtgtggattatggaagagaaaatcaatcactgcagaaacaagggctggtctttcacttgcccagcatggttactggcaacaagcacaaaatctattttaccaggctatgattaaagctactcagggaacatacaataataccgtcccaaaggctgaaatgtgcctttgggaggaacagtggttgtcctgtgcgtctcatttaggtcagtgggaagtcttagctgnn

SEQ ID NO: 70559 - DNA, 8575 bp, Zea Mays
  misc_feature (8574)..(8575): n is a, c, g, or t
aaccagaggcccatcgccctcgtcttcctccaagtccgtccccgtctctacccccaccccaaaccctcggctcgcgagcgcgagggagaccccttcctccgagtccataacacggggttgccattcgcgtcgggggaaacgagcccgcgcctcctgcccctgcactcttacggtcctacctccagccatccgctcctccgcccagctcgcggagtcttcccagcgccgatcttcaaaaccctaagctctggcgcggtaaggttggagccggacgcgcacgggcggggcgcccgccatggcgcccatcaacagcggcaacatggagcagcactcgcagcggctcctcgagcccgacctccctgtgcaagtccgactgcagcttgccatggaagttcgggacagcctggagatgacgcacactccagactacctcaactttcttcgctgctatttcagagccttctcagcaattctcaccgcttacaccaagccacaggccacagagaatgctgagcacaagctacggaatgttgtgatcgagatactcaaccgccttccacacagcgaggtgctcagaccatttgtgcaggatctgctcaagctttctctccgtgtgttgacacaggacaacgaggacaatgctctccttgccatccgaattgtgtttgacctcctccgtaacttccgccctactgtcgaggcggaggtgcagccatttcttgactttgtggttaacatataccataaatttcccacaaccgttagctacttcttcgataatcccaacacaagtgccagtatggctgcctccatgcccatgcagcatttggaccccactgccgatgcctcagtcatgatgcaagtgcctggtggtggtcaactcaacccaagcgcacgttccttcaagatagtcacagagagccctcttgttgtgatgtttctcttccagttgtatgcaaagcttgtgcagacaaatatcccgcacttgttgccactcatggtggcggccatctctatcaagggtcccgacaaggtgccgccacaccttaagacacccttcaacgatttaaagggtgcacaggtcaagaccttgtcatttctgacgtacctcctgaagagcaatgcagattacataaagtcatatgaggaaagcatatgcaagagcattgtgaacttgcttgttacgtgtcctcctgattctgtctccatcagaaaggagctattggttggtctgaaacaagttctcaacaccgagtacaagcgagggctgttccccttgattgacacacttcttgatgaaagggttctgattggcacaggtcgagtttgcatcgaaactttaagacctcttgcttacacccttcttgctgaattggtgcattatgttcgagaagatatttctcttccacagttgtcacggatcatctatttgttctctcggaatatgcatgattcttctttgacccttataattcatacaacatctgcccgcttgatgctgaacctggttgagcccatatatcaaaaaggtgttgaccagcaaagcatggacgaagcacgagttttattggggcgcatattggatgcattcgttgggaagtttaggaccctgaagcgaacaatccctcagttgcttgaagaaggtgaggaagggaaggaacaaccgaatctgagaatgaagcttgaagtcccattacagactgtgctgaatttgcagcaacctttggagtatactaaggaaatcaacgattacaaaagtctgataaagactcttgctgtcggaatgaagacaataatatggagcataacccatgctcactggccacgcccccaggtgcggaagacatctggtgttctgaagtctggcgttcactgtctggctctttttaaggaaaaagacgatgatagggaaattctgcaatcattttcgcagatgctggctataatggaagctcgtgatattatggatatgttctccttttgcatgtctgacctctttgattctatgataaccaacaaccagctattgcacatattttcaacccttttgcaagctcccaaggttctgcggcctttcacagatgtattaattaatttccttgttagctcaaagcttgaagccctgaagcagccagattcacctgctgcaaagcttgttttgcaacttttccggttcttgttcattgctgcagctaaagctccagaaagctgtgaacgcacacttcagccacacgtgccggttataatggaagtctgcatgaggagtgccactgaagttgagaaacccctaggttacatgcaccttcttcgaaacatgtttcgtgcattgaacagtgctaaatttgattcattgatgcgtgatcttataccatctctgcaaccctgcctcaatatgttactctccatgcttgatggtccgataagtgaagatatgcgggacttgattttggagctttgcctgattttacctgcccgcttgagttctttattgccccacatacctcgtctaatgaaacctcttgttcttgctctaaaaggtagtgatgaccttgtgagcttagctctacgtacacttgagttctggattgatagtctgaatcctgactttttggaacctagcatggcaaatttaatgtcagaagtcattcttgctttatggtctcatttaaggcctcctccatacacatggggcacaaagtctttggaacttttagggaagctggggggacgaaataggcgatttttgcgggagcctcttgcacttgaatccaaggaaaatccggagcatggattacgtttagttctgacttttgagcctgcgacaccttttttggttcctctggacagatgcatacaccaagctgttggtgcagttatgcaaggcaatggcttggaagcattctacaggaagaaggctcttcaattcattcgggtgtgcctcgattctttgttaaatctgagggaaaatgtacctggcgagggtgtgagccctggtgttctcggtacattgctaatctctaacctggatccctcaagacgtcggaatgatgcttcagatatgaagggagatttaggtgtgaagacaaaaacacaactactggctgaaaaatctgttttcaagactcttcttgtagctatcattgcagctaatgctgacaccagtcttcatgatgagaaggatgattatgttgtcgatatatgccggcattttgctatgcttttccatgttgactcaccatcctccagccaatctggatttatgcatcctattggttcttcactcccatctatcatcatgggatcaagatcaagatgcaacacttcatctaatctccgggagctggaccctttaatatttttggatgctttagttgaagtgctatccagcgaaaatcgtcaacatgcaaaagctgccctatctgctttgaatatttttgccgagacattaatctttcttgcacggatgaaacacactggtatgctaaggggaggtcctagcacccccatgctagtctctagtccatctttaaatccagtatattcacctcccccaagtgtgcgggttgctgtatttgaggaattgttacctcggttattgcattgttgctacagtagcacatggcaagctcagatgggtggtgtaatgggtctcggggcattggtcggtaaagtgtctgtggataccctatgcatttttcaggtcagagtcgtgcgtggtcttctttttgttcttaagaggttaccagtgcatgcaaacaaagagcaggaggagacaaatcatgtcctaacacaagtacttagagtagtaaacaacgcagatgaagcaaacagtgaacctcgacggcaaagttttcagggagttgttgaattccttgcacaggagttgtttaacccaaacgcttcaatggttgtgagaaagaacgtgcaggcttgcttatcactgcttgcaagcagaactggcagtgaggtttctgaattgcttgagcctctctatttgccattgcttcagcctctgatttcacgacctcttcgttcgaagaatattgagcaacaggtgggcaccgttactgctttgaacttctgtcttgcactcagaccaccccttctaaaactatctcctgaacttgtcaattttttgcaagaagcactacaaattgccgaggctgatgaaactatatgggtcactaggatgatgaatgcgaaagtagttctcacatggaacaaactcagaaccgcatgcattgaactactctgtactgcaatggcatggggagatctaaaagctcaaaatcatactgaattgcgagcaaagattatttcaatgtttttcaaatctctaacatgcagaacaacagagattgtcaatgttgctaaggagggacttcgtcaggtggttcaacagcaaaggatgccaaaggatcttctacagagcagcttaaggcccattctagtaaacttagcaaacacaaagagccttagcatgccattgctacaaggattggctcgcctgcttgaattactgtcaaattggtttaatgtcactttgggtgccaagctattggatcacttgaaaaaatggctggagccagaaaagcttgtccagactcaaaaatcttggaaggctggagatgaaccaaaaatagcagcagctatgatcgagctgtttcaccttcttcccccggcagcaagcaaattcttggatgaccttgttaccttggtaattgatctggaaagggcacttcctgaagatcagttttacagtgagatcaacagtccataccgtgctccactggcaaaatttttgaatcgttatgttctggaggctgttgactattttcttgctcgattaagccatccaaagtatttcaggaggtttatgtacataatctgctcggatactggggacctaagggatgcacttgcaaggtcacctcagaaaatacttgcaagtgccttttctcagttttactctcaaagtgaagcatctgctgctcaattatcttctgtaaaggatgaagcccttactggggctgtatctgagagtattactgtacaatcttcatcaaacatggttactacttctgagagttactttaatggattagagcttgtctcagcccttgtgaaattgatgccagagtggctccgtaacaaccgggttgtctttgacaccttgctacttgcttggaaatcacctgcaagacttgcgaggttgcagaacgagcaggatttgagtttaccccaggtgatggaaagcaagaggctgatcaaatgcttcctgaattacttaagacacgatcgaactgaagttggtgcactctttgatatgttatcagtattcttgtaccgcagtcgtatagattatagctttcttaaggaattttatgtcatagaggttgctgaaggatactccccgaatttgaagaaaactatccttaatcattttctgaacattttccagtcaaaacaatatggacaagatcatttagttgttaccatgcagattcttatacttccaatgctagctcattcatttcaaaatggacaaagttgggaagttgttgatcctactataattaaaactattgttgagaagcttcttgatcctccagaagaggtcagcgctgaatacgacgaaccattgaggatagaacttcttcagctagctacattacttttgaagtatctacagactgatcttgttcaccatcgaaaggaactcataaagtttggttggaatcatctcaagcgtgaagataactcgagcaaacagtgggcctttgtgaatgtttgtcatttcttagaggcctatcaagctcctgaaaagattattttacaggtcttcattgctctgctacggacatgccaaccagaaaacaagctgttggtgaagcaagctctcgatatcctcatgcctgccctacctaggagacttcctcctgaaaaaaatgatagccgcatgccgatatggatcagatacaccaagaaagttctcgtagaggaagggcattcaattccaaatatgattcacatattccagcttattgttcgccatgcggacctcttctatagttgcagagcccactttgttcctcagatggtcaactctcttagtcgccttggattaccatacaacacaacagcggaaaatagaaggcttgcaattgaacttgctgggttggtagtggcatgggaaagacagagacaaagtgagatgaaagtggcgcaggaaagtgagagccagaatcaattaggtgacatgcttaatccttctgttattggtggtgatccaaaacgctcctctgatgttccgtcgtttgctgatgatttgagtaagagagtgaaagttgagcctggtttgcaacctctttgtgtaatgtcgccgggtggggcatctatacctaatattgaaacacctggatcttcaggtctacctgatgaggagtataaacctaatgcagcaatggaggagatgatcattaccttcctaattagggtatcacttgtgattgagcctaaggataaggaatctagctcaatgtacaagcaagctcttgatctactgactcaagctctggaagtctggccaaatgccaatgttaaattcaattatctggagaaattacttgggaatctgtcacccactcctcagtccaaggaccctgcatcagccctcgcacaaggacttgatgttatgaacaaagtcttggagaaacaaccccgtctcttcatccgaaataacatcaatcatatttctcaaatactggaaccttgctttggcaacaaaatgctggatgctggaaagtcactttgttccttgctcaagatggtgttcagtgcttttcctcttgaagcagcaacaacgccacaagatataaagttgttgcatcaaagggttcaagaactcattcacaagaatcttgctgctgttacaactcagcagatagcacttgagctcaacaatgctcactcaatcattagcttttcattgtttgtcctcaatgcacttgcagaagtacagaagaatttcattgacccgttcattggcttgcttttccgtgttctgcaacgtcttgcacgtgacatggggtcttctgctggcagccatatccgacaaggacagaggcctgaactggattcatcagttaactcacggtctaccatagattctactgtcatatctaacatgaagactgtcttaaaacttataagtgagagggtgatgtcctcttctgaccacagaaaatctatgggccaaatacttcaagctcttctttcagagaaaggcactgattccagcattcttctgtgcatgctagacatgataaaaacttggattgaggaagattgtaggcttgcttcatcaactggttctgttagttcacttaacccaaaggaaataataacttatcttcataagttatcattagttgacagaaaaagctttcctccagctgcacaagaagaatgggatgcaaaatacttgcagcttctttattcactgtgtgcagattcaaccaagtatccgttgtcttttcggcaagaatttttccataagattgagagacagtatatgcttggacttagagctaaagatccagaaatgaggaagcgattcttcaagctttaccatgatacagtgggaaaaacattattttctagattgcaatttataatacagttacaggactgggaagctgtgagtgatgttttctggttgaagcaaggtcttgatctcgttttggcaatattagtagaaaatgaaccaattacacttgcagcaaattctgctcgagtaccaacgcttatgatagctgggcctgttccagatcgcatcaccatgccacagcaggttcctgatgctcaggaaagcatggatggtacaacactatcgtttgactctcttgctgcaaggcatgctcagttcttaaatgacgcgaacaagcttgtggtggcagatatcatggctccattgaaggaacttgcatttgctgatcccaatgttgcatatcatttgtgggtgcttgttttcccaattgtttgggtcaccttacataaagaggaacaagttgccctagctaagccaataatcgcgcttctatcgaaagattaccacaagaggcagcagggctgcagacctaacgttgctcaggcacttcttgagggtcttcatttgagccatccccaaccacgcatgcctagtgagcttatcaaatatattggaaaaacttgcaatgtgtggtatattgcaattgcattactcgagagtcatatagtgcatatgaatgaggccaagtgctccgagtcattggctgagttatacagacttcttaatgaagacgacatgaggtgtggattatggaagagaaaatcaatcactgcagaaacaagggctggtctttcacttgcccagcatggttactggcaacaagcacaaaatctattttaccaggctatgattaaagctactcagggaacatacaataataccgtcccaaaggctgaaatgtgcctttgggaggaacagtggttgtcctgtgcgtctcatttaggtcagtgggaagtcttagctgnn

SEQ ID NO: 70560 - DNA, 8336 bp, Zea Mays
  misc_feature (8335)..(8336): n is a, c, g, or t
tcgagaccggtccttgtataaccagaggcccatcgccctcgtcttcctccaagtccgtccccgtctctacccccaccccaaaccctcggctcgcgagcgcgagggagaccccttcctccgagtccataacacggggttgccattcgcgtcgggggaaacgagcccgcgcctcctgcccctgcactcttacggtcctacctccagccatccgctcctccgcccagctcgcggagtcttcccagcgccgatcttcaaaaccctaagctctggcgcggtaaggttggagccggacgcgcacgggcggggcgcccgccatggcgcccatcaacagcggcaacatggagcagcactcgcagcggctcctcgagcccgacctccctgtgcaagtccgactgcagcttgccatggaagttcgggacagcctggagatgacgcacactccagactacctcaactttcttcgctgctatttcagagccttctcagcaattctcaccgcttacaccaagccacaggccacagagaatgctgagcacaagctacggaatgttgtgatcgagatactcaaccgccttccacacagcgaggtgctcagaccatttgtgcaggatctgctcaagctttctctccgtgtgttgacacaggacaacgaggacaatgctctccttgccatccgaattgtgtttgacctcctccgtaacttccgccctactgtcgaggcggaggtgcagccatttcttgactttgtggttaacatataccataaatttcccacaaccgttagctacttcttcgataatcccaacacaagtgccagtatggctgcctccatgcccatgcagcatttggaccccactgccgatgcctcagtcatgatgcaagtgcctggtggtggtcaactcaacccaagcgcacgttccttcaagatagtcacagagagccctcttgttgtgatgtttctcttccagttgtatgcaaagcttgtgcagacaaatatcccgcacttgttgccactcatggtggcggccatctctatcaagggtcccgacaaggtgccgccacaccttaagacacccttcaacgatttaaagggtgcacaggtcaagaccttgtcatttctgacgtacctcctgaagagcaatgcagattacataaagtcatatgaggaaagcatatgcaagagcattgtgaacttgcttgttacgtgtcctcctgattctgtctccatcagaaaggagctattggttggtctgaaacaagttctcaacaccgagtacaagcgagggctgttccccttgattgacacacttcttgatgaaagggttctgattggcacaggtcgagtttgcatcgaaactttaagacctcttgcttacacccttcttgctgaattggtgcattatgttcgagaagatatttctcttccacagttgtcacggatcatctatttgttctctcggaatatgcatgattcttctttgacccttataattcatacaacatctgcccgcttgatgctgaacctggttgagcccatatatcaaaaaggtgttgaccagcaaagcatggacgaagcacgagttttattggggcgcatattggatgcattcgttgggaagtttaggaccctgaagcgaacaatccctcagttgcttgaagaaggtgaggaagggaaggaacaaccgaatctgagaatgaagcttgaagtcccattacagactgtgctgaatttgcagcaacctttggagtatactaaggaaatcaacgattacaaaagtctgataaagactcttgctgtcggaatgaagacaataatatggagcataacccatgctcactggccacgcccccagcaacaaaatcaacagtcttccaatttgtcacttcaacacttcagggggctgagggaggatgaggtgcggaagacatctggtgttctgaagtctggcgttcactgtctggctctttttaaggaaaaagacgatgatagggaaattctgcaatcattttcgcagatgctggctataatggaagctcgtgatattatggatatgttctccttttgcatgtctgacctctttgattctatgataaccaacaaccagctattgcacatattttcaacccttttgcaagctcccaaggttctgcggcctttcacagatgtattaattaatttccttgttagctcaaagcttgaagccctgaagcagccagattcacctgctgcaaagcttgttttgcaacttttccggttcttgttcattgctgcagctaaagctccagaaagctgtgaacgcacacttcagccacacgtgccggttataatggaagtctgcatgaggagtgccactgaagttgagaaacccctaggttacatgcaccttcttcgaaacatgtttcgtgcattgaacagtgctaaatttgattcattgatgcgtgatcttataccatctctgcaaccctgcctcaatatgttactctccatgcttgatgaagtcattcttgctttatggtctcatttaaggcctcctccatacacatggggcacaaagtctttggaacttttagggaagctggggggacgaaataggcgatttttgcgggagcctcttgcacttgaatccaaggaaaatccggagcatggattacgtttagttctgacttttgagcctgcgacaccttttttggttcctctggacagatgcatacaccaagctgttggtgcagttatgcaaggcaatggcttggaagcattctacaggaagaaggctcttcaattcattcgggtgtgcctcgattctttgttaaatctgagggaaaatgtacctggcgagggtgtgagccctggtgttctcggtacattgctaatctctaacctggatccctcaagacgtcggaatgatgcttcagatatgaagggagatttaggtgtgaagacaaaaacacaactactggctgaaaaatctgttttcaagactcttcttgtagctatcattgcagctaatgctgacaccagtcttcatgatgagaaggatgattatgttgtcgatatatgccggcattttgctatgcttttccatgttgactcaccatcctccagccaatctggatttatgcatcctattggttcttcactcccatctatcatcatgggatcaagatcaagatgcaacacttcatctaatctccgggagctggaccctttaatatttttggatgctttagttgaagtgctatccagcgaaaatcgtcaacatgcaaaagctgccctatctgctttgaatatttttgccgagacattaatctttcttgcacggatgaaacacactggtatgctaaggggaggtcctagcacccccatgctagtctctagtccatctttaaatccagtatattcacctcccccaagtgtgcgggttgctgtatttgaggaattgttacctcggttattgcattgttgctacagtagcacatggcaagctcagatgggtggtgtaatgggtctcggggcattggtcggtaaagtgtctgtggataccctatgcatttttcaggtcagagtcgtgcgtggtcttctttttgttcttaagaggttaccagtgcatgcaaacaaagagcaggaggagacaaatcatgtcctaacacaagtacttagagtagtaaacaacgcagatgaagcaaacagtgaacctcgacggcaaagttttcagggagttgttgaattccttgcacaggagttgtttaacccaaacgcttcaatggttgtgagaaagaacgtgcaggcttgcttatcactgcttgcaagcagaactggcagtgaggtttctgaattgcttgagcctctctatttgccattgcttcagcctctgatttcacgacctcttcgttcgaagaatattgagcaacaggtgggcaccgttactgctttgaacttctgtcttgcactcagaccaccccttctaaaactatctcctgaacttgtcaattttttgcaagaagcactacaaattgccgaggctgatgaaactatatgggtcactaggatgatgaatgcgaaagtagttctcacatggaacaaactcagaaccgcatgcattgaactactctgtactgcaatggcatggggagatctaaaagctcaaaatcatactgaattgcgagcaaagattatttcaatgtttttcaaatctctaacatgcagaacaacagagattgtcaatgttgctaaggagggacttcgtcaggtggttcaacagcaaaggatgccaaaggatcttctacagagcagcttaaggcccattctagtaaacttagcaaacacaaagagccttagcatgccattgctacaaggattggctcgcctgcttgaattactgtcaaattggtttaatgtcactttgggtgccaagctattggatcacttgaaaaaatggctggagccagaaaagcttgtccagactcaaaaatcttggaaggctggagatgaaccaaaaatagcagcagctatgatcgagctgtttcaccttcttcccccggcagcaagcaaattcttggatgaccttgttaccttggtaattgatctggaaagggcacttcctgaagatcagttttacagtgagatcaacagtccataccgtgctccactggcaaaatttttgaatcgttatgttctggaggctgttgactattttcttgctcgattaagccatccaaagtatttcaggaggtttatgtacataatctgctcggatactggggacctaagggatgcacttgcaaggtcacctcagaaaatacttgcaagtgccttttctcagttttactctcaaagtgaagcatctgctgctcaattatcttctgtaaaggatgaagcccttactggggctgtatctgagagtattactgtacaatcttcatcaaacatggttactacttctgagagttactttaatggattagagcttgtctcagcccttgtgaaattgatgccagagtggctccgtaacaaccgggttgtctttgacaccttgctacttgcttggaaatcacctgcaagacttgcgaggttgcagaacgagcaggatttgagtttaccccaggtgatggaaagcaagaggctgatcaaatgcttcctgaattacttaagacacgatcgaactgaagttggtgcactctttgatatgttatcagtattcttgtaccgcagtcgtatagattatagctttcttaaggaattttatgtcatagaggttgctgaaggatactccccgaatttgaagaaaactatccttaatcattttctgaacattttccagtcaaaacaatatggacaagatcatttagttgttaccatgcagattcttatacttccaatgctagctcattcatttcaaaatggacaaagttgggaagttgttgatcctactataattaaaactattgttgagaagcttcttgatcctccagaagaggtcagcgctgaatacgacgaaccattgaggatagaacttcttcagctagctacattacttttgaagtatctacagactgatcttgttcaccatcgaaaggaactcataaagtttggttggaatcatctcaagcgtgaagataactcgagcaaacagtgggcctttgtgaatgtttgtcatttcttagaggcctatcaagctcctgaaaagattattttacaggtcttcattgctctgctacggacatgccaaccagaaaacaagctgttggtgaagcaagctctcgatatcctcatgcctgccctacctaggagacttcctcctgaaaaaaatgatagccgcatgccgatatggatcagatacaccaagaaagttctcgtagaggaagggcattcaattccaaatatgattcacatattccagcttattgttcgccatgcggacctcttctatagttgcagagcccactttgttcctcagatggtcaactctcttagtcgccttggattaccatacaacacaacagcggaaaatagaaggcttgcaattgaacttgctgggttggtagtggcatgggaaagacagagacaaagtgagatgaaagtggcgcaggaaagtgagagccagaatcaattaggtgacatgcttaatccttctgttattggtggtgatccaaaacgctcctctgatgttccgtcgtttgctgatgatttgagtctacctgatgaggagtataaacctaatgcagcaatggaggagatgatcattaccttcctaattagggtatcacttgtgattgagcctaaggataaggaatctagctcaatgtacaagcaagctcttgatctactgactcaagctctggaagtctggccaaatgccaatgttaaattcaattatctggagaaattacttgggaatctgtcacccactcctcagtccaaggaccctgcatcagccctcgcacaaggacttgatgttatgaacaaagtcttggagaaacaaccccgtctcttcatccgaaataacatcaatcatatttctcaaatactggaaccttgctttggcaacaaaatgctggatgctggaaagtcactttgttccttgctcaagatggtgttcagtgcttttcctcttgaagcagcaacaacgccacaagatataaagttgttgcatcaaagggttcaagaactcattcacaagaatcttgctgctgttacaactcagcagatagcacttgagctcaacaatgctcactcaatcattagcttttcattgtttgtcctcaatgcacttgcagaagtacagaagaatttcattgacccgttcattggcttgcttttccgtgttctgcaacgtcttgcacgtgacatggggtcttctgctggcagccatatccgacaaggacagaggcctgaactggattcatcagttaactcacggtctaccatagattctactgtcatatctaacatgaagactgtcttaaaacttataagtgagagggtgatgtcctcttctgaccacagaaaatctatgggccaaatacttcaagctcttctttcagagaaaggcactgattccagcattcttctgtgcatgctagacatgataaaaacttggattgaggaagattgtaggcttgcttcatcaactggttctgttagttcacttaacccaaaggaaataataacttatcttcataagttatcattagttgacagaaaaagctttcctccagctgcacaagaagaatgggatgcaaaatacttgcagcttctttattcactgtgtgcagattcaaccaagtatccgttgtcttttcggcaagaatttttccataagattgagagacagtatatgcttggacttagagctaaagatccagaaatgaggaagcgattcttcaagctttaccatgatacagtgggaaaaacattattttctagattgcaatttataatacagttacaggactgggaagctgtgagtgatgttttctggttgaagcaaggtcttgatctcgttttggcaatattagtagaaaatgaaccaattacacttgcagcaaattctgctcgagtaccaacgcttatgatagctgggcctgttccagatcgcatcaccatgccacagcaggttcctgatgctcaggaaagcatggatggtacaacactatcgtttgactctcttgctgcaaggcatgctcagttcttaaatgacgcgaacaagcttgtggtggcagatatcatggctccattgaaggaacttgcatttgctgatcccaatgttgcatatcatttgtgggtgcttgttttcccaattgtttgggtcaccttacataaagaggaacaagttgccctagctaagccaataatcgcgcttctatcgaaagattaccacaagaggcagcagggctgcagacctaacgttgctcaggcacttcttgagggtcttcatttgagccatccccaaccacgcatgcctagtgagcttatcaaatatattggaaaaacttgcaatgtgtggtatattgcaattgcattactcgagagtcatatagtgcatatgaatgaggccaagtgctccgagtcattggctgagttatacagacttcttaatgaagacgacatgaggtgtggattatggaagagaaaatcaatcactgcagaaacaagggctggtctttcacttgcccagcatggttactggcaacaagcacaaaatctattttaccaggctatgattaaagctactcagggaacatacaataataccgtcccaaaggctgaaatgtgcctttgggaggaacagtggttgtcctgtgcgtctcatttaggtcagtgggaagtcttagctgnn

SEQ ID NO: 70561 - DNA, 8444 bp, Zea Mays
  misc_feature (8443)..(8444): n is a, c, g, or t
aaagataaagataatgatttataagatgaaaatattgaaataagaataggaagtaagaatttggaatcagagaatttggaagagggaatggttcgagaccggtccttgtataaccagaggcccatcgccctcgtcttcctccaagtccgtccccgtctctacccccaccccaaaccctcggctcgcgagcgcgagggagaccccttcctccgagtccataacacggggttgccattcgcgtcgggggaaacgagcccgcgcctcctgcccctgcactcttacggtcctacctccagccatccgctcctccgcccagctcgcggagtcttcccagcgccgatcttcaaaaccctaagctctggcgcggtaaggttggagccggacgcgcacgggcggggcgcccgccatggcgcccatcaacagcggcaacatggagcagcactcgcagcggctcctcgagcccgacctccctgtgcaagtccgactgcagcttgccatggaagttcgggacagcctggagatgacgcacactccagactacctcaactttcttcgctgctatttcagagccttctcagcaattctcaccgcttacaccaagccacaggccacagagaatgctgagcacaagctacggaatgttgtgatcgagatactcaaccgccttccacacagcgaggtgctcagaccatttgtgcaggatctgctcaagctttctctccgtgtgttgacacaggacaacgaggacaatgctctccttgccatccgaattgtgtttgacctcctccgtaacttccgccctactgtcgaggcggaggtgcagccatttcttgactttgtggttaacatataccataaatttcccacaaccgttagctacttcttcgataatcccaacacaagtgccagtatggctgcctccatgcccatgcagcatttggaccccactgccgatgcctcagtcatgatgcaagtgcctggtggtggtcaactcaacccaagcgcacgttccttcaagatagtcacagagagccctcttgttgtgatgtttctcttccagttgtatgcaaagcttgtgcagacaaatatcccgcacttgttgccactcatggtggcggccatctctatcaagggtcccgacaaggtgccgccacaccttaagacacccttcaacgatttaaagggtgcacaggtcaagaccttgtcatttctgacgtacctcctgaagagcaatgcagattacataaagtcatatgaggaaagcatatgcaagagcattgtgaacttgcttgttacgtgtcctcctgattctgtctccatcagaaaggagctattggttggtctgaaacaagttctcaacaccgagtacaagcgagggctgttccccttgattgacacacttcttgatgaaagggttctgattggcacaggtcgagtttgcatcgaaactttaagacctcttgcttacacccttcttgctgaattggtgcattatgttcgagaagatatttctcttccacagttgtcacggatcatctatttgttctctcggaatatgcatgattcttctttgacccttataattcatacaacatctgcccgcttgatgctgaacctggttgagcccatatatcaaaaaggtgttgaccagcaaagcatggacgaagcacgagttttattggggcgcatattggatgcattcgttgggaagtttaggaccctgaagcgaacaatccctcagttgcttgaagaaggtgaggaagggaaggaacaaccgaatctgagaatgaagcttgaagtcccattacagactgtgctgaatttgcagcaacctttggagtatactaaggaaatcaacgattacaaaagtctgataaagactcttgctgtcggaatgaagacaataatatggagcataacccatgctcactggccacgcccccaggtgcggaagacatctggtgttctgaagtctggcgttcactgtctggctctttttaaggaaaaagacgatgatagggaaattctgcaatcattttcgcagatgctggctataatggaagctcgtgatattatggatatgttctccttttgcatgtctgacctctttgattctatgataaccaacaaccagctattgcacatattttcaacccttttgcaagctcccaaggttctgcggcctttcacagatgtattaattaatttccttgttagctcaaagcttgaagccctgaagcagccagattcacctgctgcaaagcttgttttgcaacttttccggttcttgttcattgctgcagctaaagctccagaaagctgtgaacgcacacttcagccacacgtgccggttataatggaagtctgcatgaggagtgccactgaagttgagaaacccctaggttacatgcaccttcttcgaaacatgtttcgtgcattgaacagtgctaaatttgattcattgatgcgtgatcttataccatctctgcaaccctgcctcaatatgttactctccatgcttgatggtccgataagtgaagatatgcgggacttgattttggagctttgcctgattttacctgcccgcttgagttctttattgccccacatacctcgtctaatgaaacctcttgttcttgctctaaaaggtagtgatgaccttgtgagcttagctctacgtacacttgagttctggattgatagtctgaatcctgactttttggaacctagcatggcaaatttaatgtcagaagtcattcttgctttatggtctcatttaaggcctcctccatacacatggggcacaaagtctttggaacttttagggaagctggggggacgaaataggcgatttttgcgggagcctcttgcacttgaatccaaggaaaatccggagcatggattacgtttagttctgacttttgagcctgcgacaccttttttggttcctctggacagatgcatacaccaagctgttggtgcagttatgcaaggcaatggcttggaagcattctacaggaagaaggctcttcaattcattcgggtgtgcctcgattctttgttaaatctgagggaaaatgtacctggcgagggtgtgagccctggtgttctcggtacattgctaatctctaacctggatccctcaagacgtcggaatgatgcttcagatatgaagggagatttaggtgtgaagacaaaaacacaactactggctgaaaaatctgttttcaagactcttcttgtagctatcattgcagctaatgctgacaccagtcttcatgatgagaaggatgattatgttgtcgatatatgccggcattttgctatgcttttccatgttgactcaccatcctccagccaatctggatttatgcatcctattggttcttcactcccatctatcatcatgggatcaagatcaagatgcaacacttcatctaatctccgggagctggaccctttaatatttttggatgctttagttgaagtgctatccagcgaaaatcgtcaacatgcaaaagctgccctatctgctttgaatatttttgccgagacattaatctttcttgcacggatgaaacacactggtatgctaaggggaggtcctagcacccccatgctagtctctagtccatctttaaatccagtatattcacctcccccaagtgtgcgggttgctgtatttgaggaattgttacctcggttattgcattgttgctacagtagcacatggcaagctcagatgggtggtgtaatgggtctcggggcattggtcggtaaagtgtctgtggataccctatgcatttttcaggtcagagtcgtgcgtggtcttctttttgttcttaagaggttaccagtgcatgcaaacaaagagcaggaggagacaaatcatgtcctaacacaagtacttagagtagtaaacaacgcagatgaagcaaacagtgaacctcgacggcaaagttttcagggagttgttgaattccttgcacaggagttgtttaacccaaacgcttcaatggttgtgagaaagaacgtgcaggcttgcttatcactgcttgcaagcagaactggcagtgaggtttctgaattgcttgagcctctctatttgccattgcttcagcctctgatttcacgacctcttcgttcgaagaatattgagcaacaggtgggcaccgttactgctttgaacttctgtcttgcactcagaccaccccttctaaaactatctcctgaacttgtcaattttttgcaagaagcactacaaattgccgaggctgatgaaactatatgggtcactaggatgatgaatgcgaaagtagttctcacatggaacaaactcagaaccgcatgcattgaactactctgtactgcaatggcatggggagatctaaaagctcaaaatcatactgaattgcgagcaaagattatttcaatgtttttcaaatctctaacatgcagaacaacagagattgtcaatgttgctaaggagggacttcgtcaggtggttcaacagcaaaggatgccaaaggatcttctacagagcagcttaaggcccattctagtaaacttagcaaacacaaagagccttagcatgccattgctacaaggattggctcgcctgcttgaattactgtcaaattggtttaatgtcactttgggtgccaagctattggatcacttgaaaaaatggctggagccagaaaagcttgtccagactcaaaaatcttggaaggctggagatgaaccaaaaatagcagcagctatgatcgagctgtttcaccttcttcccccggcagcaagcaaattcttggatgaccttgttaccttggtaattgatctggaaagggcacttcctgaagatcagttttacagtgagatcaacagtccataccgtgctccactggcaaaatttttgaatcgttatgttctggaggctgttgactattttcttgctcgattaagccatccaaagtatttcaggaggtttatgtacataatctgctcggatactggggacctaagggatgcacttgcaaggtcacctcagaaaatacttgcaagtgccttttctcagttttactctcaaagtgaagcatctgctgctcaattatcttctgtaaaggatgaagcccttactggggctgtatctgagagtattactgtacaatcttcatcaaacatggttactacttctgagagttactttaatggattagagcttgtctcagcccttgtgaaattgatgccagagtggctccgtaacaaccgggttgtctttgacaccttgctacttgcttggaaatcacctgcaagacttgcgaggttgcagaacgagcaggatttgagtttaccccaggtgatggaaagcaagaggctgatcaaatgcttcctgaattacttaagacacgatcgaactgaagttggtgcactctttgatatgttatcagtattcttgtaccgcagtcgtatagattatagctttcttaaggaattttatgtcatagaggttgctgaaggatactccccgaatttgaagaaaactatccttaatcattttctgaacattttccagtcaaaacaatatggacaagatcatttagttgttaccatgcagattcttatacttccaatgctagctcattcatttcaaaatggacaaagttgggaagttgttgatcctactataattaaaactattgttgagaagcttcttgatcctccagaagaggtcagcgctgaatacgacgaaccattgaggatagaacttcttcagctagctacattacttttgaagtatctacagactgatcttgttcaccatcgaaaggaactcataaagtttggttggaatcatctcaagcgtgaagataactcgagcaaacagtgggcctttgtgaatgtttgtcatttcttagaggcctatcaagctcctgaaaagattattttacaggtcttcattgctctgctacggacatgccaaccagaaaacaagctgttggtgaagcaagctctcgatatcctcatgcctgccctacctaggagacttcctcctgaaaaaaatgatagccgcatgccgatatggatcagatacaccaagaaagttctcgtagaggaagggcattcaattccaaatatgattcacatattccagcttattgttcgccatgcggacctcttctatagttgcagagcccactttgttcctcagatggtcaactctcttagtcgccttggattaccatacaacacaacagcggaaaatagaaggcttgcaattgaacttgctgggttggtagtggcatgggaaagacagagacaaagtgagatgaaagtggcgcaggaaagtgagagccagaatcaattaggtatcacttgtgattgagcctaaggataaggaatctagctcaatgtacaagcaagctcttgatctactgactcaagctctggaagtctggccaaatgccaatgttaaattcaattatctggagaaattacttgggaatctgtcacccactcctcagtccaaggaccctgcatcagccctcgcacaaggacttgatgttatgaacaaagtcttggagaaacaaccccgtctcttcatccgaaataacatcaatcatatttctcaaatactggaaccttgctttggcaacaaaatgctggatgctggaaagtcactttgttccttgctcaagatggtgttcagtgcttttcctcttgaagcagcaacaacgccacaagatataaagttgttgcatcaaagggttcaagaactcattcacaagaatcttgctgctgttacaactcagcagatagcacttgagctcaacaatgctcactcaatcattagcttttcattgtttgtcctcaatgcacttgcagaagtacagaagaatttcattgacccgttcattggcttgcttttccgtgttctgcaacgtcttgcacgtgacatggggtcttctgctggcagccatatccgacaaggacagaggcctgaactggattcatcagttaactcacggtctaccatagattctactgtcatatctaacatgaagactgtcttaaaacttataagtgagagggtgatgtcctcttctgaccacagaaaatctatgggccaaatacttcaagctcttctttcagagaaaggcactgattccagcattcttctgtgcatgctagacatgataaaaacttggattgaggaagattgtaggcttgcttcatcaactggttctgttagttcacttaacccaaaggaaataataacttatcttcataagttatcattagttgacagaaaaagctttcctccagctgcacaagaagaatgggatgcaaaatacttgcagcttctttattcactgtgtgcagattcaaccaagtatccgttgtcttttcggcaagaatttttccataagattgagagacagtatatgcttggacttagagctaaagatccagaaatgaggaagcgattcttcaagctttaccatgatacagtgggaaaaacattattttctagattgcaatttataatacagttacaggactgggaagctgtgagtgatgttttctggttgaagcaaggtcttgatctcgttttggcaatattagtagaaaatgaaccaattacacttgcagcaaattctgctcgagtaccaacgcttatgatagctgggcctgttccagatcgcatcaccatgccacagcaggttcctgatgctcaggaaagcatggatggtacaacactatcgtttgactctcttgctgcaaggcatgctcagttcttaaatgacgcgaacaagcttgtggtggcagatatcatggctccattgaaggaacttgcatttgctgatcccaatgttgcatatcatttgtgggtgcttgttttcccaattgtttgggtcaccttacataaagaggaacaagttgccctagctaagccaataatcgcgcttctatcgaaagattaccacaagaggcagcagggctgcagacctaacgttgctcaggcacttcttgagggtcttcatttgagccatccccaaccacgcatgcctagtgagcttatcaaatatattggaaaaacttgcaatgtgtggtatattgcaattgcattactcgagagtcatatagtgcatatgaatgaggccaagtgctccgagtcattggctgagttatacagacttcttaatgaagacgacatgaggtgtggattatggaagagaaaatcaatcactgcagaaacaagggctggtctttcacttgcccagcatggttactggcaacaagcacaaaatctattttaccaggctatgattaaagctactcagggaacatacaataataccgtcccaaaggctgaaatgtgcctttgggaggaacagtggttgtcctgtgcgtctcatttaggtcagtgggaagtcttagctgnn

SEQ ID NO: 70562 - DNA, 1558 bp, Zea Mays
gtagagcattagatatgcatgtagaaggaaagttctaatgcgatggtggtaatgtgatgcatggtcaaagagagtaaggtttagttgttcgtttcagagaataaaagtaccagtagaggttcatccctcctgggcaggcaacgagctaattagataggcacctaacttaggttagtaagttttaattattaccttaacacaacatgatagcgaacatgatgatattgtaaagtattttggcaacaatggtgtatttaaactccacaaatttattggaacttgagctagcacctgtatgagtcaagagcctatacttttcaatgagggttatggatttagcagcaggggaactcccggagattgtgcctcttggaaaaggcttctttcttgccaactatcctatttcaattttggattgaccattatcgttcgcgttcctttgttctccatcttcagatttattggaacttgagctagcacctgtatgagtcaagagcctagacttttcaacgagggttatggatttggcagcaggggaactcccagagattgtgcctcttggaaaaggcttctttcttgccaactatcctatttcaattttggattgaccattatcgttcgcgttcctttgttctccatcttttacctcttgtagttacacaagaacaacttgattgtgctaaacatgcaatcaaatctgcagttctgatgaacttggaatcaagggctcaagtaacctgtctctttttggtcattgtgctccaacgtgacatcacaacaatcattgaggagtgtaaccggcaacctcagctctgaaagaaccctagagtaaacactcacatcaagacactccactgttcactcttgtgctgctcctaccaatggagcaagagcatctccacctggcaatggtccactcgttgtattcatcactaagtcagctcgattccaccaatgggtgttcatgctgttggatggaaaatgacaacccctctttgcatcatgcactgttttgtctttctaaaatatttctgtttgctcctagcggcttgaacccctacaagtgcacctggcattggttaccaatctgcagattcataacatctcatgaaaaggatacgtgttggacaaccagataaggtattacagagaatatgaataatctggaggttctactgatgcatgtaaattatggaattatggtttcaattctagattatttgataatggcacctctatatgctcattgggcaatgatcagaaagttggaggtcatagaaatactgagaatggtgaattttgtttacatttatgggcacttttgaaaagaaattattttgtatggtagtattgttgaaaagatcaataattttagagactttgatgatcgctatgtggatcattgtgcacggaataagcggagctgctcatatcttctactaacaagacacttagcattcgttgcccactcttagcagctgccaggtttatttcccctcttccgatctcctgcccttatatgtgaattcctttcatcctcccaatatttgtttccctg

SEQ ID NO: 70563 - DNA, 1275 bp, Zea Mays
catgcatgtgtctttcctacagagcctatacttttcaatgagggttatggatttagcagcaggggaactcccggagattgtgcctcttggaaaaggcttctttcttgccaactatcctatttcaattttggattgaccattatcgttcgcgttcctttgttctccatcttcagatttattggaacttgagctagcacctgtatgagtcaagagcctagacttttcaacgagggttatggatttggcagcaggggaactcccagagattgtgcctcttggaaaaggcttctttcttgccaactatcctatttcaattttggattgaccattatcgttcgcgttcctttgttctccatcttttacctcttgtagttacacaagaacaacttgattgtgctaaacatgcaatcaaatctgcagttctgatgaacttggaatcaagggctcaagtaacctgtctctttttggtcattgtgctccaacgtgacatcacaacaatcattgaggagtgtaaccggcaacctcagctctgaaagaaccctagagtaaacactcacatcaagacactccactgttcactcttgtgctgctcctaccaatggagcaagagcatctccacctggcaatggtccactcgttgtattcatcactaagtcagctcgattccaccaatgggtgttcatgctgttggatggaaaatgacaacccctctttgcatcatgcactgttttgtctttctaaaatatttctgtttgctcctagcggcttgaacccctacaagtgcacctggcattggttaccaatctgcagattcataacatctcatgaaaaggatacgtgttggacaaccagataaggtattacagagaatatgaataatctggaggttctactgatgcatgtaaattatggaattatggtttcaattctagattatttgataatggcacctctatatgctcattgggcaatgatcagaaagttggaggtcatagaaatactgagaatggtgaattttgtttacatttatgggcacttttgaaaagaaattattttgtatggtagtattgttgaaaagatcaataattttagagactttgatgatcgctatgtggatcattgtgcacggaataagcggagctgctcatatcttctactaacaagacacttagcattcgttgcccactcttagcagctgccaggtttatttcccctcttccgatctcctgcccttatatgtgaattcctttcatcctcccaatatttgtttccctg

SEQ ID NO: 70564 - DNA, 1677 bp, Zea Mays
gcggcatccagtcagtggttgtctggatctgggggctccaagtgtggatccagtcctaccttctccagatctgttttcctctcacctgggtgggcttcgtcttgccactggtctcctcctcgggctcgtcggcgtagccgcggtgggcacaacccgcggcgtgcagaagaaccggaggctcggctggtgttggtaccagaggaggaggcggtgagttcttgaaagatgatggaggggagacagacttggaccaccaacatatgcacgaggtggtgaatggggttccctatgagcttctccatcggctggcgtctcagctcccgtcagtcgcacttggaagcggatttcatttaccctttctcctcaaggtggccctcgatctagagacgccgtctatctccagcaagagcgataccgtcgaggcgcctatccacgccagacacaacgtccgcagtgatgggcgacctctaaggcctgaacggtgccaccataggcttctcggcggccggcggcccggaggaggcgactgaagaggaggacatgcggggctgcgagggatgcgctcgccggtggccgaagttggggctaagctggggctgtgcacagtcgagaagacgaaggcaaggcgagtcactccatcacgctatgcatgtcaccaaggcgcggcctcccaatctcgagcctagacttttcaacgagggttatggatttggcagcaggggaactcccagagattgtgcctcttggaaaaggcttctttcttgccaactatcctatttcaattttggattgaccattatcgttcgcgttcctttgttctccatcttttacctcttgtagttacacaagaacaacttgattgtgctaaacatgcaatcaaatctgcagttctgatgaacttggaatcaaggtgtaaccggcaacctcagctctgaaagaaccctagagtaaacactcacatcaagacactccactgttcactcttgtgctgctcctaccaatggagcaagagcatctccacctggcaatggtccactcgttgtattcatcactaagtcagctcgattccaccaatgggtgttcatgctgttggatggaaaatgacaacccctctttgcatcatgcactgttttgtctttctaaaatatttctgtttgctcctagcggcttgaacccctacaagtgcacctggcattggttaccaatctgcagattcataacatctcatgaaaaggatacgtgttggacaaccagataaggtattacagagaatatgaataatctggaggttctactgatgcatgtaaattatggaattatggtttcaattctagattatttgataatggcacctctatatgctcattgggcaatgatcagaaagttggaggtcatagaaatactgagaatggtgaattttgtttacatttatgggcacttttgaaaagaaattattttgtatggtagtattgttgaaaagatcaataattttagagactttgatgatcgctatgtggatcattgtgcacggaataagcggagctgctcatatcttctactaacaagacacttagcattcgttgcccactcttagcagctgccaggtttatttcccctcttccgatctcctgcccttatatgtgaattcctttcatcctcccaatatttgtttccctg

SEQ ID NO: 70565 - DNA, 2082 bp, Zea Mays
gcggcatccagtcagtggttgtctggatctgggggctccaagtgtggatccagtcctaccttctccagatctgttttcctctcacctgggtgggcttcgtcttgccactggtctcctcctcgggctcgtcggcgtagccgcggtgggcacaacccgcggcgtgcagaagaaccggaggctcggctggtgttggtaccagaggaggaggcggtgagttcttgaaagatgatggaggggagacagacttggaccaccaacatatgcacgaggtggtgaatggggttccctatgagcttctccatcggctggcgtctcagctcccgtcagtcgcacttggaagcggatttcatttaccctttctcctcaaggtggccctcgatctagagacgccgtctatctccagcaagagcgataccgtcgaggcgcctatccacgccagacacaacgtccgcagtgatgggcgacctctaaggcctgaacggtgccaccataggcttctcggcggccggcggcccggaggaggcgactgaagaggaggacatgcggggctgcgagggatgcgctcgccggtggccgaagttggggctaagctggggctgtgcacagtcgagaagacgaaggcaaggcgagtcactccatcacgctatgcatgtcaccaaggcgcggcctcccaatctcggctttggttttggatgtccaggataatgtaagtgtaaaataatctgggccattaaccgagtcaattgtgatgtggagaactgacgaagttgtctgcatgcacggattgaggccaagtcattctttgtttgcgaactgcaaggagaaacagagcctatacttttcaatgagggttatggatttagcagcaggggaactcccggagattgtgcctcttggaaaaggcttctttcttgccaactatcctatttcaattttggattgaccattatcgttcgcgttcctttgttctccatcttcagatttattggaacttgagctagcacctgtatgagtcaagagcctagacttttcaacgagggttatggatttggcagcaggggaactcccagagattgtgcctcttggaaaaggcttctttcttgccaactatcctatttcaattttggattgaccattatcgttcgcgttcctttgttctccatcttttacctcttgtagttacacaagaacaacttgattgtgctaaacatgcaatcaaatctgcagttctgatgaacttggaatcaagggctcaagtaacctgtctctttttggtcattgtgctccaacgtgacatcacaacaatcattgaggagtgtaaccggcaacctcagctctgaaagaaccctagagtaaacactcacatcaagacactccactgttcactcttgtgctgctcctaccaatggagcaagagcatctccacctggcaatggtccactcgttgtattcatcactaagtcagctcgattccaccaatgggtgttcatgctgttggatggaaaatgacaacccctctttgcatcatgcactgttttgtctttctaaaatatttctgtttgctcctagcggcttgaacccctacaagtgcacctggcattggttaccaatctgcagattcataacatctcatgaaaaggatacgtgttggacaaccagataaggtattacagagaatatgaataatctggaggttctactgatgcatgtaaattatggaattatggtttcaattctagattatttgataatggcacctctatatgctcattgggcaatgatcagaaagttggaggtcatagaaatactgagaatggtgaattttgtttacatttatgggcacttttgaaaagaaattattttgtatggtagtattgttgaaaagatcaataattttagagactttgatgatcgctatgtggatcattgtgcacggaataagcggagctgctcatatcttctactaacaagacacttagcattcgttgcccactcttagcagctgccaggtttatttcccctcttccgatctcctgcccttatatgtgaattcctttcatcctcccaatatttgtttccctg

SEQ ID NO: 70566 - DNA, 1445 bp, Zea Mays
gcggcatccagtcagtggttgtctggatctgggggctccaagtgtggatccagtcctaccttctccagatctgttttcctctcacctgggtgggcttcgtcttgccactggtctcctcctcgggctcgtcggcgtagccgcggtgggcacaacccgcggcgtgcagaagaaccggaggctcggctggtgttggtaccagaggaggaggcggtgagttcttgaaagatgatggaggggagacagacttggaccaccaacatatgcacgaggtggtgaatggggttccctatgagcttctccatcggctggcgtctcagctcccgtcagtcgcacttggaagcggatttcatttaccctttctcctcaaggtggccctcgatctagagacgccgtctatctccagcaagagcgataccgtcgaggcgcctatccacgccagacacaacgtccgcagtgatgggcgacctctaaggcctgaacggtgccaccataggcttctcggcggccggcggcccggaggaggcgactgaagaggaggacatgcggggctgcgagggatgcgctcgccggtggccgaagttggggctaagctggggctgtgcacagtcgagaagacgaaggcaaggcgagtcactccatcacgctatgcatgtcaccaaggcgcggcctcccaatctcgtgtaaccggcaacctcagctctgaaagaaccctagagtaaacactcacatcaagacactccactgttcactcttgtgctgctcctaccaatggagcaagagcatctccacctggcaatggtccactcgttgtattcatcactaagtcagctcgattccaccaatgggtgttcatgctgttggatggaaaatgacaacccctctttgcatcatgcactgttttgtctttctaaaatatttctgtttgctcctagcggcttgaacccctacaagtgcacctggcattggttaccaatctgcagattcataacatctcatgaaaaggatacgtgttggacaaccagataaggtattacagagaatatgaataatctggaggttctactgatgcatgtaaattatggaattatggtttcaattctagattatttgataatggcacctctatatgctcattgggcaatgatcagaaagttggaggtcatagaaatactgagaatggtgaattttgtttacatttatgggcacttttgaaaagaaattattttgtatggtagtattgttgaaaagatcaataattttagagactttgatgatcgctatgtggatcattgtgcacggaataagcggagctgctcatatcttctactaacaagacacttagcattcgttgcccactcttagcagctgccaggtttatttcccctcttccgatctcctgcccttatatgtgaattcctttcatcctcccaatatttgtttccctg

SEQ ID NO: 70567 - DNA, 1704 bp, Zea Mays
attagcggcatccagtcagtggttgtctggatctgggggctccaagtgtggatccagtcctaccttctccagatctgttttcctctcacctgggtgggcttcgtcttgccactggtctcctcctcgggctcgtcggcgtagccgcggtgggcacaacccgcggcgtgcagaagaaccggaggctcggctggtgttggtaccagaggaggaggcggtgagttcttgaaagatgatggaggggagacagacttggaccaccaacatatgcacgaggtggtgaatggggttccctatgagcttctccatcggctggcgtctcagctcccgtcagtcgcacttggaagcggatttcatttaccctttctcctcaaggtggccctcgatctagagacgccgtctatctccagcaagagcgataccgtcgaggcgcctatccacgccagacacaacgtccgcagtgatgggcgacctctaaggcctgaacggtgccaccataggcttctcggcggccggcggcccggaggaggcgactgaagaggaggacatgcggggctgcgagggatgcgctcgccggtggccgaagttggggctaagctggggctgtgcacagtcgagaagacgaaggcaaggcgagtcactccatcacgctatgcatgtcaccaaggcgcggcctcccaatctcgagcctatacttttcaatgagggttatggatttagcagcaggggaactcccggagattgtgcctcttggaaaaggcttctttcttgccaactatcctatttcaattttggattgaccattatcgttcgcgttcctttgttctccatcttcagatttattggaacttgagctagcacctgtatgagtcaaggctcaagtaacctgtctctttttggtcattgtgctccaacgtgacatcacaacaatcattgaggagtgtaaccggcaacctcagctctgaaagaaccctagagtaaacactcacatcaagacactccactgttcactcttgtgctgctcctaccaatggagcaagagcatctccacctggcaatggtccactcgttgtattcatcactaagtcagctcgattccaccaatgggtgttcatgctgttggatggaaaatgacaacccctctttgcatcatgcactgttttgtctttctaaaatatttctgtttgctcctagcggcttgaacccctacaagtgcacctggcattggttaccaatctgcagattcataacatctcatgaaaaggatacgtgttggacaaccagataaggtattacagagaatatgaataatctggaggttctactgatgcatgtaaattatggaattatggtttcaattctagattatttgataatggcacctctatatgctcattgggcaatgatcagaaagttggaggtcatagaaatactgagaatggtgaattttgtttacatttatgggcacttttgaaaagaaattattttgtatggtagtattgttgaaaagatcaataattttagagactttgatgatcgctatgtggatcattgtgcacggaataagcggagctgctcatatcttctactaacaagacacttagcattcgttgcccactcttagcagctgccaggtttatttcccctcttccgatctcctgcccttatatgtgaattcctttcatcctcccaatatttgtttccctg

SEQ ID NO: 70568 - DNA, 2220 bp, Zea Mays
cccgcattagcggcatccagtcagtggttgtctggatctgggggctccaagtgtggatccagtcctaccttctccagatctgttttcctctcacctgggtgggcttcgtcttgccactggtctcctcctcgggctcgtcggcgtagccgcggtgggcacaacccgcggcgtgcagaagaaccggaggctcggctggtgttggtaccagaggaggaggcggtgagttcttgaaagatgatggaggggagacagacttggaccaccaacatatgcacgaggtggtgaatggggttccctatgagcttctccatcggctggcgtctcagctcccgtcagtcgcacttggaagcggatttcatttaccctttctcctcaaggtggccctcgatctagagacgccgtctatctccagcaagagcgataccgtcgaggcgcctatccacgccagacacaacgtccgcagtgatgggcgacctctaaggcctgaacggtgccaccataggcttctcggcggccggcggcccggaggaggcgactgaagaggaggacatgcggggctgcgagggatgcgctcgccggtggccgaagttggggctaagctggggctgtgcacagtcgagaagacgaaggcaaggcgagtcactccatcacgctatgcatgtcaccaaggcgcggcctcccaatctcgagcctatacttttcaatgagggttatggatttagcagcaggggaactcccggagattgtgcctcttggaaaaggcttctttcttgccaactatcctatttcaattttggattgaccattatcgttcgcgttcctttgttctccatcttcagatttattggaacttgagctagcacctgtatgagtcaagagcctagacttttcaacgagggttatggatttggcagcaggggaactcccagagattgtgcctcttggaaaaggcttctttcttgccaactatcctatttcaattttggattgaccattatcgttcgcgttcctttgttctccatcttttacctcttgtagttacacaagaacaacttgattgtgctaaacatgcaatcaaatctgcagttctgatgaacttggaatcaagggtaaattattcttgctcctgatataatgctaagctgggttgttgatttttttgatcacttcgtttctagatagtagtagttctgattaaaagtgagttatgccacagtgttttgagtctaaaataacttatgtgtaataaatataaatatttagtttctttaataaacatgtgttacatatcacttctgccatagttacaactgaatttgatatgagctacagatgatctaccatatcttttcaacttggttaaataatttctctatctttgtatataggctcaagtaacctgtctctttttggtcattgtgctccaacgtgacatcacaacaatcattgaggagtgtaaccggcaacctcagctctgaaagaaccctagagtaaacactcacatcaagacactccactgttcactcttgtgctgctcctaccaatggagcaagagcatctccacctggcaatggtccactcgttgtattcatcactaagtcagctcgattccaccaatgggtgttcatgctgttggatggaaaatgacaacccctctttgcatcatgcactgttttgtctttctaaaatatttctgtttgctcctagcggcttgaacccctacaagtgcacctggcattggttaccaatctgcagattcataacatctcatgaaaaggatacgtgttggacaaccagataaggtattacagagaatatgaataatctggaggttctactgatgcatgtaaattatggaattatggtttcaattctagattatttgataatggcacctctatatgctcattgggcaatgatcagaaagttggaggtcatagaaatactgagaatggtgaattttgtttacatttatgggcacttttgaaaagaaattattttgtatggtagtattgttgaaaagatcaataattttagagactttgatgatcgctatgtggatcattgtgcacggaataagcggagctgctcatatcttctactaacaagacacttagcattcgttgcccactcttagcagctgccaggtttatttcccctcttccgatctcctgcccttatatgtgaattcctttcatcctcccaatatttgtttccctg

SEQ ID NO: 70569 - DNA, 1955 bp, Zea Mays
gcaccccgccccgcatcccgccggcggccgcaccccgccccgcagccccaccgccacgttctgcctcttgcgcaccccgccccgcattagcggcatccagtcagtggttgtctggatctgggggctccaagtgtggatccagtcctaccttctccagatctgttttcctctcacctgggtgggcttcgtcttgccactggtctcctcctcgggctcgtcggcgtagccgcggtgggcacaacccgcggcgtgcagaagaaccggaggctcggctggtgttggtaccagaggaggaggcggtgagttcttgaaagatgatggaggggagacagacttggaccaccaacatatgcacgaggtggtgaatggggttccctatgagcttctccatcggctggcgtctcagctcccgtcagtcgcacttggaagcggatttcatttaccctttctcctcaaggtggccctcgatctagagacgccgtctatctccagcaagagcgataccgtcgaggcgcctatccacgccagacacaacgtccgcagtgatgggcgacctctaaggcctgaacggtgccaccataggcttctcggcggccggcggcccggaggaggcgactgaagaggaggacatgcggggctgcgagggatgcgctcgccggtggccgaagttggggctaagctggggctgtgcacagtcgagaagacgaaggcaaggcgagtcactccatcacgctatgcatgtcaccaaggcgcggcctcccaatctcgagcctatacttttcaatgagggttatggatttagcagcaggggaactcccggagattgtgcctcttggaaaaggcttctttcttgccaactatcctatttcaattttggattgaccattatcgttcgcgttcctttgttctccatcttcagatttattggaacttgagctagcacctgtatgagtcaagagcctagacttttcaacgagggttatggatttggcagcaggggaactcccagagattgtgcctcttggaaaaggcttctttcttgccaactatcctatttcaattttggattgaccattatcgttcgcgttcctttgttctccatcttttacctcttgtagttacacaagaacaacttgattgtgctaaacatgcaatcaaatctgcagttctgatgaacttggaatcaaggtgtaaccggcaacctcagctctgaaagaaccctagagtaaacactcacatcaagacactccactgttcactcttgtgctgctcctaccaatggagcaagagcatctccacctggcaatggtccactcgttgtattcatcactaagtcagctcgattccaccaatgggtgttcatgctgttggatggaaaatgacaacccctctttgcatcatgcactgttttgtctttctaaaatatttctgtttgctcctagcggcttgaacccctacaagtgcacctggcattggttaccaatctgcagattcataacatctcatgaaaaggatacgtgttggacaaccagataaggtattacagagaatatgaataatctggaggttctactgatgcatgtaaattatggaattatggtttcaattctagattatttgataatggcacctctatatgctcattgggcaatgatcagaaagttggaggtcatagaaatactgagaatggtgaattttgtttacatttatgggcacttttgaaaagaaattattttgtatggtagtattgttgaaaagatcaataattttagagactttgatgatcgctatgtggatcattgtgcacggaataagcggagctgctcatatcttctactaacaagacacttagcattcgttgcccactcttagcagctgccaggtttatttcccctcttccgatctcctgcccttatatgtgaattcctttcatcctcccaatatttgtttccctg

SEQ ID NO: 70570 - DNA, 1910 bp, Zea Mays
gcacgttctgcctcttgcgcaccccgccccgcatcgtggccgcggccgcaccccgccccgcatcccgccggcggccgcaccccgccccgcagccccaccgccacgttctgcctcttgcgcaccccgccccgcattagcggcatccagtcagtggttgtctggatctgggggctccaagtgtggatccagtcctaccttctccagatctgttttcctctcacctgggtgggcttcgtcttgccactggtctcctcctcgggctcgtcggcgtagccgcggtgggcacaacccgcggcgtgcagaagaaccggaggctcggctggtgttggtaccagaggaggaggcggtggccctcgatctagagacgccgtctatctccagcaagagcgataccgtcgaggcgcctatccacgccagacacaacgtccgcagtgatgggcgacctctaaggcctgaacggtgccaccataggcttctcggcggccggcggcccggaggaggcgactgaagaggaggacatgcggggctgcgagggatgcgctcgccggtggccgaagttggggctaagctggggctgtgcacagtcgagaagacgaaggcaaggcgagtcactccatcacgctatgcatgtcaccaaggcgcggcctcccaatctcgagcctatacttttcaatgagggttatggatttagcagcaggggaactcccggagattgtgcctcttggaaaaggcttctttcttgccaactatcctatttcaattttggattgaccattatcgttcgcgttcctttgttctccatcttcagatttattggaacttgagctagcacctgtatgagtcaagagcctagacttttcaacgagggttatggatttggcagcaggggaactcccagagattgtgcctcttggaaaaggcttctttcttgccaactatcctatttcaattttggattgaccattatcgttcgcgttcctttgttctccatcttttacctcttgtagttacacaagaacaacttgattgtgctaaacatgcaatcaaatctgcagttctgatgaacttggaatcaagggctcaagtaacctgtctctttttggtcattgtgctccaacgtgacatcacaacaatcattgaggagtgtaaccggcaacctcagctctgaaagaaccctagagtaaacactcacatcaagacactccactgttcactcttgtgctgctcctaccaatggagcaagagcatctccacctggcaatggtccactcgttgtattcatcactaagtcagctcgattccaccaatgggtgttcatgctgttggatggaaaatgacaacccctctttgcatcatgcactgttttgtctttctaaaatatttctgtttgctcctagcggcttgaacccctacaagtgcacctggcattggttaccaatctgcagattcataacatctcatgaaaaggatacgtgttggacaaccagataaggtattacagagaatatgaataatctggaggttctactgatgcatgtaaattatggaattatggtttcaattctagattatttgataatggcacctctatatgctcattgggcaatgatcagaaagttggaggtcatagaaatactgagaatggtgaattttgtttacatttatgggcacttttgaaaagaaattattttgtatggtagtattgttgaaaagatcaataattttagagactttgatgatcgctatgtggatcattgtgcacggaataagcggagctgctcatatcttctactaacaagacacttagcattcgttgcccactcttagcagctgccaggtttatttcccctcttccgatctcctgcccttatatgtgaattcctttcatcctcccaatatttgtttccctg

SEQ ID NO: 70571 - DNA, 645 bp, Zea Mays
gtcggatctgtgctggcgcgcgtgtgatgcgcctttgtttttctctgtttcccgtcgatgtgatggagggatgacagaagcaccatttctgccgcgtgagaggctcttcaagcagcaacattacttccagaacttgaccaagcacacctacctgaaagggcgctacgacgtgatcacatctgtcgccatcccccttgcactcgctgcctccagcatgttcatgattgggcgtggagtttataacatgtctcatggggttgggaagaaagagtgatcttccactggttaactattgtttctgcttgtcatggaagtcataccgtcgagactgcgaagtcctcttcgcttgcaaaataatacggccaaataacaattcgactacattttcgcatcaattttctgtttgtatttgtgggtgtgaagtggcagtaacttgaaaatcagcactgtcactgttttggttagttactccattcctttcgtcttttgtgtcccctttcaatagaagcaagctggccttgtacttcctccattcttttttttagttgtcacggtttagttcaaaaaaatgaactagcgggcgacaattatttagttcaaaaatgctctgttcatcaacatgcacgtaacgtaaggggtctgtgg

SEQ ID NO: 70572 - DNA, 1780 bp, Zea Mays
ctgaaaaccgaacagaccctgagacggcagtcacgaacccgtccgtgcacgccaagcgaaagccgaaagaaagcgaagcgagagcaaacagccctccccggccggctgttcggcctgttcccctcccgagtcccgtccctgcggccaaacccacgaccaacgtctccgatccgatccaagccgccatggatttcttcaagtccatcctcgccgagcccgatccggacccggcctctccgcctccgggacccacgtccggtacagccgcttcgaggcgcagctgcgcgcgctccaggcggatccggccacgttcacgtccgatcccgaggacgccgaggacttcgccgcgtggagcaaggggtttatcctggacgagagggaggaggagatcgaggccctgtgctacgacagcgacgcgctggaagccatggcggacaggctcgtcccggacgccgtgccccgcgaggtgttctggccgaggtacttttaccgcgtccataagctgaagcagcaggaggacgccagggcgaagctcgtgcagcgtgtgattgcgcaggaggaggacgaggacttgagctgggaggtcgatgacgacgaagaggaagaggaagagcagcagaaagacagcacggaggagctagcagaacagaggcaagagccgatcaaagaagaagtcaggcaggatatggctgagaaagaaaatgtggagagaattgtagaagaaagtggagttgagacggtggaagaggcgcctggtttggtgaaggaagagaagaatgccgcagagccgcagccaattgttctcggtagctctttggtggtagtggacaaggaggaggaacgggaaaaagcagttctcggtagctctttcggtgtggtgggtgagggtgagaatgcagagccctccaagtcgaatgtcgaagaatcaggtgccaagaaggaaggagcgaagcatgagacgagtgattcgagcaaggacagcgattactccatagtgtctagacagcgaactgcggaggaagaggatcttgagtgggatgagattgaggatctaggagagcatgaagaaaagaaaggcggcatccagacctcaagccctgctctgaaggaggagctgcgcaagaggctgagcattgccgaagatgatgaggatttaagctgggatatcgaggatgatgatgacaatgcctgaatgccattggtggatgacagaagcaccatttctgccgcgtgagaggctcttcaagcagcaacattacttccagaacttgaccaagcacacctacctgaaagggcgctacgacgtgatcacatctgtcgccatcccccttgcactcgctgcctccagcatgttcatgattgggcgtggagtttataacatgtctcatggggttgggaagaaagagtgatcttccactggttaactattgtttctgcttgtcatggaagtcataccgtcgagactgcgaagtcctcttcgcttgcaaaataatacggccaaataacaattcgactacattttcgcatcaattttctgtttgtatttgtgggtgtgaagtggcagtaacttgaaaatcagcactgtcactgttttggttagttactccattcctttcgtcttttgtgtcccctttcaatagaagcaagctggccttgtacttcctccattcttttttttagttgtcacggtttagttcaaaaaaatgaactagcgggcgacaattatttagttcaaaaatgctctgttcatcaacatgcacgtaacgtaaggggtctgtgg

SEQ ID NO: 70573 - DNA, 1516 bp, Zea Mays
gagacggcagtcacgaacccgtccgtgcacgccaagcgaaagccgaaagaaagcgaagcgagagcaaacagccctccccggccggctgttcggcctgttcccctcccgagtcccgtccctgcggccaaacccacgaccaacgtctccgatccgatccaagccgccatggatttcttcaagtccatcctcgccgagcccgatccggacccggcctctccgcctccgggacccacgtccggtacagccgcttcgaggcgcagctgcgcgcgctccaggcggatccggccacgttcacgtccgatcccgaggacgccgaggacttcgccgcgtggagcaaggggtttatcctggacgagagggaggaggagatcgaggccctgtgctacgacagcgacgcgctggaagccatggcggacaggctcgtcccggacgccgtgccccgcgaggtgttctggccgaggtacttttaccgcgtccataagctgaagcagcaggaggacgccagggcgaagctcgtgcagcgtgtgattgcgcaggaggaggacgaggacttgagctgggaggtcgatgacgacgaagaggaagaggaagagcagcagaaagacagcacggaggagctagcagaacagaggcaagagccgatcaaagaagaagtcaggcaggatatggctgagaaagaaaatgtggagagaattgtagaagaaagtggagttgagacggtggaagaggcgcctggtttggtgaaggaagagaagaatgccgcagagccgcagccaattgttctcggtagctctttggtggtagtggacaaggaggaggaacgggaaaaagcagttctcggtagctctttcggtgtggtgggtgagggtgagaatgcagagccctccaagtcgaatgtcgaagaatcaggtgccaagaaggaaggagcgaagcatgagacgagtgattcgagcaaggacagcgattactccatagtgtctagacagcgaactgcggaggaagaggatcttgagtgggatgagattgaggatctaggagagcatgaagaaaagaaaggcggcatccagacctcaagccctgctctgaaggaggagctgcgcaagaggctgagcattgccgaagatgatgaggatttaagctgggatatcgaggatgatgatgacaatgcctgaatgccattggtggtatggaagtgtcagttgtatttctacattttgtaccttccattactcgcgcaagttactgtgatttggccaataatgattggctatccttatgctatggacacgtgtgtatactgtaaactctccagtttgatgatatcaagtggcaattggctaagcgtcaatctattaggttgtctttgtggtatttaccgtaaacatgccatgtttatttgacttgtgtcacatgttataatgttgtttgtttattaatgtacatttgctgcaccagaatttgggatagcgtttgaacaatttatattagaaccaccattgccacaggacaccttttt

SEQ ID NO: 70574 - DNA, 1383 bp, Zea Mays
agacgtcccctctagggcttgttcggttattttcaatccatatggattggaggggattgatacggattggaggggattttgacttattgtggattgaaaccccttcaatccccctcaatccatatggattggggtaaaaccgaacaagcccctagcgggaatcgcaatctcaggatccagccgagcactcgacagtcctaaactcctaatccggtaatgccctccgccagattcccattcccaatcctgcccttgttctcccttctctctcttttttttatgtatgttcatgatggcgtatcaggctatcagctaacagatcggtgacggagttgcaccggtcataccagcataccactgcttgtgctagtttagattgctgcttgcttggatcggaagatactttgtggtttgtacgcttctagtaagcgtcaggcgtacgcagggttgatcctttgcttaccagaagatgcagttgaaggggggattttggatgcaacggagtttggaaacttcttgcgtggatacgcatggactgctcgagagctcattcgtcttgcagtagcgggcaggtgcccaagtgctgaccttgtctgcatcttgtgacgcttggcgtgtcaaccaactttggtcttcacagatcagagatgaaccacagtcaaggttctagaattattcgtggcaggggtagaaataaaaggatgtggacatcagatgaagatgacgagcttgtcaaagctttgtgtgagatatctgctgatcctagatataaggttgaaggaggggcctttaagaactgttactctcaaggcatagagaacattctttcacaaaagctacctggtcgtggtattaaagccagccctcatgttgattctcggctgaaagtgatgaagcggaagtattattcgatcaaggatatgatagcatcgacaggcttctcttgggatgacacaagaaagatgatccagtgtgaaaaacaacgatatgatgaatattgcagagaccatcctagagccaagggtctgtatggtgtcccatttgtatatttcgatacatttgatgcaatatatggcaaggacagctctgctggggaagggttggaagggtctgaagctgcaattgctaacatggagaatgaaaatataaatgaagttggagatgacgaagtggaagaggacaggatgtccacaggaatatctggtcgctccccggccgcaacgttaagctctaagagtcagaagaaagacaattatgacgggaaaaggaataggaccgaatcaaattgcccatctctggacaagttcaaggatgtacatgttcagtttcagaatgccattcagcatgccagcacaatggctgctgcaatggagctgttcaagg

SEQ ID NO: 70575 - DNA, 1929 bp, Zea Mays
agacgtcccctctagggcttgttcggttattttcaatccatatggattggaggggattgatacggattggaggggattttgacttattgtggattgaaaccccttcaatccccctcaatccatatggattggggtaaaaccgaacaagcccctagcgggaatcgcaatctcaggatccagccgagcactcgacagtcctaaactcctaatccggtaatgccctccgccagattcccattcccaatcctgcccttgttctcccttctctctcttttttttatgtatgttcatgatggcgtatcaggctatcagctaacagatcggtgacggagttgcaccggtcataccagcataccactgcttgtgctagtttagattgctgcttgcttggatcggaagatactttgtggtttgtacgcttctagtaagcgtcaggcgtacgcagggttgatcctttgcttaccagaagatgcagttgaaggggggattttggatgcaacggagtttggaaacttcttgcgtggatacgcatggactgctcgagagctcattcgtcttgcagtagcgggcaggcaagtcgcatggaatggtggcggcagttgtcgggcggcagcttagctgcctaggttattagtagatctataggagttcgccggtggggttagcagcggctctagaccgtgtcttcttcctccgggccgatgatgtgcccatgggaggcgccgccggttctccttcccgagccagccgtcgacgtgcttgacggggtcggatttctctatgcccggctcggcgaggtcacccgaaccattcatcttcctaacgcaccccttggtgactgctaaaagtgtaacggccattactggcccctcctcatcggtgcagatttgagttatgtttcctccggtcatgtctggcgatggtggattggattggagatgaagctctgcctgttgggagccatgtttttttatcgtacattatgtgtgtaccagtgttttccattgtagattttgtgtgtaccaggttcctgttatgtaatatgcatgctattcttgatctaatataagtcacctcatctaaaaaaaaggaagaaaaatcacaaatttagatgaggtttttactttctttatttttttatatataaaaaaccttcaggtgcccaagtgctgaccttgtctgcatcttgtgacgcttggcgtgtcaaccaactttggtcttcacagatcaggggtagaaataaaaggatgtggacatcagatgaagatgacgagcttgtcaaagctttgtgtgagatatctgctgatcctagatataaggttgaaggaggggcctttaagaactgttactctcaaggcatagagaacattctttcacaaaagctacctggtcgtggtattaaagccagccctcatgttgattctcggctgaaagtgatgaagcggaagtattattcgatcaaggatatgatagcatcgacaggcttctcttgggatgacacaagaaagatgatccagtgtgaaaaacaacgatatgatgaatattgcagagaccatcctagagccaagggtctgtatggtgtcccatttgtatatttcgatacatttgatgcaatatatggcaaggacagctctgctggggaagggttggaagggtctgaagctgcaattgctaacatggagaatgaaaatataaatgaagttggagatgacgaagtggaagaggacaggatgtccacaggaatatctggtcgctccccggccgcaacgttaagctctaagagtcagaagaaagacaattatgacgggaaaaggaataggaccgaatcaaattgcccatctctggacaagttcaaggatgtacatgttcagtttcagaatgccattcagcatgccagcacaatggctgctgcaatggagctgttcaagg

SEQ ID NO: 70576 - DNA, 1024 bp, Zea Mays
agacgtcccctctagggcttgttcggttattttcaatccatatggattggaggggattgatacggattggaggggattttgacttattgtggattgaaaccccttcaatccccctcaatccatatggattggggtaaaaccgaacaagcccctagcgggaatcgcaatctcaggatccagccgagcactcgacagtcctaaactcctaatccggtgcccaagtgctgaccttgtctgcatcttgtgacgcttggcgtgtcaaccaactttggtcttcacagatcagagatgaaccacagtcaaggttctagaattattcgtggcaggggtagaaataaaaggatgtggacatcagatgaagatgacgagcttgtcaaagctttgtgtgagatatctgctgatcctagatataaggttgaaggaggggcctttaagaactgttactctcaaggcatagagaacattctttcacaaaagctacctggtcgtggtattaaagccagccctcatgttgattctcggctgaaagtgatgaagcggaagtattattcgatcaaggatatgatagcatcgacaggcttctcttgggatgacacaagaaagatgatccagtgtgaaaaacaacgatatgatgaatattgcagagaccatcctagagccaagggtctgtatggtgtcccatttgtatatttcgatacatttgatgcaatatatggcaaggacagctctgctggggaagggttggaagggtctgaagctgcaattgctaacatggagaatgaaaatataaatgaagttggagatgacgaagtggaagaggacaggatgtccacaggaatatctggtcgctccccggccgcaacgttaagctctaagagtcagaagaaagacaattatgacgggaaaaggaataggaccgaatcaaattgcccatctctggacaagttcaaggatgtacatgttcagtttcagaatgccattcagcatgccagcacaatggctgctgcaatggagctgttcaagg

SEQ ID NO: 70577 - DNA, 1700 bp, Zea Mays
tcctggtatccagttcctttctttgcccctcctccgctttcttcggttcttcctctcccccactccccacgctgcctgagaggctgagactaggaaggggaaggaaaataatagtttggcgcgcaaatatccgcctccattcgtacgccgctattctcgtctgcgatccgcagcgcgatgatgatcccgtggggcggcgtggggtgctgtctcagcgccgctgcgctgtatctcctcgggaggagcagcggaagctgctatcttggacactgcaagtaaggtcctaccacttgtagttgccatctctgggagagttggttcagacacaccacttatatgccaacaaagcggcatgagaggtgtaattgttgaagaaacggcagagcaacacttcctgaagcacaatgatgccggatcctggattcaagattcggcagtgatgctttctgttagcaaagaggttccatggtatctggatgatggaactggacgtgtttatgtggtcggtgctcgttctgcagctggtttaattttaactgttgccagtgaggtttttgaggaatcagggaggacacttgtacgtggaactctagattatttacaagggttgaagatgctgggagtaaagcgaactgaaagggttcttccaactggaacctcattgacagttgttggtgagcgaccgcacaaaggacccttttatgcatcatcaaagagcattgatcaacttattgtgaatcttgggaaatgggccaagttataccgaattgcttccatgggttttgcaacatttggtgtcttccttcttgcaaagcgtgcactacagcattttctagaaagaagacggcggcatgaactgcaaaaaagggttcttaatgcagcagcacaaaggcaagctagagaagctgaagggagcaaaggtacatcagacgcagagcctaacagtaaaaaagatcaattagtgttggacatatgtgtcatatgccttgagcaagagtacaatgctgtttttgtgccgtgtggtcacatgtgttgctgtgtggcatgctcttcacatttgacgaactgcccactttgccggagaagaattgaccaagctgtcagaaccttccgccattgatggtgatatatgatgcaaaaaactggcatggtaccaccacatgtactgcttctgaaaccaatttattcttggaacttggaagtgctggctgctatcaaccaacgacatgaactgcaatactggggcgaagcagcttcaatgagtttgctttttgaactgaacagtgagtgatgcaagttgcaagctcataattgacagttgagatactctcactccctacatagtgccaatgggtgctcttgcctgtaatgtactacaactctgtacaggacgctcttgtgtaagtgcacatagattagcagcttgcttattgacaacatcgatgccggtaatatgtactgttgcccatcgggcatttgtgcaaaggaataacaaaatcagctcgtttagttgtgataatcaatttttctggtgggtgagaatgagatgcgtctcttagggtttttttttcgtatccagtttatttgtcaggatcataggaaatagatgatttgaaatatgttgtatgttttaagactgtccgtagcataattctgttatttgggattcaaataatccctctgttctagtatataaagtg

SEQ ID NO: 70578 - DNA, 1862 bp, Zea Mays
agcgtacctgacagtgtggatccactctcctcgatgacgcggaatccgtttcagcttctggtaggtatcctggtatccagttcctttctttgcccctcctccgctttcttcggttcttcctctcccccactccccacgctgcctgagaggctgagactaggaaggggaaggaaaataatagtttggcgcgcaaatatccgcctccattcgtacgccgctattctcgtctgcgatccgcagcgcgatgatgatcccgtggggcggcgtggggtgctgtctcagcgccgctgcgctgtatctcctcgggaggagcagcggaagtgatgcggaggtgctgaggtcggtggcgagggcgggcagcatgaaggatttagctgctatcttggacactgcaagtaaggtcctaccacttgtagttgccatctctgggagagttggttcagacacaccacttatatgccaacaaagcggcatgagaggtgtaattgttgaagaaacggcagagcaacacttcctgaagcacaatgatgccggatcctggattcaagattcggcagtgatgctttctgttagcaaagaggttccatggtatctgtttacaactgggatgcttctctaacctttaaacaatcactaggatgatggaactggacgtgtttatgtggtcggtgctcgttctgcagctggtttaattttaactgttgccagtgaggtttttgaggaatcagggaggacacttgtacgtggaactctagattatttacaagggttgaagatgctgggagtaaagcgaactgaaagggttcttccaactggaacctcattgacagttgttggtgagcgaccgcacaaaggacccttttatgcatcatcaaagagcattgatcaacttattgtgaatcttgggaaatgggccaagttataccgaattgcttccatgggttttgcaacatttggtgtcttccttcttgcaaagcgtgcactacagcattttctagaaagaagacggcggcatgaactgcaaaaaagggttcttaatgcagcagcacaaaggcaagctagagaagctgaagggagcaaaggtacatcagacgcagagcctaacagtaaaaaagatcaattagtgttggacatatgtgtcatatgccttgagcaagagtacaatgctgtttttgtgccgtgtggtcacatgtgttgctgtgtggcatgctcttcacatttgacgaactgcccactttgccggagaagaattgaccaagctgtcagaaccttccgccattgatggtgatatatgatgcaaaaaactggcatggtaccaccacatgtactgcttctgaaaccaatttattcttggaacttggaagtgctggctgctatcaaccaacgacatgaactgcaatactggggcgaagcagcttcaatgagtttgctttttgaactgaacagtgagtgatgcaagttgcaagctcataattgacagttgagatactctcactccctacatagtgccaatgggtgctcttgcctgtaatgtactacaactctgtacaggacgctcttgtgtaagtgcacatagattagcagcttgcttattgacaacatcgatgccggtaatatgtactgttgcccatcgggcatttgtgcaaaggaataacaaaatcagctcgtttagttgtgataatcaatttttctggtgggtgagaatgagatgcgtctcttagggtttttttttcgtatccagtttatttgtcaggatcataggaaatagatgatttgaaatatgttgtatgttttaagactgtccgtagcataattctgttatttgggattcaaataatccctctgttctagtatataaagtg

SEQ ID NO: 70579 - DNA, 1811 bp, Zea Mays
cactagtcagcgtacctgacagtgtggatccactctcctcgatgacgcggaatccgtttcagcttctggtaggtatcctggtatccagttcctttctttgcccctcctccgctttcttcggttcttcctctcccccactccccacgctgcctgagaggctgagactaggaaggggaaggaaaataatagtttggcgcgcaaatatccgcctccattcgtacgccgctattctcgtctgcgatccgcagcgcgatgatgatcccgtggggcggcgtggggtgctgtctcagcgccgctgcgctgtatctcctcgggaggagcagcggaagctgctatcttggacactgcaagtaaggtcctaccacttgtagttgccatctctgggagagttggttcagacacaccacttatatgccaacaaagcggcatgagaggtgtaattgttgaagaaacggcagagcaacacttcctgaagcacaatgatgccggatcctggattcaagattcggcagtgatgctttctgttagcaaagaggttccatggtatctggatgatggaactggacgtgtttatgtggtcggtgctcgttctgcagctggtttaattttaactgttgccagtgaggtttttgaggaatcagggaggacacttgtacgtggaactctagattatttacaagggttgaagatgctgggagtaaagcgaactgaaagggttcttccaactggaacctcattgacagttgttggtgaggccattaaagatgatgttggaactattcgaattcagcgaccgcacaaaggacccttttatgcatcatcaaagagcattgatcaacttattgtgaatcttgggaaatgggccaagttataccgaattgcttccatgggttttgcaacatttggtgtcttccttcttgcaaagcgtgcactacagcattttctagaaagaagacggcggcatgaactgcaaaaaagggttcttaatgcagcagcacaaaggcaagctagagaagctgaagggagcaaaggtacatcagacgcagagcctaacagtaaaaaagatcaattagtgttggacatatgtgtcatatgccttgagcaagagtacaatgctgtttttgtgccgtgtggtcacatgtgttgctgtgtggcatgctcttcacatttgacgaactgcccactttgccggagaagaattgaccaagctgtcagaaccttccgccattgatggtgatatatgatgcaaaaaactggcatggtaccaccacatgtactgcttctgaaaccaatttattcttggaacttggaagtgctggctgctatcaaccaacgacatgaactgcaatactggggcgaagcagcttcaatgagtttgctttttgaactgaacagtgagtgatgcaagttgcaagctcataattgacagttgagatactctcactccctacatagtgccaatgggtgctcttgcctgtaatgtactacaactctgtacaggacgctcttgtgtaagtgcacatagattagcagcttgcttattgacaacatcgatgccggtaatatgtactgttgcccatcgggcatttgtgcaaaggaataacaaaatcagctcgtttagttgtgataatcaatttttctggtgggtgagaatgagatgcgtctcttagggtttttttttcgtatccagtttatttgtcaggatcataggaaatagatgatttgaaatatgttgtatgttttaagactgtccgtagcataattctgttatttgggattcaaataatccctctgttctagtatataaagtg

SEQ ID NO: 70580 - DNA, 1956 bp, Zea Mays
cgactgagctcgctctcccctatttcctgtggggccaatacagcctcgtgtcactggagtagcggtggcgagtgcagaccccactagtcagcgtacctgacagtgtggatccactctcctcgatgacgcggaatccgtttcagcttctggtaggtatcctggtatccagttcctttctttgcccctcctccgctttcttcggttcttcctctcccccactccccacgctgcctgagaggctgagactaggaaggggaaggaaaataatagtttggcgcgcaaatatccgcctccattcgtacgccgctattctcgtctgcgatccgcagcgcgatgatgatcccgtggggcggcgtggggtgctgtctcagcgccgctgcgctgtatctcctcgggaggagcagcggaagctgctatcttggacactgcaagtaaggtcctaccacttgtagttgccatctctgggagagttggttcagacacaccacttatatgccaacaaagcggcatgagaggtgtaattgttgaagaaacggcagagcaacacttcctgaagcacaatgatgccggatcctggattcaagattcggcagtgatgctttctgttagcaaagaggttccatggtatctgtttacaactgggatgcttctctaacctttaaacaatcactaggatgatggaactggacgtgtttatgtggtcggtgctcgttctgcagctggtttaattttaactgttgccagtgaggtttttgaggaatcagggaggacacttgtacgtggaactctagattatttacaagggttgaagatgctgggagtaaagcgaactgaaagggttcttccaactggaacctcattgacagttgttggtgaggtattatttctattatccattggccattaaagatgatgttggaactattcgaattcagcgaccgcacaaaggacccttttatgcatcatcaaagagcattgatcaacttattgtgaatcttgggaaatgggccaagttataccgaattgcttccatgggttttgcaacatttggtgtcttccttcttgcaaagcgtgcactacagcattttctagaaagaagacggcggcatgaactgcaaaaaagggttcttaatgcagcagcacaaaggcaagctagagaagctgaagggagcaaaggtacatcagacgcagagcctaacagtaaaaaagatcaattagtgttggacatatgtgtcatatgccttgagcaagagtacaatgctgtttttgtgccgtgtggtcacatgtgttgctgtgtggcatgctcttcacatttgacgaactgcccactttgccggagaagaattgaccaagctgtcagaaccttccgccattgatggtgatatatgatgcaaaaaactggcatggtaccaccacatgtactgcttctgaaaccaatttattcttggaacttggaagtgctggctgctatcaaccaacgacatgaactgcaatactggggcgaagcagcttcaatgagtttgctttttgaactgaacagtgagtgatgcaagttgcaagctcataattgacagttgagatactctcactccctacatagtgccaatgggtgctcttgcctgtaatgtactacaactctgtacaggacgctcttgtgtaagtgcacatagattagcagcttgcttattgacaacatcgatgccggtaatatgtactgttgcccatcgggcatttgtgcaaaggaataacaaaatcagctcgtttagttgtgataatcaatttttctggtgggtgagaatgagatgcgtctcttagggtttttttttcgtatccagtttatttgtcaggatcataggaaatagatgatttgaaatatgttgtatgttttaagactgtccgtagcataattctgttatttgggattcaaataatccctctgttctagtatataaagtg

SEQ ID NO: 70581 - DNA, 2122 bp, Zea Mays
ttctccatggctcgccgtcgccgccgcggagaccccgcctttgctctaaaaccctaggcaaccctgcttctctctgtaattgttgcgggaccccacccagacacgcagtgagagagctagtagagttggcatggtggcttgtccccacgtcgcagcgactgagctcgctctcccctatttcctgtggggccaatacagcctcgtgtcactggagtagcggtggcgagtgcagaccccactagtcagcgtacctgacagtgtggatccactctcctcgatgacgcggaatccgtttcagcttctggtaggtatcctggtatccagttcctttctttgcccctcctccgctttcttcggttcttcctctcccccactccccacgctgcctgagaggctgagactaggaaggggaaggaaaataatagtttggcgcgcaaatatccgcctccattcgtacgccgctattctcgtctgcgatccgcagcgcgatgatgatcccgtggggcggcgtggggtgctgtctcagcgccgctgcgctgtatctcctcgggaggagcagcggaagtgatgcggaggtgctgaggtcggtggcgagggcgggcagcatgaaggatttagctgctatcttggacactgcaagtaaggtcctaccacttgtagttgccatctctgggagagttggttcagacacaccacttatatgccaacaaagcggcatgagaggtgtaattgttgaagaaacggcagagcaacacttcctgaagcacaatgatgccggatcctggattcaagattcggcagtgatgctttctgttagcaaagaggttccatggtatctggatgatggaactggacgtgtttatgtggtcggtgctcgttctgcagctggtttaattttaactgttgccagtgaggtttttgaggaatcagggaggacacttgtacgtggaactctagattatttacaagggttgaagatgctgggagtaaagcgaactgaaagggttcttccaactggaacctcattgacagttgttggtgaggtattatttctattatccattggccattaaagatgatgttggaactattcgaattcagcgaccgcacaaaggacccttttatgcatcatcaaagagcattgatcaacttattgtgaatcttgggaaatgggccaagttataccgaattgcttccatgggttttgcaacatttggtgtcttccttcttgcaaagcgtgcactacagcattttctagaaagaagacggcggcatgaactgcaaaaaagggttcttaatgcagcagcacaaaggcaagctagagaagctgaagggagcaaaggtacatcagacgcagagcctaacagtaaaaaagatcaattagtgttggacatatgtgtcatatgccttgagcaagagtacaatgctgtttttgtgccgtgtggtcacatgtgttgctgtgtggcatgctcttcacatttgacgaactgcccactttgccggagaagaattgaccaagctgtcagaaccttccgccattgatggtgatatatgatgcaaaaaactggcatggtaccaccacatgtactgcttctgaaaccaatttattcttggaacttggaagtgctggctgctatcaaccaacgacatgaactgcaatactggggcgaagcagcttcaatgagtttgctttttgaactgaacagtgagtgatgcaagttgcaagctcataattgacagttgagatactctcactccctacatagtgccaatgggtgctcttgcctgtaatgtactacaactctgtacaggacgctcttgtgtaagtgcacatagattagcagcttgcttattgacaacatcgatgccggtaatatgtactgttgcccatcgggcatttgtgcaaaggaataacaaaatcagctcgtttagttgtgataatcaatttttctggtgggtgagaatgagatgcgtctcttagggtttttttttcgtatccagtttatttgtcaggatcataggaaatagatgatttgaaatatgttgtatgttttaagactgtccgtagcataattctgttatttgggattcaaataatccctctgttctagtatataaagtg

SEQ ID NO: 70582 - DNA, 1471 bp, Zea Mays
tcctggtatccagttcctttctttgcccctcctccgctttcttcggttcttcctctcccccactccccacgctgcctgagaggctgagactaggaaggggaaggaaaataatagtttggcgcgcaaatatccgcctccattcgtacgccgctattctcgtctgcgatccgcagcgcgatgatgatcccgtggggcggcgtggggtgctgtctcagcgccgctgcgctgtatctcctcgggaggagcagcggaagtgatgcggaggtgctgaggtcggtggcgagggcgggcagcatgaaggatttagctgctatcttggacactgcaagtaaggtcctaccacttgtagttgccatctctgggagagttggttcagacacaccacttatatgccaacaaagcggcatgagaggtgtaattgttgaagaaacggcagagcaacacttcctgaagcacaatgatgccggatcctggattcaagattcggcagtgatgctttctgttagcaaagaggttccatggtatctggatgatggaactggacgtgtttatgtggtcggtgctcgttctgcagctggtttaattttaactgttgccagtgaggtttttgaggaatcagggaggacacttgtacgtggaactctagattatttacaagggttgaagatgctgggagtaaagcgaactgaaagggttcttccaactggaacctcattgacagttgttggtgaggtattatttctattatccattggccattaaagatgatgttggaactattcgaattcagcgaccgcacaaaggacccttttatgcatcatcaaagagcattgatcaacttattgtgaatcttgggaaatgggccaagtaggaaaatttgttagaacatatttttggttgttacttcttagttagggcatcttatgctagtatcatgtttgtggcaggttataccgaattgcttccatgggttttgcaacatttggtgtcttccttcttgcaaagcgtgcactacagcattttctagaaagaagacggcggcatgaactgcaaaaaagggttcttaatgcagcagcacaaaggcaagctagagaagctgaagggagcaaaggtacatcagacgcagagcctaacagtaaaaaagatcaattagtgttggacatatgtgtcatatgccttgagcaagagtacaatgctgtttttgtgccgtaagtattgtatcttttccagaacttgaatgctctttgttgagaatgaagcaacttgattttctctatttttctatttcctttttcccataattccaaatatactaggcaacattatggttttcatatttcctgttcactagtagtttcttgatttttctcttaatggcttgcctcataacttgatagaacttgaatactgctaaggccttctttggatgttcagtactaaggaactataattctagaacccattgatctgc

SEQ ID NO: 70583 - DNA, 2250 bp, Zea Mays
tacgtccacgatggagcttgaacccacaacctcaaagttaaaagtcttgcactctaccgactgagctagacatactttgctgttacatatccgagctcggcgccatagatcttggcgccgagctcgataccacgttggcgccacgtcgttcaggttgggccagcgtagcacgcacctcggcgccatagcctatggcgccgagctgtgttacctcggcgccattggctatggcgccgagtaaagggtccaaaaatgacattaaaattttctaaggtccaaacgtgaatttttttctgaggaagggctaaaatataaaaaattcggtgtgtttgtcgctcggtagccagagccggcctgggcctggcctccgctctttctcttccgcattggccaacaaggcaaagagggaacaaaacaaccgcccttgcaagtgggtccattactccattccatcacaatagaacggcagcaacaaggccgccacagagacgcagacgcgatcgccgccggccgtccccgcccagtgcgctctcgcgctacacgtgccatgccgcacgcagcaatgagtagccgccgccgccgccgccgcggcgcttagcaagcgacgatggagatggcgagcgcgcggaggagggcgaagccgccgcaggcggtcggcggaggcggagaccagctcgcgctgtgggccgcctgcgtgctgctctcctcgctctcgctgctcgtcgccgccgccttctccacgggcttcggcggggccgcgaggctcacgctcgaggccggcccggaccgggaccgggaggccgcgggtgcgctcgtgacgagggcaactggcgccggcagcgggaggtactgcgacgaggacgacgacctgatcgacagcatgtccgtggacggggagtgggtgctgctgcgcggcgccgccgagcggctctacgggcccgggcagtgcccgttcgtcgacgaggggttccggtgcagggagaacggcaggccggacggcgactacgccgagtgggcatggcggccgaggcgctgcgcgctgccgagattcgacgcgaggaggctgctggagatgctccggaaccggcggctggtgttcgtgggcgactccatcgggcggaaccagtgggagtccatgctgtgcatgctggcctcggccgtcgccgacgacagggacaagcaggcgagcccgggcggcgccagcatatacgaggagaacgggagccccatcaccaagcgcaagggcttcctctccttccggttccgcgactacaactgcaccgtggagcactaccggtcgccgtacctggtccgccgcggccgcccgccgcgccactcgccgaagcgcgtcgccacggcgctccggctgggctccatggacgccatggcgccccggtggaaggacgcggacgtcctggtgttcaacacgggacactggtggaaccacgagaggctgcagcagttgacggcaagacgttgcggctcaacatgagcgtggaggacgcctacgagagggcgctgaacacgctgcagaaatgggtccaaaaggaagtgaacacaacaaaaacgctggtcgtcctacgaacatactcgccggcacatggcgtcaaacggtggtggaggtgggtgtgtcagggagacggcgccggagctgaacacgtcgaggatcgcgctgcaccggtggccgggcctgctcaacccgagcccggctttaattgaagcggcgaagaagcggcagctggcgacgatgcacgtcctgaacgtgaccctgatgacggcgcagcggcgggacggccacccgtcggtgtacaacgtccgcctcccgtcgccggcggcggcgcaggagcaggtgacgacgagggcggccgactgcagccactggtgcctgccaggcgtgccggacgcgtggaacgagctcctctacgctttgattctacataggactaggactacgtcattaggaggttcagactgaggtgttttttattggttataatttatttatagaggaactatatatatcttctaataataatgctaatgatgtgtccggcccagttttttttcatttccctctgggcttggctcacggcctgtcctaccctaggctcacgcacactgtgccggtcctgagtttttctgaggaatatataaaccttcaattaggcagtacgtacacgtggtagagagggtgtagatagtagatcaactctttttatcgcggagaaaaaggaacacttctaatcagac

SEQ ID NO: 70584 - DNA, 2582 bp, Zea Mays
aatacattagattattggagttttagagtccaaaatataaatatacttaataaacaaaaagattataattagagtccggtataaataaacagtgacttgatgattttataaagtactttgtacttccatagggtgggttacttatgtgcatggtacttgcgtcacgcagtttgaataaacaaaaacaaaaacaaaaaaaatatctagatgaataaataaatcggtcacaaaaacaaaaaaactagatgaaaaataaatctagacggacaaatcagcgacataaacgaaaaatatagacaacaaaaaaacaaattagtgataaaaaaatacgtccacgatggagcttgaacccacaacctcaaagttaaaagtcttgcactctaccgactgagctagacatactttgctgttacatatccgagctcggcgccatagatcttggcgccgagctcgataccacgttggcgccacgtcgttcaggttgggccagcgtagcacgcacctcggcgccatagcctatggcgccgagctgtgttacctcggcgccattggctatggcgccgagtaaagggtccaaaaatgacattaaaattttctaaggtccaaacgtgaatttttttctgaggaagggctaaaatataaaaaattcggtgtgtttgtcgctcggtagccagagccggcctgggcctggcctccgctctttctcttccgcattggccaacaaggcaaagagggaacaaaacaaccgcccttgcaagtgggtccattactccattccatcacaatagaacggcagcaacaaggccgccacagagacgcagacgcgatcgccgccggccgtccccgcccagtgcgctctcgcgctacacgtgccatgccgcacgcagcaatgagtagccgccgccgccgccgccgcggcgcttagcaagcgacgatggagatggcgagcgcgcggaggagggcgaagccgccgcaggcggtcggcggaggcggagaccagctcgcgctgtgggccgcctgcgtgctgctctcctcgctctcgctgctcgtcgccgccgccttctccacgggcttcggcggggccgcgaggctcacgctcgaggccggcccggaccgggaccgggaggccgcgggtgcgctcgtgacgagggcaactggcgccggcagcgggaggtactgcgacgaggacgacgacctgatcgacagcatgtccgtggacggggagtgggtgctgctgcgcggcgccgccgagcggctctacgggcccgggcagtgcccgttcgtcgacgaggggttccggtgcagggagaacggcaggccggacggcgactacgccgagtgggcatggcggccgaggcgctgcgcgctgccgagattcgacgcgaggaggctgctggagatgctccggaaccggcggctggtgttcgtgggcgactccatcgggcggaaccagtgggagtccatgctgtgcatgctggcctcggccgtcgccgacgacagggacaagcaggcgagcccgggcggcgccagcatatacgaggagaacgggagccccatcaccaagcgcaagggcttcctctccttccggttccgcgactacaactgcaccgtggagcactaccggtcgccgtacctggtccgccgcggccgcccgccgcgccactcgccgaagcgcgtcgccacggcgctccggctgggctccatggacgccatggcgccccggtggaaggacgcggacgtcctggtgttcaacacgggacactggtggaaccacgagaggctgcagcagttgacggcaagacgttgcggctcaacatgagcgtggaggacgcctacgagagggcgctgaacacgctgcagaaatgggtccaaaaggaagtgaacacaacaaaaacgctggtcgtcctacgaacatactcgccggcacatgtaagggcgtcaaacggtggtggaggtgggtgtgtcagggagacggcgccggagctgaacacgtcgaggatcgcgctgcaccggtggccgggcctgctcaacccgagcccggctttaattgaagcggcgaagaagcggcagctggcgacgatgcacgtcctgaacgtgaccctgatgacggcgcagcggcgggacggccacccgtcggtgtacaacgtccgcctcccgtcgccggcggcggcgcaggagcaggtgacgacgagggcggccgactgcagccactggtgcctgccaggcgtgccggacgcgtggaacgagctcctctacgctttgattctacataggactaggactacgtcattaggaggttcagactgaggtgttttttattggttataatttatttatagaggaactatatatatcttctaataataatgctaatgatgtgtccggcccagttttttttcatttccctctgggcttggctcacggcctgtcctaccctaggctcacgcacactgtgccggtcctgagtttttctgaggaatatataaaccttcaattaggcagtacgtacacgtggtagagagggtgtagatagtagatcaactctttttatcgcggagaaaaaggaacacttctaatcagac

SEQ ID NO: 70585 - DNA, 2756 bp, Zea Mays
ataaacaaatgattgtgttaatcttacattagtagtgatgtacaatgataaattttaattaatattaaaaagtataatttcgaatacattagattattggagttttagagtccaaaatataaatatacttaataaacaaaaagattataattagagtccggtataaataaacagtgacttgatgattttataaagtactttgtacttccatagggtgggttacttatgtgcatggtacttgcgtcacgcagtttgaataaacaaaaacaaaaacaaaaaaaatatctagatgaataaataaatcggtcacaaaaacaaaaaaactagatgaaaaataaatctagacggacaaatcagcgacataaacgaaaaatatagacaacaaaaaaacaaattagtgataaaaaaatacgtccacgatggagcttgaacccacaacctcaaagttaaaagtcttgcactctaccgactgagctagacatactttgctgttacatatccgagctcggcgccatagatcttggcgccgagctcgataccacgttggcgccacgtcgttcaggttgggccagcgtagcacgcacctcggcgccatagcctatggcgccgagctgtgttacctcggcgccattggctatggcgccgagtaaagggtccaaaaatgacattaaaattttctaaggtccaaacgtgaatttttttctgaggaagggctaaaatataaaaaattcggtgtgtttgtcgctcggtagccagagccggcctgggcctggcctccgctctttctcttccgcattggccaacaaggcaaagagggaacaaaacaaccgcccttgcaagtgggtccattactccattccatcacaatagaacggcagcaacaaggccgccacagagacgcagacgcgatcgccgccggccgtccccgcccagtgcgctctcgcgctacacgtgccatgccgcacgcagcaatgagtagccgccgccgccgccgccgcggcgcttagcaagcgacgatggagatggcgagcgcgcggaggagggcgaagccgccgcaggcggtcggcggaggcggagaccagctcgcgctgtgggccgcctgcgtgctgctctcctcgctctcgctgctcgtcgccgccgccttctccacgggcttcggcggggccgcgaggctcacgctcgaggccggcccggaccgggaccgggaggccgcgggtgcgctcgtgacgagggcaactggcgccggcagcgggaggtactgcgacgaggacgacgacctgatcgacagcatgtccgtggacggggagtgggtgctgctgcgcggcgccgccgagcggctctacgggcccgggcagtgcccgttcgtcgacgaggggttccggtgcagggagaacggcaggccggacggcgactacgccgagtgggcatggcggccgaggcgctgcgcgctgccgaggttcctaactgccaagtggtcgtggtcaagtcccaagcatatgcatgcatcatatatatttgatgtgtgtatgcgtatcagattcgacgcgaggaggctgctggagatgctccggaaccggcggctggtgttcgtgggcgactccatcgggcggaaccagtgggagtccatgctgtgcatgctggcctcggccgtcgccgacgacagggacaagcaggcgagcccgggcggcgccagcatatacgaggagaacgggagccccatcaccaagcgcaagggcttcctctccttccggttccgcgactacaactgcaccgtggagcactaccggtcgccgtacctggtccgccgcggccgcccgccgcgccactcgccgaagcgcgtcgccacggcgctccggctgggctccatggacgccatggcgccccggtggaaggacgcggacgtcctggtgttcaacacgggacactggtggaaccacgagaggctgcagcagttaggatgctacttccaggacggcaagacgttgcggctcaacatgagcgtggaggacgcctacgagagggcgctgaacacgctgcagaaatgggtccaaaaggaagtgaacacaacaaaaacgctggtcgtcctacgaacatactcgccggcacatggcgtcaaacggtggtggaggtgggtgtgtcagggagacggcgccggagctgaacacgtcgaggatcgcgctgcaccggtggccgggcctgctcaacccgagcccggctttaattgaagcggcgaagaagcggcagctggcgacgatgcacgtcctgaacgtgaccctgatgacggcgcagcggcgggacggccacccgtcggtgtacaacgtccgcctcccgtcgccggcggcggcgcaggagcaggtgacgacgagggcggccgactgcagccactggtgcctgccaggcgtgccggacgcgtggaacgagctcctctacgctttgattctacataggactaggactacgtcattaggaggttcagactgaggtgttttttattggttataatttatttatagaggaactatatatatcttctaataataatgctaatgatgtgtccggcccagttttttttcatttccctctgggcttggctcacggcctgtcctaccctaggctcacgcacactgtgccggtcctgagtttttctgaggaatatataaaccttcaattaggcagtacgtacacgtggtagagagggtgtagatagtagatcaactctttttatcgcggagaaaaaggaacacttctaatcagac

SEQ ID NO: 70586 - DNA, 685 bp, Zea Mays
ctgtaatagaaaagagaagaatataattactaaggaacaaaggaacaaccaaaaaattgatctggagcacttaaggcaacgcccggaccaagaaagccatcatcgtttggtggcttgttgtgaaaggggaggcaacatcaatttgatctggagcacttaagtggtcttgatcatctgcgtcacaaaaattgcaaaatcatctctggagaaagcattggccgagaatggagagctggatgtaggaacatcgcagcttcctgtggtagcctctccctccgatctgcaacaacctcttgtaatcaagattgacacgtcaaatgaagatcacgagaagtaaaagtgttgtgttcacaatctcggatgtacattctttgtctgttgagtctgtagactatatatacccatagctcttgtgaggccggtaaaagggtaaaaaagcgcaaaaagagagaaaaatgacggtgaagtttgactgatagattcggaaaaaatgggaatcgccgaatcggagacgggattgtgatacgtgggtgtaccgaacgaatcaatacgaacggaattcaccgaaaacagatcgtcaaatatggaaaataggacaggtcgggaaaggattacaacggacgtgtactatggggtgtatgtaactcatgtcagatttaataaaattatctaagatataatttat

SEQ ID NO: 70587 - DNA, 1849 bp, Zea Mays
tcgcaacaaaccggttcggttaaccctttctccaccgcccgcagtcagactcagagcagaggcgaccggatcatgcgcgtccacatctgtcggtgctgggcgctccccgccgaggacggacacggacggtaggtgggactggaactggaactggaagcaaggcgaggcgaggcgaggcgaggcgtgcgagcaaggtgaagcgaaccctccccctgctgtttcctcccgtgctcggtgctccccaccgggaaaaggggcaacgagagtagagaaatcgaacccacacgcaacgcgtcgcgacgggacagctccacctccacccactcgcctgcctccagatccagcgcccgcatctctctctctgtcgctcgcgcgagataagccgccgcgccgggcgggcgtgctagcggtagcagcgagcggtgcgcgagggcggcggaggcgggagggcggatccggtgggcggcaaatctggcaggcgccgcggtggggctgcgggcgcgggggagggcggggggctgggcggacggcgcggagggcggggagggaggggaggactgcggcaggctcaggccctggcgcaggaggctgctcgcgtccatggcgctctcgtggccctcggccgtccgcctcgccgtcgccgccgtcctgctcgccgccgtcgtcgtcgcgctcttcacgctccccgtcgagaagattttaaaggattttctgctttggatcaaggagaacttgggtgcatggggtcctttggtgctggccctagcttacattcctctgacagtcttagctgttccagcatcaattcttacacttggagggggctatttatttggactgccagtagggttcgttgctgattccattggagcaacaattggtgcaactgctgcatttctgcttggcaggacgattgggaggccttatgttctttcgaaatgcaaagattaccctaagtttcaagcagtagctattgccatccaaagatctggcttcaagatcgtgttgctactaaggcttgtacctttacttccgttcaacatgttgaactacctgttatctgtcactcctgttggtgttggagaatacatgctggcttcttggtttggaatgatgccaatcactcttgctttggtgtacgttggaacaacactgaaagatctatcagatgtgacacatgggtggagtgagatctcgactactcgatggtggtcttgatcatctgcgtcacaaaaattgcaaaatcatctctggagaaagcattggccgagaatggagagctggatgtaggaacatcgcagcttcctgtggtagcctctccctccgatctgcaacaacctcttgtaatcaagattgacacgtcaaatgaagatcacgagaagtaaaagtgttgtgttcacaatctcggatgtacattctttgtctgttgagtctgtagactatatatacccatagctcttgtgaggccggtaaaagggtaaaaaagcgcaaaaagagagaaaaatgacggtgaagtttgactgataggtaatatctttggtgaaaatgcaattgtagtatttcagttgggcctagccgctagggatgaaacgagcggaaaaataactcctgtttgtgttttttttttgtgaaaatggcgccagattcggaaaaaatgggaatcgccgaatcggagacgggattgtgatacgtgggtgtaccgaacgaatcaatacgaacggaattcaccgaaaacagatcgtcaaatatggaaaataggacaggtcgggaaaggattacaacggacgtgtactatggggtgtatgtaactcatgtcagatttaataaaattatctaagatataatttat

SEQ ID NO: 70588 - DNA, 1984 bp, Zea Mays
ctgcctggcaaacagcaacgcgagttcaggtcatcaggtttcaggtgtccatccaaccttctgtcgtctccgggtgctccgggccagtcgtcgacggcgagccgtacgtatattattacccccaggcgaaacccaaagagaacccgtaccaacccaaacaaaaccacacaccacctcctcgccggctcgtcatcgccatcgccatcgtcatcgccatcgccatcgtttcattgcgagtctccgtttcatctcgccccctcacccccacacacactggaatccccgcgtctgaatccggcgcccccgccccgatccgcgccgaatcgccgccgctcggggtggaaccctagcccgatctcgatccgtttctccgcgatgggcgccggccgtgtctgtcgcggcggcccctcctccgcctcccccgccgcagggcggccgttctcgacgctcgccgcgtcgtcctccgcctccccttcctcggctccttcagagacggcgtccacgtcggtcaccaagacggtgaacggctcccaccacttcaaaatcgcgggctactctctctccaagggaatcggggtggggaagttcatcgcttccgagtccttcaacgtggggggattcgactgggcgatctacttctaccccgacgggaagagcgccgaggacggcgctgcctacgtctcgctcttcatagccctcgccagcgagggcaccgatgtgcgcgcgctgttcgagctcacgctcgtcgaccagagcggcaagggtcaggataaggtgcatacccacttcgggaggtcgctcgagagcggcccatacaccctcaagtaccgcggcagcatgtggggctacaagcgtttcttcaaacgaactgccctagaaacatcagactatcttaaagatgattgccttttagtgaactgcactgttggcgttgttcaatcacatactgaaggaccaaagatatacacaattccagtaccgcggtccaacatggctctacatattggtcagctattgacaagtggaaagaggacagacattgcattcgaagttgatggagagatgtttcctgcccacaaggtgattctttcagcccggtctcctgtttttagggcacaactttttggcccaatgaaggataaggacatgaagtgtataaagattgaagacatggaggctccagtattcaaggccttgctccatttcatgtattgggatgagttgccggatattgaagagcttactggtgtaaatacaacttgggtatccaccttgatggctcaacatttactagctgctgcagaccgttatgcattggagagattgaaattgctctgtgaacttaagctgtgtgaagatgttgcaataaatacagtggcaaatactttggcactggctgaacagcaccactgttatcagctaaaaactgtttgcttgaaatttgtagctctgcctgaaaatttgaaagctgtcatgcaaaccgatgggtttgattatttgcaacaaagctgcccatccctcctgaccgagcttctcgagtatgtggccaaggcaggagagcactccgtgagcccctgcttgtattcaactgaagtccttgacggtggtgatgccaatgggcgacgcgtgaaaccaaggatctaacggttggaagaggagttcctcgtgcccattttaagttgtaaagtgtttcgaatgacgggtgcttatgtggccgtgccatatcatgcatgttgtagcgtgtgggtttgtgtgtgtgttgtgacttccatccctctccccagccgtattgatggtactgtagagggtgttatcgctaatatataccctactgacttatgtattgcatcgctgtttcaaagcagtctgtcatcataagtgcacacaggtggaatagggcgaggatggtctggtgcaaaggaagttaaatgatgatgaaacggcaggtggcagaacgatttgctcctttggtacacgatgattc

SEQ ID NO: 70589 - DNA, 2276 bp, Zea Mays
ctgcctggcaaacagcaacgcgagttcaggtcatcaggtttcaggtgtccatccaaccttctgtcgtctccgggtgctccgggccagtcgtcgacggcgagccgtacgtatattattacccccaggcgaaacccaaagagaacccgtaccaacccaaacaaaaccacacaccacctcctcgccggctcgtcatcgccatcgccatcgtcatcgccatcgccatcgtttcattgcgagtctccgtttcatctcgccccctcacccccacacacactggaatccccgcgtctgaatccggcgcccccgccccgatccgcgccgaatcgccgccgctcggggtggaaccctagcccgatctcgatccgtttctccgcgatgggcgccggccgtgtctgtcgcggcggcccctcctccgcctcccccgccgcagggcggccgttctcgacgctcgccgcgtcgtcctccgcctccccttcctcggctccttcagagacggcgtccacgtcggtcaccaagacggtgaacggctcccaccacttcaaaatcgcgggctactctctctccaagggaatcggggtggggaagttcatcgcttccgagtccttcaacgtggggggattcgactgggcgatctacttctaccccgacgggaagagcgccgaggacggcgctgcctacgtctcgctcttcatagccctcgccagcgagggcaccgatgtgcgcgcgctgttcgagctcacgctcgtcgaccagagcggcaagggtcaggataaggtgcatacccacttcgggaggtcgctcgagagcggcccatacaccctcaagtaccgcggcagcatgtggcgtgaaaagcagttgaaaaggccgtggctataagaaaaagacaccagccagagggggtcgaaggggctacaagcgtttcttcaaacgaactgccctagaaacatcagactatcttaaagatgattgccttttagtgaactgcactgttggcgttgttcaatcacatactgaaggaccaaagatatacacaattccagtaccgcggtccaacatggctctacatattggtcagctattgacaagtggaaagaggacagacattgcattcgaagttgatggagagatgtttcctgcccacaaggtgattctttcagcccggtctcctgtttttagggcacaactttttggcccaatgaaggataaggacatgaagtgtataaagattgaagacatggaggctccagtattcaaggccttgctccatttcatgtattgggatgagttgccggatattgaagagcttactggtgtaaatacaacttgggtatccaccttgatggctcaacatttactagctgctgcagaccgttatgcattggagagattgaaattgctctgtgaacttaagctgtgtgaagatgttgcaataaatacagtggcaaatactttggcactggctgaacagcaccactgttatcagctaaaaactgtttgcttgaaatttgtagctctgcctgaaaatttgaaagctgtcatgcaaaccgatgggtttgattatttgcaacaaagctgcccatccctcctgaccgagcttctcgagtatgtggccaaggcaggagagcactccgtgagcccctgcttgtattcaactgaagtccttgacggtggtgatgccaatgggcgacgcgtgaaaccaaggatctaacggttggaagaggagttcctcgtgcccattttaagttgtaaagtgtttcgaatgacgggtgcttatgtggccgtgccatatcatgcatgttgtagcgtgtgggtttgtgtgtgtgttgtgacttccatccctctccccagccgtattgatggtactgtagagggtgttatcgctaatatataccctactgacttatgtattgcatcgctgtttcaaagcagtctgtcatcataagtgcacacaggtggaatagggcgaggatggtctggtgcaaaggtgaaataatggcacagactgtgtatgtgtgtgtcctgtttttcagaagttttaccttgcggtaggccagatttgtcgattcttagtcgtctgtatttggctgtattcaattgaaattgtgaaatgtatcagttgaagttatgcgtagacattcacttccatacctctcgaatacccgtttggattgccttttttacctttgtaaaatattcgtttgattcgtgacaggaagttaaatgatgatgaaacggcaggtggcagaacgatttgctcctttggtacacgatgattc

SEQ ID NO: 70590 - DNA, 1277 bp, Zea Mays
cccgaaacttttcgaaaatcccccacagaatcccatccccccgggccccggcaaccgctggcgctgcctccagccctccaacaccacgaccgccgggcggctcctcctcctctgccggagagctcggcgggcggcatgggaacagagtatcccaccttcgccgacgtatccggggcccgcgcgctcctcttcctcgccgactccacaccccggctggccccgccttcgcgtcctcccgctctcagcgaggagttctactgctactcgggctcctcgtcctcctactccggcgcgtcgacgaggtcatgcgtctccgactcggcacagcgcggtcgccccgtcgatcccctacgcgtgctctccgtcgtcgcctccctccgccgcatcgaccctaaggtgctagccgaggccacaagcgcgctgttccataccgacgcagagaagaagcggaagggcgtgtggatcgagatcgacagcggtggtgacgacggccagagcgagaggagcagcgccgtggccagcgaggggagcaccgtcacggccgccgcgtccgcgggctccacggccacgtcggggagatgccgcggggctccgcgggtgggttgtgctgctggtggtaaggggccgaggagggcggaggtgatcatgcagtggttttcgcagacgcaagctgggccagcgacggagaacgacatccgcgccgccgtcggcgacaactccggcacgagcaaagcgatacgatggctgttgaagcaggagggcggcttgcggcgtgcaggcaatggtggtgccctggatccgtatgtttatatgctgcatgagaaaggatgagatggtgtgcgacaaggtacggctccgtggtggagttgcctccggcggggcacccggaacaccttcccggtgcgtgcaagccattgtcgtagcccagagcagcgacgcacctcggctcgttgaaggtaaaccagttcttcaccctgtctccgaacgcgtggaagcagaactcggcgtagtctgcaaacgcctcccttcgattgggcacggcgtgcagctgggtcagactgactgacacatggttgaatcaatttgaaatttggtttctagatgtcgtctagtttgcaattcttacacaatctttgggctaagccagcccaggtactgttcatggagtgccaatgggaggtcataatggtagagatttgcatacggcgcgatacctgacttgtatgtatacatatatataaaggttaaccaggaatctgaatgtttcctgaaagaat

SEQ ID NO: 70591 - DNA, 297 bp, Zea Mays
caacaaaataacaccatgaatttcggaatttcgttttttagctcaacaaagtaagcctgtattatctgattgtacatgtaaactgagatcgagtaacactagattatcctcatcctcatatggaagaagggaggacaaagacgaaccaaacattatctcgttgttttgttttctatcgccaacctgacgaattaaaaaaaaaggcaatcctagatcagaccaattccataagaaatggatctcctaaagccatagcccttatcagttttacaaaatccatctcgttctgaaccttca

SEQ ID NO: 70592 - DNA, 2317 bp, Zea Mays
gaaacaccgttcccactcagctttgcttcagcaccgagggttttggggagggcgactagggtttcaactcggcgagcgaacacagaatccttcctggtcgtcggaagcagcttcaaccgcgtcagattcgtctccgcgtcccatgcgatttattcctcccttcttctactctgtactctatcggtgtcgccatcgttcagacgcggccgctggttttgtgttcgcttcttatgtcatcgcacacggtgatttgcggctgtcaaagattgtgttcgccatcgtcgttgctgtcgctcggcacacgccagacctgctgctgcgtcctgcacactcgtccttgcaccgtagcacctgtgtaacctgaaacttccttgacagcgccgtcctctgcttcgcagtcatgccgtcatgccggtgttgtcagtcgtacacgctggttcgttgatcgatgaagtgtcccaacactttatcctaataaatacatatacgctactaaagctccctcatccgctgcaacgacaccgtgattgctttacagcttaaaaccttctgtaccgtgacttggtattcagttcacaggacgaacctcatcattacatcctcggatgagtacggatcaaatgctatgctcgaaggcgtgtttccatattttactttaagtcagttggtctgattatatggtcggtcactcatacattttttggtttctgaatactatatcaacgattcacgttcaactgcgccattcttttacggccggcttctaaatgttcacctcttatgcaggtaagtctagagatggtcccaaattttttcgtcattttactttgcgcatatatactcctgctaataatgtaccaatcttatttggtataattagtaattggatttcatagacgatatttaacctcaattattcacattggattacgtatacatatgaagctgttgtgatgtatcctgctagacatttgcttgcatcgtgtgcacatttatattcatctttagatagggtcagctaattatatgagtactgatatattctttggttcatggttattatatcaatatttcatgatggtcggcaaccatttatctctcagccttctacctactctacccaattctttcatgggtacattaagaaataataggtttttcgtcagtagcattcgtgattacatatcccttttacttgagacactaagtctgctgatccaatggtcgttgttagatatcattaaagtgttctcaccctttatcggcttcattcattttcaagtgactacaaatcaaccaagcaaacacataaatgcctgatcgccaaaacaaggcaaacggaaagtcatttactgctattctgaacatcgttttccttttttgggttttggacgtttgactactaccaatagatatccccttcatcattgtttccgcgcctgcactttcctatttgcagaaaaacaggaaaataacttcttaatcctcactttgcaccttaagcttctgtttctgaaatgtccgatggagaagaaacaatttcgcttacaagtggacaaaattgaaagagaaacataaatcatatgcgtctacctttatattaaaaattttgaatagtttttttcctacatagcaaattccactactgtgttcataacatatactacctccgttcacaaatatatgacaccgttgacttttttaaaactttaaccactcgtcttattcaaaatatttattcaaaaatataaaatttcaattcaactacaaactaccttaagtgataaaacaaatcacaataaaataaataataactaattattttttgaataggcgagtgatcaaagtttttttaaagttaaaaatgtcatatatttatgaaccgatggagtatatgacacaattagtatgtacttttgccacaaaccctttgataatggatgcaaaggaagctcgacggcgtcgaaaatattatttgcacgatccactagttacacattattatcaggttcagattaaatatgattaatatcacaaagaagctacgtaatatggagctaatcttatagccaagcatgttcacaagcaaggacgatggtaaaggtgaggtgagtggggctctagccccctatcgctttcgagctcatatgtccctcccataacccctaaaatttgaaattatatagtaaatgagtgataagcagctcaatgatgtgatgatatactataataagtagatatttagaaatattgataacgaaaagaggaaaatacgatttgaatagatgaaaaaaggtcgtatattgttgctccaaat

SEQ ID NO: 70593 - DNA, 3222 bp, Zea Mays
cccatccatatccatgccagcctatatataccggacgccctcgggcccgacgtgctcgtgctcgtcctcgcccagcaccgtaaccaccggacagagcacgcaccatgaaacccaccaccagcagcacgctgctgctggcagcggcggtgctctgcctcgcgctgccgctgctccccggcgccacggccaaggcggcgcgggcgcggcagggcgactacctggcgcgcctgcgcgggtcgtcgccgtggccggccgagtcggcgtcgctggcggtcgcggcgacggacagagcgtcccggcacgcggcgtcgccgggcgtggggcgcaaagaggacgaccgcgtggacaggctgcccggccagccgtcgggcgtggacttcgagcagtacgccgggtacgtgacggtggacgccgcggccgggcgcgcgctcttctactacctcgccgaggccgtgggcggcgggtcggcgtcggcggccaagccactcctgctctggctcaacggaggccccgggtgctcgtcgctggggtacggcgccatggaggagctgggcccgttccgggtgaagagcgacggcaagacgctgtaccgcaacccgtacgcgtggaacaacgcggcaaacgtgctgttcctggagagccccgccggcgtgggcttctcttactccaacacgacggctgactacagccggagcggcgacaacaagacggccgaggacgcgctccggttcctgctcaactggatggagaagttccccgagtacaagggccgcgacctgtacctggccggagagagctacgccggccactacgtcccgcagctcgcccacgccatcctcgggcacgccgccgccggcaagccgtcgtcgtcgtcgcccctcaacctcaggggcatcatgatcgggaacgcggtgatcaacgactggacggacaccaagggcatgtacgacttcttctggacgcacgcgctcatctccgacgcgacggccgacgcgatcggcaggcactgcaacttcagcgccgccgccgacgccgacgccgcggcctccaacgacaagtgcaacgaagcgacgtcggaggccgacgaggccctgcaggacatcgacatctacaacatctacgcgcccaactgccagtcccccggcctcgtctcgccgcccatcaccccctcggtttgacccgtgctcggattattacgtgaacgcgtacctcaacgacccggacgtgcagagggcgctccacgccaacgtcacccgcctcgaccacccctggtccgcctgcagcgatgtcttgagacgctggactgacagcgccacgaccgtcctgcctattctcacggagctcctcaacaacgacatcagggtctgggtgtacagtggagacaccgatgggagagtgccggtcacttccagcaggtactccgtgaaccagctccagctcccagttgccgcaaaatggagggcatggttcagcagcactcagggcgccggagaggtgggcggctacaccgtgcagtacaagggcaaggagaagggcagcctcagcctggtcaccgtcagaggagccggccacgaggtgcccagctaccagccaaggcgagcgctcgtgcttgtccagggtttccttgcaggcaaaacgcttcctggctgcaaaacgtgcgagtcggcttagcggttggcagcactacagcaacatgtatctgagagcgagggagagaaagcgaaagggaatcaagccattggaaacacacgcaccttgcggatcatgtaactgcaggtctgcaaaaaaaaaaggcaattatacagtcatagtcacaggcagagaaatctgtacacgaaataagtaagtaggttatgttccatggtgtatttagtgtgctaatttgatgccataaatctcagtcgtgcaggtgcatcagtgctagcgaatcattagaaacaaagaattttcacttccccgccaattcctttctttcttcgaacaataacggggcgtttggatcccttcattttaaaggaattggaattcactcaataaaatgatacagaaaagaaagaaagaaaaaggacagctcttgcgcaaagcattgactcccggattcttgcaacttttacaagatcagttagatatgcaatggcacgcttctacatttggatggccacaacaatggtggaaacgtatctgatcttgtatataaatcataacaatccactaatcttgtgggaggtgaaatcagcctatttgtttattcttccccttgcctctctatgtggtttacagttggggaacctgtgcctgttaatccctgcatcttcttgcagacatagacataatgggagtcaggatcctctgggacaaatccatcagggagtctacccctctcggtcagtggaacaggatccagtacacgcctcgttatctttccagtgaacacaggtcttgctgcaatacattaaaacagcactgatgaagccagcataaaaaatattcacttttttttactcagcaggcttttacacagctatctgtttccatcttatcgtaccatcatttatcctcatttttgtatcgctctgtggggtactatggaccactaattctactaacagatgacattcttttgaagtaaatttcttgcagcaccccagagttaagtgaaatgaattacacatattagtcattttatgtaacagaacagacaatatattcatgagaaaacagaaagaacaactcagttctcacttcaactgcattgcacatgaaaaaaaggcaatattgtactgttatatcacaatacaaaaggaaaaggaaacataccacattgtacaaattttactgtcagttggacaacatatatgtctccaaagcaaggggtaaaaactcaaactaaagtttgatacgtacgtagaatataaagtacaactttccagtcacatgctgattgattcaaatgaggcattcgtaccgatggatcaccatatgttatctacaagttcacacacgaaaattgggtcaaaatgcataccagggtttcaacattgttgatgctgggctgtgtatgtgactaaggcccataggcccatgactaagaagaggaatggagaaataatctagaactcagacccaaaattgtcctcaacagcactactttcagagcaaatgtacaaaagtgcgtaccaaaataaaggttcctcctggtttaagaagcctgcaataaaaaag

SEQ ID NO: 70594 - DNA, 3307 bp, Zea Mays
aaaatagcaaatccatccttctcctttagacagaaagaaaaaaaaacaaaggatccagctcgcattcgcagttgcagcccatccatatccatgccagcctatatataccggacgccctcgggcccgacgtgctcgtgctcgtcctcgcccagcaccgtaaccaccggacagagcacgcaccatgaaacccaccaccagcagcacgctgctgctggcagcggcggtgctctgcctcgcgctgccgctgctccccggcgccacggccaaggcggcgcgggcgcggcagggcgactacctggcgcgcctgcgcgggtcgtcgccgtggccggccgagtcggcgtcgctggcggtcgcggcgacggacagagcgtcccggcacgcggcgtcgccgggcgtggggcgcaaagaggacgaccgcgtggacaggctgcccggccagccgtcgggcgtggacttcgagcagtacgccgggtacgtgacggtggacgccgcggccgggcgcgcgctcttctactacctcgccgaggccgtgggcggcgggtcggcgtcggcggccaagccactcctgctctggctcaacggaggccccgggtgctcgtcgctggggtacggcgccatggaggagctgggcccgttccgggtgaagagcgacggcaagacgctgtaccgcaacccgtacgcgtggaacaacgcggcaaacgtgctgttcctggagagccccgccggcgtgggcttctcttactccaacacgacggctgactacagccggagcggcgacaacaagacggccgaggacgcgctccggttcctgctcaactggatggagaagttccccgagtacaagggccgcgacctgtacctggccggagagagctacgccggccactacgtcccgcagctcgcccacgccatcctcgggcacgccgccgccggcaagccgtcgtcgtcgtcgcccctcaacctcaggggcatcatgatcgggaacgcggtgatcaacgactggacggacaccaagggcatgtacgacttcttctggacgcacgcgctcatctccgacgcgacggccgacgcgatcggcaggcactgcaacttcagcgccgccgccgacgccgacgccgcggcctccaacgacaagtgcaacgaagcgacgtcggaggccgacgaggccctgcaggacatcgacatctacaacatctacgcgcccaactgccagtcccccggcctcgtctcgccgcccatcaccccctcgatggacaggtttgacccgtgctcggattattacgtgaacgcgtacctcaacgacccggacgtgcagagggcgctccacgccaacgtcacccgcctcgaccacccctggtccgcctgcagcgatgtcttgagacgctggactgacagcgccacgaccgtcctgcctattctcacggagctcctcaacaacgacatcagggtctgggtgtacagtggagacaccgatgggagagtgccggtcacttccagcaggtactccgtgaaccagctccagctcccagttgccgcaaaatggagggcatggttcagcagcactcagggcgccggagaggtgggcggctacaccgtgcagtacaagggcaaggagaagggcagcctcagcctggtcaccgtcagaggagccggccacgaggtgcccagctaccagccaaggcgagcgctcgtgcttgtccagggtttccttgcaggcaaaacgcttcctggctgcaaaacgtgcgagtcggcttagcggttggcagcactacagcaacatgtatctgagagcgagggagagaaagcgaaagggaatcaagccattggaaacacacgcaccttgcggatcatgtaactgcaggtctgcaaaaaaaaaaggcaattatacagtcatagtcacaggcagagaaatctgtacacgaaataagtaagtaggttatgttccatggtgtatttagtgtgctaatttgatgccataaatctcagtcgtgcaggtgcatcagtgctagcgaatcattagaaacaaagaattttcacttccccgccaattcctttctttcttcgaacaataacggggcgtttggatcccttcattttaaaggaattggaattcactcaataaaatgatacagaaaagaaagaaagaaaaaggacagctcttgcgcaaagcattgactcccggattcttgcaacttttacaagatcagttagatatgcaatggcacgcttctacatttggatggccacaacaatggtggaaacgtatctgatcttgtatataaatcataacaatccactaatcttgtgggaggtgaaatcagcctatttgtttattcttccccttgcctctctatgtggtttacagttggggaacctgtgcctgttaatccctgcatcttcttgcagacatagacataatgggagtcaggatcctctgggacaaatccatcagggagtctacccctctcggtcagtggaacaggatccagtacacgcctcgttatctttccagtgaacacaggtcttgctgcaatacattaaaacagcactgatgaagccagcataaaaaatattcacttttttttactcagcaggcttttacacagctatctgtttccatcttatcgtaccatcatttatcctcatttttgtatcgctctgtggggtactatggaccactaattctactaacagatgacattcttttgaagtaaatttcttgcagcaccccagagttaagtgaaatgaattacacatattagtcattttatgtaacagaacagacaatatattcatgagaaaacagaaagaacaactcagttctcacttcaactgcattgcacatgaaaaaaaggcaatattgtactgttatatcacaatacaaaaggaaaaggaaacataccacattgtacaaattttactgtcagttggacaacatatatgtctccaaagcaaggggtaaaaactcaaactaaagtttgatacgtacgtagaatataaagtacaactttccagtcacatgctgattgattcaaatgaggcattcgtaccgatggatcaccatatgttatctacaagttcacacacgaaaattgggtcaaaatgcataccagggtttcaacattgttgatgctgggctgtgtatgtgactaaggcccataggcccatgactaagaagaggaatggagaaataatctagaactcagacccaaaattgtcctcaacagcactactttcagagcaaatgtacaaaagtgcgtaccaaaataaaggttcctcctggtttaagaagcctgcaataaaaaag

SEQ ID NO: 70595 - DNA, 1739 bp, Zea Mays
gtcacggtcacgtgcacgcagagccccgctcgccttctataggtagcgccgcgcgggtggcgtcgcttctggtctgtggcggatcggatcgacacccagccagcgcgtggagagtagaacacccccaagaggccaggactgagactgaccatgggagaagcgtgcagggacgcggcggctgcgggccggcagctgctgcaggacgaagcgggcggaggaggagggcgtcacgcggagaaggagctcgtcggtgacccgacccacgactcggccgtctcggcgaagctgtacgaggacgtgccggcgacgccgatgatggcgctcaaccacatctcccgcctgtgcgaatccgtcgacgcctccgtccggttctacgtcaaggcgctcggcttcgtgctcatccagcgcccgccggcgctcgacttctccggcgcatggctcttcaactacggcgtgggtatccacctcgtgcagcgcgacgacgcgcggcgggcccccgacgtgaggccggaggaggcggagctggaccccatggacaaccacgtgtcgttccagtgcgaggacatgggcgccatggagcggcggctgcgggagatgcgcgtgcggtacatgaagcggaccatcaacgaggaggaagggtcgcccatcgaccagctcttcttcagggacccggacggcttcatgatcgagatctgcaactgcgagaacctggagctcgtccccgccggcgccttcggccgcctcaggctgccccgcgaccgccacaacccgcccgtgcgcatggtcgccggcagcgacgagtagagggggagggggctttcgcgtccgcgtgaccctctgccctccaaggccagcagcccagcaccacagggggagaaatagtttgtggctcatataatcgccgagggctcttaattatgctggattctgggtcgtgtttcctgccgagtttcagttttgaattcgaatttgttctagttttgacctgcttcggttaccaggagattcttagcaagatgaaccgtggaataactgtgaaactaaaccgtggaagatgaattctcaatcaggtctaaataggcaaccgacagcctagcctggacactgcttggttctagcgggctatagtagggcaggctaaaatatctaaactgaacctgactacaaccattacacgccttctactgctacagctatctggatgaaggaatacgataataggagataatagaacagggtatggaattatgttgtatcattcatatccttttatggtatacgccttcgctcttttatacttgtctactgttacaataggccgctagctagtccatacgtcacaggagagcggatagcgcgttacaatagtccgctagctagcccatacgctcgcaggatagcgcgcactgggcttacgcagacgccggcccacaaccacatcctcctttacttctttgccttttgaacacaagcctatttagcgccattttcagcgtcatgacactgaatactgacaaaccgatcaaaccatcggtgctgccaataacaagtagaaattgatattctcgtgggcgaaacttgcaaggtagtcatacatactatgggctcttttttagctcagtaatcatacttagatgttctatggacagtctctctatttttttctattttagttttccgtatctaaaacctctatttttttctattctagttttccgtatctaaaactaagagcaaac

SEQ ID NO: 70596 - DNA, 4339 bp, Zea Mays
aacacccctggtgttacgatcactaaaactctgacatgtcatcatcagcatttgcattaacttgcttgatacacttagaatgcattcactaggatccaaaataatctaagtatgatgttgtgattagtgaagagtgaaggacctggttttgaaaatctcaatttagagctccaaaagtggaacttgtgatttggcaataatttgccaaaaggtcaaattaccaaatttatagagttctccaacccaaacaactttcaggtatagatatttccatgttttataggaagaagtggagaaaactcaaaaattaactttttggacctaaggttggatggctggaaacaatatcaagtagctgtctttgaatcttcataacttttgatatataggcaatttgaagatggtcacagtagcaaagctgtagagctacactaaatgtgtaattttgtttaagctacttaaccctaagttcatatagaactaggtggaaaactggtccaaagtgggaatgtcagaatctaaatttcagactgcaatatctgaaactgaagattttatatgctgaagtaactttggaagcctgttggtggctgatccatacagctatgggttacagtttatgtaccaaagtggaagaccacatgttgaggtataagtttggttaaggttcatacccctgaaactatttggaactggtagaaacagtggtccaaaaatgtagtgtttaattctggattttcagacttagtgaaaaatcaaagtctgaatttgtgtgtttaatgccaactttgggctttgatggtttggaatccatattgttctaactaagggacattgtaccaaacttgtggagcaacatgtggagcaccaatttgattaagcaacttggcctcagaagcatttggaacttggagaaaagggtgaggttatctcgtttcgaagagagcaagagaagttcagagactttgtttgaaatctacaaacaagcaacttttaaactaatggaaatttggacatgagctctatacaccaaagttgggtttgagcttaaggttaaccttgtttttagtaggatgcaataaattgatgaagctcttgaagcagatcaagtccaatttcaactctaaactagcccaaaagtggattttaagatttagctatgttttgctaaaagtccgtatataaaagtcgtggagcttggaaaagtgaatgattttcatatttggagctctccaagtgatgtgggagaatttgaagtaatttgcaaaaattcagatttgggtcagttggaatcagcccaaaacagttttgtttatctgtatttggatccctgtaacttttaatccatgagtattttggaaacagttgttataacaaacctgtagagtaactataggagaacaatgtttatgaaatgtagcagccctaaaaccatatgcaactaggagaaaaaggtgttcaaagtgggactgtcagacttatggattttcaggcttcgaatagttgccaaagtctgaaatcagtgtttttagtgccattttggggctgtgtgttgcctgttctaggaagttttggaccatggttgctatgggagagttgaagagcatatgtcagtgaacaaatttcgttgtgtgagttaggcttgatctgacccagaacatggagtacaagttacccaaagtggggctgatagtttttttcagttttcagaccaggaacagaaggttaagtctgaattgcagtgtttgtgctgtttttggagctcatttgtggaaaatctaaggagctttgggctgagacgtctatagaggagttaaagaccacaagttagtgtacaaattcatttaatgggaatgggtgtaatcctacgcaaaatgtggagaaaatgtggctcaaaattggactgtcagtttaattgggctgaattttgttctgtctctgaaatctgaatttcagtgtagaatgcctagtttggagctgttttgtgatcaatatgagtggttttagactgtagtttctatagaaaacttggagaccacagtatggcgaatacgtttcataaggtgagattgacatggtgctacataaaaagtagagtaatgtttgcctaaagatcagttgtcaggtgttggggattttcaaacagtaaaacatctaagtctgaatctgtgtgtttttacccacctttggagctatgtggtaattaatccaaagatatttgggttaagagtctgtagcaaaatgagagacctgatatagataatcaaggtttgtgcaatgagttggcttgctactgtatagaacttggagaacagcctattgcaaatccctctgtcagacttaaactgtgctgtccagttagctgaatttggacttttcagtatttatactctactttagcgcatcacaactttttatttgaatatttccaacctatgggcgttataccaaagtgaaagaactatgcttagtggagtaaatttagttaagggagatgggcctgttgctaagagaatttgtgacataaaaggggatcaaacagagagctgggcaatgggcagtgtggctgattcagtggattcagaagattgaaactatgtttcagtgaagtatagccgttcagaggttccaaatatctgaaggaaaaattacctttctccatgtgctggccgatggcctttatcccctagccgtttctccttatcccctccctgccacacattttctattatccttaggtcgaccaaatccttagaatgctcctgttcttatccagttgaggtctagaagcttactcatcacgccggagcagcagtagcagtcgagctcggcatcagctcccttgctgctcactttgcagcacctcgccagctccctggtaacactctgcacctgccgtcgaactctctcagaatgagcagtttggtcgtccccatctcgccgtggttcgtcctcaccatgttttcagatgtgtttgggctgagatgccattcaaaatcgatgatctgttcgtcgccaccggccgcaagcaccagttttgttgaacatacgtgattgaagatcctttgtggtgatgaaggtgaaatcagcatagcactcgccaagcattctacagaaggtctggactagagaaccatgttgtttcacgtttgttgagttcggttggattagggtgacctgattcattgctctggctattaggtctaattaataggcttggattttagaaataaaagtgcagtgccaaaaaaaagtatggcaatgtttgaataaccttgttttggtcatttaagcacttggtaaaatttgggggctatttggaaatcctttgcttagaaagcattgtaaagttacaaataggatggattaatccctttagaaaagatgaagtaagtttatggatgaaatctaatgtgttcagtcccttggtagtcatagtttgtaggtgtagtctggtaatgcttttaaatatttttgttgcaaactgcataaacataagcatccatgatcatgtcatttcatgtagagctcccaaaataaagagtgaagatttaagatgaagtggttgttgaagaggagtttactccagtgcctgttcatcaagtggatggagccatctaactgatcatcgtgttagaagtatctagaacctcttctctgcaacaaaggcaagccccggtgcatttgccccttccttgtgttttaaatgctttatcaccttaaatgatgcattaggtgataggagttgtgtgatgaacaactgatgcattaccattccttggaatttaaatactataccttgatccctgatttataaaaagaactgataatgcttaaccctgcttagaaactgaaaaatcatttgttttcaaaaagaatgattgcggaacattagttatgggctttttgattcaaaaatcaaagcaaactaaggtgatgactccacttcggccggagtgggatcatcattggaaaagagtacccctgtcgggtgccaaaaatggggaaatggttaataaatctagaccagacgctgagcagacagagtcgcccgtctgtgtcgattaaggaccgtaccgttgactggcctgttgtggttgagactttgcaactagccacataccctggtatgggacagggtaagcttgaacccggctattccatacgtgaagagacaatcgcgcactgggagtggagagatggcgggagtagcatgtaccctcctggcatagtagcacgcctggtagggtaatgtgctctcgggtggcgcggacctgttcatgtagtggaggactccgtgggaacggttgacatatgcaagggttaagtgctacatatg

SEQ ID NO: 70597 - DNA, 1613 bp, Zea Mays
gcaacgggcgcagcgcacagcaggcgcaaacgcaacacagagcagcgacccaacctacgaacccagagttcccgccaggcccagagcccagagcccagagccccacccgcccccgcgcccgcgggctccaggccgagccgaagctaggcgcgatgtcgctgtcaccggcggacggcgcagcgtactggctgcggtggcaggtcctcgtctgcggcgcgctcatcgcgctgcccacggtggccgcggcggcgctgctgccgcggctgcggagctcagcgccgcccctgcgcgcggccgacctctgggttccttgctgggcgcgcctccacccgggctggctccttgcctaccgcgccgtcgcgctcgccgccgctgtagcgcttctcgcgcgcctcgtcgtcgcgcgcggcatcaccgtcttctacttctacacccagtggacgtttctattagtcaccatatattttgcgtttgccacagctatatcagcccatggatgtttggtttactcaaggaaaagtttgaggaaagccgacgaatcccgtggacttcttaatgctgatgtcgaaaatcgtgatgtttccaattctgtttctggagagaggaaaacagatgagacaaatatgatgatgagctattatgaacaaatagtgaatgagagaagagctgggttctggggccggtgcatggaaatcatataccagactagcgcaggtgcaacaatgttgactgatgtcacatattggggccttcttgtgccatttttctaccgtgacaagtttgggttagctttgttcactgatggcatgcactccttaaatgctgtttttctacttattgacacacttctcaacaacatgtggattttcagccctttccctggtaccgaatgtctttctttgttttctggagctgcgcctatgtaacattccagtgggtccttcatgcttgtggaggcgtatcctggtggccgtacccatttctggacctttcatcatctggagctcctctatggtacctcggcatggccatcgctcatgtcccctgcttcttcctgtattggttgatcgtcaaggcgaagcacacttatttccaacggatgttcccacatgcttatgttagggcaacatagacccatttatctaatcacaggttaggataaactcataaacatgtataaataaatatctgtatcatactacttctgcacctgccgggcttaagtgtacacctgtatagtctcgtgaatttacagcccctttgagatgggtatgagacctgagaacacgccaggaccggcatgttgatcaatgaatcgcagaggttcactgtcacctgggaacacggtcttgtgctctgtgcctctgtgtgttcctttccttcgcttgaacttgaagtgcacattggaagcacgcccatggtttccctttcccccaaggatgatgtattgcattttatggtgataaaaggacgcttttgaactacagtgctcgagtatttcttcactcccgatgtggtgtccaattcatcatgaatactcgttcagtcacaactcacaacatattctcacttgaaggcttgaagaaactgtcagcgtattttgtatttggcgc

SEQ ID NO: 70598 - DNA, 1239 bp, Zea Mays
accgtacgtagcagagcatcagtttcataaacaagtccatacgtactacttcaccttcaagcagcagcagcagccatggcagcacccaccgtcgtctccttgctcgccatggccgtggtggcgatagcagcgcttcaagctacggctgccggtccgccgccaccgccaccgtacggcaggccgacgaactgtgttcagacgttatacgagtttgccacagctatatcagcccatggatgtttggtttactcaaggaaaagtttgaggaaagccgacgaatcccgtggacttcttaatgctgatgtcgaaaatcgtgatgtttccaattctgtttctggagagaggaaaacagatgagacaaatatgatgatgagctattatgaacaaatagtgaatgagagaagagctgggttctggggccggtgcatggaaatcatataccagactagcgcaggtgcaacaatgttgactgatgtcacatattggggccttcttgtgccatttttctaccgtgacaagtttgggttagctttgttcactgatggcatgcactccttaaatgctgtttttctacttattgacacacttctcaacaacatgccctttccctggtaccgaatgtctttctttgttttctggagctgcgcctatgtaacattccagtgggtccttcatgcttgtggaggcgtatcctggtggccgtacccatttctggacctttcatcatctggagctcctctatggtacctcggcatggccatcgctcatgtcccctgcttcttcctgtattggttgatcgtcaaggcgaagcacacttatttccaacggatgttcccacatgcttatgttagggcaacatagacccatttatctaatcacagcccctttgagatgggtatgagacctgagaacacgccaggaccggcatgttgatcaatgaatcgcagaggttcactgtcacctgggaacacggtcttgtgctctgtgcctctgtgtgttcctttccttcgcttgaacttgaagtgcacattggaagcacgcccatggtttccctttcccccaaggatgatgtattgcattttatggtgataaaaggacgcttttgaactacagtgctcgagtatttcttcactcccgatgtggtgtccaattcatcatgaatactcgttcagtcacaactcacaacatattctcacttgaaggcttgaagaaactgtcagcgtattttgtatttggcgc

SEQ ID NO: 70599 - DNA, 414 bp, Zea Mays
aaagtatacccccgtaactgttttgcgtcgtcccaccgtttcaatgaccacaaatgcatctccactattctagatgctcttgacgttgtcaccaaagcacatcatgtgctacctccacgccatcgtcgtgagaacctctgtggacggtgtgtgcctatcgccagagtcgtctggtcttccatcgatagctatgacctttcaagacgttgttgacattatttatgaaaactgttggaaaagttcatctcgttaagatatgtggcagatcctatgtgtcgccgctggaaaagttaggaaagattgttaacacggactatcgccaatccaattaaaaatacaaagcgaacccatattttttgtgtcgacatggacacctaaaaaaaatatagcaaccaaaaaagcgagagtcgttgg

SEQ ID NO: 70600 - DNA, 2588 bp, Zea Mays
gagaaaaagcattggaagccctgcccaagtgaataccatgcaaataatcctgagatgtccaagctgttgcacaaagcaattcgtgagaaacgtgataatgcgtacactgtctaccaacaacatcttgcaagccgtcctgtcaatgttcttcgagatcttcttgaattgaaaagtgatcgtgcacctattcctattggcaaagtggagtctgcaacctccattgttgaacgtttttgtactggtggaatgtccctaggagccatttcaagggaaacgcatgaagctattgcaattgcaatgaatagaataggtgggaaatctaattcaggagaaggtggtgaggatccaatccgttggaatcccctcactgatgttgtagatggttattctccaacacttcctcatctcaagggtcttcagaatggtgacacagccacaagtgccattaagcaggttgcatctggacgttttggagttacaccaacattcttagtaaatgctgaccaaattgagataaagattgcgcaaggtgcaaagcctggtgaaggaggtcaacttcctgggaaaaaagtcagtgcatacattgctcgtctgaggaactccaaacctggagttcctctaatctccccgcctccacaccatgacatttattctatcgaggatcttgcacagttgatttatgacctccatcagataaatcctaaagctaaagtatctgtaaagcttgtgtctgaagctggaattggaactgtagcttctggagtttcaaaggcgaatgcagacataattcagatatcaggtcatgatggtggtactggagctagcccaatcagctccatcaaacatgctgggggtccgtgggaacttggtcttacagaaacaaatcagacacttatacaaaatggattgagagagagggtagtacttagggtggacggtggattcaggagtggtcaagatgttcttattgctgctgctatgggagctgatgaatatggctttggttctgtagccatgatagctactggatgtgtcatggcacggatttgtcacacgaataattgtccagttggagtggctagtcagagagaagagcttcgtgcaaggtttcctggtgttcctggtgatcttgttaactacttcctctttgttgccgaggaggttcgagctgcattagcccagttgggttatgagaagttggatgacatcattgggcgaacagatttgcttaaaccaaagcacatctcattggtgaaaacgcagcacattgatcttggatacctcctatcaaatgctggattgcctgaatggagcagctcccaaattaggagccaggacgtccacactaatggccctgttcttgatgagacaatccttgcagatcctgagatagctgatgctattgagaatgagaaggaagtttccaaggcatttcaaatctataatgttgacagagctgtctgtggtcgggtagcaggtgtgattgccaagaagtatggagacacaggttttgctggccagctcaacatcacgttcaatggaagtgcagggcagtcctttggttgtttcctgactcctggaatgaacattcggctagttggggaggccaatgattatgttggaaagggtatggctggtggagaactggtggtagttcctgtagacaaaacaggatttgttcctgaggatgctactatagttggaaacacttgtctgtatggagctacaggtggtcaggtatttgtgagaggcaaggcaggagaaagatttgctgttagaaactctctatgtcaggcagtggttgagggcaccggagatcattgctgtgagtacatgactggtggctgcgtagtcgtacttggcaaagctgggaggaatgttgcagctggaatgactggtggtcttgcctacattctagatgaggatgatacacttgtcccaaaggtcaacaaggaaatcgtcaaaatgcagagagtgaatgctccagctgggcagatgcagctaaagggcttgattgaggcctatgttgataaaacgggcagcgagaaaggtattgcgattttgagggaatgggaggcctatttgccgctcttctggcaactggtaccgcccagtgaagaagactcgcctgaggcttgtgcagagtttgagagagtacttgccaagcaagcaaccacccaattgtctgcgaagtgatcgaatcagactacaggaaggtggtaggtgttttctatttgacacaaagtgatctcatcttatcacttcaagaaaatcgaagaccataaccggcgctctgaggcaccgaagtgcccgtctgaagactgcaactttgtggaggctctgcccaggccatctttttgagttgagctaacagaaccgagggttcttctcgacgctcgtgcacctaggtaacccctgtaaattggtttgctgacgctaggctgcaaggggcctgccctgtttgaactgctgtactgtacatgattcttggccgttgccctgtgtaattatgttttggttagctcgtaaatttatacgcatccaatggaggcatacaatgcaaaaaaataattaagatacaacaataa

SEQ ID NO: 70601 - DNA, 2593 bp, Zea Mays
tttcaccttcaagagaaaaagcattggaagccctgcccaagtgaataccatgcaaataatcctgagatgtccaagctgttgcacaaagcaattcgtgagaaacgtgataatgcgtacactgtctaccaacaacatcttgcaagccgtcctgtcaatgttcttcgagatcttcttgaattgaaaagtgatcgtgcacctattcctattggcaaagtggagtctgcaacctccattgttgaacgtttttgtactggtggaatgtccctaggagccatttcaagggaaacgcatgaagctattgcaattgcaatgaatagaataggtgggaaatctaattcaggagaaggtggtgaggatccaatccgttggaatcccctcactgatgttgtagatggttattctccaacacttcctcatctcaagggtcttcagaatggtgacacagccacaagtgccattaagcaggttgcatctggacgttttggagttacaccaacattcttagtaaatgctgaccaaattgagataaagattgcgcaaggtgcaaagcctggtgaaggaggtcaacttcctgggaaaaaagtcagtgcatacattgctcgtctgaggaactccaaacctggagttcctctaatctccccgcctccacaccatgacatttattctatcgaggatcttgcacagttgatttatgacctccatcagataaatcctaaagctaaagtatctgtaaagcttgtgtctgaagctggaattggaactgtagcttctggagtttcaaaggcgaatgcagacataattcaggtcatgatggtggtactggagctagcccaatcagctccatcaaacatgctgggggtccgtgggaacttggtcttacagaaacaaatcagacacttatacaaaatggattgagagagagggtagtacttagggtggacggtggattcaggagtggtcaagatgttcttattgctgctgctatgggagctgatgaatatggctttggttctgtagccatgatagctactggatgtgtcatggcacggatttgtcacacgaataattgtccagttggagtggctagtcagagagaagagcttcgtgcaaggtttcctggtgttcctggtgatcttgttaactacttcctctttgttgccgaggaggttcgagctgcattagcccagttgggttatgagaagttggatgacatcattgggcgaacagatttgcttaaaccaaagcacatctcattggtgaaaacgcagcacattgatcttggatacctcctatcaaatgctggattgcctgaatggagcagctcccaaattaggagccaggacgtccacactaatggccctgttcttgatgagacaatccttgcagatcctgagatagctgatgctattgagaatgagaaggaagtttccaaggcatttcaaatctataatgttgacagagctgtctgtggtcgggtagcaggtgtgattgccaagaagtatggagacacaggttttgctggccagctcaacatcacgttcaatggaagtgcagggcagtcctttggttgtttcctgactcctggaatgaacattcggctagttggggaggccaatgattatgttggaaagggtatggctggtggagaactggtggtagttcctgtagacaaaacaggatttgttcctgaggatgctactatagttggaaacacttgtctgtatggagctacaggtggtcaggtatttgtgagaggcaaggcaggagaaagatttgctgttagaaactctctatgtcaggcagtggttgagggcaccggagatcattgctgtgagtacatgactggtggctgcgtagtcgtacttggcaaagctgggaggaatgttgcagctggaatgactggtggtcttgcctacattctagatgaggatgatacacttgtcccaaaggtcaacaaggaaatcgtcaaaatgcagagagtgaatgctccagctgggcagatgcagctaaagggcttgattgaggcctatgttgataaaacgggcagcgagaaaggtattgcgattttgagggaatgggaggcctatttgccgctcttctggcaactggtaccgcccagtgaagaagactcgcctgaggcttgtgcagagtttgagagagtacttgccaagcaagcaaccacccaattgtctgcgaagtgatcgaatcagactacaggaaggtggtaggtgttttctatttgacacaaagtgatctcatcttatcacttcaagaaaatcgaagaccataaccggcgctctgaggcaccgaagtgcccgtctgaagactgcaactttgtggaggctctgcccaggccatctttttgagttgagctaacagaaccgagggttcttctcgacgctcgtgcacctaggtaacccctgtaaattggtttgctgacgctaggctgcaaggggcctgccctgtttgaactgctgtactgtacatgattcttggccgttgccctgtgtaattatgttttggttagctcgtaaatttatacgcatccaatggaggcatacaatgcaaaaaaataattaagatacaacaataa

SEQ ID NO: 70602 - DNA, 2973 bp, Zea Mays
ggttgccgaaaaagaggacacacctattgtgctgtgtgtccttatctggcactagaaacatgccggcaatggaggctgagcaacaaaactcttaatttgatgcggaatgggaagatgcccacagtgaccatcgagcaggcacaaaggaactttatcaaagcagtaaaatcaggtctgctcaaaattctttcaaaaatgggtatctcactgctctcaagctattgtggagctcagatctttgaaatttatggtcttggtcaagaagttgttgatcttgccttctgtggaagtgtatcgaaaattggaggtctcacacttgatgagggagaccttatcattctgggtgaaggcgttctctgaagatactgcaaagaggctagaaaactttggatttatccaatccagacctggaggtgaataccatgcaaataatcctgagatgtccaagctgttgcacaaagcaattcgtgagaaacgtgataatgcgtacactgtctaccaacaacatcttgcaagccgtcctgtcaatgttcttcgagatcttcttgaattgaaaagtgatcgtgcacctattcctattggcaaagtggagtctgcaacctccattgttgaacgtttttgtactggtggaatgtccctaggagccatttcaagggaaacgcatgaagctattgcaattgcaatgaatagaataggtgggaaatctaattcaggagaaggtggtgaggatccaatccgttggaatcccctcactgatgttgtagatggttattctccaacacttcctcatctcaagggtcttcagaatggtgacacagccacaagtgccattaagcaggttgcatctggacgttttggagttacaccaacattcttagtaaatgctgaccaaattgagataaagattgcgcaaggtgcaaagcctggtgaaggaggtcaacttcctgggaaaaaagtcagtgcatacattgctcgtctgaggaactccaaacctggagttcctctaatctccccgcctccacaccatgacatttattctatcgaggatcttgcacagttgatttatgacctccatcagataaatcctaaagctaaagtatctgtaaagcttgtgtctgaagctggaattggaactgtagcttctggagtttcaaaggcgaatgcagacataattcagatatcaggtcatgatggtggtactggagctagcccaatcagctccatcaaacatgctgggggtccgtgggaacttggtcttacagaaacaaatcagacacttatacaaaatggattgagagagagggtagtacttagggtggacggtggattcaggagtggtcaagatgttcttattgctgctgctatgggagctgatgaatatggctttggttctgtagccatgatagctactggatgtgtcatggcacggatttgtcacacgaataattgtccagttggagtggctagtcagagagaagagcttcgtgcaaggtttcctggtgttcctggtgatcttgttaactacttcctctttgttgccgaggaggttcgagctgcattagcccagttgggttatgagaagttggatgacatcattgggcgaacagatttgcttaaaccaaagcacatctcattggtgaaaacgcagcacattgatcttggatacctcctatcaaatgctggattgcctgaatggagcagctcccaaattaggagccaggacgtccacactaatggccctgttcttgatgagacaatccttgcagatcctgagatagctgatgctattgagaatgagaaggaagtttccaaggcatttcaaatctataatgttgacagagctgtctgtggtcgggtagcaggtgtgattgccaagaagtatggagacacaggttttgctggccagctcaacatcacgttcaatggaagtgcagggcagtcctttggttgtttcctgactcctggaatgaacattcggctagttggggaggccaatgattatgttggaaagggtatggctggtggagaactggtggtagttcctgtagacaaaacaggatttgttcctgaggatgctactatagttggaaacacttgtctgtatggagctacaggtggtcaggtatttgtgagaggcaaggcaggagaaagatttgctgttagaaactctctatgtcaggcagtggttgagggcaccggagatcattgctgtgagtacatgactggtggctgcgtagtcgtacttggcaaagctgggaggaatgttgcagctggaatgactggtggtcttgcctacattctagatgaggatgatacacttgtcccaaaggtcaacaaggaaatcgtcaaaatgcagagagtgaatgctccagctgggcagatgcagctaaagggcttgattgaggcctatgttgataaaacgggcagcgagaaaggtattgcgattttgagggaatgggaggcctatttgccgctcttctggcaactggtaccgcccagtgaagaagactcgcctgaggcttgtgcagagtttgagagagtacttgccaagcaagcaaccacccaattgtctgcgaagtgatcgaatcagactacaggaaggtggtaggtgttttctatttgacacaaagtgatctcatcttatcacttcaagaaaatcgaagaccataaccggcgctctgaggcaccgaagtgcccgtctgaagactgcaactttgtggaggctctgcccaggccatctttttgagttgagctaacagaaccgagggttcttctcgacgctcgtgcacctaggtaacccctgtaaattggtttgctgacgctaggctgcaaggggcctgccctgtttgaactgctgtactgtacatgattcttggccgttgccctgtgtaattatgttttggttagctcgtaaatttatacgcatccaatggaggcatacaatgcaaaaaaataattaagatacaacaataa

SEQ ID NO: 70603 - DNA, 3495 bp, Zea Mays
caaagcttgggttctgtattgtgaaattcaatatcgtcacgccaaaactcccaaaaatgttacaaatcctgcaattgatccccttagagaaggtttagttatgtctcttgaggttaatattgggaaaagaggcaacatcttggaggttggccctgaaaatgctgatcaggttgcactatcaagccctgtgctgaatgaaggtgaactggaaactctattgaatgactcaaaacttaagcccaaagtactgtcaacatacttcgatattcgtaaaggtctagatggttcacttgataagacaattcaggctctttgtgaagaagctgatgctgctgtgcggagcggctctcaacttcttgttctttctgatcgttctgaagcacctgaacctactcgtcctgccataccaatacttctagctgttggcgccatccaccagcatttgattcagaatggtctccgtatgtctgcttctattgttgctgatactgctcagtgttttagcacacatcattttgcctgtctgatcggatatggtgccagtgctgtgtgtccttatctggcactagaaacatgccggcaatggaggctgagcaacaaaactcttaatttgatgcggaatgggaagatgcccacagtgaccatcgagcaggcacaaaggaactttatcaaagcagtaaaatcaggtctgctcaaaattctttcaaaaatgggtatctcactgctctcaagctattgtggagctcagatctttgaaatttatggtcttggtcaagaagttgttgatcttgccttctgtggaagtgtatcgaaaattggaggtctcacacttgatgagctgggtagggagaccttatcattctgggtgaaggcgttctctgaagatactgcaaagaggctagaaaactttggatttatccaatccagacctggaggtgaataccatgcaaataatcctgagatgtccaagctgttgcacaaagcaattcgtgagaaacgtgataatgcgtacactgtctaccaacaacatcttgcaagccgtcctgtcaatgttcttcgagatcttcttgaattgaaaagtgatcgtgcacctattcctattggcaaagtggagtctgcaacctccattgttgaacgtttttgtactggtggaatgtccctaggagccatttcaagggaaacgcatgaagctattgcaattgcaatgaatagaataggtgggaaatctaattcaggagaaggtggtgaggatccaatccgttggaatcccctcactgatgttgtagatggttattctccaacacttcctcatctcaagggtcttcagaatggtgacacagccacaagtgccattaagcaggttgcatctggacgttttggagttacaccaacattcttagtaaatgctgaccaaattgagataaagattgcgcaaggtgcaaagcctggtgaaggaggtcaacttcctgggaaaaaagtcagtgcatacattgctcgtctgaggaactccaaacctggagttcctctaatctccccgcctccacaccatgacatttattctatcgaggatcttgcacagttgatttatgacctccatcagataaatcctaaagctaaagtatctgtaaagcttgtgtctgaagctggaattggaactgtagcttctggagtttcaaaggcgaatgcagacataattcagatatcaggtcatgatggtggtactggagctagcccaatcagctccatcaaacatgctgggggtccgtgggaacttggtcttacagaaacaaatcagacacttatacaaaatggattgagagagagggtagtacttagggtggacggtggattcaggagtggtcaagatgttcttattgctgctgctatgggagctgatgaatatggctttggttctgtagccatgatagctactggatgtgtcatggcacggatttgtcacacgaataattgtccagttggagtggctagtcagagagaagagcttcgtgcaaggtttcctggtgttcctggtgatcttgttaactacttcctctttgttgccgaggaggttcgagctgcattagcccagttgggttatgagaagttggatgacatcattgggcgaacagatttgcttaaaccaaagcacatctcattggtgaaaacgcagcacattgatcttggatacctcctatcaaatgctggattgcctgaatggagcagctcccaaattaggagccaggacgtccacactaatggccctgttcttgatgagacaatccttgcagatcctgagatagctgatgctattgagaatgagaaggaagtttccaaggcatttcaaatctataatgttgacagagctgtctgtggtcgggtagcaggtgtgattgccaagaagtatggagacacaggttttgctggccagctcaacatcacgttcaatggaagtgcagggcagtcctttggttgtttcctgactcctggaatgaacattcggctagttggggaggccaatgattatgttggaaagggtatggctggtggagaactggtggtagttcctgtagacaaaacaggatttgttcctgaggatgctactatagttggaaacacttgtctgtatggagctacaggtggtcaggtatttgtgagaggcaaggcaggagaaagatttgctgttagaaactctctatgtcaggcagtggttgagggcaccggagatcattgctgtgagtacatgactggtggctgcgtagtcgtacttggcaaagctgggaggaatgttgcagctggaatgactggtggtcttgcctacattctagatgaggatgatacacttgtcccaaaggtcaacaaggaaatcgtcaaaatgcagagagtgaatgctccagctgggcagatgcagctaaagggcttgattgaggcctatgttgataaaacgggcagcgagaaaggtattgcgattttgagggaatgggaggcctatttgccgctcttctggcaactggtaccgcccagtgaagaagactcgcctgaggcttgtgcagagtttgagagagtacttgccaagcaagcaaccacccaattgtctgcgaagtgatcgaatcagactacaggaaggtggtaggtgttttctatttgacacaaagtgatctcatcttatcacttcaagaaaatcgaagaccataaccggcgctctgaggcaccgaagtgcccgtctgaagactgcaactttgtggaggctctgcccaggccatctttttgagttgagctaacagaaccgagggttcttctcgacgctcgtgcacctaggtaacccctgtaaattggtttgctgacgctaggctgcaaggggcctgccctgtttgaactgctgtactgtacatgattcttggccgttgccctgtgtaattatgttttggttagctcgtaaatttatacgcatccaatggaggcatacaatgcaaaaaaataattaagatacaacaataa

SEQ ID NO: 70604 - DNA, 3728 bp, Zea Mays
ctaaatgtaacattcagtattcagttggtgttataccaatggatgagtcaaaagtagtaatgaaaggacgattaggtcctggaatgatgataactgttgatctacagactggacaggtgcttgaaaacacagaagtaaagaaaactgtggcttcagcgagcccctatgggacttggttgcaagaatgcacacgtttgataaagcctgtcaactttctctcttcaactatcatggacaatgagactgttttgagacatcaacaggcatttggctattcaagtgaagatgtgcaaatggtgattgaatcaatggcttcacaaggaaaggaaccaacattttgtatgggcgatgacattccattagctgtgttatcacaaagaccacacttgttatatgattatttcaagcagcggtttgcgcaggttacaaatcctgcaattgatccccttagagaaggtttagttatgtctcttgaggttaatattgggaaaagaggcaacatcttggaggttggccctgaaaatgctgatcaggttgcactatcaagccctgtgctgaatgaaggtgaactggaaactctattgaatgactcaaaacttaagcccaaagtactgtcaacatacttcgatattcgtaaaggtctagatggttcacttgataagacaattcaggctctttgtgaagaagctgatgctgctgtgcggagcggctctcaacttcttgttctttctgatcgttctgaagcacctgaacctactcgtcctgccataccaatacttctagctgttggcgccatccaccagcatttgattcagaatggtctccgtatgtctgcttctattgttgctgatactgctcagtgttttagcacacatcattttgcctgtctgatcggatatggtgccagtgctgtgtgtccttatctggcactagaaacatgccggcaatggaggctgagcaacaaaactcttaatttgatgcggaatgggaagatgcccacagtgaccatcgagcaggcacaaaggaactttatcaaagcagtaaaatcaggtctgctcaaaattctttcaaaaatgggtatctcactgctctcaagctattgtggagctcagatctttgaaatttatggtcttggtcaagaagttgttgatcttgccttctgtggaagtgtatcgaaaattggaggtctcacacttgatgaggggagaccttatcattctgggtgaaggcgttctctgaagatactgcaaagaggctagaaaactttggatttatccaatccagacctggaggtgaataccatgcaaataatcctgagatgtccaagctgttgcacaaagcaattcgtgagaaacgtgataatgcgtacactgtctaccaacaacatcttgcaagccgtcctgtcaatgttcttcgagatcttcttgaattgaaaagtgatcgtgcacctattcctattggcaaagtggagtctgcaacctccattgttgaacgtttttgtactggtggaatgtccctaggagccatttcaagggaaacgcatgaagctattgcaattgcaatgaatagaataggtgggaaatctaattcaggagaaggtggtgaggatccaatccgttggaatcccctcactgatgttgtagatggttattctccaacacttcctcatctcaagggtcttcagaatggtgacacagccacaagtgccattaagcaggttgcatctggacgttttggagttacaccaacattcttagtaaatgctgaccaaattgagataaagattgcgcaaggtgcaaagcctggtgaaggaggtcaacttcctgggaaaaaagtcagtgcatacattgctcgtctgaggaactccaaacctggagttcctctaatctccccgcctccacaccatgacatttattctatcgaggatcttgcacagttgatttatgacctccatcagataaatcctaaagctaaagtatctgtaaagcttgtgtctgaagctggaattggaactgtagcttctggagtttcaaaggcgaatgcagacataattcagatatcaggtcatgatggtggtactggagctagcccaatcagctccatcaaacatgctgggggtccgtgggaacttggtcttacagaaacaaatcagccatgatagctactggatgtgtcatggcacggatttgtcacacgaataattgtccagttggagtggctagtcagagagaagagcttcgtgcaaggtttcctggtgttcctggtgatcttgttaactacttcctctttgttgccgaggaggttcgagctgcattagcccagttgggttatgagaagttggatgacatcattgggcgaacagatttgcttaaaccaaagcacatctcattggtgaaaacgcagcacattgatcttggatacctcctatcaaatgctggattgcctgaatggagcagctcccaaattaggagccaggacgtccacactaatggccctgttcttgatgagacaatccttgcagatcctgagatagctgatgctattgagaatgagaaggaagtttccaaggcatttcaaatctataatgttgacagagctgtctgtggtcgggtagcaggtgtgattgccaagaagtatggagacacaggttttgctggccagctcaacatcacgttcaatggaagtgcagggcagtcctttggttgtttcctgactcctggaatgaacattcggctagttggggaggccaatgattatgttggaaagggtatggctggtggagaactggtggtagttcctgtagacaaaacaggatttgttcctgaggatgctactatagttggaaacacttgtctgtatggagctacaggtggtcaggtatttgtgagaggcaaggcaggagaaagatttgctgttagaaactctctatgtcaggcagtggttgagggcaccggagatcattgctgtgagtacatgactggtggctgcgtagtcgtacttggcaaagctgggaggaatgttgcagctggaatgactggtggtcttgcctacattctagatgaggatgatacacttgtcccaaaggtcaacaaggaaatcgtcaaaatgcagagagtgaatgctccagctgggcagatgcagctaaagggcttgattgaggcctatgttgataaaacgggcagcgagaaaggtattgcgattttgagggaatgggaggcctatttgccgctcttctggcaactggtaccgcccagtgaagaagactcgcctgaggcttgtgcagagtttgagagagtacttgccaagcaagcaaccacccaattgtctgcgaagtgatcgaatcagactacaggaaggtggtaggtgttttctatttgacacaaagtgatctcatcttatcacttcaagaaaatcgaagaccataaccggcgctctgaggcaccgaagtgcccgtctgaagactgcaactttgtggaggctctgcccaggccatctttttgagttgagctaacagaaccgagggttcttctcgacgctcgtgcacctaggtaacccctgtaaattggtttgctgacgctaggctgcaaggggcctgccctgtttgaactgctgtactgtacatgattcttggccgttgccctgtgtaattatgttttggttagctcgtaaatttatacgcatccaatggaggcatacaatgcaaaaaaataattaagatacaacaataa

SEQ ID NO: 70605 - DNA, 3871 bp, Zea Mays
ttcagatgtcacaagctaaactaaatgtaacattcagtattcagttggtgttataccaatggatgagtcaaaagtagtaatgaaaggacgattaggtcctggaatgatgataactgttgatctacagactggacaggtgcttgaaaacacagaagtaaagaaaactgtggcttcagcgagcccctatgggacttggttgcaagaatgcacacgtttgataaagcctgtcaactttctctcttcaactatcatggacaatgagactgttttgagacatcaacaggcatttggctattcaagtgaagatgtgcaaatggtgattgaatcaatggcttcacaaggaaaggaaccaacattttgtatgggcgatgacattccattagctgtgttatcacaaagaccacacttgttatatgattatttcaagcagcggtttgcgcaggttacaaatcctgcaattgatccccttagagaaggtttagttatgtctcttgaggttaatattgggaaaagaggcaacatcttggaggttggccctgaaaatgctgatcaggttgcactatcaagccctgtgctgaatgaaggtgaactggaaactctattgaatgactcaaaacttaagcccaaagtactgtcaacatacttcgatattcgtaaaggtctagatggttcacttgataagacaattcaggctctttgtgaagaagctgatgctgctgtgcggagcggctctcaacttcttgttctttctgatcgttctgaagcacctgaacctactcgtcctgccataccaatacttctagctgttggcgccatccaccagcatttgattcagaatggtctccgtatgtctgcttctattgttgctgatactgctcagtgttttagcacacatcattttgcctgtctgatcggatatggtgccagtgctgtgtgtccttatctggcactagaaacatgccggcaatggaggctgagcaacaaaactcttaatttgatgcggaatgggaagatgcccacagtgaccatcgagcaggcacaaaggaactttatcaaagcagtaaaatcaggtctgctcaaaattctttcaaaaatgggtatctcactgctctcaagctattgtggagctcagatctttgaaatttatggtcttggtcaagaagttgttgatcttgccttctgtggaagtgtatcgaaaattggaggtctcacacttgatgagggagaccttatcattctgggtgaaggcgttctctgaagatactgcaaagaggctagaaaactttggatttatccaatccagacctggaggtgaataccatgcaaataatcctgagatgtccaagctgttgcacaaagcaattcgtgagaaacgtgataatgcgtacactgtctaccaacaacatcttgcaagccgtcctgtcaatgttcttcgagatcttcttgaattgaaaagtgatcgtgcacctattcctattggcaaagtggagtctgcaacctccattgttgaacgtttttgtactggtggaatgtccctaggagccatttcaagggaaacgcatgaagctattgcaattgcaatgaatagaataggtgggaaatctaattcaggagaaggtggtgaggatccaatccgttggaatcccctcactgatgttgtagatggttattctccaacacttcctcatctcaagggtcttcagaatggtgacacagccacaagtgccattaagcaggttgcatctggacgttttggagttacaccaacattcttagtaaatgctgaccaaattgagataaagattgcgcaaggtgcaaagcctggtgaaggaggtcaacttcctgggaaaaaagtcagtgcatacattgctcgtctgaggaactccaaacctggagttcctctaatctccccgcctccacaccatgacatttattctatcgaggatcttgcacagttgatttatgacctccatcagataaatcctaaagctaaagtatctgtaaagcttgtgtctgaagctggaattggaactgtagcttctggagtttcaaaggcgaatgcagacataattcagatatcaggtcatgatggtggtactggagctagcccaatcagctccatcaaacatgctgggggtccgtgggaacttggtcttacagaaacaaatcagacacttatacaaaatggattgagagagagggtagtacttagggtggacggtggattcaggagtggtcaagatgttcttattgctgctgctatgggagctgatgaatatggctttggttctgtagccatgatagctactggatgtgtcatggcacggatttgtcacacgaataattgtccagttggagtggctagtcagagagaagagcttcgtgcaaggtttcctggtgttcctggtgatcttgttaactacttcctctttgttgccgaggaggttcgagctgcattagcccagttgggttatgagaagttggatgacatcattgggcgaacagatttgcttaaaccaaagcacatctcattggtgaaaacgcagcacattgatcttggatacctcctatcaaatgctggattgcctgaatggagcagctcccaaattaggagccaggacgtccacactaatggccctgttcttgatgagacaatccttgcagatcctgagatagctgatgctattgagaatgagaaggaagtttccaaggcatttcaaatctataatgttgacagagctgtctgtggtcgggtagcaggtgtgattgccaagaagtatggagacacaggttttgctggccagctcaacatcacgttcaatggaagtgcagggcagtcctttggttgtttcctgactcctggaatgaacattcggctagttggggaggccaatgattatgttggaaagggtatggctggtggagaactggtggtagttcctgtagacaaaacaggatttgttcctgaggatgctactatagttggaaacacttgtctgtatggagctacaggtggtcaggtatttgtgagaggcaaggcaggagaaagatttgctgttagaaactctctatgtcaggcagtggttgagggcaccggagatcattgctgtgagtacatgactggtggctgcgtagtcgtacttggcaaagctgggaggaatgttgcagctggaatgactggtggtcttgcctacattctagatgaggatgatacacttgtcccaaaggtcaacaaggaaatcgtcaaaatgcagagagtgaatgctccagctgggcagatgcagctaaagggcttgattgaggcctatgttgataaaacgggcagcgagaaaggtattgcgattttgagggaatgggaggcctatttgccgctcttctggcaactggtaccgcccagtgaagaagactcgcctgaggcttgtgcagagtttgagagagtacttgccaagcaagcaaccacccaattgtctgcgaagtgatcgaatcagactacaggaaggtggtaggtgttttctatttgacacaaagtgatctcatcttatcacttcaagaaaatcgaagaccataaccggcgctctgaggcaccgaagtgcccgtctgaagactgcaactttgtggaggctctgcccaggccatctttttgagttgagctaacagaaccgagggttcttctcgacgctcgtgcacctaggtaacccctgtaaattggtttgctgacgctaggctgcaaggggcctgccctgtttgaactgctgtactgtacatgattcttggccgttgccctgtgtaattatgttttggttagctcgtaaatttatacgcatccaatggaggcatacaatgcaaaaaaataattaagatacaacaataa

SEQ ID NO: 70606 - DNA, 5717 bp, Zea Mays
ccgcctcccccgacccgctccgctccgctccgctccatccatccctcccgtccccagctccccggcttcccgctgcccctgcgtgcgtgtctctggctgtgcctgtgcgccccccggtgcacccgagaggccgagaggcgaaggctcgtcgtcgcgttgctcgtcgcctcgcctcgcctataactactccctccgctccgcgcctccgctccacacctattccgccacccgcctctcacctctccagtccccacccccgcccccgtccgctcccctatcctgttcgttcccctcctctccacacgatcccctcccttgtcggcttccgcgcgggcgggagtggccgcggccacgactccaccgcctcctgctcgcgccaccacccctcggcccctcgcggcgccgcgcgaccggcgcgtggtgcgcgtttgcctgcccgtcgtcggccctttcttattagttattattaggcggaggagaggctagctctgcggggggtcgccgcgcgccgccgaatcggatcacacgcctccccttcccgccaggccagggggccatggccacgctcccgcgcgccgcgccgcccacgcccgccgcgctgctcccgctgccccgcgccgcgccgccgctgctgctcgccgggagggccgccgccgcgcgccgctctcggctgcgcgcgcggggcccgtccgcggcggcgcgccggagctgggtcgtcgcctccgccgcttcctcctcctcacgggccgtggtcggcggcgtcgcccgccgggaggcccctcccgcgccgcagaagcccacgcagcaggctgcggacttgaaccatatcttgtctgaacgtggagcttgtggtgttggatttgtcgcaaacttgaaaaatatgtcttcatttgacattgactgatgagtgccgttccatgggacttgtttgatgactgggccagcaagcaagggcttgctctctttgacagaagaaatacaggtgtaggcatggtcttccttccacaagatgagaagtcaatggaagaagccaaagctgcaactgaaaaggtttttgtggatgaaggccttgaggttcttggttggagacccgttccttttaatgtatcagttgtaggtcggaatgcaaaagaaaccatgcctaatatacaacaaatatttgtgaaagttgcaaaagaagataatgctgatgacatagagagagaattatacatcagccgaaagctgatagagcgggctgcaaaatcttttagttgggcagatgaactttatttctgctctttatcaagcagaacgattgtctacaagggaatgctacgatctgaggttcttgggcaattctatttagaccttcagaatgaactgtataaatcaccttttgccatatatcatcgaagattcagtacaaatacaagtcctcgatggcctcttgctcaacctatgaggttacttggacacaacggagaaattaacacaatacaggggaacttgaactggatgcgatcaagggaaaccacactaaagtctcctgtatggcgaggtcgtgaacatgaaatttgcccgtttggtgaccctaaagcatctgattcagcgaatcttgacagtacagctgaattgctgctaagaagtggtaggagtcctgcagaagctcttatgattctcgtccctgaggcatataagaaccatccaacattatctataaaataccccgaggtaactgacttctatgactactacaaaggacaaatggaagcttgggatggacctgctttacttctatttagtgatgggaggactgtaggagcaactcttgataggaatggtctccgtccagcacgctattggagaacgtcagatgacttcgtttatgtcgcatctgaagttggtgttataccaatggatgagtcaaaagtagtaatgaaaggacgattaggtcctggaatgatgataactgttgatctacagactggacaggtgcttgaaaacacagaagtaaagaaaactgtggcttcagcgagcccctatgggacttggttgcaagaatgcacacgtttgataaagcctgtcaactttctctcttcaactatcatggacaatgagactgttttgagacatcaacaggcatttggctattcaagtgaagatgtgcaaatggtgattgaatcaatggcttcacaaggaaaggaaccaacattttgtatgggcgatgacattccattagctgtgttatcacaaagaccacacttgttatatgattatttcaagcagcggtttgcgcaggttacaaatcctgcaattgatccccttagagaaggtttagttatgtctcttgaggttaatattgggaaaagaggcaacatcttggaggttggccctgaaaatgctgatcaggttgcactatcaagccctgtgctgaatgaaggtgaactggaaactctattgaatgactcaaaacttaagcccaaagtactgtcaacatacttcgatattcgtaaaggtctagatggttcacttgataagacaattcaggctctttgtgaagaagctgatgctgctgtgcggagcggctctcaacttcttgttctttctgatcgttctgaagcacctgaacctactcgtcctgccataccaatacttctagctgttggcgccatccaccagcatttgattcagaatggtctccgtatgtctgcttctattgttgctgatactgctcagtgttttagcacacatcattttgcctgtctgatcggatatggtgccagtgctgtgtgtccttatctggcactagaaacatgccggcaatggaggctgagcaacaaaactcttaatttgatgcggaatgggaagatgcccacagtgaccatcgagcaggcacaaaggaactttatcaaagcagtaaaatcaggtctgctcaaaattctttcaaaaatgggtatctcactgctctcaagctattgtggagctcagatctttgaaatttatggtcttggtcaagaagttgttgatcttgccttctgtggaagtgtatcgaaaattggaggtctcacacttgatgagctgggtagggagaccttatcattctgggtgaaggcgttctctgaagatactgcaaagaggctagaaaactttggatttatccaatccagacctggaggtgaataccatgcaaataatcctgagatgtccaagctgttgcacaaagcaattcgtgagaaacgtgataatgcgtacactgtctaccaacaacatcttgcaagccgtcctgtcaatgttcttcgagatcttcttgaattgaaaagtgatcgtgcacctattcctattggcaaagtggagtctgcaacctccattgttgaacgtttttgtactggtggaatgtccctaggagccatttcaagggaaacgcatgaagctattgcaattgcaatgaatagaataggtgggaaatctaattcaggagaaggtggtgaggatccaatccgttggaatcccctcactgatgttgtagatggttattctccaacacttcctcatctcaagggtcttcagaatggtgacacagccacaagtgccattaagcaggttgcatctggacgttttggagttacaccaacattcttagtaaatgctgaccaaattgagataaagattgcgcaaggtgcaaagcctggtgaaggaggtcaacttcctgggaaaaaagtcagtgcatacattgctcgtctgaggaactccaaacctggagttcctctaatctccccgcctccacaccatgacatttattctatcgaggatcttgcacagttgatttatgacctccatcagataaatcctaaagctaaagtatctgtaaagcttgtgtctgaagctggaattggaactgtagcttctggagtttcaaaggcgaatgcagacataattcagatatcaggtcatgatggtggtactggagctagcccaatcagctccatcaaacatgctgggggtccgtgggaacttggtcttacagaaacaaatcagacacttatacaaaatggattgagagagagggtagtacttagggtggacggtggattcaggagtggtcaagatgttcttattgctgctgctatgggagctgatgaatatggctttggttctgtagccatgatagctactggatgtgtcatggcacggatttgtcacacgaataattgtccagttggagtggctagtcagagagaagagcttcgtgcaaggtttcctggtgttcctggtgatcttgttaactacttcctctttgttgccgaggaggttcgagctgcattagcccagttgggttatgagaagttggatgacatcattgggcgaacagatttgcttaaaccaaagcacatctcattggtgaaaacgcagcacattgatcttggatacctcctatcaaatgctggattgcctgaatggagcagctcccaaattaggagccaggacgtccacactaatggccctgttcttgatgagacaatccttgcagatcctgagatagctgatgctattgagaatgagaaggaagtttccaaggcatttcaaatctataatgttgacagagctgtctgtggtcgggtagcaggtgtgattgccaagaagtatggagacacaggttttgctggccagctcaacatcacgttcaatggaagtgcagggcagtcctttggttgtttcctgactcctggaatgaacattcggctagttggggaggccaatgattatgttggaaagggtatggctggtggagaactggtggtagttcctgtagacaaaacaggatttgttcctgaggatgctactatagttggaaacacttgtctgtatggagctacaggtggtcaggtatttgtgagaggcaaggcaggagaaagatttgctgttagaaactctctatgtcaggcagtggttgagggcaccggagatcattgctgtgagtacatgactggtggctgcgtagtcgtacttggcaaagctgggaggaatgttgcagctggaatgactggtggtcttgcctacattctagatgaggatgatacacttgtcccaaaggtcaacaaggaaatcgtcaaaatgcagagagtgaatgctccagctgggcagatgcagctaaagggcttgattgaggcctatgttgataaaacgggcagcgagaaaggtattgcgattttgagggaatgggaggcctatttgccgctcttctggcaactggtaccgcccagtgaagaagactcgcctgaggcttgtgcagagtttgagagagtacttgccaagcaagcaaccacccaattgtctgcgaagtgatcgaatcagactacaggaaggtggtaggtgttttctatttgacacaaagtgatctcatcttatcacttcaagaaaatcgaagaccataaccggcgctctgaggcaccgaagtgcccgtctgaagactgcaactttgtggaggctctgcccaggccatctttttgagttgagctaacagaaccgagggttcttctcgacgctcgtgcacctaggtaacccctgtaaattggtttgctgacgctaggctgcaaggggcctgccctgtttgaactgctgtactgtacatgattcttggccgttgccctgtgtaattatgttttggttagctcgtaaatttatacgcatccaatggaggcatacaatgcaaaaaaataattaagatacaacaataa

SEQ ID NO: 70607 - DNA, 5844 bp, Zea Mays
ccgcctcccccgacccgctccgctccgctccgctccatccatccctcccgtccccagctccccggcttcccgctgcccctgcgtgcgtgtctctggctgtgcctgtgcgccccccggtgcacccgagaggccgagaggcgaaggctcgtcgtcgcgttgctcgtcgcctcgcctcgcctataactactccctccgctccgcgcctccgctccacacctattccgccacccgcctctcacctctccagtccccacccccgcccccgtccgctcccctatcctgttcgttcccctcctctccacacgatcccctcccttgtcggcttccgcgcgggcgggagtggccgcggccacgactccaccgcctcctgctcgcgccaccacccctcggcccctcgcggcgccgcgcgaccggcgcgtggtgcgcgtttgcctgcccgtcgtcggccctttcttattagttattattaggcggaggagaggctagctctgcggggggtcgccgcgcgccgccgaatcggatcacacgcctccccttcccgccaggccagggggccatggccacgctcccgcgcgccgcgccgcccacgcccgccgcgctgctcccgctgccccgcgccgcgccgccgctgctgctcgccgggagggccgccgccgcgcgccgctctcggctgcgcgcgcggggcccgtccgcggcggcgcgccggagctgggtcgtcgcctccgccgcttcctcctcctcacgggccgtggtcggcggcgtcgcccgccgggaggcccctcccgcgccgcagaagcccacgcagcaggctgcggacttgaaccatatcttgtctgaacgtggagcttgtggtgttggatttgtcgcaaacttgaaaaatatgtcttcatttgacattgttcgtgatgctcttatggctcttgggtgcatggagcaccgtggtggttgtggagcggacagtgactcaggtgatggtgcaggactgatgagtgccgttccatgggacttgtttgatgactgggccagcaagcaagggcttgctctctttgacagaagaaatacaggtgtaggcatggtcttccttccacaagatgagaagtcaatggaagaagccaaagctgcaactgaaaaggtttttgtggatgaaggccttgaggttcttggttggagacccgttccttttaatgtatcagttgtaggtcggaatgcaaaagaaaccatgcctaatatacaacaaatatttgtgaaagttgcaaaagaagataatgctgatgacatagagagagaattatacatcagccgaaagctgatagagcgggctgcaaaatcttttagttgggcagatgaactttatttctgctctttatcaagcagaacgattgtctacaagggaatgctacgatctgaggttcttgggcaattctatttagaccttcagaatgaactgtataaatcaccttttgccatatatcatcgaagattcagtacaaatacaagtcctcgatggcctcttgctcaacctatgaggttacttggacacaacggagaaattaacacaatacaggggaacttgaactggatgcgatcaagggaaaccacactaaagtctcctgtatggcgaggtcgtgaacatgaaatttgcccgtttggtgaccctaaagcatctgattcagcgaatcttgacagtacagctgaattgctgctaagaagtggtaggagtcctgcagaagctcttatgattctcgtccctgaggcatataagaaccatccaacattatctataaaataccccgaggtaactgacttctatgactactacaaaggacaaatggaagcttgggatggacctgctttacttctatttagtgatgggaggactgtaggagcaactcttgataggaatggtctccgtccagcacgctattggagaacgtcagatgacttcgtttatgtcgcatctgaaagttcagatgtcacaagctaaactaaatgtaacattcagtattcagttggtgttataccaatggatgagtcaaaagtagtaatgaaaggacgattaggtcctggaatgatgataactgttgatctacagactggacaggtgcttgaaaacacagaagtaaagaaaactgtggcttcagcgagcccctatgggacttggttgcaagaatgcacacgtttgataaagcctgtcaactttctctcttcaactatcatggacaatgagactgttttgagacatcaacaggcatttggctattcaagtgaagatgtgcaaatggtgattgaatcaatggcttcacaaggaaaggaaccaacattttgtatgggcgatgacattccattagctgtgttatcacaaagaccacacttgttatatgattatttcaagcagcggtttgcgcaggttacaaatcctgcaattgatccccttagagaaggtttagttatgtctcttgaggttaatattgggaaaagaggcaacatcttggaggttggccctgaaaatgctgatcaggttgcactatcaagccctgtgctgaatgaaggtgaactggaaactctattgaatgactcaaaacttaagcccaaagtactgtcaacatacttcgatattcgtaaaggtctagatggttcacttgataagacaattcaggctctttgtgaagaagctgatgctgctgtgcggagcggctctcaacttcttgttctttctgatcgttctgaagcacctgaacctactcgtcctgccataccaatacttctagctgttggcgccatccaccagcatttgattcagaatggtctccgtatgtctgcttctattgttgctgatactgctcagtgttttagcacacatcattttgcctgtctgatcggatatggtgccagtgctgtgtgtccttatctggcactagaaacatgccggcaatggaggctgagcaacaaaactcttaatttgatgcggaatgggaagatgcccacagtgaccatcgagcaggcacaaaggaactttatcaaagcagtaaaatcaggtctgctcaaaattctttcaaaaatgggtatctcactgctctcaagctattgtggagctcagatctttgaaatttatggtcttggtcaagaagttgttgatcttgccttctgtggaagtgtatcgaaaattggaggtctcacacttgatgagctgggtagggagaccttatcattctgggtgaaggcgttctctgaagatactgcaaagaggctagaaaactttggatttatccaatccagacctggaggtgaataccatgcaaataatcctgagatgtccaagctgttgcacaaagcaattcgtgagaaacgtgataatgcgtacactgtctaccaacaacatcttgcaagccgtcctgtcaatgttcttcgagatcttcttgaattgaaaagtgatcgtgcacctattcctattggcaaagtggagtctgcaacctccattgttgaacgtttttgtactggtggaatgtccctaggagccatttcaagggaaacgcatgaagctattgcaattgcaatgaatagaataggtgggaaatctaattcaggagaaggtggtgaggatccaatccgttggaatcccctcactgatgttgtagatggttattctccaacacttcctcatctcaagggtcttcagaatggtgacacagccacaagtgccattaagcaggttgcatctggacgttttggagttacaccaacattcttagtaaatgctgaccaaattgagataaagattgcgcaaggtgcaaagcctggtgaaggaggtcaacttcctgggaaaaaagtcagtgcatacattgctcgtctgaggaactccaaacctggagttcctctaatctccccgcctccacaccatgacatttattctatcgaggatcttgcacagttgatttatgacctccatcagataaatcctaaagctaaagtatctgtaaagcttgtgtctgaagctggaattggaactgtagcttctggagtttcaaaggcgaatgcagacataattcagatatcaggtcatgatggtggtactggagctagcccaatcagctccatcaaacatgctgggggtccgtgggaacttggtcttacagaaacaaatcagacacttatacaaaatggattgagagagagggtagtacttagggtggacggtggattcaggagtggtcaagatgttcttattgctgctgctatgggagctgatgaatatggctttggttctgtagccatgatagctactggatgtgtcatggcacggatttgtcacacgaataattgtccagttggagtggctagtcagagagaagagcttcgtgcaaggtttcctggtgttcctggtgatcttgttaactacttcctctttgttgccgaggaggttcgagctgcattagcccagttgggttatgagaagttggatgacatcattgggcgaacagatttgcttaaaccaaagcacatctcattggtgaaaacgcagcacattgatcttggatacctcctatcaaatgctggattgcctgaatggagcagctcccaaattaggagccaggacgtccacactaatggccctgttcttgatgagacaatccttgcagatcctgagatagctgatgctattgagaatgagaaggaagtttccaaggcatttcaaatctataatgttgacagagctgtctgtggtcgggtagcaggtgtgattgccaagaagtatggagacacaggttttgctggccagctcaacatcacgttcaatggaagtgcagggcagtcctttggttgtttcctgactcctggaatgaacattcggctagttggggaggccaatgattatgttggaaagggtatggctggtggagaactggtggtagttcctgtagacaaaacaggatttgttcctgaggatgctactatagttggaaacacttgtctgtatggagctacaggtggtcaggtatttgtgagaggcaaggcaggagaaagatttgctgttagaaactctctatgtcaggcagtggttgagggcaccggagatcattgctgtgagtacatgactggtggctgcgtagtcgtacttggcaaagctgggaggaatgttgcagctggaatgactggtggtcttgcctacattctagatgaggatgatacacttgtcccaaaggtcaacaaggaaatcgtcaaaatgcagagagtgaatgctccagctgggcagatgcagctaaagggcttgattgaggcctatgttgataaaacgggcagcgagaaaggtattgcgattttgagggaatgggaggcctatttgccgctcttctggcaactggtaccgcccagtgaagaagactcgcctgaggcttgtgcagagtttgagagagtacttgccaagcaagcaaccacccaattgtctgcgaagtgatcgaatcagactacaggaaggtggtaggtgttttctatttgacacaaagtgatctcatcttatcacttcaagaaaatcgaagaccataaccggcgctctgaggcaccgaagtgcccgtctgaagactgcaactttgtggaggctctgcccaggccatctttttgagttgagctaacagaaccgagggttcttctcgacgctcgtgcacctaggtaacccctgtaaattggtttgctgacgctaggctgcaaggggcctgccctgtttgaactgctgtactgtacatgattcttggccgttgccctgtgtaattatgttttggttagctcgtaaatttatacgcatccaatggaggcatacaatgcaaaaaaataattaagatacaacaataa

SEQ ID NO: 70608 - DNA, 5356 bp, Zea Mays
ccgcctcccccgacccgctccgctccgctccgctccatccatccctcccgtccccagctccccggcttcccgctgcccctgcgtgcgtgtctctggctgtgcctgtgcgccccccggtgcacccgagaggccgagaggcgaaggctcgtcgtcgcgttgctcgtcgcctcgcctcgcctataactactccctccgctccgcgcctccgctccacacctattccgccacccgcctctcacctctccagtccccacccccgcccccgtccgctcccctatcctgttcgttcccctcctctccacacgatcccctcccttgtcggcttccgcgcgggcgggagtggccgcggccacgactccaccgcctcctgctcgcgccaccacccctcggcccctcgcggcgccgcgcgaccggcgcgtggtgcgcgtttgcctgcccgtcgtcggccctttcttattagttattattaggcggaggagaggctagctctgcggggggtcgccgcgcgccgccgaatcggatcacacgcctccccttcccgccaggccagggggccatggccacgctcccgcgcgccgcgccgcccacgcccgccgcgctgctcccgctgccccgcgccgcgccgccgctgctgctcgccgggagggccgccgccgcgcgccgctctcggctgcgcgcgcggggcccgtccgcggcggcgcgccggagctgggtcgtcgcctccgccgcttcctcctcctcacgggccgtggtcggcggcgtcgcccgccgggaggcccctcccgcgccgcagaagcccacgcagcaggctgcggacttgaaccatatcttgtctgaacgtggagcttgtggtgttggatttgtcgcaaacttgaaaaatatgtcttcatttgacattgttcgtgatgctcttatggctcttgggtgcatggagcaccgtggtggttgtggagcggacagtgactcaggtgatggtgcaggactgatgagtgccgttccatgggacttgtttgatgactgggccagcaagcaagggcttgctctctttgacagaagaaatacaggtgtaggcatggtcttccttccacaagatgagaagtcaatggaagaagccaaagctggggaacttgaactggatgcgatcaagggaaaccacactaaagtctcctgtatggcgaggtcgtgaacatgaaatttgcccgtttggtgaccctaaagcatctgattcagcgaatcttgacagtacagctgaattgctgctaagaagtggtaggagtcctgcagaagctcttatgattctcgtccctgaggcatataagaaccatccaacattatctataaaataccccgaggtaactgacttctatgactactacaaaggacaaatggaagcttgggatggacctgctttacttctatttagtgatgggaggactgtaggagcaactcttgataggaatggtctccgtccagcacgctattggagaacgtcagatgacttcgtttatgtcgcatctgaagttggtgttataccaatggatgagtcaaaagtagtaatgaaaggacgattaggtcctggaatgatgataactgttgatctacagactggacaggtgcttgaaaacacagaagtaaagaaaactgtggcttcagcgagcccctatgggacttggttgcaagaatgcacacgtttgataaagcctgtcaactttctctcttcaactatcatggacaatgagactgttttgagacatcaacaggcatttggctattcaagtgaagatgtgcaaatggtgattgaatcaatggcttcacaaggaaaggaaccaacattttgtatgggcgatgacattccattagctgtgttatcacaaagaccacacttgttatatgattatttcaagcagcggtttgcgcaggttacaaatcctgcaattgatccccttagagaaggtttagttatgtctcttgaggttaatattgggaaaagaggcaacatcttggaggttggccctgaaaatgctgatcaggttgcactatcaagccctgtgctgaatgaaggtgaactggaaactctattgaatgactcaaaacttaagcccaaagtactgtcaacatacttcgatattcgtaaaggtctagatggttcacttgataagacaattcaggctctttgtgaagaagctgatgctgctgtgcggagcggctctcaacttcttgttctttctgatcgttctgaagcacctgaacctactcgtcctgccataccaatacttctagctgttggcgccatccaccagcatttgattcagaatggtctccgtatgtctgcttctattgttgctgatactgctcagtgttttagcacacatcattttgcctgtctgatcggatatggtgccagtgctgtgtgtccttatctggcactagaaacatgccggcaatggaggctgagcaacaaaactcttaatttgatgcggaatgggaagatgcccacagtgaccatcgagcaggcacaaaggaactttatcaaagcagtaaaatcaggtctgctcaaaattctttcaaaaatgggtatctcactgctctcaagctattgtggagctcagatctttgaaatttatggtcttggtcaagaagttgttgatcttgccttctgtggaagtgtatcgaaaattggaggtctcacacttgatgagctgggtagggagaccttatcattctgggtgaaggcgttctctgaagatactgcaaagaggctagaaaactttggatttatccaatccagacctggaggtgaataccatgcaaataatcctgagatgtccaagctgttgcacaaagcaattcgtgagaaacgtgataatgcgtacactgtctaccaacaacatcttgcaagccgtcctgtcaatgttcttcgagatcttcttgaattgaaaagtgatcgtgcacctattcctattggcaaagtggagtctgcaacctccattgttgaacgtttttgtactggtggaatgtccctaggagccatttcaagggaaacgcatgaagctattgcaattgcaatgaatagaataggtgggaaatctaattcaggagaaggtggtgaggatccaatccgttggaatcccctcactgatgttgtagatggttattctccaacacttcctcatctcaagggtcttcagaatggtgacacagccacaagtgccattaagcaggttgcatctggacgttttggagttacaccaacattcttagtaaatgctgaccaaattgagataaagattgcgcaaggtgcaaagcctggtgaaggaggtcaacttcctgggaaaaaagtcagtgcatacattgctcgtctgaggaactccaaacctggagttcctctaatctccccgcctccacaccatgacatttattctatcgaggatcttgcacagttgatttatgacctccatcagataaatcctaaagctaaagtatctgtaaagcttgtgtctgaagctggaattggaactgtagcttctggagtttcaaaggcgaatgcagacataattcagatatcaggtcatgatggtggtactggagctagcccaatcagctccatcaaacatgctgggggtccgtgggaacttggtcttacagaaacaaatcagacacttatacaaaatggattgagagagagggtagtacttagggtggacggtggattcaggagtggtcaagatgttcttattgctgctgctatgggagctgatgaatatggctttggttctgtagccatgatagctactggatgtgtcatggcacggatttgtcacacgaataattgtccagttggagtggctagtcagagagaagagcttcgtgcaaggtttcctggtgttcctggtgatcttgttaactacttcctctttgttgccgaggaggttcgagctgcattagcccagttgggttatgagaagttggatgacatcattgggcgaacagatttgcttaaaccaaagcacatctcattggtgaaaacgcagcacattgatcttggatacctcctatcaaatgctggattgcctgaatggagcagctcccaaattaggagccaggacgtccacactaatggccctgttcttgatgagacaatccttgcagatcctgagatagctgatgctattgagaatgagaaggaagtttccaaggcatttcaaatctataatgttgacagagctgtctgtggtcgggtagcaggtgtgattgccaagaagtatggagacacaggttttgctggccagctcaacatcacgttcaatggaagtgcagggcagtcctttggttgtttcctgactcctggaatgaacattcggctagttggggaggccaatgattatgttggaaagggtatggctggtggagaactggtggtagttcctgtagacaaaacaggatttgttcctgaggatgctactatagttggaaacacttgtctgtatggagctacaggtggtcaggtatttgtgagaggcaaggcaggagaaagatttgctgttagaaactctctatgtcaggcagtggttgagggcaccggagatcattgctgtgagtacatgactggtggctgcgtagtcgtacttggcaaagctgggaggaatgttgcagctggaatgactggtggtcttgcctacattctagatgaggatgatacacttgtcccaaaggtcaacaaggaaatcgtcaaaatgcagagagtgaatgctccagctgggcagatgcagctaaagggcttgattgaggcctatgttgataaaacgggcagcgagaaaggtattgcgattttgagggaatgggaggcctatttgccgctcttctggcaactggtaccgcccagtgaagaagactcgcctgaggcttgtgcagagtttgagagagtacttgccaagcaagcaaccacccaattgtctgcgaagtgatcgaatcagactacaggaaggtggtaggtgttttctatttgacacaaagtgatctcatcttatcacttcaagaaaatcgaagaccataaccggcgctctgaggcaccgaagtgcccgtctgaagactgcaactttgtggaggctctgcccaggccatctttttgagttgagctaacagaaccgagggttcttctcgacgctcgtgcacctaggtaacccctgtaaattggtttgctgacgctaggctgcaaggggcctgccctgtttgaactgctgtactgtacatgattcttggccgttgccctgtgtaattatgttttggttagctcgtaaatttatacgcatccaatggaggcatacaatgcaaaaaaataattaagatacaacaataa

SEQ ID NO: 70609 - DNA, 3293 bp, Zea Mays
ccgcctcccccgacccgctccgctccgctccgctccatccatccctcccgtccccagctccccggcttcccgctgcccctgcgtgcgtgtctctggctgtgcctgtgcgccccccggtgcacccgagaggccgagaggcgaaggctcgtcgtcgcgttgctcgtcgcctcgcctcgcctataactactccctccgctccgcgcctccgctccacacctattccgccacccgcctctcacctctccagtccccacccccgcccccgtccgctcccctatcctgttcgttcccctcctctccacacgatcccctcccttgtcggcttccgcgcgggcgggagtggccgcggccacgactccaccgcctcctgctcgcgccaccacccctcggcccctcgcggcgccgcgcgaccggcgcgtggtgcgcgtttgcctgcccgtcgtcggccctttcttattagttattattaggcggaggagaggctagctctgcggggggtcgccgcgcgccgccgaatcggatcacacgcctccccttcccgccaggccagggggccatggccacgctcccgcgcgccgcgccgcccacgcccgccgcgctgctcccgctgccccgcgccgcgccgccgctgctgctcgccgggagggccgccgccgcgcgccgctctcggctgcgcgcgcggggcccgtccgcggcggcgcgccggagctgggtcgtcgcctccgccgcttcctcctcctcacgggccgtggtcggcggcgtcgcccgccgggaggcccctcccgcgccgcagaagcccacgcagcaggctgcggacttgaaccatatcttgtctgaacgtggagcttgtggtgttggatttgtcgcaaacttgaaaaatatgtcttcatttgacattgttcgtgatgctcttatggctcttgggtgcatggagcaccgtggtggttgtggagcggacagtgactcaggtgatggtgcaggactgatgagtgccgttccatgggacttgtttgatgactgggccagcaagcaagggcttgctctctttgacagaagaaatacaggtgtaggcatggtcttccttccacaagatgagaagtcaatggaagaagccaaagctgcaactgaaaaggtttttgtggatgaaggccttgaggttcttggttggagacccgttccttttaatgtatcagttgtaggtcggaatgcaaaagaaaccatgcctaatatacaacaaatatttgtgaaagttgcaaaagaagataatgctgatgacatagagagagaattatacatcagccgaaagctgatagagcgggctgcaaaatcttttagttgggcagatgaactttatttctgctctttatcaagcagaacgattgtctacaagggaatgctacgatctgaggttcttgggcaattctatttagaccttcagaatgaactgtataaatcaccttttgccatatatcatcgaagattcagtacaaatacaagtcctcgatggcctcttgctcaacctatgaggttacttggacacaacggagaaattaacacaatacaggggaacttgaactggatgcgatcaagggaaaccacactaaagtctcctgtatggcgaggtcgtgaacatgaaatttgcccgtttggtgaccctaaagcatctgattcagcgaatcttgacagtacagctgaattgctgctaagaagtggtaggagtcctgcagaagctcttatgattctcgtccctgaggcatataagaaccatccaacattatctataaaataccccgaggtaactgacttctatgactactacaaaggacaaatggaagcttgggatggacctgctttacttctatttagtgatgggaggactgtaggagcaactcttgataggaatggtctccgtccagcacgctattggagaacgtcagatgacttcgtttatgtcgcatctgaagttggtgttataccaatggatgagtcaaaagtagtaatgaaaggacgattaggtcctggaatgatgataactgttgatctacagactggacaggtgcttgaaaacacagaagtaaagaaaactgtggcttcagcgagcccctatgggacttggttgcaagaatgcacacgtttgataaagcctgtcaactttctctcttcaactatcatggacaatgagactgttttgagacatcaacaggcatttggctattcaagtgaagatgtgcaaatggtgattgaatcaatggcttcacaaggaaaggaaccaacattttgtatgggcgatgacattccattagctgtgttatcacaaagaccacacttgttatatgattatttcaagcagcggtttgcgcaggttacaaatcctgcaattgatccccttagagaaggtttagttatgtctcttgaggttaatattgggaaaagaggcaacatcttggaggttggccctgaaaatgctgatcaggttgcactatcaagccctgtgctgaatgaaggtgaactggaaactctattgaatgactcaaaacttaagcccaaagtactgtcaacatacttcgatattcgtaaaggtctagatggttcacttgataagacaattcaggctctttgtgaagaagctgatgctgctgtgcggagcggctctcaacttcttgttctttctgatcgttctgaagcacctgaacctactcgtcctgccataccaatacttctagctgttggcgccatccaccagcatttgattcagaatggtctccgtatgtctgcttctattgttgctgatactgctcagtgttttagcacacatcattttgcctgtctgatcggatatggtgccagtgctgtgtgtccttatctggcactagaaacatgccggcaatggaggctgagcaacaaaactcttaatttgatgcggaatgggaagatgcccacagtgaccatcgagcaggcacaaaggaactttatcaaagcagtaaaatcaggtctgctcaaaattctttcaaaaatgggtatctcactgctctcaagctattgtggagctcagatctttgaaatttatggtcttggtcaagaagttgttgatcttgccttctgtggaagtgtatcgaaaattggaggtctcacacttgatgagctgggtagggagaccttatcattctgggtgaaggcgttctctgaagatactgcaaagaggctagaaaactttggatttatccaatccagacctggagcctatttattttacttgtggatatctgtctccagcagtactgcgtagaatcaac

SEQ ID NO: 70610 - DNA, 3106 bp, Zea Mays
cccccacatccgtcccgtccccaaaacacatttctttcctttgcctgctttcctaccaataccatctcgcccgcttgcgttgcgtgaatctgcccattcctcaccattctaaacacccccctttccataacaatgccgccgtggaggcagcgcgcgcggggcctccggcggtgctagatccgcggcccagcacagcgacgcgagccgagccaaggtaccgggcggggacctccagcggcgctcaggaaggcgccgaagaaaaccgtggccgccgggacaggcgggggcgtccaatgcacgagcacacccgcgcctgggcgtgggaggcgacggtgcgcaaggtgcagcatccgcagcccgtgggcaggcgccgggtgtccccgatgtcggccgcggacgactacgagacggcgtcgtcgtcctcgtcggccgccggcgacgtctgcgagcacgtccacggctacatggagcgcggcctccccaacggcgacttctacacgggccagtggcgcgacggcgcgccgcacggggccggcaagtacctgtggacggacgggtgcatgtacgagggggagtggcggcacggcaaggccacggggcggggcaagttctcctggccgtcgggagccacctacgagggcgagttcaaggacgggttcatggacggctccggcacctacaccggcgccgccggggacacctaccgggggtcctggtccatgaacctcaagcacggcagcggcaagaagagctacgccaacggcgacgagtacgacggcgagtggcgcgcggggctgcaggacggctccggccgctacacctggcgcaacggcaccgagtacacggggcagtggtgcgcggggctcatccacggccgcggcgcgctcgtctggtccaacggcaaccgctacgatggcgggtgggaggacggctgtccgcgtggccaggggactttccgctgggccgacggcagcgtctacgtcggccgctggacgcgcgacactcccaccggcattgtccagcagaagggagtctactacccgtccccggcggcgtcctccccgacggcacgcgatccccgcgacgtgttcgccagggacctgccgggcttcatgggcgccagacccgactccccgtcgccgcgcaagtcacgcgcatcgtctgtcagggcggccaacgggcgggcgagctcagcgtccgggttgagcaacagttccggcggcgacaggaagtatgagaagatttgcatttgggagtccgacggcgacatcacgtgcgacattgtggacgggcccgccttgggagatgaggcggggaccgcgcggaggagcgtgaggacggacgacggcggtgacgaccggggcctgccgccaccatcgccggcgccgcacgtcacacagtgggtacctccacgggaggtgaagcgacaaggggagaccatcgccaagggacacaagcactacgagcttatgctaaaattgcagctcgggatcaggcatgcagtggggaagcaaggcccaattgtgcttgatctgaaatcgtctgctttcgacccaaaggaaaaggtgacgctgcgcaagctgttcaaggtggatgctggtgactatatgttatcgctatgtggaaatgaggctctcagagagctttcatctcctggtaagagtggaagctttttctacctgacaaacgatgatcggtacatgataaagacgatgaagaaatctgaagtgaagatgcttctgaagatgctcccagcttattacaatcatgtccgggcatttgagaatactctagtaaccaagttttttggtctacactgtgtcaagttagctggagcaaatcagaagaaggttcgttttgtcataatgggaaatctattctgctcggaatatccaattcataggcgttttgatctcaaaggttcatcacttgggcgcacaactgataagccacatacagagatcgatcagtatacaactttgaaggatcttgacctgaacttcatctttagattgaagaagcaatggttccatgagttccaaaggcaagtggacagggattgtgagttccttgagcaggagaaaatcatggattacagtcttcttgttggcgtacatttcagagataacacagagaagcttctgactgaaggttccattgactttgatatcatcaacaacgtaccgacacctcgcctttcaaaaggaaatacagatcggtttcttgctggtccaaacaggtctcctaaaatcaaacttggggccaacatgccttcgagagcagaactcactgcccgtaagagcgactgcgaaccgcggatgatcggagagcccaccggagagtgctacgacgtcatactgtattttgggatcatagacatacttcaggattacgatatcagcaagaggcttgagcacgcgtacaagtctttccagcacgacccaacctctatgtccgcggtggacccgaggcagtattccaggcggtttaaagaattcgtgtacagagtgtttcaagaagacgggtgcgcagctgcagacgcgttgagactttggagatgccgcagcctccatgtgtaggtgggtgaactctcaaaggaagcccatctgggtggactagagttgccagaagccagcctccatgttgagactttggagggtggcgtgggtgagcgtcagtcagtggaagcccatctgggtggactagagttgccagaagccagccgtcatctttgtcttccagaattatagttttagccatacacatacgtacatagctcatcactaatgttttgtagggtagggaggtgtttagcttacagatccagctcacagatagaaagattgtaagacaagagcgcaagccagtcgggagatgtagattcttcatcacccgtcccgaggtgtttagcttacagattcagctcacagatacaaagctactgtcttgatcgcaacctcttattttaacttatcgataggaaaccccttgtagacgacgagtgagatcgctgtaatgtacagggtttgtgggtggcctacaagtgatggctcagttttgttccttctttgttttctggaaatgaatgatcttgctaacttccaat

SEQ ID NO: 70611 - DNA, 3810 bp, Zea Mays
cccccacatccgtcccgtccccaaaacacatttctttcctttgcctgctttcctaccaataccatctcgcccgcttgcgttgcgtgaatctgcccattcctcaccattctaaacacccccctttccataacaatgccgccgtggaggcagcgcgcgcggggcctccggcggtgctagatccgcggcccagcacagcgacgcgagccgagccaaggtaccgggcggggacctccagcggcgctcaggaaggcgccgaagaaaaccgtggccgccgggacaggcgggggcgtccaatgcacgagcacacccgcgcctgggcgtgggaggcgacggtgcgcaaggtgcagcatccgcagcccgtgggcaggcgccgggtgtccccgatgtcggccgcggacgactacgagacggcgtcgtcgtcctcgtcggccgccggcgacgtctgcgagcacgtccacggctacatggagcgcggcctccccaacggcgacttctacacgggccagtggcgcgacggcgcgccgcacggggccggcaagtacctgtggacggacgggtgcatgtacgagggggagtggcggcacggcaaggccacggggcggggcaagttctcctggccgtcgggagccacctacgagggcgagttcaaggacgggttcatggacggctccggcacctacaccggcgccgccggggacacctaccgggggtcctggtccatgaacctcaagcacggcagcggcaagaagagctacgccaacggcgacgagtacgacggcgagtggcgcgcggggctgcaggacggctccggccgctacacctggcgcaacggcaccgagtacacggggcagtggtgcgcggggctcatccacggccgcggcgcgctcgtctggtccaacggcaaccgctacgatggcgggtgggaggacggctgtccgcgtggccaggggactttccgctgggccgacggcagcgtctacgtcggccgctggacgcgcgacactcccaccggcattgtccagcagaagggagtctactacccgtccccggcggcgtcctccccgacggcacgcgatccccgcgacgtgttcgccagggacctgccgggcttcatgggcgccagacccgactccccgtcgccgcgcaagtcacgcgcatcgtctgtcagggcggccaacgggcgggcgagctcagcgtccgggttgagcaacagttccggcggcgacaggaagtatgagaagatttgcatttgggagtccgacggcgacatcacgtgcgacattgtggacgggcccgccttgggagatgaggcggggaccgcgcggaggagcgtgaggacggacgacggcggtgacgaccggggcctgccgccaccatcgccggcgccgcacgtcacacagtgggtacctccacgggaggtgaagcgacaaggggagaccatcgccaagggacacaagcactacgagcttatgctaaaattgcagctcgggatcaggcatgcagtggggaagcaaggcccaattgtgcttgatctgaaatcgtctgctttcgacccaaaggaaaaggtatggacgaagtttcctcctcaaggctcaaaatacactcctccccacaattcttgtgacttcagatggaaggattactgcccacaggtcttccggacgctgcgcaagctgttcaaggtggatgctggtgactatatgttatcgctatgtggaaatgaggctctcagagagctttcatctcctggtaagagtggaagctttttctacctgacaaacgatgatcggtacatgataaagacgatgaagaaatctgaagtgaagatgcttctgaagatgctcccagcttattacaatcatgtccgggcatttgagaatactctagtaaccaagttttttggtctacactgtgtcaagttagctggagcaaatcagaagaaggttcgttttgtcataatgggaaatctattctgctcggaatatccaattcataggcgttttgatctcaaaggttcatcacttgggcgcacaactgataagccacatacagagatcgatcagtatacaactttgaaggatcttgacctgaacttcatctttagattgaagaagcaatggttccatgagttccaaaggcaagtggacagggattgtgagttccttgagcaggagaaaatcatggattacagtcttcttgttggcgtacatttcagagataacacagagaagcttctgactgaaggttccattgactttgatatcatcaacaacgtaccgacacctcgcctttcaaaaggaaatacagatcggtttcttgctggtccaaacaggtaactagacattcagttacgttaatctgttcttttttatacttatgaggtaatggaatgcgacctgcaatcagaatagttatgattctgtgacatctagcagtcacgatccttatgtcatatttggtagtaggattcgtaccagcaaccttcaaatattctatgccactactgtttaagaatattcaaacttttttgtttaagaaacatttttcaactccctcagcactgttttttttttgtgaacataccttatgaaatatttttttgtcatgatcttccgaagtgtggcagaataactgaaaatgaaatgtaagcatgcaatcattcctttgtgacccattcaaaatctagtgtgtccccacatagttggtgtccaccatgacttctagctagaacaaggcatctatgctatagaccctatgcccctatcagtccctttctgttaatgcatctcagctgttcttgatttgatttgttctctgtctaaatggcttgagtaaacagataaaactttgcatacgtaatccaaattttccacaatttactacgatacggaacatgctgtttaactctgtagttatttccatctgaacatcgtgaattaacaggtctcctaaaatcaaacttggggccaacatgccttcgagagcagaactcactgcccgtaagagcgactgcgaaccgcggatgatcggagagcccaccggagagtgctacgacgtcatactgtattttgggatcatagacatacttcaggattacgatatcagcaagaggcttgagcacgcgtacaagtctttccagcacgacccaacctctatgtccgcggtggacccgaggcagtattccaggcggtttaaagaattcgtgtacagagtgtttcaagaagacgggtgcgcagctgcagacgcgttgagactttggagatgccgcagcctccatgtgtaggtgggtgaactctcaaaggaagcccatctgggtggactagagttgccagaagccagcctccatgttgagactttggagggtggcgtgggtgagcgtcagtcagtggaagcccatctgggtggactagagttgccagaagccagccgtcatctttgtcttccagaattatagttttagccatacacatacgtacatagctcatcactaatgttttgtagggtagggaggtgtttagcttacagatccagctcacagatagaaagattgtaagacaagagcgcaagccagtcgggagatgtagattcttcatcacccgtcccgaggtgtttagcttacagattcagctcacagatacaaagctactgtcttgatcgcaacctcttattttaacttatcgataggaaaccccttgtagacgacgagtgagatcgctgtaatgtacagggtttgtgggtggcctacaagtgatggctcagttttgttccttctttgttttctggaaatgaatgatcttgctaacttccaat

SEQ ID NO: 70612 - DNA, 3129 bp, Zea Mays
cccccacatccgtcccgtccccaaaacacatttctttcctttgcctgctttcctaccaataccatctcgcccgcttgcgttgcgtgaatctgcccattcctcaccattctaaacacccccctttccataacaatgccgccgtggaggcagcgcgcgcggggcctccggcggtgctagatccgcggcccagcacagcgacgcgagccgagccaaggtaccgggcggggacctccagcggcgctcaggaaggcgccgaagaaaaccgtggccgccgggacaggcgggggcgtccaatgcacgagcacacccgcgcctgggcgtgggaggcgacggtgcgcaaggtgcagcatccgcagcccgtgggcaggcgccgggtgtccccgatgtcggccgcggacgactacgagacggcgtcgtcgtcctcgtcggccgccggcgacgtctgcgagcacgtccacggctacatggagcgcggcctccccaacggcgacttctacacgggccagtggcgcgacggcgcgccgcacggggccggcaagtacctgtggacggacgggtgcatgtacgagggggagtggcggcacggcaaggccacggggcggggcaagttctcctggccgtcgggagccacctacgagggcgagttcaaggacgggttcatggacggctccggcacctacaccggcgccgccggggacacctaccgggggtcctggtccatgaacctcaagcacggcagcggcaagaagagctacgccaacggcgacgagtacgacggcgagtggcgcgcggggctgcaggacggctccggccgctacacctggcgcaacggcaccgagtacacggggcagtggtgcgcggggctcatccacggccgcggcgcgctcgtctggtccaacggcaaccgctacgatggcgggtgggaggacggctgtccgcgtggccaggggactttccgctgggccgacggcagcgtctacgtcggccgctggacgcgcgacactcccaccggcattgtccagcagaagggagtctactacccgtccccggcggcgtcctccccgacggcacgcgatccccgcgacgtgttcgccagggacctgccgggcttcatgggcgccagacccgactccccgtcgccgcgcaagtcacgcgcatcgtctgtcagggcggccaacgggcgggcgagctcagcgtccgggttgagcaacagttccggcggcgacaggaagtatgagaagatttgcatttgggagtccgacggcgacatcacgtgcgacattgtggacgggcccgccttgggagatgaggcggggaccgcgcggaggagcgtgaggacggacgacggcggtgacgaccggggcctgccgccaccatcgccggcgccgcacgtcacacagtgggtacctccacgggaggtgaagcgacaaggggagaccatcgccaagggacacaagcactacgagcttatgctaaaattgcagctcgggatcaggcatgcagtggggaagcaaggcccaattgtgcttgatctgaaatcgtctgctttcgacccaaaggaaaaggtatggacgaagtttcctcctcaaggctcaaaatacactcctccccacaattcttgtgacttcagatggaaggattactgcccacaggtcttccggacgctgcgcaagctgttcaaggtggatgctggtgactatatgttatcgctatgtggaaatgaggctctcagagagctttcatctcctggtaagagtggaagctttttctacctgacaaacgatgatcggtacatgataaagacgatgaagaaatctgaagtgaagatgcttctgaagatgctcccagcttattacaatcatgtccgggcatttgagaatactctagtaaccaagttttttggtctacactgtgtcaagttagctggagcaaatcagaagaaggttcatcacttgggcgcacaactgataagccacatacagagatcgatcagtatacaactttgaaggatcttgacctgaacttcatctttagattgaagaagcaatggttccatgagttccaaaggcaagtggacagggattgtgagttccttgagcaggagaaaatcatggattacagtcttcttgttggcgtacatttcagagataacacagagaagcttctgactgaaggttccattgactttgatatcatcaacaacgtaccgacacctcgcctttcaaaaggaaatacagatcggtttcttgctggtccaaacaggtctcctaaaatcaaacttggggccaacatgccttcgagagcagaactcactgcccgtaagagcgactgcgaaccgcggatgatcggagagcccaccggagagtgctacgacgtcatactgtattttgggatcatagacatacttcaggattacgatatcagcaagaggcttgagcacgcgtacaagtctttccagcacgacccaacctctatgtccgcggtggacccgaggcagtattccaggcggtttaaagaattcgtgtacagagtgtttcaagaagacgggtgcgcagctgcagacgcgttgagactttggagatgccgcagcctccatgtgtaggtgggtgaactctcaaaggaagcccatctgggtggactagagttgccagaagccagcctccatgttgagactttggagggtggcgtgggtgagcgtcagtcagtggaagcccatctgggtggactagagttgccagaagccagccgtcatctttgtcttccagaattatagttttagccatacacatacgtacatagctcatcactaatgttttgtagggtagggaggtgtttagcttacagatccagctcacagatagaaagattgtaagacaagagcgcaagccagtcgggagatgtagattcttcatcacccgtcccgaggtgtttagcttacagattcagctcacagatacaaagctactgtcttgatcgcaacctcttattttaacttatcgataggaaaccccttgtagacgacgagtgagatcgctgtaatgtacagggtttgtgggtggcctacaagtgatggctcagttttgttccttctttgttttctggaaatgaatgatcttgctaacttccaat

SEQ ID NO: 70613 - DNA, 3715 bp, Zea Mays
cccccacatccgtcccgtccccaaaacacatttctttcctttgcctgctttcctaccaataccatctcgcccgcttgcgttgcgtgaatctgcccattcctcaccattctaaacacccccctttccataacaatgccgccgtggaggcagcgcgcgcggggcctccggcggtgctagatccgcggcccagcacagcgacgcgagccgagccaaggtaccgggcggggacctccagcggcgctcaggaaggcgccgaagaaaaccgtggccgccgggacaggcgggggcgtccaatgcacgagcacacccgcgcctgggcgtgggaggcgacggtgcgcaaggtgcagcatccgcagcccgtgggcaggcgccgggtgtccccgatgtcggccgcggacgactacgagacggcgtcgtcgtcctcgtcggccgccggcgacgtctgcgagcacgtccacggctacatggagcgcggcctccccaacggcgacttctacacgggccagtggcgcgacggcgcgccgcacggggccggcaagtacctgtggacggacgggtgcatgtacgagggggagtggcggcacggcaaggccacggggcggggcaagttctcctggccgtcgggagccacctacgagggcgagttcaaggacgggttcatggacggctccggcacctacaccggcgccgccggggacacctaccgggggtcctggtccatgaacctcaagcacggcagcggcaagaagagctacgccaacggcgacgagtacgacggcgagtggcgcgcggggctgcaggacggctccggccgctacacctggcgcaacggcaccgagtacacggggcagtggtgcgcggggctcatccacggccgcggcgcgctcgtctggtccaacggcaaccgctacgatggcgggtgggaggacggctgtccgcgtggccaggggactttccgctgggccgacggcagcgtctacgtcggccgctggacgcgcgacactcccaccggcattgtccagcagaagggagtctactacccgtccccggcggcgtcctccccgacggcacgcgatccccgcgacgtgttcgccagggacctgccgggcttcatgggcgccagacccgactccccgtcgccgcgcaagtcacgcgcatcgtctgtcagggcggccaacgggcgggcgagctcagcgtccgggttgagcaacagttccggcggcgacaggaagtatgagaagatttgcatttgggagtccgacggcgacatcacgtgcgacattgtggacgggcccgccttgggagatgaggcggggaccgcgcggaggagcgtgaggacggacgacggcggtgacgaccggggcctgccgccaccatcgccggcgccgcacgtcacacagtgggtacctccacgggaggtgaagcgacaaggggagaccatcgccaagggacacaagcactacgagcttatgctaaaattgcagctcgggatcaggcatgcagtggggaagcaaggcccaattgtgcttgatctgaaatcgtctgctttcgacccaaaggaaaaggacgctgcgcaagctgttcaaggtggatgctggtgactatatgttatcgctatgtggaaatgaggctctcagagagctttcatctcctggtaagagtggaagctttttctacctgacaaacgatgatcggtacatgataaagacgatgaagaaatctgaagtgaagatgcttctgaagatgctcccagcttattacaatcatgtccgggcatttgagaatactctagtaaccaagttttttggtctacactgtgtcaagttagctggagcaaatcagaagaaggttcgttttgtcataatgggaaatctattctgctcggaatatccaattcataggcgttttgatctcaaaggttcatcacttgggcgcacaactgataagccacatacagagatcgatcagtatacaactttgaaggatcttgacctgaacttcatctttagattgaagaagcaatggttccatgagttccaaaggcaagtggacagggattgtgagttccttgagcaggagaaaatcatggattacagtcttcttgttggcgtacatttcagagataacacagagaagcttctgactgaaggttccattgactttgatatcatcaacaacgtaccgacacctcgcctttcaaaaggaaatacagatcggtttcttgctggtccaaacaggtaactagacattcagttacgttaatctgttcttttttatacttatgaggtaatggaatgcgacctgcaatcagaatagttatgattctgtgacatctagcagtcacgatccttatgtcatatttggtagtaggattcgtaccagcaaccttcaaatattctatgccactactgtttaagaatattcaaacttttttgtttaagaaacatttttcaactccctcagcactgttttttttttgtgaacataccttatgaaatatttttttgtcatgatcttccgaagtgtggcagaataactgaaaatgaaatgtaagcatgcaatcattcctttgtgacccattcaaaatctagtgtgtccccacatagttggtgtccaccatgacttctagctagaacaaggcatctatgctatagaccctatgcccctatcagtccctttctgttaatgcatctcagctgttcttgatttgatttgttctctgtctaaatggcttgagtaaacagataaaactttgcatacgtaatccaaattttccacaatttactacgatacggaacatgctgtttaactctgtagttatttccatctgaacatcgtgaattaacaggtctcctaaaatcaaacttggggccaacatgccttcgagagcagaactcactgcccgtaagagcgactgcgaaccgcggatgatcggagagcccaccggagagtgctacgacgtcatactgtattttgggatcatagacatacttcaggattacgatatcagcaagaggcttgagcacgcgtacaagtctttccagcacgacccaacctctatgtccgcggtggacccgaggcagtattccaggcggtttaaagaattcgtgtacagagtgtttcaagaagacgggtgcgcagctgcagacgcgttgagactttggagatgccgcagcctccatgtgtaggtgggtgaactctcaaaggaagcccatctgggtggactagagttgccagaagccagcctccatgttgagactttggagggtggcgtgggtgagcgtcagtcagtggaagcccatctgggtggactagagttgccagaagccagccgtcatctttgtcttccagaattatagttttagccatacacatacgtacatagctcatcactaatgttttgtagggtagggaggtgtttagcttacagatccagctcacagatagaaagattgtaagacaagagcgcaagccagtcgggagatgtagattcttcatcacccgtcccgaggtgtttagcttacagattcagctcacagatacaaagctactgtcttgatcgcaacctcttattttaacttatcgataggaaaccccttgtagacgacgagtgagatcgctgtaatgtacagggtttgtgggtggcctacaagtgatggctcagttttgttccttctttgttttctggaaatgaatgatcttgctaacttccaat

SEQ ID NO: 70614 - DNA, 1269 bp, Zea Mays
gaacgaacgagcaaggcctataaacctcctcacatcacagtcaccacaccactcgccacgccttcgccgcctataaaccgccaccactagccccccctgctccgaggaccacaggagcccacggcacggcgacgccatcgacctcactccatccctccctccctccctccctcactcctcctcttcgccgcctcgcaagcaatggcggtggcgcggctacgcgcggtcgccgccgccgtgctgcagccggcgctcgccgcgggcggccgcggcgagaggcggccgctcgggacggcggcggaggtggccgcgggcgcgggcccgggggctgcgaggtgggagctcttgggcgcgcgggagtactacgactaccgccgcgccatgtacggcgacatcacgcacaaggccatcctcgtcgacgccgccggcacgctgctcgcccccaccgagcccatggcgcaggtgtacaggacgataggccagaagtacggagtgaattactcagaggatgagattctgatgcggtaccggctagcttatgcgcagccatggggtcgatcgcgtctgaggtatgtcgatgacggaaggcccttttggcaacatatagtgagctcatctaccggctgctcagatctacagtatttcgaggaactgtaccagtactacacaactgagaaggcctggcgtctctgcgacccagacgctggacgtgttttcgaggcgctgaggagggctggcgtcaaaacagccatcgtgtccaacttcgacactcgtcttcggccgcttttacaggcgctgaaatgcgacggctggttcgacgcagttgctgtgtctgctgaggttgcagcagaaaagccgaaccccacaatattcttgaaggcctgcgagctgctaggagtgaaacctgaagaagcggtgcacattggtgatgaccgtaggaacgacttatggggagcgagggatgcaggctgcgatgcctggctttggggcagtgacgtttactccttcaaggagatcgcggagaggatcggagttgaggtgtagcaagttgtttctcctcggtcggcgccacttaccccgggcgtcttgtacatattcccaagagaaataacaagagcatcagtttctccaaaaaggacagctaaaatgcaatacagagaaacaagaacagcaaactcacacaaataatggcgaaagcttctcttttgctcaacagctaaagaatcgcgactgactcttggcgcctgccgtgcacgacatatcgatttg

SEQ ID NO: 70615 - DNA, 4684 bp, Zea Mays
gcccagacccgaagccctgcgcctccccctccgccgctcgccgggcgagatgtccccgccgttcgtgttcccctcgaccctgcgggatctggagctggacaccgacggagacagagacgaggagccctcgctccggccgcagaaccccgtcgccgtcgccacgctccgcgctgccgacctcgaggagttcgtcaaggggaggtgtttgatgccatctactctatcgtgcgtgatttcaattgcctacccccagcccttaagtttaacattgttgagaccttgcgctccaacctcagtgtccttctacccagcatagactcactttcccgggcatccatgtcatccccttctgatgctaccgaaatcactgaccgcattgcctcacaccgcaatgccctcaagatctactccttctttctcatttccattgttctcaccgcggaagctggcgctgaaagctgcacagcggctaaggcaacagcacatggtcgaaagaagaaccatatatattcttggaactgggaagcacaaagaggcaggatcatgagtctagtcgctaattctcttgaagctaacctttcgctactttttggtcctggaggaaccgatgaacgatatctctcttttgtttcgaagtgtacttttgttctctgtgaaaatcaaaatgtgttaaaagatgaggatacaagaaatggcctgtgccggataattggagcaattgccacgaagcatcagaggatttctcaaatcagtgcatctgtttcacatctaatacacaaatttgatttcactgttcctcatcttgcggaagcagttgcttctgcggagaaaaagtttggtgatggaagccttgcaatttccctgattagggaaataggtcgggctgatccaaaagaatacacgagagatagtgttggtgcggataatgttgggagattccttgtagaacttgcagaccgcttgccaaaacttatgtcaaccaacattggtgttctgatacctcactttggtggtgagtcatataagatcagaaatgctcttgttggagttttgggaaagctggctgcaaaggctttcaaggatgttgagggtgatagcaatgctcggcttcgaagtaagcaggctatgctggagattttgattgagcgctgtagggatgtgtcagcatacacaaggagtcgtgtgcttcaggtgtggtctgagctttgtgaagaaaattctatttcaattggcctgtggaatgaagtggcttccgttgcttcagggcgactggaggacaaaagtgctattgtgagaaaatcagcattacagcttcttataacaatgctgcaacacaacccttttgggcctcagttaaggactgcaacctttgaggcaactctagaaaagtacaaggaaaaattacaaggaatggagccttcaaattcagacaaagatgaggccgcaaatgatagttcgcctggtgaagtgatcatggggcaagatgaaagtgtcagtgatagctgtttagcatcaagtcaggatcaaaatgaccgtgatgctacgattgtggatataacaaacttggaacaaataagagctttagttgcttcacttgaagctggtctgcggttttcaaagtgtataacttcgttaatgccaattcttgttcagttgttggcgtcatcctcagctactgatgttgagaacaccatccttttactgatgagatgcagacagtttcagatcgaaggatcagaagcagcactcaggaaaatgttacctctggtaatatcccaaaaactctgtctggtatttgtgcttgttttgtatttgttaattgttccttggccctttggatttttcaggtgttttctcaggataagtcaatatatgaggcagtggagagtgcattcattactttatacacaaggaaaagtccaatagaaacagcaaaaagtttgttagaccttgccattgattgcagcattggtgaccttgctgctctcgagagcttaattagttccttagtttccaaagcagaaatttcatccagcatggtatcagcactgtgggactatttttgctttaacataaatggagtgagaccagtgcaaagccgtggagctctatctattctttgtatggctgcaaagtcgtctcccagcattttgggtaatcacttgcaagatattattgacattgggtttggacgctgggctaaggaagaacctctgcttgctagaactgcatgtcttgctttgcagagattatcagaggaagacaaggacaagctgataagtaataatagtagagtatttgctgcattgcaaggtttggtaacaagcttctcgattcctgagaaaatatggtatggagctgcagataaagctataagcaccatctataccctacaccctgcacctgaactttttgctactgagactgcaaagaagtctctcagttctgtattcagcgttttaggaacaaatgatgtgtcaaatggagatgaagctcagaatggtgcctctctgtcatcagtatcaccttcaaagctgggtagatttctttttgttattagccatatagcactaaatcatttggtgtacattgagaattctgttaggaaaattcagaaacagaaacggaagaatgaaaaatctcagcccaccactgaggatctccaacctgacgtgtctaaaagtttggaggcacaaggcataaatgccgaactgggacttagtgcaaccatagatattgcaatcgagtcccttgctgaaagagcagaaaaggaaattgtttgctgttcttctgaaaagaatctcataggacattgtgggccatttctctcaaaactctgcaggaatcttgcattgctgcaaaagttcccagaccttcaagcttctgcaatgcttgctctttgcaggctaatgatcattgatgcagagttctgcgaagcaaatcttcaaatcctgtttactgttgctgagagtgcgccttctgaaactgtccgatccaattgcactatagcccttggtgatttagcagttcgcttcccaaatctcttagatccttggacagagtatatatatgcccggttacgtgatccttcagtgtctgtgaggaagaatgctgtgctggtcatttctcatcttatattgaatgatatgatgaaggttaaagggtatataaatgaaatggctgtaagaatagaagataaagatgagaggatatcaagcctggcgaaactcttctttcacgagttgtcaaagaaaggaagcaacccaatttataatcttcttccggatatcttgggtagactatgcaatcaacacctcaaagaagaaacattttgcaatattatgcagttcttaatcaactcaattaagaaggacaaacaaatggaagctcttgtggataagctgtgcaataggtttgctggagtaaatgatgtcagacagtgggagtatatttcttattgcctttctcagctaaccttcactgaaaagggcctgaaaaaactcattgataattttaagatgtttgaacatgcattatctgaagattctgtgatgaaccacttcagaagcgtaatatcaaagtgcaagaagtttgcgaaacctgagctaaaaatttgcattgaggaatttgaggagaaacttagcaaggttcatcaggaaaagaaagagcaggaggaaacaacaaaaaatgctgaggcacacagacagagaattgattcgcttgatgaatttctggttactaaggaagttagtgagaacagtgggaattctgctgaagatgaaactagcgaggtagttgatccttctgtggatagcagcacggaacatatggagaacacgccagaatgcagtgtcaatactagtgctgagaattctcagacaacagccccacttacagaatcagaaggtggcggtgaagagattcaatccgcacaacctgttagcaaaggcatgtcacggttaagggcaaagaaaaccagagatcctgttgtagatccttcggtggaccgcagcaccgaatataaggggaacacgccagagcacagtgcggatactagtacggagaattctcagacatcagtcccacttacaggaacagaaggtggcagcgaagagattcaatccacacaacctgttggcaaaggcgtgtcgcggtcaagggcaaggaaaaccagagaccccgttgtagaggactcagcagctccagtgagacgcgccacgcgttcaaccagaagacaaggaagctgatggtgcagcaaagcggcagctcaagccattccgtgccgatctcgcctcgaggtcccggagtactggaccacagcaaagcggtgcctggacgtctggatcggagagttggctggctctatcctttttgcgtgatgcgtgtcggtctagttttagctcgctgattcccggacaggccaataatgatctctcgtgaatctgtctaggggcagtatgtttaactgctccatacgaggagctcttgtgtttggttgttgcagtaggtcggctttcatatggattgtctactacagacattgctcccttggggagcgtatgtataatatctggcctgatctttttgaggcctgatgacgctatgatatttttgaacgtgttgttcttatgaatccagcaggctcagctgatttccagcctttcaatgtgaccacagaatccca

SEQ ID NO: 70616 - DNA, 4530 bp, Zea Mays
ctcacgaaaactcaccgtctcccgctctcgatttcgaaacactcgccactcttcgcctcccgttccccagcccagacccgaagccctgcgcctccccctccgccgctcgccgggcgagatgtccccgccgttcgtgttcccctcgaccctgcgggatctggagctggacaccgacggagacagagacgaggagccctcgctccggccgcagaaccccgtcgccgtcgccacgctccgcgctgccgacctcgaggagttcgtcaagggtgcatcatttgatctttctgataaggagctcttctgcattgaggaacaggaggtgtttgatgccatctactctatcgtgcgtgatttcaattgcctacccccagcccttaagtttaacattgttgagaccttgcgctccaacctcagtgtccttctacccagcatagactcactttcccgggcatccatgtcatccccttctgatgctaccgaaatcactgaccgcattgcctcacaccgcaatgccctcaagatctactccttctttctcatttccattgttctcaccgcggaagctggcgctgaaagctgcacagcggctaaggcaacagcacatggtcgaaagaagaaccatatatattcttggaactgggaagcacaaagaggcaggatcatgagtctagtcgctaattctcttgaagctaacctttcgctactttttggtcctggaggaaccgatgaacgatatctctcttttgtttcgaagtgtacttttgttctctgtgaaaatcaaaatgtgttaaaagatgaggatacaagaaatggcctgtgccggataattggagcaattgccacgaagcatcagaggatttctcaaatcagtgcatctgtttcacatctaatacacaaatttgatttcactgttcctcatcttgcggaagcagttgcttctgcggagaaaaagtttggtgatggaagccttgcaatttccctgattagggaaataggtcgggctgatccaaaagaatacacgagagatagtgttggtgcggataatgttgggagattccttgtagaacttgcagaccgcttgccaaaacttatgtcaaccaacattggtgttctgatacctcactttggtggtgagtcatataagatcagaaatgctcttgttggagttttgggaaagctggctgcaaaggctttcaaggatgttgagggtgatagcaatgctcggcttcgaagtaagcaggctatgctggagattttgattgagcgctgtagggatgtgtcagcatacacaaggagtcgtgtgcttcaggtgtggtctgagctttgtgaagaaaattctatttcaattggcctgtggaatgaagtggcttccgttgcttcagggcgactggaggacaaaagtgctattgtgagaaaatcagcattacagcttcttataacaatgctgcaacacaacccttttgggcctcagttaaggactgcaacctttgaggcaactctagaaaagtacaaggaaaaattacaaggaatggagccttcaaattcagacaaagatgaggccgcaaatgatagttcgcctggtgaagtgatcatggggcaagatgaaagtgtcagtgatagctgtttagcatcaagtcaggatcaaaatgaccgtgatgctacgattgtggatataacaaacttggaacaaataagagctttagttgcttcacttgaagctggtctgcggttttcaaagtgtataacttcgttaatgccaattcttgttcagttgttggcgtcatcctcagctactgatgttgagaacaccatccttttactgatgagatgcagacagtttcagatcgaaggatcagaagcagcactcaggaaaatgttacctctggtatcagcactgtgggactatttttgctttaacataaatggagtgagaccagtgcaaagccgtggagctctatctattctttgtatggctgcaaagtcgtctcccagcattttgggtaatcacttgcaagatattattgacattgggtttggacgctgggctaaggaagaacctctgcttgctagaactgcatgtcttgctttgcagagattatcagaggaagacaaggacaagctgataagtaataatagtagagtatttgctgcattgcaaggtttggtaacaagcttctcgattcctgagaaaatatggtatggagctgcagataaagctataagcaccatctataccctacaccctgcacctgaactttttgctactgagactgcaaagaagtctctcagttctgtattcagcgttttaggaacaaatgatgtgtcaaatggagatgaagctcagaatggtgcctctctgtcatcagtatcaccttcaaagctgggtagatttctttttgttattagccatatagcactaaatcatttggtgtacattgagaattctgttaggaaaattcagaaacagaaacggaagaatgaaaaatctcagcccaccactgaggatctccaacctgacgtgtctaaaagtttggaggcacaaggcataaatgccgaactgggacttagtgcaaccatagatattgcaatcgagtcccttgctgaaagagcagaaaaggaaattgtttgctgttcttctgaaaagaatctcataggacattgtgggccatttctctcaaaactctgcaggaatcttgcattgctgcaaaagttcccagaccttcaagcttctgcaatgcttgctctttgcaggctaatgatcattgatgcagagttctgcgaagcaaatcttcaaatcctgtttactgttgctgagagtgcgccttctgaaactgtccgatccaattgcactatagcccttggtgatttagcagttcgcttcccaaatctcttagatccttggacagagtatatatatgcccggttacgtgatccttcagtgtctgtgaggaagaatgctgtgctggtcatttctcatcttatattgaatgatatgatgaaggttaaagggtatataaatgaaatggctgtaagaatagaagataaagatgagaggatatcaagcctggcgaaactcttctttcacgagttgtcaaagaaaggaagcaacccaatttataatcttcttccggatatcttgggtagactatgcaatcaacacctcaaagaagaaacattttgcaatattatgcagttcttaatcaactcaattaagaaggacaaacaaatggaagctcttgtggataagctgtgcaataggtttgctggagtaaatgatgtcagacagtgggagtatatttcttattgcctttctcagctaaccttcactgaaaagggcctgaaaaaactcattgataattttaagatgtttgaacatgcattatctgaagattctgtgatgaaccacttcagaagcgtaatatcaaagtgcaagaagtttgcgaaacctgagctaaaaatttgcattgaggaatttgaggagaaacttagcaaggttcatcaggaaaagaaagagcaggaggaaacaacaaaaaatgctgaggcacacagacagagaattgattcgcttgatgaatttctggttactaaggaagttagtgagaacagtgggaattctgctgaagatgaaactagcgaggtagttgatccttctgtggatagcagcacggaacatatggagaacacgccagaatgcagtgtcaatactagtgctgagaattctcagacaacagccccacttacagaatcagaaggtggcggtgaagagattcaatccgcacaacctgttagcaaaggcatgtcacggttaagggcaaagaaaaccagagatcctgttgtagatccttcggtggaccgcagcaccgaatataaggggaacacgccagagcacagtgcggatactagtacggagaattctcagacatcagtcccacttacaggaacagaaggtggcagcgaagagattcaatccacacaacctgttggcaaaggcgtgtcgcggtcaagggcaaggaaaaccagagaccccgttgtagaggactcagcagctccagtgagacgcgccacgcgttcaaccagaagacaaggaagctgatggtgcagcaaagcggcagctcaagccattccgtgccgatctcgcctcgaggtcccggagtactggaccacagcaaagcggtgcctggacgtctggatcggagagttggctggctctatcctttttgcgtgatgcgtgtcggtctagttttagctcgctgattcccggacaggccaataatgatctctcgtgaatctgtctaggggcagtatgtttaactgctccatacgaggagctcttgtgtttggttgttgcagtaggtcggctttcatatggattgtctactacagacattgctcccttggggagcgtatgtataatatctggcctgatctttttgaggcctgatgacgctatgatatttttgaacgtgttgttcttatgaatccagcaggctcagctgatttccagcctttcaatgtgaccacagaatccca

SEQ ID NO: 70617 - DNA, 4723 bp, Zea Mays
cccacctccccacatgaggcgtgggcccttctcgccatacagagagactccctcacgaaaactcaccgtctcccgctctcgatttcgaaacactcgccactcttcgcctcccgttccccagcccagacccgaagccctgcgcctccccctccgccgctcgccgggcgagatgtccccgccgttcgtgttcccctcgaccctgcgggatctggagctggacaccgacggagacagagacgaggagccctcgctccggccgcagaaccccgtcgccgtcgccacgctccgcgctgccgacctcgaggagttcgtcaagggaggtgtttgatgccatctactctatcgtgcgtgatttcaattgcctacccccagcccttaagtttaacattgttgagaccttgcgctccaacctcagtgtccttctacccagcatagactcactttcccgggcatccatgtcatccccttctgatgctaccgaaatcactgaccgcattgcctcacaccgcaatgccctcaagatctactccttctttctcatttccattgttctcaccgcggaagctggcgctgaaagctgcacagcggctaaggcaacagcacatggtcgaaagaagaaccatatatattcttggaactgggaagcacaaagaggcaggatcatgagtctagtcgctaattctcttgaagctaacctttcgctactttttggtcctggaggaaccgatgaacgatatctctcttttgtttcgaagtgtacttttgttctctgtgaaaatcaaaatgtgttaaaagatgaggatacaagaaatggcctgtgccggataattggagcaattgccacgaagcatcagaggatttctcaaatcagtgcatctgtttcacatctaatacacaaatttgatttcactgttcctcatcttgcggaagcagttgcttctgcggagaaaaagtttggtgatggaagccttgcaatttccctgattagggaaataggtcgggctgatccaaaagaatacacgagagatagtgttggtgcggataatgttgggagattccttgtagaacttgcagaccgcttgccaaaacttatgtcaaccaacattggtgttctgatacctcactttggtggtgagtcatataagatcagaaatgctcttgttggagttttgggaaagctggctgcaaaggctttcaaggatgttgagggtgatagcaatgctcggcttcgaagtaagcaggctatgctggagattttgattgagcgctgtagggatgtgtcagcatacacaaggagtcgtgtgcttcaggtgtggtctgagctttgtgaagaaaattctatttcaattggcctgtggaatgaagtggcttccgttgcttcagggcgactggaggacaaaagtgctattgtgagaaaatcagcattacagcttcttataacaatgctgcaacacaacccttttgggcctcagttaaggactgcaacctttgaggcaactctagaaaagtacaaggaaaaattacaaggaatggagccttcaaattcagacaaagatgaggccgcaaatgatagttcgcctggtgaagtgatcatggggcaagatgaaagtgtcagtgatagctgtttagcatcaagtcaggatcaaaatgaccgtgatgctacgattgtggatataacaaacttggaacaaataagagctttagttgcttcacttgaagctggtctgcggttttcaaagtgtataacttcgttaatgccaattcttgttcagttgttggcgtcatcctcagctactgatgttgagaacaccatccttttactgatgagatgcagacagtttcagatcgaaggatcagaagcagcactcaggaaaatgttacctctggtgttttctcaggataagtcaatatatgaggcagtggagagtgcattcattactttatacacaaggaaaagtccaatagaaacagcaaaaagtttgttagaccttgccattgattgcagcattggtgaccttgctgctctcgagagcttaattagttccttagtttccaaagcagaaatttcatccagcatggtatcagcactgtgggactatttttgctttaacataaatggagtgagaccagtgcaaagccgtggagctctatctattctttgtatggctgcaaagtcgtctcccagcattttgggtaatcacttgcaagatattattgacattgggtttggacgctgggctaaggaagaacctctgcttgctagaactgcatgtcttgctttgcagagattatcagaggaagacaaggacaagctgataagtaataatagtagagtatttgctgcattgcaaggtttggtaacaagcttctcgattcctgagaaaatatggtatggagctgcagataaagctataagcaccatctataccctacaccctgcacctgaactttttgctactgagactgcaaagaagtctctcagttctgtattcagcgttttaggaacaaatgatgtgtcaaatggagatgaagctcagaatggtgcctctctgtcatcagtatcaccttcaaagctgggtagatttctttttgttattagccatatagcactaaatcatttggtgtacattgagaattctgttaggaaaattcagaaacagaaacggaagaatgaaaaatctcagcccaccactgaggatctccaacctgacgtgtctaaaagtttggaggcacaaggcataaatgccgaactgggacttagtgcaaccatagatattgcaatcgagtcccttgctgaaagagcagaaaaggaaattgtttgctgttcttctgaaaagaatctcataggacattgtgggccatttctctcaaaactctgcaggaatcttgcattgctgcaaaagttcccagaccttcaagcttctgcaatgcttgctctttgcaggctaatgatcattgatgcagagttctgcgaagcaaatcttcaaatcctgtttactgttgctgagagtgcgccttctgaaactgtccgatccaattgcactatagcccttggtgatttagcagttcgcttcccaaatctcttagatccttggacagagtatatatatgcccggttacgtgatccttcagtgtctgtgaggaagaatgctgtgctggtcatttctcatcttatattgaatgatatgatgaaggttaaagggtatataaatgaaatggctgtaagaatagaagataaagatgagaggatatcaagcctggcgaaactcttctttcacgagttgtcaaagaaaggaagcaacccaatttataatcttcttccggatatcttgggtagactatgcaatcaacacctcaaagaagaaacattttgcaatattatgcagttcttaatcaactcaattaagaaggacaaacaaatggaagctcttgtggataagctgtgcaataggtttgctggagtaaatgatgtcagacagtgggagtatatttcttattgcctttctcagctaaccttcactgaaaagggcctgaaaaaactcattgataattttaagatgtttgaacatgcattatctgaagattctgtgatgaaccacttcagaagcgtaatatcaaagtgcaagaagtttgcgaaacctgagctaaaaatttgcattgaggaatttgaggagaaacttagcaaggttcatcaggaaaagaaagagcaggaggaaacaacaaaaaatgctgaggcacacagacagagaattgattcgcttgatgaatttctggttactaaggaagttagtgagaacagtgggaattctgctgaagatgaaactagcgaggtagttgatccttctgtggatagcagcacggaacatatggagaacacgccagaatgcagtgtcaatactagtgctgagaattctcagacaacagccccacttacagaatcagaaggtggcggtgaagagattcaatccgcacaacctgttagcaaaggcatgtcacggttaagggcaaagaaaaccagagatcctgttgtagatccttcggtggaccgcagcaccgaatataaggggaacacgccagagcacagtgcggatactagtacggagaattctcagacatcagtcccacttacaggaacagaaggtggcagcgaagagattcaatccacacaacctgttggcaaaggcgtgtcgcggtcaagggcaaggaaaaccagagaccccgttgtagaggactcagcagctccagtgagacgcgccacgcgttcaaccagaagacaaggaagctgatggtgcagcaaagcggcagctcaagccattccgtgccgatctcgcctcgaggtcccggagtactggaccacagcaaagcggtgcctggacgtctggatcggagagttggctggctctatcctttttgcgtgatgcgtgtcggtctagttttagctcgctgattcccggacaggccaataatgatctctcgtgaatctgtctaggggcagtatgtttaactgctccatacgaggagctcttgtgtttggttgttgcagtaggtcggctttcatatggattgtctactacagacattgctcccttggggagcgtatgtataatatctggcctgatctttttgaggcctgatgacgctatgatatttttgaacgtgttgttcttatgaatccagcaggctcagctgatttccagcctttcaatgtgaccacagaatccca

SEQ ID NO: 70618 - DNA, 2819 bp, Zea Mays
ccccatcctgtccttccgttcagataacgccatccaacgcccaaggcgtgattaaaacaccacaagcagccaatcaatgacccgagcggacgatccaaaaactggggaaagtttcatcaatgccatcgccacctgtgaatctgtactctacagactccatggctcaatttaaggaaaaacaaaagcaacatgtccattgtttgttggttcaaacatcagtggggtattataattataaagagatcacaacagacacgaggcagccgtccgagttcaccaaacgcacgctagggtgataccaacactgacatacaagaacgaacacgggtttttttgctagtgtacaggcgcttctactttctctcctacttcgaaccagaagaaaacagagctgcgggaatagatggcccgcacatggcgcagcgcgagtgtgccgttcgtcctgacggccctcgcgcctccttcgatcctggtgcggacgaccgttactccgtgcccttgctccttgagggatgagaatggatcgtactctatcgctgtgctgattattgggaaggacaggtggtccaaagggttttgctcgcactgcagcagacactcctggatggtcaatctaccgcctcgatgcagcaagcagcatccgagttctgctctaatagtcagatttgcaatcttgcatgttgatagaaactccagtgcgctgtttgataggccaatcaatggaaacctaggtaagactgagacattgacagaaacagcaagataaacagaaccatgtaccagtgtgcaagttcattgctttctgaagtagacagaacttacattaccatttaccaactcaattccatgggaaaaaagacaatagatcaataaattgtatcctctcaactatcagacagacataaactactaacaatagaatatagttgaattaataaccttaagtcaagcataaaacagaaaagggggcatacccaggaataaaagtttttttctcctcaaacccgtaggacagctgtgcatcattatattaaaaagaagaaagaggagagcacacatgcaatattctagatacacatatgtgcctgtaacaagagagagagagagagaacagccacgaccagcagtaggcctcagttgtctactggctgtacagcgaagaggtaagaatacctcttgctccagctatttcccacagggtacaactcctcactagcgagtaatataaaagctctagttgccctaaaaaaagtaatgaaactctagctaaacttggagatgcaccatgaaacatgcatctattacgatgtttccataaggacaggctcccagaaataaaagctaccacacaaggtttaacgcaagcataacaaaaaaaaaacaaagccttttagtctcaaacaagatggggccggctagagttgaaacccaacataagccacaaatcaaggttcaggcacgtgaatagtttttttcaatgcactcctattgaatgccaaatctttcggtatattccaccttttagggctagtttagaaacttattcccggggattgaagagaaaattagcttaattttcccttcaatccccgagaatcccgaaggagatttaagtttccaaactagcccttaagtcttctttttacggtatcttcccatgtcaacttcatcctgcacatgcctctctttccattactattgtgccttaggatcccactaggcactggtgtctctggaagtcttcgttgaacctgtccaaaccatttcaaccggtgttggacaagcttttcttcaattgatgttatccctagtctatcatgtatatcattgttccagactcgatcccttctcgtatgaccacaaatccaatgcaacatacgcattttcgcaacacttatctgttgaacacgttgtgtttttgtagaccaacattatgcatcatacaaaataggtataatcgtcgtcctataaaacttgatttttggcttttgtggtacctcttgtcacataggagccagatgtttggcgccacttcacccaccctgctttggttctagggctaaaatcttcatcaatatcactgtctctctatagcattaatcctaaataccaaaaaaatatccttcctatgcaccactgacctccaaactaacatccttcctcctttgtagtagtgccgaagtcacaacttatatattcagttttagttctactgagtctaaaacatttaaattttagagtctcgcaccacaaactctaatttcctatttactcttgcacggctttcatcaactagcagtctagcactgcatcctccgcaaaaaaaaacatataccaagatatatccccatgtatatcccttgtgacatcatccattaccaaggcaaaaaggaaagcatacaacaataaattatgagaaacttaacttttcactactgcaccgcataaatcaagattgtatagattcagttatgttatacacttatactgatcattgtgtcacttgacataaataaacctagccaacatgctgctgagataaatctacaggaagcctcataatcattgcatttttaaggtgtactaaagttaacaaatttacaataagttgataaacatgacagtaatcaatcttgtaaaagatagaccaccataaacaactatgaaatgatcaggaagcagcagcagcagaagacaagaaaaacggccacatgagggaaagagcttacttgtcgaaaccacgtgagcaggtcaatacagtgtcatcaggaagatcgcccccgccaatctgatgtaagttaaatgggttcacagttgca

SEQ ID NO: 70619 - DNA, 260 bp, Zea Mays
ccagtgcaggttacctaggcagttttggttcaccgagaaccatggccgtcgtagctgcaaataccttcagaacaccaactgggaggaaaacaaaaggagcagattgggctcctgcctcctggagctctggcccaagtaaacggagcagactagcagaggatggcttctagttgtaaactctgctgttgatgtgcatgggtggactgtctggacgaggagcacggaccgtccgcagttggtagaaaggaggcaacggctag

SEQ ID NO: 70620 - DNA, 967 bp, Zea Mays
cgacattcttggattatatttttggatggagacttgtgagttattttcataaaccaacgtcaagcatgaatccatgtttcttacttgaaaccccgaaaaaacaccatgagcaagaggcactcgcgttggcgtcactcatcgatgacgagaagaagcttggcgactgtcagttcgacctctagaagcagtcctacgtggtcgcatgcgccgctgtgtacgacaagctcccgcgaagctgccgcttggacgcggtccagagcagctgcaccacgctgtccatcgttaagcagggagcctcatggttgtcgccaacgtcgacgactctcgggttgttctggacaccgcatccgacaacgacgccatcacgtcgtccagctcatcgtccaccggaagcccaacctgccacgtaagtcgctactgaccgaacatgaattcttgtgcgctgggacgatggacgttgttgacgttgtgtgagtgtcctcgaacatgatgtatgtagtggagtagcgcatccggtggtgcaacggccaggggtactacctcgttgatgagcccgtggtgcacttcgtttggcagtccaaccaagagtcatcggtactcgtcatgtcgcgcgcgttcgacgactactatatcgaggattgtggtgtcatcttggcgctggaggtgacgcagaggaggatcgacaacagtgaccagttcgtcatcctcaccaccgtcagggtagcttttatgccggcctgcctttaattctcttcgcaaacacacacttaccttttttaagcaagagcgtatgatggtgtgtgtctgatgactaacgatgtatgagggaattttttccggcatgtgtggaacatgctctccaatgatgagaccatacaaatcgtggcatatatcgaagtctgcatgatactgatggttgcaatgtaatggtgaaacaactagattaaaataacaaaatttatgtatg

SEQ ID NO: 70621 - DNA, 1027 bp, Zea Mays
gaccagtgcaggttacctaggcagttttggttcaccgagaaccatggccgtcgtagctgcaaataccttcagaacaccaactgggaggaaaacaaaaggagcagattgggctcctgcctcctggagctctggcccaagtaaacggagcagactagcagaggatggcttctagttgtaaactctgacttgtgagttattttcataaaccaacgtcaagcatgaatccatgtttcttacttgaaaccccgaaaaaacaccatgagcaagaggcactcgcgttggcgtcactcatcgatgacgagaagaagcttggcgactgtcagttcgacctctagaagcagtcctacgtggtcgcatgcgccgctgtgtacgacaagctcccgcgaagctgccgcttggacgcggtccagagcagctgcaccacgctgtccatcgttaagcagggagcctcatggttgtcgccaacgtcgacgactctcgggttgttctggacaccgcatccgacaacgacgccatcacgtcgtccagctcatcgtccaccggaagcccaacctgccactggagtagcgcatccggtggtgcaacggccaggggtactacctcgttgatgagcccgtggtgcacttcgtttggcagtccaaccaagagtcatcggtactcgtcatgtcgcgcgcgttcgacgactactatatcgaggattgtggtgtcatcttggcgctggaggtgacgcagaggaggatcgacaacagtgaccagttcgtcatcctcaccaccgtcagggtagcttttatgccggcctgcctttaattctcttcgcaaacacacacttaccttttttaagcaagagcgtatgatggtgtgtgtctgatgactaacgatgtatgagggaattttttccggcatgtgtggaacatgctctccaatgatgagaccatacaaatcgtggcatatatcgaagtctgcatgatactgatggttgcaatgtaatggtgaaacaactagattaaaataacaaaatttatgtatg

SEQ ID NO: 70622 - DNA, 3437 bp, Zea Mays
ggagactaaccatcgtgtgcttatattctcacagatggttaagatgttggacatccttgcagaatatctctcccttcggggatttcagtttcagaggcttgatggtagtacaagagcagatcttcgtcatcaagccatggaacattttaatgctcctggaagtgatgacttctgttttcttttatccacacgtgccggaggacttggtattaatcttgcaactgcagatacagtgataatttttgattcagattggaatccacaaaatgatctgcaggttcttcctctcattctcttcctcctgcaagttcttgatcacttggttattcagaagctaaatgctgagggcaggcttgagaagaaagaatccaaaaagggtggctccatatttgacaagaatgaactttcggctatcttgaggtttggagcagaggaattgttcaaagaagacaagactgatgaagaggccaagagaaaccttgaaagtttggacattgatgaaattcttgagagagcagagaaagtcgagacaaagggtggtgaaggggaggaaggaaatgagcttcttagtgctttcaaggcatgtgatgtcgcaaacttttccagtggcgaggatgatgcaacattctggagtaggctaatacagccagatcctgcagatattattcaggaaactttggcgcctcgtgctgcacgtaataaaaagagttatgttgaagatccccagtttgacaaaaataataacaggaaaagacgtgcagttgaagcacaagaaaagccaaggaggcgttctggcagaacagtggaaacagttaattcagtaccattggttgatggagcagtagctcaagtacgagagtggtcttttggtaatattccaaagaaggatgcttctcgttttgtacgagcggttaaaaaatttgggaatgcaacccagattgacttaattgtggatgatgttggtggtgtactagagaaggcaccacatgaagcacaaatagagctatttgatttgttgattgatggttgtcagaaaagctgttaaagagaatacagatatcaagggcacagttttggattttttcggtgtagctgtgaaggcctatgaattgctagctcgtgttgaagagcttcagttgttgtcaaagcgcattgcacgatacaaagatccaatcaagcaataccgcatccaactaccttataaaaagcctcagtggtcagcaagctgtggatggactgaaactgatgatgctagattgatggttggaattcattggtatggctacgggaattgggagaaaatacgtttggatccaaagcttggcctgacaacaaaaattgcaccagcaacacttggtgagagagagacatttttaccacgtgctccaaacttggataaccgtgctagcgctctcctgcaaaaggaatatgctaagtttagcggtaatagctcaaaagtcaaaggaaatgcccgccagacagtcaataacgacagtaatagtggagctcgatcaatgagaggccgacaaaaggatgcaccagataaagaggataataagccgaacaaagatgacattcagaagcgcaaggtaatgatggaagctgaagcaagagaagaaggtgaaatttctgaatcagaggcagagacaaagtatcgtctggacaaagaggagaagtggctcgaatggtgctctgaagttttaaatgaggaacaggaaactttgaagcgcctggacaggctgcagaatacaagtgtaaacctcccaaaggaaaaggttctttcaagaatccgcaagtatctcctgataattggggacaaaattggtgaagttgtccggcaacacagtgaatcttataggcaatcccgtaagtgtagccgcacctcccgcatgaccatgaggttatggaattatgttgccaccttttcaaacatgtctggggagcaattgcatgatctctatttgaaacttagtcaagaccaactggaaggtggagttggcccatctcatggtgccaatttcacatccattccttccagcaagggaggtaactcaaatcaacttcatcctacaagaaaccataggccaaccaggtctctccagtacaattctgagtctttgcacaataatgagagctctggaagttctgaagcctggaagcgtcgacggagagcagaccctgataatcagtttgacacccagcctttgtatcaacctccaattatgacaaatggaaataggttgcaggaatctagtagttctgcaggaattcttggttggggtccagttgaaatgagacggtatggtaatgaaaggccaaagcgtggtgttcatcctagtcattttcctactgggcatggacctttgttgtagctgaaggaattagatgactcgaacaaccttgtccactttggcataactgttcccagtgaatttcagcttccatatagttacaaatggtggaactctgtcggaattgaaattcttttttccataacaagaaggaataaaaagcaagacctgacctggagcgcagtttgaatactgtccctcaaaggtaatgccaggactccagaggcgacgcagggatttgttaacagctacactgaatatccttctgacaacatcacagtaaaacgaatacatggtggcttgtcaactgccaagaggattaatcgaggaaattttgtcgattcagttttgtgatccaatagaaaagttgggggtcattaggaaaaagttcatctcaacaatgatctatagttcactctatacatgtattatgttttacattgcaatataatgaaatatggttcagttattcccactcagtgtgttttgtgcccttctgtattgatgtaatagatcaaagaaatgcatgttctcgttttttttttttttttttagaaaaccgcaggagaactgcgcatcttatatattagagaggaaaaaagacattacaaaagaggagaagttgcagagcaactctcccacctaataaagaagttgcagctgggggggcatagtatgtgttagtttcaatttctctaaatagaggaaatatatattttgttcacgcgatggaatcggtagatacttgaattgattccatagtatttttttcctgaggtgatgtgagaatgaggtgtgtggttatatgtatttcaaataattgtttgacaacacggtgttatgatttacattttgacatgtcatgatctgtattctgtggtgcaggttagctaggtgatcaaagccattctacaagtcatttcgcaaaagcaaacaatttaggagttgcatgaggcctactttaccctggatgcctcacttttgttatttagatgcagtgaggatgtttctagctctgtgctccctccctcataaatatgacattgcgaaactttgatcatccgtctcattcaaaaaattcttgag

SEQ ID NO: 70623 - DNA, 3285 bp, Zea Mays
gtgagactacgggagactaaccatcgtgtgcttatattctcacagatggttaagatgttggacatccttgcagaatatctctcccttcggggatttcagtttcagaggcttgatggtagtacaagagcagatcttcgtcatcaagccatggaacattttaatgctcctggaagtgatgacttctgttttcttttatccacacgtgccggaggacttggtattaatcttgcaactgcagatacagtgataatttttgattcagattggaatccacaaaatgatctgcaggttcttcctctcattctcttcctcctgcaagttcttgatcacttggttattcagaagctaaatgctgagggcaggcttgagaagaaagaatccaaaaagggtggctccatatttgacaagaatgaactttcggctatcttgaggtttggagcagaggaattgttcaaagaagacaagactgatgaagaggccaagagaaaccttgaaagtttggacattgatgaaattcttgagagagcagagaaagtcgagacaaagggtggtgaaggggaggaaggaaatgagcttcttagtgctttcaaggtcgcaaacttttccagtggcgaggatgatgcaacattctggagtaggctaatacagccagatcctgcagatattattcaggaaactttggcgcctcgtgctgcacgtaataaaaagagttatgttgaagatccccagtttgacaaaaataataacaggaaaagacgtgcagttgaagcacaagaaaagccaaggaggcgttctggcagaacagtggaaacagttaattcagtaccattggttgatggagcagtagctcaagtacgagagtggtcttttggtaatattccaaagaaggatgcttctcgttttgtacgagcgggcacagttttggattttttcggtgtagctgtgaaggcctatgaattgctagctcgtgttgaagagcttcagttgttgtcaaagcgcattgcacgatacaaagatccaatcaagcaataccgcatccaactaccttataaaaagcctcagtggtcagcaagctgtggatggactgaaactgatgatgctagattgatggttggaattcattggtatggctacgggaattgggagaaaatacgtttggatccaaagcttggcctgacaacaaaaattgcaccagcaacacttggtgagagagagacatttttaccacgtgctccaaacttggataaccgtgctagcgctctcctgcaaaaggaatatgctaagtttagcggtaatagctcaaaagtcaaaggaaatgcccgccagacagtcaataacgacagtaatagtggagctcgatcaatgagaggccgacaaaaggatgcaccagataaagaggataataagccgaacaaagatgacattcagaagcgcaaggtaatgatggaagctgaagcaagagaagaaggtgaaatttctgaatcagaggcagagacaaagtatcgtctggacaaagaggagaagtggctcgaatggtgctctgaagttttaaatgaggaacaggaaactttgaagcgcctggacaggctgcagaatacaagtgtaaacctcccaaaggaaaaggttctttcaagaatccgcaagtatctcctgataattggggacaaaattggtgaagttgtccggcaacacagtgaatcttataggcaatcccgtaagtgtagccgcacctcccgcatgaccatgaggttatggaattatgttgccaccttttcaaacatgtctggggagcaattgcatgatctctatttgaaacttagtcaagaccaactggaaggtggagttggcccatctcatggtgccaatttcacatccattccttccagcaagggaggtaactcaaatcaacttcatcctacaagaaaccataggccaaccaggtctctccagtacaattctgagtctttgcacaataatgagagctctggaagttctgaagcctggaagcgtcgacggagagcagaccctgataatcagtttgacacccagcctttgtatcaacctccaattatgacaaatggaaataggttgcaggaatctagtagttctgcaggaattcttggttggggtccagttgaaatgagacggtatggtaatgaaaggccaaagcgtggtgttcatcctagtcattttcctactgggcatggacctttgttgtagctgaaggaattagatgactcgaacaaccttgtccactttggcataactgttcccagtgaatttcagcttccatatagttacaaatggtggaactctgtcggaattgaaattcttttttccataacaagaaggaataaaaagcaagacctgacctggagcgcagtttgaatactgtccctcaaaggtaatgccaggactccagaggcgacgcagggatttgttaacagctacactgaatatccttctgacaacatcacagtaaaacgaatacatggtggcttgtcaactgccaagaggattaatcgaggaaattttgtcgattcagttttgtgatccaatagaaaagttgggggtcattaggaaaaagttcatctcaacaatgatctatagttcactctatacatgtattatgttttacattgcaatataatgaaatatggttcagttattcccactcagtgtgttttgtgcccttctgtattgatgtaatagatcaaagaaatgcatgttctcgttttttttttttttttttagaaaaccgcaggagaactgcgcatcttatatattagagaggaaaaaagacattacaaaagaggagaagttgcagagcaactctcccacctaataaagaagttgcagctgggggggcatagtatgtgttagtttcaatttctctaaatagaggaaatatatattttgttcacgcgatggaatcggtagatacttgaattgattccatagtatttttttcctgaggtgatgtgagaatgaggtgtgtggttatatgtatttcaaataattgtttgacaacacggtgttatgatttacattttgacatgtcatgatctgtattctgtggtgcaggttagctaggtgatcaaagccattctacaagtcatttcgcaaaagcaaacaatttaggagttgcatgaggcctactttaccctggatgcctcacttttgttatttagatgcagtgaggatgtttctagctctgtgctccctccctcataaatatgacattgcgaaactttgatcatccgtctcattcaaaaaattcttgag

SEQ ID NO: 70624 - DNA, 4642 bp, Zea Mays
cttcaaagttggattcaagaaggtaataaattacacgaaaagagttgctgaggaacagaggtacaagagggcactatcacgtgaagaggttgaggtgcatgatgtgggcaaggagatggagctggatcttattaaacaatatagtcaggttgaacggatatttgctgatagggtcagcaaagctgatggagatgatctggttcctgaatatttagtcaaatggcaaggacttccttatgcagaatctacctgggaaaaagatacagatatcgattttgctcaagatgcaattgatgaatataaggctcgtgaagctgccacatctatacttgggaaaacagtagatttccaacgaaagaaaagcaaagctagtttgaggaggcttgatgatcagccagaatggctaaaagctggtaagcttcgtgattatcagctggaaggactaaactttctcgtgaatgggtggagaaatgatactaatgttatacttgctgatgaaatgggtctggggaaaactatccaatctgtttccatgcttggcttccttcataatgctcaagaaatcaatggtccatttcttgtagttgtgccactgtcaacattgtcgaactgggcaaaagaatttcggaagtggctgcccaacatgaatgttgtcatttatgttggcaaccgtgccagcagagagatgtgccagaagcatgagtttttttcagacaagaagggtgggcgtcatgtaaaattccatacgttgataactacatatgaggtgattctcaaggacaaagcggttctttccaagatcaaatggaactatcttatggttgatgaagcccaccggttgaaaaattgtgaagcatcactatatactacccttttggaattcagcactaagaataagctgcttatcactggaacacctttgcagaacagtgtggaagagctttgggcattacttcatttccttgatccagttaaattcaacagcaaggatagttttgttgaaagatacaaaaatttgagttccttcaatgaaaccgagcttgcgaatctgcataaggaattgaggcctcatattctaaggcgggttataaaagatgtcgagaagtctttacctcctaaaattgaacggattctacgtgtcgagatgtcaccccttcagaaacaatactacaagtggattttagagcggaatttccagaatctaaataaaggagtccgtgggaatcaggtatcacttttgaacattgttgttgaattgaagaaatgctgcaaccatccatttttgtttgaaagtgccgatcacggttatggtggagatagcattggcgatcggaataaagttgaacggattgttatgagtagtggtaaacttgtcttgttggacaaactattgatggttaagatgttggacatccttgcagaatatctctcccttcggggatttcagtttcagaggcttgatggtagtacaagagcagatcttcgtcatcaagccatggaacattttaatgctcctggaagtgatgacttctgttttcttttatccacacgtgccggaggacttggtattaatcttgcaactgcagatacagtgataatttttgattcagattggaatccacaaaatgatctgcaggttcttcctctcattctcttcctcctgcaagttcttgatcacttggttattcagaagctaaatgctgagggcaggcttgagaagaaagaatccaaaaagggtggctccatatttgacaagaatgaactttcggctatcttgaggtttggagcagaggaattgttcaaagaagacaagactgatgaagaggccaagagaaaccttgaaagtttggacattgatgaaattcttgagagagcagagaaagtcgagacaaagggtggtgaaggggaggaaggaaatgagcttcttagtgctttcaaggcatgtgatgtcgcaaacttttccagtggcgaggatgatgcaacattctggagtaggctaatacagccagatcctgcagatattattcaggaaactttggcgcctcgtgctgcacgtaataaaaagagttatgttgaagatccccagtttgacaaaaataataacaggaaaagacgtgcagttgaagcacaagaaaagccaaggaggcgttctggcagaacagtggaaacagttaattcagtaccattggttgatggagcagtagctcaagtacgagagtggtcttttggtaatattccaaagaaggatgcttctcgttttgtacgagcgggcacagttttggattttttcggtgtagctgtgaaggcctatgaattgctagctcgtgttgaagagcttcagttgttgtcaaagcgcattgcacgatacaaagatccaatcaagcaataccgcatccaactaccttataaaaagcctcagtggtcagcaagctgtggatggactgaaactgatgatgctagattgatggttggaattcattggtatggctacgggaattgggagaaaatacgtttggatccaaagcttggcctgacaacaaaaattgcaccagcaacacttggtgagagagagacatttttaccacgtgctccaaacttggataaccgtgctagcgctctcctgcaaaaggaatatgctaagtttagcggtaatagctcaaaagtcaaaggaaatgcccgccagacagtcaataacgacagtaatagtggagctcgatcaatgagaggccgacaaaaggatgcaccagataaagaggataataagccgaacaaagatgacattcagaagcgcaaggtaatgatggaagctgaagcaagagaagaaggtgaaatttctgaatcagaggcagagacaaagtatcgtctggacaaagaggagaagtggctcgaatggtgctctgaagttttaaatgaggaacaggaaactttgaagcgcctggacaggctgcagaatacaagtgtaaacctcccaaaggaaaaggttctttcaagaatccgcaagtatctcctgataattggggacaaaattggtgaagttgtccggcaacacagtgaatcttataggcaatcccgtaagtgtagccgcacctcccgcatgaccatgaggttatggaattatgttgccaccttttcaaacatgtctggggagcaattgcatgatctctatttgaaacttagtcaagaccaactggaaggtggagttggcccatctcatggtgccaatttcacatccattccttccagcaagggaggtaactcaaatcaacttcatcctacaagaaaccataggccaaccaggtctctccagtacaattctgagtctttgcacaataatgagagctctggaagttctgaagcctggaagcgtcgacggagagcagaccctgataatcagtttgacacccagcctttgtatcaacctccaattatgacaaatggaaataggttgcaggaatctagtagttctgcaggaattcttggttggggtccagttgaaatgagacggtatggtaatgaaaggccaaagcgtggtgttcatcctagtcattttcctactgggcatggacctttgttgtagctgaaggaattagatgactcgaacaaccttgtccactttggcataactgttcccagtgaatttcagcttccatatagttacaaatggtggaactctgtcggaattgaaattcttttttccataacaagaaggaataaaaagcaagacctgacctggagcgcagtttgaatactgtccctcaaaggtaatgccaggactccagaggcgacgcagggatttgttaacagctacactgaatatccttctgacaacatcacagtaaaacgaatacatggtggcttgtcaactgccaagaggattaatcgaggaaattttgtcgattcagttttgtgatccaatagaaaagttgggggtcattaggaaaaagttcatctcaacaatgatctatagttcactctatacatgtattatgttttacattgcaatataatgaaatatggttcagttattcccactcagtgtgttttgtgcccttctgtattgatgtaatagatcaaagaaatgcatgttctcgttttttttttttttttttagaaaaccgcaggagaactgcgcatcttatatattagagaggaaaaaagacattacaaaagaggagaagttgcagagcaactctcccacctaataaagaagttgcagctgggggggcatagtatgtgttagtttcaatttctctaaatagaggaaatatatattttgttcacgcgatggaatcggtagatacttgaattgattccatagtatttttttcctgaggtgatgtgagaatgaggtgtgtggttatatgtatttcaaataattgtttgacaacacggtgttatgatttacattttgacatgtcatgatctgtattctgtggtgcaggttagctaggtgatcaaagccattctacaagtcatttcgcaaaagcaaacaatttaggagttgcatgaggcctactttaccctggatgcctcacttttgttatttagatgcagtgaggatgtttctagctctgtgctccctccctcataaatatgacattgcgaaactttgatcatccgtctcattcaaaaaattcttgag

SEQ ID NO: 70625 - DNA, 6107 bp, Zea Mays
aggtattccatataatgccataatctgggatggcattcttcagcaactccgggagcaaggctgattcaggagggtacaacctgaatgaaaaggccgaagatgagggcatctacgagtcagttcaggatgggaatgttgacctgagttctaggcagtggaacttaaatgagaaagcagatgatgcttaccattgtgaagcagagcaatatgaggcgggccagtcaggtttgtactcttctgagaaggcatcagggcagcatatccagaaaggaggcagatcttctggtggtccatggggcacaaattttctgaaggattccaggtccaaacagatggccgaggatgttccatcgaatagtggtagaggaatgaatgctgctagcttgcatgatggcttggatgatagtggagaggatgatgagctgaacagggcaaatggtgaggtgcctgctgaggaaatgctctccgatgactattatgagcaggacggagaggagcagattgaatcgttgcatcgtggcgggacgaagcaatcaagctgttccacttctgaagacgaccccgctgatgtggattttgagccagacagcgaaacggacaaagctactgataagatgatgatgatgactttgttgagaaccggaggcaacctaaacgacttaagattgtagcaactaaaacttccaagggaaggaagttgcccatgccagctcaacgaaaacgaggggtgtctcacagcgatgaagaatattcttcaggaaaagattcagatcttcccagtgatgctgatttcaaacacagatcgaaaagacctgacaggttgcatcagaaatctgtgggccgcagtgatgttgccccaatcaattctcataatgagcttcgaacttctggaaggaggacagtgaaaaagatctcatatgttgaaagcgaagaaagtgatgatagcgaggagaagtcaactaaacaacaaaaggaggagctggaagaggaagacggagaaacaattgaaaaagttctttggcatcaacccaagggtgtagctgaagaagcaataaagaatcaccaatcagctcaacctactgttgtcagcctaacatcggactttgatcaacagtgggatgaattagagttctatataaaatggaaaggccagtcttacctgcattgtcaatggaagacattatcagagcttcaaagtgttagtggattcaagaaggtaataaattacacgaaaagagttgctgaggaacagaggtacaagagggcactatcacgtgaagaggttgaggtgcatgatgtgggcaaggagatggagctggatcttattaaacaatatagtcaggttgaacggatatttgctgatagggtcagcaaagctgatggagatgatctggttcctgaatatttagtcaaatggcaaggacttccttatgcagaatctacctgggaaaaagatacagatatcgattttgctcaagatgcaattgatgaatataaggctcgtgaagctgccacatctatacttgggaaaacagtagatttccaacgaaagaaaagcaaagctagtttgaggaggcttgatgatcagccagaatggctaaaagctggtaagcttcgtgattatcagctggaaggactaaactttctcgtgaatgggtggagaaatgatactaatgttatacttgctgatgaaatgggtctggggaaaactatccaatctgtttccatgcttggcttccttcataatgctcaagaaatcaatggtccatttcttgtagttgtgccactgtcaacattgtcgaactgggcaaaagaatttcggaagtggctgcccaacatgaatgttgtcatttatgttggcaaccgtgccagcagagagatgtgccagaagcatgagtttttttcagacaagaagggtgggcgtcatgtaaaattccatacgttgataactacatatgaggtgattctcaaggacaaagcggttctttccaagatcaaatggaactatcttatggttgatgaagcccaccggttgaaaaattgtgaagcatcactatatactacccttttggaattcagcactaagaataagctgcttatcactggaacacctttgcagaacagtgtggaagagctttgggcattacttcatttccttgatccagttaaattcaacagcaaggatagttttgttgaaagatacaaaaatttgagttccttcaatgaaaccgagcttgcgaatctgcataaggaattgaggcctcatattctaaggcgggttataaaagatgtcgagaagtctttacctcctaaaattgaacggattctacgtgtcgagatgtcaccccttcagaaacaatactacaagtggattttagagcggaatttccagaatctaaataaaggagtccgtgggaatcaggtatcacttttgaacattgttgttgaattgaagaaatgctgcaaccatccatttttgtttgaaagtgccgatcacggttatggtggagatagcattggcgatcggaataaagttgaacggattgttatgagtagtggtaaacttgtcttgttggacaaactattggtgagactacgggagactaaccatcgtgtgcttatattctcacagatggttaagatgttggacatccttgcagaatatctctcccttcggggatttcagtttcagaggcttgatggtagtacaagagcagatcttcgtcatcaagccatggaacattttaatgctcctggaagtgatgacttctgttttcttttatccacacgtgccggaggacttggtattaatcttgcaactgcagatacagtgataatttttgattcagattggaatccacaaaatgatctgcaggccatgagtagggcacataggattggccaacaggaaactgttaatatctaccgcttcgtcacatgcaaaagtgttgaagaggatattttggaacgcgcaaagaaaaagatggttcttgatcacttggttattcagaagctaaatgctgagggcaggcttgagaagaaagaatccaaaaagggtggctccatatttgacaagaatgaactttcggctatcttgaggtttggagcagaggaattgttcaaagaagacaagactgatgaagaggccaagagaaaccttgaaagtttggacattgatgaaattcttgagagagcagagaaagtcgagacaaagggtggtgaaggggaggaaggaaatgagcttcttagtgctttcaaggtcgcaaacttttccagtggcgaggatgatgcaacattctggagtaggctaatacagccagatcctgcagatattattcaggaaactttggcgcctcgtgctgcacgtaataaaaagagttatgttgaagatccccagtttgacaaaaataataacaggaaaagacgtgcagttgaagcacaagaaaagccaaggaggcgttctggcagaacagtggaaacagttaattcagtaccattggttgatggagcagtagctcaagtacgagagtggtcttttggtaatattccaaagaaggatgcttctcgttttgtacgagcggttaaaaaatttgggaatgcaacccagattgacttaattgtggatgatgttggtggtgtactagagaaggcaccacatgaagcacaaatagagctatttgatttgttgattgatggttgtcagaaaagctgttaaagagaatacagatatcaagggcacagttttggattttttcggtgtagctgtgaaggcctatgaattgctagctcgtgttgaagagcttcagttgttgtcaaagcgcattgcacgatacaaagatccaatcaagcaataccgcatccaactaccttataaaaagcctcagtggtcagcaagctgtggatggactgaaactgatgatgctagattgatggttggaattcattggtatggctacgggaattgggagaaaatacgtttggatccaaagcttggcctgacaacaaaaattgcaccagcaacacttggtgagagagagacatttttaccacgtgctccaaacttggataaccgtgctagcgctctcctgcaaaaggaatatgctaagtttagcggtaatagctcaaaagtcaaaggaaatgcccgccagacagtcaataacgacagtaatagtggagctcgatcaatgagaggccgacaaaaggatgcaccagataaagaggataataagccgaacaaagatgacattcagaagcgcaaggtaatgatggaagctgaagcaagagaagaaggtgaaatttctgaatcagaggcagagacaaagtatcgtctggacaaagaggagaagtggctcgaatggtgctctgaagttttaaatgaggaacaggaaactttgaagcgcctggacaggctgcagaatacaagtgtaaacctcccaaaggaaaaggttctttcaagaatccgcaagtatctcctgataattggggacaaaattggtgaagttgtccggcaacacagtgaatcttataggcaatcccgtaagtgtagccgcacctcccgcatgaccatgaggttatggaattatgttgccaccttttcaaacatgtctggggagcaattgcatgatctctatttgaaacttagtcaagaccaactggaaggtggagttggcccatctcatggtgccaatttcacatccattccttccagcaagggaggtaactcaaatcaacttcatcctacaagaaaccataggccaaccaggtctctccagtacaattctgagtctttgcacaataatgagagctctggaagttctgaagcctggaagcgtcgacggagagcagaccctgataatcagtttgacacccagcctttgtatcaacctccaattatgacaaatggaaataggttgcaggaatctagtagttctgcaggaattcttggttggggtccagttgaaatgagacggtatggtaatgaaaggccaaagcgtggtgttcatcctagtcattttcctactgggcatggacctttgttgtagctgaaggaattagatgactcgaacaaccttgtccactttggcataactgttcccagtgaatttcagcttccatatagttacaaatggtggaactctgtcggaattgaaattcttttttccataacaagaaggaataaaaagcaagacctgacctggagcgcagtttgaatactgtccctcaaaggtaatgccaggactccagaggcgacgcagggatttgttaacagctacactgaatatccttctgacaacatcacagtaaaacgaatacatggtggcttgtcaactgccaagaggattaatcgaggaaattttgtcgattcagttttgtgatccaatagaaaagttgggggtcattaggaaaaagttcatctcaacaatgatctatagttcactctatacatgtattatgttttacattgcaatataatgaaatatggttcagttattcccactcagtgtgttttgtgcccttctgtattgatgtaatagatcaaagaaatgcatgttctcgttttttttttttttttttagaaaaccgcaggagaactgcgcatcttatatattagagaggaaaaaagacattacaaaagaggagaagttgcagagcaactctcccacctaataaagaagttgcagctgggggggcatagtatgtgttagtttcaatttctctaaatagaggaaatatatattttgttcacgcgatggaatcggtagatacttgaattgattccatagtatttttttcctgaggtgatgtgagaatgaggtgtgtggttatatgtatttcaaataattgtttgacaacacggtgttatgatttacattttgacatgtcatgatctgtattctgtggtgcaggttagctaggtgatcaaagccattctacaagtcatttcgcaaaagcaaacaatttaggagttgcatgaggcctactttaccctggatgcctcacttttgttatttagatgcagtgaggatgtttctagctctgtgctccctccctcataaatatgacattgcgaaactttgatcatccgtctcattcaaaaaattcttgag

SEQ ID NO: 70626 - DNA, 5901 bp, Zea Mays
gtgatactgagcctgtgagaggtattccatataatgccataatctgggatggcattcttcagcaactccgggagcaaggctgattcaggagggtacaacctgaatgaaaaggccgaagatgagggcatctacgagtcagttcaggatgggaatgttgacctgagttctaggcagtggaacttaaatgagaaagcagatgatgcttaccattgtgaagcagagcaatatgaggcgggccagtcaggtttgtactcttctgagaaggcatcagggcagcatatccagaaaggaggcagatcttctggtggtccatggggcacaaattttctgaaggattccaggtccaaacagatggccgaggatgttccatcgaatagtggtagaggaatgaatgctgctagcttgcatgatggcttggatgatagtggagaggatgatgagctgaacagggcaaatggtgaggtgcctgctgaggaaatgctctccgatgactattatgagcaggacggagaggagcagattgaatcgttgcatcgtggcgggacgaagcaatcaagctgttccacttctggtggggcagcaaaatctggctcacgacaaatgaaggcgtcaaagtacaatgcttatgacgacgatgatgacgatgactataatgatgagaatgacgatgacaatgacgctgatgaagacgaccccgctgatgtggattttgagccagacagcgaaacggacaaagctactgataaggataagtttatggatagtgagaattctgatggcgacgatgatgatggccttgaactctcagatgatgatgatgactttgttgagaaccggaggcaacctaaacgacttaagattgtagcaactaaaacttccaagggaaggaagttgcccatgccagctcaacgaaaacgaggggtgtctcacagcgatgaagaatattcttcaggaaaagattcagatcttcccagtgatgctgatttcaaacacagatcgaaaagacctgacaggttgcatcagaaatctgtgggccgcagtgatgttgccccaatcaattctcataatgagcttcgaacttctggaaggaggacagtgaaaaagatctcatatgttgaaagcgaagaaagtgatgatagcgaggagaagtcaactaaacaacaaaaggttagtggattcaagaaggtaataaattacacgaaaagagttgctgaggaacagaggtacaagagggcactatcacgtgaagaggttgaggtgcatgatgtgggcaaggagatggagctggatcttattaaacaatatagtcaggttgaacggatatttgctgatagggtcagcaaagctgatggagatgatctggttcctgaatatttagtcaaatggcaaggacttccttatgcagaatctacctgggaaaaagatacagatatcgattttgctcaagatgcaattgatgaatataaggctcgtgaagctgccacatctatacttgggaaaacagtagatttccaacgaaagaaaagcaaagctagtttgaggaggcttgatgatcagccagaatggctaaaagctggtaagcttcgtgattatcagctggaaggactaaactttctcgtgaatgggtggagaaatgatactaatgttatacttgctgatgaaatgggtctggggaaaactatccaatctgtttccatgcttggcttccttcataatgctcaagaaatcaatggtccatttcttgtagttgtgccactgtcaacattgtcgaactgggcaaaagaatttcggaagtggctgcccaacatgaatgttgtcatttatgttggcaaccgtgccagcagagagatgtgccagaagcatgagtttttttcagacaagaagggtgggcgtcatgtaaaattccatacgttgataactacatatgaggtgattctcaaggacaaagcggttctttccaagatcaaatggaactatcttatggttgatgaagcccaccggttgaaaaattgtgaagcatcactatatactacccttttggaattcagcactaagaataagctgcttatcactggaacacctttgcagaacagtgtggaagagctttgggcattacttcatttccttgatccagttaaattcaacagcaaggatagttttgttgaaagatacaaaaatttgagttccttcaatgaaaccgagcttgcgaatctgcataaggaattgaggcctcatattctaaggcgggttataaaagatgtcgagaagtctttacctcctaaaattgaacggattctacgtgtcgagatgtcaccccttcagaaacaatactacaagtggattttagagcggaatttccagaatctaaataaaggagtccgtgggaatcaggtatcacttttgaacattgttgttgaattgaagaaatgctgcaaccatccatttttgtttgaaagtgccgatcacggttatggtggagatagcattggcgatcggaataaagttgaacggattgttatgagtagtggtaaacttgtcttgttggacaaactattggtgagactacgggagactaaccatcgtgtgcttatattctcacagatggttaagatgttggacatccttgcagaatatctctcccttcggggatttcagtttcagaggcttgatggtagtacaagagcagatcttcgtcatcaagccatggaacattttaatgctcctggaagtgatgacttctgttttcttttatccacacgtgccggaggacttggtattaatcttgcaactgcagatacagtgataatttttgattcagattggaatccacaaaatgatctgcaggccatgagtagggcacataggattggccaacaggaaactgttaatatctaccgcttcgtcacatgcaaaagtgttgaagaggatattttggaacgcgcaaagaaaaagatggttcttgatcacttggttattcagaagctaaatgctgagggcaggcttgagaagaaagaatccaaaaagggtggctccatatttgacaagaatgaactttcggctatcttgaggtttggagcagaggaattgttcaaagaagacaagactgatgaagaggccaagagaaaccttgaaagtttggacattgatgaaattcttgagagagcagagaaagtcgagacaaagggtggtgaaggggaggaaggaaatgagcttcttagtgctttcaaggtcgcaaacttttccagtggcgaggatgatgcaacattctggagtaggctaatacagccagatcctgcagatattattcaggaaactttggcgcctcgtgctgcacgtaataaaaagagttatgttgaagatccccagtttgacaaaaataataacaggaaaagacgtgcagttgaagcacaagaaaagccaaggaggcgttctggcagaacagtggaaacagttaattcagtaccattggttgatggagcagtagctcaagtacgagagtggtcttttggtaatattccaaagaaggatgcttctcgttttgtacgagcgggcacagttttggattttttcggtgtagctgtgaaggcctatgaattgctagctcgtgttgaagagcttcagttgttgtcaaagcgcattgcacgatacaaagatccaatcaagcaataccgcatccaactaccttataaaaagcctcagtggtcagcaagctgtggatggactgaaactgatgatgctagattgatggttggaattcattggtatggctacgggaattgggagaaaatacgtttggatccaaagcttggcctgacaacaaaaattgcaccagcaacacttggtgagagagagacatttttaccacgtgctccaaacttggataaccgtgctagcgctctcctgcaaaaggaatatgctaagtttagcggtaatagctcaaaagtcaaaggaaatgcccgccagacagtcaataacgacagtaatagtggagctcgatcaatgagaggccgacaaaaggatgcaccagataaagaggataataagccgaacaaagatgacattcagaagcgcaaggtaatgatggaagctgaagcaagagaagaaggtgaaatttctgaatcagaggcagagacaaagtatcgtctggacaaagaggagaagtggctcgaatggtgctctgaagttttaaatgaggaacaggaaactttgaagcgcctggacaggctgcagaatacaagtgtaaacctcccaaaggaaaaggttctttcaagaatccgcaagtatctcctgataattggggacaaaattggtgaagttgtccggcaacacagtgaatcttataggcaatcccgcatgaccatgaggttatggaattatgttgccaccttttcaaacatgtctggggagcaattgcatgatctctatttgaaacttagtcaagaccaactggaaggtggagttggcccatctcatggtgccaatttcacatccattccttccagcaagggaggtaactcaaatcaacttcatcctacaagaaaccataggccaaccaggtctctccagtacaattctgagtctttgcacaataatgagagctctggaagttctgaagcctggaagcgtcgacggagagcagaccctgataatcagtttgacacccagcctttgtatcaacctccaattatgacaaatggaaataggttgcaggaatctagtagttctgcaggaattcttggttggggtccagttgaaatgagacggtatggtaatgaaaggccaaagcgtggtgttcatcctagtcattttcctactgggcatggacctttgttgtagctgaaggaattagatgactcgaacaaccttgtccactttggcataactgttcccagtgaatttcagcttccatatagttacaaatggtggaactctgtcggaattgaaattcttttttccataacaagaaggaataaaaagcaagacctgacctggagcgcagtttgaatactgtccctcaaaggtaatgccaggactccagaggcgacgcagggatttgttaacagctacactgaatatccttctgacaacatcacagtaaaacgaatacatggtggcttgtcaactgccaagaggattaatcgaggaaattttgtcgattcagttttgtgatccaatagaaaagttgggggtcattaggaaaaagttcatctcaacaatgatctatagttcactctatacatgtattatgttttacattgcaatataatgaaatatggttcagttattcccactcagtgtgttttgtgcccttctgtattgatgtaatagatcaaagaaatgcatgttctcgttttttttttttttttttagaaaaccgcaggagaactgcgcatcttatatattagagaggaaaaaagacattacaaaagaggagaagttgcagagcaactctcccacctaataaagaagttgcagctgggggggcatagtatgtgttagtttcaatttctctaaatagaggaaatatatattttgttcacgcgatggaatcggtagatacttgaattgattccatagtatttttttcctgaggtgatgtgagaatgaggtgtgtggttatatgtatttcaaataattgtttgacaacacggtgttatgatttacattttgacatgtcatgatctgtattctgtggtgcaggttagctaggtgatcaaagccattctacaagtcatttcgcaaaagcaaacaatttaggagttgcatgaggcctactttaccctggatgcctcacttttgttatttagatgcagtgaggatgtttctagctctgtgctccctccctcataaatatgacattgcgaaactttgatcatccgtctcattcaaaaaattcttgag

SEQ ID NO: 70627 - DNA, 5534 bp, Zea Mays
ctcctctcgtcggccgcggcacaaggagtgatactgagcctgtgagaggtattccatataatgccataatctgggatggcattcttcagcaactccgggagcaaggctgattcaggagggtacaacctgaatgaaaaggccgaagatgagggcatctacgagtcagttcaggatgggaatgttgacctgagttctaggcagtggaacttaaatgagaaagcagatgatgcttaccattgtgaagcagagcaatatgaggcgggccagtcaggtttgtactcttctgagaaggcatcagggcagcatatccagaaaggaggcagatcttctggtggtccatggggcacaaattttctgaaggattccaggtccaaacagatggccgaggatgttccatcgaatagtggtagaggaatgaatgctgctagcttgcatgatggcttggatgatagtggagaggatgatgagctgaacagggcaaatggtgaggtgcctgctgaggaaatgctctccgatgactattatgagcaggacggagaggagcagattgaatcgttgcatcgtggcgggacgaagcaatcaagctgttccacttctgaagacgaccccgctgatgtggattttgagccagacagcgaaacggacaaagctactgataaggataagtttatggatagtgagaattctgatggcgacgatgatgatggccttgaactctcagatgatgatgatgactttgttgagaaccggaggcaacctaaacgacttaagattgtagcaactaaaacttccaagggaaggaagttgcccatgccagctcaacgaaaacgaggggtgtctcacagcgatgaagaatattcttcaggaaaagattcagatcttcccagtgatgctgatttcaaacacagatcgaaaagacctgacaggttgcatcagaaatctgtgggccgcagtgatgttgccccaatcaattctcataatgagcttcgaacttctggaaggaggacagtgaaaaagatctcatatgttgaaagcgaagaaagtgatgatagcgaggagaagtcaactaaacaacaaaaggaggagctggaagaggaagacggagaaacaattgaaaaagttctttggcatcaacccaagggtgtagctgaagaagcaataaagaatcaccaatcagctcaacctactgttgtcagcctaacatcggactttgatcaacagtgggatgaattagagttctatataaaatggaaaggccagtcttacctgcattgtcaatggaagacattatcagagcttcaaagtgttagtggattcaagaaggtaataaattacacgaaaagagttgctgaggaacagaggtacaagagggcactatcacgtgaagaggttgaggtgcatgatgtgggcaaggagatggagctggatcttattaaacaatatagtcaggttgaacggatatttgctgatagggtcagcaaagctgatggagatgatctggttcctgaatatttagtcaaatggcaaggacttccttatgcagaatctacctgggaaaaagatacagatatcgattttgctcaagatgcaattgatgaatataaggctcgtgaagctgccacatctatacttgggaaaacagtagatttccaacgaaagaaaagcaaagctagtttgaggaggcttgatgatcagccagaatggctaaaagctggtaagcttcgtgattatcagctggaaggactaaactttctcgtgaatgggtggagaaatgatactaatgttatacttgctgatgaaatgggtctggggaaaactatccaatctgtttccatgcttggcttccttcataatgctcaagaaatcaatggtccatttcttgtagttgtgccactgtcaacattgtcgaactgggcaaaagaatttcggaagtggctgcccaacatgaatgttgtcatttatgttggcaaccgtgccagcagagagatgtgccagaagcatgagtttttttcagacaagaagggtgggcgtcatgtaaaattccatacgttgataactacatatgaggtgattctcaaggacaaagcggttctttccaagatcaaatggaactatcttatggttgatgaagcccaccggttgaaaaattgtgaagcatcactatatactacccttttggaattcagcactaagaataagctgcttatcactggaacacctttgcagaacagtgtggaagagctttgggcattacttcatttccttgatccagttaaattcaacagcaaggatagttttgttgaaagatacaaaaatttgagttccttcaatgaaaccgagcttgcgaatctgcataaggaattgaggcctcatattctaaggcgggttataaaagatgtcgagaagtctttacctcctaaaattgaacggattctacgtgtcgagatgtcaccccttcagaaacaatactacaagtggattttagagcggaatttccagaatctaaataaaggagtccgtgggaatcaggtatcacttttgaacattgttgttgaattgaagaaatgctgcaaccatccatttttgtttgaaagtgccgatcacggttatggtggagatagcattggcgatcggaataaagttgaacggattgttatgagtagtggtaaacttgtcttgttggacaaactattggtgagactacgggagactaaccatcgtgtgcttatattctcacagatggttaagatgttggacatccttgcagaatatctctcccttcggggatttcagtttcagaggcttgatggtagtacaagagcagatcttcgtcatcaagccatggaacattttaatgctcctggaagtgatgacttctgttttcttttatccacacgtgccggaggacttggtattaatcttgcaactgcagatacagtgataatttttgattcagattggaatccacaaaatgatctgcaggccatgagtagggcacataggattggccaacaggaaactgttaatatctaccgcttcgtcacatgcaaaagtgttgaagaggatattttggaacgcgcaaagaaaaagatggttcttgatcacttggttattcagaagctaaatgctgagggcaggcttgagaagaaagaatccaaaaagggtggctccatatttgacaagaatgaactttcggctatcttgaggtttggagcagaggaattgttcaaagaagacaagactgatgaagaggccaagagaaaccttgaaagtttggacattgatgaaattcttgagagagcagagaaagtcgagacaaagggtggtgaaggggaggaaggaaatgagcttcttagtgctttcaaggtcgcaaacttttccagtggcgaggatgatgcaacattctggagtaggctaatacagccagatcctgcagatattattcaggaaactttggcgcctcgtgctgcacgtaataaaaagagttatgttgaagatccccagtttgacaaaaataataacaggaaaagacgtgcagttgaagcacaagaaaagccaaggaggcgttctggcagaacagtggaaacagttaattcagtaccattggttgatggagcagtagctcaagtacgagagtggtcttttggtaatattccaaagaaggatgcttctcgttttgtacgagcggttaaaaaatttgggaatgcaacccagattgacttaattgtggatgatgttggtggtgtactagagaaggcaccacatgaagcacaaatagagctatttgatttgttgattgatggttgtcagaaaagctgttaaagagaatacagatatcaagggcacagttttggattttttcggtgtagctgtgaaggcctatgaattgctagctcgtgttgaagagcttcagttgttgtcaaagcgcattgcacgatacaaagatccaatcaagcaataccgcatccaactaccttataaaaagcctcagtggtcagcaagctgtggatggactgaaactgatgatgctagattgatggttggaattcattggtatggctacgggaattgggagaaaatacgtttggatccaaagcttggcctgacaacaaaaattgcaccagcaacacttggtgagagagagacatttttaccacgtgctccaaacttggataaccgtgctagcgctctcctgcaaaaggaatatgctaagtttagcggtaatagctcaaaagtcaaaggaaatgcccgccagacagtcaataacgacagtaatagtggagctcgatcaatgagaggccgacaaaaggatgcaccagataaagaggataataagccgaacaaagatgacattcagaagcgcaaggtaatgatggaagctgaagcaagagaagaaggtgaaatttctgaatcagaggcagagacaaagtatcgtctggacaaagaggagaagtggctcgaatggtgctctgaagttttaaatgaggaacaggaaactttgaagcgcctggacaggctgcagaatacaagtgtaaacctcccaaaggaaaaggttctttcaagaatccgcaagtatctcctgataattggggacaaaattggtgaagttgtccggcaacacagtgaatcttataggcaatcccgtaagtgtagccgcacctcccgcatgaccatgaggttatggaattatgttgccaccttttcaaacatgtctggggagcaattgcatgatctctatttgaaacttagtcaagaccaactggaaggtggagttggcccatctcatggtgccaatttcacatccattccttccagcaagggaggtaactcaaatcaacttcatcctacaagaaaccataggccaaccaggtctctccagtacaattctgagtctttgcacaataatgagagctctggaagttctgaagcctggaagcgtcgacggagagcagaccctgataatcagtttgacacccagcctttgtatcaacctccaattatgacaaatggaaataggttgcaggaatctagtagttctgcaggaattcttggttggggtccagttgaaatgagacggtatggtaatgaaaggccaaagcgtggtgttcatcctagtcattttcctactgggcatggacctttgttgtagctgaaggaattagatgactcgaacaaccttgtccactttggcataactgttcccagtgaatttcagcttccatatagttacaaatggtggaactctgtcggaattgaaattcttttttccataacaagaaggaataaaaagcaagacctgacctggagcgcagtttgaatactgtccctcaaaggttagctaggtgatcaaagccattctacaagtcatttcgcaaaagcaaacaatttaggagttgcatgaggcctactttaccctggatgcctcacttttgttatttagatgcagtgaggatgtttctagctctgtgctccctccctcataaatatgacattgcgaaactttgatcatccgtctcattcaaaaaattcttgag

SEQ ID NO: 70628 - DNA, 6726 bp, Zea Mays
acttatctgcccttcctaatcgcccttacccccttgtgttagataaccacccctctcccttgcgcgccgccgccgccgccgccgcgcctccccgccgggagcccgtctccggcgatcgccgccgtctagcccccctcctgtccccgccttcgatccgaatcctagacgaaaaatcgtggaaaataccgcaaaaaatcgcggaaattcgcccggttctgtttgaataaatcgcacgggcgttgcgccccgcccctctcgctcccctcccgccgccagccccgcggccgccggcgacggcgatcgcgcagacaaataggcgcccgcgtcgagccagaaaaacccgcctcgtgccggtccgagcattcgtctctgtcgtggggactgagcacccgttgcctgtccccgcccgcctgcccgccgcctcctgctcctctcgtcggccgcggcacaaggagtgatactgagcctgtgagaggtattccatataatgccataatctgggatggcattcttcagcaactccgggagcaaggctgattcaggagggtacaacctgaatgaaaaggccgaagatgagggcatctacgagtcagttcaggatgggaatgttgacctgagttctaggcagtggaacttaaatgagaaagcagatgatgcttaccattgtgaagcagagcaatatgaggcgggccagtcaggtttgtactcttctgagaaggcatcagggcagcatatccagaaaggaggcagatcttctggtggtccatggggcacaaattttctgaaggattccaggtccaaacagatggccgaggatgttccatcgaatagtggtagaggaatgaatgctgctagcttgcatgatggcttggatgatagtggagaggatgatgagctgaacagggcaaatggtgaggtgcctgctgaggaaatgctctccgatgactattatgagcaggacggagaggagcagattgaatcgttgcatcgtggcgggacgaagcaatcaagctgttccacttctggtggggcagcaaaatctggctcacgacaaatgaaggcgtcaaagtacaatgcttatgacgacgatgatgacgatgactataatgatgagaatgacgatgacaatgacgctgatgaagacgaccccgctgatgtggattttgagccagacagcgaaacggacaaagctactgataagtgagaattctgatggcgacgatgatgatggccttgaactctcagatgatgatgatgactttgttgagaaccggaggcaacctaaacgacttaagattgtagcaactaaaacttccaagggaaggaagttgcccatgccagctcaacgaaaacgaggggtgtctcacagcgatgaagaatattcttcaggaaaagattcagatcttcccagtgatgctgatttcaaacacagatcgaaaagacctgacaggttgcatcagaaatctgtgggccgcagtgatgttgccccaatcaattctcataatgagcttcgaacttctggaaggaggacagtgaaaaagatctcatatgttgaaagcgaagaaagtgatgatagcgaggagaagtcaactaaacaacaaaagctcatgaaggaggagctggaagaggaagacggagaaacaattgaaaaagttctttggcatcaacccaagggtgtagctgaagaagcaataaagaatcaccaatcagctcaacctactgttgtcagcctaacatcggactttgatcaacagtgggatgaattagagttctatataaaatggaaaggccagtcttacctgcattgtcaatggaagacattatcagagcttcaaagtgttagtggattcaagaaggtaataaattacacgaaaagagttgctgaggaacagaggtacaagagggcactatcacgtgaagaggttgaggtgcatgatgtgggcaaggagatggagctggatcttattaaacaatatagtcaggttgaacggatatttgctgatagggtcagcaaagctgatggagatgatctggttcctgaatatttagtcaaatggcaaggacttccttatgcagaatctacctgggaaaaagatacagatatcgattttgctcaagatgcaattgatgaatataaggctcgtgaagctgccacatctatacttgggaaaacagtagatttccaacgaaagaaaagcaaagctagtttgaggaggcttgatgatcagccagaatggctaaaagctggtaagcttcgtgattatcagctggaaggactaaactttctcgtgaatgggtggagaaatgatactaatgttatacttgctgatgaaatgggtctggggaaaactatccaatctgtttccatgcttggcttccttcataatgctcaagaaatcaatggtccatttcttgtagttgtgccactgtcaacattgtcgaactgggcaaaagaatttcggaagtggctgcccaacatgaatgttgtcatttatgttggcaaccgtgccagcagagagatgtgccagaagcatgagtttttttcagacaagaagggtgggcgtcatgtaaaattccatacgttgataactacatatgaggtgattctcaaggacaaagcggttctttccaagatcaaatggaactatcttatggttgatgaagcccaccggttgaaaaattgtgaagcatcactatatactacccttttggaattcagcactaagaataagctgcttatcactggaacacctttgcagaacagtgtggaagagctttgggcattacttcatttccttgatccagttaaattcaacagcaaggatagttttgttgaaagatacaaaaatttgagttccttcaatgaaaccgagcttgcgaatctgcataaggaattgaggcctcatattctaaggcgggttataaaagatgtcgagaagtctttacctcctaaaattgaacggattctacgtgtcgagatgtcaccccttcagaaacaatactacaagtggattttagagcggaatttccagaatctaaataaaggagtccgtgggaatcaggtatcacttttgaacattgttgttgaattgaagaaatgctgcaaccatccatttttgtttgaaagtgccgatcacggttatggtggagatagcattggcgatcggaataaagttgaacggattgttatgagtagtggtaaacttgtcttgttggacaaactattggtgagactacgggagactaaccatcgtgtgcttatattctcacagatggttaagatgttggacatccttgcagaatatctctcccttcggggatttcagtttcagaggcttgatggtagtacaagagcagatcttcgtcatcaagccatggaacattttaatgctcctggaagtgatgacttctgttttcttttatccacacgtgccggaggacttggtattaatcttgcaactgcagatacagtgataatttttgattcagattggaatccacaaaatgatctgcaggccatgagtagggcacataggattggccaacaggaaactgttaatatctaccgcttcgtcacatgcaaaagtgttgaagaggatattttggaacgcgcaaagaaaaagatggttcttgatcacttggttattcagaagctaaatgctgagggcaggcttgagaagaaagaatccaaaaagggtggctccatatttgacaagaatgaactttcggctatcttgaggtttggagcagaggaattgttcaaagaagacaagactgatgaagaggccaagagaaaccttgaaagtttggacattgatgaaattcttgagagagcagagaaagtcgagacaaagggtggtgaaggggaggaaggaaatgagcttcttagtgctttcaaggtcgcaaacttttccagtggcgaggatgatgcaacattctggagtaggctaatacagccagatcctgcagatattattcaggaaactttggcgcctcgtgctgcacgtaataaaaagagttatgttgaagatccccagtttgacaaaaataataacaggaaaagacgtgcagttgaagcacaagaaaagccaaggaggcgttctggcagaacagtggaaacagttaattcagtaccattggttgatggagcagtagctcaagtacgagagtggtcttttggtaatattccaaagaaggatgcttctcgttttgtacgagcggttaaaaaatttgggaatgcaacccagattgacttaattgtggatgatgttggtggtgtactagagaaggcaccacatgaagcacaaatagagctatttgatttgttgattgatggttgtcagaaaagctgttaaagagaatacagatatcaagggcacagttttggattttttcggtgtagctgtgaaggcctatgaattgctagctcgtgttgaagagcttcagttgttgtcaaagcgcattgcacgatacaaagatccaatcaagcaataccgcatccaactaccttataaaaagcctcagtggtcagcaagctgtggatggactgaaactgatgatgctagattgatggttggaattcattggtatggctacgggaattgggagaaaatacgtttggatccaaagcttggcctgacaacaaaaattgcaccagcaacacttggtgagagagagacatttttaccacgtgctccaaacttggataaccgtgctagcgctctcctgcaaaaggaatatgctaagtttagcggtaatagctcaaaagtcaaaggaaatgcccgccagacagtcaataacgacagtaatagtggagctcgatcaatgagaggccgacaaaaggatgcaccagataaagaggataataagccgaacaaagatgacattcagaagcgcaaggtaatgatggaagctgaagcaagagaagaaggtgaaatttctgaatcagaggcagagacaaagtatcgtctggacaaagaggagaagtggctcgaatggtgctctgaagttttaaatgaggaacaggaaactttgaagcgcctggacaggctgcagaatacaagtgtaaacctcccaaaggaaaaggttctttcaagaatccgcaagtatctcctgataattggggacaaaattggtgaagttgtccggcaacacagtgaatcttataggcaatcccgcatgaccatgaggttatggaattatgttgccaccttttcaaacatgtctggggagcaattgcatgatctctatttgaaacttagtcaagaccaactggaaggtggagttggcccatctcatggtgccaatttcacatccattccttccagcaagggaggtaactcaaatcaacttcatcctacaagaaaccataggccaaccaggtctctccagtacaattctgagtctttgcacaataatgagagctctggaagttctgaagcctggaagcgtcgacggagagcagaccctgataatcagtttgacacccagcctttgtatcaacctccaattatgacaaatggaaataggttgcaggaatctagtagttctgcaggaattcttggttggggtccagttgaaatgagacggtatggtaatgaaaggccaaagcgtggtgttcatcctagtcattttcctactgggcatggacctttgttgtagctgaaggaattagatgactcgaacaaccttgtccactttggcataactgttcccagtgaatttcagcttccatatagttacaaatggtggaactctgtcggaattgaaattcttttttccataacaagaaggaataaaaagcaagacctgacctggagcgcagtttgaatactgtccctcaaaggtaatgccaggactccagaggcgacgcagggatttgttaacagctacactgaatatccttctgacaacatcacagtaaaacgaatacatggtggcttgtcaactgccaagaggattaatcgaggaaattttgtcgattcagttttgtgatccaatagaaaagttgggggtcattaggaaaaagttcatctcaacaatgatctatagttcactctatacatgtattatgttttacattgcaatataatgaaatatggttcagttattcccactcagtgtgttttgtgcccttctgtattgatgtaatagatcaaagaaatgcatgttctcgttttttttttttttttttagaaaaccgcaggagaactgcgcatcttatatattagagaggaaaaaagacattacaaaagaggagaagttgcagagcaactctcccacctaataaagaagttgcagctgggggggcatagtatgtgttagtttcaatttctctaaatagaggaaatatatattttgttcacgcgatggaatcggtagatacttgaattgattccatagtatttttttcctgaggtgatgtgagaatgaggtgtgtggttatatgtatttcaaataattgtttgacaacacggtgttatgatttacattttgacatgtcatgatctgtattctgtggtgcaggttagctaggtgatcaaagccattctacaagtcatttcgcaaaagcaaacaatttaggagttgcatgaggcctactttaccctggatgcctcacttttgttatttagatgcagtgaggatgtttctagctctgtgctccctccctcataaatatgacattgcgaaactttgatcatccgtctcattcaaaaaattcttgag

SEQ ID NO: 70629 - DNA, 6743 bp, Zea Mays
acttatctgcccttcctaatcgcccttacccccttgtgttagataaccacccctctcccttgcgcgccgccgccgccgccgccgcgcctccccgccgggagcccgtctccggcgatcgccgccgtctagcccccctcctgtccccgccttcgatccgaatcctagacgaaaaatcgtggaaaataccgcaaaaaatcgcggaaattcgcccggttctgtttgaataaatcgcacgggcgttgcgccccgcccctctcgctcccctcccgccgccagccccgcggccgccggcgacggcgatcgcgcagacaaataggcgcccgcgtcgagccagaaaaacccgcctcgtgccggtccgagcattcgtctctgtcgtggggactgagcacccgttgcctgtccccgcccgcctgcccgccgcctcctgctcctctcgtcggccgcggcacaaggagtgatactgagcctgtgagaggtattccatataatgccataatctgggatggcattcttcagcaactccgggagcaaggctgattcaggagggtacaacctgaatgaaaaggccgaagatgagggcatctacgagtcagttcaggatgggaatgttgacctgagttctaggcagtggaacttaaatgagaaagcagatgatgcttaccattgtgaagcagagcaatatgaggcgggccagtcaggtttgtactcttctgagaaggcatcagggcagcatatccagaaaggaggcagatcttctggtggtccatggggcacaaattttctgaaggattccaggtccaaacagatggccgaggatgttccatcgaatagtggtagaggaatgaatgctgctagcttgcatgatggcttggatgatagtggagaggatgatgagctgaacagggcaaatggtgaggtgcctgctgaggaaatgctctccgatgactattatgagcaggacggagaggagcagattgaatcgttgcatcgtggcgggacgaagcaatcaagctgttccacttctggtggggcagcaaaatctggctcacgacaaatgaaggcgtcaaagtacaatgcttatgacgacgatgatgacgatgactataatgatgagaatgacgatgacaatgacgctgatgaagacgaccccgctgatgtggattttgagccagacagcgaaacggacaaagctactgataaggataagtttatggatagtgagaattctgatggcgacgatgatgatggccttgaactctcagatgatgatgatgactttgttgagaaccggaggcaacctaaacgacttaagattgtagcaactaaaacttccaagggaaggaagttgcccatgccagctcaacgaaaacgaggggtgtctcacagcgatgaagaatattcttcaggaaaagattcagatcttcccagtgatgctgatttcaaacacagatcgaaaagacctgacaggttgcatcagaaatctgtgggccgcagtgatgttgccccaatcaattctcataatgagcttcgaacttctggaaggaggacagtgaaaaagatctcatatgttgaaagcgaagaaagtgatgatagcgaggagaagtcaactaaacaacaaaagctcatgaaggaggagctggaagaggaagacggagaaacaattgaaaaagttctttggcatcaacccaagggtgtagctgaagaagcaataaagaatcaccaatcagctcaacctactgttgtcagcctaacatcggactttgatcaacagtgggatgaattagagttctatataaaatggaaaggccagtcttacctgcattgtcaatggaagacattatcagagcttcaaagtgttagtggattcaagaaggtaataaattacacgaaaagagttgctgaggaacagaggtacaagagggcactatcacgtgaagaggttgaggtgcatgatgtgggcaaggagatggagctggatcttattaaacaatatagtcaggttgaacggatatttgctgatagggtcagcaaagctgatggagatgatctggttcctgaatatttagtcaaatggcaaggacttccttatgcagaatctacctgggaaaaagatacagatatcgattttgctcaagatgcaattgatgaatataaggctcgtgaagctgccacatctatacttgggaaaacagtagatttccaacgaaagaaaagcaaagctagtttgaggaggcttgatgatcagccagaatggctaaaagctggtaagcttcgtgattatcagctggaaggactaaactttctcgtgaatgggtggagaaatgatactaatgttatacttgctgatgaaatgggtctggggaaaactatccaatctgtttccatgcttggcttccttcataatgctcaagaaatcaatggtccatttcttgtagttgtgccactgtcaacattgtcgaactgggcaaaagaatttcggaagtggctgcccaacatgaatgttgtcatttatgttggcaaccgtgccagcagagagatgtgccagaagcatgagtttttttcagacaagaagggtgggcgtcatgtaaaattccatacgttgataactacatatgaggtgattctcaaggacaaagcggttctttccaagatcaaatggaactatcttatggttgatgaagcccaccggttgaaaaattgtgaagcatcactatatactacccttttggaattcagcactaagaataagctgcttatcactggaacacctttgcagaacagtgtggaagagctttgggcattacttcatttccttgatccagttaaattcaacagcaaggatagttttgttgaaagatacaaaaatttgagttccttcaatgaaaccgagcttgcgaatctgcataaggaattgaggcctcatattctaaggcgggttataaaagatgtcgagaagtctttacctcctaaaattgaacggattctacgtgtcgagatgtcaccccttcagaaacaatactacaagtggattttagagcggaatttccagaatctaaataaaggagtccgtgggaatcaggtatcacttttgaacattgttgttgaattgaagaaatgctgcaaccatccatttttgtttgaaagtgccgatcacggttatggtggagatagcattggcgatcggaataaagttgaacggattgttatgagtagtggtaaacttgtcttgttggacaaactattggtgagactacgggagactaaccatcgtgtgcttatattctcacagatggttaagatgttggacatccttgcagaatatctctcccttcggggatttcagtttcagaggcttgatggtagtacaagagcagatcttcgtcatcaagccatggaacattttaatgctcctggaagtgatgacttctgttttcttttatccacacgtgccggaggacttggtattaatcttgcaactgcagatacagtgataatttttgattcagattggaatccacaaaatgatctgcaggccatgagtagggcacataggattggccaacaggaaactgttaatatctaccgcttcgtcacatgcaaaagtgttgaagaggatattttggaacgcgcaaagaaaaagatggttcttgatcacttggttattcagaagctaaatgctgagggcaggcttgagaagaaagaatccaaaaagggtggctccatatttgacaagaatgaactttcggctatcttgaggtttggagcagaggaattgttcaaagaagacaagactgatgaagaggccaagagaaaccttgaaagtttggacattgatgaaattcttgagagagcagagaaagtcgagacaaagggtggtgaaggggaggaaggaaatgagcttcttagtgctttcaaggtcgcaaacttttccagtggcgaggatgatgcaacattctggagtaggctaatacagccagatcctgcagatattattcaggaaactttggcgcctcgtgctgcacgtaataaaaagagttatgttgaagatccccagtttgacaaaaataataacaggaaaagacgtgcagttgaagcacaagaaaagccaaggaggcgttctggcagaacagtggaaacagttaattcagtaccattggttgatggagcagtagctcaagtacgagagtggtcttttggtaatattccaaagaaggatgcttctcgttttgtacgagcggttaaaaaatttgggaatgcaacccagattgacttaattgtggatgatgttggtggtgtactagagaaggcaccacatgaagcacaaatagagctatttgatttgttgattgatggttgtcagaaaagctgttaaagagaatacagatatcaagggcacagttttggattttttcggtgtagctgtgaaggcctatgaattgctagctcgtgttgaagagcttcagttgttgtcaaagcgcattgcacgatacaaagatccaatcaagcaataccgcatccaactaccttataaaaagcctcagtggtcagcaagctgtggatggactgaaactgatgatgctagattgatggttggaattcattggtatggctacgggaattgggagaaaatacgtttggatccaaagcttggcctgacaacaaaaattgcaccagcaacacttggtgagagagagacatttttaccacgtgctccaaacttggataaccgtgctagcgctctcctgcaaaaggaatatgctaagtttagcggtaatagctcaaaagtcaaaggaaatgcccgccagacagtcaataacgacagtaatagtggagctcgatcaatgagaggccgacaaaaggatgcaccagataaagaggataataagccgaacaaagatgacattcagaagcgcaaggtaatgatggaagctgaagcaagagaagaaggtgaaatttctgaatcagaggcagagacaaagtatcgtctggacaaagaggagaagtggctcgaatggtgctctgaagttttaaatgaggaacaggaaactttgaagcgcctggacaggctgcagaatacaagtgtaaacctcccaaaggaaaaggttctttcaagaatccgcaagtatctcctgataattggggacaaaattggtgaagttgtccggcaacacagtgaatcttataggcaatcccgcatgaccatgaggttatggaattatgttgccaccttttcaaacatgtctggggagcaattgcatgatctctatttgaaacttagtcaagaccaactggaaggtggagttggcccatctcatggtgccaatttcacatccattccttccagcaagggaggtaactcaaatcaacttcatcctacaagaaaccataggccaaccaggtctctccagtacaattctgagtctttgcacaataatgagagctctggaagttctgaagcctggaagcgtcgacggagagcagaccctgataatcagtttgacacccagcctttgtatcaacctccaattatgacaaatggaaataggttgcaggaatctagtagttctgcaggaattcttggttggggtccagttgaaatgagacggtatggtaatgaaaggccaaagcgtggtgttcatcctagtcattttcctactgggcatggacctttgttgtagctgaaggaattagatgactcgaacaaccttgtccactttggcataactgttcccagtgaatttcagcttccatatagttacaaatggtggaactctgtcggaattgaaattcttttttccataacaagaaggaataaaaagcaagacctgacctggagcgcagtttgaatactgtccctcaaaggtaatgccaggactccagaggcgacgcagggatttgttaacagctacactgaatatccttctgacaacatcacagtaaaacgaatacatggtggcttgtcaactgccaagaggattaatcgaggaaattttgtcgattcagttttgtgatccaatagaaaagttgggggtcattaggaaaaagttcatctcaacaatgatctatagttcactctatacatgtattatgttttacattgcaatataatgaaatatggttcagttattcccactcagtgtgttttgtgcccttctgtattgatgtaatagatcaaagaaatgcatgttctcgttttttttttttttttttagaaaaccgcaggagaactgcgcatcttatatattagagaggaaaaaagacattacaaaagaggagaagttgcagagcaactctcccacctaataaagaagttgcagctgggggggcatagtatgtgttagtttcaatttctctaaatagaggaaatatatattttgttcacgcgatggaatcggtagatacttgaattgattccatagtatttttttcctgaggtgatgtgagaatgaggtgtgtggttatatgtatttcaaataattgtttgacaacacggtgttatgatttacattttgacatgtcatgatctgtattctgtggtgcaggttagctaggtgatcaaagccattctacaagtcatttcgcaaaagcaaacaatttaggagttgcatgaggcctactttaccctggatgcctcacttttgttatttagatgcagtgaggatgtttctagctctgtgctccctccctcataaatatgacattgcgaaactttgatcatccgtctcattcaaaaaattcttgag

SEQ ID NO: 70630 - DNA, 6629 bp, Zea Mays
acttatctgcccttcctaatcgcccttacccccttgtgttagataaccacccctctcccttgcgcgccgccgccgccgccgccgcgcctccccgccgggagcccgtctccggcgatcgccgccgtctagcccccctcctgtccccgccttcgatccgaatcctagacgaaaaatcgtggaaaataccgcaaaaaatcgcggaaattcgcccggttctgtttgaataaatcgcacgggcgttgcgccccgcccctctcgctcccctcccgccgccagccccgcggccgccggcgacggcgatcgcgcagacaaataggcgcccgcgtcgagccagaaaaacccgcctcgtgccggtccgagcattcgtctctgtcgtggggactgagcacccgttgcctgtccccgcccgcctgcccgccgcctcctgctcctctcgtcggccgcggcacaaggagtgatactgagcctgtgagaggtattccatataatgccataatctgggatggcattcttcagcaactccgggagcaaggctgattcaggagggtacaacctgaatgaaaaggccgaagatgagggcatctacgagtcagttcaggatgggaatgttgacctgagttctaggcagtggaacttaaatgagaaagcagatgatgcttaccattgtgaagcagagcaatatgaggcgggccagtcaggtttgtactcttctgagaaggcatcagggcagcatatccagaaaggaggcagatcttctggtggtccatggggcacaaattttctgaaggattccaggtccaaacagatggccgaggatgttccatcgaatagtggtagaggaatgaatgctgctagcttgcatgatggcttggatgatagtggagaggatgatgagctgaacagggcaaatggtgaggtgcctgctgaggaaatgctctccgatgactattatgagcaggacggagaggagcagattgaatcgttgcatcgtggcgggacgaagcaatcaagctgttccacttctgaagacgaccccgctgatgtggattttgagccagacagcgaaacggacaaagctactgataaggataagtttatggatagtgagaattctgatggcgacgatgatgatggccttgaactctcagatgatgatgatgactttgttgagaaccggaggcaacctaaacgacttaagattgtagcaactaaaacttccaagggaaggaagttgcccatgccagctcaacgaaaacgaggggtgtctcacagcgatgaagaatattcttcaggaaaagattcagatcttcccagtgatgctgatttcaaacacagatcgaaaagacctgacaggttgcatcagaaatctgtgggccgcagtgatgttgccccaatcaattctcataatgagcttcgaacttctggaaggaggacagtgaaaaagatctcatatgttgaaagcgaagaaagtgatgatagcgaggagaagtcaactaaacaacaaaagctcatgaaggaggagctggaagaggaagacggagaaacaattgaaaaagttctttggcatcaacccaagggtgtagctgaagaagcaataaagaatcaccaatcagctcaacctactgttgtcagcctaacatcggactttgatcaacagtgggatgaattagagttctatataaaatggaaaggccagtcttacctgcattgtcaatggaagacattatcagagcttcaaagtgttagtggattcaagaaggtaataaattacacgaaaagagttgctgaggaacagaggtacaagagggcactatcacgtgaagaggttgaggtgcatgatgtgggcaaggagatggagctggatcttattaaacaatatagtcaggttgaacggatatttgctgatagggtcagcaaagctgatggagatgatctggttcctgaatatttagtcaaatggcaaggacttccttatgcagaatctacctgggaaaaagatacagatatcgattttgctcaagatgcaattgatgaatataaggctcgtgaagctgccacatctatacttgggaaaacagtagatttccaacgaaagaaaagcaaagctagtttgaggaggcttgatgatcagccagaatggctaaaagctggtaagcttcgtgattatcagctggaaggactaaactttctcgtgaatgggtggagaaatgatactaatgttatacttgctgatgaaatgggtctggggaaaactatccaatctgtttccatgcttggcttccttcataatgctcaagaaatcaatggtccatttcttgtagttgtgccactgtcaacattgtcgaactgggcaaaagaatttcggaagtggctgcccaacatgaatgttgtcatttatgttggcaaccgtgccagcagagagatgtgccagaagcatgagtttttttcagacaagaagggtgggcgtcatgtaaaattccatacgttgataactacatatgaggtgattctcaaggacaaagcggttctttccaagatcaaatggaactatcttatggttgatgaagcccaccggttgaaaaattgtgaagcatcactatatactacccttttggaattcagcactaagaataagctgcttatcactggaacacctttgcagaacagtgtggaagagctttgggcattacttcatttccttgatccagttaaattcaacagcaaggatagttttgttgaaagatacaaaaatttgagttccttcaatgaaaccgagcttgcgaatctgcataaggaattgaggcctcatattctaaggcgggttataaaagatgtcgagaagtctttacctcctaaaattgaacggattctacgtgtcgagatgtcaccccttcagaaacaatactacaagtggattttagagcggaatttccagaatctaaataaaggagtccgtgggaatcaggtatcacttttgaacattgttgttgaattgaagaaatgctgcaaccatccatttttgtttgaaagtgccgatcacggttatggtggagatagcattggcgatcggaataaagttgaacggattgttatgagtagtggtaaacttgtcttgttggacaaactattggtgagactacgggagactaaccatcgtgtgcttatattctcacagatggttaagatgttggacatccttgcagaatatctctcccttcggggatttcagtttcagaggcttgatggtagtacaagagcagatcttcgtcatcaagccatggaacattttaatgctcctggaagtgatgacttctgttttcttttatccacacgtgccggaggacttggtattaatcttgcaactgcagatacagtgataatttttgattcagattggaatccacaaaatgatctgcaggccatgagtagggcacataggattggccaacaggaaactgttaatatctaccgcttcgtcacatgcaaaagtgttgaagaggatattttggaacgcgcaaagaaaaagatggttcttgatcacttggttattcagaagctaaatgctgagggcaggcttgagaagaaagaatccaaaaagggtggctccatatttgacaagaatgaactttcggctatcttgaggtttggagcagaggaattgttcaaagaagacaagactgatgaagaggccaagagaaaccttgaaagtttggacattgatgaaattcttgagagagcagagaaagtcgagacaaagggtggtgaaggggaggaaggaaatgagcttcttagtgctttcaaggtcgcaaacttttccagtggcgaggatgatgcaacattctggagtaggctaatacagccagatcctgcagatattattcaggaaactttggcgcctcgtgctgcacgtaataaaaagagttatgttgaagatccccagtttgacaaaaataataacaggaaaagacgtgcagttgaagcacaagaaaagccaaggaggcgttctggcagaacagtggaaacagttaattcagtaccattggttgatggagcagtagctcaagtacgagagtggtcttttggtaatattccaaagaaggatgcttctcgttttgtacgagcggttaaaaaatttgggaatgcaacccagattgacttaattgtggatgatgttggtggtgtactagagaaggcaccacatgaagcacaaatagagctatttgatttgttgattgatggttgtcagaaaagctgttaaagagaatacagatatcaagggcacagttttggattttttcggtgtagctgtgaaggcctatgaattgctagctcgtgttgaagagcttcagttgttgtcaaagcgcattgcacgatacaaagatccaatcaagcaataccgcatccaactaccttataaaaagcctcagtggtcagcaagctgtggatggactgaaactgatgatgctagattgatggttggaattcattggtatggctacgggaattgggagaaaatacgtttggatccaaagcttggcctgacaacaaaaattgcaccagcaacacttggtgagagagagacatttttaccacgtgctccaaacttggataaccgtgctagcgctctcctgcaaaaggaatatgctaagtttagcggtaatagctcaaaagtcaaaggaaatgcccgccagacagtcaataacgacagtaatagtggagctcgatcaatgagaggccgacaaaaggatgcaccagataaagaggataataagccgaacaaagatgacattcagaagcgcaaggtaatgatggaagctgaagcaagagaagaaggtgaaatttctgaatcagaggcagagacaaagtatcgtctggacaaagaggagaagtggctcgaatggtgctctgaagttttaaatgaggaacaggaaactttgaagcgcctggacaggctgcagaatacaagtgtaaacctcccaaaggaaaaggttctttcaagaatccgcaagtatctcctgataattggggacaaaattggtgaagttgtccggcaacacagtgaatcttataggcaatcccgcatgaccatgaggttatggaattatgttgccaccttttcaaacatgtctggggagcaattgcatgatctctatttgaaacttagtcaagaccaactggaaggtggagttggcccatctcatggtgccaatttcacatccattccttccagcaagggaggtaactcaaatcaacttcatcctacaagaaaccataggccaaccaggtctctccagtacaattctgagtctttgcacaataatgagagctctggaagttctgaagcctggaagcgtcgacggagagcagaccctgataatcagtttgacacccagcctttgtatcaacctccaattatgacaaatggaaataggttgcaggaatctagtagttctgcaggaattcttggttggggtccagttgaaatgagacggtatggtaatgaaaggccaaagcgtggtgttcatcctagtcattttcctactgggcatggacctttgttgtagctgaaggaattagatgactcgaacaaccttgtccactttggcataactgttcccagtgaatttcagcttccatatagttacaaatggtggaactctgtcggaattgaaattcttttttccataacaagaaggaataaaaagcaagacctgacctggagcgcagtttgaatactgtccctcaaaggtaatgccaggactccagaggcgacgcagggatttgttaacagctacactgaatatccttctgacaacatcacagtaaaacgaatacatggtggcttgtcaactgccaagaggattaatcgaggaaattttgtcgattcagttttgtgatccaatagaaaagttgggggtcattaggaaaaagttcatctcaacaatgatctatagttcactctatacatgtattatgttttacattgcaatataatgaaatatggttcagttattcccactcagtgtgttttgtgcccttctgtattgatgtaatagatcaaagaaatgcatgttctcgttttttttttttttttttagaaaaccgcaggagaactgcgcatcttatatattagagaggaaaaaagacattacaaaagaggagaagttgcagagcaactctcccacctaataaagaagttgcagctgggggggcatagtatgtgttagtttcaatttctctaaatagaggaaatatatattttgttcacgcgatggaatcggtagatacttgaattgattccatagtatttttttcctgaggtgatgtgagaatgaggtgtgtggttatatgtatttcaaataattgtttgacaacacggtgttatgatttacattttgacatgtcatgatctgtattctgtggtgcaggttagctaggtgatcaaagccattctacaagtcatttcgcaaaagcaaacaatttaggagttgcatgaggcctactttaccctggatgcctcacttttgttatttagatgcagtgaggatgtttctagctctgtgctccctccctcataaatatgacattgcgaaactttgatcatccgtctcattcaaaaaattcttgag

SEQ ID NO: 70631 - DNA, 6719 bp, Zea Mays
acttatctgcccttcctaatcgcccttacccccttgtgttagataaccacccctctcccttgcgcgccgccgccgccgccgccgcgcctccccgccgggagcccgtctccggcgatcgccgccgtctagcccccctcctgtccccgccttcgatccgaatcctagacgaaaaatcgtggaaaataccgcaaaaaatcgcggaaattcgcccggttctgtttgaataaatcgcacgggcgttgcgccccgcccctctcgctcccctcccgccgccagccccgcggccgccggcgacggcgatcgcgcagacaaataggcgcccgcgtcgagccagaaaaacccgcctcgtgccggtccgagcattcgtctctgtcgtggggactgagcacccgttgcctgtccccgcccgcctgcccgccgcctcctgctcctctcgtcggccgcggcacaaggagtgatactgagcctgtgagaggtattccatataatgccataatctgggatggcattcttcagcaactccgggagcaaggctgattcaggagggtacaacctgaatgaaaaggccgaagatgagggcatctacgagtcagttcaggatgggaatgttgacctgagttctaggcagtggaacttaaatgagaaagcagatgatgcttaccattgtgaagcagagcaatatgaggcgggccagtcaggtttgtactcttctgagaaggcatcagggcagcatatccagaaaggaggcagatcttctggtggtccatggggcacaaattttctgaaggattccaggtccaaacagatggccgaggatgttccatcgaatagtggtagaggaatgaatgctgctagcttgcatgatggcttggatgatagtggagaggatgatgagctgaacagggcaaatggtgaggtgcctgctgaggaaatgctctccgatgactattatgagcaggacggagaggagcagattgaatcgttgcatcgtggcgggacgaagcaatcaagctgttccacttctggtggggcagcaaaatctggctcacgacaaatgaaggcgtcaaagtacaatgcttatgacgacgatgatgacgatgactataatgatgagaatgacgatgacaatgacgctgatgaagacgaccccgctgatgtggattttgagccagacagcgaaacggacaaagctactgataaggataagtttatggatagtgagaattctgatggcgacgatgatgatggccttgaactctcagatgatgatgatgactttgttgagaaccggaggcaacctaaacgacttaagattgtagcaactaaaacttccaagggaaggaagttgcccatgccagctcaacgaaaacgaggggtgtctcacagcgatgaagaatattcttcaggaaaagattcagatcttcccagtgatgctgatttcaaacacagatcgaaaagacctgacaggttgcatcagaaatctgtgggccgcagtgatgttgccccaatcaattctcataatgagcttcgaacttctggaaggaggacagtgaaaaagatctcatatgttgaaagcgaagaaagtgatgatagcgaggagaagtcaactaaacaacaaaagctcatgaaggaggagctggaagaggaagacggagaaacaattgaaaaagttctttggcatcaacccaagggtgtagctgaagaagcaataaagaatcaccaatcagctcaacctactgttgtcagcctaacatcggactttgatcaacagtgggatgaattagagttctatataaaatggaaaggccagtcttacctgcattgtcaatggaagacattatcagagcttcaaagtgttagtggattcaagaaggtaataaattacacgaaaagagttgctgaggaacagaggtacaagagggcactatcacgtgaagaggttgaggtgcatgatgtgggcaaggagatggagctggatcttattaaacaatatagtcaggttgaacggatatttgctgatagggtcagcaaagctgatggagatgatctggttcctgaatatttagtcaaatggcaaggacttccttatgcagaatctacctgggaaaaagatacagatatcgattttgctcaagatgcaattgatgaatataaggctcgtgaagctgccacatctatacttgggaaaacagtagatttccaacgaaagaaaagcaaagctagtttgaggaggcttgatgatcagccagaatggctaaaagctggtaagcttcgtgattatcagctggaaggactaaactttctcgtgaatgggtggagaaatgatactaatgttatacttgctgatgaaatgggtctggggaaaactatccaatctgtttccatgcttggcttccttcataatgctcaagaaatcaatggtccatttcttgtagttgtgccactgtcaacattgtcgaactgggcaaaagaatttcggaagtggctgcccaacatgaatgttgtcatttatgttggcaaccgtgccagcagagagatgtgccagaagcatgagtttttttcagacaagaagggtgggcgtcatgtaaaattccatacgttgataactacatatgaggtgattctcaaggacaaagcggttctttccaagatcaaatggaactatcttatggttgatgaagcccaccggttgaaaaattgtgaagcatcactatatactacccttttggaattcagcactaagaataagctgcttatcactggaacacctttgcagaacagtgtggaagagctttgggcattacttcatttccttgatccagttaaattcaacagcaaggatagttttgttgaaagatacaaaaatttgagttccttcaatgaaaccgagcttgcgaatctgcataaggaattgaggcctcatattctaaggcgggttataaaagatgtcgagaagtctttacctcctaaaattgaacggattctacgtgtcgagatgtcaccccttcagaaacaatactacaagtggattttagagcggaatttccagaatctaaataaaggagtccgtgggaatcaggtatcacttttgaacattgttgttgaattgaagaaatgctgcaaccatccatttttgtttgaaagtgccgatcacggttatggtggagatagcattggcgatcggaataaagttgaacggattgttatgagtagtggtaaacttgtcttgttggacaaactattgatggttaagatgttggacatccttgcagaatatctctcccttcggggatttcagtttcagaggcttgatggtagtacaagagcagatcttcgtcatcaagccatggaacattttaatgctcctggaagtgatgacttctgttttcttttatccacacgtgccggaggacttggtattaatcttgcaactgcagatacagtgataatttttgattcagattggaatccacaaaatgatctgcaggccatgagtagggcacataggattggccaacaggaaactgttaatatctaccgcttcgtcacatgcaaaagtgttgaagaggatattttggaacgcgcaaagaaaaagatggttcttgatcacttggttattcagaagctaaatgctgagggcaggcttgagaagaaagaatccaaaaagggtggctccatatttgacaagaatgaactttcggctatcttgaggtttggagcagaggaattgttcaaagaagacaagactgatgaagaggccaagagaaaccttgaaagtttggacattgatgaaattcttgagagagcagagaaagtcgagacaaagggtggtgaaggggaggaaggaaatgagcttcttagtgctttcaaggtcgcaaacttttccagtggcgaggatgatgcaacattctggagtaggctaatacagccagatcctgcagatattattcaggaaactttggcgcctcgtgctgcacgtaataaaaagagttatgttgaagatccccagtttgacaaaaataataacaggaaaagacgtgcagttgaagcacaagaaaagccaaggaggcgttctggcagaacagtggaaacagttaattcagtaccattggttgatggagcagtagctcaagtacgagagtggtcttttggtaatattccaaagaaggatgcttctcgttttgtacgagcggttaaaaaatttgggaatgcaacccagattgacttaattgtggatgatgttggtggtgtactagagaaggcaccacatgaagcacaaatagagctatttgatttgttgattgatggttgtcagaaaagctgttaaagagaatacagatatcaagggcacagttttggattttttcggtgtagctgtgaaggcctatgaattgctagctcgtgttgaagagcttcagttgttgtcaaagcgcattgcacgatacaaagatccaatcaagcaataccgcatccaactaccttataaaaagcctcagtggtcagcaagctgtggatggactgaaactgatgatgctagattgatggttggaattcattggtatggctacgggaattgggagaaaatacgtttggatccaaagcttggcctgacaacaaaaattgcaccagcaacacttggtgagagagagacatttttaccacgtgctccaaacttggataaccgtgctagcgctctcctgcaaaaggaatatgctaagtttagcggtaatagctcaaaagtcaaaggaaatgcccgccagacagtcaataacgacagtaatagtggagctcgatcaatgagaggccgacaaaaggatgcaccagataaagaggataataagccgaacaaagatgacattcagaagcgcaaggtaatgatggaagctgaagcaagagaagaaggtgaaatttctgaatcagaggcagagacaaagtatcgtctggacaaagaggagaagtggctcgaatggtgctctgaagttttaaatgaggaacaggaaactttgaagcgcctggacaggctgcagaatacaagtgtaaacctcccaaaggaaaaggttctttcaagaatccgcaagtatctcctgataattggggacaaaattggtgaagttgtccggcaacacagtgaatcttataggcaatcccgtaagtgtagccgcacctcccgcatgaccatgaggttatggaattatgttgccaccttttcaaacatgtctggggagcaattgcatgatctctatttgaaacttagtcaagaccaactggaaggtggagttggcccatctcatggtgccaatttcacatccattccttccagcaagggaggtaactcaaatcaacttcatcctacaagaaaccataggccaaccaggtctctccagtacaattctgagtctttgcacaataatgagagctctggaagttctgaagcctggaagcgtcgacggagagcagaccctgataatcagtttgacacccagcctttgtatcaacctccaattatgacaaatggaaataggttgcaggaatctagtagttctgcaggaattcttggttggggtccagttgaaatgagacggtatggtaatgaaaggccaaagcgtggtgttcatcctagtcattttcctactgggcatggacctttgttgtagctgaaggaattagatgactcgaacaaccttgtccactttggcataactgttcccagtgaatttcagcttccatatagttacaaatggtggaactctgtcggaattgaaattcttttttccataacaagaaggaataaaaagcaagacctgacctggagcgcagtttgaatactgtccctcaaaggtaatgccaggactccagaggcgacgcagggatttgttaacagctacactgaatatccttctgacaacatcacagtaaaacgaatacatggtggcttgtcaactgccaagaggattaatcgaggaaattttgtcgattcagttttgtgatccaatagaaaagttgggggtcattaggaaaaagttcatctcaacaatgatctatagttcactctatacatgtattatgttttacattgcaatataatgaaatatggttcagttattcccactcagtgtgttttgtgcccttctgtattgatgtaatagatcaaagaaatgcatgttctcgttttttttttttttttttagaaaaccgcaggagaactgcgcatcttatatattagagaggaaaaaagacattacaaaagaggagaagttgcagagcaactctcccacctaataaagaagttgcagctgggggggcatagtatgtgttagtttcaatttctctaaatagaggaaatatatattttgttcacgcgatggaatcggtagatacttgaattgattccatagtatttttttcctgaggtgatgtgagaatgaggtgtgtggttatatgtatttcaaataattgtttgacaacacggtgttatgatttacattttgacatgtcatgatctgtattctgtggtgcaggttagctaggtgatcaaagccattctacaagtcatttcgcaaaagcaaacaatttaggagttgcatgaggcctactttaccctggatgcctcacttttgttatttagatgcagtgaggatgtttctagctctgtgctccctccctcataaatatgacattgcgaaactttgatcatccgtctcattcaaaaaattcttgag

SEQ ID NO: 70632 - DNA, 6698 bp, Zea Mays
acttatctgcccttcctaatcgcccttacccccttgtgttagataaccacccctctcccttgcgcgccgccgccgccgccgccgcgcctccccgccgggagcccgtctccggcgatcgccgccgtctagcccccctcctgtccccgccttcgatccgaatcctagacgaaaaatcgtggaaaataccgcaaaaaatcgcggaaattcgcccggttctgtttgaataaatcgcacgggcgttgcgccccgcccctctcgctcccctcccgccgccagccccgcggccgccggcgacggcgatcgcgcagacaaataggcgcccgcgtcgagccagaaaaacccgcctcgtgccggtccgagcattcgtctctgtcgtggggactgagcacccgttgcctgtccccgcccgcctgcccgccgcctcctgctcctctcgtcggccgcggcacaaggagtgatactgagcctgtgagaggtattccatataatgccataatctgggatggcattcttcagcaactccgggagcaaggctgattcaggagggtacaacctgaatgaaaaggccgaagatgagggcatctacgagtcagttcaggatgggaatgttgacctgagttctaggcagtggaacttaaatgagaaagcagatgatgcttaccattgtgaagcagagcaatatgaggcgggccagtcaggtttgtactcttctgagaaggcatcagggcagcatatccagaaaggaggcagatcttctggtggtccatggggcacaaattttctgaaggattccaggtccaaacagatggccgaggatgttccatcgaatagtggtagaggaatgaatgctgctagcttgcatgatggcttggatgatagtggagaggatgatgagctgaacagggcaaatggtgaggtgcctgctgaggaaatgctctccgatgactattatgagcaggacggagaggagcagattgaatcgttgcatcgtggcgggacgaagcaatcaagctgttccacttctggtggggcagcaaaatctggctcacgacaaatgaaggcgtcaaagtacaatgcttatgacgacgatgatgacgatgactataatgatgagaatgacgatgacaatgacgctgatgaagacgaccccgctgatgtggattttgagccagacagcgaaacggacaaagctactgataaggataagtttatggatagtgagaattctgatggcgacgatgatgatggccttgaactctcagatgatgatgatgactttgttgagaaccggaggcaacctaaacgacttaagattgtagcaactaaaacttccaagggaaggaagttgcccatgccagctcaacgaaaacgaggggtgtctcacagcgatgaagaatattcttcaggaaaagattcagatcttcccagtgatgctgatttcaaacacagatcgaaaagacctgacaggttgcatcagaaatctgtgggccgcagtgatgttgccccaatcaattctcataatgagcttcgaacttctggaaggaggacagtgaaaaagatctcatatgttgaaagcgaagaaagtgatgatagcgaggagaagtcaactaaacaacaaaagctcatgaaggaggagctggaagaggaagacggagaaacaattgaaaaagttctttggcatcaacccaagggtgtagctgaagaagcaataaagaatcaccaatcagctcaacctactgttgtcagcctaacatcggactttgatcaacagtgggatgaattagagttctatataaaatggaaaggccagtcttacctgcattgtcaatggaagacattatcagagcttcaaagtgttagtggattcaagaaggtaataaattacacgaaaagagttgctgaggaacagaggtacaagagggcactatcacgtgaagaggttgaggtgcatgatgtgggcaaggagatggagctggatcttattaaacaatatagtcaggttgaacggatatttgctgatagggtcagcaaagctgatggagatgatctggttcctgaatatttagtcaaatggcaaggacttccttatgcagaatctacctgggaaaaagatacagatatcgattttgctcaagatgcaattgatgaatataaggctcgtgaagctgccacatctatacttgggaaaacagtagatttccaacgaaagaaaagcaaagctagtttgaggaggcttgatgatcagccagaatggctaaaagctggtaagcttcgtgattatcagctggaaggactaaactttctcgtgaatgggtggagaaatgatactaatgttatacttgctgatgaaatgggtctggggaaaactatccaatctgtttccatgcttggcttccttcataatgctcaagaaatcaatggtccatttcttgtagttgtgccactgtcaacattgtcgaactgggcaaaagaatttcggaagtggctgcccaacatgaatgttgtcatttatgttggcaaccgtgccagcagagagatgtgccagaagcatgagtttttttcagacaagaagggtgggcgtcatgtaaaattccatacgttgataactacatatgaggtgattctcaaggacaaagcggttctttccaagatcaaatggaactatcttatggttgatgaagcccaccggttgaaaaattgtgaagcatcactatatactacccttttggaattcagcactaagaataagctgcttatcactggaacacctttgcagaacagtgtggaagagctttgggcattacttcatttccttgatccagttaaattcaacagcaaggatagttttgttgaaagatacaaaaatttgagttccttcaatgaaaccgagcttgcgaatctgcataaggaattgaggcctcatattctaaggcgggttataaaagatgtcgagaagtctttacctcctaaaattgaacggattctacgtgtcgagatgtcaccccttcagaaacaatactacaagtggattttagagcggaatttccagaatctaaataaaggagtccgtgggaatcaggtatcacttttgaacattgttgttgaattgaagaaatgctgcaaccatccatttttgtttgaaagtgccgatcacggttatggtggagatagcattggcgatcggaataaagttgaacggattgttatgagtagtggtaaacttgtcttgttggacaaactattgatggttaagatgttggacatccttgcagaatatctctcccttcggggatttcagtttcagaggcttgatggtagtacaagagcagatcttcgtcatcaagccatggaacattttaatgctcctggaagtgatgacttctgttttcttttatccacacgtgccggaggacttggtattaatcttgcaactgcagatacagtgataatttttgattcagattggaatccacaaaatgatctgcaggccatgagtagggcacataggattggccaacaggaaactgttaatatctaccgcttcgtcacatgcaaaagtgttgaagaggatattttggaacgcgcaaagaaaaagatggttcttgatcacttggttattcagaagctaaatgctgagggcaggcttgagaagaaagaatccaaaaagggtggctccatatttgacaagaatgaactttcggctatcttgaggtttggagcagaggaattgttcaaagaagacaagactgatgaagaggccaagagaaaccttgaaagtttggacattgatgaaattcttgagagagcagagaaagtcgagacaaagggtggtgaaggggaggaaggaaatgagcttcttagtgctttcaaggtcgcaaacttttccagtggcgaggatgatgcaacattctggagtaggctaatacagccagatcctgcagatattattcaggaaactttggcgcctcgtgctgcacgtaataaaaagagttatgttgaagatccccagtttgacaaaaataataacaggaaaagacgtgcagttgaagcacaagaaaagccaaggaggcgttctggcagaacagtggaaacagttaattcagtaccattggttgatggagcagtagctcaagtacgagagtggtcttttggtaatattccaaagaaggatgcttctcgttttgtacgagcggttaaaaaatttgggaatgcaacccagattgacttaattgtggatgatgttggtggtgtactagagaaggcaccacatgaagcacaaatagagctatttgatttgttgattgatggttgtcagaaaagctgttaaagagaatacagatatcaagggcacagttttggattttttcggtgtagctgtgaaggcctatgaattgctagctcgtgttgaagagcttcagttgttgtcaaagcgcattgcacgatacaaagatccaatcaagcaataccgcatccaactaccttataaaaagcctcagtggtcagcaagctgtggatggactgaaactgatgatgctagattgatggttggaattcattggtatggctacgggaattgggagaaaatacgtttggatccaaagcttggcctgacaacaaaaattgcaccagcaacacttggtgagagagagacatttttaccacgtgctccaaacttggataaccgtgctagcgctctcctgcaaaaggaatatgctaagtttagcggtaatagctcaaaagtcaaaggaaatgcccgccagacagtcaataacgacagtaatagtggagctcgatcaatgagaggccgacaaaaggatgcaccagataaagaggataataagccgaacaaagatgacattcagaagcgcaaggtaatgatggaagctgaagcaagagaagaaggtgaaatttctgaatcagaggcagagacaaagtatcgtctggacaaagaggagaagtggctcgaatggtgctctgaagttttaaatgaggaacaggaaactttgaagcgcctggacaggctgcagaatacaagtgtaaacctcccaaaggaaaaggttctttcaagaatccgcaagtatctcctgataattggggacaaaattggtgaagttgtccggcaacacagtgaatcttataggcaatcccgcatgaccatgaggttatggaattatgttgccaccttttcaaacatgtctggggagcaattgcatgatctctatttgaaacttagtcaagaccaactggaaggtggagttggcccatctcatggtgccaatttcacatccattccttccagcaagggaggtaactcaaatcaacttcatcctacaagaaaccataggccaaccaggtctctccagtacaattctgagtctttgcacaataatgagagctctggaagttctgaagcctggaagcgtcgacggagagcagaccctgataatcagtttgacacccagcctttgtatcaacctccaattatgacaaatggaaataggttgcaggaatctagtagttctgcaggaattcttggttggggtccagttgaaatgagacggtatggtaatgaaaggccaaagcgtggtgttcatcctagtcattttcctactgggcatggacctttgttgtagctgaaggaattagatgactcgaacaaccttgtccactttggcataactgttcccagtgaatttcagcttccatatagttacaaatggtggaactctgtcggaattgaaattcttttttccataacaagaaggaataaaaagcaagacctgacctggagcgcagtttgaatactgtccctcaaaggtaatgccaggactccagaggcgacgcagggatttgttaacagctacactgaatatccttctgacaacatcacagtaaaacgaatacatggtggcttgtcaactgccaagaggattaatcgaggaaattttgtcgattcagttttgtgatccaatagaaaagttgggggtcattaggaaaaagttcatctcaacaatgatctatagttcactctatacatgtattatgttttacattgcaatataatgaaatatggttcagttattcccactcagtgtgttttgtgcccttctgtattgatgtaatagatcaaagaaatgcatgttctcgttttttttttttttttttagaaaaccgcaggagaactgcgcatcttatatattagagaggaaaaaagacattacaaaagaggagaagttgcagagcaactctcccacctaataaagaagttgcagctgggggggcatagtatgtgttagtttcaatttctctaaatagaggaaatatatattttgttcacgcgatggaatcggtagatacttgaattgattccatagtatttttttcctgaggtgatgtgagaatgaggtgtgtggttatatgtatttcaaataattgtttgacaacacggtgttatgatttacattttgacatgtcatgatctgtattctgtggtgcaggttagctaggtgatcaaagccattctacaagtcatttcgcaaaagcaaacaatttaggagttgcatgaggcctactttaccctggatgcctcacttttgttatttagatgcagtgaggatgtttctagctctgtgctccctccctcataaatatgacattgcgaaactttgatcatccgtctcattcaaaaaattcttgag

SEQ ID NO: 70633 - DNA, 6605 bp, Zea Mays
acttatctgcccttcctaatcgcccttacccccttgtgttagataaccacccctctcccttgcgcgccgccgccgccgccgccgcgcctccccgccgggagcccgtctccggcgatcgccgccgtctagcccccctcctgtccccgccttcgatccgaatcctagacgaaaaatcgtggaaaataccgcaaaaaatcgcggaaattcgcccggttctgtttgaataaatcgcacgggcgttgcgccccgcccctctcgctcccctcccgccgccagccccgcggccgccggcgacggcgatcgcgcagacaaataggcgcccgcgtcgagccagaaaaacccgcctcgtgccggtccgagcattcgtctctgtcgtggggactgagcacccgttgcctgtccccgcccgcctgcccgccgcctcctgctcctctcgtcggccgcggcacaaggagtgatactgagcctgtgagaggtattccatataatgccataatctgggatggcattcttcagcaactccgggagcaaggctgattcaggagggtacaacctgaatgaaaaggccgaagatgagggcatctacgagtcagttcaggatgggaatgttgacctgagttctaggcagtggaacttaaatgagaaagcagatgatgcttaccattgtgaagcagagcaatatgaggcgggccagtcaggtttgtactcttctgagaaggcatcagggcagcatatccagaaaggaggcagatcttctggtggtccatggggcacaaattttctgaaggattccaggtccaaacagatggccgaggatgttccatcgaatagtggtagaggaatgaatgctgctagcttgcatgatggcttggatgatagtggagaggatgatgagctgaacagggcaaatggtgaggtgcctgctgaggaaatgctctccgatgactattatgagcaggacggagaggagcagattgaatcgttgcatcgtggcgggacgaagcaatcaagctgttccacttctgaagacgaccccgctgatgtggattttgagccagacagcgaaacggacaaagctactgataaggataagtttatggatagtgagaattctgatggcgacgatgatgatggccttgaactctcagatgatgatgatgactttgttgagaaccggaggcaacctaaacgacttaagattgtagcaactaaaacttccaagggaaggaagttgcccatgccagctcaacgaaaacgaggggtgtctcacagcgatgaagaatattcttcaggaaaagattcagatcttcccagtgatgctgatttcaaacacagatcgaaaagacctgacaggttgcatcagaaatctgtgggccgcagtgatgttgccccaatcaattctcataatgagcttcgaacttctggaaggaggacagtgaaaaagatctcatatgttgaaagcgaagaaagtgatgatagcgaggagaagtcaactaaacaacaaaagctcatgaaggaggagctggaagaggaagacggagaaacaattgaaaaagttctttggcatcaacccaagggtgtagctgaagaagcaataaagaatcaccaatcagctcaacctactgttgtcagcctaacatcggactttgatcaacagtgggatgaattagagttctatataaaatggaaaggccagtcttacctgcattgtcaatggaagacattatcagagcttcaaagtgttagtggattcaagaaggtaataaattacacgaaaagagttgctgaggaacagaggtacaagagggcactatcacgtgaagaggttgaggtgcatgatgtgggcaaggagatggagctggatcttattaaacaatatagtcaggttgaacggatatttgctgatagggtcagcaaagctgatggagatgatctggttcctgaatatttagtcaaatggcaaggacttccttatgcagaatctacctgggaaaaagatacagatatcgattttgctcaagatgcaattgatgaatataaggctcgtgaagctgccacatctatacttgggaaaacagtagatttccaacgaaagaaaagcaaagctagtttgaggaggcttgatgatcagccagaatggctaaaagctggtaagcttcgtgattatcagctggaaggactaaactttctcgtgaatgggtggagaaatgatactaatgttatacttgctgatgaaatgggtctggggaaaactatccaatctgtttccatgcttggcttccttcataatgctcaagaaatcaatggtccatttcttgtagttgtgccactgtcaacattgtcgaactgggcaaaagaatttcggaagtggctgcccaacatgaatgttgtcatttatgttggcaaccgtgccagcagagagatgtgccagaagcatgagtttttttcagacaagaagggtgggcgtcatgtaaaattccatacgttgataactacatatgaggtgattctcaaggacaaagcggttctttccaagatcaaatggaactatcttatggttgatgaagcccaccggttgaaaaattgtgaagcatcactatatactacccttttggaattcagcactaagaataagctgcttatcactggaacacctttgcagaacagtgtggaagagctttgggcattacttcatttccttgatccagttaaattcaacagcaaggatagttttgttgaaagatacaaaaatttgagttccttcaatgaaaccgagcttgcgaatctgcataaggaattgaggcctcatattctaaggcgggttataaaagatgtcgagaagtctttacctcctaaaattgaacggattctacgtgtcgagatgtcaccccttcagaaacaatactacaagtggattttagagcggaatttccagaatctaaataaaggagtccgtgggaatcaggtatcacttttgaacattgttgttgaattgaagaaatgctgcaaccatccatttttgtttgaaagtgccgatcacggttatggtggagatagcattggcgatcggaataaagttgaacggattgttatgagtagtggtaaacttgtcttgttggacaaactattgatggttaagatgttggacatccttgcagaatatctctcccttcggggatttcagtttcagaggcttgatggtagtacaagagcagatcttcgtcatcaagccatggaacattttaatgctcctggaagtgatgacttctgttttcttttatccacacgtgccggaggacttggtattaatcttgcaactgcagatacagtgataatttttgattcagattggaatccacaaaatgatctgcaggccatgagtagggcacataggattggccaacaggaaactgttaatatctaccgcttcgtcacatgcaaaagtgttgaagaggatattttggaacgcgcaaagaaaaagatggttcttgatcacttggttattcagaagctaaatgctgagggcaggcttgagaagaaagaatccaaaaagggtggctccatatttgacaagaatgaactttcggctatcttgaggtttggagcagaggaattgttcaaagaagacaagactgatgaagaggccaagagaaaccttgaaagtttggacattgatgaaattcttgagagagcagagaaagtcgagacaaagggtggtgaaggggaggaaggaaatgagcttcttagtgctttcaaggtcgcaaacttttccagtggcgaggatgatgcaacattctggagtaggctaatacagccagatcctgcagatattattcaggaaactttggcgcctcgtgctgcacgtaataaaaagagttatgttgaagatccccagtttgacaaaaataataacaggaaaagacgtgcagttgaagcacaagaaaagccaaggaggcgttctggcagaacagtggaaacagttaattcagtaccattggttgatggagcagtagctcaagtacgagagtggtcttttggtaatattccaaagaaggatgcttctcgttttgtacgagcggttaaaaaatttgggaatgcaacccagattgacttaattgtggatgatgttggtggtgtactagagaaggcaccacatgaagcacaaatagagctatttgatttgttgattgatggttgtcagaaaagctgttaaagagaatacagatatcaagggcacagttttggattttttcggtgtagctgtgaaggcctatgaattgctagctcgtgttgaagagcttcagttgttgtcaaagcgcattgcacgatacaaagatccaatcaagcaataccgcatccaactaccttataaaaagcctcagtggtcagcaagctgtggatggactgaaactgatgatgctagattgatggttggaattcattggtatggctacgggaattgggagaaaatacgtttggatccaaagcttggcctgacaacaaaaattgcaccagcaacacttggtgagagagagacatttttaccacgtgctccaaacttggataaccgtgctagcgctctcctgcaaaaggaatatgctaagtttagcggtaatagctcaaaagtcaaaggaaatgcccgccagacagtcaataacgacagtaatagtggagctcgatcaatgagaggccgacaaaaggatgcaccagataaagaggataataagccgaacaaagatgacattcagaagcgcaaggtaatgatggaagctgaagcaagagaagaaggtgaaatttctgaatcagaggcagagacaaagtatcgtctggacaaagaggagaagtggctcgaatggtgctctgaagttttaaatgaggaacaggaaactttgaagcgcctggacaggctgcagaatacaagtgtaaacctcccaaaggaaaaggttctttcaagaatccgcaagtatctcctgataattggggacaaaattggtgaagttgtccggcaacacagtgaatcttataggcaatcccgtaagtgtagccgcacctcccgcatgaccatgaggttatggaattatgttgccaccttttcaaacatgtctggggagcaattgcatgatctctatttgaaacttagtcaagaccaactggaaggtggagttggcccatctcatggtgccaatttcacatccattccttccagcaagggaggtaactcaaatcaacttcatcctacaagaaaccataggccaaccaggtctctccagtacaattctgagtctttgcacaataatgagagctctggaagttctgaagcctggaagcgtcgacggagagcagaccctgataatcagtttgacacccagcctttgtatcaacctccaattatgacaaatggaaataggttgcaggaatctagtagttctgcaggaattcttggttggggtccagttgaaatgagacggtatggtaatgaaaggccaaagcgtggtgttcatcctagtcattttcctactgggcatggacctttgttgtagctgaaggaattagatgactcgaacaaccttgtccactttggcataactgttcccagtgaatttcagcttccatatagttacaaatggtggaactctgtcggaattgaaattcttttttccataacaagaaggaataaaaagcaagacctgacctggagcgcagtttgaatactgtccctcaaaggtaatgccaggactccagaggcgacgcagggatttgttaacagctacactgaatatccttctgacaacatcacagtaaaacgaatacatggtggcttgtcaactgccaagaggattaatcgaggaaattttgtcgattcagttttgtgatccaatagaaaagttgggggtcattaggaaaaagttcatctcaacaatgatctatagttcactctatacatgtattatgttttacattgcaatataatgaaatatggttcagttattcccactcagtgtgttttgtgcccttctgtattgatgtaatagatcaaagaaatgcatgttctcgttttttttttttttttttagaaaaccgcaggagaactgcgcatcttatatattagagaggaaaaaagacattacaaaagaggagaagttgcagagcaactctcccacctaataaagaagttgcagctgggggggcatagtatgtgttagtttcaatttctctaaatagaggaaatatatattttgttcacgcgatggaatcggtagatacttgaattgattccatagtatttttttcctgaggtgatgtgagaatgaggtgtgtggttatatgtatttcaaataattgtttgacaacacggtgttatgatttacattttgacatgtcatgatctgtattctgtggtgcaggttagctaggtgatcaaagccattctacaagtcatttcgcaaaagcaaacaatttaggagttgcatgaggcctactttaccctggatgcctcacttttgttatttagatgcagtgaggatgtttctagctctgtgctccctccctcataaatatgacattgcgaaactttgatcatccgtctcattcaaaaaattcttgag

SEQ ID NO: 70634 - DNA, 6018 bp, Zea Mays
acttatctgcccttcctaatcgcccttacccccttgtgttagataaccacccctctcccttgcgcgccgccgccgccgccgccgcgcctccccgccgggagcccgtctccggcgatcgccgccgtctagcccccctcctgtccccgccttcgatccgaatcctagacgaaaaatcgtggaaaataccgcaaaaaatcgcggaaattcgcccggttctgtttgaataaatcgcacgggcgttgcgccccgcccctctcgctcccctcccgccgccagccccgcggccgccggcgacggcgatcgcgcagacaaataggcgcccgcgtcgagccagaaaaacccgcctcgtgccggtccgagcattcgtctctgtcgtggggactgagcacccgttgcctgtccccgcccgcctgcccgccgcctcctgctcctctcgtcggccgcggcacaaggagtgatactgagcctgtgagaggtattccatataatgccataatctgggatggcattcttcagcaactccgggagcaaggctgattcaggagggtacaacctgaatgaaaaggccgaagatgagggcatctacgagtcagttcaggatgggaatgttgacctgagttctaggcagtggaacttaaatgagaaagcagatgatgcttaccattgtgaagcagagcaatatgaggcgggccagtcaggtttgtactcttctgagaaggcatcagggcagcatatccagaaaggaggcagatcttctggtggtccatggggcacaaattttctgaaggattccaggtccaaacagatggccgaggatgttccatcgaatagtggtagaggaatgaatgctgctagcttgcatgatggcttggatgatagtggagaggatgatgagctgaacagggcaaatggtgaggtgcctgctgaggaaatgctctccgatgactattatgagcaggacggagaggagcagattgaatcgttgcatcgtggcgggacgaagcaatcaagctgttccacttctggtggggcagcaaaatctggctcacgacaaatgaaggcgtcaaagtacaatgcttatgacgacgatgatgacgatgactataatgatgagaatgacgatgacaatgacgctgatgaagacgaccccgctgatgtggattttgagccagacagcgaaacggacaaagctactgataaggataagtttatggatagtgagaattctgatggcgacgatgatgatggccttgaactctcagatgatgatgatgactttgttgagaaccggaggcaacctaaacgacttaagattgtagcaactaaaacttccaagggaaggaagttgcccatgccagctcaacgaaaacgaggggtgtctcacagcgatgaagaatattcttcaggaaaagattcagatcttcccagtgatgctgatttcaaacacagatcgaaaagacctgacaggttgcatcagaaatctgtgggccgcagtgatgttgccccaatcaattctcataatgagcttcgaacttctggaaggaggacagtgaaaaagatctcatatgttgaaagcgaagaaagtgatgatagcgaggagaagtcaactaaacaacaaaagctcatgaaggaggagctggaagaggaagacggagaaacaattgaaaaagttctttggcatcaacccaagggtgtagctgaagaagcaataaagaatcaccaatcagctcaacctactgttgtcagcctaacatcggactttgatcaacagtgggatgaattagagttctatataaaatggaaaggccagtcttacctgcattgtcaatggaagacattatcagagcttcaaagtgttagtggattcaagaaggtaataaattacacgaaaagagttgctgaggaacagaggtacaagagggcactatcacgtgaagaggttgaggtgcatgatgtgggcaaggagatggagctggatcttattaaacaatatagtcaggttgaacggatatttgctgatagggtcagcaaagctgatggagatgatctggttcctgaatatttagtcaaatggcaaggacttccttatgcagaatctacctgggaaaaagatacagatatcgattttgctcaagatgcaattgatgaatataaggctcgtgaagctgccacatctatacttgggaaaacagtagatttccaacgaaagaaaagcaaagctagtttgaggaggcttgatgatcagccagaatggctaaaagctggtaagcttcgtgattatcagctggaaggactaaactttctcgtgaatgggtggagaaatgatactaatgttatacttgctgatgaaatgggtctggggaaaactatccaatctgtttccatgcttggcttccttcataatgctcaagaaatcaatggtccatttcttgtagttgtgccactgtcaacattgtcgaactgggcaaaagaatttcggaagtggctgcccaacatgaatgttgtcatttatgttggcaaccgtgccagcagagagatgtgccagaagcatgagtttttttcagacaagaagggtgggcgtcatgtaaaattccatacgttgataactacatatgaggtgattctcaaggacaaagcggttctttccaagatcaaatggaactatcttatggttgatgaagcccaccggttgaaaaattgtgaagcatcactatatactacccttttggaattcagcactaagaataagctgcttatcactggaacacctttgcagaacagtgtggaagagctttgggcattacttcatttccttgatccagttaaattcaacagcaaggatagttttgttgaaagatacaaaaatttgagttccttcaatgaaaccgagcttgcgaatctgcataaggaattgaggcctcatattctaaggcgggttataaaagatgtcgagaagtctttacctcctaaaattgaacggattctacgtgtcgagatgtcaccccttcagaaacaatactacaagtggattttagagcggaatttccagaatctaaataaaggagtccgtgggaatcaggtatcacttttgaacattgttgttgaattgaagaaatgctgcaaccatccatttttgtttgaaagtgccgatcacggttatggtggagatagcattggcgatcggaataaagttgaacggattgttatgagtagtggtaaacttgtcttgttggacaaactattgatggttaagatgttggacatccttgcagaatatctctcccttcggggatttcagtttcagaggcttgatggtagtacaagagcagatcttcgtcatcaagccatggaacattttaatgctcctggaagtgatgacttctgttttcttttatccacacgtgccggaggacttggtattaatcttgcaactgcagatacagtgataatttttgattcagattggaatccacaaaatgatctgcaggccatgagtagggcacataggattggccaacaggaaactgttaatatctaccgcttcgtcacatgcaaaagtgttgaagaggatattttggaacgcgcaaagaaaaagatggttcttgatcacttggttattcagaagctaaatgctgagggcaggcttgagaagaaagaatccaaaaagggtggctccatatttgacaagaatgaactttcggctatcttgaggtttggagcagaggaattgttcaaagaagacaagactgatgaagaggccaagagaaaccttgaaagtttggacattgatgaaattcttgagagagcagagaaagtcgagacaaagggtggtgaaggggaggaaggaaatgagcttcttagtgctttcaaggtcgcaaacttttccagtggcgaggatgatgcaacattctggagtaggctaatacagccagatcctgcagatattattcaggaaactttggcgcctcgtgctgcacgtaataaaaagagttatgttgaagatccccagtttgacaaaaataataacaggaaaagacgtgcagttgaagcacaagaaaagccaaggaggcgttctggcagaacagtggaaacagttaattcagtaccattggttgatggagcagtagctcaagtacgagagtggtcttttggtaatattccaaagaaggatgcttctcgttttgtacgagcggttaaaaaatttgggaatgcaacccagattgacttaattgtggatgatgttggtggtgtactagagaaggcaccacatgaagcacaaatagagctatttgatttgttgattgatggttgtcagaaaagctgttaaagagaatacagatatcaagggcacagttttggattttttcggtgtagctgtgaaggcctatgaattgctagctcgtgttgaagagcttcagttgttgtcaaagcgcattgcacgatacaaagatccaatcaagcaataccgcatccaactaccttataaaaagcctcagtggtcagcaagctgtggatggactgaaactgatgatgctagattgatggttggaattcattggtatggctacgggaattgggagaaaatacgtttggatccaaagcttggcctgacaacaaaaattgcaccagcaacacttggtgagagagagacatttttaccacgtgctccaaacttggataaccgtgctagcgctctcctgcaaaaggaatatgctaagtttagcggtaatagctcaaaagtcaaaggaaatgcccgccagacagtcaataacgacagtaatagtggagctcgatcaatgagaggccgacaaaaggatgcaccagataaagaggataataagccgaacaaagatgacattcagaagcgcaaggtaatgatggaagctgaagcaagagaagaaggtgaaatttctgaatcagaggcagagacaaagtatcgtctggacaaagaggagaagtggctcgaatggtgctctgaagttttaaatgaggaacaggaaactttgaagcgcctggacaggctgcagaatacaagtgtaaacctcccaaaggaaaaggttctttcaagaatccgcaagtatctcctgataattggggacaaaattggtgaagttgtccggcaacacagtgaatcttataggcaatcccgcatgaccatgaggttatggaattatgttgccaccttttcaaacatgtctggggagcaattgcatgatctctatttgaaacttagtcaagaccaactggaaggtggagttggcccatctcatggtgccaatttcacatccattccttccagcaagggaggtaactcaaatcaacttcatcctacaagaaaccataggccaaccaggtctctccagtacaattctgagtctttgcacaataatgagagctctggaagttctgaagcctggaagcgtcgacggagagcagaccctgataatcagtttgacacccagcctttgtatcaacctccaattatgacaaatggaaataggttgcaggaatctagtagttctgcaggaattcttggttggggtccagttgaaatgagacggtatggtaatgaaaggccaaagcgtggtgttcatcctagtcattttcctactgggcatggacctttgttgtagctgaaggaattagatgactcgaacaaccttgtccactttggcataactgttcccagtgaatttcagcttccatatagttacaaatggtggaactctgtcggaattgaaattcttttttccataacaagaaggaataaaaagcaagacctgacctggagcgcagtttgaatactgtccctcaaaggttagctaggtgatcaaagccattctacaagtcatttcgcaaaagcaaacaatttaggagttgcatgaggcctactttaccctggatgcctcacttttgttatttagatgcagtgaggatgtttctagctctgtgctccctccctcataaatatgacattgcgaaactttgatcatccgtctcattcaaaaaattcttgag

SEQ ID NO: 70635 - DNA, 6054 bp, Zea Mays
acttatctgcccttcctaatcgcccttacccccttgtgttagataaccacccctctcccttgcgcgccgccgccgccgccgccgcgcctccccgccgggagcccgtctccggcgatcgccgccgtctagcccccctcctgtccccgccttcgatccgaatcctagacgaaaaatcgtggaaaataccgcaaaaaatcgcggaaattcgcccggttctgtttgaataaatcgcacgggcgttgcgccccgcccctctcgctcccctcccgccgccagccccgcggccgccggcgacggcgatcgcgcagacaaataggcgcccgcgtcgagccagaaaaacccgcctcgtgccggtccgagcattcgtctctgtcgtggggactgagcacccgttgcctgtccccgcccgcctgcccgccgcctcctgctcctctcgtcggccgcggcacaaggagtgatactgagcctgtgagaggtattccatataatgccataatctgggatggcattcttcagcaactccgggagcaaggctgattcaggagggtacaacctgaatgaaaaggccgaagatgagggcatctacgagtcagttcaggatgggaatgttgacctgagttctaggcagtggaacttaaatgagaaagcagatgatgcttaccattgtgaagcagagcaatatgaggcgggccagtcaggtttgtactcttctgagaaggcatcagggcagcatatccagaaaggaggcagatcttctggtggtccatggggcacaaattttctgaaggattccaggtccaaacagatggccgaggatgttccatcgaatagtggtagaggaatgaatgctgctagcttgcatgatggcttggatgatagtggagaggatgatgagctgaacagggcaaatggtgaggtgcctgctgaggaaatgctctccgatgactattatgagcaggacggagaggagcagattgaatcgttgcatcgtggcgggacgaagcaatcaagctgttccacttctggtggggcagcaaaatctggctcacgacaaatgaaggcgtcaaagtacaatgcttatgacgacgatgatgacgatgactataatgatgagaatgacgatgacaatgacgctgatgaagacgaccccgctgatgtggattttgagccagacagcgaaacggacaaagctactgataaggataagtttatggatagtgagaattctgatggcgacgatgatgatggccttgaactctcagatgatgatgatgactttgttgagaaccggaggcaacctaaacgacttaagattgtagcaactaaaacttccaagggaaggaagttgcccatgccagctcaacgaaaacgaggggtgtctcacagcgatgaagaatattcttcaggaaaagattcagatcttcccagtgatgctgatttcaaacacagatcgaaaagacctgacaggttgcatcagaaatctgtgggccgcagtgatgttgccccaatcaattctcataatgagcttcgaacttctggaaggaggacagtgaaaaagatctcatatgttgaaagcgaagaaagtgatgatagcgaggagaagtcaactaaacaacaaaaggaggagctggaagaggaagacggagaaacaattgaaaaagttctttggcatcaacccaagggtgtagctgaagaagcaataaagaatcaccaatcagctcaacctactgttgtcagcctaacatcggactttgatcaacagtgggatgaattagagttctatataaaatggaaaggccagtcttacctgcattgtcaatggaagacattatcagagcttcaaagtgttagtggattcaagaaggtaataaattacacgaaaagagttgctgaggaacagaggtacaagagggcactatcacgtgaagaggttgaggtgcatgatgtgggcaaggagatggagctggatcttattaaacaatatagtcaggttgaacggatatttgctgatagggtcagcaaagctgatggagatgatctggttcctgaatatttagtcaaatggcaaggacttccttatgcagaatctacctgggaaaaagatacagatatcgattttgctcaagatgcaattgatgaatataaggctcgtgaagctgccacatctatacttgggaaaacagtagatttccaacgaaagaaaagcaaagctagtttgaggaggcttgatgatcagccagaatggctaaaagctggtaagcttcgtgattatcagctggaaggactaaactttctcgtgaatgggtggagaaatgatactaatgttatacttgctgatgaaatgggtctggggaaaactatccaatctgtttccatgcttggcttccttcataatgctcaagaaatcaatggtccatttcttgtagttgtgccactgtcaacattgtcgaactgggcaaaagaatttcggaagtggctgcccaacatgaatgttgtcatttatgttggcaaccgtgccagcagagagatgtgccagaagcatgagtttttttcagacaagaagggtgggcgtcatgtaaaattccatacgttgataactacatatgaggtgattctcaaggacaaagcggttctttccaagatcaaatggaactatcttatggttgatgaagcccaccggttgaaaaattgtgaagcatcactatatactacccttttggaattcagcactaagaataagctgcttatcactggaacacctttgcagaacagtgtggaagagctttgggcattacttcatttccttgatccagttaaattcaacagcaaggatagttttgttgaaagatacaaaaatttgagttccttcaatgaaaccgagcttgcgaatctgcataaggaattgaggcctcatattctaaggcgggttataaaagatgtcgagaagtctttacctcctaaaattgaacggattctacgtgtcgagatgtcaccccttcagaaacaatactacaagtggattttagagcggaatttccagaatctaaataaaggagtccgtgggaatcaggtatcacttttgaacattgttgttgaattgaagaaatgctgcaaccatccatttttgtttgaaagtgccgatcacggttatggtggagatagcattggcgatcggaataaagttgaacggattgttatgagtagtggtaaacttgtcttgttggacaaactattggtgagactacgggagactaaccatcgtgtgcttatattctcacagatggttaagatgttggacatccttgcagaatatctctcccttcggggatttcagtttcagaggcttgatggtagtacaagagcagatcttcgtcatcaagccatggaacattttaatgctcctggaagtgatgacttctgttttcttttatccacacgtgccggaggacttggtattaatcttgcaactgcagatacagtgataatttttgattcagattggaatccacaaaatgatctgcaggccatgagtagggcacataggattggccaacaggaaactgttaatatctaccgcttcgtcacatgcaaaagtgttgaagaggatattttggaacgcgcaaagaaaaagatggttcttgatcacttggttattcagaagctaaatgctgagggcaggcttgagaagaaagaatccaaaaagggtggctccatatttgacaagaatgaactttcggctatcttgaggtttggagcagaggaattgttcaaagaagacaagactgatgaagaggccaagagaaaccttgaaagtttggacattgatgaaattcttgagagagcagagaaagtcgagacaaagggtggtgaaggggaggaaggaaatgagcttcttagtgctttcaaggtcgcaaacttttccagtggcgaggatgatgcaacattctggagtaggctaatacagccagatcctgcagatattattcaggaaactttggcgcctcgtgctgcacgtaataaaaagagttatgttgaagatccccagtttgacaaaaataataacaggaaaagacgtgcagttgaagcacaagaaaagccaaggaggcgttctggcagaacagtggaaacagttaattcagtaccattggttgatggagcagtagctcaagtacgagagtggtcttttggtaatattccaaagaaggatgcttctcgttttgtacgagcggttaaaaaatttgggaatgcaacccagattgacttaattgtggatgatgttggtggtgtactagagaaggcaccacatgaagcacaaatagagctatttgatttgttgattgatggttgtcagaaaagctgttaaagagaatacagatatcaagggcacagttttggattttttcggtgtagctgtgaaggcctatgaattgctagctcgtgttgaagagcttcagttgttgtcaaagcgcattgcacgatacaaagatccaatcaagcaataccgcatccaactaccttataaaaagcctcagtggtcagcaagctgtggatggactgaaactgatgatgctagattgatggttggaattcattggtatggctacgggaattgggagaaaatacgtttggatccaaagcttggcctgacaacaaaaattgcaccagcaacacttggtgagagagagacatttttaccacgtgctccaaacttggataaccgtgctagcgctctcctgcaaaaggaatatgctaagtttagcggtaatagctcaaaagtcaaaggaaatgcccgccagacagtcaataacgacagtaatagtggagctcgatcaatgagaggccgacaaaaggatgcaccagataaagaggataataagccgaacaaagatgacattcagaagcgcaaggtaatgatggaagctgaagcaagagaagaaggtgaaatttctgaatcagaggcagagacaaagtatcgtctggacaaagaggagaagtggctcgaatggtgctctgaagttttaaatgaggaacaggaaactttgaagcgcctggacaggctgcagaatacaagtgtaaacctcccaaaggaaaaggttctttcaagaatccgcaagtatctcctgataattggggacaaaattggtgaagttgtccggcaacacagtgaatcttataggcaatcccgcatgaccatgaggttatggaattatgttgccaccttttcaaacatgtctggggagcaattgcatgatctctatttgaaacttagtcaagaccaactggaaggtggagttggcccatctcatggtgccaatttcacatccattccttccagcaagggaggtaactcaaatcaacttcatcctacaagaaaccataggccaaccaggtctctccagtacaattctgagtctttgcacaataatgagagctctggaagttctgaagcctggaagcgtcgacggagagcagaccctgataatcagtttgacacccagcctttgtatcaacctccaattatgacaaatggaaataggttgcaggaatctagtagttctgcaggaattcttggttggggtccagttgaaatgagacggtatggtaatgaaaggccaaagcgtggtgttcatcctagtcattttcctactgggcatggacctttgttgtagctgaaggaattagatgactcgaacaaccttgtccactttggcataactgttcccagtgaatttcagcttccatatagttacaaatggtggaactctgtcggaattgaaattcttttttccataacaagaaggaataaaaagcaagacctgacctggagcgcagtttgaatactgtccctcaaaggttagctaggtgatcaaagccattctacaagtcatttcgcaaaagcaaacaatttaggagttgcatgaggcctactttaccctggatgcctcacttttgttatttagatgcagtgaggatgtttctagctctgtgctccctccctcataaatatgacattgcgaaactttgatcatccgtctcattcaaaaaattcttgag

SEQ ID NO: 70636 - DNA, 2706 bp, Zea Mays
gaaacgtcctcgtggacgtgcaatagccactgcgcgagtcggtgtcggggctggtgtcggacgaatacggggaggagacgcctgctcctacgccctctgtcgagaatgaggtggcacggaggtggaggcatgaggggagagagaaaagaagtagaatgacgaacgaggtggtgacaactgagacgatgaccattattatcgtgcagaggtataaatagccaaatggatcgtgtttggcgagccgacccgaggcacgacatatttaatagtgtctgggccaacccaacacgagcgtcgtgcggtgcttgggccgtagcctcggcccgtagtgctggcccgacccgacatgattattttttttaaaaaaaatatatacatatgtacaatttatattcaatattataatcacctgatcatgatattctactggttagatagtttcgcccagagtcttccaccacccttcaattagagtgtgggacagtgggttcaaacctcacctcctacatcactttttaacataccccatgatgcaccgctcgctttttaatattttacgctgaattgatttggaaaaaattatagggattttttttataaaaaaatgacgcggtacgaccgttgaaactggtggtttaagtataaaatagagagtagaaaaatttaaaagttttaatccctctcagtcttttacaatctccttgtaaacgaacaagacctcccctgataccttggaaccaacacgccagagacacaaattacagagccggctccacagagacacttcactgctgcaaagagcagcagccacgagcttcaactccacgcaagattaccccaagttctcaacacgtacccgacggccgaacacgtgactccagccagtgagggcacaccacgtcaccccgccgccactcatatataaaacctattgacctcactacccgccgccggcgaccaccagacagcagccccatcaccccctgagtcctgactcctgagtcctgacgcaccgcgaggccgggccaaatcgtcgagagccaagtcagcgaagccccgaaccctccctccctcccatggccgtccgccgcaggaccgcggcggccgctgccggggacccgcctccgcaggcgccaccggcagatgaggcggcggcggtggcaccagacgaaccggtcctccgggcgccgaacctgcgcgtggccgctgtggcagcggcgctcttcctcgcgcccttctcgtacctcgcgttcgtgcactactccctgaccgccgatctgcagcgatccatcctcaaatgcggcgccatgagcctcgttgggttctgcgtcgcgctcaagctcatccctatcgcggcccgctaccacctccgccgccgtatgttcggctacgacatcaacaagaaaggcttgcctacgggtcaaatcaaagtgcctgaggcactaggccttgttgtggggattgtctatttggtcattgctattatatttcagcagtttcactatgccccagactccatttggcttgttgaatataatgcagcattgacatccatctgctttatgattcttcttggatttgttgatgatgttcttgatgttccatggagagtgaaattggcgctgccaacatttgcagcactcccattgttgatggcatatgctggtggcacttccatcatcattccaaagcctttaaccccttatgttgggctaacagttttggagctaggtttattttacaagctattcatgctcttgttagcagtcttttgtacaaactcgataaatatacatgctggcctaaatggacttgaagttgggcagacagttgttatatctgcggcggttttgatacataatgtaatgcgcatagcatcttctacagatattgaaactcagcaagctcatgaattctctatttatcttgtcttgccattcctaaccatttcattagctctgctagcttttaactggtatccttcaattgtttttgttggtgatacctacacctattttgctggaatggctttggctgtgataggaattttgggacatttcaggcgagacgttgttgctcttctttttacctcaagttcttaatttcctgtgttcggtcccacagctctttcactttgttccttgcccaagacataggttgccgaggtttgatcctggagcgggtctgttgactggtaccaaagatgggaatctggttaacatattccttaggttatttggaaagtgctcagagagggccctttgcataaggctccttattttccaggctctatgttgcgtattctgcttctggctaaggcacatgctcaccggatggtacaagtgataacctgcaatcggctctccatcctgacacccagctcgttgggaaaaaaaatcagctgcatctgatggctgttgttttcctcgacatacttgtagactaaccagagtaggtttttggattcatttcctgtgtatacttgtgctaactacagtttccaagtctttgtaaccatatttatgcaatgccttggcttcaaggaagtcttcggtatacttgtgtaccaagagcctgtttcttctctgatatcctgtttggttcaaggagtaggatgatggaattggaaagagtaaaatgtatcttaatggttagtttgaaaactccaatctgaggggatttagatggaaattagttcattttttg

SEQ ID NO: 70637 - DNA, 2543 bp, Zea Mays
gaaacgtcctcgtggacgtgcaatagccactgcgcgagtcggtgtcggggctggtgtcggacgaatacggggaggagacgcctgctcctacgccctctgtcgagaatgaggtggcacggaggtggaggcatgaggggagagagaaaagaagtagaatgacgaacgaggtggtgacaactgagacgatgaccattattatcgtgcagaggtataaatagccaaatggatcgtgtttggcgagccgacccgaggcacgacatatttaatagtgtctgggccaacccaacacgagcgtcgtgcggtgcttgggccgtagcctcggcccgtagtgctggcccgacccgacatgattattttttttaaaaaaaatatatacatatgtacaatttatattcaatattataatcacctgatcatgatattctactggttagatagtttcgcccagagtcttccaccacccttcaattagagtgtgggacagtgggttcaaacctcacctcctacatcactttttaacataccccatgatgcaccgctcgctttttaatattttacgctgaattgatttggaaaaaattatagggattttttttataaaaaaatgacgcggtacgaccgttgaaactggtggtttaagtataaaatagagagtagaaaaatttaaaagttttaatccctctcagtcttttacaatctccttgtaaacgaacaagacctcccctgataccttggaaccaacacgccagagacacaaattacagagccggctccacagagacacttcactgctgcaaagagcagcagccacgagcttcaactccacgcaagattaccccaagttctcaacacgtacccgacggccgaacacgtgactccagccagtgagggcacaccacgtcaccccgccgccactcatatataaaacctattgacctcactacccgccgccggcgaccaccagacagcagccccatcaccccctgagtcctgactcctgagtcctgacgcaccgcgaggccgggccaaatcgtcgagagccaagtcagcgaagccccgaaccctccctccctcccatggccgtccgccgcaggaccgcggcggccgctgccggggacccgcctccgcaggcgccaccggcagatgaggcggcggcggtggcaccagacgaaccggtcctccgggcgccgaacctgcgcgtggccgctgtggcagcggcgctcttcctcgcgcccttctcgtacctcgcgttcgtgcactactccctgaccgccgatctgcagcgatccatcctcaaatgcggcgccatgagcctcgttgggttctgcgtcgcgctcaagctcatccctatcgcggcccgctaccacctccgccgccgtatgttcggctacgacatcaacaagaaaggcttgcctacgggtcaaatcaaagtgcctgaggcactaggccttgttgtggggattgtctatttggtcattgctattatatttcagcagtttcactatgccccagactccatttggcttgttgaatataatgcagcattgacatccatctgctttatgattcttcttggatttgttgatgatgttcttgatgttccatggagagtgaaattggcgctgccaacatttgcagcactcccattgttgatggcatatgctggtggcacttccatcatcattccaaagcctttaaccccttatgttgggctaacagttttggagctaggtttattttacaagctattcatgctcttgttagcagtcttttgtacaaactcgataaatatacatgctggcctaaatggacttgaagttgggcagacagttgttatatctgcggcggttttgatacataatgtaatgcgcatagcatcttctacagatattgaaactcagcaagctcatgaattctctatttatcttgtcttgccattcctaaccatttcattagctctgctagcttttaactggtatccttcaattgtttttgttggtgatacctacacctattttgctggaatggctttggctgtgataggaattttgggacatttcagcgagacgttgttgctcttctttttacctcaagttcttaatttcctgtgttcggtcccacaggctctatgttgcgtattctgcttctggctaaggcacatgctcaccggatggtacaagtgataacctgcaatcggctctccatcctgacacccagctcgttgggaaaaaaaatcagctgcatctgatggctgttgttttcctcgacatacttgtagactaaccagagtaggtttttggattcatttcctgtgtatacttgtgctaactacagtttccaagtctttgtaaccatatttatgcaatgccttggcttcaaggaagtcttcggtatacttgtgtaccaagagcctgtttcttctctgatatcctgtttggttcaaggagtaggatgatggaattggaaagagtaaaatgtatcttaatggttagtttgaaaactccaatctgaggggatttagatggaaattagttcattttttg

SEQ ID NO: 70638 - DNA, 2663 bp, Zea Mays
gaaacgtcctcgtggacgtgcaatagccactgcgcgagtcggtgtcggggctggtgtcggacgaatacggggaggagacgcctgctcctacgccctctgtcgagaatgaggtggcacggaggtggaggcatgaggggagagagaaaagaagtagaatgacgaacgaggtggtgacaactgagacgatgaccattattatcgtgcagaggtataaatagccaaatggatcgtgtttggcgagccgacccgaggcacgacatatttaatagtgtctgggccaacccaacacgagcgtcgtgcggtgcttgggccgtagcctcggcccgtagtgctggcccgacccgacatgattattttttttaaaaaaaatatatacatatgtacaatttatattcaatattataatcacctgatcatgatattctactggttagatagtttcgcccagagtcttccaccacccttcaattagagtgtgggacagtgggttcaaacctcacctcctacatcactttttaacataccccatgatgcaccgctcgctttttaatattttacgctgaattgatttggaaaaaattatagggattttttttataaaaaaatgacgcggtacgaccgttgaaactggtggtttaagtataaaatagagagtagaaaaatttaaaagttttaatccctctcagtcttttacaatctccttgtaaacgaacaagacctcccctgataccttggaaccaacacgccagagacacaaattacagagccggctccacagagacacttcactgctgcaaagagcagcagccacgagcttcaactccacgcaagattaccccaagttctcaacacgtacccgacggccgaacacgtgactccagccagtgagggcacaccacgtcaccccgccgccactcatatataaaacctattgacctcactacccgccgccggcgaccaccagacagcagccccatcaccccctgagtcctgactcctgagtcctgacgcaccgcgaggccgggccaaatcgtcgagagccaagtcagcgaagccccgaaccctccctccctcccatggccgtccgccgcaggaccgcggcggccgctgccggggacccgcctccgcaggcgccaccggcagatgaggcggcggcggtggcaccagacgaaccggtcctccgggcgccgaacctgcgcgtggccgctgtggcagcggcgctcttcctcgcgcccttctcgtacctcgcgttcgtgcactactccctgaccgccgatctgcagcgatccatcctcaaatgcggcgccatgagcctcgttgggttctgcgtcgcgctcaagctcatccctatcgcggcccgctaccacctccgccgccgtatgttcggctacgacatcaacaagaaaggcttgcctacgggtcaaatcaaagtgcctgaggcactaggccttgttgtggggattgtctatttggtcattgctattatatttcagcagtttcactatgccccagactccattttgtttttgttgtcttcttgttgcagtggcttgttgaatataatgcagcattgacatccatctgctttatgattcttcttggatttgttgatgatgttcttgatgttccatggagagtgaaattggcgctgccaacatttgcagcactcccattgttgatggcatatgctggtggcacttccatcatcattccaaagcctttaaccccttatgttgggctaacagttttggagctaggtttattttacaagctattcatgctcttgttagcagtcttttgtacaaactcgataaatatacatgctggcctaaatggacttgaagttgggcagacagttgttatatctgcggcggttttgatacataatgtaatgcgcatagcatcttctacagatattgaaactcagcaagctcatgaattctctatttatcttgtcttgccattcctaaccatttcattagctctgctagcttttaactggaattttgggacatttcagcgagacgttgttgctcttctttttacctcaagttcttaatttcctgtgttcggtcccacagctctttcactttgttccttgcccaagacataggttgccgaggtttgatcctggagcgggtctgttgactggtaccaaagatgggaatctggttaacatattccttaggttatttggaaagtgctcagagagggccctttgcataaggctccttattttccaggctctatgttgcgtattctgcttctggctaaggcacatgctcaccggatggtacaagtgataacctgcaatcggctctccatcctgacacccagctcgttgggaaaaaaaatcagctgcatctgatggctgttgttttcctcgacatacttgtagactaaccagagtaggtttttggattcatttcctgtgtatacttgtgctaactacagtttccaagtctttgtaaccatatttatgcaatgccttggcttcaaggaagtcttcggtatacttgtgtaccaagagcctgtttcttctctgatatcctgtttggttcaaggagtaggatgatggaattggaaagagtaaaatgtatcttaatggttagtttgaaaactccaatctgaggggatttagatggaaattagttcattttttg

SEQ ID NO: 70639 - DNA, 1058 bp, Zea Mays
gcacaaactaccttaagtgataaaacaaatcacaaaaaaataaatgataactcattgtttttttaataagacgaatggtcaaaaaaatttaaaaagtcaacagtgtcatatatttatgaacggagtgagtactaaacacaaaggtgacaaggtagatacctttcccgcagctgttctgtatccttccaaagattcaggagtagagaacagacgaagtgcatcattaagcgtctgaacagcatctgggaatatatcaagatggagcagtaggaagggctgaacagtagctgatgctttgttacctgacaggtgtatttatcagtatacaccactgaaaagacagataggaaagcacaagtgggcctactcaagcataagtttcacactatacctatggtgaataactaatgcaatcatgatatcattattccattggagaaaacgaaaacatctgaatggggctgttttaacttagcagggcagccaggctagtgctgagatgcattggtgcattattgtagagcttcaatggtagagcgcagaattaccttacggaacaccaaaaaaatcctagattcttccatgttatatcaaaggactaacacagaacagacacttcattaatcgccaacatgtagaatgctcttccaacatgaactattaaccctgatattgggctggtcaaagatggaaaaaaaagcaatgacagcatgtacagcaggaagcaaaaggtgacagcaactggatcaacagggaatacgttcatggaaacatgatgcagacgtaacaaatcaagaaaaactcaaaaaaacaaaagtttccaagttctttcaaagagatatactagctagaatgctaggtagataccagcttacagaaaaattgagttgtctccctcaggacaagacaaaattacctgcagctttcacaacgctctgtagctgccctccaaaaatagcactaagctcagaggggacaaaactctgagttctaactattgcagatttgttctttcgtccaactgtctcccaagcatcatcatcagcggatgaaacaac

SEQ ID NO: 70640 - DNA, 6212 bp, Zea Mays
cttcctccctgcccatccccttcctctcgtaatcccggaaatccgcgggtccctcgcaatccccaaccgcgcgccgccgccgatctcgccgcgacccaggccctagcgcccgatccgtcgccgcgctggcctccccgcgctccgcaaaccctaggggttccgcgcgcgcgggagggatggaggcgctggtggggcgggcggtacggaaggcgttcccggggttcggcacctacgcgggcgtcgttgagtcgtacgaccccggcgcgggctacttccgcgtgctatacgaggacggcgactccgaggaggtcgacgccgacgagatggcccagattctcgtcggacccgcgatgccgcgcgcgcagcagcagcgcacctcgccgcaggatgccgcggggaggcgccccaagaagcgccgccgcgggaacgaggacgacccatccccgacctcgactccagacggcgtcgtgctggccgttgccgccgccgcgggcgaggagaccgagcccgcgacgcccgttatggaggcggtggcggagaagaagccgagggtcagcccgggaccagagtcgtccaggccgctgcggcggagcgcgcgccaggcgaaggcggccgagcacgcggccgagatggaggcggcggtggccgtcgcggctgccgcggaggccgaggaggaggctgctgctgctgcggcggcttcgacgccgcagcagtctgggaggaagcgaccccgcgcgattgggagtgggcggtaccgctcggtgtccagggacttggaggaggccgcccctaagaaaccgctgccaccgccacctaagccggagctgccaccatcgtcgcagggtctggatttaggcggcctccctgttctcgatgtctttcaagtttactcctgcttaaggtcgtttagcaaacagttgttcctcagccccttctcactggagacatttgtggctgcgttgcggagcacctatgtcaacccgttgatcgactgggtgcatttcacgctgctgcgggctctcaagagtcatctggaggactcggccaatgaaggagacccgtcggcggtacactgcattaggaatcttaactgggagctgttagacctagcaacttggccaatctatcttgctgaatacttgctaactaggggctcagaattgaggtatggtatgaagcttacagatttaagtttgctgagtacagagtactataggcagcctgcaggggtaaaactcgagctgctgcgttcactctctgatgatgttctagagatcggggctatacggtcaaggttgtcagagtcagatggaaacgacgagggcttcagaagcactggtgtaagaagaaaaaagaggggcaggggctcttctgctaaggtggcagtgggttcttctcaatttccagaaggatctgctgaagtggatgatggaaacagcgatgaatgttatctttgtggcatggatggcaacttgttatgctgtgatggctgtccagctgcatttcattcgaaatgtgttggggtggtggaggatcttttgcctgaaggtgattggtattgtcctgaatgtttgatacggaaggatggatctagaaatattgcaaatccaatgagaggagcagagattctaggaactgatccacacggtcgactatacttcttcacttgcggctatcttttggtctcaatggttaacacaatttcttcattttgtgatactgcaatcaagtcacccaatcttaacagtcgttaccagagtagcagggaatgtagtacatctgatgctgagatagactcaaaacatttatcattattgaagcaacctagtgatcatgatcagtttaaggtagaacaaagaagctcctttgaacacttgaattctggaaaaatttctacctcaaattctgatgatttggatcaagatttgtcacagcatagcattaaactaagatattcacttatgtctcgaagtggaattgttgctgaaggtgatttgaatcaaatacctgaaaatagatcctctagtgccaagaatgataactgcaattccccaaaagatattgtttattcacgtgctaatggttctcttgcaaagaaccagaaagattcaccacctaaagaaaaaccaagagattggcagctccattctgatcctgctaggtacataaactattacagtttcggtcaaatagcagcttcagctgctgaagagctaaaacacaagctgtctgaaaacaaggacgtgaaaaaacctgttcaggatgtactctcgttccatctgagaacaatatgtaaaaagtatgctaacttttttgcactaactgatcaaaagctttctgctgaactgcttaaagaaaaatgtggatggtgcaattcctgccaaattagtggtggcgttgattgcattttcagattaactgatattaagtacatggaaggccctaagccacatactcttgatctcggagcagaaaataatatggaaagtcatatcatccttgctatgtataacattttgtcagttgaagaacggttgaatggtttgctgagtggcccttggcaaaatccacaatatagcatttgttggcgcaatgcggttctcaaggcttcagatgtgtcatcacttaagcagcctcttctaatgttagagtccagtctgcgacgtgttgccattactacggaatggcagaaagcggcggactctgttgaagttgttggttctgcagctcatattttggtccgctcgtctaataagtctctaagtcatgtaagtgctactgctagaaagccagggagaaagccgtctcctaacggtgaacttaaagttgactctcgtgatgttggtgtttattggtggaggggtggaaaattatctcgccaagtgtttcattggaagaggttgcctcagtcattggtcaacaaagctgctcggcaagctggacgtaggagaattcccacgatttcatacacggatggttcacaatttgcgcggaggttcaaatacatagcctggcgagctgctgtggaaatggcagaaaatgcggcccagctcattttgcagattaaagaacttgaatggaatatcaagtggactgagatactgagcactctcccttctagccttatgaccaaagaaacccagaaaatagctaggcttttcaagaaagttataattcgcaggaaacgcattgaaggaacaaatgttgaatatctgcttgattttggaaagagggagaacattcctcctgttatttctaaacatggaacaaaacttgaggaatcctctagcgagaggaacaggtactggttgagtgaagttcatgtccctttgaatctgttgaaggcttatgaagccaaaacatttgctcgcttactgaaaaagaaagaaactgacgaactatctaagaagactaagaaattgtgtggctcaaaaccagaaatgccaagaaagacaggctttgattacctctttgaaaaagcagaaaaaagatccaccatgccttgtggtcattgtcacaaagaggtgattgcaagtgaagctgttaactgccaatattgtgcagctcttttccatagaaaacatttcaaggtccctagaggtgctacaaatgctgtttatgtttgtaataagtgcttagatgagaaggttctaaaggtggagtctcctcagaaaaagactgcaccaaagaagctgtctcccaaaaagaagcagaagaaacaaaagaaacaatcacgcaagattgagaccaggaggaatcagatagttctgaaatgcaaaacgaaaattggcaaaaagggtaagcgtggccggcccaggaagaacccaacggatctgtcaaagaatgaaccatcaaagatccatgaaagtgaaccatcaaatgtttccaaaaatgaaccagtgaaacgtatatcaaaacgattacatgataaatacatgaaaagtaactcaaatgtatccgagaatgcagctagctctagcaagaggaagaggactgtttcacagtattcatactggttgaatggcctccgatggtcacaaaatccacatgatgaacgagcaagaagtttcaggaaagaaagagtagtttttccatcagaagatgctgaaatttctgaagtcaacccagtatgctgcttgtgtgaaaaatgctataatgaagaggatatctatattgcctgtgaaaaatgtgaagactggttccatggggatatatattctgttaacattgagaatgtgaacaatctcattggtttcaagtgccatagatgccgccggagaagtctacctgtctgcccgtatgcagagactgtaacagttgtcaaaggccagtcagatgaggatcattgcatcaagcttgtagatcaatgtgttggcaagtttgtggaggatgaggatcccaattgtcccaaagatcttggtgctccgggtagtctgcaagagcttcatgatcatgaaattgagcaggggctcaatgttcatattactgagatagaattcagttacgataactgtctagaggagctgaatgatcatggctgttcgaaagagtttgatgctcatagcactgagaaagatctagaggacgataaaagtttgagaaaggtagacatccataatgagttgagggcgcttgacgatcttggctctgagaaagaacctggtgatcattgtaatccgaaagatctcaacagtcacatcaatctgaaagatcctggcaactgtagaagtgacaaagagatgaaggataataattgtctaaatgaactagatggagacaacaattggaaagcactcgacagctataacagttggaaactgctcgacagccataacagtcaagaggagcttgactgtactacaaatagcaagttttctcctaaagaaataccatgtcctatggaacttgacggttttagtagcctgaagcttgtcagtcataacatcttggaagaacttgataatcataactgtctaaaagagaacggtaatgaaaatagttctaaagagctggacaacaatggaagtccaaaagattcaggtgactgtctagcagatcacttcaacagcagtaggatatctggcaatgaggcactggtccttacacctgaaactgattcggtaaatgaatctcttggtttgcaatccaaggatgatcctgggaagtctgttcctactgagcatgagattgatcttcaggtggtggtgactttatagtgtactttggacagtcagaaaccttccagcctcagcatgagtcccattagttccactggtcatttcttgatgctgttctggttgataattttgttgaccttgcctcattgccgtaatctacaataaggaaaaaaagctattctttatttcctttgggaaatattctgatctgactagccaagcgatagaataattaactcttgaggttaagttatattattcttaatagggctgacatagggaatagttagggtttcaatgtttcatttcctttccaagcttcacattgcctgtcagaatatggagtcatgtcacccacgattatgcattgatttggatccctctaagtacaagtgactggtatttggctgccctgcagtaatatatgatgttcaagggagatagcagccacagccgccgcgaagcatgaggaggcaatatattccattccccattgtttcgttttgtgggccccttagatgttgcacaagatggatgtgccaaaacctgatgattcaatgattcattctttcaactttgctcctaacagtgagttgcaatctttatctgtaaaaaatgctccaagggaactcgtctggacagggttaattggattttgtataggtttgcgttatcagccttcctagttacagagttcactctagcatggaatcggtttggacaatgctgttttggtcctctggttacattccgcttcagcgttagattacgatcgattcttcgcggcattgcgcgcgttcttttgataaagagacgctcttctagtcgctccaaaaattctgtaattccatctcgtgtctggaatggtcggccatcgagaagaatggtagaagaacgagcgaggagccaaggaaggagacgagagtacctcagaaaactagttcctacgaaaactcctgtatagttggtgctttatagcatctccaacgacatgacataaaaatgtcctataatttaaaaaagtgtattttattg

SEQ ID NO: 70641 - DNA, 6265 bp, Zea Mays
cttcctccctgcccatccccttcctctcgtaatcccggaaatccgcgggtccctcgcaatccccaaccgcgcgccgccgccgatctcgccgcgacccaggccctagcgcccgatccgtcgccgcgctggcctccccgcgctccgcaaaccctaggggttccgcgcgcgcgggagggatggaggcgctggtggggcgggcggtacggaaggcgttcccggggttcggcacctacgcgggcgtcgttgagtcgtacgaccccggcgcgggctacttccgcgtgctatacgaggacggcgactccgaggaggtcgacgccgacgagatggcccagattctcgtcggacccgcgatgccgcgcgcgcagcagcagcgcacctcgccgcaggatgccgcggggaggcgccccaagaagcgccgccgcgggaacgaggacgacccatccccgacctcgactccagacggcgtcgtgctggccgttgccgccgccgcgggcgaggagaccgagcccgcgacgcccgttatggaggcggtggcggagaagaagccgagggtcagcccgggaccagagtcgtccaggccgctgcggcggagcgcgcgccaggcgaaggcggccgagcacgcggccgagatggaggcggcggtggccgtcgcggctgccgcggaggccgaggaggaggctgctgctgctgcggcggcttcgacgccgcagcagtctgggaggaagcgaccccgcgcgattgggagtgggcggtaccgctcggtgtccagggacttggaggaggccgcccctaagaaaccgctgccaccgccacctaagccggagctgccaccatcgtcgcagggtctggatttaggcggcctccctgttctcgatgtctttcaagtttactcctgcttaaggtcgtttagcaaacagttgttcctcagccccttctcactggagacatttgtggctgcgttgcggagcacctatgtcaacccgttgatcgactgggtgcatttcacgctgctgcgggctctcaagagtcatctggaggactcggccaatgaaggagacccgtcggcggtacactgcattaggaatcttaactgggagctgttagacctagcaacttggccaatctatcttgctgaatacttgctaactaggggctcagaattgaggtatggtatgaagcttacagatttaagtttgctgagtacagagtactataggcagcctgcaggggtaaaactcgagctgctgcgttcactctctgatgatgttctagagatcggggctatacggtcaaggttgtcagagtcagatggaaacgacgagggcttcagaagcactggtgtaagaagaaaaaagaggggcaggggctcttctgctaaggtggcagtgggttcttctcaatttccagaaggatctgctgaagtggatgatggaaacagcgatgaatgttatctttgtggcatggatggcaacttgttatgctgtgatggctgtccagctgcatttcattcgaaatgtgttggggtggtggaggatcttttgcctgaaggtgattggtattgtcctgaatgtttgatacggaaggatggatctagaaatattgcaaatccaatgagaggagcagagattctaggaactgatccacacggtcgactatacttcttcacttgcggctatcttttggtatcgatcttcatcatcttgttgcagttttgaactcatgtcatccttcgtacagctcaatggttaacacaatttcttcattttgtgatactgcaatcaagtcacccaatcttaacagtcgttaccagagtagcagggaatgtagtacatctgatgctgagatagactcaaaacatttatcattattgaagcaacctagtgatcatgatcagtttaaggtagaacaaagaagctcctttgaacacttgaattctggaaaaatttctacctcaaattctgatgatttggatcaagatttgtcacagcatagcattaaactaagatattcacttatgtctcgaagtggaattgttgctgaaggtgatttgaatcaaatacctgaaaatagatcctctagtgccaagaatgataactgcaattccccaaaagatattgtttattcacgtgctaatggttctcttgcaaagaaccagaaagattcaccacctaaagaaaaaccaagagattggcagctccattctgatcctgctaggtacataaactattacagtttcggtcaaatagcagcttcagctgctgaagagctaaaacacaagctgtctgaaaacaaggacgtgaaaaaacctgttcaggatgtactctcgttccatctgagaacaatatgtaaaaagtatgctaacttttttgcactaactgatcaaaagctttctgctgaactgcttaaagaaaaatgtggatggtgcaattcctgccaaattagtggtggcgttgattgcattttcagattaactgatattaagtacatggaaggccctaagccacatactcttgatctcggagcagaaaataatatggaaagtcatatcatccttgctatgtataacattttgtcagttgaagaacggttgaatggtttgctgagtggcccttggcaaaatccacaatatagcatttgttggcgcaatgcggttctcaaggcttcagatgtgtcatcacttaagcagcctcttctaatgttagagtccagtctgcgacgtgttgccattactacggaatggcagaaagcggcggactctgttgaagttgttggttctgcagctcatattttggtccgctcgtctaataagtctctaagtcatgtaagtgctactgctagaaagccagggagaaagccgtctcctaacggtgaacttaaagttgactctcgtgatgttggtgtttattggtggaggggtggaaaattatctcgccaagtgtttcattggaagaggttgcctcagtcattggtcaacaaagctgctcggcaagctggacgtaggagaattcccacgatttcatacacggatggttcacaatttgcgcggaggttcaaatacatagcctggcgagctgctgtggaaatggcagaaaatgcggcccagctcattttgcagattaaagaacttgaatggaatatcaagtggactgagatactgagcactctcccttctagccttatgaccaaagaaacccagaaaatagctaggcttttcaagaaagttataattcgcaggaaacgcattgaaggaacaaatgttgaatatctgcttgattttggaaagagggagaacattcctcctgttatttctaaacatggaacaaaacttgaggaatcctctagcgagaggaacaggtactggttgagtgaagttcatgtccctttgaatctgttgaaggcttatgaagccaaaacatttgctcgcttactgaaaaagaaagaaactgacgaactatctaagaagactaagaaattgtgtggctcaaaaccagaaatgccaagaaagacaggctttgattacctctttgaaaaagcagaaaaaagatccaccatgccttgtggtcattgtcacaaagaggtgattgcaagtgaagctgttaactgccaatattgtgcagctcttttccatagaaaacatttcaaggtccctagaggtgctacaaatgctgtttatgtttgtaataagtgcttagatgagaaggttctaaaggtggagtctcctcagaaaaagactgcaccaaagaagctgtctcccaaaaagaagcagaagaaacaaaagaaacaatcacgcaagattgagaccaggaggaatcagatagttctgaaatgcaaaacgaaaattggcaaaaagggtaagcgtggccggcccaggaagaacccaacggatctgtcaaagaatgaaccatcaaagatccatgaaagtgaaccatcaaatgtttccaaaaatgaaccagtgaaacgtatatcaaaacgattacatgataaatacatgaaaagtaactcaaatgtatccgagaatgcagctagctctagcaagaggaagaggactgtttcacagtattcatactggttgaatggcctccgatggtcacaaaatccacatgatgaacgagcaagaagtttcaggaaagaaagagtagtttttccatcagaagatgctgaaatttctgaagtcaacccagtatgctgcttgtgtgaaaaatgctataatgaagaggatatctatattgcctgtgaaaaatgtgaagactggttccatggggatatatattctgttaacattgagaatgtgaacaatctcattggtttcaagtgccatagatgccgccggagaagtctacctgtctgcccgtatgcagagactgtaacagttgtcaaaggccagtcagatgaggatcattgcatcaagcttgtagatcaatgtgttggcaagtttgtggaggatgaggatcccaattgtcccaaagatcttggtgctccgggtagtctgcaagagcttcatgatcatgaaattgagcaggggctcaatgttcatattactgagatagaattcagttacgataactgtctagaggagctgaatgatcatggctgttcgaaagagtttgatgctcatagcactgagaaagatctagaggacgataaaagtttgagaaaggtagacatccataatgagttgagggcgcttgacgatcttggctctgagaaagaacctggtgatcattgtaatccgaaagatctcaacagtcacatcaatctgaaagatcctggcaactgtagaagtgacaaagagatgaaggataataattgtctaaatgaactagatggagacaacaattggaaagcactcgacagctataacagttggaaactgctcgacagccataacagtcaagaggagcttgactgtactacaaatagcaagttttctcctaaagaaataccatgtcctatggaacttgacggttttagtagcctgaagcttgtcagtcataacatcttggaagaacttgataatcataactgtctaaaagagaacggtaatgaaaatagttctaaagagctggacaacaatggaagtccaaaagattcaggtgactgtctagcagatcacttcaacagcagtaggatatctggcaatgaggcactggtccttacacctgaaactgattcggtaaatgaatctcttggtttgcaatccaaggatgatcctgggaagtctgttcctactgagcatgagattgatcttcaggtggtggtgactttatagtgtactttggacagtcagaaaccttccagcctcagcatgagtcccattagttccactggtcatttcttgatgctgttctggttgataattttgttgaccttgcctcattgccgtaatctacaataaggaaaaaaagctattctttatttcctttgggaaatattctgatctgactagccaagcgatagaataattaactcttgaggttaagttatattattcttaatagggctgacatagggaatagttagggtttcaatgtttcatttcctttccaagcttcacattgcctgtcagaatatggagtcatgtcacccacgattatgcattgatttggatccctctaagtacaagtgactggtatttggctgccctgcagtaatatatgatgttcaagggagatagcagccacagccgccgcgaagcatgaggaggcaatatattccattccccattgtttcgttttgtgggccccttagatgttgcacaagatggatgtgccaaaacctgatgattcaatgattcattctttcaactttgctcctaacagtgagttgcaatctttatctgtaaaaaatgctccaagggaactcgtctggacagggttaattggattttgtataggtttgcgttatcagccttcctagttacagagttcactctagcatggaatcggtttggacaatgctgttttggtcctctggttacattccgcttcagcgttagattacgatcgattcttcgcggcattgcgcgcgttcttttgataaagagacgctcttctagtcgctccaaaaattctgtaattccatctcgtgtctggaatggtcggccatcgagaagaatggtagaagaacgagcgaggagccaaggaaggagacgagagtacctcagaaaactagttcctacgaaaactcctgtatagttggtgctttatagcatctccaacgacatgacataaaaatgtcctataatttaaaaaagtgtattttattg

SEQ ID NO: 70642 - DNA, 7686 bp, Zea Mays
attttcttcttccatttttttgaaattgattcataaagcaatgcgctcacttcccatgtcacttcacgttttccctcccaaattccattccccttctgcagaggacttggctagcgagtactaaccgaaaggatttggcgagtatagtagcaactcacaacgcctcgtccccctgcacggccgcatcttcctccctgcccatccccttcctctcgtaatcccggaaatccgcgggtccctcgcaatccccaaccgcgcgccgccgccgatctcgccgcgacccaggccctagcgcccgatccgtcgccgcgctggcctccccgcgctccgcaaaccctaggggttccgcgcgcgcgggagggatggaggcgctggtggggcgggcggtacggaaggcgttcccggggttcggcacctacgcgggcgtcgttgagtcgtacgaccccggcgcgggctacttccgcgtgctatacgaggacggcgactccgaggaggtcgacgccgacgagatggcccagattctcgtcggacccgcgatgccgcgcgcgcagcagcagcgcacctcgccgcaggatgccgcggggaggcgccccaagaagcgccgccgcgggaacgaggacgacccatccccgacctcgactccagacggcgtcgtgctggccgttgccgccgccgcgggcgaggagaccgagcccgcgacgcccgttatggaggcggtggcggagaagaagccgagggtcagcccgggaccagagtcgtccaggccgctgcggcggagcgcgcgccaggcgaaggcggccgagcacgcggccgagatggaggcggcggtggccgtcgcggctgccgcggaggccgaggaggaggctgctgctgctgcggcggcttcgacgccgcagcagtctgggaggaagcgaccccgcgcgattgggagtgggcggtaccgctcggtgtccagggacttggaggaggccgcccctaagaaaccgctgccaccgccacctaagccggagctgccaccatcgtcgcagggtctggatttaggcggcctccctgttctcgatgtctttcaagtttactcctgcttaaggtcgtttagcaaacagttgttcctcagccccttctcactggagacatttgtggctgcgttgcggagcacctatgtcaacccgttgatcgactgggtgcatttcacgctgctgcgggctctcaagagtcatctggaggactcggccaatgaaggagacccgtcggcggtacactgcattaggaatcttaactgggagctgttagacctagcaacttggccaatctatcttgctgaatacttgctaactaggggctcagaattgaggtatggtatgaagcttacagatttaagtttgctgagtacagagtactataggcagcctgcaggggtaaaactcgagctgctgcgttcactctctgatgatgttctagagatcggggctatacggtcaaggttgtcagagtcagatggaaacgacgagggcttcagaagcactggtgtaagaagaaaaaagaggggcaggggctcttctgctaaggtggcagtgggttcttctcaatttccagaaggatctgctgaagtggatgatggaaacagcgatgaatgttatctttgtggcatggatggcaacttgttatgctgtgatggctgtccagctgcatttcattcgaaatgtgttggggtggtggaggatcttttgcctgaaggtgattggtattgtcctgaatgtttgatacggaaggatggatctagaaatattgcaaatccaatgagaggagcagagattctaggaactgatccacacggtcgactatacttcttcacttgcggctatcttttggtctcaatggttaacacaatttcttcattttgtgatactgcaatcaagtcacccaatcttaacagtcgttaccagagtagcagggaatgtagtacatctgatgctgagatagactcaaaacatttatcattattgaagcaacctagtgatcatgatcagtttaaggtagaacaaagaagctcctttgaacacttgaattctggaaaaatttctacctcaaattctgatgatttggatcaagatttgtcacagcatagcattaaactaagatattcacttatgtctcgaagtggaattgttgctgaaggtgatttgaatcaaatacctgaaaatagatcctctagtgccaagaatgataactgcaattccccaaaagatattgtttattcacgtgctaatggttctcttgcaaagaaccagaaagattcaccacctaaagaaaaaccaagagattggcagctccattctgatcctgctaggtacataaactattacagtttcggtcaaatagcagcttcagctgctgaagagctaaaacacaagctgtctgaaaacaaggacgtgaaaaaacctgttcaggatgtactctcgttccatctgagaacaatatgtaaaaagtatgctaacttttttgcactaactgatcaaaagctttctgctgaactgcttaaagaaaaatgtggatggtgcaattcctgccaaattagtggtggcgttgattgcattttcagattaactgatattaagtacatggaaggccctaagccacatactcttgatctcggagcagaaaataatatggaaagtcatatcatccttgctatgtataacattttgtcagttgaagaacggttgaatggtttgctgagtggcccttggcaaaatccacaatatagcatttgttggcgcaatgcggttctcaaggcttcagatgtgtcatcacttaagcagcctcttctaatgttagagtccagtctgcgacgtgttgccattactacggaatggcagaaagcggcggactctgttgaagttgttggttctgcagctcatattttggtccgctcgtctaataagtctctaagtcatgtaagtgctactgctagaaagccagggagaaagccgtctcctaacggtgaacttaaagttgactctcgtgatgttggtgtttattggtggaggggtggaaaattatctcgccaagtgtttcattggaagaggttgcctcagtcattggtcaacaaagctgctcggcaagctggacgtaggagaattcccacgatttcatacacggatggttcacaatttgcgcggaggttcaaatacatagcctggcgagctgctgtggaaatggcagaaaatgcggcccagctcattttgcaggtgacatcttctccttgctttggaaagcaataggtcaaattttttcactgaattgttcttctttgtggtgtgcacttcagattaaagaacttgaatggaatatcaagtggactgagatactgagcactctcccttctagccttatgaccaaagaaacccagaaaatagctaggcttttcaagaaagttataattcgcaggaaacgcattgaaggaacaaatgttgaatatctgcttgattttggaaagagggagaacattcctcctgttatttctaaacatggaacaaaacttgaggaatcctctagcgagaggaacaggtactggttgagtgaagttcatgtccctttgaatctgttgaaggcttatgaagccaaaacatttgctcgcttactgaaaaagaaagaaactgacgaactatctaagaagactaagaaattgtgtggctcaaaaccagaaatgccaagaaagacaggctttgattacctctttgaaaaagcagaaaaaagatccaccatgccttgtggtcattgtcacaaagaggtgattgcaaggtatgtcactgacaattagttttatacttacccctttaacaattcatttaatttatttctgaagtacaccatactcatcttatcaattatttgtagctataggcaaaggtttatttcatttcaaacatacttttggacactacatttcatacaagctgtgaacattataggtattagttttatatttgtgacattttgttgtgctgacatctgttgcttctcactttgatgcatgcgagtgatgtgcttatggtaaggtttaatactccccgtcacaatgcgtacatgttaaagaaatagtatatgcagattagggccttagcacagtgacatatttaactcttctatgcaagccttataaattgatcatctctgaatgttttcagtttggctttcagatgcaatcattatacttgtattttcataacagtatttatcggccaatatgtgaataaacttcttacatgactgtactatgctgagttagatattagtatttgtttctaaataatctaggtgcacagttaccaatcaaactattggtgccatttcgtagaagccattcaaatgagcaaatactctggaaaacttgttaggctttacataaaaaccatgtattgacattttcattcttgcaggctatttatttctctaataagtttttgtaactatgttctcagtttggctacacacacaatttcgtttctgttacattgaaaattcttttgtactagttctgattcgttgtctgtcttttcaacagtgaagctgttaactgccaatattgtgcagctcttttccatagaaaacatttcaaggtccctagaggtgctacaaatgctgtttatgtttgtaataagtgcttagatgagaaggttctaaaggtggagtctcctcagaaaaagactgcaccaaagaagctgtctcccaaaaagaagcagaagaaacaaaagaaacaatcacgcaagattgagaccaggaggaatcagatagttctgaaatgcaaaacgaaaattggcaaaaagggtaagcgtggccggcccaggaagaacccaacggatctgtcaaagaatgaaccatcaaagatccatgaaagtgaaccatcaaatgtttccaaaaatgaaccagtgaaacgtatatcaaaacgattacatgataaatacatgaaaagtaactcaaatgtatccgagaatgcagctagctctagcaagaggaagaggactgtttcacagtattcatactggttgaatggcctccgatggtcacaaaatccacatgatgaacgagcaagaagtttcaggaaagaaagagtagtttttccatcagaagatgctgaaatttctgaagtcaacccagtatgctgcttgtgtgaaaaatgctataatgaagaggatatctatattgcctgtgaaaaatgtgaagactggttccatggggatatatattctgttaacattgagaatgtgaacaatctcattggtttcaagtgccatagatgccgccggagaagtctacctgtctgcccgtatgcagagactgtaacagttgtcaaaggccagtcagatgaggatcattgcatcaagcttgtagatcaatgtgttggcaagtttgtggaggatgaggatcccaattgtcccaaagatcttggtgctccgggtagtctgcaagagcttcatgatcatgaaattgagcaggggctcaatgttcatattactgagatagaattcagttacgataactgtctagaggagctgaatgatcatggctgttcgaaagagtttgatgctcatagcactgagaaagatctagaggacgataaaagtttgagaaaggtagacatccataatgagttgagggcgcttgacgatcttggctctgagaaagaacctggtgatcattgtaatccgaaagatctcaacagtcacatcaatctgaaagatcctggcaactgtagaagtgacaaagagatgaaggataataattgtctaaatgaactagatggagacaacaattggaaagcactcgacagctataacagttggaaactgctcgacagccataacagtcaagaggagcttgactgtactacaaatagcaagttttctcctaaagaaataccatgtcctatggaacttgacggttttagtagcctgaagcttgtcagtcataacatcttggaagaacttgataatcataactgtctaaaagagaacggtaatgaaaatagttctaaagagctggacaacaatggaagtccaaaagattcaggtgactgtctagcagatcacttcaacagcagtaggatatctggcaatgaggcactggtccttacacctgaaactgattcggtaaatgaatctcttggtttgcaatccaaggatgatcctgggaagtctgttcctactgagcatgagattgatcttcaggtggtggtgactttatagtgtactttggacagtcagaaaccttccagcctcagcatgagtcccattagttccactggtcatttcttgatgctgttctggttgataattttgttgaccttgcctcattgccgtaatctacaataaggaaaaaaagctattctttatttcctttgggaaatattctgatctgactagccaagcgatagaataattaactcttgaggttaagttatattattcttaatagggctgacatagggaatagttagggtttcaatgtttcatttcctttccaagcttcacattgcctgtcagaatatggagtcatgtcacccacgattatgcattgatttggatccctctaagtacaagtgactggtatttggctgccctgcagtaatatatgatgttcaaggtgagtctcaatttcgtgttacatgtatgttcattagaacatttgacatgtttcccttaggccttgttcgtttctatcggattgcacccggaattgttccacctaatcaaagtttatataaattagagaagcaatccggttaggaatcgttccgacccatcaatccgatagaaacgaacaaggccttagtcttttcctattttccctcctgttatgcccaaacttcaaataatcagtactgatggttcgaagcaatttactagtggagtaattgtcagcaacacattacaagtgtgatgcccatattttctttcagctttatcgaccatgttaccagtctatagtaatgacatatggatattaccaactcatcaaatttgcaaaagcacacttcatcaaagtcttctcagttggcactcatcgtgtttgttctccatgtaaacagggagatagcagccacagccgccgcgaagcatgaggaggcaatatattccattccccattgtttcgttttgtgggccccttagatgttgcacaagatggatgtgccaaaacctgatgattcaatgattcattctttcaactttgctcctaacagtgagttgcaatctttatctgtaaaaaatgctccaagggaactcgtctggacagggttaattggattttgtataggtttgcgttatcagccttcctagttacagagttcactctagcatggaatcggtttggacaatgctgttttggtcctctggttacattccgcttcagcgttagattacgatcgattcttcgcggcattgcgcgcgttcttttgataaagagacgctcttctagtcgctccaaaaattctgtaattccatctcgtgtctggaatggtcggccatcgagaagaatggtagaagaacgagcgaggagccaaggaaggagacgagagtacctcagaaaactagttcctacgaaaactcctgtatagttggtgctttatagcatctccaacgacatgacataaaaatgtcctataatttaaaaaagtgtattttattg

SEQ ID NO: 70643 - DNA, 355 bp, Zea Mays
caagagtattttggggaatgggaatatatagggatccaaataatcaaatttgccctccctcaccaagtcgaggaccccctccgaatccgagggttcaagcgaccgacggcgaacatggcggcggacggcggcccagcgacgtcggcgctggaagaggccctcaagcccttccaggaaagagcctccgaggctgagatacgcatagcgaagctggaagccttgctgtacaacaaagatggtccgagcggtggatccgaggcaacttcctctgccgtgaaggatctccagtcgaagctagatgtggttactgcagaatgcttgactgaaaaggagaagctcggctcatgaaccttgc

SEQ ID NO: 70644 - DNA, 1066 bp, Zea Mays
catcgtaaatcaagtatacacaggtagtggcaagtggaaacctacagtggagttctcttcttgaagcgaattttgctgctgctccacaaagtataccaataattgctctttcatttgtataccagaatgtggttcctgttctctgtacaaatttggagggagacctgtcaaaagtacgaacagctattgtggcgggtactgccatacccctggctctgttcctagtatgggatggagtaatcttggggacacttccagaccttgcagggagcagcactgtttctgaccccttggaactacttagatcgagtaatgggatagtggggcctattgttgaggcgttctcatttctcgctatagccacatcatacattggatttgttctaggaatctcggacttccttgcagacttgcttaaactaccaagtggccagaacaaaccgctgccatacgtattgactctgtttcctccacttgttctgtcactgcttgacccggagatatttttcaaggcattggactttgcaggaacttatggagttctagtgctgtttggagtttttcctgccgctatgtcttggtcagagagatattcggatgagttggaagctccagtaccccctatagtccccggagggaaatttactctctcggctgtcatgggaggtgcattgcttgtgattgttccagagttaatcaaggatgtaatgcaactacaaggactacactgacaatcggtgcaagtgaaaggacatataacagttacagtaaaacggtccttgagatttttgttgcagtaacaagtacatgtagcaaaagcaaaggcaaaactcgaaagcaatcaagtgcagagattgcagtttcatcgagcatcgacgttggagttgaattgttttttatgagattagcacggggttcagaacttcggttaaatttctgcaaccgaaagaaaaatctaaaattccgtattacactaatatatgtgctttgttgtgaatatataactttgtaattatattttctattgtttatgtcacataaaattcttcttttcattagatgtttg

SEQ ID NO: 70645 - DNA, 1182 bp, Zea Mays
cgaacacctcctatgcgattgcaatgtcttcctcgtggtggttcgtgagcgtcttcttcaggccaagcgccagcgattgattggtgcagtaaatggagttctggtagtcggcatcctagcatccttcacttctcttgttgtagtggcaagtggaaacctacagtggagttctcttcttgaagcgaattttgctgctgctccacaaagtataccaataattgctctttcatttgtataccagaatgtggttcctgttctctgtacaaatttggagggagacctgtcaaaagtacgaacagctattgtggcgggtactgccatacccctggctctgttcctagtatgggatggagtaatcttggggacacttccagaccttgcagggagcagcactgtttctgaccccttggaactacttagatcgagtaatgggatagtggggcctattgttgaggcgttctcatttctcgctatagccacatcatacattggatttgttctaggaatctcggacttccttgcagacttgcttaaactaccaagtggccagaacaaaccgctgccatacgtattgactctgtttcctccacttgttctgtcactgcttgacccggagatatttttcaaggcattggactttgcaggaacttatggagttctagtgctgtttggagtttttcctgccgctatgtcttggtcagagagatattcggatgagttggaagctccagtaccccctatagtccccggagggaaatttactctctcggctgtcatgggaggtgcattgcttgtgattgttccagagttaatcaaggatgtaatgcaactacaaggactacactgacaatcggtgcaagtgaaaggacatataacagttacagtaaaacggtccttgagatttttgttgcagtaacaagtacatgtagcaaaagcaaaggcaaaactcgaaagcaatcaagtgcagagattgcagtttcatcgagcatcgacgttggagttgaattgttttttatgagattagcacggggttcagaacttcggttaaatttctgcaaccgaaagaaaaatctaaaattccgtattacactaatatatgtgctttgttgtgaatatataactttgtaattatattttctattgtttatgtcacataaaattcttcttttcattagatgtttg

SEQ ID NO: 70646 - DNA, 1317 bp, Zea Mays
gtttaaggtctcgatggctatgcgcactcttgggacatttggagtgagaacatcttgcttatcctatttatttatacattatgcacttcttgtcgcatacgtggcacgctcttcaaatatcataacaaactcattgggcattccaatatgggagagtgctaccctgttttctctagctttcggaggggtatgttactttggaagccagcgattgattggtgcagtaaatggagttctggtagtcggcatcctagcatccttcacttctcttgttgtagtggcaagtggaaacctacagtggagttctcttcttgaagcgaattttgctgctgctccacaaagtataccaataattgctctttcatttgtataccagaatgtggttcctgttctctgtacaaatttggagggagacctgtcaaaagtacgaacagctattgtggcgggtactgccatacccctggctctgttcctagtatgggatggagtaatcttggggacacttccagaccttgcagggagcagcactgtttctgaccccttggaactacttagatcgagtaatgggatagtggggcctattgttgaggcgttctcatttctcgctatagccacatcatacattggatttgttctaggaatctcggacttccttgcagacttgcttaaactaccaagtggccagaacaaaccgctgccatacgtattgactctgtttcctccacttgttctgtcactgcttgacccggagatatttttcaaggcattggactttgcaggaacttatggagttctagtgctgtttggagtttttcctgccgctatgtcttggtcagagagatattcggatgagttggaagctccagtaccccctatagtccccggagggaaatttactctctcggctgtcatgggaggtgcattgcttgtgattgttccagagttaatcaaggatgtaatgcaactacaaggactacactgacaatcggtgcaagtgaaaggacatataacagttacagtaaaacggtccttgagatttttgttgcagtaacaagtacatgtagcaaaagcaaaggcaaaactcgaaagcaatcaagtgcagagattgcagtttcatcgagcatcgacgttggagttgaattgttttttatgagattagcacggggttcagaacttcggttaaatttctgcaaccgaaagaaaaatctaaaattccgtattacactaatatatgtgctttgttgtgaatatataactttgtaattatattttctattgtttatgtcacataaaattcttcttttcattagatgtttg

SEQ ID NO: 70647 - DNA, 2340 bp, Zea Mays
gccagccagcttctgctggaacaagaacagtacaggtacagcctcctccctccacagcagcgacaccaatggcatcgtggtcgtggacctctgttcactgcagcagctaccccctaccggggccgtcggcacgcttcacgccttctctggtctccgcaacaacaccggcgctcaggcggacgagggcgagggggcagctgcagcgatgcctctgttcccagtacgccggcgaacgccagccgccgccgccgccaccgccacagccggagccggactcgccgcagcagctggagcgcctcttctccaacctcaaccagaccaccatgaagcacgagccagggagcgtcaccagcgccgtcttccttgtggctggcacaacggttggagcaggcatccttgcaatccctgcagtcacacaagaagctgggttcttggcctcggcagtcatatgcatcctctgctggtcatacatggtaatagaatgtcactgactgggtaaattatcaaacccggcgtgttaaaaggtaaacccttttgcatcctacatcgctggcacaactctaaaatctgcatcagtgggggggaaattcaatcaccctcgttatagcagctgaaaccgttttgaatgttttgtttcttgtgtcaccttgatacaggacggtttgatgattgacccaagtgcctgtttcgttgagtcgtttacagtgagacagcttatgattgttggcgtcgcatttccaggtcgtcacggggctgttggttgctgaagtaaacgtcaataccatgtgtgagctaggatctggtggcgtctcactggtctcgatggctatgcgcactcttgggacatttggagtgagaacatcttggtatgatgaaattatatatatgtgatagaagtttattagtgcatagaagaccagaaaaacttattaaaaatgaaaattgcaaaagaaggaacttcagactcagaccatagcataaactgagctgaccactcagagtcagaattcctattttctactcaattaacattcctaacgtatatgaaggatttctgactttgctttccttgtgctgcagcttatcctatttatttatacattatgcacttcttgtcgcatacgtggcacgctcttcaaatatcataacaaactcattgggcattccaatatgggagagtgctaccctgttttctctagctttcggaggggtatgttactttggaagccagcgattgattggtgcagtaaatggagttctggtagtcggcatcctagcatccttcacttctcttgttgtagtggcaagtggaaacctacagtggagttctcttcttgaagcgaattttgctgctgctccacaaagtataccaataattgctctttcatttgtataccagaatgtggttcctgttctctgtacaaatttggagggagacctgtcaaaagtacgaacagctattgtggcgggtactgccatacccctggctctgttcctagtatgggatggagtaatcttggggacacttccagaccttgcagggagcagcactgtttctgaccccttggaactacttagatcgagtaatgggatagtggggcctattgttgaggcgttctcatttctcgctatagccacatcatacattggatttgttctaggaatctcggacttccttgcagacttgcttaaactaccaagtggccagaacaaaccgctgccatacgtattgactctgtttcctccacttgttctgtcactgcttgacccggagatatttttcaaggcattggactttgcaggaacttatggagttctagtgctgtttggagtttttcctgccgctatgtcttggtcagagagatattcggatgagttggaagctccagtaccccctatagtccccggagggaaatttactctctcggctgtcatgggaggtgcattgcttgtgattgttccagagttaatcaaggatgtaatgcaactacaaggactacactgacaatcggtgcaagtgaaaggacatataacagttacagtaaaacggtccttgagatttttgttgcagtaacaagtacatgtagcaaaagcaaaggcaaaactcgaaagcaatcaagtgcagagattgcagtttcatcgagcatcgacgttggagttgaattgttttttatgagattagcacggggttcagaacttcggttaaatttctgcaaccgaaagaaaaatctaaaattccgtattacactaatatatgtgctttgttgtgaatatataactttgtaattatattttctattgtttatgtcacataaaattcttcttttcattagatgtttg

SEQ ID NO: 70648 - DNA, 2110 bp, Zea Mays
gccagccagcttctgctggaacaagaacagtacaggtacagcctcctccctccacagcagcgacaccaatggcatcgtggtcgtggacctctgttcactgcagcagctaccccctaccggggccgtcggcacgcttcacgccttctctggtctccgcaacaacaccggcgctcaggcggacgagggcgagggggcagctgcagcgatgcctctgttcccagtacgccggcgaacgccagccgccgccgccgccaccgccacagccggagccggactcgccgcagcagctggagcgcctcttctccaacctcaaccagaccaccatgaagcacgagccagggagcgtcaccagcgccgtcttccttgtggctggcacaacggttggagcaggcatccttgcaatccctgcagtcacacaagaagctgggttcttggcctcggcagtcatatgcatcctctgctggtcatacatggtcgtcacggggctgttggttgctgaagtaaacgtcaataccatgtgtgagctaggatctggtggcgtctcactggtctcgatggctatgcgcactcttgggacatttggagtgagaacatcttgcttatcctatttatttatacattatgcacttcttgtcgcatacgtggcacgctcttcaaatatcataacaaactcattgggcattccaatatgggagagtgctaccctgttttctctagctttcggaggggtatgttactttggaagccagcgattgattggtgcagtaaatggagttctggtagtcggcatcctagcatccttcacttctcttgttgtagtggcaagtggaaacctacagtggagttctcttcttgaagcgaattttgctgctgctccacaaagtataccaataattgctctttcatttgtataccagaatgtggttcctgttctctgtacaaatttggagggagacctgtcaaaagtacggtacgatttccaaggataactttgttcgtaaatgctaacacctaattaagtacataagttgtgattcgtgccagttaaaagtgttaccgatattgtcggtcatgcaacaacagagctatttatacaacactgcaacacttctccaactaaataaacattctgaatctctgctaaattgactatatcaattatcaaatggtcatatattggtaaattttagaagtataagcatatcctttatgggttttgcagaacagctattgtggcgggtactgccatacccctggctctgttcctagtatgggatggagtaatcttggggacacttccagaccttgcagggagcagcactgtttctgaccccttggaactacttagatcgagtaatgggatagtggggcctattgttgaggcgttctcatttctcgctatagccacatcatacattggatttgttctaggaatctcggacttccttgcagacttgcttaaactaccaagtggccagaacaaaccgctgccatacgtattgactctgtttcctccacttgttctgtcactgcttgacccggagatatttttcaaggcattggactttgcaggaacttatggagttctagtgctgtttggagtttttcctgccgctatgtcttggtcagagagatattcggatgagttggaagctccagtaccccctatagtccccggagggaaatttactctctcggctgtcatgggaggtgcattgcttgtgattgttccagagttaatcaaggatgtaatgcaactacaaggactacactgacaatcggtgcaagtgaaaggacatataacagttacagtaaaacggtccttgagatttttgttgcagtaacaagtacatgtagcaaaagcaaaggcaaaactcgaaagcaatcaagtgcagagattgcagtttcatcgagcatcgacgttggagttgaattgttttttatgagattagcacggggttcagaacttcggttaaatttctgcaaccgaaagaaaaatctaaaattccgtattacactaatatatgtgctttgttgtgaatatataactttgtaattatattttctattgtttatgtcacataaaattcttcttttcattagatgtttg

SEQ ID NO: 70649 - DNA, 1848 bp, Zea Mays
cagccagccagccagccagcttctgctggaacaagaacagtacaggtacagcctcctccctccacagcagcgacaccaatggcatcgtggtcgtggacctctgttcactgcagcagctaccccctaccggggccgtcggcacgcttcacgccttctctggtctccgcaacaacaccggcgctcaggcggacgagggcgagggggcagctgcagcgatgcctctgttcccagtacgccggcgaacgccagccgccgccgccgccaccgccacagccggagccggactcgccgcagcagctggagcgcctcttctccaacctcaaccagaccaccatgaagcacgagccagggagcgtcaccagcgccgtcttccttgtggctggcacaacggttggagcaggcatccttgcaatccctgcagtcacacaagaagctgggttcttggcctcggcagtcatatgcatcctctgctggtcatacatggtcgtcacggggctgttggttgctgaagtaaacgtcaataccatgtgtgagctaggatctggtggcgtctcactggtctcgatggctatgcgcactcttgggacatttggagtgagaacatcttgcttatcctatttatttatacattatgcacttcttgtcgcatacgtggcacgctcttcaaatatcataacaaactcattgggcattccaatatgggagagtgctaccctgttttctctagctttcggaggggtatgttactttggaagtaaatggagttctggtagtcggcatcctagcatccttcacttctcttgttgtagtggcaagtggaaacctacagtggagttctcttcttgaagcgaattttgctgctgctccacaaagtataccaataattgctctttcatttgtataccagaatgtggttcctgttctctgtacaaatttggagggagacctgtcaaaagtacgaacagctattgtggcgggtactgccatacccctggctctgttcctagtatgggatggagtaatcttggggacacttccagaccttgcagggagcagcactgtttctgaccccttggaactacttagatcgagtaatgggatagtggggcctattgttgaggcgttctcatttctcgctatagccacatcatacattggatttgttctaggaatctcggacttccttgcagacttgcttaaactaccaagtggccagaacaaaccgctgccatacgtattgactctgtttcctccacttgttctgtcactgcttgacccggagatatttttcaaggcattggactttgcaggaacttatggagttctagtgctgtttggagtttttcctgccgctatgtcttggtcagagagatattcggatgagttggaagctccagtaccccctatagtccccggagggaaatttactctctcggctgtcatgggaggtgcattgcttgtgattgttccagagttaatcaaggatgtaatgcaactacaaggactacactgacaatcggtgcaagtgaaaggacatataacagttacagtaaaacggtccttgagatttttgttgcagtaacaagtacatgtagcaaaagcaaaggcaaaactcgaaagcaatcaagtgcagagattgcagtttcatcgagcatcgacgttggagttgaattgttttttatgagattagcacggggttcagaacttcggttaaatttctgcaaccgaaagaaaaatctaaaattccgtattacactaatatatgtgctttgttgtgaatatataactttgtaattatattttctattgtttatgtcacataaaattcttcttttcattagatgtttg

SEQ ID NO: 70650 - DNA, 1914 bp, Zea Mays
cagccagccagccagccagcttctgctggaacaagaacagtacaggtacagcctcctccctccacagcagcgacaccaatggcatcgtggtcgtggacctctgttcactgcagcagctaccccctaccggggccgtcggcacgcttcacgccttctctggtctccgcaacaacaccggcgctcaggcggacgagggcgagggggcagctgcagcgatgcctctgttcccagtacgccggcgaacgccagccgccgccgccgccaccgccacagccggagccggactcgccgcagcagctggagcgcctcttctccaacctcaaccagaccaccatgaagcacgagccagggagcgtcaccagcgccgtcttccttgtggctggcacaacggttggagcaggcatccttgcaatccctgcagtcacacaagaagctgggttcttggcctcggcagtcatatgcatcctctgctggtcatacatggtaatagaatgtcactgactgggtaaattatcaaacccggcgtgttaaaaggtcgtcacggggctgttggttgctgaagtaaacgtcaataccatgtgtgagctaggatctggtggcgtctcactggtctcgatggctatgcgcactcttgggacatttggagtgagaacatcttgcttatcctatttatttatacattatgcacttcttgtcgcatacgtggcacgctcttcaaatatcataacaaactcattgggcattccaatatgggagagtgctaccctgttttctctagctttcggaggggtatgttactttggaagccagcgattgattggtgcagtaaatggagttctggtagtcggcatcctagcatccttcacttctcttgttgtagtggcaagtggaaacctacagtggagttctcttcttgaagcgaattttgctgctgctccacaaagtataccaataattgctctttcatttgtataccagaatgtggttcctgttctctgtacaaatttggagggagacctgtcaaaagtacgctattgtggcgggtactgccatacccctggctctgttcctagtatgggatggagtaatcttggggacacttccagaccttgcagggagcagcactgtttctgaccccttggaactacttagatcgagtaatgggatagtggggcctattgttgaggcgttctcatttctcgctatagccacatcatacattggatttgttctaggaatctcggacttccttgcagacttgcttaaactaccaagtggccagaacaaaccgctgccatacgtattgactctgtttcctccacttgttctgtcactgcttgacccggagatatttttcaaggcattggactttgcaggaacttatggagttctagtgctgtttggagtttttcctgccgctatgtcttggtcagagagatattcggatgagttggaagctccagtaccccctatagtccccggagggaaatttactctctcggctgtcatgggaggtgcattgcttgtgattgttccagagttaatcaaggatgtaatgcaactacaaggactacactgacaatcggtgcaagtgaaaggacatataacagttacagtaaaacggtccttgagatttttgttgcagtaacaagtacatgtagcaaaagcaaaggcaaaactcgaaagcaatcaagtgcagagattgcagtttcatcgagcatcgacgttggagttgaattgttttttatgagattagcacggggttcagaacttcggttaaatttctgcaaccgaaagaaaaatctaaaattccgtattacactaatatatgtgctttgttgtgaatatataactttgtaattatattttctattgtttatgtcacataaaattcttcttttcattagatgtttg

SEQ ID NO: 70651 - DNA, 1866 bp, Zea Mays
cggcagccagccagccagccagcttctgctggaacaagaacagtacaggtacagcctcctccctccacagcagcgacaccaatggcatcgtggtcgtggacctctgttcactgcagcagctaccccctaccggggccgtcggcacgcttcacgccttctctggtctccgcaacaacaccggcgctcaggcggacgagggcgagggggcagctgcagcgatgcctctgttcccagtacgccggcgaacgccagccgccgccgccgccaccgccacagccggagccggactcgccgcagcagctggagcgcctcttctccaacctcaaccagaccaccatgaagcacgagccagggagcgtcaccagcgccgtcttccttgtggctggcacaacggttggagcaggcatccttgcaatccctgcagtcacacaagaagctgggttcttggcctcggcagtcatatgcatcctctgctggtcatacatggtcgtcacggggctgttggttgctgaagtaaacgtcaataccatgtgtgagctaggatctggtggcgtctcactggtctcgatggctatgcgcactcttgggacatttggagtgagaacatcttgcttatcctatttatttatacattatgcacttcttgtcgcatacgtggcacgctcttcaaatatcataacaaactcattgggcattccaatatgggagagtgctaccctgttttctctagctttcggaggggtatgttactttggaagccagcgattgattggtgcagtaaatggagttctggtagtcggcatcctagcatccttcacttctcttgttgtagtggcaagtggaaacctacagtggagttctcttcttgaagcgaattttgctgctgctccacaaagtataccaataattgctctttcatttgtataccagaatgtggttcctgttctctgtacaaatttggagggagacctgtcaaaagtacgctattgtggcgggtactgccatacccctggctctgttcctagtatgggatggagtaatcttggggacacttccagaccttgcagggagcagcactgtttctgaccccttggaactacttagatcgagtaatgggatagtggggcctattgttgaggcgttctcatttctcgctatagccacatcatacattggatttgttctaggaatctcggacttccttgcagacttgcttaaactaccaagtggccagaacaaaccgctgccatacgtattgactctgtttcctccacttgttctgtcactgcttgacccggagatatttttcaaggcattggactttgcaggaacttatggagttctagtgctgtttggagtttttcctgccgctatgtcttggtcagagagatattcggatgagttggaagctccagtaccccctatagtccccggagggaaatttactctctcggctgtcatgggaggtgcattgcttgtgattgttccagagttaatcaaggatgtaatgcaactacaaggactacactgacaatcggtgcaagtgaaaggacatataacagttacagtaaaacggtccttgagatttttgttgcagtaacaagtacatgtagcaaaagcaaaggcaaaactcgaaagcaatcaagtgcagagattgcagtttcatcgagcatcgacgttggagttgaattgttttttatgagattagcacggggttcagaacttcggttaaatttctgcaaccgaaagaaaaatctaaaattccgtattacactaatatatgtgctttgttgtgaatatataactttgtaattatattttctattgtttatgtcacataaaattcttcttttcattagatgtttg

SEQ ID NO: 70652 - DNA, 2009 bp, Zea Mays
ggcactacggcagccagccagccagccagcttctgctggaacaagaacagtacaggtacagcctcctccctccacagcagcgacaccaatggcatcgtggtcgtggacctctgttcactgcagcagctaccccctaccggggccgtcggcacgcttcacgccttctctggtctccgcaacaacaccggcgctcaggcggacgagggcgagggggcagctgcagcgatgcctctgttcccagtacgccggcgaacgccagccgccgccgccgccaccgccacagccggagccggactcgccgcagcagctggagcgcctcttctccaacctcaaccagaccaccatgaagcacgagccagggagcgtcaccagcgccgtcttccttgtggctggcacaacggttggagcaggcatccttgcaatccctgcagtcacacaagaagctgggttcttggcctcggcagtcatatgcatcctctgctggtcatacatggtaatagaatgtcactgactgggtaaattatcaaacccggcgtgttaaaaggacggtttgatgattgacccaagtgcctgtttcgttgagtcgtttacagtgagacagcttatgattgttggcgtcgcatttccaggtcgtcacggggctgttggttgctgaagtaaacgtcaataccatgtgtgagctaggatctggtggcgtctcactggtctcgatggctatgcgcactcttgggacatttggagtgagaacatcttgcttatcctatttatttatacattatgcacttcttgtcgcatacgtggcacgctcttcaaatatcataacaaactcattgggcattccaatatgggagagtgctaccctgttttctctagctttcggaggggtatgttactttggaagccagcgattgattggtgcagtaaatggagttctggtagtcggcatcctagcatccttcacttctcttgttgtagtggcaagtggaaacctacagtggagttctcttcttgaagcgaattttgctgctgctccacaaagtataccaataattgctctttcatttgtataccagaatgtggttcctgttctctgtacaaatttggagggagacctgtcaaaagtacgctattgtggcgggtactgccatacccctggctctgttcctagtatgggatggagtaatcttggggacacttccagaccttgcagggagcagcactgtttctgaccccttggaactacttagatcgagtaatgggatagtggggcctattgttgaggcgttctcatttctcgctatagccacatcatacattggatttgttctaggaatctcggacttccttgcagacttgcttaaactaccaagtggccagaacaaaccgctgccatacgtattgactctgtttcctccacttgttctgtcactgcttgacccggagatatttttcaaggcattggactttgcaggaacttatggagttctagtgctgtttggagtttttcctgccgctatgtcttggtcagagagatattcggatgagttggaagctccagtaccccctatagtccccggagggaaatttactctctcggctgtcatgggaggtgcattgcttgtgattgttccagagttaatcaaggatgtaatgcaactacaaggactacactgacaatcggtgcaagtgaaaggacatataacagttacagtaaaacggtccttgagatttttgttgcagtaacaagtacatgtagcaaaagcaaaggcaaaactcgaaagcaatcaagtgcagagattgcagtttcatcgagcatcgacgttggagttgaattgttttttatgagattagcacggggttcagaacttcggttaaatttctgcaaccgaaagaaaaatctaaaattccgtattacactaatatatgtgctttgttgtgaatatataactttgtaattatattttctattgtttatgtcacataaaattcttcttttcattagatgtttg

SEQ ID NO: 70653 - DNA, 2481 bp, Zea Mays
cgggcagcgtgcgcgaagataacaacacacacggcactacggcagccagccagccagccagcttctgctggaacaagaacagtacaggtacagcctcctccctccacagcagcgacaccaatggcatcgtggtcgtggacctctgttcactgcagcagctaccccctaccggggccgtcggcacgcttcacgccttctctggtctccgcaacaacaccggcgctcaggcggacgagggcgagggggcagctgcagcgatgcctctgttcccagtacgccggcgaacgccagccgccgccgccgccaccgccacagccggagccggactcgccgcagcagctggagcgcctcttctccaacctcaaccagaccaccatgaagcacgagccagggagcgtcaccagcgccgtcttccttgtggctggcacaacggttggagcaggcatccttgcaatccctgcagtcacacaagaagctgggttcttggcctcggcagtcatatgcatcctctgctggtcatacatggtaatagaatgtcactgactgggtaaattatcaaacccggcgtgttaaaaggacggtttgatgattgacccaagtgcctgtttcgttgagtcgtttacagtgagacagcttatgattgttggcgtcgcatttccaggtcgtcacggggctgttggttgctgaagtaaacgtcaataccatgtgtgagctaggatctggtggcgtctcactggtctcgatggctatgcgcactcttgggacatttggagtgagaacatcttgcttatcctatttatttatacattatgcacttcttgtcgcatacgtggcacgctcttcaaatatcataacaaactcattgggcattccaatatgggagagtgctaccctgttttctctagctttcggaggggtatgttactttggaagccagcgattgattggtgcagtaaatggagttctggtagtcggcatcctagcatccttcacttctcttgttgtaagtgctaatgctatcagatatgcaccaaagttgcctggtggattttacattcaagaaacttgttataaatatttttaaaaatctctcatgggaagaacatgcacggcagttaaatgacaaagtaataaaacaacacaaggcatttttcaaaatataatattataatttatatcaggagggagggaaacatcgtaaatcaagtatacacaggtacaaagaacgacctgagtaaaacattgcataagctcaatacttatatgcagataggttcttttgacaagaaacatgatcattttttataatgatgtgattatcatcctttttatatgcgtctatttggacataaagtatgcccttgttacaaattgatcatcagacaacttgaaaactcctttggcacagatagcaactttccatatgtggtttacacaggtagtggcaagtggaaacctacagtggagttctcttcttgaagcgaattttgctgctgctccacaaagtataccaataattgctctttcatttgtataccagaatgtggttcctgttctctgtacaaatttggagggagacctgtcaaaagtacgaacagctattgtggcgggtactgccatacccctggctctgttcctagtatgggatggagtaatcttggggacacttccagaccttgcagggagcagcactgtttctgaccccttggaactacttagatcgagtaatgggatagtggggcctattgttgaggcgttctcatttctcgctatagccacatcatacattggatttgttctaggaatctcggacttccttgcagacttgcttaaactaccaagtggccagaacaaaccgctgccatacgtattgactctgtttcctccacttgttctgtcactgcttgacccggagatatttttcaaggcattggactttgcaggaacttatggagttctagtgctgtttggagtttttcctgccgctatgtcttggtcagagagatattcggatgagttggaagctccagtaccccctatagtccccggagggaaatttactctctcggctgtcatgggaggtgcattgcttgtgattgttccagagttaatcaaggatgtaatgcaactacaaggactacactgacaatcggtgcaagtgaaaggacatataacagttacagtaaaacggtccttgagatttttgttgcagtaacaagtacatgtagcaaaagcaaaggcaaaactcgaaagcaatcaagtgcagagattgcagtttcatcgagcatcgacgttggagttgaattgttttttatgagattagcacggggttcagaacttcggttaaatttctgcaaccgaaagaaaaatctaaaattccgtattacactaatatatgtgctttgttgtgaatatataactttgtaattatattttctattgtttatgtcacataaaattcttcttttcattagatgtttg

SEQ ID NO: 70654 - DNA, 909 bp, Zea Mays
cggcactacggcagccagccagccagccagcttctgctggaacaagaacagtacaggtacagcctcctccctccacagcagcgacaccaatggcatcgtggtcgtggacctctgttcactgcagcagctaccccctaccggggccgtcggcacgcttcacgccttctctggtctccgcaacaacaccggcgctcaggcggacgagggcgagggggcagctgcagcgatgcctctgttcccagtacgccggcgaacgccagccgccgccgccgccaccgccacagccggagccggactcgccgcagcagctggagcgcctcttctccaacctcaaccagaccaccatgaagcacgagccagggagcgtcaccagcgccgtcttccttgtggctggcacaacggttggagcaggcatccttgcaatccctgcagtcacacaagaagctgggttcttggcctcggcagtcatatgcatcctctgctggtcatacatggtaatagaatgtcactgactgggtaaattatcaaacccggcgtgttaaaaggacggtttgatgattgacccaagtgcctgtttcgttgagtcgtttacagtgagacagcttatgattgttggcgtcgcatttccaggtcgtcacggggctgttggttgctgaagtaaacgtcaataccatgtgtgagctaggatctggtggcgtctcactggtctcgatggctatgcgcactcttgggacatttggagtgagaacatcttgatgggagagtgctaccctgttttctctagctttcggaggggtatgttactttggaagccagcgattgattggtgcagtaaatggagttctggtagtcggcatcctagcatccttcacttctcttgttacaacttgaaaactcctttggcacaga

SEQ ID NO: 70655 - DNA, 2554 bp, Zea Mays
ggtagatgcagatgaagtattatacacaatttggctgtgtatgatgcattgatgcatactgattctctggtttgttatccgaagtgtggagttccatggttctgttatttcaaacacatgttcatgtatactgcatactattaattgattatattgcatcatagcatggtcgatggtttctagttaaaatggctaagaagttcctagaaacttctcttgcaataaacaaatgcttctttgcagataacactattgaaaacattaccctaagagcaccatcagataacacaatatatctggattgcttgggtgatgataaatcaacattaacctccctgtttgggccaagctccaatgtagagtttcctgcttgactgatttgacaatatttgtatgtggagaagatgttaaggacaatcattctcagaaaaaaaattaaggacgtgatatcggccaacagctaaaagtggcgcatccaataaaagattaagggaacaatcatttgcaaaaggatattttatagggaactcagacttccgtaaagcacagcttgctttccacaaggaatctccaacatagctcagcttgagaccatcttgagtttgccatcttcctaattgagggttacttccagtgacgatgaccttaagtttgttaccagtggacgtgggggacagcagcaagtaggtatgagttgattaaataagttactgattaacacaggtaaggatagtttataaaagataaagacatctataaagtttacttacagtagatccagatacgagccgaggacagctaatcacgaactggacaacgatatctgctcagggaaagtattatataagacaaaaaaaatgattacttcatgtggtgctccaaaaatagaaatacatcatttcttcttattcccctttacattttattataaatacatgtaatgtgcatgttttcaaaagaaaaaaaatccgttgatatataagggcacaaggattctatctgggaacttgcttataaaatacataagggcacacaaaataaaacatctgagagtgggagacagagagctctagacatctagagtaggaagaacttcctttgatatatttaacaaacatgtgtaaacacgatgccgtatcggttttttcagcaaaatattcatcacgaaattgcagatatttgcagatttaacactctggtcctgctctcaattggttttcatataaatggtaccttcaggatccaaacttttgttgagggacactgactgtgattcctttttaacaccttcagtagcattgaaaatgacattcttgaatgcacttctgaagaatagagcttcagaagcatcctgaatgcaaacaagaccattagtaaacatagtacagaaggaagaaacttgtttatcgtgaacctaacgaacagcgatgcccataatcagtgttctaatatagaaaatacaacagtgatagatacaacaatccacatcttatccaataggtacaacccagtgctagtgctggctactcccacatgagtggggtctggggaaggaataacccacgaggcaagccttacccctgcatttttgcagagaggctgcatcagaaaccaggaccattagcttggtggaaagacttgtcaccactgcgctaggcctgtccttcacgatagatacaacatgttgagctaaagaaataagatccatatattgctgctactgcattgcttactgtagagaacataatacatacactggtgataaaaatgatcagtacctgccaccagtcacggatttcaattacgtctccttccttcacgccctccggcaggactagtttccttttctccccagcctcccatctcaacacattcttcttgtcatccaccacatagtacttgtactcagaggtaaagccggcaacaacagacacgctcccacaccagattagctcactgtcctgatggactggactgagagatactccttgcttgacattccacgacccgagtgctggttccgacccggcaatcagcaagctctggccccattgcgtgtaatacggtagtttgaacagcaaggtcactgaattcaggtgtttctttcccgaggtcgccatgtccttcaaacggcacgaccggcggcaatggcgacaaacgggcagggaatcagcgacgggcggggggagagatcagagcgaggtacaaaacagagcgagtgagagagcggcgaaggctctccggctctccctcgaagatagaaggcgacgcgaggggagcggatgggtgtgcgtgtggagggcgaaggcgacgtctacgacggtgggagagcctgggaaagcgtcacccgcgaccgcagtgacagcataaaaaaggagcccttttctcctcccttcgtggatccggctcctaattttgagacggcgaagaatagcaaagcaatccgctcgggtcgtcgtccggttgtgtgtggctgtgagcggcggtggcggtgacacacgtgaggtgaggacgacgcgcgcgtcggccgtcggttccactgcccggtccgtca

SEQ ID NO: 70656 - DNA, 787 bp, Zea Mays
atggcttccgccgtgcactcgccgctggctctgctaccgaggccccgcgccgtggccgacggcggcatggaggacagcgacagcgagagcgtggcggagtcgtgcccgcacccgcgcggcgcggccaccgactcctcgtcctgctgcggcagcagcgcgtgctgccacgacgacgaggaggaggaggagatggacgaggacgacgacgggtgcagcagctgcgtggagggagacgagtgcagcagctaccatcaaggccaagaaggagctgccggcggcggcggcggcggcggcgacggcgacgtggaggagcggcgcctggtgggagcagatggcggtggccggggcccgcggcacgacgcttcctctcccacgggcgccggaggccgcggtcgccgaggacccgaagcgcgcggcggagcggcaggaggaggaccgcaagttctgggaggactgtctcgcctccgggtacccatgaacccacccacccccttggccccttgccatgcatccgatcgagctcaccgcaatcccatgcgtgcatgctcgcgcacaaaccacaagttacatacacgacgacggcggcaaaggccagaatcgccgtgccgacacacaagagctagtagtagtagtatgtttttttagggattacccccctacttgctcttccttgtacagccatttcacgaatattttagaaattcttgggctactgtacgttgaccggcagcgtgctgcgtgcatgacatgatgatgatctgaattctgaagaaactggcggtttatt

SEQ ID NO: 70657 - DNA, 3614 bp, Zea Mays
caaccgctccccaccgccagccggatctcctgagaggcgacgccgcgactgccggacggcaaccctgctcctccgccggtgccctcccgcacgatgagccgcagcgggcctcgccgcggcatcttcgatggcctccccatcccggccgacaaatcctacctcaaggaaagcctgtcgcggatcgacgagagctgggcggccgcgcggttcgactcgctgccgcacgtcgtgcacatcctcacctccaaggaccgcgagggcgagatccagttcctcaaagagcagagcgacctcatcgaggacgtcgtggacgaggtcgtgcacgcctaccaccacggcttcaacaaggccatccagaactactcccagatcctgcggctgttcagcgagtctgcagagagcattaccggactcaagggggagatggaggaggcgaagaagctgcttggcaggaagaataagcacctcggccagttgtggtaccgctccctcacactgcgccatgtgctatcccttttggatcaggtcgaggatgttgccaaggttcctgctcgaattgaaaacttaatggcagagaagcagctgtatgctgcagtgcaattgcaagtccaatcagttctgatactagaacgagaaggccttcaagcggtaggtgctcttcaagatgttcgttctgatctaacaaagctgcgaggagtactattttacaaaattttggaagagttacatgcccatttgtacaacaatggcgaatatagctctgcagttttaagtatggttgacagtgagcaagcaccgacttctacagctactgggcgattggtaaacagcatgcaacctctttcaaggagaactagatcaattaaaggtgacaaccacattggtgggccagtagatgggtttccaaaagttagttctgttgatggaggctcttcgtttgatggcccagatgataatagcttagatatgagtgaaagtgatggacacactcgaaaggattcgaaaagtttttctcatgaaatcccaatttttctttcctatgctacaccagatgagtttcttgaatcaatgataaaggcagatgctccccttaatgtgaagtacctgagaacattggtacaatgcttatccatgcttggaaaggttgcagctgcaggagctgtgatatgccaacgagtacgccctacaatccatgatgttatcacttcaaagattaaagcatgttctgaagacgcttcaaaatccagtatgggcaaagctgcaaaaacgaatgatgtgttgcattcaaatggacccactccccggtttcaaatgttcacacagaaaacaaagagtggcgcatctgtaatggcagcccaactagttgtcagtcccatttcgccgactatggcacccactggagatgctcagcgtgcagctactcaacttcttagatcaatatttgaatgtcttgtagagatacttgagaaccatattattgttggagagcttcttgaacaaaaatcaacatctgaggttgataatgtaaacacacctcatattgcaaatggggatgcaagctggaatccagactctgaatctttccaagctactggtggtttcagtgttgcattctctctatcagtcgtgcagagtgagtgccagcaacttctgtgtgaaattttgcgggcaactccagaagctgctactgctgacgcagctgtccagacagctaggcttgcaaataaggatccagtgaaggaaaagagggatggatcagaaggcctttcttttgccttccgcattactgatgcagcaaccccagcgtcaaatgaaggtcaaggatggcgaagaaattccaatgtgcctcaagaagggagtgatggcttattggcttttgtgaataactttctgaaggagcacttcttgccagcaatatttgtagattaccgaaaatgcgttcagcaggccatatctagtccagcagcatttagaccacgtgtacatgcaacatcagcatatagttcatcggtggaacttggacgccctgtgcttcaagggcttctcgccattgatataatagccaaagaggttcttggatgggttcaattgatgccaaactatgcgactgagcttgtggagtatgtacgcacatttttagaacgtgctcatgagagatgtcgtgcatcatatatggaggctgtccttgaaaagcaaagttatattctcctttcaaggaatgacattgagagtttaatgcgcctggaaccagcaaacatttctttgcaaaattctactggtgaacatgataacaatgcaacaggtgcagaggcagtcgaagtagagattgaactaagtgatctcttattagatatgtgcccaataaaacaggaaaacttgatccatgacgaccagaaactgatattgttggcttctcttagtgactcattggaatatttagcagattcagttgaaaggcttggggaatcattcataagtccaccaaccacttcagagagcataaatcatagccatggtcgacatgcccgctcatctagtgcaattccaaaaagtctcgcgtctctggctaatgagtacagaaggttagctgttgattgtgtcagagtattgagattggaaatgcagctagaggcgatataccacatgcaggaaatgaccaaaagagaatacgtcgaagatcaagatgctgaagatcctgatgactttattatctcccttacaactcagattgcacgacgggatgaagaaatggctccttatatcacggaatcagaaaggaattacatatttggtgggatttccagtgttgctgctaatgcatcaataaaggcacttgctcaaatgaagtcaataaacttgttaggagtccagcaaatatgcaggaattcgatagctctggaacaggctcttgcagccataccttcaatagatagtgaagcagtccaacagcgattggatcgcgttcgaacgttctatgagttgttaaatttgccttttgagtctttgcttggattcatcgcagaacatgaatatttgttttctgctaaagaatacctgagtgttctaaaggtcaatgtgccgggtagagaaatacctgcggatgctgaacgacgcatctcacagattttgggtcactagatctaatcagacacaatggtgctatttttgactggttatgccttatgtgggctttggctaccaaatggttctccacctgtttccatggcggtgtttgtgtagatttagctggtttttgctatttagtaattttgtttccttttgtatttcacgtgatatattcttttgtatgtcttatcagttatcattgattgtaaatttgtagtgttccggataaaattttcattattgattattgtaaatgtgttatctgtctggatgcgatatttaataagctcatcagattcagtgtcctgtatggtgcacagacgagttgccagtcatgaacttttcagtcttgtaaaattgggaaatttattgggaatggttgaacaagtggaacgccataaaaatgtgacagtgaagtatgcactacactatgatgtttggtttacgaaatgtaaggtaaatagcaatagtaataattcacatccgag

SEQ ID NO: 70658 - DNA, 3745 bp, Zea Mays
caaccgctccccaccgccagccggatctcctgagaggcgacgccgcgactgccggacggcaaccctgctcctccgccggtgccctcccgcacgatgagccgcagcgggcctcgccgcggcatcttcgatggcctccccatcccggccgacaaatcctacctcaaggaaagcctgtcgcggatcgacgagagctgggcggccgcgcggttcgactcgctgccgcacgtcgtgcacatcctcacctccaaggaccgcgagggcgagatccagttcctcaaagagcagagcgacctcatcgaggacgtcgtggacgaggtcgtgcacgcctaccaccacggcttcaacaaggccatccagaactactcccagatcctgcggctgttcagcgagtctgcagagagcattaccggactcaagggggagatggaggaggcgaagaagctgcttggcaggaagaataagcacctcggccagttgtggtaccgctccctcacactgcgccatgtgctatcccttttggatcaggtcgaggatgttgccaaggtcagtgtgttcctgctcgaattgaaaacttaatggcagagaagcagctgtatgctgcagtgcaattgcaagtccaatcagttctgatactagaacgagaaggccttcaagcggtaggtgctcttcaagatgttcgttctgatctaacaaagctgcgaggagtactattttacaaaattttggaagagttacatgcccatttgtacaacaatggcgaatatagctctgcagttttaagtatggttgacagtgagcaagcaccgacttctacagctactgggcgattggtaaacagcatgcaacctctttcaaggagaactagatcaattaaaggtgacaaccacattggtgggccagtagatgggtttccaaaagttagttctgttgatggaggctcttcgtttgatggcccagatgataatagcttagatatgagtgaaagtgatggacacactcgaaaggattcgaaaagtttttctcatgaaatcccaatttttctttcctatgctacaccagatgagtttcttgaatcaatgataaaggcagatgctccccttaatgtgaagtacctgagaacattggtacaatgcttatccatgcttggaaaggttgcagctgcaggagctgtgatatgccaacgagtacgccctacaatccatgatgttatcacttcaaagattaaagcatgttctgaagacgcttcaaaatccagtatgggcaaagctgcaaaaacgaatgatgtgttgcattcaaatggacccactccccggtttcaaatgttcacacagaaaacaaagagtggcgcatctgtaatggcagcccaactagttgtcagtcccatttcgccgactatggcacccactggagatgctcagcgtgcagctactcaacttcttagatcaatatttgaatgtcttgtagagatacttgagaaccatattattgttggagagcttcttgaacaaaaatcaacatctgaggttgataatgtaaacacacctcatattgcaaatggggatgcaagctggaatccagactctgaatctttccaagctactggtggtttcagtgttgcattctctctatcagtcgtgcagagtgagtgccagcaacttctgtgtgaaattttgcgggcaactccagaagctgctactgctgacgcagctgtccagacagctaggcttgcaaataaggatccagtgaaggaaaagagggatggatcagaaggcctttcttttgccttccgcattactgatgcagcaaccccagcgtcaaatgaaggtcaaggatggcgaagaaattccaatgtgcctcaagaagggtatggaacagcaagtgtcatacctgaccaaggaattttcctagccgcgtctgtttaccgtcctgtttttgagtttatgaataaaatagggttgatgttgcctcagaagtactcacaacttgggagtgatggcttattggcttttgtgaataactttctgaaggagcacttcttgccagcaatatttgtagattaccgaaaatgcgttcagcaggccatatctagtccagcagcatttagaccacgtgtacatgcaacatcagcatatagttcatcggtggaacttggacgccctgtgcttcaagggcttctcgccattgatataatagccaaagaggttcttggatgggttcaattgatgccaaactatgcgactgagcttgtggagtatgtacgcacatttttagaacgtgctcatgagagatgtcgtgcatcatatatggaggctgtccttgaaaagcaaagttatattctcctttcaaggaatgacattgagagtttaatgcgcctggaaccagcaaacatttctttgcaaaattctactggtgaacatgataacaatgcaacaggtgcagaggcagtcgaagtagagattgaactaagtgatctcttattagatatgtgcccaataaaacaggaaaacttgatccatgacgaccagaaactgatattgttggcttctcttagtgactcattggaatatttagcagattcagttgaaaggcttggggaatcattcataagtccaccaaccacttcagagagcataaatcatagccatggtcgacatgcccgctcatctagtgcaattccaaaaagtctcgcgtctctggctaatgagtacagaaggttagctgttgattgtgtcagagtattgagattggaaatgcagctagaggcgatataccacatgcaggaaatgaccaaaagagaatacgtcgaagatcaagatgctgaagatcctgatgactttattatctcccttacaactcagattgcacgacgggatgaagaaatggctccttatatcacggaatcagaaaggaattacatatttggtgggatttccagtgttgctgctaatgcatcaataaaggcacttgctcaaatgaagtcaataaacttgttaggagtccagcaaatatgcaggaattcgatagctctggaacaggctcttgcagccataccttcaatagatagtgaagcagtccaacagcgattggatcgcgttcgaacgttctatgagttgttaaatttgccttttgagtctttgcttggattcatcgcagaacatgaatatttgttttctgctaaagaatacctgagtgttctaaaggtcaatgtgccgggtagagaaatacctgcggatgctgaacgacgcatctcacagattttgggtcactagatctaatcagacacaatggtgctatttttgactggttatgccttatgtgggctttggctaccaaatggttctccacctgtttccatggcggtgtttgtgtagatttagctggtttttgctatttagtaattttgtttccttttgtatttcacgtgatatattcttttgtatgtcttatcagttatcattgattgtaaatttgtagtgttccggataaaattttcattattgattattgtaaatgtgttatctgtctggatgcgatatttaataagctcatcagattcagtgtcctgtatggtgcacagacgagttgccagtcatgaacttttcagtcttgtaaaattgggaaatttattgggaatggttgaacaagtggaacgccataaaaatgtgacagtgaagtatgcactacactatgatgtttggtttacgaaatgtaaggtaaatagcaatagtaataattcacatccgag

SEQ ID NO: 70659 - DNA, 3750 bp, Zea Mays
caaccgctccccaccgccagccggatctcctgagaggcgacgccgcgactgccggacggcaaccctgctcctccgccggtgccctcccgcacgatgagccgcagcgggcctcgccgcggcatcttcgatggcctccccatcccggccgacaaatcctacctcaaggaaagcctgtcgcggatcgacgagagctgggcggccgcgcggttcgactcgctgccgcacgtcgtgcacatcctcacctccaaggaccgcgagggcgagatccagttcctcaaagagcagagcgacctcatcgaggacgtcgtggacgaggtcgtgcacgcctaccaccacggcttcaacaaggccatccagaactactcccagatcctgcggctgttcagcgagtctgcagagagcattaccggactcaagggggagatggaggaggcgaagaagctgcttggcaggaagaataagcacctcggccagttgtggtaccgctccctcacactgcgccatgtgctatcccttttggatcaggtcgaggatgttgccaaggttcctgctcgaattgaaaacttaatggcagagaagcagctgtatgctgcagtgcaattgcaagtccaatcagttctgatactagaacgagaaggccttcaagcggtaggtgctcttcaagatgttcgttctgatctaacaaagctgcgaggagtactattttacaaaattttggaagagttacatgcccatttgtacaacaatggcgaatatagattttctgtgcagctctgcagttttaagtatggttgacagtgagcaagcaccgacttctacagctactgggcgattggtaaacagcatgcaacctctttcaaggagaactagatcaattaaaggtgacaaccacattggtgggccagtagatgggtttccaaaagttagttctgttgatggaggctcttcgtttgatggcccagatgataatagcttagatatgagtgaaagtgatggacacactcgaaaggattcgaaaagtttttctcatgaaatcccaatttttctttcctatgctacaccagatgagtttcttgaatcaatgataaaggcagatgctccccttaatgtgaagtacctgagaacattggtacaatgcttatccatgcttggaaaggttgcagctgcaggagctgtgatatgccaacgagtacgccctacaatccatgatgttatcacttcaaagattaaagcatgttctgaagacgcttcaaaatccagtatgggcaaagctgcaaaaacgaatgatgtgttgcattcaaatggacccactccccggtttcaaatgttcacacagaaaacaaagagtggcgcatctgtaatggcagcccaactagttgtcagtcccatttcgccgactatggcacccactggagatgctcagcgtgcagctactcaacttcttagatcaatatttgaatgtcttgtagagatacttgagaaccatattattgttggagagcttcttgaacaaaaatcaacatctgaggttgataatgtaaacacacctcatattgcaaatggggatgcaagctggaatccagactctgaatctttccaagctactggtggtttcagtgttgcattctctctatcagtcgtgcagagtgagtgccagcaacttctgtgtgaaattttgcgggcaactccagaagctgctactgctgacgcagctgtccagacagctaggcttgcaaataaggatccagtgaaggaaaagagggatggatcagaaggcctttcttttgccttccgcattactgatgcagcaaccccagcgtcaaatgaaggtcaaggatggcgaagaaattccaatgtgcctcaagaagggtatggaacagcaagtgtcatacctgaccaaggaattttcctagccgcgtctgtttaccgtcctgtttttgagtttatgaataaaatagggttgatgttgcctcagaagtactcacaacttgggagtgatggcttattggcttttgtgaataactttctgaaggagcacttcttgccagcaatatttgtagattaccgaaaatgcgttcagcaggccatatctagtccagcagcatttagaccacgtgtacatgcaacatcagcatatagttcatcggtggaacttggacgccctgtgcttcaagggcttctcgccattgatataatagccaaagaggttcttggatgggttcaattgatgccaaactatgcgactgagcttgtggagtatgtacgcacatttttagaacgtgctcatgagagatgtcgtgcatcatatatggaggctgtccttgaaaagcaaagttatattctcctttcaaggaatgacattgagagtttaatgcgcctggaaccagcaaacatttctttgcaaaattctactggtgaacatgataacaatgcaacaggtgcagaggcagtcgaagtagagattgaactaagtgatctcttattagatatgtgcccaataaaacaggaaaacttgatccatgacgaccagaaactgatattgttggcttctcttagtgactcattggaatatttagcagattcagttgaaaggcttggggaatcattcataagtccaccaaccacttcagagagcataaatcatagccatggtcgacatgcccgctcatctagtgcaattccaaaaagtctcgcgtctctggctaatgagtacagaaggttagctgttgattgtgtcagagtattgagattggaaatgcagctagaggcgatataccacatgcaggaaatgaccaaaagagaatacgtcgaagatcaagatgctgaagatcctgatgactttattatctcccttacaactcagattgcacgacgggatgaagaaatggctccttatatcacggaatcagaaaggaattacatatttggtgggatttccagtgttgctgctaatgcatcaataaaggcacttgctcaaatgaagtcaataaacttgttaggagtccagcaaatatgcaggaattcgatagctctggaacaggctcttgcagccataccttcaatagatagtgaagcagtccaacagcgattggatcgcgttcgaacgttctatgagttgttaaatttgccttttgagtctttgcttggattcatcgcagaacatgaatatttgttttctgctaaagaatacctgagtgttctaaaggtcaatgtgccgggtagagaaatacctgcggatgctgaacgacgcatctcacagattttgggtcactagatctaatcagacacaatggtgctatttttgactggttatgccttatgtgggctttggctaccaaatggttctccacctgtttccatggcggtgtttgtgtagatttagctggtttttgctatttagtaattttgtttccttttgtatttcacgtgatatattcttttgtatgtcttatcagttatcattgattgtaaatttgtagtgttccggataaaattttcattattgattattgtaaatgtgttatctgtctggatgcgatatttaataagctcatcagattcagtgtcctgtatggtgcacagacgagttgccagtcatgaacttttcagtcttgtaaaattgggaaatttattgggaatggttgaacaagtggaacgccataaaaatgtgacagtgaagtatgcactacactatgatgtttggtttacgaaatgtaaggtaaatagcaatagtaataattcacatccgag

SEQ ID NO: 70660 - DNA, 3629 bp, Zea Mays
caaccgctccccaccgccagccggatctcctgagaggcgacgccgcgactgccggacggcaaccctgctcctccgccggtgccctcccgcacgatgagccgcagcgggcctcgccgcggcatcttcgatggcctccccatcccggccgacaaatcctacctcaaggaaagcctgtcgcggatcgacgagagctgggcggccgcgcggttcgactcgctgccgcacgtcgtgcacatcctcacctccaaggaccgcgagggcgagatccagttcctcaaagagcagagcgacctcatcgaggacgtcgtggacgaggtcgtgcacgcctaccaccacggcttcaacaaggccatccagaactactcccagatcctgcggctgttcagcgagtctgcagagagcattaccggactcaagggggagatggaggaggcgaagaagctgcttggcaggaagaataagcacctcggccagttgtggtaccgctccctcacactgcgccatgtgctatcccttttggatcaggtcgaggatgttgccaaggttcctgctcgaattgaaaacttaatggcagagaagcagctgtatgctgcagtgcaattgcaagtccaatcagttctgatactagaacgagaaggccttcaagcggtaggtgctcttcaagatgttcgttctgatctaacaaagctgcgaggagtactattttacaaaattttggaagagttacatgcccatttgtacaacaatggcgaatatagctctgcagttttaagtatggttgacagtgagcaagcaccgacttctacagctactgggcgattggtaaacagcatgcaacctctttcaaggagaactagatcaattaaaggtgacaaccacattggtgggccagtagatgggtttccaaaagttagttctgttgatggaggctcttcgtttgatggcccagatgataatagcttagatatgagtgaaagtgatggacacactcgaaaggattcgaaaagtttttctcatgaaatcccaatttttctttcctatgctacaccagatgagtttcttgaatcaatgataaaggcagatgctccccttaatgtgaagtacctgagaacattggtacaatgcttatccatgcttggaaaggttgcagctgcaggagctgtgatatgccaacgagtacgccctacaatccatgatgttatcacttcaaagattaaagcatgttctgaagacgcttcaaaatccagtatgggcaaagctgcaaaaacgaatgatgtgttgcattcaaatggacccactccccggtttcaaatgttcacacagaaaacaaagagtggcgcatctgtaatggcagcccaactagttgtcagtcccatttcgccgactatggcacccactggagatgctcagcgtgcagctactcaacttcttagatcaatatttgaatgtcttgtagagatacttgagaaccatattattgttggagagcttcttgaacaaaaatcaacatctgaggttgataatgtaaacacacctcatattgcaaatggggatgcaagctggaatccagactctgaatctttccaagctactggtggtttcagtgttgcattctctctatcagtcgtgcagagtgagtgccagcaacttctgtgtgaaattttgcgggcaactccagaagctgctactgctgacgcagctgtccagacagctaggcttgcaaataaggatccagtgaaggaaaagagggatggatcagaaggcctttcttttgccttccgcattactgatgcagcaaccccagcgtcaaatgaaggtcaaggatggcgaagaaattccaatgtgcctcaagaagggtatggaacagcaagtgtcatacctgaccaaggaattttcctagccgcgtctgtttaccgtcctgtttttgagtttatgaataaaatagggttgatgttgcctcagaagtactcacaacttgggagtgatggcttattggcttttgtgaataactttctgaaggagcacttcttgccagcaatatttgtagattaccgaaaatgcgttcagcaggccatatctagtccagcagcatttagaccacgtgtacatgcaacatcagcatatagttcatcggtggaacttggacgccctgtgcttcaagggcttctcgccattgatataatagccaaagaggctgtccttgaaaagcaaagttatattctcctttcaaggaatgacattgagagtttaatgcgcctggaaccagcaaacatttctttgcaaaattctactggtgaacatgataacaatgcaacaggtgcagaggcagtcgaagtagagattgaactaagtgatctcttattagatatgtgcccaataaaacaggaaaacttgatccatgacgaccagaaactgatattgttggcttctcttagtgactcattggaatatttagcagattcagttgaaaggcttggggaatcattcataagtccaccaaccacttcagagagcataaatcatagccatggtcgacatgcccgctcatctagtgcaattccaaaaagtctcgcgtctctggctaatgagtacagaaggttagctgttgattgtgtcagagtattgagattggaaatgcagctagaggcgatataccacatgcaggaaatgaccaaaagagaatacgtcgaagatcaagatgctgaagatcctgatgactttattatctcccttacaactcagattgcacgacgggatgaagaaatggctccttatatcacggaatcagaaaggaattacatatttggtgggatttccagtgttgctgctaatgcatcaataaaggcacttgctcaaatgaagtcaataaacttgttaggagtccagcaaatatgcaggaattcgatagctctggaacaggctcttgcagccataccttcaatagatagtgaagcagtccaacagcgattggatcgcgttcgaacgttctatgagttgttaaatttgccttttgagtctttgcttggattcatcgcagaacatgaatatttgttttctgctaaagaatacctgagtgttctaaaggtcaatgtgccgggtagagaaatacctgcggatgctgaacgacgcatctcacagattttgggtcactagatctaatcagacacaatggtgctatttttgactggttatgccttatgtgggctttggctaccaaatggttctccacctgtttccatggcggtgtttgtgtagatttagctggtttttgctatttagtaattttgtttccttttgtatttcacgtgatatattcttttgtatgtcttatcagttatcattgattgtaaatttgtagtgttccggataaaattttcattattgattattgtaaatgtgttatctgtctggatgcgatatttaataagctcatcagattcagtgtcctgtatggtgcacagacgagttgccagtcatgaacttttcagtcttgtaaaattgggaaatttattgggaatggttgaacaagtggaacgccataaaaatgtgacagtgaagtatgcactacactatgatgtttggtttacgaaatgtaaggtaaatagcaatagtaataattcacatccgag

SEQ ID NO: 70661 - DNA, 3752 bp, Zea Mays
gcttacgctacgcggtcgccaaccgctccccaccgccagccggatctcctgagaggcgacgccgcgactgccggacggcaaccctgctcctccgccggtgccctcccgcacgatgagccgcagcgggcctcgccgcggcatcttcgatggcctccccatcccggccgacaaatcctacctcaaggaaagcctgtcgcggatcgacgagagctgggcggccgcgcggttcgactcgctgccgcacgtcgtgcacatcctcacctccaaggaccgcgagggcgagatccagttcctcaaagagcagagcgacctcatcgaggacgtcgtggacgaggtcgtgcacgcctaccaccacggcttcaacaaggccatccagaactactcccagatcctgcggctgttcagcgagtctgcagagagcattaccggactcaagggggagatggaggaggcgaagaagctgcttggcaggaagaataagcacctcggccagttgtggtaccgctccctcacactgcgccatgtgctatcccttttggatcaggtcgaggatgttgccaaggttcctgctcgaattgaaaacttaatggcagagaagcagctgtatgctgcagtgcaattgcaagtccaatcagttctgatactagaacgagaaggccttcaagcggtgctcttcaagatgttcgttctgatctaacaaagctgcgaggagtactattttacaaaattttggaagagttacatgcccatttgtacaacaatggcgaatatagctctgcagttttaagtatggttgacagtgagcaagcaccgacttctacagctactgggcgattggtaaacagcatgcaacctctttcaaggagaactagatcaattaaaggtgacaaccacattggtgggccagtagatgggtttccaaaagttagttctgttgatggaggctcttcgtttgatggcccagatgataatagcttagatatgagtgaaagtgatggacacactcgaaaggattcgaaaagtttttctcatgaaatcccaatttttctttcctatgctacaccagatgagtttcttgaatcaatgataaaggcagatgctccccttaatgtgaagtacctgagaacattggtacaatgcttatccatgcttggaaaggttgcagctgcaggagctgtgatatgccaacgagtacgccctacaatccatgatgttatcacttcaaagattaaagcatgttctgaagacgcttcaaaatccagtatgggcaaagctgcaaaaacgaatgatgtgttgcattcaaatggacccactccccggtttcaaatgttcacacagaaaacaaagagtggcgcatctgtaatggcagcccaactagttgtcagtcccatttcgccgactatggcacccactggagatgctcagcgtgcagctactcaacttcttagatcaatatttgaatgtcttgtagagatacttgagaaccatattattgttggagagcttcttgaacaaaaatcaacatctgaggttgataatgtaaacacacctcatattgcaaatggggatgcaagctggaatccagactctgaatctttccaagctactggtggtttcagtgttgcattctctctatcagtcgtgcagagtgagtgccagcaacttctgtgtgaaattttgcgggcaactccagaagctgctactgctgacgcagctgtccagacagctaggcttgcaaataaggatccagtgaaggaaaagagggatggatcagaaggcctttcttttgccttccgcattactgatgcagcaaccccagcgtcaaatgaaggtcaaggatggcgaagaaattccaatgtgcctcaagaagggtatggaacagcaagtgtcatacctgaccaaggaattttcctagccgcgtctgtttaccgtcctgtttttgagtttatgaataaaatagggttgatgttgcctcagaagtactcacaacttgggagtgatggcttattggcttttgtgaataactttctgaaggagcacttcttgccagcaatatttgtagattaccgaaaatgcgttcagcaggccatatctagtccagcagcatttagaccacgtgtacatgcaacatcagcatatagttcatcggtggaacttggacgccctgtgcttcaagggcttctcgccattgatataatagccaaagaggttcttggatgggttcaattgatgccaaactatgcgactgagcttgtggagtatgtacgcacatttttagaacgtgctcatgagagatgtcgtgcatcatatatggaggctgtccttgaaaagcaaagttatattctcctttcaaggaatgacattgagagtttaatgcgcctggaaccagcaaacatttctttgcaaaattctactggtgaacatgataacaatgcaacaggtgcagaggcagtcgaagtagagattgaactaagtgatctcttattagatatgtgcccaataaaacaggaaaacttgatccatgacgaccagaaactgatattgttggcttctcttagtgactcattggaatatttagcagattcagttgaaaggcttggggaatcattcataagtccaccaaccacttcagagagcataaatcatagccatggtcgacatgcccgctcatctagtgcaattccaaaaagtctcgcgtctctggctaatgagtacagaaggttagctgttgattgtgtcagagtattgagattggaaatgcagctagaggcgatataccacatgcaggaaatgaccaaaagagaatacgtcgaagatcaagatgctgaagatcctgatgactttattatctcccttacaactcagattgcacgacgggatgaagaaatggctccttatatcacggaatcagaaaggaattacatatttggtgggatttccagtgttgctgctaatgcatcaataaaggcacttgctcaaatgaagtcaataaacttgttaggagtccagcaaatatgcaggaattcgatagctctggaacaggctcttgcagccataccttcaatagatagtgaagcagtccaacagcgattggatcgcgttcgaacgttctatgagttgttaaatttgccttttgagtctttgcttggattcatcgcagaacatgaatatttgttttctgctaaagaatacctgagtgttctaaaggtcaatgtgccgggtagagaaatacctgcggatgctgaacgacgcatctcacagattttgggtcactagatctaatcagacacaatggtgctatttttgactggttatgccttatgtgggctttggctaccaaatggttctccacctgtttccatggcggtgtttgtgtagatttagctggtttttgctatttagtaattttgtttccttttgtatttcacgtgatatattcttttgtatgtcttatcagttatcattgattgtaaatttgtagtgttccggataaaattttcattattgattattgtaaatgtgttatctgtctggatgcgatatttaataagctcatcagattcagtgtcctgtatggtgcacagacgagttgccagtcatgaacttttcagtcttgtaaaattgggaaatttattgggaatggttgaacaagtggaacgccataaaaatgtgacagtgaagtatgcactacactatgatgtttggtttacgaaatgtaaggtaaatagcaatagtaataattcacatccgag

SEQ ID NO: 70662 - DNA, 3487 bp, Zea Mays
ggaccacgcaccatcgacatacacacacacacacaccagctgtgcttacgctacgcggtcgccaaccgctccccaccgccagccggatctcctgagaggcgacgccgcgactgccggacggcaaccctgctcctccgccggtgccctcccgcacgatgagccgcagcgggcctcgccgcggcatcttcgatggcctccccatcccggccgacaaatcctacctcaaggaaagcctgtcgcggatcgacgagagctgggcggccgcgcggttcgactcgctgccgcacgtcgtgcacatcctcacctccaaggaccgcgagggcgagatccagttcctcaaagagcagagcgacctcatcgaggacgtcgtggacgaggtcgtgcacgcctaccaccacggcttcaacaaggccatccagaactactcccagatcctgcggctgttcagcgagtctgcagagagcattaccggactcaagggggagatggaggaggcgaagaagctgcttggcaggaagaataagcacctcggccagttgtggtaccgctccctcacactgcgccatgtgctatcccttttggatcaggtcgaggatgttgccaaggttcctgctcgaattgaaaacttaatggcagagaagcagctgtatgctgcagtgcaattgcaagtccaatcagttctgatactagaacgagaaggccttcaagcggtaggtgctcttcaagatgttcgttctgatctaacaaagctgcgaggagtactattttacaaaattttggaagagttacatgcccatttgtacaacaatggcgaatatagctctgcagttttaagtatggttgacagtgagcaagcaccgacttctacagctactgggcgattggtaaacagcatgcaacctctttcaaggagaactagatcaattaaaggtgacaaccacattggtgggccagtagatgggtttccaaaagttagttctgttgatggaggctcttcgtttgatggcccagatgataatagcttagatatgagtgaaagtgatggacacactcgaaaggattcgaaaagtttttctcatgaaatcccaatttttctttcctatgctacaccagatgagtttcttgaatcaatgataaaggcagatgctccccttaatgtgaagtacctgagaacattggtacaatgcttatccatgcttggaaaggttgcagctgcaggagctgtgatatgagaaccatattattgttggagagcttcttgaacaaaaatcaacatctgaggttgataatgtaaacacacctcatattgcaaatggggatgcaagctggaatccagactctgaatctttccaagctactggtggtttcagtgttgcattctctctatcagtcgtgcagagtgagtgccagcaacttctgtgtgaaattttgcgggcaactccagaagctgctactgctgacgcagctgtccagacagctaggcttgcaaataaggatccagtgaaggaaaagagggatggatcagaaggcctttcttttgccttccgcattactgatgcagcaaccccagcgtcaaatgaaggtcaaggatggcgaagaaattccaatgtgcctcaagaagggtatggaacagcaagtgtcatacctgaccaaggaattttcctagccgcgtctgtttaccgtcctgtttttgagggttgatgttgcctcagaagtactcacaacttgggagtgatggcttattggcttttgtgaataactttctgaaggagcacttcttgccagcaatatttgtagattaccgaaaatgcgttcagcaggccatatctagtccagcagcatttagaccacgtgtacatgcaacatcagcatatagttcatcggtggaacttggacgccctgtgcttcaagggcttctcgccattgatataatagccaaagaggttcttggatgggttcaattgatgccaaactatgcgactgagcttgtggagtatgtacgcacatttttagaacgtgctcatgagagatgtcgtgcatcatatatggaggctgtccttgaaaagcaaagttatattctcctttcaaggaatgacattgagagtttaatgcgcctggaaccagcaaacatttctttgcaaaattctactggtgaacatgataacaatgcaacaggtgcagaggcagtcgaagtagagattgaactaagtgatctcttattagatatgtgcccaataaaacaggaaaacttgatccatgacgaccagaaactgatattgttggcttctcttagtgactcattggaatatttagcagattcagttgaaaggcttggggaatcattcataagtccaccaaccacttcagagagcataaatcatagccatggtcgacatgcccgctcatctagtgcaattccaaaaagtctcgcgtctctggctaatgagtacagaaggttagctgttgattgtgtcagagtattgagattggaaatgcagctagaggcgatataccacatgcaggaaatgaccaaaagagaatacgtcgaagatcaagatgctgaagatcctgatgactttattatctcccttacaactcagattgcacgacgggatgaagaaatggctccttatatcacggaatcagaaaggaattacatatttggtgggatttccagtgttgctgctaatgcatcaataaaggcacttgctcaaatgaagtcaataaacttgttaggagtccagcaaatatgcaggaattcgatagctctggaacaggctcttgcagccataccttcaatagatagtgaagcagtccaacagcgattggatcgcgttcgaacgttctatgagttgttaaatttgccttttgagtctttgcttggattcatcgcagaacatgaatatttgttttctgctaaagaatacctgagtgttctaaaggtcaatgtgccgggtagagaaatacctgcggatgctgaacgacgcatctcacagattttgggtcactagatctaatcagacacaatggtgctatttttgactggttatgccttatgtgggctttggctaccaaatggttctccacctgtttccatggcggtgtttgtgtagatttagctggtttttgctatttagtaattttgtttccttttgtatttcacgtgatatattcttttgtatgtcttatcagttatcattgattgtaaatttgtagtgttccggataaaattttcattattgattattgtaaatgtgttatctgtctggatgcgatatttaataagctcatcagattcagtgtcctgtatggtgcacagacgagttgccagtcatgaacttttcagtcttgtaaaattgggaaatttattgggaatggttgaacaagtggaacgccataaaaatgtgacagtgaagtatgcactacactatgatgtttggtttacgaaatgtaaggtaaatagcaatagtaataattcacatccgag

SEQ ID NO: 70663 - DNA, 1830 bp, Zea Mays
aaggccgcataacttgagcccaattaccaaaatgacaccaaccgattaaactcacagcccaactcctcttctcgccctcgtctgacttcgtttcggacctccccagtttttcccctccggccgccgccggagaagcagaagccatgcaggtcgccgccgcgcgcgcccgccgcctcctcgccttaccggcggcctcggggatccccggaatactctccggaccgatcccagggcgcgcatcatgcgccgagggcgttctcctttaccgtctcaatggcgctcccgcttcgccgtcttctccgcagcataccaggggcttctcctcctcctgcttcgcctcccgatcacactgtaacctcccatcgcctaccatagcttctcaatggttgaatgagaaatcagtacactgtcacatgacgacagcacacttctcaacggaagcaagtgacatggaccaccctacagaagctgtagaggagatgtaccagaaaatgttgaaatctgttgaagctgagaccatgcctccaaatgcctggttgtggtcaatgattgatagctgctccaataaggaggacatcaaacttctttttcaaattttgcagaaactcagggtatttagactatcaaatcttcgcatcagtgcaaacttcaatgagcatctctgcagaaaagtaactgaggcttgtgctcgtgtaggcgccgttgactatgggttgaaggctttatggaaacataatgtttatggaataacaccaacgattggttctgctcattatctactgcaacatgctaaagagcaaaatgacaacaaactaatggaaaacgtaattcatgtcctatcaaaaaatttcttaccgctgcaaccaggcacagctgatatagtcttcagtatctgttataatgctgatagatgggatttactctcaaaatacgcggagagatttgttaaggcaggtgtcaaactgcatcgagctgcatttgacatttggatggactttgctgccaaagttggggattctcaatctatttggcacattaatagtctaagaggcaggtctgtcaaacattatacacttgcaacagggtttgcatgtgcaaaggggtctctgcttgatcggaagccagaaaatgccgctgacaagattaagcttctttatgaggtttggcacaggcatttgcctgatcagaagaaaccatttgtgaaagatgaactcgagaaacttattgctggatggcctacggaggtggtaaagaggcagaagaaagataagaggaaggagttggaggaagctttgatgaaggacatccctacgatggtggactgcctgacaaagtccggcctcgacatccctgtggaactggacaagcttgccaccccacagctccaagtggcgtagcaaaagaaggcgcgcggctcgccatacaaccggaacagacttgagtctcgaggaacagcatgcattttggtttggcactgatgcaggcagcgcagcgcagcgcaggacgcagattgaaaatctgtgatagatgaaatcatgtttttatttctgtttctaatgttgtagtgcaggcccgtgcgtggtgcgccctttctgttgtgcgttgaccgttgaaaatctgtgatagatgaaatcatgtttttatttctgtttctaagaagcaaattgccgtcgtatcttggcacgtgttgtaactgtacccatcctttctccaaggactttctaatctgttattacttttaatattgcattaatagacctagtcgcgaaaggggtaagtttcagttttgcatcaaaaaagatgtgagcattgaatctcacaattgttgcc

SEQ ID NO: 70664 - DNA, 2190 bp, Zea Mays
aaggccgcataacttgagcccaattaccaaaatgacaccaaccgattaaactcacagcccaactcctcttctcgccctcgtctgacttcgtttcggacctccccagtttttcccctccggccgccgccggagaagcagaagccatgcaggtcgccgccgcgcgcgcccgccgcctcctcgccttaccggcggcctcggggatccccggaatactctccggaccgatcccagggcgcgcatcatgcgccgagggcgttctcctttaccgtctcaatggcgctcccgcttcgccgtcttctccgcagcataccaggggcttctcctcctcctgcttcgcctcccgatcacactgtaacctcccatcgcctaccatagcttctcaatggttgaatgagaaatcagtacactgtcacatgacgacagcacacttctcaacggaagcaagtgacatggaccaccctacagaagctgtagaggagatgtaccagaaaatgttgaaatctgttgaagctgagaccatgcctccaaatgcctggttgtggtcaatgattgatagctgctccaataaggaggacatcaaacttctttttcaaattttgcagaaactcagggtatttagactatcaaatcttcgcatcagtgcaaacttcaatgagcatctctgcagaaaagtaactgaggcttgtgctcgtgtaggcgccgttgactatgggttgaaggctttatggaaacataatgtttatggaataacaccaacgattggttctgctcattatctactgcaacatgctaaagagcaaaatgacaacaaactaatggaaaacgtaattcatgtcctatcaaaaaatttcttaccgctgcaaccaggcacagctgatatagtcttcagtatctgttataatgctgatagatgggatttactctcaaaatacgcggagagatttgttaaggcaggtgtcaaactgcatcgagctgcatttgacatttggatggactttgctgccaaagttggggattctcaatctatttggcacattaatagtctaagaggcaggtctgtcaaacattatacacttgcaacagggtttgcatgtgcaaaggggtctctgcttgatcggaagccagaaaatgccgctgacaagattaagcttctttatgaggtttggcacagggttggtcatcagacctatattactaaaatactggatttgcttcatggcagcagcatattaaaaaatatttctggataacggatgtttttccccttactctgaatatcctgcattcctgctgcacctatgctggccatgctgctcaagcatatcagactcaagctatttttttgtttggcattttgaatgttaaaacaatatatttcactattttacagaccttaatatatttcttcttaatatgcgttttcgagaaaaagaacagagtccttaagctgagatactttgatagagacaatttttacatataaaacatcgaattggcatgttcacctgatgagtatttatggttgggcgcagcatttgcctgatcagaagaaaccatttgtgaaagatgaactcgagaaacttattgctggatggcctacggaggtggtaaagaggcagaagaaagataagaggaaggagttggaggaagctttgatgaaggacatccctacgatggtggactgcctgacaaagtccggcctcgacatccctgtggaactggacaagcttgccaccccacagctccaagtggcgtagcaaaagaaggcgcgcggctcgccatacaaccggaacagacttgagtctcgaggaacagcatgcattttggtttggcactgatgcaggcagcgcagcgcagcgcaggacgcagattgaaaatctgtgatagatgaaatcatgtttttatttctgtttctaatgttgtagtgcaggcccgtgcgtggtgcgccctttctgttgtgcgttgaccgttgaaaatctgtgatagatgaaatcatgtttttatttctgtttctaagaagcaaattgccgtcgtatcttggcacgtgttgtaactgtacccatcctttctccaaggactttctaatctgttattacttttaatattgcattaatagacctagtcgcgaaaggggtaagtttcagttttgcatcaaaaaagatgtgagcattgaatctcacaattgttgcc

SEQ ID NO: 70665 - DNA, 1344 bp, Zea Mays
cgccaagctccctctacgcacctgcctcctcctcggcccggatcccgccgccagcgcctgttatggagatgaaggcgtcggcctccgatgaaaccctagccgccgtcttggaccacctcaagccccacaccgtcggcaccttcctcccccctcgtgcgtgggacgacgacgagcgaaagcctccggccacatcttgagcgacggcagctcccccttttcgctgcgccgtccagctccccctcccctcgcgcacatgtccccaccacgctcgaatccttcagctcacgcgaccgcgactgcgaccccttcacctccctctgcaacatctagggttcgggtttgggtattggattgagcgggttcaggtagctgcgggagaggcggacgtgcggcgcgtccccctgcggcgtgccgaagatcttgacaactcgcatggccatctagggttggggttgagcgggttcgagtagttgctggagaggtggtcgggcgacgcgtccctctgcaacatgccgaaggtcttgacggtgagcatggccatctcgtcgagctggtcctgcagctacgtgatgatgtcaatggataaaatcattgttggttcaacatcatgaatgacacttggaggaacttccgaacttgaaccatgaaggaatatatcttattttatatcaatcttgtggcacataaacaatggcgacaaacatccaattgctttcgagagcttgaaacatctccaatagaggtttgctcaatttcccaagtttgtttgggaaagggaggctcatggagctatacagtgtactcggggccttctttcatcttaacgctattcgagatcgtgagtttgccagcaagccttatgtggggagcaagaggtggaagtgtccagcgctatatctgctccggcgtcgagttgctgctgtgcgtgacctgcaagtgcggcatccacaaggagtttagcttcaaccaccgtgtcagatcaagtagctcatgtccatcctcatctttgggtttcaggtttggccttacaattcactgtacaaggttaaccgcaccgaattttgaatcatacgattatgtaggtcgcctctccttccctcctttttgttttgttcttcattttaatgttatatatgttcactaaatattcttcaatgtttggtatcattttgtgacttcatttagaagaggaaccaatatttgtcatacaaatgtgttttgtgtttctaaatgggagtatctttgaaaaaaatcaaggaattattagggatggattgcacccttgaaatgattatcaattgaaatatgttaacttagctttatgattagtattattgtaacacg

SEQ ID NO: 70666 - DNA, 944 bp, Zea Mays
cgccaagctccctctacgcacctgcctcctcctcggcccggatcccgccgccagcgcctgttatggagatgaaggcgtcggcctccgatgaaaccctagccgccgtcttggaccacctcaagccccacaccgtcggcaccttcctcccccctcgtgcgtgggacgacgacgagcgaaagcctccggccacatcttgagcgacggcagctcccccttttcgctgcgccgtccagctccccctcccctcgcgcacatgtccccaccacgctcgaatccttcagctcacgcgaccgcgactgcgaccccttcacctccctctgcaacatctagggttcgggtttgggtattggattgagcgggttcaggtagctgcgggagaggcggacgtgcggcgcgtccccctgcggcgtgccgaagatcttgacaactcgcatggccatctagggttggggttgagcgggttcgagtagttgctggagaggtggtcgggcgacgcgtccctctgcaacatgccgaaggtcttgacggtgagcatggccatctcgtcgagctggtcctgcagctacgtgatgatgtcaatggattcaacccacatagcatgggccaggccagatctaaaaaatttgtgtgttgcccccgagagcccaacgacgatggtgttgtcgtcgttaagtgaggctagcactagcactgctgctttgcactatgaggttgtcgattttatcaagccagctttggggaagcttgaaggataaaatcattgttggttcaacatcatgaatgacacttggaggaacttccgaacttgaaccatgaaggaatatatcttattttatatcaatcttgtggcacataaacaatggcgacaaacatccaattgctttcgagagcttgaaacatctccaatagagaaccttaatccggaggttgggagtggactgtgc

SEQ ID NO: 70667 - DNA, 1847 bp, Zea Mays
cttccatcatcgtctctttcttttgatgccaatctcctccctgctcgctctcccgttcagacacagcgcgtcttagcttctgggagaagcggccgaggaatctgtcatggacatgtcactggagatacatgatccacccaaaagcctcctgcattgggagtgttgaggcacaagcacaacacacgcaggccagccgcagtgatgcacaagccgcctcgccgccggtcactataaaaacagacgcctcggggcctcaaaccatcatcaactgatcaaacagacaaccctatactgctacaacacacacacagacacatgcataatggttggtacatggtaaaactatagcaatctaaggtcgatcgctcgtctagctacaccactatcaccagtaccacctccatggtttcttgactgatagatagacggacgagaatgaagaagctagctagctactagatatatcatcagtagagtgttcagttgttgatgatggcctcctccttgcccctggtcaccactgggctgcgccatcctccgcagcagcagtcgccgagggtggtcctgcagagcgaggacccgaccgagtggtgcgcgtgggcgcaccaggggcaccgcctgtgggtggccatgccggactccttctgggtgtacacgtacaaggtggaccggtgcccgttccggggcaaccacgtgtggacgacgtgcccgtacgcgcactggggggagcgcgcgcgccgccgcgaccccagccgctacgcgtacgccgccgcgacgtgcccggactacgccgactccaagcgccggaaccgcctggccgggtccaccgcgccccccacctgcgcgcgcggcctccgctgcggcttcgcgcacggcgtcttcgagacgtggctgcaccccaccaggttccgcacccgcatgtgcgaggccggcgccgggtgcagccgccgggtctgcttcttcgcgcactgcctcgcgcagcgcaggcgcgaggacgacctggtcctgccgctcgtcgtcttccccgccatcaccatgccgcccccgctaccgctaccgctgccgctgccgccgctggccttcgttgtcccgaacaacccgctgccgcccgtaccacccgccctcccctgcccccgctcggtctcggtcgtcgcccatcaggttgatcgcgtcacgcaggccatgcagcagggccgcagcgtgcgcctgcttacgcgcgccgatgccgatgccgcttcgtcgtcgtcgtcgtatttttcctcctcccgtgcccctgctagtaatgctgctgtggccacggcgccgggcgacgacgaggatatcgacatcgtcgccattgtcaccggctgctgcctcgcctccgaggaagaatctaaggctgccggcggcggcgactacccgcacttggacctcaacctcatcatggacatcgtgaggatgaactagatagctacaaattaaagatatacctgccagtgcatggcgtccatgcgtgcgcttggatggttcggcgccgcgacaggtggaggaggcgccgccgaaaggagggacgggacgccagccgcagcagcaagcatcatcgcctcgtgcccctagctagctagtatacactggcacggcagtatcgtataatacatattattatactagtataatgtaaggtgtcatgtcctttattttgaacttaactggattagtaccagatggagttttggacatgtattgtggtgttggatccgtctagctatatatgtgatggatctatatatgtgtctgtagctatttgtgggcttgtatgaattttgtggaatgatgaataatatgtgaattaacaaatatgtttacgt

SEQ ID NO: 70668 - DNA, 2124 bp, Zea Mays
agcactcttccatcatcgtctctttcttttgatgccaatctcctccctgctcgctctcccgttcagacttgacgagatgtgtaattgaaaacaatgtacgcgcgcggttttttcgtcggaaagaaggaaggaaggaaaaaaccgcagctgcacacacacgaatgacatgacacaagtgcgtgcgacagggtgtacacacatcatcactcccgggttgatccctatcgcattggcatggggacaaaccgctcctcgtgcatggcctgcactgcacacccctagtgacctggacgatgaatggacagatatatacggcatcgtctttctttgcacacagacacagcgcgtcttagcttctgggagaagcggccgaggaatctgtcatggacatgtcactggagatacatgatccacccaaaagcctcctgcattgggagtgttgaggcacaagcacaacacacgcaggccagccgcagtgatgcacaagccgcctcgccgccggtcactataaaaacagacgcctcggggcctcaaaccatcatcaactgatcaaacagacaaccctatactgctacaacacacacacagacacatgcataatggttggtacatggtaaaactatagcaatctaaggtcgatcgctcgtctagctacaccactatcaccagtaccacctccatggtttcttgactgatagatagacggacgagaatgaagaagctagctagctactagatatatcatcagtagagtgttcagttgttgatgatggcctcctccttgcccctggtcaccactgggctgcgccatcctccgcagcagcagtcgccgagggtggtcctgcagagcgaggacccgaccgagtggtgcgcgtgggcgcaccaggggcaccgcctgtgggtggccatgccggactccttctgggtgtacacgtacaaggtggaccggtgcccgttccggggcaaccacgtgtggacgacgtgcccgtacgcgcactggggggagcgcgcgcgccgccgcgaccccagccgctacgcgtacgccgccgcgacgtgcccggactacgccgactccaagcgccggaaccgcctggccgggtccaccgcgccccccacctgcgcgcgcggcctccgctgcggcttcgcgcacggcgtcttcgagacgtggctgcaccccaccaggttccgcacccgcatgtgcgaggccggcgccgggtgcagccgccgggtctgcttcttcgcgcactgcctcgcgcagcgcaggcgcgaggacgacctggtcctgccgctcgtcgtcttccccgccatcaccatgccgcccccgctaccgctaccgctgccgctgccgccgctggccttcgttgtcccgaacaacccgctgccgcccgtaccacccgccctcccctgcccccgctcggtctcggtcgtcgcccatcaggttgatcgcgtcacgcaggccatgcagcagggccgcagcgtgcgcctgcttacgcgcgccgatgccgatgccgcttcgtcgtcgtcgtcgtatttttcctcctcccgtgcccctgctagtaatgctgctgtggccacggcgccgggcgacgacgaggatatcgacatcgtcgccattgtcaccggctgctgcctcgcctccgaggaagaatctaaggctgccggcggcggcgactacccgcacttggacctcaacctcatcatggacatcgtgaggatgaactagatagctacaaattaaagatatacctgccagtgcatggcgtccatgcgtgcgcttggatggttcggcgccgcgacaggtggaggaggcgccgccgaaaggagggacgggacgccagccgcagcagcaagcatcatcgcctcgtgcccctagctagctagtatacactggcacggcagtatcgtataatacatattattatactagtataatgtaaggtgtcatgtcctttattttgaacttaactggattagtaccagatggagttttggacatgtattgtggtgttggatccgtctagctatatatgtgatggatctatatatgtgtctgtagctatttgtgggcttgtatgaattttgtggaatgatgaataatatgtgaattaacaaatatgtttacgt

SEQ ID NO: 70669 - DNA, 2556 bp, Zea Mays
gaccttggctaccatcgcaaaccccgcttttgtttatcattccgcctctccagtcttgacttcccctctctttctctcttcccggcggggcggccggaaatctccccccaaattcagctggtttcacgggagctatcggccggtggagaggaaaggacgagtcttgagctggacttcttggcggattggctgctggcattcgcaggaactgtgtgtcaggagcggggagatgagctgcttaccgtgctccggttcctcggggaaggaggacaagagcttggcggcgctctcgccgagcccccggcctgcggccaaggcggcaccagttcgatcaaattcacgtgcttcgagctccaggaaggaagattctgtacctgttcgcagaggaggaaacgctgcacatggcccggcacagattttcagtttccgggagttggctgttgccaccaaaaatttcagaagagattgcctgttgggagaaggtggctttggtcgtgtgtataaaggacatatggaaaatgggtcattgctgtgaagcaacttgatagaaatggttttcaaggaaatcgtgaatttcttgtggaggttctcatgctaagtctcttgcaccatcctaatctggtcagattaattggctattgtgccgatggtgaccagcgcctcttagtttacgaatacatgttgttgggatcactggaaaatcgtctgtttggtccagcaggcaaggaacctcttgactggaatacaaggatgaagattgctgctggtgcagcgaagggtctggagtaccttcatgacaaggcaaatccaccagtcatatacagagacttcaaatcatcaaacattcttctgggtgaagactactaccctaagctgtctgattttgggcttgcaaaacttggtccagttggtgacaaaacccatgtatcaacacgagttatgggaacatatggatattgcgctcctgagtatgccatgacagggcagttgacgctaaagtctgacgtttacagctttggtgttgtgttccttgaacttattacaggccgcaaagcaatcgatcacacccagccttcaggggagcaaaaccttgtcgcatgggctcgtccacttttcagagaccgaaggaagttctgccagcttgctgatccattgttgcatggcggctacccgaaaaggggtttgtaccaggccttagctgttgcagctatgtgtttgcaggagcaagcagcatcccggccgctgataggagacgttgtcactgcactgtcttacctagctgcacatccttatgatccaaatgcgccttccacaaaggattctaagacctgcccgtctaccccaagggcaaagacacaccgacgaaccaccagtgttcctgatgctcaacatgctgctgagtcgcttattttgaacttcccagacatgaggaaggagactgtcagaggaggggaattcgagaaggatcgtactgaaggttctggcagcagcagtagctctggaaggaacgattgcctggatgtcccgcgacttctatccgttcctaacggcaaagtttgcggtgaaggtaataacattcagaagtccactgttaaggttggtgcccgtgagaactagaatacagagccggccaaattctgcaggcatctttgaatggatgcatggattagaccattctttccatgcttgctgtcaattttgcgaggaatcttcgtcgcttggcgtgagtctttctgaaggggactgttgtcgagagttgagtactaccactgcaacaggtttggttttgcagacccggatagcctcatgctccacggttggtttttggttgcctccacggaacagttcaacaattcctccaggctttacatgaagtctcatgctgatgaaaggaagaactactctgtcgctgagattcagagcttagactctttagagtgtgcatttcgatgagaatctgctacattctgaatgtcacccacaccacagctttcacctgtgctgactaacgaaccctgcagtaatgtgtcattgaaggatgtggttgagtttccttgttctgttcttgtaggaaccacgtgccgacagggctgtgtctgtacatgttaatgggttgtttgtaggaacaattggatctataccattaaaagatccaaactttagatatataccatggacctcatatgtcattgactcatgtggacccacatgtaagtgagatagtaatggtatggatctaaagtggtgatcttttaatggtatggatccaaatttcccttgtttgtaagtagagctgttcatatatttattttttcttcttcgtcggtattgtgtaatggggtgatttgcagacaacatgtcaggcgtagctctgtagtctgtacagaaaaagaaggtttgcttttttgtttgcttggtattgtatgtaacattgactcgtcatatactattgtacaaatggggaagaacactgatcctttgggtaaggtgctgcttctcttcggtttgaactggagcgaattggaatgaggaagaggggaggggaaaccccccaag

SEQ ID NO: 70670 - DNA, 1926 bp, Zea Mays
gttcaccccggagcgcgtttcctggtcaactaaggccggcatgaagggctgctcagagcgcttgctgtttctgctgctgctgctggcatcgtcgtcgttactgtccgctgtgattgccgcgcagcagacttgccccgccgacctcgacagcaaatgcgatggtggcgcgtctgatgatgattgggagggggagttcttccccggcgtcccgaaaatcaagtatgagggtccaacaagcaagaaccctcttgcttataagtggtataacaaggaggaagtgattctcggtaagaagatgaaggattggatgcgcttcagtgttgcattctggcacacgttccgtggtactggcgctgatcctttcggtgctcctacaaagacttggccttgggaggacggcacaaattctttggccatggctaagagaagaatgagagctcactttgagttcatggagaagttgggagttgacaaatggtgcttccatgacagggatattgccccggatgggaagactcttgaagaaacaaattctaacttggatgagatagtccagctggcaaagcagctgcagggtgagaccaatataaagccattgtggggtaccgcacagctctttatgcatccacgttacatgcatggcgctgctacgagcccagaggttaaagtatatgcttatgcggctgcacaagttaagaaagctttggaggtcactcactacctaggtggtgaaaactatgtgttctggggtggaagagagggttaccaaactcttctgaatactgatatgaagagagaacttgaccatctggctaactttcttcaagctgctgttgactacaagaagaagattggattcaacggaacactattgatagagcctaaaccacaggaaccaacaaaacaccagtatgactgggatgttgcgactacgtttgcttttctacagaagtacggtcttacaggagagttcaagattaatgttgagtgcaaccatgctactctatctggacacagctgccatcatgaattggagactgcacggattaatgggctgcttggaaatatcgatgcaaacactggtgatcctcaagttggttgggacacagatcagttcatgacagacattgcagaggctactttggttatgtcaagtgtagttaagaatggtggacttgcacctggtggtttcaactttgatgccaaattgcggagggaaagtactgatgttgaggacatgtttcttgcccatatctccggaatggacaccctggcacgtggcctccgtaacgttgccaagctgattggggatggttccctagatgatcttgtccgcaagcggtaccagagctttgatagtgagattggtgccttgatcgaggctgggaaaggagactttgagacgctagaaaagaaggttctagagtggggtgagcccactgttgcatccggcaaacaggaactggcggagattctgttccagtctgccctatagatgatggtgccatgtccataggtccaggaataagcaagggtgcgccctcctccgaacacgcactcgtcctcctcaccacggggatgttatggttccgtgcgatggactacctacaatacagcatggaactgagataattaggatgtaatctgtcagaaaatttccagaattgttacctccttttgtttagagtggattagtggaatcaaactggagttagttaaagcttatcctacattttggtgtggcgatcgtgtttggtacttccttgaatgctgtttcatagtgtggcaacgatgttgctgcttagtcctacaactggtggtagtaatgtatcatagttcgaacgtttcttcacaataaattatgatctttaataaattttattagttcaaaaataaataaaaatagagttcgattttaatctaatt

SEQ ID NO: 70671 - DNA, 1889 bp, Zea Mays
ccccttttaagggagcgcgtttcctggtcaactaaggccggcatgaagggctgctcagagcgcttgctgtttctgctgctgctgctggcatcgtcgtcgttactgtccgctgtgattgccgcgcagcagacttgccccgccgacctcgacagcaaatgcgatggtggcgcgtctgatgatgattgggagggggagttcttccccggcgtcccgaaaatcaagtatgagggtccaacaagcaagaaccctcttgcttataagtggtataacaaggaggaagtgattctcggtaagaagatgaaggattggatgcgcttcagtgttgcattctggcacacgttccgtggtactggcgctgatcctttcggtgctcctacaaagacttggccttgggaggacggcacaaattctttggccatggctaagagaagaatgagagctcactttgagttcatggagaagttgggagttgacaaatggtgcttccatgacagggatattgccccggatgggaagactcttgaagaaacaaattctaacttggatgagatagtccagctggcaaagcagctgcagctctttatgcatccacgttacatgcatggcgctgctacgagcccagaggttaaagtatatgcttatgcggctgcacaagttaagaaagctttggaggtcactcactacctaggtggtgaaaactatgtgttctggggtggaagagagggttaccaaactcttctgaatactgatatgaagagagaacttgaccatctggctaactttcttcaagctgctgttgactacaagaagaagattggattcaacggaacactattgatagagcctaaaccacaggaaccaacaaaacaccagtatgactgggatgttgcgactacgtttgcttttctacagaagtacggtcttacaggagagttcaagattaatgttgagtgcaaccatgctactctatctggacacagctgccatcatgaattggagactgcacggattaatgggctgcttggaaatatcgatgcaaacactggtgatcctcaagttggttgggacacagatcagttcatgacagacattgcagaggctactttggttatgtcaagtgtagttaagaatggtggacttgcacctggtggtttcaactttgatgccaaattgcggagggaaagtactgatgttgaggacatgtttcttgcccatatctccggaatggacaccctggcacgtggcctccgtaacgttgccaagctgattggggatggttccctagatgatcttgtccgcaagcggtaccagagctttgatagtgagattggtgccttgatcgaggctgggaaaggagactttgagacgctagaaaagaaggttctagagtggggtgagcccactgttgcatccggcaaacaggaactggcggagattctgttccagtctgccctatagatgatggtgccatgtccataggtccaggaataagcaagggtgcgccctcctccgaacacgcactcgtcctcctcaccacggggatgttatggttccgtgcgatggactacctacaatacagcatggaactgagataattaggatgtaatctgtcagaaaatttccagaattgttacctccttttgtttagagtggattagtggaatcaaactggagttagttaaagcttatcctacattttggtgtggcgatcgtgtttggtacttccttgaatgctgtttcatagtgtggcaacgatgttgctgcttagtcctacaactggtggtagtaatgtatcatagttcgaacgtttcttcacaataaattatgatctttaataaattttattagttcaaaaataaataaaaatagagttcgattttaatctaatt

SEQ ID NO: 70672 - DNA, 1928 bp, Zea Mays
ccccttttaagggagcgcgtttcctggtcaactaaggccggcatgaagggctgctcagagcgcttgctgtttctgctgctgctgctggcatcgtcgtcgttactgtccgctgtgattgccgcgcagcagacttgccccgccgacctcgacagcaaatgcgatggtggcgcgtctgatgatgattgggagggggagttcttccccggcgtcccgaaaatcaagtatgagggtccaacaagcaagaaccctcttgcttataagtggtataacaaggaggaagtgattctcggtaagaagatgaaggattggatgcgcttcagtgttgcattctggcacacgttccgtggtactggcgctgatcctttcggtgctcctacaaagacttggccttgggaggacggcacaaattctttggccatggctaagagaagaatgagagctcactttgagttcatggagaagttgggagttgacaaatggtgcttccatgacagggatattgccccggatgggaagactcttgaagaaacaaattctaacttggatgagatagtccagctggcaaagcagctgcagggtgagaccaatataaagccattgtggggtaccgcacagctctttatgcatccacgttacatgcatggcgctgctacgagcccagaggttaaagtatatgcttatgcggctgcacaagttaagaaagctttggaggtcactcactacctaggtggtgaaaactatgtgttctggggtggaagagagggttaccaaactcttctgaatactgatatgaagagagaacttgaccatctggctaactttcttcaagctgctgttgactacaagaagaagattggattcaacggaacactattgatagagcctaaaccacaggaaccaacaaaacaccagtatgactgggatgttgcgactacgtttgcttttctacagaagtacggtcttacaggagagttcaagattaatgttgagtgcaaccatgctactctatctggacacagctgccatcatgaattggagactgcacggattaatgggctgcttggaaatatcgatgcaaacactggtgatcctcaagttggttgggacacagatcagttcatgacagacattgcagaggctactttggttatgtcaagtgtagttaagaatggtggacttgcacctggtggtttcaactttgatgccaaattgcggagggaaagtactgatgttgaggacatgtttcttgcccatatctccggaatggacaccctggcacgtggcctccgtaacgttgccaagctgattggggatggttccctagatgatcttgtccgcaagcggtaccagagctttgatagtgagattggtgccttgatcgaggctgggaaaggagactttgagacgctagaaaagaaggttctagagtggggtgagcccactgttgcatccggcaaacaggaactggcggagattctgttccagtctgccctatagatgatggtgccatgtccataggtccaggaataagcaagggtgcgccctcctccgaacacgcactcgtcctcctcaccacggggatgttatggttccgtgcgatggactacctacaatacagcatggaactgagataattaggatgtaatctgtcagaaaatttccagaattgttacctccttttgtttagagtggattagtggaatcaaactggagttagttaaagcttatcctacattttggtgtggcgatcgtgtttggtacttccttgaatgctgtttcatagtgtggcaacgatgttgctgcttagtcctacaactggtggtagtaatgtatcatagttcgaacgtttcttcacaataaattatgatctttaataaattttattagttcaaaaataaataaaaatagagttcgattttaatctaatt

SEQ ID NO: 70673 - DNA, 1926 bp, Zea Mays
ggaatccccttttaagggagcgcgtttcctggtcaactaaggccggcatgaagggctgctcagagcgcttgctgtttctgctgctgctgctggcatcgtcgtcgttactgtccgctgtgattgccgcgcagcagacttgccccgccgacctcgacagcaaatgcgatggtggcgcgtctgatgatgattgggagggggagttcttccccggcgtcccgaaaatcaaggtccaacaagcaagaaccctcttgcttataagtggtataacaaggaggaagtgattctcggtaagaagatgaaggattggatgcgcttcagtgttgcattctggcacacgttccgtggtactggcgctgatcctttcggtgctcctacaaagacttggccttgggaggacggcacaaattctttggccatggctaagagaagaatgagagctcactttgagttcatggagaagttgggagttgacaaatggtgcttccatgacagggatattgccccggatgggaagactcttgaagaaacaaattctaacttggatgagatagtccagctggcaaagcagctgcagggtgagaccaatataaagccattgtggggtaccgcacagctctttatgcatccacgttacatgcatggcgctgctacgagcccagaggttaaagtatatgcttatgcggctgcacaagttaagaaagctttggaggtcactcactacctaggtggtgaaaactatgtgttctggggtggaagagagggttaccaaactcttctgaatactgatatgaagagagaacttgaccatctggctaactttcttcaagctgctgttgactacaagaagaagattggattcaacggaacactattgatagagcctaaaccacaggaaccaacaaaacaccagtatgactgggatgttgcgactacgtttgcttttctacagaagtacggtcttacaggagagttcaagattaatgttgagtgcaaccatgctactctatctggacacagctgccatcatgaattggagactgcacggattaatgggctgcttggaaatatcgatgcaaacactggtgatcctcaagttggttgggacacagatcagttcatgacagacattgcagaggctactttggttatgtcaagtgtagttaagaatggtggacttgcacctggtggtttcaactttgatgccaaattgcggagggaaagtactgatgttgaggacatgtttcttgcccatatctccggaatggacaccctggcacgtggcctccgtaacgttgccaagctgattggggatggttccctagatgatcttgtccgcaagcggtaccagagctttgatagtgagattggtgccttgatcgaggctgggaaaggagactttgagacgctagaaaagaaggttctagagtggggtgagcccactgttgcatccggcaaacaggaactggcggagattctgttccagtctgccctatagatgatggtgccatgtccataggtccaggaataagcaagggtgcgccctcctccgaacacgcactcgtcctcctcaccacggggatgttatggttccgtgcgatggactacctacaatacagcatggaactgagataattaggatgtaatctgtcagaaaatttccagaattgttacctccttttgtttagagtggattagtggaatcaaactggagttagttaaagcttatcctacattttggtgtggcgatcgtgtttggtacttccttgaatgctgtttcatagtgtggcaacgatgttgctgcttagtcctacaactggtggtagtaatgtatcatagttcgaacgtttcttcacaataaattatgatctttaataaattttattagttcaaaaataaataaaaatagagttcgattttaatctaatt

SEQ ID NO: 70674 - DNA, 2090 bp, Zea Mays
gcctaagcgtccgctcattttggtgtccaacacctcctctctttctcctccgtcgtaatcgcaatgtctgctcaatcgaacaactgacccagccgaattacaagccgctcaccccccaaaaaacccgaagtccagcaaagattggggacgcgtaggcatcggagattgcctcgggagcgcgtttcctggtcaactaaggccggcatgaagggctgctcagagcgcttgctgtttctgctgctgctgctggcatcgtcgtcgttactgtccgctgtgattgccgcgcagcagacttgccccgccgacctcgacagcaaatgcgatggtggcgcgtctgatgatgattgggagggggagttcttccccggcgtcccgaaaatcaagtatgagggtccaacaagcaagaaccctcttgcttataagtggtataacaaggaggaagtgattctcggtaagaagatgaaggattggatgcgcttcagtgttgcattctggcacacgttccgtggtactggcgctgatcctttcggtgctcctacaaagacttggccttgggaggacggcacaaattctttggccatggctaagagaagaatgagagctcactttgagttcatggagaagttgggagttgacaaatggtgcttccatgacagggatattgccccggatgggaagactcttgaagaaacaaattctaacttggatgagatagtccagctggcaaagcagctgcagggtgagaccaatataaagccattgtggggtaccgcacagctctttatgcatccacgttacatgcatggcgctgctacgagcccagaggttaaagtatatgcttatgcggctgcacaagttaagaaagctttggaggtcactcactacctaggtggtgaaaactatgtgttctggggtggaagagagggttaccaaactcttctgaatactgatatgaagagagaacttgaccatctggctaactttcttcaagctgctgttgactacaagaagaagattggattcaacggaacactattgatagagcctaaaccacaggaaccaacaaaacaccagtatgactgggatgttgcgactacgtttgcttttctacagaagtacggtcttacaggagagttcaagattaatgttgagtgcaaccatgctactctatctggacacagctgccatcatgaattggagactgcacggattaatgggctgcttggaaatatcgatgcaaacactggtgatcctcaagttggttgggacacagatcagttcatgacagacattgcagaggctactttggttatgtcaagtgtagttaagaatggtggacttgcacctggtggtttcaactttgatgccaaattgcggagggaaagtactgatgttgaggacatgtttcttgcccatatctccggaatggacaccctggcacgtggcctccgtaacgttgccaagctgattggggatggttccctagatgatcttgtccgcaagcggtaccagagctttgatagtgagattggtgccttgatcgaggctgggaaaggagactttgagacgctagaaaagaaggttctagagtggggtgagcccactgttgcatccggcaaacaggaactggcggagattctgttccagtctgccctatagatgatggtgccatgtccataggtccaggaataagcaagggtgcgccctcctccgaacacgcactcgtcctcctcaccacggggatgttatggttccgtgcgatggactacctacaatacagcatggaactgagataattaggatgtaatctgtcagaaaatttccagaattgttacctccttttgtttagagtggattagtggaatcaaactggagttagttaaagcttatcctacattttggtgtggcgatcgtgtttggtacttccttgaatgctgtttcatagtgtggcaacgatgttgctgcttagtcctacaactggtggtagtaatgtatcatagttcgaacgtttcttcacaataaattatgatctttaataaattttattagttcaaaaataaataaaaatagagttcgattttaatctaatt

SEQ ID NO: 70675 - DNA, 2075 bp, Zea Mays
gcctaagcgtccgctcattttggtgtccaacacctcctctctttctcctccgtcgtaatcgcaatgtctgctcaatcgaacaactgacccagccgaattacaagccgctcaccccccaaaaaacccgaagtccagcaaagattggggacgcgtaggcatcggagattgcctcgggagcgcgtttcctggtcaactaaggccggcatgaagggctgctcagagcgcttgctgtttctgctgctgctgctggcatcgtcgtcgttactgtccgctgtgattgccgcgcagcagacttgccccgccgacctcgacagcaaatgcgatggtggcgcgtctgatgatgattgggagggggagttcttccccggcgtcccgaaaatcaagtatgagggtccaacaagcaagaaccctcttgcttataagtggtataacaaggaggaagtgattctcggtaagaagatgaaggattggatgcgcttcagtgttgcattctggcacacgttccgtggtactggcgctgatcctttcggtgctcctacaaagacttggccttgggaggacggcacaaattctttggccatggctaagagaagaatgagagctcactttgagttcatggagaagttgggagttgacaaatggtgcttccatgacagggatattgccccggatgggaagactcttgaagaaacaaattctaacttggatgagatagtccagctggcaaagcagctgcagggtgagaccaatataaagccattgtggggtaccgcacagctctttatgcatccacgttacatgcatggcgctgctacgagcccagaggttaaagtatatgcttatgcggctgcacaagttaagaaagctttggaggtcactcactacctaggtggtgaaaactatgtgttctggggtggaagagagggttaccaaactcttctgaatactgatatgaagagagaacttgaccatctggctaactttcttcaagctgctgttgactacaagaagaagattggattcaacggaacactattgatagagcctaaaccacaggaaccaacaaaacaccagtatgactgggatgttgcgactacgtttgcttttctacagaagtacggtcttacaggagagttcaagattaatgttgagtgcaaccatgctactctatctggacacagctgccatcatgaattggagactgcacggattaatgggctgcttggaaatatcgatgcaaacactggttgggacacagatcagttcatgacagacattgcagaggctactttggttatgtcaagtgtagttaagaatggtggacttgcacctggtggtttcaactttgatgccaaattgcggagggaaagtactgatgttgaggacatgtttcttgcccatatctccggaatggacaccctggcacgtggcctccgtaacgttgccaagctgattggggatggttccctagatgatcttgtccgcaagcggtaccagagctttgatagtgagattggtgccttgatcgaggctgggaaaggagactttgagacgctagaaaagaaggttctagagtggggtgagcccactgttgcatccggcaaacaggaactggcggagattctgttccagtctgccctatagatgatggtgccatgtccataggtccaggaataagcaagggtgcgccctcctccgaacacgcactcgtcctcctcaccacggggatgttatggttccgtgcgatggactacctacaatacagcatggaactgagataattaggatgtaatctgtcagaaaatttccagaattgttacctccttttgtttagagtggattagtggaatcaaactggagttagttaaagcttatcctacattttggtgtggcgatcgtgtttggtacttccttgaatgctgtttcatagtgtggcaacgatgttgctgcttagtcctacaactggtggtagtaatgtatcatagttcgaacgtttcttcacaataaattatgatctttaataaattttattagttcaaaaataaataaaaatagagttcgattttaatctaatt

SEQ ID NO: 70676 - DNA, 2166 bp, Zea Mays
cgcggaccgtccgggcctaagcgtccgctcattttggtgtccaacacctcctctctttctcctccgtcgtaatcgcaatgtctgctcaatcgaacaactgacccagccgaattacaagccgctcaccccccaaaaaacccgaaaaaagaaaactctgttcaaccacccgccgagttcagcagcactctcctccgccctcttccaggtccagcaaagattggggacgcgtaggcatcggagattgcctcgggagcgcgtttcctggtcaactaaggccggcatgaagggctgctcagagcgcttgctgtttctgctgctgctgctggcatcgtcgtcgttactgtccgctgtgattgccgcgcagcagacttgccccgccgacctcgacagcaaatgcgatggtggcgcgtctgatgatgattgggagggggagttcttccccggcgtcccgaaaatcaagtatgagggtccaacaagcaagaaccctcttgcttataagtggtataacaaggaggaagtgattctcggtaagaagatgaaggattggatgcgcttcagtgttgcattctggcacacgttccgtggtactggcgctgatcctttcggtgctcctacaaagacttggccttgggaggacggcacaaattctttggccatggctaagagaagaatgagagctcactttgagttcatggagaagttgggagttgacaaatggtgcttccatgacagggatattgccccggatgggaagactcttgaagaaacaaattctaacttggatgagatagtccagctggcaaagcagctgcagggtgagaccaatataaagccattgtggggtaccgcacagctctttatgcatccacgttacatgcatggcgctgctacgagcccagaggttaaagtatatgcttatgcggctgcacaagttaagaaagctttggaggtcactcactacctaggtggtgaaaactatgtgttctggggtggaagagagggttaccaaactcttctgaatactgatatgaagagagaacttgaccatctggctaactttcttcaagctgctgttgactacaagaagaagattggattcaacggaacactattgatagagcctaaaccacaggaaccaacaaaacaccagtatgactgggatgttgcgactacgtttgcttttctacagaagtacggtcttacaggagagttcaagattaatgttgagtgcaaccatgctactctatctggacacagctgccatcatgaattggagactgcacggattaatgggctgcttggaaatatcgatgcaaacactggtgatcctcaagttggttgggacacagatcagttcatgacagacattgcagaggctactttggttatgtcaagtgtagttaagaatggtggacttgcacctggtggtttcaactttgatgccaaattgcggagggaaagtactgatgttgaggacatgtttcttgcccatatctccggaatggacaccctggcacgtggcctccgtaacgttgccaagctgattggggatggttccctagatgatcttgtccgcaagcggtaccagagctttgatagtgagattggtgccttgatcgaggctgggaaaggagactttgagacgctagaaaagaaggttctagagtggggtgagcccactgttgcatccggcaaacaggaactggcggagattctgttccagtctgccctatagatgatggtgccatgtccataggtccaggaataagcaagggtgcgccctcctccgaacacgcactcgtcctcctcaccacggggatgttatggttccgtgcgatggactacctacaatacagcatggaactgagataattaggatgtaatctgtcagaaaatttccagaattgttacctccttttgtttagagtggattagtggaatcaaactggagttagttaaagcttatcctacattttggtgtggcgatcgtgtttggtacttccttgaatgctgtttcatagtgtggcaacgatgttgctgcttagtcctacaactggtggtagtaatgtatcatagttcgaacgtttcttcacaataaattatgatctttaataaattttattagttcaaaaataaataaaaatagagttcgattttaatctaatt

SEQ ID NO: 70677 - DNA, 4332 bp, Zea Mays
ctccagaatagcagggacgggcttgttgtagctatccaccagaaaccttatcatgttggcaatctgtcacccacaattaatagacatcagcaggaatacaacttataagatgggcgtttcttctattacctagctggtacagtggtactactgttcatgatttacataatgctcctagaacctttccccaccatttctcgaatatcagtaggggtatccaaaagcaaattgcccaacgattggcactgatgaacacacgctgtacttaattacagcttgacttaaaagagctggaagaaaggttcagtaaattaatctgcaagtaaaaagggccaccaacaaggaggataataaacaatatttatagtaaaaggagatgagactaccaaaggataatactgggagaaaaggaactggaacctaagtccaagtatcaaagcattatcttgatcaaaatgccaactttatcctgaagcacaacaatctagcaggagtttgaaaagcctactagtttagagccgctactcttagtatacaagtgaaaactcgaagacagctttgaaggttccaacaagcttgctggaattgtttacacttcatagaagggagatgcctccaaagaaactaaacaaaattaattgagctgaaaaaaaaatcataacctcccctctccctttttcccttgtctatctatatatacatatgatatgcttaaaaggatctgacttaacaatgcatcaatgtataaataatatgcatgcttgtgtggtggttcacttacatactgactgatgagcacaatagcaatatcctccctcgtagtaaattctttgaacgcatcctcgatttgtttaactgtcgtctctgtggcatgaaacaacaaacagtattgataatgaaccatcaggatcaacaacagtaactaatgtatgaagtaatgcagcacaaataatggggattgcagaatgaaataatgactagagatcctagtcactgatatggttacaaggtacaaggtaaaagcatcattcaagattatctgcatcagctgcacaagtacatgaaagctcacaaataaggaaaccagtactaggaaggaaaacccagatatatgatatatcctaatatagtaggcctgctttggtccgacggcatcagttaactgcatgtgaaaagcattatatcttactgtaagatccattagcaagaaacggccaaggtaagaaacagtatgacccatgtgactggaagggattttgttgtggaaggaacatgacatgaagcagaaatatatgcaccacgctactgtaagatccattaccacaaaaaaaacatagggaatcaaaagcgagagagagaggtgcatgagtgaaagtgactgttttgcaggaacatgaaatgaagcagaaacatatagtgcatgctactgcaagatccatcaccacgaaatacatgtatgagtgaagggattgttttgcaaggaacatgaaatgaggaagaaacatggtgcacgctactgtaagatacaacaccatttaacgcctagggaaacaaagatttcagaggtgtatgaatgaaagggtcagagagtataacaaaacagcggttgtaagctagtactaggcttctttgctgtctgcttgggtgtaagctgtacaagtacaagttcctcttgtgagctctagaactcatctatggatttgtataagagcagagtgtaaagggaagacccagtgccagaggctccgacatgagtagagtctggggcagggataacccgaggcaagcctaaacccttcctggtcctaggggtagaagacgaccacaaaagaggagggctgagggtactggaagcagcagcacttggctacctggcatcagagatggaggtgaggagattcggccacaaagcctgtcagattctcaaatccctcagcaaattggttgattcaccttctcggaggcaagatgaactgccagcagggaacacagagaagggacgatggtggaggcttcagtgcttacagagatacagatgatgcttaaagaagggaagggaatgaaacccggagggccctccccctgtccaacgaaagtcgaggtggtgattacagaggattcatccagaatagagatgagatgtggagggatgaccatgggaactatgttttagtcaggaaaccctaggttcctacagagattatagtactggccgcacttacaaacgtcgatccacgggaaaaatgacagcatgatggaaattgagaaggatctgaggcaaaacctgagaaatagagatgaaagaaccttcctgagaaccaaaatagagctatgtatgataacaggcagaatttcaatagaagaaccaaacctgggaaagatattacatactataactgcaatgggaccagtcaccatcatggacaatgtccaaatcaacctttcttatagaactgcaagaacagtgaacacaaagaacagtggacacaaagctatgttttgtttcagcattcacatcccctctgataagggtaaaggtaaacagtaaaaggttttaagcttgatgagaattattgagggagaagcaacattgcaaatcataagaattgaaatgtatttaaatatatgagcatggttagaaaaatcaggaagttgtctcccgaaaaaattctggtttacttttccttctgaatagataaggcaacaccttacaagattttagagagtgaaatttagaactcatgagatcattgaaacggtagagaacgtgctagaaacagttttttgtgtgaaaaatcgcgaaccctgaaatggaaaacgatcgagatgcagagggggagaggaggaagattcgccaagaaccgatttaggaatagccgagctcgctaagaaattagaaggaaaagaaaaacgtaagcaacaaagagaaaggctcaacatcccatcaaggcaggaaaggccaaggagactgtaatgtctaaaagtctaaatccacagaaagtaaacctgatgattccatggagttagacccagctacgattgactcccaagaagaattggtggattatgaacttgaccccttggagcaggaaaaattagaggtgaaaattattgaccaaaactttaaagagagaacaaaaaagctttctaatgtgctcaacaatgactccagtgcaattcatttgccaccagattggaaaaatatggacatggtgccagatactagtcatactacagacaaggagaagcagagttcagacatcctgaaggttggagaagcaaaccaagggagagttattaccaagatctcggccattgctacaagatcaagctcaagagttgctgatctgggagaaggaaattgtgacatcaagtcaggtactagttctctcactgccttctctacttctgatcctgaatcattaatgcattttacttcattttgcaatattaaattgggacacgacctagtagaatcactagatactatccctaccatccaagatcaagaagcagccaatgctgcctgggcagaaaataaagtaaggactgtccagtccaaggattgggttgatgtcaataatgcttccaacgaagaagctttattgactttttcagagttgtaaatcagtctgcagaaacacagacacctgtgagtccctcctcggatgtgagagatgcaggacatagaaccttcaggatgtctgaactctgctacagttcaatgaaggatcacttagttcagtttttgtgtagtttcatgtatgggtgaatttatggaccgttgaaacaagaaccagtgtggcagtgcataacattaagcagtgaaccttgagatgatagtagagagcagtgggcttcttggcttattaattgagccaagtgtgctgagggttcaacatacagtgtcccgtggaccatcaaggtcttgcagggaagtggtgtggatcgacacacaccatttgcagttctgccgatgacttacctaggaattctagtatgtagctactactccctctgtttcaaattggaagtcattctggcttttatagataagtagctttgagtgtgtattagagataatgtgtatccaggtgcttacaatttggaacggggggaatacttaagagcggcaggttttatttagctatttactagatgagaaggtgatgaaaagaatgggcacttggcaaagtcctttcctgtcttcaggggtaactccataatagcgatattgatgatagataataaggctcagcaataataatatgcagcagtaaagaggatattcgtttcactcactgttgtcgacgaggaggtagttggttttct

SEQ ID NO: 70678 - DNA, 329 bp, Zea Mays
attgccacgttacttcccatatatctataaagtgagccttcaacttcaggaagagtagtacgacatgtttcctcatttgtggatggaactgaggattctgaagatgaagcagaggttaaggggatcaaaagaaaaaggaaaaataagaaggttaaaactcatcaaggtgacaaacaacagagcaagaaaaagaagaaaaataaaaagaaaaagggcaaaggtaatgcaatataggttttttgttctctcttgttttttcatgtaaaagaatttggttggcagctgggcaccgtactgaaactatgccaccgtaccattgctgaacctac

SEQ ID NO: 70679 - DNA, 577 bp, Zea Mays
cccacatgtcatgcagagatggtcagccagccaggcaagcattaaaagccagtgtccggtcgggccgcgtacctggttcgaccagaccagaactcaaccggtcgcgcttccttcttcaccctcagtcctcttccgtcctcctcctgtccaccgccccgtgcagttcggcggcgacatggcggcggccggcgacctgtccgacgatgagaagcgggcgatgaggggcagcaagttcgcgccgcttcctccgcctcctccctcttcccgcccccagccgaggtgagccttcaacttcaggaagagtagtacgacatgtttcctcatttgtggatggaactgaggattctgaagatgaagcagaggttaaggggatcaaaagaaaaaggaaaaataagaaggttaaaactcatcaaggtgacaaacaacagagcaagaaaaagaagaaaaataaaaagaaaaagggcaaaggtaatgcaatataggttttttgttctctcttgttttttcatgtaaaagaatttggttggcagctgggcaccgtactgaaactatgccaccgtaccattgctgaacctac

SEQ ID NO: 70680 - DNA, 2725 bp, Zea Mays
tttgctttgttttgcatctgggttcagtggaaaagttactgcagtactctctccctcctagcgttccagagcttcggcgtggtgtatggagacttgagcacatcgcctttgtatgtctacagaaactcactgtctgggagactgaacggttaccttgatgagacaaccatctttgggttgttttctctggtgttttggaccttcacacttgttccgttgctgaagtatgtcataattgtcttgagcgcggatgataatggggaaggtggagcttttgctttgtactcacttctttgcaggcatgcaaaattcagtctgctgccaaaccagcaagcagcagatgaagagctgtcaacttattaccatccaggcactgatcgagctgtggtttcctctccattcaaaaggtttctggagaagcacaggaagctgcggacctgtttacttctttttgtactgtttggtgcgtgcatggtgataggtgatggtgtctttacaccaactatatctgttctgtcagccatctctggattacaagatcctgccacaagtggactaggagatggatggatcgtattcatcgcatgtgttatgcttgttggtctctttgctctgcagcaccgaggtactcataaggtggcattcttgttcgctccgattattgtgctctggctcttgagcattggtatcattggactatataacatcatccgttggaatcctagaatatttgttgctctttctccacactatattgtaaagtttttcaagaaaactggaaaagatggttggatatctcttggtggggtacttcttgctatcacaggtaccgaagctatgtttgccgatcttggccacttctctgctgcatctatcaggttggcttttgtcagtgtcatatatccctgtcttgtgctgcaatacatgggacaggctgcgtttctgtctaaaaacataccagctgtatataacagtttttatctttctattccaagtcctttattttggcctgtgttcgtcatagcaactcttgctgcaattttgggcagccaagctattatatctgcaaccttttctatcgttaagcagtgccttgccttgggatgctttccacgggtaaaggtcgtgcatacttcaaggtggatccgtggccagatttacatacctgagataaattggattctgatggtcctctgtttagctgtgacacttggcttccgtgacataacagtgataggaaatgcttatggtctcgcgtgcatcactgtgatgtttgtcaccacctgtctgatgtcattggtcatcatcttcgtgtggcaaaagaatctcctcatctccttgctattcttcgtattctttggggcactcgaaggcgcctacctgtctgcagcagtgatgaaggttccccagggaggctgggctccgatcgcgctatccgccgtgttcatgttcatcatgtacgtgtggcactacggcacgcggcggaagtacctgttcgacctccagaacaaggtgtccatgagatggatcctgaacctgggcccgagcctgggcatcgtgcgcgtgcccgggatcggcctcatctacacggagctggtgacgggcgtgccggccatcttctcccacttcgtcaccaacctgccggcgttccaccaggtgctggtcttcgtgtgcgtcaagtccgtgccggtgccgtacgtgcccatggacgagcggtacctcatcgggcggatcggccccagggagtaccgcatgtaccggtgcatcgtcagatggaggccgaggagtcggcctcgtcggggacggggaggagctacgagtcgtcgacggagggcaggatggcggtcgtgcacaccaccggcacgacggggaccgggctggtgatgatggcctccgccgaggacgcggaaggcacgtccctgtccaggagcagcaagtcggagacgctccggagcctgcagtccatctacgagcaggagtccgccggcaccgtcagccggcggcggaggagggtgcggttccagatcgacgaggaggagcggatcgagccgcaggtgagggacgagctgtccgacctcctggaggccaaggaggccggcgcggcctacatcatcggccactcgtacgtgaaggcgaggaagaactccaatttcctcaagacgttcgccatcaactacgcctactccttcctccggaagaactgcagggggccgtcggtgacgctgcacatcccccacatcagcctcatcgaggtcggcatgatctactacgtgtaagtgtaacccaggcggcctgccctcaaagtcaaagcagcacggggggattttcattttctttcgggtgatacgatatgcttgttttggacccagacttactgctggagatactctctccgtttctttttatttgtcgctggatagtgtaaaattacagtatccagcgacaaaaataaaaagaaacagatgaagtaattagttagttttgtctctgctctgcaccgtatctgtatcgtagtttcatcaaggtggtggcataagacacacagtagccgaatcggccggttgccaccgtttgttcaccagagctttcggtaaccctttgtaaatagattctgttcatcatggaaattaagcattgtagcttgtcaataggctacagctagcatacagatttgagcatccttcctttgcacttcatatatacagcatacataattgcatttctc

SEQ ID NO: 70681 - DNA, 2848 bp, Zea Mays
ctgagtttgctttgttttgcatctgggttcagtggaaaagttactgcagtactctctccctcctagcgttccagagcttcggcgtggtgtatggagacttgagcacatcgcctttgtatgtctacagaaactcactgtctgggagactgaacggttaccttgatgagacaaccatctttgggttgttttctctggtgttttggaccttcacacttgttccgttgctgaagtatgtcataattgtcttgagcgcggatgataatggggaagaaaacaccttagcttaggacatgcaactttgtgcaacaagtggagcttttgctttgtactcacttctttgcaggcatgcaaaattcagtctgctgccaaaccagcaagcagcagatgaagagctgtcaacttattaccatccaggcactgatcgagctgtggtttcctctccattcaaaaggtttctggagaagcacaggaagctgcggacctgtttacttctttttgtactgtttggtgcgtgcatggtgataggtgatggtgtctttacaccaactatatctgttctgtcagccatctctggattacaagatcctgccacaagtggactaggagatggatggatcgtattcatcgcatgtgttatgcttgttggtctctttgctctgcagcaccgaggtactcataaggtggcattcttgttcgctccgattattgtgctctggctcttgagcattggtatcattggactatataacatcatccgttggaatcctagaatatttgttgctctttctccacactatattgtaaagtttttcaagaaaactggaaaagatggttggatatctcttggtggggtacttcttgctatcacaggtaccgaagctatgtttgccgatcttggccacttctctgctgcatctatcaggttggcttttgtcagtgtcatatatccctgtcttgtgctgcaatacatgggacaggctgcgtttctgtctaaaaacataccagctgtatataacagtttttatctttctattccaagtcctttattttggcctgtgttcgtcatagcaactcttgctgcaattttgggcagccaagctattatatctgcaaccttttctatcgttaagcagtgccttgccttgggatgctttccacgggtaaaggtcgtgcatacttcaaggtggatccgtggccagatttacatacctgagataaattggattctgatggtcctctgtttagctgtgacacttggcttccgtgacataacagtgataggaaatgcttatggtctcgcgtgcatcactgtgatgtttgtcaccacctgtctgatgtcattggtcatcatcttcgtgtggcaaaagaatctcctcatctccttgctattcttcgtattctttggggcactcgaaggcgcctacctgtctgcagcagtgatgaaggttccccagggaggctgggctccgatcgcgctatccgccgtgttcatgttcatcatgtacgtgtggcactacggcacgcggcggaagtacctgttcgacctccagaacaaggtgtccatgagatggatcctgaacctgggcccgagcctgggcatcgtgcgcgtgcccgggatcggcctcatctacacggagctggtgacgggcgtgccggccatcttctcccacttcgtcaccaacctgccggcgttccaccaggtgctggtcttcgtgtgcgtcaagtccgtgccggtgccgtacgtgcccatggacgagcggtacctcatcgggcggatcggccccagggagtaccgcatgtaccggtgcatcgtcaggtacgggtacaaggacgtgcagaaggacgacgagaacttcgagaacaacctggtgatgagcatcgcccggttcatccagatggaggccgaggagtcggcctcgtcggggacggggaggagctacgagtcgtcgacggagggcaggatggcggtcgtgcacaccaccggcacgacggggaccgggctggtgatgatggcctccgccgaggacgcggaaggcacgtccctgtccaggagcagcaagtcggagacgctccggagcctgcagtccatctacgagcaggagtccgccggcaccgtcagccggcggcggaggagggtgcggttccagatcgacgaggaggagcggatcgagccgcaggtgagggacgagctgtccgacctcctggaggccaaggaggccggcgcggcctacatcatcggccactcgtacgtgaaggcgaggaagaactccaatttcctcaagacgttcgccatcaactacgcctactccttcctccggaagaactgcagggggccgtcggtgacgctgcacatcccccacatcagcctcatcgaggtcggcatgatctactacgtgtaagtgtaacccaggcggcctgccctcaaagtcaaagcagcacggggggattttcattttctttcgggtgatacgatatgcttgttttggacccagacttactgctggagatactctctccgtttctttttatttgtcgctggatagtgtaaaattacagtatccagcgacaaaaataaaaagaaacagatgaagtaattagttagttttgtctctgctctgcaccgtatctgtatcgtagtttcatcaaggtggtggcataagacacacagtagccgaatcggccggttgccaccgtttgttcaccagagctttcggtaaccctttgtaaatagattctgttcatcatggaaattaagcattgtagcttgtcaataggctacagctagcatacagatttgagcatccttcctttgcacttcatatatacagcatacataattgcatttctc

SEQ ID NO: 70682 - DNA, 3045 bp, Zea Mays
ctctcccccctccttcgtctcgacggcctcgcctgtatataaactagacgaggggaagcttccctcctccgccttatcccgccgttttgtagtggcttcgtctttagcttgggcctcgcttccacttcgtagctgcctacgcgctcgcgactcgcctggtcgcttccggttgaagggccgggccgcaatggacgaagaggtcggcgccgccgggcggcagcaggttcagtggaaaagttactgcagtactctctccctcctagcgttccagagcttcggcgtggtgtatggagacttgagcacatcgcctttgtatgtctacagaaactcactgtctgggagactgaacggttaccttgatgagacaaccatctttgggttgttttctctggtgttttggaccttcacacttgttccgttgctgaagtatgtcataattgtcttgagcgcggatgataatggggaagaaaacaccttagcttaggacatgcaactttgtgcaacaagtggagcttttgctttgtactcacttctttgcaggcatgcaaaattcagtctgctgccaaaccagcaagcagcagatgaagagctgtcaacttattaccatccaggcactgatcgagctgtggtttcctctccattcaaaaggtttctggagaagcacaggaagctgcggacctgtttacttctttttgtactgtttggtgcgtgcatggtgataggtgatggtgtctttacaccaactatatctgttctgtcagccatctctggattacaagatcctgccacaagtggactaggagatggatggatcgtattcatcgcatgtgttatgcttgttggtctctttgctctgcagcaccgaggtactcataaggtggcattcttgttcgctccgattattgtgctctggctcttgagcattggtatcattggactatataacatcatccgttggaatcctagaatatttgttgctctttctccacactatattgtaaagtttttcaagaaaactggaaaagatggttggatatctcttggtggggtacttcttgctatcacaggtaccgaagctatgtttgccgatcttggccacttctctgctgcatctatcaggttggcttttgtcagtgtcatatatccctgtcttgtgctgcaatacatgggacaggctgcgtttctgtctaaaaacataccagctgtatataacagtttttatctttctattccaagtcctttattttggcctgtgttcgtcatagcaactcttgctgcaattttgggcagccaagctattatatctgcaaccttttctatcgttaagcagtgccttgccttgggatgctttccacgggtaaaggtcgtgcatacttcaaggtggatccgtggccagatttacatacctgagataaattggattctgatggtcctctgtttagctgtgacacttggcttccgtgacataacagtgataggaaatgcttatggtctcgcgtgcatcactgtgatgtttgtcaccacctgtctgatgtcattggtcatcatcttcgtgtggcaaaagaatctcctcatctccttgctattcttcgtattctttggggcactcgaaggcgcctacctgtctgcagcagtgatgaaggttccccagggaggctgggctccgatcgcgctatccgccgtgttcatgttcatcatgtacgtgtggcactacggcacgcggcggaagtacctgttcgacctccagaacaaggtgtccatgagatggatcctgaacctgggcccgagcctgggcatcgtgcgcgtgcccgggatcggcctcatctacacggagctggtgacgggcgtgccggccatcttctcccacttcgtcaccaacctgccggcgttccaccaggtgctggtcttcgtgtgcgtcaagtccgtgccggtgccgtacgtgcccatggacgagcggtacctcatcgggcggatcggccccagggagtaccgcatgtaccggtgcatcgtcaggtacgggtacaaggacgtgcagaaggacgacgagaacttcgagaacaacctggtgatgagcatcgcccggttcatccagatggaggccgaggagtcggcctcgtcggggacggggaggagctacgagtcgtcgacggagggcaggatggcggtcgtgcacaccaccggcacgacggggaccgggctggtgatgatggcctccgccgaggacgcggaaggcacgtccctgtccaggagcagcaagtcggagacgctccggagcctgcagtccatctacgagcaggagtccgccggcaccgtcagccggcggcggaggagggtgcggttccagatcgacgaggaggagcggatcgagccgcaggtgagggacgagctgtccgacctcctggaggccaaggaggccggcgcggcctacatcatcggccactcgtacgtgaaggcgaggaagaactccaatttcctcaagacgttcgccatcaactacgcctactccttcctccggaagaactgcagggggccgtcggtgacgctgcacatcccccacatcagcctcatcgaggtcggcatgatctactacgtgtaagtgtaacccaggcggcctgccctcaaagtcaaagcagcacggggggattttcattttctttcgggtgatacgatatgcttgttttggacccagacttactgctggagatactctctccgtttctttttatttgtcgctggatagtgtaaaattacagtatccagcgacaaaaataaaaagaaacagatgaagtaattagttagttttgtctctgctctgcaccgtatctgtatcgtagtttcatcaaggtggtggcataagacacacagtagccgaatcggccggttgccaccgtttgttcaccagagctttcggtaaccctttgtaaatagattctgttcatcatggaaattaagcattgtagcttgtcaataggctacagctagcatacagatttgagcatccttcctttgcacttcatatatacagcatacataattgcatttctc

SEQ ID NO: 70683 - DNA, 2920 bp, Zea Mays
tgggcatcaagctccatccaattttcccccgcgctctcctgttaagctctcccccctccttcgtctcgacggcctcgcctgtatataaactagacgaggggaagcttccctcctccgccttatcccgccgttttgtagtggcttcgtctttagcttgggcctcgcttccacttcgtagctgcctacgcgctcgcgactcgcctggtcgcttccggttgaagggccgggccgcaatggacgaagaggtcggcgccgccgggcggcagcaggttcagtggaaaagttactgcagtactctctccctcctagcgttccagagcttcggcgtggtgtatggagacttgagcacatcgcctttgtatgtctacagaaactcactgtctgggagactgaacggttaccttgatgagacaaccatctttgggttgttttctctggtgttttggaccttcacacttgttccgttgctgaagtatgtcataattgtcttgagcgcggatgataatggggaaggtggagcttttgctttgtactcacttctttgcaggcatgcaaaattcagtctgctgccaaaccagcaagcagcagatgaagagctgtcaacttattaccatccaggcactgatcgagctgtggtttcctctccattcaaaaggtttctggagaagcacaggaagctgcggacctgtttacttctttttgtactgtttggtgcgtgcatggtgataggtgatggtgtctttacaccaactatatctgttctgtcagccatctctggattacaagatcctgccacaagtggactaggagatgcaccgaggtactcataaggtggcattcttgttcgctccgattattgtgctctggctcttgagcattggtatcattggactatataacatcatccgttggaatcctagaatatttgttgctctttctccacactatattgtaaagtttttcaagaaaactggaaaagatggttggatatctcttggtggggtacttcttgctatcacaggtaccgaagctatgtttgccgatcttggccacttctctgctgcatctatcaggttggcttttgtcagtgtcatatatccctgtcttgtgctgcaatacatgggacaggctgcgtttctgtctaaaaacataccagctgtatataacagtttttatctttctattccaagtcctttattttggcctgtgttcgtcatagcaactcttgctgcaattttgggcagccaagctattatatctgcaaccttttctatcgttaagcagtgccttgccttgggatgctttccacgggtaaaggtcgtgcatacttcaaggtggatccgtggccagatttacatacctgagataaattggattctgatggtcctctgtttagctgtgacacttggcttccgtgacataacagtgataggaaatgcttatggtctcgcgtgcatcactgtgatgtttgtcaccacctgtctgatgtcattggtcatcatcttcgtgtggcaaaagaatctcctcatctccttgctattcttcgtattctttggggcactcgaaggcgcctacctgtctgcagcagtgatgaaggttccccagggaggctgggctccgatcgcgctatccgccgtgttcatgttcatcatgtacgtgtggcactacggcacgcggcggaagtacctgttcgacctccagaacaaggtgtccatgagatggatcctgaacctgggcccgagcctgggcatcgtgcgcgtgcccgggatcggcctcatctacacggagctggtgacgggcgtgccggccatcttctcccacttcgtcaccaacctgccggcgttccaccaggtgctggtcttcgtgtgcgtcaagtccgtgccggtgccgtacgtgcccatggacgagcggtacctcatcgggcggatcggccccagggagtaccgcatgtaccggtgcatcgtcagatggaggccgaggagtcggcctcgtcggggacggggaggagctacgagtcgtcgacggagggcaggatggcggtcgtgcacaccaccggcacgacggggaccgggctggtgatgatggcctccgccgaggacgcggaaggcacgtccctgtccaggagcagcaagtcggagacgctccggagcctgcagtccatctacgagcaggagtccgccggcaccgtcagccggcggcggaggagggtgcggttccagatcgacgaggaggagcggatcgagccgcaggtgagggacgagctgtccgacctcctggaggccaaggaggccggcgcggcctacatcatcggccactcgtacgtgaaggcgaggaagaactccaatttcctcaagacgttcgccatcaactacgcctactccttcctccggaagaactgcagggggccgtcggtgacgctgcacatcccccacatcagcctcatcgaggtcggcatgatctactacgtgtaagtgtaacccaggcggcctgccctcaaagtcaaagcagcacggggggattttcattttctttcgggtgatacgatatgcttgttttggacccagacttactgctggagatactctctccgtttctttttatttgtcgctggatagtgtaaaattacagtatccagcgacaaaaataaaaagaaacagatgaagtaattagttagttttgtctctgctctgcaccgtatctgtatcgtagtttcatcaaggtggtggcataagacacacagtagccgaatcggccggttgccaccgtttgttcaccagagctttcggtaaccctttgtaaatagattctgttcatcatggaaattaagcattgtagcttgtcaataggctacagctagcatacagatttgagcatccttcctttgcacttcatatatacagcatacataattgcatttctc

SEQ ID NO: 70684 - DNA, 3558 bp, Zea Mays
ctacgccacgccagacgcccagacggcgacgtgggcatcaagctccatccaattttcccccgcgctctcctgttaagctctcccccctccttcgtctcgacggcctcgcctgtatataaactagacgaggggaagcttccctcctccgccttatcccgccgttttgtagtggcttcgtctttagcttgggcctcgcttccacttcgtagctgcctacgcgctcgcgactcgcctggtcgcttccggttgaagggccgggccgcaatggacgaagaggtcggcgccgccgggcggcagcaggttcagtggaaaagttactgcagtactctctccctcctagcgttccagagcttcggcgtggtgtatggagacttgagcacatcgcctttgtatgtctacagaaactcactgtctgggagactgaacggttaccttgatgagacaaccatctttgggttgttttctctggtgttttggaccttcacacttgttccgttgctgaagtatgtcataattgtcttgagcgcggatgataatggggaaggtggagcttttgctttgtactcacttctttgcaggcatgcaaaattcagtctgctgccaaaccagcaagcagcagatgaagagctgtcaacttattaccatccaggcactgatcgagctgtggtttcctctccattcaaaaggtttctggagaagcacaggaagctgcggacctgtttacttctttttgtactgtttggtgcgtgcatggtgataggtgatggtgtctttacaccaactatatctgttctgtcagccatctctggattacaagatcctgccacaagtggactaggagatggatggatcgtattcatcgcatgtgttatgcttgttggtctctttgctctgcagcaccgaggtactcataaggtggcattcttgttcgctccgattattgtgctctggctcttgagcattggtatcattggactatataacatcatccgttggaatcctagaatatttgttgctctttctccacactatattgtaaagtttttcaagaaaactggaaaagatggttggatatctcttggtggggtacttcttgctatcacaggtaccgaagctatgtttgccgatcttggccacttctctgctgcatctatcaggttggcttttgtcagtgtcatatatccctgtcttgtgctgcaatacatgggacaggctgcgtttctgtctaaaaacataccagctgtatataacagtttttatctttctattccaagtcctttattttggcctgtgttcgtcatagcaactcttgctgcaattttgggcagccaagctattatatctgcaaccttttctatcgttaagcagtgccttgccttgggatgctttccacgggtaaaggtcgtgcatacttcaaggtggatccgtggccagatttacatacctgagataaattggattctgatggtcctctgtttagctgtgacacttggcttccgtgacataacagtgataggaaatgcttatggtaagcccctgaccatttcagtactgcataaactgggcaagtcctaccaagcgcatggattttattttggaaccatatggtgcttccgtttacgtcacctgcaaattctccatttcattcaagaccctaagtttaagccgttttcaactttgtggttgatatagacagtgcaccctctcattttgaccactaattgctatcatataccccgtacatttgtaccgtcacttttagttaaacaaatcaaatatcaatgaaatgtgcaactctatattttgcactaggcaattactgcgttttgcaacttatgaaggccagctgttattttttttcctttctatattagaaaccaaagctgccaattttcttggataggttgtaagtacggtgctcataactttggaggtggatagtcagtttgttggttctagcattctctccatatcttgatgcacattacatcgatattctctgccatcatatttttcacgaattcctcacactgaatcaaccatcggtgaataccgctcccttcgttggtatgatgatttcaggtctcgcgtgcatcactgtgatgtttgtcaccacctgtctgatgtcattggtcatcatcttcgtgtggcaaaagaatctcctcatctccttgctattcttcgtattctttggggcactcgaaggcgcctacctgtctgcagcagtgatgaaggttccccagggaggctgggctccgatcgcgctatccgccgtgttcatgttcatcatgtacgtgtggcactacggcacgcggcggaagtacctgttcgacctccagaacaaggtgtccatgagatggatcctgaacctgggcccgagcctgggcatcgtgcgcgtgcccgggatcggcctcatctacacggagctggtgacgggcgtgccggccatcttctcccacttcgtcaccaacctgccggcgttccaccaggtgctggtcttcgtgtgcgtcaagtccgtgccggtgccgtacgtgcccatggacgagcggtacctcatcgggcggatcggccccagggagtaccgcatgtaccggtgcatcgtcagatggaggccgaggagtcggcctcgtcggggacggggaggagctacgagtcgtcgacggagggcaggatggcggtcgtgcacaccaccggcacgacggggaccgggctggtgatgatggcctccgccgaggacgcggaaggcacgtccctgtccaggagcagcaagtcggagacgctccggagcctgcagtccatctacgagcaggagtccgccggcaccgtcagccggcggcggaggagggtgcggttccagatcgacgaggaggagcggatcgagccgcaggtgagggacgagctgtccgacctcctggaggccaaggaggccggcgcggcctacatcatcggccactcgtacgtgaaggcgaggaagaactccaatttcctcaagacgttcgccatcaactacgcctactccttcctccggaagaactgcagggggccgtcggtgacgctgcacatcccccacatcagcctcatcgaggtcggcatgatctactacgtgtaagtgtaacccaggcggcctgccctcaaagtcaaagcagcacggggggattttcattttctttcgggtgatacgatatgcttgttttggacccagacttactgctggagatactctctccgtttctttttatttgtcgctggatagtgtaaaattacagtatccagcgacaaaaataaaaagaaacagatgaagtaattagttagttttgtctctgctctgcaccgtatctgtatcgtagtttcatcaaggtggtggcataagacacacagtagccgaatcggccggttgccaccgtttgttcaccagagctttcggtaaccctttgtaaatagattctgttcatcatggaaattaagcattgtagcttgtcaataggctacagctagcatacagatttgagcatccttcctttgcacttcatatatacagcatacataattgcatttctc

SEQ ID NO: 70685 - DNA, 3017 bp, Zea Mays
cgggtttgcaggtctacgccacgccagacgcccagacggcgacgtgggcatcaagctccatccaattttcccccgcgctctcctgttaagctctcccccctccttcgtctcgacggcctcgcctgtatataaactagacgaggggaagcttccctcctccgccttatcccgccgttttgtagtggcttcgtctttagcttgggcctcgcttccacttcgtagctgcctacgcgctcgcgactcgcctggtcgcttccggttgaagggccgggccgcaatggacgaagaggtcggcgccgccgggcggcagcaggttcagtggaaaagttactgcagtactctctccctcctagcgttccagagcttcggcgtggtgtatggagacttgagcacatcgcctttgtatgtctacagaaactcactgtctgggagactgaacggttaccttgatgagacaaccatctttgggttgttttctctggtgttttggaccttcacacttgttccgttgctgaagtatgtcataattgtcttgagcgcggatgataatggggaaggtggagcttttgctttgtactcacttctttgcaggcatgcaaaattcagtctgctgccaaaccagcaagcagcagatgaagagctgtcaacttattaccatccaggcactgatcgagctgtggtttcctctccattcaaaaggtttctggagaagcacaggaagctgcggacctgtttacttctttttgtactgtttggtgcgtgcatggtgataggtgatggtgtctttacaccaactatatctgttctgtcagccatctctggattacaagatcctgccacaagtggactaggagatggatggatcgtattcatcgcatgtgttatgcttgttggtctctttgctctgcagcaccgaggtactcataaggtggcattcttgttcgctccgattattgtgctctggctcttgagcattggtatcattggactatataacatcatccgttggaatcctagaatatttgttgctctttctccacactatattgtaaagtttttcaagaaaactggaaaagatggttggatatctcttggtggggtacttcttgctatcacaggtaccgaagctatgtttgccgatcttggccacttctctgctgcatctatcaggttggcttttgtcagtgtcatatatccctgtcttgtgctgcaatacatgggacaggctgcgtttctgtctaaaaacataccagctgtatataacagtttttatctttctattccaagtcctttattttggcctgtgttcgtcatagcaactcttgctgcaattttgggcagccaagctattatatctgcaaccttttctatcgttaagcagtgccttgccttgggatgctttccacgggtaaaggtcgtgcatacttcaaggtggatccgtggccagatttacatacctgagataaattggattctgatggtcctctgtttagctgtgacacttggcttccgtgacataacagtgataggaaatgcttatggtctcgcgtgcatcactgtgatgtttgtcaccacctgtctgatgtcattggtcatcatcttcgtgtggcaaaagaatctcctcatctccttgctattcttcgtattctttggggcactcgaaggcgcctacctgtctgcagcagtgatgaaggttccccagggaggctgggctccgatcgcgctatccgccgtgttcatgttcatcatgtacgtgtggcactacggcacgcggcggaagtacctgttcgacctccagaacaaggtgtccatgagatggatcctgaacctgggcccgagcctgggcatcgtgcgcgtgcccgggatcggcctcatctacacggagctggtgacgggcgtgccggccatcttctcccacttcgtcaccaacctgccggcgttccaccaggtgctggtcttcgtgtgcgtcaagtccgtgccggtgccgtacgtgcccatggacgagcggtacctcatcgggcggatcggccccagggagtaccgcatgtaccggtgcatcgtcagatggaggccgaggagtcggcctcgtcggggacggggaggagctacgagtcgtcgacggagggcaggatggcggtcgtgcacaccaccggcacgacggggaccgggctggtgatgatggcctccgccgaggacgcggaaggcacgtccctgtccaggagcagcaagtcggagacgctccggagcctgcagtccatctacgagcaggagtccgccggcaccgtcagccggcggcggaggagggtgcggttccagatcgacgaggaggagcggatcgagccgcaggtgagggacgagctgtccgacctcctggaggccaaggaggccggcgcggcctacatcatcggccactcgtacgtgaaggcgaggaagaactccaatttcctcaagacgttcgccatcaactacgcctactccttcctccggaagaactgcagggggccgtcggtgacgctgcacatcccccacatcagcctcatcgaggtcggcatgatctactacgtgtaagtgtaacccaggcggcctgccctcaaagtcaaagcagcacggggggattttcattttctttcgggtgatacgatatgcttgttttggacccagacttactgctggagatactctctccgtttctttttatttgtcgctggatagtgtaaaattacagtatccagcgacaaaaataaaaagaaacagatgaagtaattagttagttttgtctctgctctgcaccgtatctgtatcgtagtttcatcaaggtggtggcataagacacacagtagccgaatcggccggttgccaccgtttgttcaccagagctttcggtaaccctttgtaaatagattctgttcatcatggaaattaagcattgtagcttgtcaataggctacagctagcatacagatttgagcatccttcctttgcacttcatatatacagcatacataattgcatttctc

SEQ ID NO: 70686 - DNA, 577 bp, Zea Mays
cccaagttcatctctgtaaaatcagaagcacaacaatcaacactcagtagtctgcataagcacaaccacaagagaatagaacactagtacactgtcgaaattccaaattaacaagaatagtcgttgcttcctgccttgccttcctttttgtccatgttgtgttgcacacagaatccaaaatcgtagcccgttgaggtgaaccatatggcaccagttgacatactctcacctttaccttgccatcatgaggtagccgcggagataaatagagagagagaggtagaggtctgtcggagatagagttcgtccacaccgtggtgctacctgatctagtggccaagatgctccaccaaacaattccggacgtggtcgaggcggtgtcaaacgcggagagcgatggagaagagagaaattgctcaccagagcaatttggccatcgcggtgttgccattggatgtgtccagcatcctccacagcgacaactccggtcaagagcaggtaccgccaagaggaggattatgaagatgagttcggagaggtctatgtcgttgtctcccagtcaactagggttgtggag

SEQ ID NO: 70687 - DNA, 2335 bp, Zea Mays
ctttgagggccgcgattaccgcacctcgaggaggcgaggtgaggcgtaaaaaactcaaacaacgtaaggtgttcgacacccggtcagcggcctcgacctctttcggtcgatccaactacaccattgcgctgaatcaatctgcccgctccgagcgcattctctggccgagccaatgcccgcctatcatcgaccccaccaaatgtagctctgtggtagggtccatgggattgtcttgcagaggaaacatcaaagttgttttaggtgttctcaatctctggaaagtctggttacacaggaaatgatgttcttcaagagcttgaaatactgactataaatgccaaagcagcacaagaggttatattgagtaaaattcttgagaagaatcaggctactgaatacctgaacaaattcatgaatgggtccgtagacatttctgccttcaagagccaggttccagtagtgacgtatgatgtggtccaaccctacattgcaaggattgccgctggtgaaaggtcttcaattttgtgtggagaacaaattgtagagctgctccgaagctcgggaacttctcagggtgaaccaagattgatgccatcaatctcagaggatatttaccgccgaatgtatctgtatagtctgatcatgcctatcatgagcaagtacatacgaggccttggcgaggggaaggcaatgtatcttctctttgtgaaagctgaaacattgacaaatgctggcattccagtccgatcagtcctcaccagctactacaagagccctcagttcttgcagcgcaagcacgacctctacaacagctacaccagtcccgacgaggtcattctttgccccgacagccagcagagcatgtactgccagctactctgcggcctggtggaacgccagaacgtcgtccgtctcggagcagtcttcgcctcagcattcctccggtccatcagcttcctcgagaagcactggcatgacctagtcaccgacatccgaaccggccggatcaatcccagcatcaccaacgccgcatgccgggtggccacggagagctttctcgcgcagcccaaccccgagctagctgacgaagtcgaggcgatatgcagctcggagtcatggaagggcgttcttggcaggctctggcctaacgtcaagtacatcgaggccgtcctgacggggacgatggcgcagtacgtccccatgctcgagttctacagcgacggcaggatccccctggtctgcaccatgtacgcttcctcggagagctacttcggcgtcaacctgcggccgctgtgcagcccgaaggacgtgtcctacaccatcctccccaacatggcctacttcgagttcgtgccgttggacgacggcctcaggctggcggaggatggtgaggctgtggagaaggagaagcttgtcggcctcgtggacgtcaaggtcggatgctactacgagctcgtggttaccacatttgccggtctttacaggtacagggtaggcgatgtactccaggtgacaggcttctacaaccgcgcaccccagttcaaattcatctgccggaggaacgtgatcctgagcgtggacgcagacaagacgaacgaggaagacctccacggcagcgtctcccgggccaagaagatcctggaggaccgaggccacatcctactggagtacaccagcttcaccgacacgtcgacggtgccgggccactacgtcctgttctgggaggtgaaggccacgcccacctccggctccgggggcgcgcggctggacgcgcaggtcctggagagctgctgcgtcgccgtggaggagtcgctggactgcgtgtacaggcggtgcagggcgcacgacaggtccgtggggccgctggagatacggctggtggaagccggcgccttcgacgcgctcatggacctgttggtcagccagggcggctccatcaaccagtacaagacgccacggtgcatcgagccgggcggcgccgcgctggagctgctcgactccaaggccaccgcctcgttcttcagcccccgggatcctgaagctactggtgtctgaggttgttctgctactctgaaactaatcctctgctggatctaaataatctgagaattttcgtctgggttatccccgtttacattgcacttttgtcaggctttgctactatgcaaagaagccttttttctttatttgagattgtgatcatcaattgtctatcacttgacgacttttgtgtgtgtgattgacggagcgcatggattatataacaataaaataaagtaaagagagaggccacgcatgcttttccgaaagcatcagtggtgagtgagctttcaac

SEQ ID NO: 70688 - DNA, 4325 bp, Zea Mays
aaacagaaagccaaggggaaggggaccgctttccttgccgatattggctgctcgctgatctttgagggccgcgattaccgcacctcgaggaggcgaggtgaggcgtaaaaaactcaaacaacgtaaggtgttcgacacccggtcagcggcctcgacctctttcggtcgatccaactacaccattgcgctgaatcaatctgcccgctccgagcgcattctctggccgagccaatgcccgcctatcatcgaccccaccaaatgattgaaaattattgattttctcaaataccgaggcattcagttctggaatttggtttgacgtcgacatgcttctacgcagacagcagcagagcataggatcgattcctagcttacgttggaattgctatgcgtgagatattttttcgaggcagtcttttgggcgacagcgatttgattgaagtgcagatgagaacaaatgtacggagagaactgcctgagttaccttttacgcagcagggcgtccccactcccccacggcgttatgccgcgcccaccacctgttcggcaaaatggctatggatgcaggttggggatttcaatgggacactctgacattagcttctgccatcagaaggcggtgagatctcacagtacgtctgtggagctgtgcattacttccacatggccttgttctgatcatggtggattcgggctatccattttgaagaggacactcatgtagtttctgctactcgagcaagaaggcgaggagatcttgcaaggatgggaggcttgaaagttggggggagatatgataagaacaaggctacagaggatcgaatagcttgtcttgttgattaaacactgtgactttagcaaagaatttgtgcactgttttcctttttctgcaggcagttgatgggtgcggagcagggaggcacgcgggcgactattctatgttgcaccaccacagggaggccaccatatgcggcgagcatccgcggcttgtgaatccacacacctttattctgaattgaccggaaaatatcacaaaggaagtacatcagctgcaattatcacagacaggcttgttccattgacaattagcatatccttttgaaatattatacaattctatttcgactgggaaaatgtgtcttccaattgcagccaccactgcccttaacaatagcgtttagctaaatatatagcttaactgagaaaaatatgcatgcatatcctatactttatacctgtggtgaagctagataaacttaggacggggtggggtgggatgtgctcttgccttgtggggcatataaattttatggagggagggtgaatatatggtaaaaaaatagacaaaatcactgctttagcattttttacagggtgcatttgcatcccttactctcaacgcagcctcacccctgctttataggcagcatgcccatgtttattgtcgagactaatcctttaatgctttatagtcagtgtgcccatttggtgtttgattacggtcatatgtcttattggttcagtggagacggagcctagctatgcaatcttaggcttttttctgttttgattccgcacaatcacttgcacggacggcataacgtgcggaacacaatttgtgtttaggttctggtgtagctcttcatcttttctcataatctcttatgaaggatttaggtgctgatgcaacatttcaagaataacttttgaagtggataaatgcgttcttatctttcagtcctgcacactttgttggttgcatgcaggggcagacccaagtagggccgagtgagggcacatgcccccgctcatttctttgttctaagtactagagtctaaattttcatcatgaggtcccctgctcagtctaatttagatgcctatattctggtattttagttctcgtccttacaagtatgctctcagttatattttgtcctgggtccgcccctggttgcatgtgcccgtgttggcagatagtgtgcattccttaggggtgtattatcgataactttgtgggtggttagacaattattattgtctctaaatctgcaccttctgtctcatgagtgttggtagtttcttctggacgttttaatttgttgaagaaaatattcttcaaatatcttttagtagtcataagaacaaaatgtccattctcattggtttgtattttgatctttcattttcagtagctctgtggtagggtccatgggattgtcttgcagaggaaacatcaaagttgttttaggtgttctcaatctctggaaagtctggttacacaggaaatgatgttcttcaagagcttgaaatactgactataaatgccaaagcagcacaagaggttatattgagtaaaattcttgagaagaatcaggctactgaatacctgaacaaattcatgaatgggtccgtagacatttctgccttcaagagccaggttccagtagtgacgtatgatgtggtccaaccctacattgcaaggattgccgctggtgaaaggtcttcaattttgtgtggagaacaaattgtagagctgctccgaagctcgggaacttctcagggtgaaccaagattgatgccatcaatctcagaggatatttaccgccgaatgtatctgtatagtctgatcatgcctatcatgagcaagtacatacgaggccttggcgaggggaaggcaatgtatcttctctttgtgaaagctgaaacattgacaaatgctggcattccagtccgatcagtcctcaccagctactacaagagccctcagttcttgcagcgcaagcacgacctctacaacagctacaccagtcccgacgaggtcattctttgccccgacagccagcagagcatgtactgccagctactctgcggcctggtggaacgccagaacgtcgtccgtctcggagcagtcttcgcctcagcattcctccggtccatcagcttcctcgagaagcactggcatgacctagtcaccgacatccgaaccggccggatcaatcccagcatcaccaacgccgcatgccgggtggccacggagagctttctcgcgcagcccaaccccgagctagctgacgaagtcgaggcgatatgcagctcggagtcatggaagggcgttcttggcaggctctggcctaacgtcaagtacatcgaggccgtcctgacggggacgatggcgcagtacgtccccatgctcgagttctacagcgacggcaggatccccctggtctgcaccatgtacgcttcctcggagagctacttcggcgtcaacctgcggccgctgtgcagcccgaaggacgtgtcctacaccatcctccccaacatggcctacttcgagttcgtgccgttggacgacggcctcaggctggcggaggatggtgaggctgtggagaaggagaagcttgtcggcctcgtggacgtcaaggtcggatgctactacgagctcgtggttaccacatttgccggtctttacaggtacagggtaggcgatgtactccaggtgacaggcttctacaaccgcgcaccccagttcaaattcatctgccggaggaacgtgatcctgagcgtggacgcagacaagacgaacgaggaagacctccacggcagcgtctcccgggccaagaagatcctggaggaccgaggccacatcctactggagtacaccagcttcaccgacacgtcgacggtgccgggccactacgtcctgttctgggaggtgaaggccacgcccacctccggctccgggggcgcgcggctggacgcgcaggtcctggagagctgctgcgtcgccgtggaggagtcgctggactgcgtgtacaggcggtgcagggcgcacgacaggtccgtggggccgctggagatacggctggtggaagccggcgccttcgacgcgctcatggacctgttggtcagccagggcggctccatcaaccagtacaagacgccacggtgcatcgagccgggcggcgccgcgctggagctgctcgactccaaggccaccgcctcgttcttcagcccccgggatcctgaagctactggtgtctgaggttgttctgctactctgaaactaatcctctgctggatctaaataatctgagaattttcgtctgggttatccccgtttacattgcacttttgtcaggctttgctactatgcaaagaagccttttttctttatttgagattgtgatcatcaattgtctatcacttgacgacttttgtgtgtgtgattgacggagcgcatggattatataacaataaaataaagtaaagagagaggccacgcatgcttttccgaaagcatcagtggtgagtgagctttcaac

SEQ ID NO: 70689 - DNA, 3111 bp, Zea Mays
gttacttagaaaatttctaagttctaagcaaggagataggacatgagccccgtaaaaacagaaagccaaggggaaggggaccgctttccttgccgatattggctgctcgctgatctttgagggccgcgattaccgcacctcgaggaggcgaggtgaggcgtaaaaaactcaaacaacgtaaggtgttcgacacccggtcagcggcctcgacctctttcggtcgatccaactacaccattgcgctgaatcaatctgcccgctccgagcgcattctctggccgagccaatgcccgcctatcatcgaccccaccaaatgattggtgattttattttttttggcgacatctatactacagattgaaaattattgattttctcaaataccgaggcattcagttctggaatttggtttgacgtcgacatgcttctacgcagacagcagcagagcataggatcgattcctagcttacgttggaattgctatgcgtgagatattttttcgaggcagtcttttgggcgacagcgatttgattgaagtgcagatgagaacaaatgtacggagagaactgcctgagttaccttttacgcagcagggcgtccccactcccccacggcgttatgccgcgcccaccacctgttcggcaaaatggctagtatgtcatatgtgcaataaactaatacacttgacgggtcgcgagtttgttgcgcatggacctattctgatcatagtggatgcaggttggggatttcaatgggacactctgacattagcttctgccatcagaaggcggtgagatctcacagcagttgatgggtgcggagcagggaggcacgcgggcgactattctatgttgcaccaccacagggaggccaccatatgcggcgagcatccgcggcttgtgaatccacacacctttattctgaattgaccggaaaatatcacaaaggaagtacatcagctgcaattatcacagacagtagctctgtggtagggtccatgggattgtcttgcagaggaaacatcaaagttgttttaggtgttctcaatctctggaaagtctggttacacaggaaatgatgttcttcaagagcttgaaatactgactataaatgccaaagcagcacaagaggttatattgagtaaaattcttgagaagaatcaggctactgaatacctgaacaaattcatgaatgggtccgtagacatttctgccttcaagagccaggttccagtagtgacgtatgatgtggtccaaccctacattgcaaggattgccgctggtgaaaggtcttcaattttgtgtggagaacaaattgtagagctgctccgaagctcgggaacttctcagggtgaaccaagattgatgccatcaatctcagaggatatttaccgccgaatgtatctgtatagtctgatcatgcctatcatgagcaagtacatacgaggccttggcgaggggaaggcaatgtatcttctctttgtgaaagctgaaacattgacaaatgctggcattccagtccgatcagtcctcaccagctactacaagagccctcagttcttgcagcgcaagcacgacctctacaacagctacaccagtcccgacgaggtcattctttgccccgacagccagcagagcatgtactgccagctactctgcggcctggtggaacgccagaacgtcgtccgtctcggagcagtcttcgcctcagcattcctccggtccatcagcttcctcgagaagcactggcatgacctagtcaccgacatccgaaccggccggatcaatcccagcatcaccaacgccgcatgccgggtggccacggagagctttctcgcgcagcccaaccccgagctagctgacgaagtcgaggcgatatgcagctcggagtcatggaagggcgttcttggcaggctctggcctaacgtcaagtacatcgaggccgtcctgacggggacgatggcgcagtacgtccccatgctcgagttctacagcgacggcaggatccccctggtctgcaccatgtacgcttcctcggagagctacttcggcgtcaacctgcggccgctgtgcagcccgaaggacgtgtcctacaccatcctccccaacatggcctacttcgagttcgtgccgttggacgacggcctcaggctggcggaggatggtgaggctgtggagaaggagaagcttgtcggcctcgtggacgtcaaggtcggatgctactacgagctcgtggttaccacatttgccggtctttacaggtacagggtaggcgatgtactccaggtgacaggcttctacaaccgcgcaccccagttcaaattcatctgccggaggaacgtgatcctgagcgtggacgcagacaagacgaacgaggaagacctccacggcagcgtctcccgggccaagaagatcctggaggaccgaggccacatcctactggagtacaccagcttcaccgacacgtcgacggtgccgggccactacgtcctgttctgggaggtgaaggccacgcccacctccggctccgggggcgcgcggctggacgcgcaggtcctggagagctgctgcgtcgccgtggaggagtcgctggactgcgtgtacaggcggtgcagggcgcacgacaggtccgtggggccgctggagatacggctggtggaagccggcgccttcgacgcgctcatggacctgttggtcagccagggcggctccatcaaccagtacaagacgccacggtgcatcgagccgggcggcgccgcgctggagctgctcgactccaaggccaccgcctcgttcttcagcccccgggatcctgaagctactggtgtctgaggttgttctgctactctgaaactaatcctctgctggatctaaataatctgagaattttcgtctgggttatccccgtttacattgcacttttgtcaggctttgctactatgcaaagaagccttttttctttatttgagattgtgatcatcaattgtctatcacttgacgacttttgtgtgtgtgattgacggagcgcatggattatataacaataaaataaagtaaagagagaggccacgcatgcttttccgaaagcatcagtggtgagtgagctttcaac

SEQ ID NO: 70690 - DNA, 3349 bp, Zea Mays
ctcctccaagccccatgtccgaaccatcagcatccggtccgacacacctgtagggattatgggttacttagaaaatttctaagttctaagcaaggagataggacatgagccccgtaaaaacagaaagccaaggggaaggggaccgctttccttgccgatattggctgctcgctgatctttgagggccgcgattaccgcacctcgaggaggcgaggtgaggcgtaaaaaactcaaacaacgtaaggtgttcgacacccggtcagcggcctcgacctctttcggtcgatccaactacaccattgcgctgaatcaatctgcccgctccgagcgcattctctggccgagccaatgcccgcctatcatcgaccccaccaaatgattggtgattttattttttttggcgacatctatactacagattgaaaattattgattttctcaaataccgaggcattcagttctggaatttggtttgacgtcgacatgcttctacgcagacagcagcagagcataggatcgattcctagcttacgttggaattgctatgcgtgagatattttttcgaggcagtcttttgggcgacagcgatttgattgaagtgcagatgagaacaaatgtacggagagaactgcctgagttaccttttacgcagcagggcgtccccactcccccacggcgttatgccgcgcccaccacctgttcggcaaaatggctagttggggatttcaatgggacactctgacattagcttctgccatcagaaggcggtgagatctcacagtacgtctgtggagctgtgcattacttccacatggccttgttctgatcatggtggattcgggctatccattttgaagaggacactcatgtagtttctgctactcgagcaagaaggcgaggagatcttgcaaggatgggaggcttgaaagttggggggagatatgataagaacaaggctacagaggatcgaatagcttgtcttgttgattaaacactgtgactttagcaaagaatttgtgcactgttttcctttttctgcaggcagttgatgggtgcggagcagggaggcacgcgggcgactattctatgttgcaccaccacagggaggccaccatatgcggcgagcatccgcggcttgtgaatccacacacctttattctgaattgaccggaaaatatcacaaaggaagtacatcagctgcaattatcacagacagtagctctgtggtagggtccatgggattgtcttgcagaggaaacatcaaagttgttttaggtgttctcaatctctggaaagtctggttacacaggaaatgatgttcttcaagagcttgaaatactgactataaatgccaaagcagcacaagaggttatattgagtaaaattcttgagaagaatcaggctactgaatacctgaacaaattcatgaatgggtccgtagacatttctgccttcaagagccaggttccagtagtgacgtatgatgtggtccaaccctacattgcaaggattgccgctggtgaaaggtcttcaattttgtgtggagaacaaattgtagagctgctccgaagctcgggaacttctcagggtgaaccaagattgatgccatcaatctcagaggatatttaccgccgaatgtatctgtatagtctgatcatgcctatcatgagcaagtacatacgaggccttggcgaggggaaggcaatgtatcttctctttgtgaaagctgaaacattgacaaatgctggcattccagtccgatcagtcctcaccagctactacaagagccctcagttcttgcagcgcaagcacgacctctacaacagctacaccagtcccgacgaggtcattctttgccccgacagccagcagagcatgtactgccagctactctgcggcctggtggaacgccagaacgtcgtccgtctcggagcagtcttcgcctcagcattcctccggtccatcagcttcctcgagaagcactggcatgacctagtcaccgacatccgaaccggccggatcaatcccagcatcaccaacgccgcatgccgggtggccacggagagctttctcgcgcagcccaaccccgagctagctgacgaagtcgaggcgatatgcagctcggagtcatggaagggcgttcttggcaggctctggcctaacgtcaagtacatcgaggccgtcctgacggggacgatggcgcagtacgtccccatgctcgagttctacagcgacggcaggatccccctggtctgcaccatgtacgcttcctcggagagctacttcggcgtcaacctgcggccgctgtgcagcccgaaggacgtgtcctacaccatcctccccaacatggcctacttcgagttcgtgccgttggacgacggcctcaggctggcggaggatggtgaggctgtggagaaggagaagcttgtcggcctcgtggacgtcaaggtcggatgctactacgagctcgtggttaccacatttgccggtctttacaggtacagggtaggcgatgtactccaggtgacaggcttctacaaccgcgcaccccagttcaaattcatctgccggaggaacgtgatcctgagcgtggacgcagacaagacgaacgaggaagacctccacggcagcgtctcccgggccaagaagatcctggaggaccgaggccacatcctactggagtacaccagcttcaccgacacgtcgacggtgccgggccactacgtcctgttctgggaggtgaaggccacgcccacctccggctccgggggcgcgcggctggacgcgcaggtcctggagagctgctgcgtcgccgtggaggagtcgctggactgcgtgtacaggcggtgcagggcgcacgacaggtccgtggggccgctggagatacggctggtggaagccggcgccttcgacgcgctcatggacctgttggtcagccagggcggctccatcaaccagtacaagacgccacggtgcatcgagccgggcggcgccgcgctggagctgctcgactccaaggccaccgcctcgttcttcagcccccgggatcctgaagctactggtgtctgaggttgttctgctactctgaaactaatcctctgctggatctaaataatctgagaattttcgtctgggttatccccgtttacattgcacttttgtcaggctttgctactatgcaaagaagccttttttctttatttgagattgtgatcatcaattgtctatcacttgacgacttttgtgtgtgtgattgacggagcgcatggattatataacaataaaataaagtaaagagagaggccacgcatgcttttccgaaagcatcagtggtgagtgagctttcaac

SEQ ID NO: 70691 - DNA, 4172 bp, Zea Mays
ctcctccaagccccatgtccgaaccatcagcatccggtccgacacacctgtagggattatgggttacttagaaaatttctaagttctaagcaaggagataggacatgagccccgtaaaaacagaaagccaaggggaaggggaccgctttccttgccgatattggctgctcgctgatctttgagggccgcgattaccgcacctcgaggaggcgaggtgaggcgtaaaaaactcaaacaacgtaaggtgttcgacacccggtcagcggcctcgacctctttcggtcgatccaactacaccattgcgctgaatcaatctgcccgctccgagcgcattctctggccgagccaatgcccgcctatcatcgaccccaccaaatgattgaaaattattgattttctcaaataccgaggcattcagttctggaatttggtttgacgtcgacatgcttctacgcagacagcagcagagcataggatcgattcctagcttacgttggaattgctatgcgtgagatattttttcgaggcagtcttttgggcgacagcgatttgattgaagtgcagatgagaacaaatgtacggagagaactgcctgagttaccttttacgcagcagggcgtccccactcccccacggcgttatgccgcgcccaccacctgttcggcaaaatggctagttggggatttcaatgggacactctgacattagcttctgccatcagaaggcggtgagatctcacagcagttgatgggtgcggagcagggaggcacgcgggcgactattctatgttgcaccaccacagggaggccaccatatgcggcgagcatccgcggcttgtgaatccacacacctttattctgaattgaccggaaaatatcacaaaggaagtacatcagctgcaattatcacagacaggcttgttccattgacaattagcatatccttttgaaatattatacaattctatttcgactgggaaaatgtgtcttccaattgcagccaccactgcccttaacaatagcgtttagctaaatatatagcttaactgagaaaaatatgcatgcatatcctatactttatacctgtggtgaagctagataaacttaggacggggtggggtgggatgtgctcttgccttgtggggcatataaattttatggagggagggtgaatatatggtaaaaaaatagacaaaatcactgctttagcattttttacagggtgcatttgcatcccttactctcaacgcagcctcacccctgctttataggcagcatgcccatgtttattgtcgagactaatcctttaatgctttatagtcagtgtgcccatttggtgtttgattacggtcatatgtcttattggttcagtggagacggagcctagctatgcaatcttaggcttttttctgttttgattccgcacaatcacttgcacggacggcataacgtgcggaacacaatttgtgtttaggttctggtgtagctcttcatcttttctcataatctcttatgaaggatttaggtgctgatgcaacatttcaagaataacttttgaagtggataaatgcgttcttatctttcagtcctgcacactttgttggttgcatgcaggggcagacccaagtagggccgagtgagggcacatgcccccgctcatttctttgttctaagtactagagtctaaattttcatcatgaggtcccctgctcagtctaatttagatgcctatattctggtattttagttctcgtccttacaagtatgctctcagttatattttgtcctgggtccgcccctggttgcatgtgcccgtgttggcagatagtgtgcattccttaggggtgtattatcgataactttgtgggtggttagacaattattattgtctctaaatctgcaccttctgtctcatgagtgttggtagtttcttctggacgttttaatttgttgaagaaaatattcttcaaatatcttttagtagtcataagaacaaaatgtccattctcattggtttgtattttgatctttcattttcagtagctctgtggtagggtccatgggattgtcttgcagaggaaacatcaaagttgttttaggtgttctcaatctctggaaagtctggttacacaggaaatgatgttcttcaagagcttgaaatactgactataaatgccaaagcagcacaagaggttatattgagtaaaattcttgagaagaatcaggctactgaatacctgaacaaattcatgaatgggtccgtagacatttctgccttcaagagccaggttccagtagtgacgtatgatgtggtccaaccctacattgcaaggattgccgctggtgaaaggtcttcaattttgtgtggagaacaaattgtagagctgctccgaagctcgggaacttctcagggtgaaccaagattgatgccatcaatctcagaggatatttaccgccgaatgtatctgtatagtctgatcatgcctatcatgagcaagtacatacgaggccttggcgaggggaaggcaatgtatcttctctttgtgaaagctgaaacattgacaaatgctggcattccagtccgatcagtcctcaccagctactacaagagccctcagttcttgcagcgcaagcacgacctctacaacagctacaccagtcccgacgaggtcattctttgccccgacagccagcagagcatgtactgccagctactctgcggcctggtggaacgccagaacgtcgtccgtctcggagcagtcttcgcctcagcattcctccggtccatcagcttcctcgagaagcactggcatgacctagtcaccgacatccgaaccggccggatcaatcccagcatcaccaacgccgcatgccgggtggccacggagagctttctcgcgcagcccaaccccgagctagctgacgaagtcgaggcgatatgcagctcggagtcatggaagggcgttcttggcaggctctggcctaacgtcaagtacatcgaggccgtcctgacggggacgatggcgcagtacgtccccatgctcgagttctacagcgacggcaggatccccctggtctgcaccatgtacgcttcctcggagagctacttcggcgtcaacctgcggccgctgtgcagcccgaaggacgtgtcctacaccatcctccccaacatggcctacttcgagttcgtgccgttggacgacggcctcaggctggcggaggatggtgaggctgtggagaaggagaagcttgtcggcctcgtggacgtcaaggtcggatgctactacgagctcgtggttaccacatttgccggtctttacaggtacagggtaggcgatgtactccaggtgacaggcttctacaaccgcgcaccccagttcaaattcatctgccggaggaacgtgatcctgagcgtggacgcagacaagacgaacgaggaagacctccacggcagcgtctcccgggccaagaagatcctggaggaccgaggccacatcctactggagtacaccagcttcaccgacacgtcgacggtgccgggccactacgtcctgttctgggaggtgaaggccacgcccacctccggctccgggggcgcgcggctggacgcgcaggtcctggagagctgctgcgtcgccgtggaggagtcgctggactgcgtgtacaggcggtgcagggcgcacgacaggtccgtggggccgctggagatacggctggtggaagccggcgccttcgacgcgctcatggacctgttggtcagccagggcggctccatcaaccagtacaagacgccacggtgcatcgagccgggcggcgccgcgctggagctgctcgactccaaggccaccgcctcgttcttcagcccccgggatcctgaagctactggtgtctgaggttgttctgctactctgaaactaatcctctgctggatctaaataatctgagaattttcgtctgggttatccccgtttacattgcacttttgtcaggctttgctactatgcaaagaagccttttttctttatttgagattgtgatcatcaattgtctatcacttgacgacttttgtgtgtgtgattgacggagcgcatggattatataacaataaaataaagtaaagagagaggccacgcatgcttttccgaaagcatcagtggtgagtgagctttcaac

SEQ ID NO: 70692 - DNA, 4302 bp, Zea Mays
agaagctcctccaagccccatgtccgaaccatcagcatccggtccgacacacctgtagggattatgggttacttagaaaatttctaagttctaagcaaggagataggacatgagccccgtaaaaacagaaagccaaggggaaggggaccgctttccttgccgatattggctgctcgctgatctttgagggccgcgattaccgcacctcgaggaggcgaggtgaggcgtaaaaaactcaaacaacgtaaggtgttcgacacccggtcagcggcctcgacctctttcggtcgatccaactacaccattgcgctgaatcaatctgcccgctccgagcgcattctctggccgagccaatgcccgcctatcatcgaccccaccaaatgattggtgattttattttttttggcgacatctatactacagattgaaaattattgattttctcaaataccgaggcattcagttctggaatttggtttgacgtcgacatgcttctacgcagacagcagcagagcataggatcgattcctagcttacgttggaattgctatgcgtgagatattttttcgaggcagtcttttgggcgacagcgatttgattgaagtgcagatgagaacaaatgtacggagagaactgcctgagttaccttttacgcagcagggcgtccccactcccccacggcgttatgccgcgcccaccacctgttcggcaaaatggctagtatgtcatatgtgcaataaactaatacacttgacgggtcgcgagtttgttgcgcatggacctattctgatcatagtggatgcaggttggggatttcaatgggacactctgacattagcttctgccatcagaaggcggtgagatctcacagcagttgatgggtgcggagcagggaggcacgcgggcgactattctatgttgcaccaccacagggaggccaccatatgcggcgagcatccgcggcttgtgaatccacacacctttattctgaattgaccggaaaatatcacaaaggaagtacatcagctgcaattatcacagacaggcttgttccattgacaattagcatatccttttgaaatattatacaattctatttcgactgggaaaatgtgtcttccaattgcagccaccactgcccttaacaatagcgtttagctaaatatatagcttaactgagaaaaatatgcatgcatatcctatactttatacctgtggtgaagctagataaacttaggacggggtggggtgggatgtgctcttgccttgtggggcatataaattttatggagggagggtgaatatatggtaaaaaaatagacaaaatcactgctttagcattttttacagggtgcatttgcatcccttactctcaacgcagcctcacccctgctttataggcagcatgcccatgtttattgtcgagactaatcctttaatgctttatagtcagtgtgcccatttggtgtttgattacggtcatatgtcttattggttcagtggagacggagcctagctatgcaatcttaggcttttttctgttttgattccgcacaatcacttgcacggacggcataacgtgcggaacacaatttgtgtttaggttctggtgtagctcttcatcttttctcataatctcttatgaaggatttaggtgctgatgcaacatttcaagaataacttttgaagtggataaatgcgttcttatctttcagtcctgcacactttgttggttgcatgcaggggcagacccaagtagggccgagtgagggcacatgcccccgctcatttctttgttctaagtactagagtctaaattttcatcatgaggtcccctgctcagtctaatttagatgcctatattctggtattttagttctcgtccttacaagtatgctctcagttatattttgtcctgggtccgcccctggttgcatgtgcccgtgttggcagatagtgtgcattccttaggggtgtattatcgataactttgtgggtggttagacaattattattgtctctaaatctgcaccttctgtctcatgagtgttggtagtttcttctggacgttttaatttgttgaagaaaatattcttcaaatatcttttagtagtcataagaacaaaatgtccattctcattggtttgtattttgatctttcattttcagtagctctgtggtagggtccatgggattgtcttgcagaggaaacatcaaagttgttttaggtgttctcaatctctggaaagtctggttacacaggaaatgatgttcttcaagagcttgaaatactgactataaatgccaaagcagcacaagaggttatattgagtaaaattcttgagaagaatcaggctactgaatacctgaacaaattcatgaatgggtccgtagacatttctgccttcaagagccaggttccagtagtgacgtatgatgtggtccaaccctacattgcaaggattgccgctggtgaaaggtcttcaattttgtgtggagaacaaattgtagagctgctccgaagctcgggaacttctcagggtgaaccaagattgatgccatcaatctcagaggatatttaccgccgaatgtatctgtatagtctgatcatgcctatcatgagcaagtacatacgaggccttggcgaggggaaggcaatgtatcttctctttgtgaaagctgaaacattgacaaatgctggcattccagtccgatcagtcctcaccagctactacaagagccctcagttcttgcagcgcaagcacgacctctacaacagctacaccagtcccgacgaggtcattctttgccccgacagccagcagagcatgtactgccagctactctgcggcctggtggaacgccagaacgtcgtccgtctcggagcagtcttcgcctcagcattcctccggtccatcagcttcctcgagaagcactggcatgacctagtcaccgacatccgaaccggccggatcaatcccagcatcaccaacgccgcatgccgggtggccacggagagctttctcgcgcagcccaaccccgagctagctgacgaagtcgaggcgatatgcagctcggagtcatggaagggcgttcttggcaggctctggcctaacgtcaagtacatcgaggccgtcctgacggggacgatggcgcagtacgtccccatgctcgagttctacagcgacggcaggatccccctggtctgcaccatgtacgcttcctcggagagctacttcggcgtcaacctgcggccgctgtgcagcccgaaggacgtgtcctacaccatcctccccaacatggcctacttcgagttcgtgccgttggacgacggcctcaggctggcggaggatggtgaggctgtggagaaggagaagcttgtcggcctcgtggacgtcaaggtcggatgctactacgagctcgtggttaccacatttgccggtctttacaggtacagggtaggcgatgtactccaggtgacaggcttctacaaccgcgcaccccagttcaaattcatctgccggaggaacgtgatcctgagcgtggacgcagacaagacgaacgaggaagacctccacggcagcgtctcccgggccaagaagatcctggaggaccgaggccacatcctactggagtacaccagcttcaccgacacgtcgacggtgccgggccactacgtcctgttctgggaggtgaaggccacgcccacctccggctccgggggcgcgcggctggacgcgcaggtcctggagagctgctgcgtcgccgtggaggagtcgctggactgcgtgtacaggcggtgcagggcgcacgacaggtccgtggggccgctggagatacggctggtggaagccggcgccttcgacgcgctcatggacctgttggtcagccagggcggctccatcaaccagtacaagacgccacggtgcatcgagccgggcggcgccgcgctggagctgctcgactccaaggccaccgcctcgttcttcagcccccgggatcctgaagctactggtgtctgaggttgttctgctactctgaaactaatcctctgctggatctaaataatctgagaattttcgtctgggttatccccgtttacattgcacttttgtcaggctttgctactatgcaaagaagccttttttctttatttgagattgtgatcatcaattgtctatcacttgacgacttttgtgtgtgtgattgacggagcgcatggattatataacaataaaataaagtaaagagagaggccacgcatgcttttccgaaagcatcagtggtgagtgagctttcaac

SEQ ID NO: 70693 - DNA, 3355 bp, Zea Mays
aaaaagaaggcgtccagccgaggagaccaccaaccacttcgagaagctcctccaagccccatgtccgaaccatcagcatccggtccgacacacctgtagggattatgggttacttagaaaatttctaagttctaagcaaggagataggacatgagccccgtaaaaacagaaagccaaggggaaggggaccgctttccttgccgatattggctgctcgctgatctttgagggccgcgattaccgcacctcgaggaggcgaggtgaggcgtaaaaaactcaaacaacgtaaggtgttcgacacccggtcagcggcctcgacctctttcggtcgatccaactacaccattgcgctgaatcaatctgcccgctccgagcgcattctctggccgagccaatgcccgcctatcatcgaccccaccaaatgattgaaaattattgattttctcaaataccgaggcattcagttctggaatttggtttgacgtcgacatgcttctacgcagacagcagcagagcataggatcgattcctagcttacgttggaattgctatgcgtgagatattttttcgaggcagtcttttgggcgacagcgatttgattgaagtgcagatgagaacaaatgtacggagagaactgcctgagttaccttttacgcagcagggcgtccccactcccccacggcgttatgccgcgcccaccacctgttcggcaaaatggctagttggggatttcaatgggacactctgacattagcttctgccatcagaaggcggtgagatctcacagtacgtctgtggagctgtgcattacttccacatggccttgttctgatcatggtggattcgggctatccattttgaagaggacactcatgtagtttctgctactcgagcaagaaggcgaggagatcttgcaaggatgggaggcttgaaagttggggggagatatgataagaacaaggctacagaggatcgaatagcttgtcttgttgattaaacactgtgactttagcaaagaatttgtgcactgttttcctttttctgcaggcagttgatgggtgcggagcagggaggcacgcgggcgactattctatgttgcaccaccacagggaggccaccatatgcggcgagcatccgcggcttgtgaatccacacacctttattctgaattgaccggaaaatatcacaaaggaagtacatcagctgcaattatcacagacagtagctctgtggtagggtccatgggattgtcttgcagaggaaacatcaaagttgttttaggtgttctcaatctctggaaagtctggttacacaggaaatgatgttcttcaagagcttgaaatactgactataaatgccaaagcagcacaagaggttatattgagtaaaattcttgagaagaatcaggctactgaatacctgaacaaattcatgaatgggtccgtagacatttctgccttcaagagccaggttccagtagtgacgtatgatgtggtccaaccctacattgcaaggattgccgctggtgaaaggtcttcaattttgtgtggagaacaaattgtagagctgctccgaagctcgggaacttctcagggtgaaccaagattgatgccatcaatctcagaggatatttaccgccgaatgtatctgtatagtctgatcatgcctatcatgagcaagtacatacgaggccttggcgaggggaaggcaatgtatcttctctttgtgaaagctgaaacattgacaaatgctggcattccagtccgatcagtcctcaccagctactacaagagccctcagttcttgcagcgcaagcacgacctctacaacagctacaccagtcccgacgaggtcattctttgccccgacagccagcagagcatgtactgccagctactctgcggcctggtggaacgccagaacgtcgtccgtctcggagcagtcttcgcctcagcattcctccggtccatcagcttcctcgagaagcactggcatgacctagtcaccgacatccgaaccggccggatcaatcccagcatcaccaacgccgcatgccgggtggccacggagagctttctcgcgcagcccaaccccgagctagctgacgaagtcgaggcgatatgcagctcggagtcatggaagggcgttcttggcaggctctggcctaacgtcaagtacatcgaggccgtcctgacggggacgatggcgcagtacgtccccatgctcgagttctacagcgacggcaggatccccctggtctgcaccatgtacgcttcctcggagagctacttcggcgtcaacctgcggccgctgtgcagcccgaaggacgtgtcctacaccatcctccccaacatggcctacttcgagttcgtgccgttggacgacggcctcaggctggcggaggatggtgaggctgtggagaaggagaagcttgtcggcctcgtggacgtcaaggtcggatgctactacgagctcgtggttaccacatttgccggtctttacaggtacagggtaggcgatgtactccaggtgacaggcttctacaaccgcgcaccccagttcaaattcatctgccggaggaacgtgatcctgagcgtggacgcagacaagacgaacgaggaagacctccacggcagcgtctcccgggccaagaagatcctggaggaccgaggccacatcctactggagtacaccagcttcaccgacacgtcgacggtgccgggccactacgtcctgttctgggaggtgaaggccacgcccacctccggctccgggggcgcgcggctggacgcgcaggtcctggagagctgctgcgtcgccgtggaggagtcgctggactgcgtgtacaggcggtgcagggcgcacgacaggtccgtggggccgctggagatacggctggtggaagccggcgccttcgacgcgctcatggacctgttggtcagccagggcggctccatcaaccagtacaagacgccacggtgcatcgagccgggcggcgccgcgctggagctgctcgactccaaggccaccgcctcgttcttcagcccccgggatcctgaagctactggtgtctgaggttgttctgctactctgaaactaatcctctgctggatctaaataatctgagaattttcgtctgggttatccccgtttacattgcacttttgtcaggctttgctactatgcaaagaagccttttttctttatttgagattgtgatcatcaattgtctatcacttgacgacttttgtgtgtgtgattgacggagcgcatggattatataacaataaaataaagtaaagagagaggccacgcatgcttttccgaaagcatcagtggtgagtgagctttcaac

SEQ ID NO: 70694 - DNA, 4634 bp, Zea Mays
gcacaataaatttacttatcggagcgatgttcgaaacaccatcaattagcacaacaggtagaagctttcaggagagaaaactgtcagtgagctgcgagcctgcgacaagtcggacaaaaagaaggcgtccagccgaggagaccaccaaccacttcgagaagctcctccaagccccatgtccgaaccatcagcatccggtccgacacacctgtagggattatgggttacttagaaaatttctaagttctaagcaaggagataggacatgagccccgtaaaaacagaaagccaaggggaaggggaccgctttccttgccgatattggctgctcgctgatctttgagggccgcgattaccgcacctcgaggaggcgaggtgaggcgtaaaaaactcaaacaacgtaaggtgttcgacacccggtcagcggcctcgacctctttcggtcgatccaactacaccattgcgctgaatcaatctgcccgctccgagcgcattctctggccgagccaatgcccgcctatcatcgaccccaccaaatgattggtgattttattttttttggcgacatctatactacagattgaaaattattgattttctcaaataccgaggcattcagttctggaatttggtttgacgtcgacatgcttctacgcagacagcagcagagcataggatcgattcctagcttacgttggaattgctatgcgtgagatattttttcgaggcagtcttttgggcgacagcgatttgattgaagtgcagatgagaacaaatgtacggagagaactgcctgagttaccttttacgcagcagggcgtccccactcccccacggcgttatgccgcgcccaccacctgttcggcaaaatggctagttggggatttcaatgggacactctgacattagcttctgccatcagaaggcggtgagatctcacagtacgtctgtggagctgtgcattacttccacatggccttgttctgatcatggtggattcgggctatccattttgaagaggacactcatgtagtttctgctactcgagcaagaaggcgaggagatcttgcaaggatgggaggcttgaaagttggggggagatatgataagaacaaggctacagaggatcgaatagcttgtcttgttgattaaacactgtgactttagcaaagaatttgtgcactgttttcctttttctgcaggcagttgatgggtgcggagcagggaggcacgcgggcgactattctatgttgcaccaccacagggaggccaccatatgcggcgagcatccgcggcttgtgaatccacacacctttattctgaattgaccggaaaatatcacaaaggaagtacatcagctgcaattatcacagacaggcttgttccattgacaattagcatatccttttgaaatattatacaattctatttcgactgggaaaatgtgtcttccaattgcagccaccactgcccttaacaatagcgtttagctaaatatatagcttaactgagaaaaatatgcatgcatatcctatactttatacctgtggtgaagctagataaacttaggacggggtggggtgggatgtgctcttgccttgtggggcatataaattttatggagggagggtgaatatatggtaaaaaaatagacaaaatcactgctttagcattttttacagggtgcatttgcatcccttactctcaacgcagcctcacccctgctttataggcagcatgcccatgtttattgtcgagactaatcctttaatgctttatagtcagtgtgcccatttggtgtttgattacggtcatatgtcttattggttcagtggagacggagcctagctatgcaatcttaggcttttttctgttttgattccgcacaatcacttgcacggacggcataacgtgcggaacacaatttgtgtttaggttctggtgtagctcttcatcttttctcataatctcttatgaaggatttaggtgctgatgcaacatttcaagaataacttttgaagtggataaatgcgttcttatctttcagtcctgcacactttgttggttgcatgcaggggcagacccaagtagggccgagtgagggcacatgcccccgctcatttctttgttctaagtactagagtctaaattttcatcatgaggtcccctgctcagtctaatttagatgcctatattctggtattttagttctcgtccttacaagtatgctctcagttatattttgtcctgggtccgcccctggttgcatgtgcccgtgttggcagatagtgtgcattccttaggggtgtattatcgataactttgtgggtggttagacaattattattgtctctaaatctgcaccttctgtctcatgagtgttggtagtttcttctggacgttttaatttgttgaagaaaatattcttcaaatatcttttagtagtcataagaacaaaatgtccattctcattggtttgtattttgatctttcattttcagtagctctgtggtagggtccatgggattgtcttgcagaggaaacatcaaagttgttttaggtgttctcaatctctggaaagtctggttacacaggaaatgatgttcttcaagagcttgaaatactgactataaatgccaaagcagcacaagaggttatattgagtaaaattcttgagaagaatcaggctactgaatacctgaacaaattcatgaatgggtccgtagacatttctgccttcaagagccaggttccagtagtgacgtatgatgtggtccaaccctacattgcaaggattgccgctggtgaaaggtcttcaattttgtgtggagaacaaattgtagagctgctccgaagctcgggaacttctcagggtgaaccaagattgatgccatcaatctcagaggatatttaccgccgaatgtatctgtatagtctgatcatgcctatcatgagcaagtacatacgaggccttggcgaggggaaggcaatgtatcttctctttgtgaaagctgaaacattgacaaatgctggcattccagtccgatcagtcctcaccagctactacaagagccctcagttcttgcagcgcaagcacgacctctacaacagctacaccagtcccgacgaggtcattctttgccccgacagccagcagagcatgtactgccagctactctgcggcctggtggaacgccagaacgtcgtccgtctcggagcagtcttcgcctcagcattcctccggtccatcagcttcctcgagaagcactggcatgacctagtcaccgacatccgaaccggccggatcaatcccagcatcaccaacgccgcatgccgggtggccacggagagctttctcgcgcagcccaaccccgagctagctgacgaagtcgaggcgatatgcagctcggagtcatggaagggcgttcttggcaggctctggcctaacgtcaagtacatcgaggccgtcctgacggggacgatggcgcagtacgtccccatgctcgagttctacagcgacggcaggatccccctggtctgcaccatgtacgcttcctcggagagctacttcggcgtcaacctgcggccgctgtgcagcccgaaggacgtgtcctacaccatcctccccaacatggcctacttcgagttcgtgccgttggacgacggcctcaggctggcggaggatggtgaggctgtggagaaggagaagcttgtcggcctcgtggacgtcaaggtcggatgctactacgagctcgtggttaccacatttgccggtctttacaggtacagggtaggcgatgtactccaggtgacaggcttctacaaccgcgcaccccagttcaaattcatctgccggaggaacgtgatcctgagcgtggacgcagacaagacgaacgaggaagacctccacggcagcgtctcccgggccaagaagatcctggaggaccgaggccacatcctactggagtacaccagcttcaccgacacgtcgacggtgccgggccactacgtcctgttctgggaggtgaaggccacgcccacctccggctccgggggcgcgcggctggacgcgcaggtcctggagagctgctgcgtcgccgtggaggagtcgctggactgcgtgtacaggcggtgcagggcgcacgacaggtccgtggggccgctggagatacggctggtggaagccggcgccttcgacgcgctcatggacctgttggtcagccagggcggctccatcaaccagtacaagacgccacggtgcatcgagccgggcggcgccgcgctggagctgctcgactccaaggccaccgcctcgttcttcagcccccgggatcctgaagctactggtgtctgaggttgttctgctactctgaaactaatcctctgctggatctaaataatctgagaattttcgtctgggttatccccgtttacattgcacttttgtcaggctttgctactatgcaaagaagccttttttctttatttgagattgtgatcatcaattgtctatcacttgacgacttttgtgtgtgtgattgacggagcgcatggattatataacaataaaataaagtaaagagagaggccacgcatgcttttccgaaagcatcagtggtgagtgagctttcaac

SEQ ID NO: 70695 - DNA, 4504 bp, Zea Mays
gcacaataaatttacttatcggagcgatgttcgaaacaccatcaattagcacaacaggtagaagctttcaggagagaaaactgtcagtgagctgcgagcctgcgacaagtcggacaaaaagaaggcgtccagccgaggagaccaccaaccacttcgagaagctcctccaagccccatgtccgaaccatcagcatccggtccgacacacctgtagggattatgggttacttagaaaatttctaagttctaagcaaggagataggacatgagccccgtaaaaacagaaagccaaggggaaggggaccgctttccttgccgatattggctgctcgctgatctttgagggccgcgattaccgcacctcgaggaggcgaggtgaggcgtaaaaaactcaaacaacgtaaggtgttcgacacccggtcagcggcctcgacctctttcggtcgatccaactacaccattgcgctgaatcaatctgcccgctccgagcgcattctctggccgagccaatgcccgcctatcatcgaccccaccaaatgattgaaaattattgattttctcaaataccgaggcattcagttctggaatttggtttgacgtcgacatgcttctacgcagacagcagcagagcataggatcgattcctagcttacgttggaattgctatgcgtgagatattttttcgaggcagtcttttgggcgacagcgatttgattgaagtgcagatgagaacaaatgtacggagagaactgcctgagttaccttttacgcagcagggcgtccccactcccccacggcgttatgccgcgcccaccacctgttcggcaaaatggctagttggggatttcaatgggacactctgacattagcttctgccatcagaaggcgaggacactcatgtagtttctgctactcgagcaagaaggcgaggagatcttgcaaggatgggaggcttgaaagttggggggagatatgataagaacaaggctacagaggatcgaatagcttgtcttgttgattaaacactgtgactttagcaaagaatttgtgcactgttttcctttttctgcaggcagttgatgggtgcggagcagggaggcacgcgggcgactattctatgttgcaccaccacagggaggccaccatatgcggcgagcatccgcggcttgtgaatccacacacctttattctgaattgaccggaaaatatcacaaaggaagtacatcagctgcaattatcacagacaggcttgttccattgacaattagcatatccttttgaaatattatacaattctatttcgactgggaaaatgtgtcttccaattgcagccaccactgcccttaacaatagcgtttagctaaatatatagcttaactgagaaaaatatgcatgcatatcctatactttatacctgtggtgaagctagataaacttaggacggggtggggtgggatgtgctcttgccttgtggggcatataaattttatggagggagggtgaatatatggtaaaaaaatagacaaaatcactgctttagcattttttacagggtgcatttgcatcccttactctcaacgcagcctcacccctgctttataggcagcatgcccatgtttattgtcgagactaatcctttaatgctttatagtcagtgtgcccatttggtgtttgattacggtcatatgtcttattggttcagtggagacggagcctagctatgcaatcttaggcttttttctgttttgattccgcacaatcacttgcacggacggcataacgtgcggaacacaatttgtgtttaggttctggtgtagctcttcatcttttctcataatctcttatgaaggatttaggtgctgatgcaacatttcaagaataacttttgaagtggataaatgcgttcttatctttcagtcctgcacactttgttggttgcatgcaggggcagacccaagtagggccgagtgagggcacatgcccccgctcatttctttgttctaagtactagagtctaaattttcatcatgaggtcccctgctcagtctaatttagatgcctatattctggtattttagttctcgtccttacaagtatgctctcagttatattttgtcctgggtccgcccctggttgcatgtgcccgtgttggcagatagtgtgcattccttaggggtgtattatcgataactttgtgggtggttagacaattattattgtctctaaatctgcaccttctgtctcatgagtgttggtagtttcttctggacgttttaatttgttgaagaaaatattcttcaaatatcttttagtagtcataagaacaaaatgtccattctcattggtttgtattttgatctttcattttcagtagctctgtggtagggtccatgggattgtcttgcagaggaaacatcaaagttgttttaggtgttctcaatctctggaaagtctggttacacaggaaatgatgttcttcaagagcttgaaatactgactataaatgccaaagcagcacaagaggttatattgagtaaaattcttgagaagaatcaggctactgaatacctgaacaaattcatgaatgggtccgtagacatttctgccttcaagagccaggttccagtagtgacgtatgatgtggtccaaccctacattgcaaggattgccgctggtgaaaggtcttcaattttgtgtggagaacaaattgtagagctgctccgaagctcgggaacttctcagggtgaaccaagattgatgccatcaatctcagaggatatttaccgccgaatgtatctgtatagtctgatcatgcctatcatgagcaagtacatacgaggccttggcgaggggaaggcaatgtatcttctctttgtgaaagctgaaacattgacaaatgctggcattccagtccgatcagtcctcaccagctactacaagagccctcagttcttgcagcgcaagcacgacctctacaacagctacaccagtcccgacgaggtcattctttgccccgacagccagcagagcatgtactgccagctactctgcggcctggtggaacgccagaacgtcgtccgtctcggagcagtcttcgcctcagcattcctccggtccatcagcttcctcgagaagcactggcatgacctagtcaccgacatccgaaccggccggatcaatcccagcatcaccaacgccgcatgccgggtggccacggagagctttctcgcgcagcccaaccccgagctagctgacgaagtcgaggcgatatgcagctcggagtcatggaagggcgttcttggcaggctctggcctaacgtcaagtacatcgaggccgtcctgacggggacgatggcgcagtacgtccccatgctcgagttctacagcgacggcaggatccccctggtctgcaccatgtacgcttcctcggagagctacttcggcgtcaacctgcggccgctgtgcagcccgaaggacgtgtcctacaccatcctccccaacatggcctacttcgagttcgtgccgttggacgacggcctcaggctggcggaggatggtgaggctgtggagaaggagaagcttgtcggcctcgtggacgtcaaggtcggatgctactacgagctcgtggttaccacatttgccggtctttacaggtacagggtaggcgatgtactccaggtgacaggcttctacaaccgcgcaccccagttcaaattcatctgccggaggaacgtgatcctgagcgtggacgcagacaagacgaacgaggaagacctccacggcagcgtctcccgggccaagaagatcctggaggaccgaggccacatcctactggagtacaccagcttcaccgacacgtcgacggtgccgggccactacgtcctgttctgggaggtgaaggccacgcccacctccggctccgggggcgcgcggctggacgcgcaggtcctggagagctgctgcgtcgccgtggaggagtcgctggactgcgtgtacaggcggtgcagggcgcacgacaggtccgtggggccgctggagatacggctggtggaagccggcgccttcgacgcgctcatggacctgttggtcagccagggcggctccatcaaccagtacaagacgccacggtgcatcgagccgggcggcgccgcgctggagctgctcgactccaaggccaccgcctcgttcttcagcccccgggatcctgaagctactggtgtctgaggttgttctgctactctgaaactaatcctctgctggatctaaataatctgagaattttcgtctgggttatccccgtttacattgcacttttgtcaggctttgctactatgcaaagaagccttttttctttatttgagattgtgatcatcaattgtctatcacttgacgacttttgtgtgtgtgattgacggagcgcatggattatataacaataaaataaagtaaagagagaggccacgcatgcttttccgaaagcatcagtggtgagtgagctttcaac

SEQ ID NO: 70696 - DNA, 876 bp, Zea Mays
cacgcagcagagagctaaatggaacacagcgtcatcatcatggtccgtaaccatcgtcccatcacgcatctagtacaacgccgctaccataccataccaccatctttaactggcccccggattcacgcttccttattttcagttcagttcggaaggtgatccaaatccagagtcaccaccggcaaagacgagctcgcgcgcgcgcgcacacacacacacactactggccctctgccagcggctcggcctctggcgccgacgaaaacaccttggcgatgcgttcggtggggatggcggggaggtacttggcccccgcgtagccgtgctccgcggcggctgcgaccgccctgttgtacttgtcggcccagtgcgcggcggtgggcacgacgatctccgcgacgtgcgggaacaccggcaggccgttcagcgagcgccaggcggagacggccaggtgctccgccgcgggctcgtaccgcacgtagaggtccttggccacgggctccacgcggccgtacacgtcccgcgccaccggctccgtcatcgcgagcgccgcacgggctgcgcccctcacgcccgaccgctgcgcctcggccgccagctcgcgcgccacctccggcacgccccgaaccaccgcgtagacatgcgccgacgccgccttcagcgcgcccgggaggtgcttgtccacctcgtgcaccgtgtcgtccacctgcgcccattgttgttgcgcatcggtcagcaataagcggaggaacacacgacatggtgatcgcacagtgattcagtgaacaccggttgttgttatttttgtggtggtgttgttgttattgctgttattaacgtcactaataaggaagcccaaaatctaacacttgctaa

SEQ ID NO: 70697 - DNA, 436 bp, Zea Mays
atttcacaagaagcaaacaacccaccagacaaacctccccgatgctaacagaagcagagctcctacaactacaattgagtcgccaacaaaaagaatcaaacaaaatcccaagaatcaacaagagtagacgttgtctacaacacaacacagcgaggaatattttggatcgtcggagccaaaattcagatgaaaaaaacatgttcgtcgctattttgtctctatatataattagagtcacagcttccatgaagcagatcttattttggacatgctacatgatatctatgtactactatgtcatgtacctttctgtatacttatctggtgctataacgaaccgtcatgtttcatatatagaatcgtttgctttggcttgctgaaaacgtataacatcaaaaacaagatgaacgcgcgcgctggcgcgcgccagttgact

SEQ ID NO: 70698 - DNA, 1950 bp, Zea Mays
caggaactatctttggtccgttactggcagtatccatgtacagaagatgctctctgcgccctatagtactcctggttcccttaatgcaggatgcctaataaaccactttcagcattgactctacaagatcgaaatgcagaggttcaaatacaggtccacaggaaatgggagtttcgaggtgccgttgacaatggccctatattacacatcgacatgatcctgacagactgcacaggcaatgctatccattgtcagattccttcgttcctagcagctacaagaggcgatgaatttcaagttggcaaaatatacaagatgacccgcttttcagtagcccgtgcaaaatccacctacaagcctgttgatggtgatctcatgttgtatgtcaaaccatacacaacccttgaactttgccacacttcaccatcaggttttcccctttatgtttatcatctaacaagctatgacaagattgatccagatggatcaaatgcaagaaacttccatgacgtccttggtattattacggaaatctctgcgattaagcctgtcggaaatgcacacataccctcatcttacaatcgacatgttctgataaaaaacctcagcgacgacattctgaaaattactctatggggaaaacgtgcacaagaattttcgttgaccaacacttatgacccacagaaacaaactcctatcgtggtcttatttgttggttgtttaccaaaagaatatcaaggggaagtactgttaagtggtggcgcagcctgtcattggtacttcaacccatcaattgaagaagctgaagctttttatagcaggattgaatctgaaaagataaacatagaattgcccagtcttgacaaacaagaaattacacctccaagttttccacaacgagaacatcacaaccttaaatacatactgtctttaaacccacatgatgtaccggatcaaggatatgaatgcacggtaaccattacatgtattcctgaaggcaagacttggtattatattgcttgcaacacttgcccaaacaaaccaagcattgatcccgtcatccgtcaatgctccacatgtagatcaacaaattactgcttcagatacaagctcactttcaaggcatcagatggaactgaagaagctgaaatgtttgcattcgacaatgttgctaggacaattattgggaaaccatgtccaacagttgttgcatcctttcctgatgcatcagctatcccacctgaaattgcagcaatagtttcacggaaatacacattcattatagaattcaacagccagtcattcagatttctagaaaaaacattgctcatcaaaggaattgtagcatcatatggaagaatgacatcactaccaatagtacaagaaaaagatgatgtgcaacttcctctcactccaacaaaaaacaaactgataacaacagctgccgaatctccttctacacccatgtctagactttccacagcagactcaccaagcatgccccaaaagctgacatattctccagcaaagaataagccttagacaaacctccccgatgctaacagaagcagagctcctacaactacaattgagtcgccaacaaaaagaatcaaacaaaatcccaagaatcaacaagagtagacgttgtctacaacacaacacagcgaggaatattttggatcgtcggagccaaaattcagatgaaaaaaacatgttcgtcgctattttgtctctatatataattagagtcacagcttccatgaagcagatcttattttggacatgctacatgatatctatgtactactatgtcatgtacctttctgtatacttatctggtgctataacgaaccgtcatgtttcatatatagaatcgtttgctttggcttgctgaaaacgtataacatcaaaaacaagatgaacgcgcgcgctggcgcgcgccagttgact

SEQ ID NO: 70699 - DNA, 2118 bp, Zea Mays
caacaacgtaaaagagcgttagaccagtggcgattactcacccgaggtaccaatggatagacgataattacaatgactaccaacattaatacttggtccgctgcctctaacaatacaataacacaggtcctgccaaaagtattagaacaccaatgaattgtggttattttcctgaagagtacatagctgcccttaaagtatccatgtacagaagatgctctctgcgccctatagtactcctggttcccttaatgcaggatgcctaataaaccactttcagcattgactctacaagatcgaaatgcagaggttcaaatacaggtccacaggaaatgggagtttcgaggtgccgttgacaatggccctatattacacatcgacatgatcctgacagactgcacaggcaatgctatccattgtcagattccttcgttcctagcagctacaagaggcgatgaatttcaagttggcaaaatatacaagatgacccgcttttcagtagcccgtgcaaaatccacctacaagcctgttgatggtgatctcatgttgtatgtcaaaccatacacaacccttgaactttgccacacttcaccatcaggttttcccctttatgtttatcatctaacaagctatgacaagattgatccagatggatcaaatgcaagaaacttccatgacgtccttggtattattacggaaatctctgcgattaagcctgtcggaaatgcacacataccctcatcttacaatcgacatgttctgataaaaaacctcagcgacgacattctgaaaattactctatggggaaaacgtgcacaagaattttcgttgaccaacacttatgacccacagaaacaaactcctatcgtggtcttatttgttggttgtttaccaaaagaatatcaaggggaagtactgttaagtggtggcgcagcctgtcattggtacttcaacccatcaattgaagaagctgaagctttttatagcaggattgaatctgaaaagataaacatagaattgcccagtcttgacaaacaagaaattacacctccaagttttccacaacgagaacatcacaaccttaaatacatactgtctttaaacccacatgatgtaccggatcaaggatatgaatgcacggtaaccattacatgtattcctgaaggcaagacttggtattatattgcttgcaacacttgcccaaacaaaccaagcattgatcccgtcatccgtcaatgctccacatgtagatcaacaaattactgcttcagatacaagctcactttcaaggcatcagatggaactgaagaagctgaaatgtttgcattcgacaatgttgctaggacaattattgggaaaccatgtccaacagttgttgcatcctttcctgatgcatcagctatcccacctgaaattgcagcaatagtttcacggaaatacacattcattatagaattcaacagccagtcattcagatttctagaaaaaacattgctcatcaaaggaattgtagcatcatatggaagaatgacatcactaccaatagtacaagaaaaagatgatgtgcaacttcctctcactccaacaaaaaacaaactgataacaacagctgccgaatctccttctacacccatgtctagactttccacagcagactcaccaagcatgccccaaaagctgacatattctccagcaaagaataagccttagacaaacctccccgatgctaacagaagcagagctcctacaactacaattgagtcgccaacaaaaagaatcaaacaaaatcccaagaatcaacaagagtagacgttgtctacaacacaacacagcgaggaatattttggatcgtcggagccaaaattcagatgaaaaaaacatgttcgtcgctattttgtctctatatataattagagtcacagcttccatgaagcagatcttattttggacatgctacatgatatctatgtactactatgtcatgtacctttctgtatacttatctggtgctataacgaaccgtcatgtttcatatatagaatcgtttgctttggcttgctgaaaacgtataacatcaaaaacaagatgaacgcgcgcgctggcgcgcgccagttgact

SEQ ID NO: 70700 - DNA, 2557 bp, Zea Mays
ctctacctccatattttactctcattgctactgtatagtatttttccagccatccttcagtcaacattttagatgtgctataaagtgttgtggattgttaaaaaaaaaattcgatcttctgcgatttcttctcgctcagctaaccttctttatttttttttttaaaaacgaaaaaatcttatgtgattttttactctctgcgctaacctcacttttttaccgccattcatccccttccagtttatcttaccgcacttcagtgaagtccatgttctcttacgccatttcagcacttcatcctatcattttttttatttttgccctcattggtactgtgatgagcgataaattgttaaaaaatatgggataaaatgtttggcgaaggttcctagatgaccctcttttcgttcgattcctgctctcttcattgaagaagatacatttttggtcccctcttttcgttctcttccgcctctctctctctctctttctagcggaggttcctatgtgaaaaaaaaggaacaacaatagaatcttttgtctttagagtttactgatgaaataactaagatgttatcatccctttattaaacaatcaggattacgctttcattcgaagccaggtccaaagacagtacgaagttcatccgtaaaaaaggttccgacagctcaatatcgaccatcaacaaagataaggatgcctaataaaccactttcagcattgactctacaagatcgaaatgcagaggttcaaatacaggtccacaggaaatgggagtttcgaggtgccgttgacaatggccctatattacacatcgacatgatcctgacagactgcacaggcaatgctatccattgtcagattccttcgttcctagcagctacaagaggcgatgaatttcaagttggcaaaatatacaagatgacccgcttttcagtagcccgtgcaaaatccacctacaagcctgttgatggtgatctcatgttgtatgtcaaaccatacacaacccttgaactttgccacacttcaccatcaggttttcccctttatgtttatcatctaacaagctatgacaagattgatccagatggatcaaatgcaagaaacttccatgacgtccttggtattattacggaaatctctgcgattaagcctgtcggaaatgcacacataccctcatcttacaatcgacatgttctgataaaaaacctcagcgacgacattctgaaaattactctatggggaaaacgtgcacaagaattttcgttgaccaacacttatgacccacagaaacaaactcctatcgtggtcttatttgttggttgtttaccaaaagaatatcaaggggaagtactgttaagtggtggcgcagcctgtcattggtacttcaacccatcaattgaagaagctgaagctttttatagcaggattgaatctgaaaagataaacatagaattgcccagtcttgacaaacaagaaattacacctccaagttttccacaacgagaacatcacaaccttaaatacatactgtctttaaacccacatgatgtaccggatcaaggatatgaatgcacggtaaccattacatgtattcctgaaggcaagacttggtattatattgcttgcaacacttgcccaaacaaaccaagcattgatcccgtcatccgtcaatgctccacatgtagatcaacaaattactgcttcagatacaagctcactttcaaggcatcagatggaactgaagaagctgaaatgtttgcattcgacaatgttgctaggacaattattgggaaaccatgtccaacagttgttgcatcctttcctgatgcatcagctatcccacctgaaattgcagcaatagtttcacggaaatacacattcattatagaattcaacagccagtcattcagatttctagaaaaaacattgctcatcaaaggaattgtagcatcatatggaagaatgacatcactaccaatagtacaagaaaaagatgatgtgcaacttcctctcactccaacaaaaaacaaactgataacaacagctgccgaatctccttctacacccatgtctagactttccacagcagactcaccaagcatgccccaaaagctgacatattctccagcaaagaataagccttagacaaacctccccgatgctaacagaagcagagctcctacaactacaattgagtcgccaacaaaaagaatcaaacaaaatcccaagaatcaacaagagtagacgttgtctacaacacaacacagcgaggaatattttggatcgtcggagccaaaattcagatgaaaaaaacatgttcgtcgctattttgtctctatatataattagagtcacagcttccatgaagcagatcttattttggacatgctacatgatatctatgtactactatgtcatgtacctttctgtatacttatctggtgctataacgaaccgtcatgtttcatatatagaatcgtttgctttggcttgctgaaaacgtataacatcaaaaacaagatgaacgcgcgcgctggcgcgcgccagttgact

SEQ ID NO: 70701 - DNA, 2554 bp, Zea Mays
ctctacctccatattttactctcattgctactgtatagtatttttccagccatccttcagtcaacattttagatgtgctataaagtgttgtggattgttaaaaaaaaaattcgatcttctgcgatttcttctcgctcagctaaccttctttatttttttttttaaaaacgaaaaaatcttatgtgattttttactctctgcgctaacctcacttttttaccgccattcatccccttccagtttatcttaccgcacttcagtgaagtccatgttctcttacgccatttcagcacttcatcctatcattttttttatttttgccctcattggtactgtgatgagcgataaattgttaaaaaatatgggataaaatgtttggcgaaggttcctagatgaccctcttttcgttcgattcctgctctcttcattgaagaagatacatttttggtcccctcttttcgttctcttccgcctctctctctctctctttctagcggaggttcctatgtgaaaaaaaaggaacaacaatagaatcttttgtctttagagtttactgatgaaataactaagatgttatcatccctttattaaacaatcaggattacgctttcattcgaagccaggtccaaagatacgaagttcatccgtaaaaaaggttccgacagctcaatatcgaccatcaacaaagataaggatgcctaataaaccactttcagcattgactctacaagatcgaaatgcagaggttcaaatacaggtccacaggaaatgggagtttcgaggtgccgttgacaatggccctatattacacatcgacatgatcctgacagactgcacaggcaatgctatccattgtcagattccttcgttcctagcagctacaagaggcgatgaatttcaagttggcaaaatatacaagatgacccgcttttcagtagcccgtgcaaaatccacctacaagcctgttgatggtgatctcatgttgtatgtcaaaccatacacaacccttgaactttgccacacttcaccatcaggttttcccctttatgtttatcatctaacaagctatgacaagattgatccagatggatcaaatgcaagaaacttccatgacgtccttggtattattacggaaatctctgcgattaagcctgtcggaaatgcacacataccctcatcttacaatcgacatgttctgataaaaaacctcagcgacgacattctgaaaattactctatggggaaaacgtgcacaagaattttcgttgaccaacacttatgacccacagaaacaaactcctatcgtggtcttatttgttggttgtttaccaaaagaatatcaaggggaagtactgttaagtggtggcgcagcctgtcattggtacttcaacccatcaattgaagaagctgaagctttttatagcaggattgaatctgaaaagataaacatagaattgcccagtcttgacaaacaagaaattacacctccaagttttccacaacgagaacatcacaaccttaaatacatactgtctttaaacccacatgatgtaccggatcaaggatatgaatgcacggtaaccattacatgtattcctgaaggcaagacttggtattatattgcttgcaacacttgcccaaacaaaccaagcattgatcccgtcatccgtcaatgctccacatgtagatcaacaaattactgcttcagatacaagctcactttcaaggcatcagatggaactgaagaagctgaaatgtttgcattcgacaatgttgctaggacaattattgggaaaccatgtccaacagttgttgcatcctttcctgatgcatcagctatcccacctgaaattgcagcaatagtttcacggaaatacacattcattatagaattcaacagccagtcattcagatttctagaaaaaacattgctcatcaaaggaattgtagcatcatatggaagaatgacatcactaccaatagtacaagaaaaagatgatgtgcaacttcctctcactccaacaaaaaacaaactgataacaacagctgccgaatctccttctacacccatgtctagactttccacagcagactcaccaagcatgccccaaaagctgacatattctccagcaaagaataagccttagacaaacctccccgatgctaacagaagcagagctcctacaactacaattgagtcgccaacaaaaagaatcaaacaaaatcccaagaatcaacaagagtagacgttgtctacaacacaacacagcgaggaatattttggatcgtcggagccaaaattcagatgaaaaaaacatgttcgtcgctattttgtctctatatataattagagtcacagcttccatgaagcagatcttattttggacatgctacatgatatctatgtactactatgtcatgtacctttctgtatacttatctggtgctataacgaaccgtcatgtttcatatatagaatcgtttgctttggcttgctgaaaacgtataacatcaaaaacaagatgaacgcgcgcgctggcgcgcgccagttgact

SEQ ID NO: 70702 - DNA, 2616 bp, Zea Mays
gttctctacctccatattttactctcattgctactgtatagtatttttccagccatccttcagtcaacattttagatgtgctataaagtgttgtggattgttaaaaaaaaaattcgatcttctgcgatttcttctcgctcagctaaccttctttatttttttttttaaaaacgaaaaaatcttatgtgattttttactctctgcgctaacctcacttttttaccgccattcatccccttccagtttatcttaccgcacttcagtgaagtccatgttctcttacgccatttcagcacttcatcctatcattttttttatttttgccctcattggtactgtgatgagcgataaattgttaaaaaatatgggataaaatgtttggcgaaggttcctagatgaccctcttttcgttcgattcctgctctcttcattgaagaagatacatttttggtcccctcttttcgttctcttccgcctctctctctctctctttctagcggaggttcctatgtgaaaaaaaaggaacaacaatagaatcttttgtctttagagtttactgatgaaataactaagatgttatcatccctttattaaacaatcaggattacgctttcattcgaagccaggtccaaagatacgaagttcatccgtaaaaaaggttccgacagctcaatatcgaccatcaacaaagataagtatccatgtacagaagatgctctctgcgccctatagtactcctggttcccttaatgcaggatgcctaataaaccactttcagcattgactctacaagatcgaaatgcagaggttcaaatacaggtccacaggaaatgggagtttcgaggtgccgttgacaatggccctatattacacatcgacatgatcctgacagactgcacaggcaatgctatccattgtcagattccttcgttcctagcagctacaagaggcgatgaatttcaagttggcaaaatatacaagatgacccgcttttcagtagcccgtgcaaaatccacctacaagcctgttgatggtgatctcatgttgtatgtcaaaccatacacaacccttgaactttgccacacttcaccatcaggttttcccctttatgtttatcatctaacaagctatgacaagattgatccagatggatcaaatgcaagaaacttccatgacgtccttggtattattacggaaatctctgcgattaagcctgtcggaaatgcacacataccctcatcttacaatcgacatgttctgataaaaaacctcagcgacgacattctgaaaattactctatggggaaaacgtgcacaagaattttcgttgaccaacacttatgacccacagaaacaaactcctatcgtggtcttatttgttggttgtttaccaaaagaatatcaaggggaagtactgttaagtggtggcgcagcctgtcattggtacttcaacccatcaattgaagaagctgaagctttttatagcaggattgaatctgaaaagataaacatagaattgcccagtcttgacaaacaagaaattacacctccaagttttccacaacgagaacatcacaaccttaaatacatactgtctttaaacccacatgatgtaccggatcaaggatatgaatgcacggtaaccattacatgtattcctgaaggcaagacttggtattatattgcttgcaacacttgcccaaacaaaccaagcattgatcccgtcatccgtcaatgctccacatgtagatcaacaaattactgcttcagatacaagctcactttcaaggcatcagatggaactgaagaagctgaaatgtttgcattcgacaatgttgctaggacaattattgggaaaccatgtccaacagttgttgcatcctttcctgatgcatcagctatcccacctgaaattgcagcaatagtttcacggaaatacacattcattatagaattcaacagccagtcattcagatttctagaaaaaacattgctcatcaaaggaattgtagcatcatatggaagaatgacatcactaccaatagtacaagaaaaagatgatgtgcaacttcctctcactccaacaaaaaacaaactgataacaacagctgccgaatctccttctacacccatgtctagactttccacagcagactcaccaagcatgccccaaaagctgacatattctccagcaaagaataagccttagacaaacctccccgatgctaacagaagcagagctcctacaactacaattgagtcgccaacaaaaagaatcaaacaaaatcccaagaatcaacaagagtagacgttgtctacaacacaacacagcgaggaatattttggatcgtcggagccaaaattcagatgaaaaaaacatgttcgtcgctattttgtctctatatataattagagtcacagcttccatgaagcagatcttattttggacatgctacatgatatctatgtactactatgtcatgtacctttctgtatacttatctggtgctataacgaaccgtcatgtttcatatatagaatcgtttgctttggcttgctgaaaacgtataacatcaaaaacaagatgaacgcgcgcgctggcgcgcgccagttgact

SEQ ID NO: 70703 - DNA, 2631 bp, Zea Mays
tgcctcccttaagttctctacctccatattttactctcattgctactgtatagtatttttccagccatccttcagtcaacattttagatgtgctataaagtgttgtggattgttaaaaaaaaaattcgatcttctgcgatttcttctcgctcagctaaccttctttatttttttttttaaaaacgaaaaaatcttatgtgattttttactctctgcgctaacctcacttttttaccgccattcatccccttccagtttatcttaccgcacttcagtgaagtccatgttctcttacgccatttcagcacttcatcctatcattttttttatttttgccctcattggtactgtgatgagcgataaattgttaaaaaatatgggataaaatgtttggcgaaggttcctagatgaccctcttttcgttcgattcctgctctcttcattgaagaagatacatttttggtcccctcttttcgttctcttccgcctctctctctctctctttctagcggaggttcctatgtgaaaaaaaaggaacaacaatagaatcttttgtctttagagtttactgatgaaataactaagatgttatcatccctttattaaacaatcaggattacgctttcattcgaagccaggtccaaagacagtacgaagttcatccgtaaaaaaggttccgacagctcaatatcgaccatcaacaaagataagtatccatgtacagaagatgctctctgcgccctatagtactcctggttcccttaatgcaggatgcctaataaaccactttcagcattgactctacaagatcgaaatgcagaggttcaaatacaggtccacaggaaatgggagtttcgaggtgccgttgacaatggccctatattacacatcgacatgatcctgacagactgcacaggcaatgctatccattgtcagattccttcgttcctagcagctacaagaggcgatgaatttcaagttggcaaaatatacaagatgacccgcttttcagtagcccgtgcaaaatccacctacaagcctgttgatggtgatctcatgttgtatgtcaaaccatacacaacccttgaactttgccacacttcaccatcaggttttcccctttatgtttatcatctaacaagctatgacaagattgatccagatggatcaaatgcaagaaacttccatgacgtccttggtattattacggaaatctctgcgattaagcctgtcggaaatgcacacataccctcatcttacaatcgacatgttctgataaaaaacctcagcgacgacattctgaaaattactctatggggaaaacgtgcacaagaattttcgttgaccaacacttatgacccacagaaacaaactcctatcgtggtcttatttgttggttgtttaccaaaagaatatcaaggggaagtactgttaagtggtggcgcagcctgtcattggtacttcaacccatcaattgaagaagctgaagctttttatagcaggattgaatctgaaaagataaacatagaattgcccagtcttgacaaacaagaaattacacctccaagttttccacaacgagaacatcacaaccttaaatacatactgtctttaaacccacatgatgtaccggatcaaggatatgaatgcacggtaaccattacatgtattcctgaaggcaagacttggtattatattgcttgcaacacttgcccaaacaaaccaagcattgatcccgtcatccgtcaatgctccacatgtagatcaacaaattactgcttcagatacaagctcactttcaaggcatcagatggaactgaagaagctgaaatgtttgcattcgacaatgttgctaggacaattattgggaaaccatgtccaacagttgttgcatcctttcctgatgcatcagctatcccacctgaaattgcagcaatagtttcacggaaatacacattcattatagaattcaacagccagtcattcagatttctagaaaaaacattgctcatcaaaggaattgtagcatcatatggaagaatgacatcactaccaatagtacaagaaaaagatgatgtgcaacttcctctcactccaacaaaaaacaaactgataacaacagctgccgaatctccttctacacccatgtctagactttccacagcagactcaccaagcatgccccaaaagctgacatattctccagcaaagaataagccttagacaaacctccccgatgctaacagaagcagagctcctacaactacaattgagtcgccaacaaaaagaatcaaacaaaatcccaagaatcaacaagagtagacgttgtctacaacacaacacagcgaggaatattttggatcgtcggagccaaaattcagatgaaaaaaacatgttcgtcgctattttgtctctatatataattagagtcacagcttccatgaagcagatcttattttggacatgctacatgatatctatgtactactatgtcatgtacctttctgtatacttatctggtgctataacgaaccgtcatgtttcatatatagaatcgtttgctttggcttgctgaaaacgtataacatcaaaaacaagatgaacgcgcgcgctggcgcgcgccagttgact

SEQ ID NO: 70704 - DNA, 1978 bp, Zea Mays
gtcacatttacagagagaggaaacgcaaccacatcaagaactccgccatcaccagacgacatcagctcccccaccatccatcgttctccagggattacgctttcattcgaagccaggtccaaagacagtacgaagttcatccgtaaaaaaggttccgacagctcaatatcgaccatcaacaaagataagtatccatgtacagaagatgctctctgcgccctatagtactcctggttcccttaatgcaggatgcctaataaaccactttcagcattgactctacaagatcgaaatgcagaggttcaaatacaggtccacaggaaatgggagtttcgaggtgccgttgacaatggccctatattacacatcgacatgatcctgacagactgcacaggcaatgctatccattgtcagattccttcgttcctagcagctacaagaggcgatgaatttcaagttggcaaaatatacaagatgacccgcttttcagtagcccgtgcaaaatccacctacaagcctgttgatggtgatctcatgttgtatgtcaaaccatacacaacccttgaactttgccacacttcaccatcaggttttcccctttatgtttatcatctaacaagctatgacaagattgatccagatggatcaaatgcaagaaacttccatgacgtccttggtattattacggaaatctctgcgattaagcctgtcggaaatgcacacataccctcatcttacaatcgacatgttctgataaaaaacctcaggggaagtactgttaagtggtggcgcagcctgtcattggtacttcaacccatcaattgaagaagctgaagctttttatagcaggattgaatctgaaaagataaacatagaattgcccagtcttgacaaacaagaaattacacctccaagttttccacaacgagaacatcacaaccttaaatacatactgtctttaaacccacatgatgtaccggatcaaggatatgaatgcacggtaaccattacatgtattcctgaaggcaagacttggtattatattgcttgcaacacttgcccaaacaaaccaagcattgatcccgtcatccgtcaatgctccacatgtagatcaacaaattactgcttcagatacaagctcactttcaaggcatcagatggaactgaagaagctgaaatgtttgcattcgacaatgttgctaggacaattattgggaaaccatgtccaacagttgttgcatcctttcctgatgcatcagctatcccacctgaaattgcagcaatagtttcacggaaatacacattcattatagaattcaacagccagtcattcagatttctagaaaaaacattgctcatcaaaggaattgtagcatcatatggaagaatgacatcactaccaatagtacaagaaaaagatgatgtgcaacttcctctcactccaacaaaaaacaaactgataacaacagctgccgaatctccttctacacccatgtctagactttccacagcagactcaccaagcatgccccaaaagctgacatattctccagcaaagaataagccttagacaaacctccccgatgctaacagaagcagagctcctacaactacaattgagtcgccaacaaaaagaatcaaacaaaatcccaagaatcaacaagagtagacgttgtctacaacacaacacagcgaggaatattttggatcgtcggagccaaaattcagatgaaaaaaacatgttcgtcgctattttgtctctatatataattagagtcacagcttccatgaagcagatcttattttggacatgctacatgatatctatgtactactatgtcatgtacctttctgtatacttatctggtgctataacgaaccgtcatgtttcatatatagaatcgtttgctttggcttgctgaaaacgtataacatcaaaaacaagatgaacgcgcgcgctggcgcgcgccagttgact

SEQ ID NO: 70705 - DNA, 1990 bp, Zea Mays
atcaaaagtaaaggaaggcagggcgtcacatttacagagagaggaaacgcaaccacatcaagaactccgccatcaccagacgacatcagctcccccaccatccatcgttctccagggattacgctttcattcgaagccagtacgaagttcatccgtaaaaaaggttccgacagctcaatatcgaccatcaacaaagataagtatccatgtacagaagatgctctctgcgccctatagtactcctggttcccttaatgcaggatgcctaataaaccactttcagcattgactctacaagatcgaaatgcagaggttcaaatacaggtccacaggaaatgggagtttcgaggtgccgttgacaatggccctatattacacatcgacatgatcctgacagactgcacaggcaatgctatccattgtcagattccttcgttcctagcagctacaagaggcgatgaatttcaagttggcaaaatatacaagatgacccgcttttcagtagcccgtgcaaaatccacctacaagcctgttgatggtgatctcatgttgtatgtcaaaccatacacaacccttgaactttgccacacttcaccatcaggttttcccctttatgtttatcatctaacaagctatgacaagattgatccagatggatcaaatgcaagaaacttccatgacgtccttggtattattacggaaatctctgcgattaagcctgtcggaaatgcacacataccctcatcttacaatcgacatgttctgataaaaaacctcaggggaagtactgttaagtggtggcgcagcctgtcattggtacttcaacccatcaattgaagaagctgaagctttttatagcaggattgaatctgaaaagataaacatagaattgcccagtcttgacaaacaagaaattacacctccaagttttccacaacgagaacatcacaaccttaaatacatactgtctttaaacccacatgatgtaccggatcaaggatatgaatgcacggtaaccattacatgtattcctgaaggcaagacttggtattatattgcttgcaacacttgcccaaacaaaccaagcattgatcccgtcatccgtcaatgctccacatgtagatcaacaaattactgcttcagatacaagctcactttcaaggcatcagatggaactgaagaagctgaaatgtttgcattcgacaatgttgctaggacaattattgggaaaccatgtccaacagttgttgcatcctttcctgatgcatcagctatcccacctgaaattgcagcaatagtttcacggaaatacacattcattatagaattcaacagccagtcattcagatttctagaaaaaacattgctcatcaaaggaattgtagcatcatatggaagaatgacatcactaccaatagtacaagaaaaagatgatgtgcaacttcctctcactccaacaaaaaacaaactgataacaacagctgccgaatctccttctacacccatgtctagactttccacagcagactcaccaagcatgccccaaaagctgacatattctccagcaaagaataagccttagacaaacctccccgatgctaacagaagcagagctcctacaactacaattgagtcgccaacaaaaagaatcaaacaaaatcccaagaatcaacaagagtagacgttgtctacaacacaacacagcgaggaatattttggatcgtcggagccaaaattcagatgaaaaaaacatgttcgtcgctattttgtctctatatataattagagtcacagcttccatgaagcagatcttattttggacatgctacatgatatctatgtactactatgtcatgtacctttctgtatacttatctggtgctataacgaaccgtcatgtttcatatatagaatcgtttgctttggcttgctgaaaacgtataacatcaaaaacaagatgaacgcgcgcgctggcgcgcgccagttgact

SEQ ID NO: 70706 - DNA, 2126 bp, Zea Mays
ctcctatcaaaagtaaaggaaggcagggcgtcacatttacagagagaggaaacgcaaccacatcaagaactccgccatcaccagacgacatcagctcccccaccatccatcgttctccagggattacgctttcattcgaagccagtacgaagttcatccgtaaaaaaggttccgacagctcaatatcgaccatcaacaaagataagtatccatgtacagaagatgctctctgcgccctatagtactcctggttcccttaatgcaggatgcctaataaaccactttcagcattgactctacaagatcgaaatgcagaggttcaaatacaggtccacaggaaatgggagtttcgaggtgccgttgacaatggccctatattacacatcgacatgatcctgacagactgcacaggcaatgctatccattgtcagattccttcgttcctagcagctacaagaggcgatgaatttcaagttggcaaaatatacaagatgacccgcttttcagtagcccgtgcaaaatccacctacaagcctgttgatggtgatctcatgttgtatgtcaaaccatacacaacccttgaactttgccacacttcaccatcaggttttcccctttatgtttatcatctaacaagctatgacaagattgatccagatggatcaaatgcaagaaacttccatgacgtccttggtattattacggaaatctctgcgattaagcctgtcggaaatgcacacataccctcatcttacaatcgacatgttctgataaaaaacctcagcgacgacattctgaaaattactctatggggaaaacgtgcacaagaattttcgttgaccaacacttatgacccacagaaacaaactcctatcgtggtcttatttgttggttgtttaccaaaagaatatcaaggggaagtactgttaagtggtggcgcagcctgtcattggtacttcaacccatcaattgaagaagctgaagctttttatagcaggattgaatctgaaaagataaacatagaattgcccagtcttgacaaacaagaaattacacctccaagttttccacaacgagaacatcacaaccttaaatacatactgtctttaaacccacatgatgtaccggatcaaggatatgaatgcacggtaaccattacatgtattcctgaaggcaagacttggtattatattgcttgcaacacttgcccaaacaaaccaagcattgatcccgtcatccgtcaatgctccacatgtagatcaacaaattactgcttcagatacaagctcactttcaaggcatcagatggaactgaagaagctgaaatgtttgcattcgacaatgttgctaggacaattattgggaaaccatgtccaacagttgttgcatcctttcctgatgcatcagctatcccacctgaaattgcagcaatagtttcacggaaatacacattcattatagaattcaacagccagtcattcagatttctagaaaaaacattgctcatcaaaggaattgtagcatcatatggaagaatgacatcactaccaatagtacaagaaaaagatgatgtgcaacttcctctcactccaacaaaaaacaaactgataacaacagctgccgaatctccttctacacccatgtctagactttccacagcagactcaccaagcatgccccaaaagctgacatattctccagcaaagaataagccttagacaaacctccccgatgctaacagaagcagagctcctacaactacaattgagtcgccaacaaaaagaatcaaacaaaatcccaagaatcaacaagagtagacgttgtctacaacacaacacagcgaggaatattttggatcgtcggagccaaaattcagatgaaaaaaacatgttcgtcgctattttgtctctatatataattagagtcacagcttccatgaagcagatcttattttggacatgctacatgatatctatgtactactatgtcatgtacctttctgtatacttatctggtgctataacgaaccgtcatgtttcatatatagaatcgtttgctttggcttgctgaaaacgtataacatcaaaaacaagatgaacgcgcgcgctggcgcgcgccagttgact

SEQ ID NO: 70707 - DNA, 2191 bp, Zea Mays
agaaacactgcttcaccaccgtaacctcctatcaaaagtaaaggaaggcagggcgtcacatttacagagagaggaaacgcaaccacatcaagaactccgccatcaccagacgacatcagctcccccaccatccatcgttctccagggattacgctttcattcgaagccaggtccaaagatacgaagttcatccgtaaaaaaggttccgacagctcaatatcgaccatcaacaaagataagtttatatcctaaacaagcctattatgtatagtatccatgtacagaagatgctctctgcgccctatagtactcctggttcccttaatgcaggatgcctaataaaccactttcagcattgactctacaagatcgaaatgcagaggttcaaatacaggtccacaggaaatgggagtttcgaggtgccgttgacaatggccctatattacacatcgacatgatcctgacagactgcacaggcaatgctatccattgtcagattccttcgttcctagcagctacaagaggcgatgaatttcaagttggcaaaatatacaagatgacccgcttttcagtagcccgtgcaaaatccacctacaagcctgttgatggtgatctcatgttgtatgtcaaaccatacacaacccttgaactttgccacacttcaccatcaggttttcccctttatgtttatcatctaacaagctatgacaagattgatccagatggatcaaatgcaagaaacttccatgacgtccttggtattattacggaaatctctgcgattaagcctgtcggaaatgcacacataccctcatcttacaatcgacatgttctgataaaaaacctcagcgacgacattctgaaaattactctatggggaaaacgtgcacaagaattttcgttgaccaacacttatgacccacagaaacaaactcctatcgtggtcttatttgttggttgtttaccaaaagaatatcaaggggaagtactgttaagtggtggcgcagcctgtcattggtacttcaacccatcaattgaagaagctgaagctttttatagcaggattgaatctgaaaagataaacatagaattgcccagtcttgacaaacaagaaattacacctccaagttttccacaacgagaacatcacaaccttaaatacatactgtctttaaacccacatgatgtaccggatcaaggatatgaatgcacggtaaccattacatgtattcctgaaggcaagacttggtattatattgcttgcaacacttgcccaaacaaaccaagcattgatcccgtcatccgtcaatgctccacatgtagatcaacaaattactgcttcagatacaagctcactttcaaggcatcagatggaactgaagaagctgaaatgtttgcattcgacaatgttgctaggacaattattgggaaaccatgtccaacagttgttgcatcctttcctgatgcatcagctatcccacctgaaattgcagcaatagtttcacggaaatacacattcattatagaattcaacagccagtcattcagatttctagaaaaaacattgctcatcaaaggaattgtagcatcatatggaagaatgacatcactaccaatagtacaagaaaaagatgatgtgcaacttcctctcactccaacaaaaaacaaactgataacaacagctgccgaatctccttctacacccatgtctagactttccacagcagactcaccaagcatgccccaaaagctgacatattctccagcaaagaataagccttagacaaacctccccgatgctaacagaagcagagctcctacaactacaattgagtcgccaacaaaaagaatcaaacaaaatcccaagaatcaacaagagtagacgttgtctacaacacaacacagcgaggaatattttggatcgtcggagccaaaattcagatgaaaaaaacatgttcgtcgctattttgtctctatatataattagagtcacagcttccatgaagcagatcttattttggacatgctacatgatatctatgtactactatgtcatgtacctttctgtatacttatctggtgctataacgaaccgtcatgtttcatatatagaatcgtttgctttggcttgctgaaaacgtataacatcaaaaacaagatgaacgcgcgcgctggcgcgcgccagttgact

SEQ ID NO: 70708 - DNA, 2153 bp, Zea Mays
aagaaacactgcttcaccaccgtaacctcctatcaaaagtaaaggaaggcagggcgtcacatttacagagagaggaaacgcaaccacatcaagaactccgccatcaccagacgacatcagctcccccaccatccatcgttctccagggattacgctttcattcgaagccaggtccaaagagctgagtttctaactataatctttttctctgatatatttactatgctacctacgtaaacaaatacatgtaaaataaccgtgtttcgcagcagtacgaagttcatccgtaaaaaaggttccgacagctcaatatcgaccatcaacaaagataagtatccatgtacagaagatgctctctgcgccctatagtactcctggttcccttaatgcaggatgcctaataaaccactttcagcattgactctacaagatcgaaatgcagaggttcaaatacaggtccacaggaaatgggagtttcgaggtgccgttgacaatggccctatattacacatcgacatgatcctgacagactgcacaggcaatgctatccattgtcagattccttcgttcctagcagctacaagaggcgatgaatttcaagttggcaaaatatacaagatgacccgcttttcagtagcccgtgcaaaatccacctacaagcctgttgatggtgatctcatgttgtatgtcaaaccatacacaacccttgaactttgccacacttcaccatcaggttttcccctttatgtttatcatctaacaagctatgacaagattgatccagatggatcaaatgcaagaaacttccatgcgacgacattctgaaaattactctatggggaaaacgtgcacaagaattttcgttgaccaacacttatgacccacagaaacaaactcctatcgtggtcttatttgttggttgtttaccaaaagaatatcaaggggaagtactgttaagtggtggcgcagcctgtcattggtacttcaacccatcaattgaagaagctgaagctttttatagcaggattgaatctgaaaagataaacatagaattgcccagtcttgacaaacaagaaattacacctccaagttttccacaacgagaacatcacaaccttaaatacatactgtctttaaacccacatgatgtaccggatcaaggatatgaatgcacggtaaccattacatgtattcctgaaggcaagacttggtattatattgcttgcaacacttgcccaaacaaaccaagcattgatcccgtcatccgtcaatgctccacatgtagatcaacaaattactgcttcagatacaagctcactttcaaggcatcagatggaactgaagaagctgaaatgtttgcattcgacaatgttgctaggacaattattgggaaaccatgtccaacagttgttgcatcctttcctgatgcatcagctatcccacctgaaattgcagcaatagtttcacggaaatacacattcattatagaattcaacagccagtcattcagatttctagaaaaaacattgctcatcaaaggaattgtagcatcatatggaagaatgacatcactaccaatagtacaagaaaaagatgatgtgcaacttcctctcactccaacaaaaaacaaactgataacaacagctgccgaatctccttctacacccatgtctagactttccacagcagactcaccaagcatgccccaaaagctgacatattctccagcaaagaataagccttagacaaacctccccgatgctaacagaagcagagctcctacaactacaattgagtcgccaacaaaaagaatcaaacaaaatcccaagaatcaacaagagtagacgttgtctacaacacaacacagcgaggaatattttggatcgtcggagccaaaattcagatgaaaaaaacatgttcgtcgctattttgtctctatatataattagagtcacagcttccatgaagcagatcttattttggacatgctacatgatatctatgtactactatgtcatgtacctttctgtatacttatctggtgctataacgaaccgtcatgtttcatatatagaatcgtttgctttggcttgctgaaaacgtataacatcaaaaacaagatgaacgcgcgcgctggcgcgcgccagttgact

SEQ ID NO: 70709 - DNA, 2169 bp, Zea Mays
gaagaaagaaacactgcttcaccaccgtaacctcctatcaaaagtaaaggaaggcagggcgtcacatttacagagagaggaaacgcaaccacatcaagaactccgccatcaccagacgacatcagctcccccaccatccatcgttctccagggattacgctttcattcgaagccaggtccaaagacagtacgaagttcatccgtaaaaaaggttccgacagctcaatatcgaccatcaacaaagataagtatccatgtacagaagatgctctctgcgccctatagtactcctggttcccttaatgcaggatgcctaataaaccactttcagcattgactctacaagatcgaaatgcagaggttcaaatacaggtccacaggaaatgggagtttcgaggtgccgttgacaatggccctatattacacatcgacatgatcctgacagactgcacaggcaatgctatccattgtcagattccttcgttcctagcagctacaagaggcgatgaatttcaagttggcaaaatatacaagatgacccgcttttcagtagcccgtgcaaaatccacctacaagcctgttgatggtgatctcatgttgtatgtcaaaccatacacaacccttgaactttgccacacttcaccatcaggttttcccctttatgtttatcatctaacaagctatgacaagattgatccagatggatcaaatgcaagaaacttccatgacgtccttggtattattacggaaatctctgcgattaagcctgtcggaaatgcacacataccctcatcttacaatcgacatgttctgataaaaaacctcagcgacgacattctgaaaattactctatggggaaaacgtgcacaagaattttcgttgaccaacacttatgacccacagaaacaaactcctatcgtggtcttatttgttggttgtttaccaaaagaatatcaaggggaagtactgttaagtggtggcgcagcctgtcattggtacttcaacccatcaattgaagaagctgaagctttttatagcaggattgaatctgaaaagataaacatagaattgcccagtcttgacaaacaagaaattacacctccaagttttccacaacgagaacatcacaaccttaaatacatactgtctttaaacccacatgatgtaccggatcaaggatatgaatgcacggtaaccattacatgtattcctgaaggcaagacttggtattatattgcttgcaacacttgcccaaacaaaccaagcattgatcccgtcatccgtcaatgctccacatgtagatcaacaaattactgcttcagatacaagctcactttcaaggcatcagatggaactgaagaagctgaaatgtttgcattcgacaatgttgctaggacaattattgggaaaccatgtccaacagttgttgcatcctttcctgatgcatcagctatcccacctgaaattgcagcaatagtttcacggaaatacacattcattatagaattcaacagccagtcattcagatttctagaaaaaacattgctcatcaaaggaattgtagcatcatatggaagaatgacatcactaccaatagtacaagaaaaagatgatgtgcaacttcctctcactccaacaaaaaacaaactgataacaacagctgccgaatctccttctacacccatgtctagactttccacagcagactcaccaagcatgccccaaaagctgacatattctccagcaaagaataagccttagacaaacctccccgatgctaacagaagcagagctcctacaactacaattgagtcgccaacaaaaagaatcaaacaaaatcccaagaatcaacaagagtagacgttgtctacaacacaacacagcgaggaatattttggatcgtcggagccaaaattcagatgaaaaaaacatgttcgtcgctattttgtctctatatataattagagtcacagcttccatgaagcagatcttattttggacatgctacatgatatctatgtactactatgtcatgtacctttctgtatacttatctggtgctataacgaaccgtcatgtttcatatatagaatcgtttgctttggcttgctgaaaacgtataacatcaaaaacaagatgaacgcgcgcgctggcgcgcgccagttgact

SEQ ID NO: 70710 - DNA, 2219 bp, Zea Mays
gtcctcgcttgtgcttgcgtgcagagtcttccatggattgaataaaaaaagaagaagaaagaaacactgcttcaccaccgtaacctcctatcaaaagtaaaggaaggcagggcgtcacatttacagagagaggaaacgcaaccacatcaagaactccgccatcaccagacgacatcagctcccccaccatccatcgttctccagggattacgctttcattcgaagccaggtccaaagatacgaagttcatccgtaaaaaaggttccgacagctcaatatcgaccatcaacaaagataagtatccatgtacagaagatgctctctgcgccctatagtactcctggttcccttaatgcaggatgcctaataaaccactttcagcattgactctacaagatcgaaatgcagaggttcaaatacaggtccacaggaaatgggagtttcgaggtgccgttgacaatggccctatattacacatcgacatgatcctgacagactgcacaggcaatgctatccattgtcagattccttcgttcctagcagctacaagaggcgatgaatttcaagttggcaaaatatacaagatgacccgcttttcagtagcccgtgcaaaatccacctacaagcctgttgatggtgatctcatgttgtatgtcaaaccatacacaacccttgaactttgccacacttcaccatcaggttttcccctttatgtttatcatctaacaagctatgacaagattgatccagatggatcaaatgcaagaaacttccatgacgtccttggtattattacggaaatctctgcgattaagcctgtcggaaatgcacacataccctcatcttacaatcgacatgttctgataaaaaacctcagcgacgacattctgaaaattactctatggggaaaacgtgcacaagaattttcgttgaccaacacttatgacccacagaaacaaactcctatcgtggtcttatttgttggttgtttaccaaaagaatatcaaggggaagtactgttaagtggtggcgcagcctgtcattggtacttcaacccatcaattgaagaagctgaagctttttatagcaggattgaatctgaaaagataaacatagaattgcccagtcttgacaaacaagaaattacacctccaagttttccacaacgagaacatcacaaccttaaatacatactgtctttaaacccacatgatgtaccggatcaaggatatgaatgcacggtaaccattacatgtattcctgaaggcaagacttggtattatattgcttgcaacacttgcccaaacaaaccaagcattgatcccgtcatccgtcaatgctccacatgtagatcaacaaattactgcttcagatacaagctcactttcaaggcatcagatggaactgaagaagctgaaatgtttgcattcgacaatgttgctaggacaattattgggaaaccatgtccaacagttgttgcatcctttcctgatgcatcagctatcccacctgaaattgcagcaatagtttcacggaaatacacattcattatagaattcaacagccagtcattcagatttctagaaaaaacattgctcatcaaaggaattgtagcatcatatggaagaatgacatcactaccaatagtacaagaaaaagatgatgtgcaacttcctctcactccaacaaaaaacaaactgataacaacagctgccgaatctccttctacacccatgtctagactttccacagcagactcaccaagcatgccccaaaagctgacatattctccagcaaagaataagccttagacaaacctccccgatgctaacagaagcagagctcctacaactacaattgagtcgccaacaaaaagaatcaaacaaaatcccaagaatcaacaagagtagacgttgtctacaacacaacacagcgaggaatattttggatcgtcggagccaaaattcagatgaaaaaaacatgttcgtcgctattttgtctctatatataattagagtcacagcttccatgaagcagatcttattttggacatgctacatgatatctatgtactactatgtcatgtacctttctgtatacttatctggtgctataacgaaccgtcatgtttcatatatagaatcgtttgctttggcttgctgaaaacgtataacatcaaaaacaagatgaacgcgcgcgctggcgcgcgccagttgact

SEQ ID NO: 70711 - DNA, 1199 bp, Zea Mays
ctagggcatcaggagtgaacaatatctcaaaaagcccatcttctcttcctctctcgcagcaccgcctctcaacctccgccgccgctcgcccggggcgtcacccacccgcgcagaaggcccccgccgctcaaactaccggtgccctaaaccccgatattcttcttcgcctccctttcctcctcagcacccaaaccccgaccttcagggttccgccgccatgccgcagggagaccacatcgagcttcaccagaagcgccatggcaagcgcctggaccacgaggagcgcaagcgcaagcgcgaggcgcgcgaggtgcacaggcgctcgaaggacgcccgcaatttgattggtgctaagggcaagaggttcgccaagaaacgctatgctgagaaggcgcagatgaagaagaccctgaaaatgcacgatgaatcaaataagcgacagaaggttgatgatgatgtccaagagggtgctcttcctccgtatctactggatcgtgatcagacacagcgtgctaaggtactcagcaacacaatcaagcaaaagaggaaggaaaaggctggcaaatgggatgttccgctgccaaaggtcagacctgttgctgaagaagaaatgttcaaggtgctacgaactggcaagcgaaaaaccaagcagtggaagagaatggttaccaaagccacttttgttggagctggatttacaaggaaaccaccaaagtatgagcggttcattcgaccaactggtctgcgtttcaccaaagctcatgtgactcacccagaactgaagtgcactttcaaccttgacataatttctgtgaagaaaaacccaaatggtccgatgtacacttctcttggtgttatgacaaggggaacaatcattgaggtaaatgtcagtgagcttggtctggtaactcccgctggaaaagttgtttgggggaaatatgctcaagttacaaacaacccggagaatgatgggtgtatcaatgctgttttgctagtgtagaaccatagtgagattttgtttatggagtttgttttgcaccgtggtccatgggcgagcattctatatccttgctatgtgcgacaagccgacaaatgacttggctattatagcctgctataaagttgactaatacaaattagcaacatttttcttgagctacatgattttggcttcgaaacttacgcgtctccgatgaacc

SEQ ID NO: 70712 - DNA, 1225 bp, Zea Mays
gatacaggcccaaatgctaggtcccgcatcataacctagggggctagggcatcaggagtgaacaatatctcaaaaagcccatcttctcttcctctctcgcagcaccgcctctcaacctccgccgccgctcgcccggggcgtcacccacccgcgcagaaggcccccgccgctcaaactaccggtgccctaaaccccgatattcttcttcgcctccctttcctcctcagcacccaaaccccgaccttcagggttccgccgccatgccgcagggagaccacatcgagcttcaccagaagcgccatggcaagcgcctggaccacgaggagcgcaagcgcaagcgcgaggcgcgcgaggtgcacaggcgctcgaaggacgcccgcaatttgattggtgctaagggcaagaggttcgccaagaaacgctatgctgagaaggcgcagatgaagaagaccctgaaaatgcacgatgaatcaaataagcgacagaaggttgatgatgatgtccaagagggtgctcttcctccgtatctactggatcgtgatcagacacagcgtgctaaggtactcagcaacacaatcaagcaaaagaggaaggaaaaggctggcaaatgggatgttccgctgccaaaggtcagacctgttgctgaagaagaaatgttcaaggtgctacgaactggcaagcgaaaaaccaagcagtggaagagaatggttaccaaagccacttttgttggagctggatttacaaggaaaccaccaaagtatgagcggttcattcgaccaactggtctgcgtttcaccaaagctcatgtgactcacccagaactgaagtgcactttcaaccttgacataatttctgtgaagaaaaacccaaatggtccgatgtacacttctcttggtgttatgacaaggggaacaatcattgaggtaaatgtcagtgagcttggtctggtaactcccgctggaaaagttgtttgggggaaatatgctcaagttacaaacaacccggagaatgatgggtgtatcaatgctgttttgctagtgtagaaccatagagtttgttttgcaccgtggtccatgggcgagcattctatatccttgctatgtgcgacaagccgacaaatgacttggctattatagcctgctataaagttgactaatacaaattagcaacatttttcttgagctacatgattttggcttcgaaacttacgcgtctccgatgaacc

SEQ ID NO: 70713 - DNA, 1455 bp, Zea Mays
ggtagatccctccttgataacttgatgagtagataatgggtaacaaactttcgacgttagccctcatgactgaatgcaaggaaatgtaaagcacaaatttgatgaagcccacgctcccgatgccacaggcaaggatgctggagcttctgcccaccaatccaagtggatcgatgtgtgatgctgatatcaatactgagcttaaagcgattgttcctgtgattatcgatgtgtgcatgactgcactgtatgcgaagaatccatcatgattatggagtgcacccttccagataatcatctcaacttatggggagattgacaagaacaattatctggaccccaggactgcgcaagttgctactatagatcatatgaaacagacttgtacaaaactgaggcctgctgaagatgaggagcttccatcagcttacattgaagagtttaggtgtgctttagatgttgaattgtcaaagtatgtttctgaagcttatcctaaaggggcctgtgccgtttattgtactagtggaaaggatatagagggaccaggagcagatttcagttttgcagcagttatttctgctgctaagcgtagcccacagaacttttgcaatggcagctggtgttcagtttggactattgaattcaattatgagttgcagtttgttgatattaaaggaaagatacaggtagatgctcactattttgaagagggaaatgtccagctggatactaacattgatcgtaaggactccaccagaatgcagtcacctgacgattgtgcggtttcaatcagtggcatcattcgacatcacgagtctgaatatttgtcctctctcgaggaatcatacttaaatttatctgatgcaacttttaaggaccttcggcgaaaacttccagttacccgtactcttttcccctggcataacacactggtgttcggtcttacgagagaccttgccaaagaattagcgcttggaaaatgaagtctccgctggccatgtcaccagattgtttcatctttgaacttcccaatcccagtgtaaatcaacaagatactttttttttgggggaggatgacattcaaaaaatacacattctcttcacatatcctagggcttttatttggatgccgttaggaaccaaacagactcttgttgacgtgtgtgaatcatttgtttcttcaccaatgctccattgtgatagattattttaggtgttctgtatgagcctttttttaacagaaagaggtttccctcctatttaattaggaaataagaacatagttcggaacaagatctggcatccaacttgtttacatgacttagtgaccaacaacgagaggaaaagctaaaccacctttccagaatgtatctgaagaggagactaacaacaccaagcataaaaggacggccaaactaagtcagcatcaccagcgaaaggtttacgacttcgcaacga

SEQ ID NO: 70714 - DNA, 1666 bp, Zea Mays
catacctttttgtttatacgagaacttggaacatttgggtagatccctccttgataacttgatgagtagataatgggtaacaaactttcgacgttagccctcatgactgaatgcaaggaaatgtaaagcacaaatttgatgaagcccacgctcccgatgccacaggcaaggatgctggagcttctgcccaccaatccaagggacaagccacaagtcagaccttggcaatggggccacctgcagctactgcaaatgacaatcctatgctccgaaactcttccacgagctctcagactccatgttgatccatcacatctcaatactctccgcgagagtggatcgatgtgtgatgctgatatcaatactgagcttaaagcgattgttcctgtgattatcgatgtgtgcatgactgcactgtatgcgaagaatccatcatgattatggagtgcacccttccagataatcatctcaacttatggggagattgacaagaacaattatctggaccccaggactgcgcaagttgctactatagatcatatgaaacagacttgtacaaaactgaggcctgctgaagatgaggagcttccatcagcttacattgaagagtttaggtgtgctttagatgttgaattgtcaaagtatgtttctgaagcttatcctaaaggggcctgtgccgtttattgtactagtggaaaggatatagagggaccaggagcagatttcagttttgcagcagttatttctgctgctaagcgtagcccacagaacttttggccttgtgtcatccagcaatggcagctggtgttcagtttggactattgaattcaattatgagttgcagtttgttgatattaaaggaaagatacaggttgaccttttttacttaacaaggtagatgctcactattttgaagagggaaatgtccagctggatactaacattgatcgtaaggactccaccagaatgcagtcacctgacgattgtgcggtttcaatcagtggcatcattcgacatcacgagtctgaatatttgtcctctctcgaggaatcatacttaaatttatctgatgcaacttttaaggaccttcggcgaaaacttccagttacccgtactcttttcccctggcataacacactggtgttcggtcttacgagagaccttgccaaagaattagcgcttggaaaatgaagtctccgctggccatgtcaccagattgtttcatctttgaacttcccaatcccagtgtaaatcaacaagatactttttttttgggggaggatgacattcaaaaaatacacattctcttcacatatcctagggcttttatttggatgccgttaggaaccaaacagactcttgttgacgtgtgtgaatcatttgtttcttcaccaatgctccattgtgatagattattttaggtgttctgtatgagcctttttttaacagaaagaggtttccctcctatttaattaggaaataagaacatagttcggaacaagatctggcatccaacttgtttacatgacttagtgaccaacaacgagaggaaaagctaaaccacctttccagaatgtatctgaagaggagactaacaacaccaagcataaaaggacggccaaactaagtcagcatcaccagcgaaaggtttacgacttcgcaacga

SEQ ID NO: 70715 - DNA, 1441 bp, Zea Mays
tggggtcaagatcatttgcctggcactgcctgctcggcacccgcctgctcggctgctcccaccgtcccacgtgccgtccgtccgtgttggagcgtgttgccatcgccattccctccgcttcgctccgtttcgttgccaccctttacacgcactccaccttcgctcctccgggcccccgaaatgtcggacgaaggcggcgccggcgagccgctcagcgaccgccagaaacgggagatcgccacctggttcctatccaacgcgccagccggcgagatccattacatcgccaaagatgtgcgcgcgctgctggggaacgacgcggtgtacgaggccgccgccgcggaggccttcccggagtacaacaaggcccgcctcgtgtccatcgagctccccgaccgcagtggcgacataatcatctcaacttatggggagattgacaagaacaattatctggaccccaggactgcgcaagttgctactatagatcatatgaaacagacttgtacaaaactgaggcctgctgaagatgaggagcttccatcagcttacattgaagagtttaggtgtgctttagatgttgaattgtcaaacaatggcagctggtgttcagtttggactattgaattcaattatgagttgcagtttgttgatattaaaggaaagatacaggtagatgctcactattttgaagagggaaatgtccagctggatactaacattgatcgtaaggactccaccagaatgcagtcacctgacgattgtgcggtttcaatcagtggcatcattcgacatcacgagtctgaatatttgtcctctctcgaggaatcatacttaaatttatctgatgcaacttttaaggaccttcggcgaaaacttccagttacccgtactcttttcccctggcataacacactggtgttcggtcttacgagagaccttgccaaagaattagcgcttggaaaatgaagtctccgctggccatgtcaccagattgtttcatctttgaacttcccaatcccagtgtaaatcaacaagatactttttttttgggggaggatgacattcaaaaaatacacattctcttcacatatcctagggcttttatttggatgccgttaggaaccaaacagactcttgttgacgtgtgtgaatcatttgtttcttcaccaatgctccattgtgatagattattttaggtgttctgtatgagcctttttttaacagaaagaggtttccctcctatttaattaggaaataagaacatagttcggaacaagatctggcatccaacttgtttacatgacttagtgaccaacaacgagaggaaaagctaaaccacctttccagaatgtatctgaagaggagactaacaacaccaagcataaaaggacggccaaactaagtcagcatcaccagcgaaaggtttacgacttcgcaacga

SEQ ID NO: 70716 - DNA, 1419 bp, Zea Mays
tggggtcaagatcatttgcctggcactgcctgctcggcacccgcctgctcggctgctcccaccgtcccacgtgccgtccgtccgtgttggagcgtgttgccatcgccattccctccgcttcgctccgtttcgttgccaccctttacacgcactccaccttcgctcctccgggcccccgaaatgtcggacgaaggcggcgccggcgagccgctcagcgaccgccagaaacgggagatcgccacctggttcctatccaacgcgccagccggcgagatccattacatcgccaaagatgtgcgcgcgctgctggggaacgacgcggtgtacgaggccgccgccgcggaggccttcccggagtacaacaaggcccgcctcgtgtccatcgagctccccgaccgcagtggcgacataatcatctcaacttatggggagattgacaagaacaattatctggaccccaggactgcgcaagttgctactatagatcatatgaaacagacttgtacaaaactgaggcctgctgaagatgaggagcttccatcagcttacattgaagagtttagtggaaaggatatagagggaccaggagcagatttcagttttgcagcagttatttctgctgctaagcgtagcccacagaacttttggtagatgctcactattttgaagagggaaatgtccagctggatactaacattgatcgtaaggactccaccagaatgcagtcacctgacgattgtgcggtttcaatcagtggcatcattcgacatcacgagtctgaatatttgtcctctctcgaggaatcatacttaaatttatctgatgcaacttttaaggaccttcggcgaaaacttccagttacccgtactcttttcccctggcataacacactggtgttcggtcttacgagagaccttgccaaagaattagcgcttggaaaatgaagtctccgctggccatgtcaccagattgtttcatctttgaacttcccaatcccagtgtaaatcaacaagatactttttttttgggggaggatgacattcaaaaaatacacattctcttcacatatcctagggcttttatttggatgccgttaggaaccaaacagactcttgttgacgtgtgtgaatcatttgtttcttcaccaatgctccattgtgatagattattttaggtgttctgtatgagcctttttttaacagaaagaggtttccctcctatttaattaggaaataagaacatagttcggaacaagatctggcatccaacttgtttacatgacttagtgaccaacaacgagaggaaaagctaaaccacctttccagaatgtatctgaagaggagactaacaacaccaagcataaaaggacggccaaactaagtcagcatcaccagcgaaaggtttacgacttcgcaacga

SEQ ID NO: 70717 - DNA, 1599 bp, Zea Mays
tggggtcaagatcatttgcctggcactgcctgctcggcacccgcctgctcggctgctcccaccgtcccacgtgccgtccgtccgtgttggagcgtgttgccatcgccattccctccgcttcgctccgtttcgttgccaccctttacacgcactccaccttcgctcctccgggcccccgaaatgtcggacgaaggcggcgccggcgagccgctcagcgaccgccagaaacgggagatcgccacctggttcctatccaacgcgccagccggcgagatccattacatcgccaaagatgtgcgcgcgctgctggggaacgacgcggtgtacgaggccgccgccgcggaggccttcccggagtacaacaaggcccgcctcgtgtccatcgagctccccgaccgcagtggcgacataatcatctcaacttatggggagattgacaagaacaattatctggaccccaggactgcgcaagttgctactatagatcatatgaaacagacttgtacaaaactgaggcctgctgaagatgaggagcttccatcagcttacattgaagagtttaggtgtgctttagatgttgaattgtcaaagtatgtttctgaagcttatcctaaaggggcctgtgccgtttattgtactagtggaaaggatatagagggaccaggagcagatttcagttttgcagcagttatttctgctgctaagcgtagcccacagaacttttgcaatggcagctggtgttcagtttggactattgaattcaattatgagttgcagtttgttgatattaaaggaaagatacaggttgaccttttttacttaacaaggtagatgctcactattttgaagagggaaatgtccagctggatactaacattgatcgtaaggactccaccagaatgcagtcacctgacgattgtgcggtttcaatcagtggcatcattcgacatcacgagtctgaatatttgtcctctctcgaggaatcatacttaaatttatctgatgcaacttttaaggaccttcggcgaaaacttccagttacccgtactcttttcccctggcataacacactggtgttcggtcttacgagagaccttgccaaagaattagcgcttggaaaatgaagtctccgctggccatgtcaccagattgtttcatctttgaacttcccaatcccagtgtaaatcaacaagatactttttttttgggggaggatgacattcaaaaaatacacattctcttcacatatcctagggcttttatttggatgccgttaggaaccaaacagactcttgttgacgtgtgtgaatcatttgtttcttcaccaatgctccattgtgatagattattttaggtgttctgtatgagcctttttttaacagaaagaggtttccctcctatttaattaggaaataagaacatagttcggaacaagatctggcatccaacttgtttacatgacttagtgaccaacaacgagaggaaaagctaaaccacctttccagaatgtatctgaagaggagactaacaacaccaagcataaaaggacggccaaactaagtcagcatcaccagcgaaaggtttacgacttcgcaacga

SEQ ID NO: 70718 - DNA, 2140 bp, Zea Mays
atcaggcgttggatttcttatgcctggggtcaagatcatttgcctggcactgcctgctcggcacccgcctgctcggctgctcccaccgtcccacgtgccgtccgtccgtgttggagcgtgttgccatcgccattccctccgcttcgctccgtttcgttgccaccctttacacgcactccaccttcgctcctccgggcccccgaaatgtcggacgaaggcggcgccggcgagccgctcagcgaccgccagaaacgggagatcgccacctggttcctatccaacgcgccagccggcgagatccattacatcgccaaagatgtgcgcgcgctgctggggaacgacgcggtgtacgaggccgccgccgcggaggccttcccggagtacaacaaggcccgcctcgtgtccatcgagctccccgaccgcagtggcgacataatcatctcaacttatggggagattgacaagaacaattatctggaccccaggactgcgcaagttgctactatagatcatatgaaacagacttgtacaaaactgaggcctgctgaagatgaggagcttccatcagcttacattgaagagtttaggtgtgctttagatgttgaattgtcaaagtatgtttctgaagcttatcctaaaggggcctgtgccgtttattgtactagtggaaaggatatagagggaccaggagcagatttcagttttgcagcagttatttctgctgctaagcgtagcccacagaacttttggtattgtctggttcatgtcttctgtcttttccttgttcctgaagaaatttgccatattttcttaaatcttgcacatatggatcagttagttttgctctgcgttataataagactaaaaaatttgatagatccttttcagcctttaaggccatttagacatttacccatcctctgtttctagtttctctttagttttagaactttattcaggaaattcttcaaactttagtttcttattagtgtctccttacattcctttgagaacctctcatttttccattcagcatgcaacttttagtcttcagttttttcatgggtgtcattttcaatatccctgtgaactgtggtttgttttgagtatactattttatcatcagcctagaaccttttgagttatgacatgtttaatgccggcctgttctttctatttctccatcagaggaattgcttcacataatctcaatagaactgttaaacatgcttcaaatagatttaatcttttaatcgtttagcctctgatgaaggccttgtgtcatccagcaatggcagctggtgttcagtttggactattgaattcaattatgagttgcagtttgttgatattaaaggaaagatacaggtagatgctcactattttgaagagggaaatgtccagctggatactaacattgatcgtaaggactccaccagaatgcagtcacctgacgattgtgcggtttcaatcagtggcatcattcgacatcacgagtctgaatatttgtcctctctcgaggaatcatacttaaatttatctgatgcaacttttaaggaccttcggcgaaaacttccagttacccgtactcttttcccctggcataacacactggtgttcggtcttacgagagaccttgccaaagaattagcgcttggaaaatgaagtctccgctggccatgtcaccagattgtttcatctttgaacttcccaatcccagtgtaaatcaacaagatactttttttttgggggaggatgacattcaaaaaatacacattctcttcacatatcctagggcttttatttggatgccgttaggaaccaaacagactcttgttgacgtgtgtgaatcatttgtttcttcaccaatgctccattgtgatagattattttaggtgttctgtatgagcctttttttaacagaaagaggtttccctcctatttaattaggaaataagaacatagttcggaacaagatctggcatccaacttgtttacatgacttagtgaccaacaacgagaggaaaagctaaaccacctttccagaatgtatctgaagaggagactaacaacaccaagcataaaaggacggccaaactaagtcagcatcaccagcgaaaggtttacgacttcgcaacga

SEQ ID NO: 70719 - DNA, 924 bp, Zea Mays
cgagacacagcaacctcccactccactgtccactccacccccaccacctttgcctctcctagcttttccttggcatcctagctcttcctcctcagccgcagcagatcgactaggaaacatgtgcggcggcgcgatcatctccgagttcatcccgcatcgcggcgccaagcggggtctctgcgccgaggacatctggccgcacgcggccgccgacttcgacgacctcctccacgcgcacgcgcacgcgcacggccacgacgacgacgacttcgccgccgccgcctccttccatcccgaccaaggccaaggtcaacttccccaacgaggacccgccgcccgagtacgacgacgacgacgacggccacgcccacgcccacgccgccgcggcgcaggggatgctcgccatgtccgccggcggaggcagggacgaccacctagtcgactacgacgtcgtcgacgtcatgggcatgggcggcttcttccagcaccacgcgtacgtgcccgacgccgtggcgcagcaggagcaggtgcccacggtcgcgtacgtgcaccaccagccgccgccgcagcaaccgcagggcgctgccgggatggacatgtggacgttcgacgccatcaacacgcccgtgcccatgtgatgtgatcgacagggcaacgggcggatatgctagctgctgtgcggcctgctttgtgcttcttatgaatgaacatgttgctactttccaatatttatttatattcgttgcaagctttctatacctgcaatatattagtataggagcaatttatctgcccatgtaatactaggggtccaagtccaactctagcatctcacaaacactttcccttcctgccctagcggttcttgcgcaaagatgaattctccagtaataaattgccgtggattaagtcccattttatttt

SEQ ID NO: 70720 - DNA, 3491 bp, Zea Mays
agaacttcgcaagagtttccaaaactcactctcactcttaactttttttggtaagactggaaaagcgttctccaacaatttactccttatctttaactcccaatctctctgcttttgagaaaatcgatccaaaatagggtggaaatgcacatgcacatattggtagcccaatccaaaggtgaaagaacatgcatgaaagaaaatatgtagtaaggataggattcgtaatgcagacatacaagagaaaaataggagtggctggcctgcatgttcacgagcgcatagtagctacctagggtgctgtgccgtgccgtgcgcgcggtgcatgcccgtgccggtgccgcgtccctggctccggcctgctccctgaagaaacgcatgcacgcgcaggcggcagggcacacgtacagcaggtcagcagcatgcacagtgctgtagctggtatatatccgcccgttgacgtcgacgtcgagagcacgcatatgcatgcagtagcctgctggcatgccagttttggtccgttcgatcgcgcgcgcaaacaagagttgtcgtcgtacgttggcccgatcgttgcctcctgccaaagagatgtgcatcatatcaggggcatatggaacggagagatcggagtacatcatccgtcaagaaggtagtctcttgtaactttattaataagtactacctctatttttatttatttgacgtcacttatagttcaattttgtactaataaaaaacaaacggagggggtaattgactagagtgctttaaaatcgtatcctttgagcgatggatatatttgtaatttgtatcacaaggtcaagaaaaaaatggcaaatggaaaatgatcagaacgttacatcttagccaatgagaaatgcatcacatgaattggaaaattcttagaatagaagaccataagcagattctttcatcataatttctgtgctccacagcacgcgcagtcgttagtatataacggtcatgtgcttcaggtaacaaattacagtggatgtgtttagaaaaaatggtaaaatagcattagcattaaagtaagcataagttacatttaaccacacaggcacgattttagtcacgattgatgttaacaattcagactaaataacgttgatactttagtaataattcagactaagaacgttgatactttagtctcggttggtgttactaaggaactctgatgagttaaattgttagttttaagacaaaagcatctcatcgctatacgcatatgcgtaaggtgaaaagctacacgcaagataaaataaaatgatccaattttaagtctagagaaacctttggcctcgccttatcggttctcttaattttgacacgtgtgggtctagacctgtttgtttgtataacagaaagtgctgtatactcgagtggaaaaaacaacccaaatagaaaagaaaatatgtgggcttcttcgacagcccaagaaggtctggcccagctggcggctccgtaccggaaattccgacccatttggcggccattccaagagcctgcgccaacggtcacaagatcgagatcaacggtcggaacggctcagcaatcacacacacggtaagggcactaaattcactctcttttcaacgtagataaaaaatacaaggaaaacaacaataactagaggcttttctacgtagataaaaaaatatagaaaaaacaacgtattctgagaaatagagtgtattagatgttgaacctggtgaaataaattattccctctatttttttatttgtcacgttttagtttaaaaataaactttaaaaataaactagtcgacgacacattcgtttttatttgtagtgtcgacgacacatattcgatcgaaaatggagacacagtactatctttattcttctctcagcactacatctacatcagctagctatttgagcgaggcaacggcggtcaacgcactgccgaaaaaactaagacctttttcgattattccaattaattatatatggattagatgagattttaaaaaattaagaaaaaattgacttgtttgaaatttaaacacatctaatctcaatcaaaccctgagtgaatttctggggcgggtaaatttctcgcgcgccaggaaagcacgccaacgcaacgcacgtgcctgccgcgcgcgttttctctctgcaggtgcacctcgatctctcctgacttgggcccgaaaatactggaccgagacggtccaattgtctgacccggaatttcttggccagtgggtcgaaaaaaccaatagtaagcctaagaccctgtttattttattttatattataatctgtctagatcctataatactcataaataattcagcaggtattcagattatatatctgaagtccatattatgataatcaggtattcatgatatataatctaaaatccagcttatcataatatcataatctcctcaaaatagcttattatttttggaaaaacaaccattatgttatgttcacaaaattaaattatgtctgccaattatgttctttccccaaatcagtcatgttcacaaaattatgtcagacatttttgttctttccccaaatcacaggatatactgttgctttactttgtctcaaaaatcaataatcttcaattatataatctggtcatcaagacaactacaaaattggtcatccaaacaactatatacgaattataaattataatgttaacagattataatatataatattaatctataatatatgatctaatttctccttttcactcccttttcaagtgctacctcaaccaaaaggaccaaagcaattgtcacttgagatattttacataaaaaatagttttttttttcattcacctcgtcatgttattaaacatagtagaagctcatatttatggttttatagtatagtcttctatcctaaattcaataatacactatacaatgcagccctatcatacgcttttgccttataattcatttttccttcaacttcttatcatttgaggaacttttgtatgatctctatctctatcatgttatacctttgttgatcatcttggagtaagactctaagaaactatatactcagtaaaagcgtgagtctatagttgcactcaattaccaaataaaccaaactaacgtcaatcttggcacgtacgatggtctatatggcctgcccgcatatggtcattggggcgggcactacactaacatagcacgtaaatactcaaccatacaaatttgtaatagttactgtactatgcctcgtctaattcttaagtacattatgaagatttaaacttttatgaagtagtacacaaaatatattatgtgtacattacgaacggataaaaaaagtatagagatatcacaaaaacaaactgtgcatgtaccacgtacgtgcgcgtcaaccgtcaacactgcttctgcgtgggccgtgtccattcagctgccccagcaggggtggccgctggcagtggcagcagc

SEQ ID NO: 70721 - DNA, 1008 bp, Zea Mays
ctgctgtccagaacatacatgttctggcactctgcttcaagcataaatcgtccctgttggtgagctgttccaaagactcaaaggttaaagtttgggacacagtggctccttcgagtggttcatcaccatgtgtaggcagtgctcacctcaactcaaacaggccaccaattgctatgaaatgccatgaatccctttgctatattgctgctggagctcaagtgacagcgattgacttgaggacaatgaagaaggcttctgtccttgcactccagaaccacagaatactttcttacggatacgtcaatggctgtgcagtccaaaaaaatgaagagaagggaatttgacattgtcgttcaagcttcaacattgatcacttattggttttcaggaagtctttctgaatgtcagttgctataggattatttgaacaacatctcttccaatggtgatatattttatgatgctcagaatgatttcttgacacctgaatgggacagtgagaatttacaagtggtactgatgattctatccatgttcaaatcatcaagatagtcatcagggttattgcccacggaagcttaaatacttggtgctgaactgctgaagtatgatgtctcactgaaaaacaacgagatggcaatgagaagtgttcaggaagaggggtaatatttactcagagcagcaaaggaaggtcgccccaccaagctgccatgatattcctccacttaccagtgtttcaaattccaatgacatcaggttgaagaaaggaacttcacacatgaaaagagacgatccggacgaccatgaagattaaacgttgctgttaagaaaagccatattttctgtattgcttctaagctgttttatggcctttaaaccaatacttttgcttggcatatatgtagctataactattgtaatataatctctgagcttctcatgctgctattcaacatatcattactcctaccaatatatgtacagtttcagttgacttgcttgctttcc

SEQ ID NO: 70722 - DNA, 1810 bp, Zea Mays
ctatactgtaacaatgtgtataatgctgctgtccagaacatacatgttctggcactctgcttcaagcataaatcgtccctgttggtgagctgttccaaagactcaaaggttaaagtttgggacacagtggctccttcgagtggttcatcaccatgtgtaggcagtgctcacctcaactcaaacaggccaccaattgctatgaaatgccatgaatccctttgctatattgctgctggagctcaagtgacagcgattgacttgaggacaatgaagaaggcttctgtccttgcactccagaaccacagaatactttcttacggatacgtcaatggctgtgcagtccaaaaaaatgaagagaagggaatttgacattgtcgttcaagcttcaacattgatcacttattggttttcaggaagtctttctgaatgtcagttgctataggattatttgaacaacatctcttccaatggtgatatattttatgatgctcagaatgatttcttgacacctgaatgggacagtgagaatttacaagtggtactgatgattctatccatgttcaaatcatcaagatagtcatcaggttccttcagtaattcaaaccatcactaatcccttctgacgggctatatattctatcggaccaggcacaactatccaaatttcttttctatataacaaacgcggacgtaaagttgctcaaccacgctgtccacgtcgctcctccgtttcccagccattggatcggcaaccaacgacacaagagaattccgtgcgattgtttcttaacgtgaagtttctggacagcgccggacagatagagagaatagaagaatatacacatcttcttcctctcgcttccaaaggtgatgccttccacggagaggagatcgtgcgaccatgatggcagcgactcttgattttgcccatcttcccacgctcaaacggataacagtctccttccttctgtctcttccaatcgtctcttcctagttccataacactctcacaacacgctagcaggacactcattctctcaatcggctcttcccgctgcgctacacgccaccaagagcctccccaactcctccccgtcaaacggcgccgcgtcgcaaggagcacaaccaccccccgtctccttcctcagacgctgtcgcgtttctcgcgcggtgcgccccctccctgaaattcttatatacagagcaaggagcaaatatgggattccatgatgtccacgtcgctattttttgacggctcaacttgattgtgccgtgaattgtctgttagctagggagtcatcatttctgttttggcctctaaaataacgtttacagctggaaccgaagtatgcttgacaaatggttattgcccacggaagcttaaatacttggtgctgaactgctgaagtatgatgtctcactgaaaaacaacgagatggcaatgagaagtgttcaggaagaggggtaatatttactcagagcagcaaaggaaggtcgccccaccaagctgccatgatattcctccacttaccagtgtttcaaattccaatgacatcaggttgaagaaaggaacttcacacatgaaaagagacgatccggacgaccatgaagattaaacgttgctgttaagaaaagccatattttctgtattgcttctaagctgttttatggcctttaaaccaatacttttgcttggcatatatgtagctataactattgtaatataatctctgagcttctcatgctgctattcaacatatcattactcctaccaatatatgtacagtttcagttgacttgcttgctttcc

SEQ ID NO: 70723 - DNA, 1820 bp, Zea Mays
ctgaatgaagttcgctatactgtaacaatgtgtataatgctgctgtccagaacatacatgttctggcactctgcttcaagcataaatcgtccctgttggtgagctgttccaaagactcaaaggttaaagtttgggacacagtggctccttcgagtggttcatcaccatgtgtaggcagtgctcacctcaactcaaacaggccaccaattgctatgaaatgccatgaatccctttgctatattgctgctggagctcaagtgacagcgattgacttgaggacaatgaagaaggcttctgtccttgcactccagaaccacagaatactttcttacggatacgtcaatggctgtgcagtccaaaaaaatgaagagaagggaatttgacattgtcgttcaagcttcaacattgatcacttattggttttcaggaagtctttctgaatgtcagttgctataggattatttgaacaacatctcttccaatggtgatatattttatgatgctcagaatgatttcttgacacctgaatgggacagtgagaatttacaagtggtactgatgattctatccatgttcaaatcatcaagatagtcatcaggttccttcagtaattcaaaccatcactaatcccttctgacgggctatatattctatcggaccaggcacaactatccaaatttcttttctatataacaaacgcggacgtaaagttgctcaaccacgctgtccacgtcgctcctccgtttcccagccattggatcggcaaccaacgacacaagagaattccgtgcgattgtttcttaacgtgaagtttctggacagcgccggacagatagagagaatagaagaatatacacatcttcttcctctcgcttccaaaggtgatgccttccacggagaggagatcgtgcgaccatgatggcagcgactcttgattttgcccatcttcccacgctcaaacggataacagtctccttccttctgtctcttccaatcgtctcttcctagttccataacactctcacaacacgctagcaggacactcattctctcaatcggctcttcccgctgcgctacacgccaccaagagcctccccaactcctccccgtcaaacggcgccgcgtcgcaaggagcacaaccaccccccgtctccttcctcagacgctgtcgcgtttctcgcgcggtgcgccccctccctgaaattcttatatacagagcaaggagcaaatatgggattccatgatgtccacgtcgctattttttgacggctcaacttgattgtgccgtgaattgtctgttagctagggagtcatcatttctgttttggcctctaaaataacgtttacagctggaaccgaagtatgcttgacaaatggttattgcccacggaagcttaaatacttggtgctgaactgctgaagtatgatgtctcactgaaaaacaacgagatggcaatgagaagtgttcaggaagaggggtaatatttactcagagcagcaaaggtcgccccaccaagctgccatgatattcctccacttaccagtgtttcaaattccaatgacatcaggttgaagaaaggaacttcacacatgaaaagagacgatccggacgaccatgaagattaaacgttgctgttaagaaaagccatattttctgtattgcttctaagctgttttatggcctttaaaccaatacttttgcttggcatatatgtagctataactattgtaatataatctctgagcttctcatgctgctattcaacatatcattactcctaccaatatatgtacagtttcagttgacttgcttgctttcc

SEQ ID NO: 70724 - DNA, 2202 bp, Zea Mays
cgcttcttcacgtcccccctcaatcacatcaccggcactccccattgtccttcatctgctgcctgctcctccgcgcggccatgcccgagctcgcggtcctcgttctcagccacgcgctctttcacgcgcgcctccgttgccgctcttgctcccagactttgccgtggccctctcccgtctctcattggcatttttttatgtagggttactcacactgttacaagggtcattcagcgcctgtcactgctctggctgatagattgcttatggatggtgaatctaaactgcttgcaagtggagggtaccaatccaccttccctacccgtccagctgctcgatgcctctgaaattgatggagcgatacctagcacgcggtgcatgttgttctgaagattctgctgctgttggttgccattcaccctgacagtattgccagtggcaccgtcaactatttcttccctctccgcccgagcctgcagatgaatgtttgacggcacttctcgcctactgtcctcactggtgtttccaaagtctgcagtgagttcggtctcagctctaattaacgaggaagtcatgctaggcaccctctggtcttctcgtctccaaccaaccactaccggcgtgtggatgatagcaggttatctgttgcgtggcataaatcgtccctgttggtgagctgttccaaagactcaaaggttaaagtttgggacacagtggctccttcgagtggttcatcaccatgtgtaggcagtgctcacctcaactcaaacaggccaccaattgctatgaaatgccatgaatccctttgctatattgctgctggagctcaagtgacagcgattgacttgaggacaatgaagaaggcttctgtccttgcactccagaaccacagaatactttcttacggatacgtcaatggctgtgcagtccaaaaaaatgaagagaagggaatttgacattgtcgttcaagcttcaacattgatcacttattggttttcaggaagtctttctgaatgtcagttgctataggattatttgaacaacatctcttccaatggtgatatattttatgatgctcagaatgatttcttgacacctgaatgggacagtgagaatttacaagtggtactgatgattctatccatgttcaaatcatcaagatagtcatcaggttccttcagtaattcaaaccatcactaatcccttctgacgggctatatattctatcggaccaggcacaactatccaaatttcttttctatataacaaacgcggacgtaaagttgctcaaccacgctgtccacgtcgctcctccgtttcccagccattggatcggcaaccaacgacacaagagaattccgtgcgattgtttcttaacgtgaagtttctggacagcgccggacagatagagagaatagaagaatatacacatcttcttcctctcgcttccaaaggtgatgccttccacggagaggagatcgtgcgaccatgatggcagcgactcttgattttgcccatcttcccacgctcaaacggataacagtctccttccttctgtctcttccaatcgtctcttcctagttccataacactctcacaacacgctagcaggacactcattctctcaatcggctcttcccgctgcgctacacgccaccaagagcctccccaactcctccccgtcaaacggcgccgcgtcgcaaggagcacaaccaccccccgtctccttcctcagacgctgtcgcgtttctcgcgcgggttattgcccacggaagcttaaatacttggtgctgaactgctgaagtatgatgtctcactgaaaaacaacgagatggcaatgagaagtgttcaggaagaggggtaatatttactcagagcagcaaaggtcgccccaccaagctgccatgatattcctccacttaccagtgtttcaaattccaatgacatcaggttgaagaaaggaacttcacacatgaaaagagacgatccggacgaccatgaagattaaacgttgctgttaagaaaagccatattttctgtattgcttctaagctgttttatggcctttaaaccaatacttttgcttggcatatatgtagctataactattgtaatataatctctgagcttctcatgctgctattcaacatatcattactcctaccaatatatgtacagtttcagttgacttgcttgctttcc

SEQ ID NO: 70725 - DNA, 2370 bp, Zea Mays
cgcttcttcacgtcccccctcaatcacatcaccggcactccccattgtccttcatctgctgcctgctcctccgcgcggccatgcccgagctcgcggtcctcgttctcagccacgcgctctttcacgcgcgcctccgttgccgctcttgctcccagactttgccgtggccctctcccgtctctcattggcatttttttatgtagggttactcacactgttacaagggtcattcagcgcctgtcactgctctggctgatagattgcttatggatggtgaatctaaactgcttgcaagtggagggtaccaatccaccttccctacccgtccagctgctcgatgcctctgaaattgatggagcgatacctagcacgcggtgcatgttgttctgaagattctgctgctgttggttgccattcaccctgacagtattgccagtggcaccgtcaactatttcttccctctccgcccgagcctgcagatgaatgtttgacggcacttctcgcctactgtcctcactggtgtttccaaagtctgcagtgagttcggtctcagctctaattaacgaggaagtcatgctaggcaccctctggtcttctcgtctccaaccaaccactaccggcgtgtggatgatagcaggttatctgttgcgtggcataaatcgtccctgttggtgagctgttccaaagactcaaaggttaaagtttgggacacagtggctccttcgagtggttcatcaccatgtgtaggcagtgctcacctcaactcaaacaggccaccaattgctatgaaatgccatgaatccctttgctatattgctgctggagctcaagtgacagcgattgacttgaggacaatgaagaaggcttctgtccttgcactccagaaccacagaatactttcttacggatacgtcaatggctgtgcagtccaaaaaaatgaagagaagggaatttgacattgtcgttcaagcttcaacattgatcacttattggttttcaggaagtctttctgaatgtcagttgctataggattatttgaacaacatctcttccaatgaatgatttcttgacacctgaatgggacagtgagaatttacaagtggtactgatgattctatccatgttcaaatcatcaagatagtcatcaggttccttcagtaattcaaaccatcactaatcccttctgacgggctatatattctatcggaccaggcacaactatccaaatttcttttctatataacaaacgcggacgtaaagttgctcaaccacgctgtccacgtcgctcctccgtttcccagccattggatcggcaaccaacgacacaagagaattccgtgcgattgtttcttaacgtgaagtttctggacagcgccggacagatagagagaatagaagaatatacacatcttcttcctctcgcttccaaaggtgatgccttccacggagaggagatcgtgcgaccatgatggcagcgactcttgattttgcccatcttcccacgctcaaacggataacagtctccttccttctgtctcttccaatcgtctcttcctagttccataacactctcacaacacgctagcaggacactcattctctcaatcggctcttcccgctgcgctacacgccaccaagagcctccccaactcctccccgtcaaacggcgccgcgtcgcaaggagcacaaccaccccccgtctccttcctcagacgctgtcgcgtttctcgcgcggtgcgccccctccctgaaattcttatatacagagcaaggagcaaatatgggattccatgatgtccacgtcgctattttttgacggctcaacttgattgtgccgtgaattgtctgttagctagggagtcatcatttctgttttggcctctaaaataacgtttacagctggaaccgaagtatgcttgacaaatggttattgcccacggaagcttaaatacttggtgctgaactgctgaagtatgatgtctcactgaaaaacaacgagatggcaatgagaagtgttcaggaagaggggtaatatttactcagagcagcaaaggtcgccccaccaagctgccatgatattcctccacttaccagtgtttcaaattccaatgacatcaggttgaagaaaggaacttcacacatgaaaagagacgatccggacgaccatgaagattaaacgttgctgttaagaaaagccatattttctgtattgcttctaagctgttttatggcctttaaaccaatacttttgcttggcatatatgtagctataactattgtaatataatctctgagcttctcatgctgctattcaacatatcattactcctaccaatatatgtacagtttcagttgacttgcttgctttcc

SEQ ID NO: 70726 - DNA, 2206 bp, Zea Mays
cgcttcttcacgtcccccctcaatcacatcaccggcactccccattgtccttcatctgctgcctgctcctccgcgcggccatgcccgagctcgcggtcctcgttctcagccacgcgctctttcacgcgcgcctccgttgccgctcttgctcccagactttgccgtggccctctcccgtctctcattggcatttttttatgtagggttactcacactgttacaagggtcattcagcgcctgtcactgctctggctgatagattgcttatggatggtgaatctaaactgcttgcaagtggagggtaccaatccaccttccctacccgtccagctgctcgatgcctctgaaattgatggagcgatacctagcacgcggtgcatgttgttctgaagattctgctgctgttggttgccattcaccctgacagtattgccagtggcaccgtcaactatttcttccctctccgcccgagcctgcagatgaatgtttgacggcacttctcgcctactgtcctcactggtgtttccaaagtctgcagtgagttcggtctcagctctaattaacgaggaagtcatgctaggcaccctctggtcttctcgtctccaaccaaccactaccggcgtgtggatgatagcaggttatctgttgcgtggcataaatcgtccctgttggtgagctgttccaaagactcaaaggttaaagtttgggacacagtggctccttcgagtggttcatcaccatgtgtaggcagtgctcacctcaactcaaacaggccaccaattgctatgaaatgccatgaatccctttgctatattgctgctggagctcaagtgacagcgattgacttgaggacaatgaagaaggcttctgtccttgcactccagaaccacagaatactttcttacggatacgtcaatggctgtgcagtccaaaaaaatgaagagaagggaatttgacattgtcgttcaagcttcaacattgatcacttattggttttcaggaagtctttctgaatgtcagttgctataggattatttgaacaacatctcttccaatggtgatatattttatgatgctcagaatgatttcttgacacctgaatgggacagtgagaatttacaagtggtactgatgattctatccatgttcaaatcatcaagatagtcatcaggttccttcagtaattcaaaccatcactaatcccttctgacgggctatatattctatcggaccaggcacaactatccaaatttcttttctatataacaaacgcggacgtaaagttgctcaaccacgctgtccacgtcgctcctccgtttcccagccattggatcggcaaccaacgacacaagagaattccgtgcgattgtttcttaacgtgaagtttctggacagcgccggacagatagagagaatagaagaatatacacatcttcttcctctcgcttccaaaggtgatgccttccacggagaggagatcgtgcgaccatgatggcagcgactcttgattttgcccatcttcccacgctcaaacggataacagtctccttccttctgtctcttccaatcgtctcttcctagttccataacactctcacaacacgctagcaggacactcattctctcaatcggctcttcccgctgcgctacacgccaccaagagcctccccaactcctccccgtcaaacggcgccgcgtcgcaaggagcacaaccaccccccgtctccttcctcagacgctgtcgcgtttctcgcgcgggttattgcccacggaagcttaaatacttggtgctgaactgctgaagtatgatgtctcactgaaaaacaacgagatggcaatgagaagtgttcaggaagaggggtaatatttactcagagcagcaaaggaaggtcgccccaccaagctgccatgatattcctccacttaccagtgtttcaaattccaatgacatcaggttgaagaaaggaacttcacacatgaaaagagacgatccggacgaccatgaagattaaacgttgctgttaagaaaagccatattttctgtattgcttctaagctgttttatggcctttaaaccaatacttttgcttggcatatatgtagctataactattgtaatataatctctgagcttctcatgctgctattcaacatatcattactcctaccaatatatgtacagtttcagttgacttgcttgctttcc

SEQ ID NO: 70727 - DNA, 2397 bp, Zea Mays
cgcttcttcacgtcccccctcaatcacatcaccggcactccccattgtccttcatctgctgcctgctcctccgcgcggccatgcccgagctcgcggtcctcgttctcagccacgcgctctttcacgcgcgcctccgttgccgctcttgctcccagactttgccgtggccctctcccgtctctcattggcatttttttatgtagggttactcacactgttacaagggtcattcagcgcctgtcactgctctggctgatagattgcttatggatggtgaatctaaactgcttgcaagtggagggtaccaatccaccttccctacccgtccagctgctcgatgcctctgaaattgatggagcgatacctagcacgcggtgcatgttgttctgaagattctgctgctgttggttgccattcaccctgacagtattgccagtggcaccgtcaactatttcttccctctccgcccgagcctgcagatgaatgtttgacggcacttctcgcctactgtcctcactggtgtttccaaagtctgcagtgagttcggtctcagctctaattaacgaggaagtcatgctaggcaccctctggtcttctcgtctccaaccaaccactaccggcgtgtggatgatagcaggttatctgttgcgtggcataaatcgtccctgttggtgagctgttccaaagactcaaaggttaaagtttgggacacagtggctccttcgagtggttcatcaccatgtgtaggcagtgctcacctcaactcaaacaggccaccaattgctatgaaatgccatgaatccctttgctatattgctgctggagctcaagtgacagcgattgacttgaggacaatgaagaaggcttctgtccttgcactccagaaccacagaatactttcttacggatacgtcaatggctgtgcagtccaaaaaaatgaagagaagggaatttgacattgtcgttcaagcttcaacattgatcacttattggttttcaggaagtctttctgaatgtcagttgctataggattatttgaacaacatctcttccaatggtgatatattttatgatgctcagaatgatttcttgacacctgaatgggacagtgagaatttacaagtggtactgatgattctatccatgttcaaatcatcaagatagtcatcaggttccttcagtaattcaaaccatcactaatcccttctgacgggctatatattctatcggaccaggcacaactatccaaatttcttttctatataacaaacgcggacgtaaagttgctcaaccacgctgtccacgtcgctcctccgtttcccagccattggatcggcaaccaacgacacaagagaattccgtgcgattgtttcttaacgtgaagtttctggacagcgccggacagatagagagaatagaagaatatacacatcttcttcctctcgcttccaaaggtgatgccttccacggagaggagatcgtgcgaccatgatggcagcgactcttgattttgcccatcttcccacgctcaaacggataacagtctccttccttctgtctcttccaatcgtctcttcctagttccataacactctcacaacacgctagcaggacactcattctctcaatcggctcttcccgctgcgctacacgccaccaagagcctccccaactcctccccgtcaaacggcgccgcgtcgcaaggagcacaaccaccccccgtctccttcctcagacgctgtcgcgtttctcgcgcggtgcgccccctccctgaaattcttatatacagagcaaggagcaaatatgggattccatgatgtccacgtcgctattttttgacggctcaacttgattgtgccgtgaattgtctgttagctagggagtcatcatttctgttttggcctctaaaataacgtttacagctggaaccgaagtatgcttgacaaatggttattgcccacggaagcttaaatacttggtgctgaactgctgaagtatgatgtctcactgaaaaacaacgagatggcaatgagaagtgttcaggaagaggggtaatatttactcagagcagcaaaggaaggtcgccccaccaagctgccatgatattcctccacttaccagtgtttcaaattccaatgacatcaggttgaagaaaggaacttcacacatgaaaagagacgatccggacgaccatgaagattaaacgttgctgttaagaaaagccatattttctgtattgcttctaagctgttttatggcctttaaaccaatacttttgcttggcatatatgtagctataactattgtaatataatctctgagcttctcatgctgctattcaacatatcattactcctaccaatatatgtacagtttcagttgacttgcttgctttcc

SEQ ID NO: 70728 - DNA, 2156 bp, Zea Mays
cgcttcttcacgtcccccctcaatcacatcaccggcactccccattgtccttcatctgctgcctgctcctccgcgcggccatgcccgagctcgcggtcctcgttctcagccacgcgctctttcacgcgcgcctccgttgccgctcttgctcccagactttgccgtggccctctcccgtctctcattggcatttttttatgtagggttactcacactgttacaagggtcattcagcgcctgtcactgctctggctgatagattgcttatggatggtgaatctaaactgcttgcaagtggagggtaccaatccaccttccctacccgtccagctgctcgatgcctctgaaattgatggagcgatacctagcacgcggtgcatgttgttctgaagattctgctgctgttggttgccattcaccctgacagtattgccagtggcaccgtcaactatttcttccctctccgcccgagcctgcagatgaatgtttgacggcacttctcgcctactgtcctcactggtgtttccaaagtctgcagtgagttcggtctcagctctaattaacgaggaagtcatgctaggcaccctctggtcttctcgtctccaaccaaccactaccggcgtgtggatgatagcaggttatctgttgcgtggcataaatcgtccctgttggtgagctgttccaaagactcaaaggttaaagtttgggacacagtggctccttcgagtggttcatcaccatgtgtaggcagtgctcacctcaactcaaacaggccaccaattgctatgaaatgccatgaatccctttgctatattgctgctggagctcaagtgacagcgattgacttgaggacaatgaagaaggcttctgtccttgcactccagaaccacagaatactttcttacggatacgtcaatggctgtgcagtccaaaaaaatgaagagaagggaatttgacattgtcgttcaagcttcaacattgatcacttattggttttcaggaagtctttctgaatgtcagttgctataggattatttgaacaacatctcttccaatggtgatatattttatgatgctcagaatgatttcttgacacctgaatgggacagtgagaatttacaagtggttccttcagtaattcaaaccatcactaatcccttctgacgggctatatattctatcggaccaggcacaactatccaaatttcttttctatataacaaacgcggacgtaaagttgctcaaccacgctgtccacgtcgctcctccgtttcccagccattggatcggcaaccaacgacacaagagaattccgtgcgattgtttcttaacgtgaagtttctggacagcgccggacagatagagagaatagaagaatatacacatcttcttcctctcgcttccaaaggtgatgccttccacggagaggagatcgtgcgaccatgatggcagcgactcttgattttgcccatcttcccacgctcaaacggataacagtctccttccttctgtctcttccaatcgtctcttcctagttccataacactctcacaacacgctagcaggacactcattctctcaatcggctcttcccgctgcgctacacgccaccaagagcctccccaactcctccccgtcaaacggcgccgcgtcgcaaggagcacaaccaccccccgtctccttcctcagacgctgtcgcgtttctcgcgcgggttattgcccacggaagcttaaatacttggtgctgaactgctgaagtatgatgtctcactgaaaaacaacgagatggcaatgagaagtgttcaggaagaggggtaatatttactcagagcagcaaaggtcgccccaccaagctgccatgatattcctccacttaccagtgtttcaaattccaatgacatcaggttgaagaaaggaacttcacacatgaaaagagacgatccggacgaccatgaagattaaacgttgctgttaagaaaagccatattttctgtattgcttctaagctgttttatggcctttaaaccaatacttttgcttggcatatatgtagctataactattgtaatataatctctgagcttctcatgctgctattcaacatatcattactcctaccaatatatgtacagtttcagttgacttgcttgctttcc

SEQ ID NO: 70729 - DNA, 1631 bp, Zea Mays
ctagctgatcacacttggcgttgctatataagcactcgcacctcctccatcgtcccggcaacatcatcaccacacgccaaatttacagctagttagctgaattcgatcgatatccaggaactaataatccaccgacccccctcatggcggcttcgtcgcgaatgggcttatccgtctacctcgccatcatggcggcggtgctcgcctcggcgctcggagcggagctcaccgcggactactatagcgagacgtgcccgcaagcgctgaccaccatcaagctcctcgtcggcgccgccatcctgagggagcccaggatgggggcgtcgctggtccgcctccacttccacgattgcttcgtcaatggctgcgacggctccatcctgctggacgacaccgacgacatggtcggcgagaagacggcgaagcctaacaacaactccgtgagaggctacgatgtcatagacaccatcaagtcggcggtgaacacgatatgcttgggcaacgtcgtctcctgcgccgatatcttggccgtggccgctcgcgattccattgtcgctgtaagtatagttcacctgctggccactcacgcactcacggctcaaatgattgcctgccctacaaaaaaggtcacggaaccgcactactaaaaccgtgcaataagcaagcgatacgtagcataaagcactagccaaaatcttcttctccaggtccagcaggcaacttgcaaaaaccctttaaaccaaaaatcttcacactccaaagtccaaagtgacaccactgacagcagtatgacgactgacgtgacccaaagttcacatataaattattattttttgtctgtccattgcgcgcgcgcgcgtatggcgctgcttccagctgggaggaacctcgtacgacgtgctcctggggcggcgcgacgcgacgacggcaagcatggacgacgcgaacaacgacatcccgacgccgttcatggacctgccggcgctgcaggacagcttcgagtcccacggcctgtccctgcacgacctggtggtgctctccggcggccacacgctgggctactcccgctgcctcttcttccgcggccgcctgtacaacgagaccggcacgctggacccggcgtacgccgggtcgctggacgagcgctgcccgctgacgggcgacgacgacgcgctgtcggcgctggacgacacccccaccaccgtcgacgcggactactaccagggcctcatgcagggccgcgcgctgctgcactcggaccagcagctttaccaggcaggcggcgccgctggcgatctggtggagtactacgccgagaacccgaccaagttctgggaggacttcggcgcggccatgctcaagctgggcagcctgagcccgctcaccgccgacgaaggggaggtcagggagaactgccgggtcgtcaaccaggtgtgagtgtgacttcgccgccatcgccgtcgaatgaacgaggcatcagcttcgttccgtacgcacactgtggctgctagctgcaccggcaagctatgcagcaagattctgtagcgtgtgtcttatatttgtattcgcgtgcctacttaattttgtgagaaattggtcttatatgtttggttaacatatttttgatcgaa

SEQ ID NO: 70730 - DNA, 1978 bp, Zea Mays
agctactatacaaaaccagccgagcgccagaggagaagagctccgtcttgccttctcttctctacctgccgcacccgcacagccacagccaaccacacaccccacatcacaacagctccctctgcatctccgcctcgtcgccgtcgtctgcctgcacaaccttcttcttcctcatctctctctctcttcttccgctgccaccctcccagcaccgagggaagggaagcccaggaatctccgtcccgctcccggccgccgtccttctcataacctcatcggatctgtattgggttttcagtaaggagcagaaaacgccttagggaatgcagaaagatgtgcttgcacgtcgaagagctactttgtgagggacttggcaggaaagcacgccatactcttcattctctgccacctcttgatgacttcgaagctcaagagtacacgtatctccacctcgtgctttcgcacaatggggttcgacgtggcggctcaaccgtcttcttagatcaccatctcggtggagacggttgaagtcttcacaccctctcgacctctttgctgtctcattttttttaactgtcaaggataagcaagtgacctctgtgtgcataccaccaccaccatacgtagcatacacaggcacagatggcagagcataaagggaacgttctcttgcacaagtatgagatggggaaattgcttggccaaggcacctttgccaaggtttaccatgctcgtaacacggcgacttcggaaagtgtcgcgatcaaagtgattgataaggagaaggttatgaaggttggtctcattgatcaaatccagcgagaaatttctgtgatgaagcttgttaggcatccaaacatcgtacagctctatgaggtcatggccaccaaaaccaaaatatactttgtgctggaacatgttaaaggtggagagctgttcaacaagattcagcgaggaaggctcaaggaagacgcagcgaggaagtacttccagcagttgatctgtgcggtggacttctgccacagcaggggtgtctatcatcgagatttgaagccagaaaatcttttgctcgatgagaatagcaacctaaaggtatcagattttggtctaagcgcacttgctgaatgccatagacaagacggcctgctccacacgacttgtggcacgcctgcttatgttgccccagaggtgattaacagaaagggttatgatggtgcaaaggctgacatatggtcttgtggggtcatcctgtttgtgctattggctggttatcttccgttccatgataagaacttgatggacatgtataagaagattgagaaagctgacttcaaatgtccaagttggttttctaccgatgttcggaggcttttgcaaaggattcttgatcctaaccctagtagaaggatctcgatggaaaaaatcatggagaatccatggtttaggaagggtttaggtgcaaagctacttaggtacgatttacagaataagaatgcccctcatgtggacaagaatgcagattttgattcactgagcgccaacataacaactgagagcaagcaacatgaagaaaagaagcctatcaacatgaatgcatttgatataatctctctatcaactggcttggacctctctggtttatttgaagaatctaacaagaagagagaatccaaattcacatctaccaacacaagctcgacaatcatatcgaagatcgaagatattgcaaagaatttgcggttgaatttgacaaagaaggatggtggtttgttaaagatggaagcttcaaagcccggaaggaaaggggtaatgggtatcgatgccgaagtatttgaggttagccctaactttcatcttgtggagataaagaagacgaatggcgacactctagagtatcaaaaggtcctgaaccaagaaatgaggcccgcactcaaggaaatagtgtgggcttggcaagaaggaatgttgacgctttttc

SEQ ID NO: 70731 - DNA, 3142 bp, Zea Mays
gccgcctctattttatctatctatttccaccacgcgctcgttgtctcttgtcgctgcagcctcgtcccgtccaatccttccaagtctctcttcttgctgcaggctgccccaagcccaggctcaatccggctggacgaggagacggcattgctcgcatcgcctgccctgccctgccccccatgcgtgttgtgcgcatgaacagaggctaggctaccaacaacgcatagcatagccatggatcccgagttcggcgtcggcacggcgccacaaaaggggcggcgggcgtggcggacgacgctgctgctggcgtaccagagcctcggggtggtgtacggcgacctcagcatctcgccgctgtacgtgtacaagagcaccttcgccgaggacatcacgcactcggagaccaaccaggagatcttcggcgcgctctccttcgtcttctggacgctcaccctcgtcccgctcctcaagtacgccaccatcgtcctgcgcgccgacgacagcggcgagggcggcacgttcgcgctctactccctcatctgccgccacgccaatgtcagcctcctccccaaccgccaggtcgccgacgaggagctctccacctacaggctggagcgcccgcgcgaggccgccgggaggtccggcctgctcagggcgtggctggagaagcacacgaggctgcacaccgcgctgctcgtcatggtcatgatcggcacctgcatggtcatcggcgacggcgtcctcacgccagccatctccgtgttctccgccgtctcagggctcgagctctccctgtccaaggatcagcatgaatatgccgtcatcccgataacctgcgccatactggtgttcctgttcgcgctgcagcactacggcacccaccgcgtggggttcctcttcgcgcccatcatcctcgcctggctgctctgcatgagcgccatcggcctgtacaacatcgtccgctggaacccccagatctaccaggcactcaaccccgtctacatgatcaggttcctcaggaagaccaagaagtccggctggatgtcactgggaggaattctgctgtgcatgacagggtcagaagcaatgttcgcggatcttggacacttctcctacagcgccatccagcttgctttcacttctctagtgtacccttcactgatcctgggttacatgggccaagctgcttatctgtcccagcaccataaccttgacgcaagctaccagatcgggttctacattgcagttcctgagtgtgtacggtggcctgtgctggtgctggccatcttggcgtccgtggtgggcagccaggccatcatcagcgggaccttctccatcatcaaccagagccagtctctgagctgcttccctagggtgaaagtcgtgcacacgtctgacaaagttcatggccagatatacatccctgaggtcaactggatcctcatgatcctctgcgttgctgtcactgttggtttccgtaacaccaagcacatggggaacgcgtctggcttggccgtgatcacggtgatgctggtgaccacgtgcctcatgcccctggtgatcatgctgtgctgggaccgctccccctggctggccctcgccttcttcctcttcttcggctccatcgaggcgctctacttctcggcgtcgctgatcaagttcctggacggcgcgtgggtgcccatcctcctggccctcatcctgctcgccgtcatgttcgtgtggcaccacaccaccatcaggaagtacgagtacgacatgcacaacaaggtgaccctggagtggctgctggcgctgggcgacaagctgggcatggtgcgcgtcccgggcatcggcctcgtctacaccgacctcacctccggcgtgcccgccaacttctcccgcttcgtcaccaacctgccggcgttccaccgggtgctggtcttcgtctgcgtcaagtcagtgccggtgccgcacgtgctccccgccgagcgctacctcgtcggccgcgtcggcccgccgggacaccgctcctaccgctgcatcgtgcgctacggctaccgcgacgtgcaccaggacgtggactccttcgagacggagctcgtcgagagcctcgccacgttcatcaagctggacgcgctgttccgctgcagcgacgccgccggcgaccagcagcgggacagcagctactacgagcgcgagaacgcgctcacggtcatcgggagcaacccgctgcggcgccacctggccctgggctacgacgactcccactcccacgacgacggcgcgtcgtcagctggctctgaccgcgtggacggcatagagctcgccgcggcggcgccggcgccggcggtcgttaagaagcaggtgaggttcgcggtggctccgcccaggagccccggtgtggacgagaccgtgctggaggagctgcacgagctgtgcgaggcgcgcgaggccggcacggcgttcatcctgggccactcgcacgtgaagaccaagcccgggtcgtcgatactcaagaggctggccgtcggcgtcggctacaacttcctgcgccggaactgccgcggcccggacgtggtgctgcgcgtgccgccggcgtcgctgctcgaggtgggaatggtgtacgtgctgtaaccagaacgtggcggtgatgggtgactgcgatctctgcgtccggttttcgctgcgtgaactacggatctctctgctgtctgatatgctcttatgcacatctcgatttgcccatgtataaattgtaacgagatgcgatggtaacagaggatgccctgtcatttcccaatgatgagttgactaaggattataggccattttaactttatactaaatcaatcaatgcaaaattttgactacgtcttttaataaaaaacactgacacgtataagttcaaaaaaaaaataacatgtggtccttaaccttggcaaagggggaactgagctcagtggtaaaagctctatggtacaagctggccggtccaatttcctaccattatatggtggggagcctcttcctctgtgaaagtcaaaaaaaaaacttgccaaaggctcattggacaatgatatagttaagattttgtctcgtaattcacttatatagtcaccaaaatactgttgtttgcacttttttttgttgtgcagacaat

SEQ ID NO: 70732 - DNA, 3128 bp, Zea Mays
cgccgcctctattttatctatctatttccaccacgcgctcgttgtctcttgtcgctgcagcctcgtcccgtccaatccttccaagtctctcttcttgctgcaggctgccccaagcccaggctcaatccggctggacgaggagacggcattgctcgcatcgcctgccctgccctgccccccatgcgtgttgtgcgcatgaacagaggctaggctaccaacaacgcatagcatagccatggatcccgagttcggcgtcggcacggcgccacaaaaggggcggcgggcgtggcggacgacgctgctgctggcgtaccagagcctcggggtggtgtacggcgacctcagcatctcgccgctgtacgtgtacaagagcaccttcgccgaggacatcacgcactcggagaccaaccaggagatcttcggcgcgctctccttcgtcttctggacgctcaccctcgtcccgctcctcaagtacgccaccatcgtcctgcgcgccgacgacagcggcgaggatgccgtcatcccgataacctgcgccatactggtgttcctgttcgcgctgcagcactacggcacccaccgcgtggggttcctcttcgcgcccatcatcctcgcctggctgctctgcatgagcgccatcggcctgtacaacatcgtccgctggaacccccagatctaccaggcactcaaccccgtctacatgatcaggttcctcaggaagaccaagaagtccggctggatgtcactgggaggaattctgctgtgcatgacagggtcagaagcaatgttcgcggatcttggacacttctcctacagcgccatccagcttgctttcacttctctagtgtacccttcactgatcctgggttacatgggccaagctgcttatctgtcccagcaccataaccttgacgcaagctaccagatcgggttctacattgcagttcctgagtgtgtacggtggcctgtgctggtgctggccatcttggcgtccgtggtgggcagccaggccatcatcagcgggaccttctccatcatcaaccagagccagtctctgagctgcttccctagggtgaaagtcgtgcacacgtctgacaaagttcatggccagatatacatccctgaggtcaactggatcctcatgatcctctgcgttgctgtcactgttggtttccgtaacaccaagcacatggggaacgcgtctggcttggccgtgatcacggtgatgctggtgaccacgtgcctcatgcccctggtgatcatgctgtgctgggaccgctccccctggctggccctcgccttcttcctcttcttcggctccatcgaggcgctctacttctcggcgtcgctgatcaagttcctggacggcgcgtgggtgcccatcctcctggccctcatcctgctcgccgtcatgttcgtgtggcaccacaccaccatcaggaagtacgagtacgacatgcacaacaaggtgaccctggagtggctgctggcgctgggcgacaagctgggcatggtgcgcgtcccgggcatcggcctcgtctacaccgacctcacctccggcgtgcccgccaacttctcccgcttcgtcaccaacctgccggcgttccaccgggtgctggtcttcgtctgcgtcaagtcagtgccggtgccgcacgtgctccccgccgagcgctacctcgtcggccgcgtcggcccgccgggacaccgctcctaccgctgcatcgtgcgctacggctaccgcgacgtgcaccaggacgtggactccttcgagacggagctcgtcgagagcctcgccacgttcatcaagctggacgcgctgttccgctgcagcgacgccgccggcgaccagcagcgggacagcagctactacgagcgcgagaacgcgctcacggtcatcgggagcaacccgctgcggcgccacctggccctgggctacgacgactcccactcccacgacgacggcgcgtcgtcagctggctctgaccgcgtggacggcatagagctcgccgcggcggcgccggcgccggcggtcgttaagaagcaggtgaggttcgcggtggctccgcccaggagccccggtgtggacgagaccgtgctggaggagctgcacgagctgtgcgaggcgcgcgaggccggcacggcgttcatcctgggccactcgcacgtgaagaccaagcccgggtcgtcgatactcaagaggctggccgtcggcgtcggctacaacttcctgcgccggaactgccgcggcccggacgtggtgctgcgcgtgccgccggcgtcgctgctcgaggtgggaatggtgtacgtgctgtaaccagaacgtggcggtgatgggtgactgcgatctctgcgtccggttttcgctgcgtgaactacggatctctctgctgtctgatgtgctattagagcatctccaacaacgtgacctataaaaatgtcttataatttaaaaataagtaaattttatagaatttagggcaccaacaaagcaccccgctccaacagtaaagccccaaatctagattatagggcagcccactacggtgtagtatatttgaggcacttgagagagtggcctatagttttttgacaaaatttgttgaattgaggcactgttggagtggtttttcctgtgtagagccctatatttcaatttgaggcactagtttgaggcattgttggagatgctcttatgcacatctcgatttgcccatgtataaattgtaacgagatgcgatggtaacagaggatgccctgtcatttcccaatgatgagttgactaaggattataggccattttaactttatactaaatcaatcaatgcaaaattttgactacgtcttttaataaaaaacactgacacgtataagttcaaaaaaaaaataacatgtggtccttaaccttggcaaagggggaactgagctcagtggtaaaagctctatggtacaagctggccggtccaatttcctaccattatatggtggggagcctcttcctctgtgaaagtcaaaaaaaaaacttgccaaaggctcattggacaatgatatagttaagattttgtctcgtaattcacttatatagtcaccaaaatactgttgtttgcacttttttttgttgtgcagacaat

SEQ ID NO: 70733 - DNA, 1774 bp, Zea Mays
cacgcagccccccgcacctctctcgtccccactccccacaccctgctgcctgcatctcatcgatctcctcctctccgacgacgaccatggctgagacgaccctgctgacgaggaggtccaagcgcatcgctctgcgcgtttcccttgccggagccaaacccagctggcgtgactgggccggcctagcgccgctggcggtggagaagatcgccgaccgcctccgggacgaggacgtggcggacttcatgcggttccgcctggtgtgcaagctgtggatggacggcagcggcatcaggaagcctcgtgagctgggcgcacgcgttatcgaccacagcttccaccctcgccggtggatcctgctgacggatgagaagaaggaggctgatgaggcgacgcccacgcgccgcatgctgctcaacctcaccacccggaagaccatccaggtggatctgccggagctcgccgggcactccgtggtccccggacccgccgcggcgccggagggcatgctggtggtgcgcgacgagaggagtctcgtcgtgcgcctcctcaacccgctcacccgccacgtcgtcgacctcccgacgctgctgacgctgcggcctggaaaccgccgcaggggccccgttcccagctcgttcgccgaggaccacgaggtgacggcggccggcttcgccgacgcgtcgaccatcgtcgtgtacttgggcaacgccaaccagttggtcgtggccaggcccggagacgcgcgctggacgctggtaggtggcctcgaccccgagttcccgctgagatccacggccaccttccagagccgcttctactgcgtggatcgctgccagctcctggtggtggacatggagcgaggaccacgggcgcagctggtggtcgccgccaacctggagcggcggtaccgcacggtgggcatggtcgacgacggcggcaggctcatggcggtgtgcagccgggaccaggtcgtgcgtgccgatgcccgttggatgagctcgctggagacgcgcgtggagctattccatgtggatctgcaggaggagaagctgtcgcggatcgaggacctaggtgagcgggcggttttcgcagggttacgaggcgcggtgcttctgccgagtaccaagtactacttctcggtggaccgtggtacggtgttcttccgcttcggaagctcccaaaggcatttcggtgcgttccatgttcgtcgccgtcacacgtgctatatagcttcagtgtggggtaagcttccgcagcgtgtagcttcctatgtcaccaccctccgttatctctactagtccgatcctctccgcgcggccggccggtgctagctaaactgttgttgcagcatgcatcataataatttggtttcatatagccagggaataattcttcgacatatatcgcatgctgctgagtttcagtttgtattttcggttgctcaactagtttcttattaccttggactcagcataactaatgttattgcaacttcattcttgaaatggttatttcttttcaaatgcttactttgttccaactatatatcacacatatatatgtttttatcttgttctccagttatttcttaattaattctcactgtatgttttgaggtatggatcgtcattgtgtctttaccaccctagatttcggagtggttgcatttttagtcaaagccttggatcggaacggttggagaaggaaagagccaaaatgttatgggagttgtaattatgttggatttttaacgggactgttaagggcttaa

SEQ ID NO: 70734 - DNA, 2283 bp, Zea Mays
gcactttataggtttttggaatattttagcaagtttgactgggatcggtatggcattagcttaaatggtcaggttgatttgtcatcattaactggtgagtcatatgctcttgtcttgttttatatatatgaatcgccagtggaatgatctcttgtctaattgttaaaatttgcaacttgcagtggaacctacagatgtacaaggcgaatcattgcttggcaaagaattgcaacaaggctatttggataggcttgttgtaattccaaatgagtttgacggatgtggcacacaatttcgccagaagtttttaaacataatcgatccactcaaggcgaataataacctcggcagaagtgtcagcaaagcaaacttttatcgcatacggagtgctttctcatttggagcacagaagcttggtcaaattctcctgttaccatcagagtacattcgtgatgagatttatggatttttcgcaaacacactgaagagacacggaaatggtgaaagaccagacgttgacacttgtagttcattccatccctctcgtggtcccgagagtgcgcttactgaagacggatcgaagtttaaattttgttgcatgaatgagggtgaaaacggaagttcatgtcaatgccattcatcgaaactgcctgacaaggattcgagtgtgacagatgcgcataaaaattcaggaaaaaagctactcccacccttcttgctgtcaaatatgctggatctctcaggctgttgaagaagcatgtttagctgatgtgctagatgaggattctttcaagatgtcggacattatcttgaagttgaaaactagcactagatcctcaagcctgtcactagtttcatctactgatagcgagagaaggaaactatctcatgtgtattgttcccatagcacaggagacgatttacaactatcacatgctgaggttcaagtggatatggtttggcagcagaatgtgccattgtcccccaacggatcaacatttactccatctccttcaaacaattcagataactatcatgtttcttggttttgtttctctcctacatcgcatggaactggcacatacattcccaacatgagttatcatacatacagggaacgtatgatgcttgaaagagaaaccatacgagcaagaaaacaacgacagaggtttcctgatcgtcggtattactcagctgagcaaggatttgccgattcacaaactgaagacagcgtagctcaaagtggaacaaatcaatcgccgactaagcaaaacagtgcacaacagagtggttattcgagcaagagctcaatttcggatggagattttgttcgtttcaaggagcatgttgcaacaaatggtggaaccaaacaggcagtaggaagagattttgttgagaagggaagacacacaacgccaccatcatctccgccaatgacagtacttttacaaaatggacaaggaaaacctacctgtcagccttcctcacctgtcacagcagatttgttcaatgcggcgaaaagtttggagttcggatccttggggccattctcattgggacttccctcaacctcgacacagtttgaggaagaattcccagcgcttcctactagaaagagagccgaaggccccatttcagtggcgcccagcgctaaggctgttgaaaccaaaagcaggtcagaagagagtgaagagatgttccgactgagaaatgaatctgatttccctcccctccaagctggctgccgctgagactgacaggacgtcgagataatccatgctaatcgtagtggtagaagttaatgacgggacgaggctcggagatacagcaggatgtcggataggtgccccggcaggattttcgtccgacagtgtagcaagtttggatgcttggctactcacctttgtgatgtggtggcaatgtggtgtcgtgtaaaacaataataatcctcatctcacctttatttcattttattagatgaatccttagataaacaacacccagaagtcggagtgagcaatatagtttcgtctttagcatagacagtccaaaaaaattggataggggaagtagaaaatgttccccaaaaaaggaatcgtgattctgtagatttttttaagcttttgatttaaaaatagagaaatgaagaaaaggcatttaggtgcagttgtttgttgtatcttttctattgcttccatgcatttcttttaccgagaaatatgtattaggctattagcgactgtagtatttacgggcactagttggttatccgtgcgttgtgac

SEQ ID NO: 70735 - DNA, 3715 bp, Zea Mays
ctagctacatgccacggcagagggcatgcatgcctatagcttatagacgagcgtgcatgcccgggcctgaccatttttaggctaatgcagcgagcatatcctatttatatttactgatgaaatctggtgaccacgctttcatgtcaacctcctcggcttgctgtggccacagactaacaaggcaacaatatttgagatacggatagatgccacagagcaggagcgatcagcgtacacgtagacgtaggttccttccgcacttcctgccaccgtactgcgttcaactgtggtgcacgcatgagatctggaaacttttgctttgtgttaaggtttgagtagggccgtggagaaggggaaagcagatagagttgggaacaggaagaagaggcaggaagacggcgagtattatatttcttctccaaattcttgttatccggttattacaatctcaacgtatttatgggacgcagcccaagctcattcggcccactccggcccatgaacgcgtgtgtatggatgccgaattcgaacttcacgcgccttgtcctcctatgctcccgccgtttcttcagtgtcgttcgccgaactgctgaaactttgtctgcaattaaaaaaggcaccgtgttggctacatccacatttcctcgttggtttgctgatgtctttgcgtttggatcagtgcctctgaggacgtatctccccgatggcgacgttgatataactgtactggggaacacatggttaaacagtacattcatcgatgatgtccgcagcatgctccagtcggagcaggaaaactgtgacgccgagttcaaactcacaggcttgcagttcatcaacgctgaggttaagcttataaaatgtgttatcgagaacattatagtggatgtctctttcaaccagattggaggggtgtccacgttctgctttcttgagctggttgaccgtcagattgggcagaaccatttgttcaaaaggagcattatgttaataaaggcctggtgctaccatgaaagtcgcatattaggagcacaccatggactgatatctacttatgccttggaaacacttgttctttacatattcaatatgttccacaagtctctgcatggtcctcttgaggcactttataggtttttggaatattttagcaagtttgactgggatcggtatggcattagcttaaatggtcaggttgatttgtcatcattaactgtggaacctacagatgtacaaggcgaatcattgcttggcaaagaattgcaacaaggctatttggataggcttgttgtaattccaaatgagtttgacggatgtggcacacaatttcgccagaagtttttaaacataatcgatccactcaaggcgaataataacctcggcagaagtgtcagcaaagcaaacttttatcgcatacggagtgctttctcatttggagcacagaagcttggtcaaattctcctgttaccatcagagtacattcgtgatgagatttatggatttttcgcaaacacactgaagagacacggaaatggtgaaagaccagacgttgacacttgtagttcattccatccctctcgtggtcccgagagtgcgcttactgaagacggatcgaagtttaaattttgttgcatgaatgagggtgaaaacggaagttcatgtcaatgccattcatcgaaactgcctgacaaggattcgagtgtgacagatgcgcataaaaattcaggtaagtatttgcctggtcttgttcaggatatttcttggaacaaaatctggttcatggaatatgcatctgatttcaaagaacatacatcaactttagcaagcttaagcagccactcaccctgttctcaagataatagtaatggaagcagtgatgagtgcttcgagaattatgcagcagaggaagatttacaccagaatgtgccgcagcagatttatccagagcatccatcacatatattgacaaactcgactagtgcaaatatcttggatttttccagttcttgttttggtgatgagtcagattggactgctccccgcgcaggaaaaaagctactcccacccttcttgctgtcaaatatgctggatctctcaggtgatctggagttgcacttagggtgccttcgcaaagttcagtaccacctggagtcattgtttgatgaactcctgcaggctgttgaagaagcatgtttagctgatgtgctagatgaggattctttcaagatgtcggacattatcttgaagttgaaaactagcactagatcctcaagcctgtcactagtttcatctactgatagcgagagaaggaaactatctcatgtgtattgttcccatagcacaggagacgatttacaactatcacatgctgaggttcaagtggatatggtttggcagcagaatgtgccattgtcccccaacggatcaacatttactccatctccttcaaacaattcagataactatcatgtttcttggttttgtttctctcctacatcgcatggaactggcacatacattcccaacatgagttatcatacatacagggaacgtatgatgcttgaaagagaaaccatacgagcaagaaaacaacgacagaggtttcctgatcgtcggtattactcagctgagcaaggatttgccgattcacaaactgaagacagcgtagctcaaagtggaacaaatcaatcgccgactaagcaaaacagtgcacaacagagtggttattcgagcaagagctcaatttcggatggagattttgttcgtttcaaggagcatgttgcaacaaatggtggaaccaaacaggcagtaggaagagattttgttgagaagggaagacacacaacgccaccatcatctccgccaatgacagtacttttacaaaatggacaaggaaaacctacctgtcagccttcctcacctgtcacagcagatttgttcaatgcggcgaaaagtttggagttcggatccttggggccattctcattgggacttccctcaacctcgacacagtttgaggaagaattcccagcgcttcctactagaaagagagccgaaggccccatttcagtggcgcccagcgctaaggctgttgaaaccaaaagcaggtcagaagagagtgaagagatgttccgactgagaaatgaatctgatttccctcccctccaagctggctgccgctgagactgacaggacgtcgagataatccatgctaatcgtagtggtagaagttaatgacgggacgaggctcggagatacagcaggatgtcggataggtgccccggcaggattttcgtccgacagtgtagcaagtttggatgcttggctactcacctttgtgatgtggtggcaatgtggtgtcgtgtaaaacaataataatcctcatctcacctttatttcattttattagatgaatccttagataaacaacacccagaagtcggagtgagcaatatagtttcgtctttagcatagacagtccaaaaaaattggataggggaagtagaaaatgttccccaaaaaaggaatcgtgattctgtagatttttttaagcttttgatttaaaaatagagaaatgaagaaaaggcatttaggtgcagttgtttgttgtatcttttctattgcttccatgcatttcttttaccgagaaatatgtattaggctattagcgactgtagtatttacgggcactagttggttatccgtgcgttgtgac

SEQ ID NO: 70736 - DNA, 3712 bp, Zea Mays
gcgaagcctctatcccttctctgtatatatataagcagcggcaggcgagtgcagagagacccaggtagtactaggtaggtagcgagaacgaaaccacttccacaccttgtcagagcagcagcagcccgcagccgaagataccaaaccaacgccacctggatccccaccggacccgacccgacccgatcccagaggagaaggagagggggggggggggggggggggggggaaagaagaatcgccagaaatcttttgctgcctcgcagagtcgcagggcgaacgaaaacccatcttcccgattccgcccgcggcactttccattcgtcccgatcggattcctccgtttgctccagcaatggcgcacttgggcggccgcgtccagggagccgacggcgggtggttcgtgccctgcgccgactccgggcggtcgctcccgtgggcgaggggcggcgccggcgccggcgcgagcgaaacgctggcggcggtcatggcgaggagggcgccggcggcggcggcgatccggcgggacgcgctgcgcgccgcggaggcggccgccggcgaggtcgtgctgcgcgtccaccccacccgggaggcggagcgccgccgccaggacgtcatcgcctacctcaggcgactcatcggctcctgcctcggctgcgaggtctttgcgtttggatcagtgcctctgaggacgtatctccccgatggcgacgttgatataactgtactggggaacacatggttaaacagtacattcatcgatgatgtccgcagcatgctccagtcggagcaggaaaactgtgacgccgagttcaaactcacaggcttgcagttcatcaacgctgaggttaagcttataaaatgtgttatcgagaacattatagtggatgtctctttcaaccagattggaggggtgtccacgttctgctttcttgagctggttgaccgtcagattgggcagaaccatttgttcaaaaggagcattatgttaataaaggcctggtgctaccatgaaagtcgcatattaggagcacaccatggactgatatctacttatgccttggaaacacttgttctttacatattcaatatgttccacaagtctctgcatggtcctcttgaggcactttataggtttttggaatattttagcaagtttgactgggatcggtatggcattagcttaaatggtcaggttgatttgtcatcattaactgtggaacctacagatgtacaaggcgaatcattgcttggcaaagaattgcaacaaggctatttggataggcttgttgtaattccaaatgagtttgacggatgtggcacacaatttcgccagaagtttttaaacataatcgatccactcaaggcgaataataacctcggcagaagtgtcagcaaagcaaacttttatcgcatacggagtgctttctcatttggagcacagaagcttggtcaaattctcctgttaccatcagagtacattcgtgatgagatttatggatttttcgcaaacacactgaagagacacggaaatggtgaaagaccagacgttgacacttgtagttcattccatccctctcgtggtcccgagagtgcgcttactgaagacggatcgaagtttaaattttgttgcatgaatgagggtgaaaacggaagttcatgtcaatgccattcatcgaaactgcctgacaaggattcgagtgtgacagatgcgcataaaaattcaggtaagtatttgcctggtcttgttcaggatatttcttggaacaaaatctggttcatggaatatgcatctgatttcaaagaacatacatcaactttagcaagcttaagcagccactcaccctgttctcaagataatagtaatggaagcagtgatgagtgcttcgagaattatgcagcagaggaagatttacaccagaatgtgccgcagcagatttatccagagcatccatcacatatattgacaaactcgactagtgcaaatatcttggatttttccagttcttgttttggtgatgagtcagattggactgctccccgcgcaggaaaaaagctactcccacccttcttgctgtcaaatatgctggatctctcaggtgatctggagttgcacttagggtgccttcgcaaagttcagtaccacctggagtcattgtttgatgaactcctgcaggctgttgaagaagcatgtttagctgatgtgctagatgaggattctttcaagatgtcggacattatcttgaagttgaaaactagcactagatcctcaagcctgtcactagtttcatctactgatagcgagagaaggaaactatctcatgtgtattgttcccatagcacaggagacgatttacaactatcacatgctgaggttcaagtggatatggtttggcagcagaatgtgccattgtcccccaacggatcaacatttactccatctccttcaaacaattcagataactatcatgtttcttggttttgtttctctcctacatcgcatggaactggcacatacattcccaacatgagttatcatacatacagggaacgtatgatgcttgaaagagaaaccatacgagcaagaaaacaacgacagaggtttcctgatcgtcggtattactcagctgagcaaggatttgccgattcacaaactgaagacagcgtagctcaaagtggaacaaatcaatcgccgactaagcaaaacagtgcacaacagagtggttattcgagcaagagctcaatttcggatggagattttgttcgtttcaaggagcatgttgcaacaaatggtggaaccaaacaggcagtaggaagagattttgttgagaagggaagacacacaacgccaccatcatctccgccaatgacagtacttttacaaaatggacaaggaaaacctacctgtcagccttcctcacctgtcacagcagatttgttcaatgcggcgaaaagtttggagttcggatccttggggccattctcattgggacttccctcaacctcgacacagtttgaggaagaattcccagcgcttcctactagaaagagagccgaaggccccatttcagtggcgcccagcgctaaggctgttgaaaccaaaagtcagaagagagtgaagagatgttccgactgagaaatgaatctgatttccctcccctccaagctggctgccgctgagactgacaggacgtcgagataatccatgctaatcgtagtggtagaagttaatgacgggacgaggctcggagatacagcaggatgtcggataggtgccccggcaggattttcgtccgacagtgtagcaagtttggatgcttggctactcacctttgtgatgtggtggcaatgtggtgtcgtgtaaaacaataataatcctcatctcacctttatttcattttattagatgaatccttagataaacaacacccagaagtcggagtgagcaatatagtttcgtctttagcatagacagtccaaaaaaattggataggggaagtagaaaatgttccccaaaaaaggaatcgtgattctgtagatttttttaagcttttgatttaaaaatagagaaatgaagaaaaggcatttaggtgcagttgtttgttgtatcttttctattgcttccatgcatttcttttaccgagaaatatgtattaggctattagcgactgtagtatttacgggcactagttggttatccgtgcgttgtgac

SEQ ID NO: 70737 - DNA, 3076 bp, Zea Mays
atctattctatctatctacaggtctttgcgtttggatcagtgcctctgaggacgtatctccccgatggcgacgttgatataactgtactggggaacacatggttaaacagtacattcatcgatgatgtccgcagcatgctccagtcggagcaggaaaactgtgacgccgagttcaaactcacaggcttgcagttcatcaacgctgaggttaagcttataaaatgtgttatcgagaacattatagtggatgtctctttcaaccagattggaggggtgtccacgttctgctttcttgagctggttgaccgtcagattgggcagaaccatttgttcaaaaggagcattatgttaataaaggcctggtgctaccatgaaagtcgcatattaggagcacaccatggactgatatctacttatgccttggaaacacttgttctttacatattcaatatgttccacaagtctctgcatggtcctcttgaggcactttataggtttttggaatattttagcaagtttgactgggatcggtatggcattagcttaaatggtcaggttgatttgtcatcattaactgtggaacctacagatgtacaaggcgaatcattgcttggcaaagaattgcaacaaggctatttggataggcttgttgtaattccaaatgagtttgacggatgtggcacacaatttcgccagaagtttttaaacataatcgatccactcaaggcgaataataacctcggcagaagtgtcagcaaagcaaacttttatcgcatacggagtgctttctcatttggagcacagaagcttggtcaaattctcctgttaccatcagagtacattcgtgatgagatttatggatttttcgcaaacacactgaagagacacggaaatggtgaaagaccagacgttgacacttgtagttcattccatccctctcgtggtcccgagagtgcgcttactgaagacggatcgaagtttaaattttgttgcatgaatgagggtgaaaacggaagttcatgtcaatgccattcatcgaaactgcctgacaaggattcgagtgtgacagatgcgcataaaaattcaggtaagtatttgcctggtcttgttcaggatatttcttggaacaaaatctggttcatggaatatgcatctgatttcaaagaacatacatcaactttagcaagcttaagcagccactcaccctgttctcaagataatagtaatggaagcagtgatgagtgcttcgagaattatgcagcagaggaagatttacaccagaatgtgccgcagcagatttatccagagcatccatcacatatattgacaaactcgactagtgcaaatatcttggatttttccagttcttgttttggtgatgagtcagattggactgctccccgcgcaggaaaaaagctactcccacccttcttgctgtcaaatatgctggatctctcaggtgatctggagttgcacttagggtgccttcgcaaagttcagtaccacctggagtcattgtttgatgaactcctgcaggctgttgaagaagcatgtttagctgatgtgctagatgaggattctttcaagatgtcggacattatcttgaagttgaaaactagcactagatcctcaagcctgtcactagtttcatctactgatagcgagagaaggaaactatctcatgtgtattgttcccatagcacaggagacgatttacaactatcacatgctgaggttcaagtggatatggtttggcagcagaatgtgccattgtcccccaacggatcaacatttactccatctccttcaaacaattcagataactatcatgtttcttggttttgtttctctcctacatcgcatggaactggcacatacattcccaacatgagttatcatacatacagggaacgtatgatgcttgaaagagaaaccatacgagcaagaaaacaacgacagaggtttcctgatcgtcggtattactcagctgagcaaggatttgccgattcacaaactgaagacagcgtagctcaaagtggaacaaatcaatcgccgactaagcaaaacagtgcacaacagagtggttattcgagcaagagctcaatttcggatggagattttgttcgtttcaaggagcatgttgcaacaaatggtggaaccaaacaggcagtaggaagagattttgttgagaagggaagacacacaacgccaccatcatctccgccaatgacagtacttttacaaaatggacaaggaaaacctacctgtcagccttcctcacctgtcacagcagatttgttcaatgcggcgaaaagtttggagttcggatccttggggccattctcattgggacttccctcaacctcgacacagtttgaggaagaattcccagcgcttcctactagaaagagagccgaaggccccatttcagtggcgcccagcgctaaggctgttgaaaccaaaagcaggtcagaagagagtgaagagatgttccgactgagaaatgaatctgatttccctcccctccaagctggctgccgctgagactgacaggacgtcgagataatccatgctaatcgtagtggtagaagttaatgacgggacgaggctcggagatacagcaggatgtcggataggtgccccggcaggattttcgtccgacagtgtagcaagtttggatgcttggctactcacctttgtgatgtggtggcaatgtggtgtcgtgtaaaacaataataatcctcatctcacctttatttcattttattagatgaatccttagataaacaacacccagaagtcggagtgagcaatatagtttcgtctttagcatagacagtccaaaaaaattggataggggaagtagaaaatgttccccaaaaaaggaatcgtgattctgtagatttttttaagcttttgatttaaaaatagagaaatgaagaaaaggcatttaggtgcagttgtttgttgtatcttttctattgcttccatgcatttcttttaccgagaaatatgtattaggctattagcgactgtagtatttacgggcactagttggttatccgtgcgttgtgac

SEQ ID NO: 70738 - DNA, 1378 bp, Zea Mays
ggggctcgggtcgctcactgaagggtctgaaacgcatggacctgtgcccttggactctagcaagtagcaaccacatgaaagatccatcgagccaccatccccgaactccccatcctcttcttttcagccattcagagtcagcggacaagctcatagccaggtaagggtgcatgagatcatcttcactcgtttcctccaatcatctctcccgctctcttttacgatgaggaaggtgcaggaacaaagttgtgcttaaatcacgccatgtggatggccatgtcagggtctaggtgtccccatgtctactttagaccaggataagatcactaaaatatgttagggagccaaatagaccgacacaaacaacaatctcgtaatactttagggtccaggcgtgcaatttactcttgtattaatgtgcttaatatccttcacactgttttgttttgatcggcagagagacacaactggactttcagcagaaaatgctgagctcaagataaggttgcaggccatggagcagcaggcccaactgcgtgacgctctaaatgatgcactgaggcaagaagtggagaggcttaagatagcaacgggcgagatgtcgaagtccaataacgagcatttcaatatgggaatgcagcacgtttcctacagcccttcattcttccagctctcggagcaacacacagtgcagcagcatggaaacattcagctgccgcaccatttccaacagcctccgctgaatgtcccgagccaccagatgctatcccaccccaactccctctcgaacatggtgcagcaagactctcttgggcgtctccaggggctggacattgggaaaggctccatggctgtgaagtcggaggctgaggtcgtggtgaagtcagagggcagctctatatctgcgggtgaaagcaacaccaccttctagctatacaatacgtctgccttccaagaagcctttgtttggtttagagttcttcttttgttcatagtctgacatccttgaactgcttcctccttccctgtagtttttttttattccattcgttatatctagttaccattgatcggttgtgtcgatcgttgttgttgtcgtggtggctgattctatagggacattggtgtgctggtttcgagtttgttatgtgtgtggtatggttggttgtttcgagctagtgactgaaagggcaccgagtgattttttggcagaatttcttttctccacctgttttagttttgttatagaacaaccatgatttctccttctggaaatgtgtacattgtgttgctatgctaatttctagtaataattttgatgatcccaactgtaccctgctgtgcatgtgcgtgaagtgtgttgtttcaggctatcttt

SEQ ID NO: 70739 - DNA, 1289 bp, Zea Mays
ctttcatctgtcctcgccaactgtttgaactttactacattacctaaattatcttaacagattagtaaatttcagtcaactagttttaactttattatgttacctatatattatctttaatcagttgactgtatgatctgtcaaagtcaactttgttttacctgaatcatctaaccagcgtgttgtatttgtaacatatacttcctgatccttcctgatcttgggttttgtgcagaattattgcaaacaggcaatctgcagcacggtcaaaggaaagaaaagctcgatatataacagaattggagcggaaggttcaaactcttcagacagaggctactactctttcagcacagctgacactattccagagagacacaactggactttcagcagaaaatgctgagctcaagataaggttgcaggccatggagcagcaggcccaactgcgtgacgctctaaatgatgcactgaggcaagaagtggagaggcttaagatagcaacgggcgagatgtcgaagtccaataacgagcatttcaatatgggaatgcagcacgtttcctacagcccttcattcttccagctctcggagcaacacacagtgcagcagcatggaaacattcagctgccgcaccatttccaacagcctccgctgaatgtcccgagccaccagatgctatcccaccccaactccctctcgaacatggtgcagcaagactctcttgggcgtctccaggggctggacattgggaaaggctccatggctgtgaagtcggaggctgaggtcgtggtgaagtcagagggcagctctatatctgcgggtgaaagcaacaccaccttctagctatacaatacgtctgccttccaagaagcctttgtttggtttagagttcttcttttgttcatagtctgacatccttgaactgcttcctccttccctgtagtttttttttattccattcgttatatctagttaccattgatcggttgtgtcgatcgttgttgttgtcgtggtggctgattctatagggacattggtgtgctggtttcgagtttgttatgtgtgtggtatggttggttgtttcgagctagtgactgaaagggcaccgagtgattttttggcagaatttcttttctccacctgttttagttttgttatagaacaaccatgatttctccttctggaaatgtgtacattgtgttgctatgctaatttctagtaataattttgatgatcccaactgtaccctgctgtgcatgtgcgtgaagtgtgttgtttcaggctatcttt

SEQ ID NO: 70740 - DNA, 1155 bp, Zea Mays
aagatgtgaattgtttccgtggcattttctctatgctggacacacgtcctggtttttaaaggtgcttctggttgtttagtcttaaataaacagagacggagaattattgcaaacaggcaatctgcagcacggtcaaaggaaagaaaagctcgatatataacagaattggagcggaaggttcaaactcttcagacagaggctactactctttcagcacagctgacactattccagagagacacaactggactttcagcagaaaatgctgagctcaagataaggttgcaggccatggagcagcaggcccaactgcgtgacgctctaaatgatgcactgaggcaagaagtggagaggcttaagatagcaacgggcgagatgtcgaagtccaataacgagcatttcaatatgggaatgcagcacgtttcctacagcccttcattcttccagctctcggagcaacacacagtgcagcagcatggaaacattcagctgccgcaccatttccaacagcctccgctgaatgtcccgagccaccagatgctatcccaccccaactccctctcgaacatggtgcagcaagactctcttgggcgtctccaggggctggacattgggaaaggctccatggctgtgaagtcggaggctgaggtcgtggtgaagtcagagggcagctctatatctgcgggtgaaagcaacaccaccttctagctatacaatacgtctgccttccaagaagcctttgtttggtttagagttcttcttttgttcatagtctgacatccttgaactgcttcctccttccctgtagtttttttttattccattcgttatatctagttaccattgatcggttgtgtcgatcgttgttgttgtcgtggtggctgattctatagggacattggtgtgctggtttcgagtttgttatgtgtgtggtatggttggttgtttcgagctagtgactgaaagggcaccgagtgattttttggcagaatttcttttctccacctgttttagttttgttatagaacaaccatgatttctccttctggaaatgtgtacattgtgttgctatgctaatttctagtaataattttgatgatcccaactgtaccctgctgtgcatgtgcgtgaagtgtgttgtttcaggctatcttt

SEQ ID NO: 70741 - DNA, 1399 bp, Zea Mays
cccaacgcactccactctctttcagaacccaacacgccactgtcgcggtaacagagcagctagccaagagtagtagccgcgtgcccgcgtgcgcttcccgaaccccgagtcccgaccagagagagatacggagaggagcagacctgcccgtcgcaatggcgatgccaccgaagcccggcgacccgccgcagcgctcgccggcacgtagcccaaacctcaatctcccctgcccgctgccgccggtcccgggcggggcatgttcggagaggtgatggaggccaagaaggccatgtcttccgagcagctctccgagctcgccgccatcgatcccaagcgcgccaaaagaattattgcaaacaggcaatctgcagcacggtcaaaggaaagaaaagctcgatatataacagaattggagcggaaggttcaaactcttcagacagaggctactactctttcagcacagctgacactattccagagagacacaactggactttcagcagaaaatgctgagctcaagataaggttgcaggccatggagcagcaggcccaactgcgtgacgctctaaatgatgcactgaggcaagaagtggagaggcttaagatagcaacgggcgagatgtcgaagtccaataacgagcatttcaatatgggaatgcagcacgtttcctacagcccttcattcttccagctctcggagcaacacacagtgcagcagcatggaaacattcagctgccgcaccatttccaacagcctccgctgaatgtcccgagccaccagatgctatcccaccccaactccctctcgaacatggtgcagcaagactctcttgggcgtctccaggggctggacattgggaaaggctccatggctgtgaagtcggaggctgaggtcgtggtgaagtcagagggcagctctatatctgcgggtgaaagcaacaccaccttctagctatacaatacgtctgccttccaagaagcctttgtttggtttagagttcttcttttgttcatagtctgacatccttgaactgcttcctccttccctgtagtttttttttattccattcgttatatctagttaccattgatcggttgtgtcgatcgttgttgttgtcgtggtggctgattctatagggacattggtgtgctggtttcgagtttgttatgtgtgtggtatggttggttgtttcgagctagtgactgaaagggcaccgagtgattttttggcagaatttcttttctccacctgttttagttttgttatagaacaaccatgatttctccttctggaaatgtgtacattgtgttgctatgctaatttctagtaataattttgatgatcccaactgtaccctgctgtgcatgtgcgtgaagtgtgttgtttcaggctatcttt

SEQ ID NO: 70742 - DNA, 1786 bp, Zea Mays
cgatgatgcatggtatttcagcggttcttgttaaggggctgtttgtttgggatcataatctgttcggattatataattcaataaattttgaactaaatattagtttaaaatttgctggattatataatttagacagattataatcacaaacaagcacccctgaaatcatgtttatttcttttcaaaattatataatccggcttatccgacccatgatggcgtcatgctgtgcacattgcggtggacccgagtcgtccaggccgccatgccagagcgcgcagccagccggcaaagccgtcctccctcactcccgtgtttctcttccccgtccctgtccccttcccctcgaagatgcgtggcggaaccaagcaagctgacgctcctcgccgccaagccactacaccgcagatgaagaggcgcggccgctcaaggtggtcttcggctacccggctaagtatttcattgacacatcgccgatcggggacggccgcctaggtgccatgatctggggctgcgtcgaatctgagaggctccagtgtaaccggatgaggctcctaaggaagaaggatgtaccttattacaaggtacttgcagttttttgacacttttttcttgaacacacaggagggtgaatctgcttgtgcaataacaggtgtagttaagaaaggtacttatatgtctgatatttgtgtcaattgtcataaagtccacttgttattgaatgttgatcatatggaaaatacagttccacacatgtttgcatttatttccttgcatatgtcattaaagcttctttatttcttgccttcgttaaaggacttcagttgatggatttagtattgtctctgctgctatagcatcactcatttcttttttgttgccaggattaccttctactaggggtgaagacatgcaaattaagtgtttgcttgaaatgtatgggctaaagaagaaagtgcgatctgatatcagtgcagaatattggctacataaggaatgtgcatatcgagagaggcaactttttgatttttgggggctgatgtggatacgacatcctttgtccatgtatggaataggatacatcctttcaatggatgctgatgatgttcaccgcaaaaagagatttacagagaggatgtcaagactcgaagaggaagaaaaaaatcaggcaaatatcaggaagaggaagttctttgcagaaattctaaatgcttctagggagcaacaggtgcaattaggcactacattcaagcaaataaagcagagaaatgatgaagtttaggtatgtatggagaatgacatacttggtgcaatggcgagagttatttcaatgagtcacagggttcgaagctgcatcttcgcatttgcgaggggaaggcattgtctctatgagcttctcgaagaaactggaaaagctgagcatgctagttagcatgaagggagtgaagtgccaaaagtagagttggatgaaatactcgcagctcgataactcattcgactcggcttgttttaattttatagctagccaagctagtattctagctcggttctctaatgagccaactcgggttacctcataagctagctcacaagccaaacaagccaagccacagcacaaatttgtctaatcgttggtgttgtctcatctctcatagtcttgtcttctcgtatttatgatatgtgatatggacatgtggatgtgccatatgtttaaatatttgcattattgtatggctacatacctatattgcatatttaatatttgattattggttatggttttgtg

SEQ ID NO: 70743 - DNA, 358 bp, Zea Mays
atcggtccctccgctggatttgcagaagaaagtgcgatctgatatcagtgcagaatattggctacataaggaatgtgcatatcgagagaggcaactttttgatttttgggggctgatgtggatacgacatcctttgtccatgtatggaataggatacatcctttcaatggatgctgatgatgttcaccgcaaaaagagatttacagagaggatgtcaagactcgaagaggaagaaaaaaatcaggcaaatatcaggaagaggaagttctttgcagaaattctaaatgcttctagggagcaacaggtgcaattaggcactacattcaagcaaataaagcagagaaatgatgaagtttag

SEQ ID NO: 70744 - DNA, 689 bp, Zea Mays
gccgtcctccctcactcccgtgtttctcttccccgtccctgtccccttcccctcgaagatgcgtggcggaaccaagcaagctgacgctcctcgccgccaagccactacaccgcagatgaagaggcgcggccgctcaaggtggtcttcggctacccggctaagtatttcattgacacatcgccgatcggggacggccgcctaggtgccatgatctggggctgcgtcgaatctgagaggctccagtgtaaccggatgaggctcctaaggaagaaggatgtaccttattacaaggattaccttctactaggggtgaagacatgcaaattaagtgtttgcttgaaatgtatgggctaaagaagaaagtgcgatctgatatcagtgcagaatattggctacataaggaatgtgcatatcgagagaggcaactttttgatttttgggggctgatgtggatacgacatcctttgtccatgtatggaataggatacatcctttcaatggatgctgatgatgttcaccgcaaaaagagatttacagagaggatgtcaagactcgaagaggaagaaaaaaatcaggcaaatatcaggaagaggaagttctttgcagaaattctaaatgcttctagggagcaacaggtgcaattaggcactacattcaagcaaataaagcagagaaatgatgaagtttag

SEQ ID NO: 70745 - DNA, 3314 bp, Zea Mays
cggatttatgcggaaattcggaaaacgtgccgtactccggaaagctgcgttgactctgcctcgtttgctggagtgtctgggtgggtcgtggaattctgaccgagcgatttggtgccagttgttggttcacggccctcgagctgcaatcgacaattccgttggcatatgaacagttcgtgttttgtgatatatttcaccaaaaggaatcaggatggagagactgctcattttgtggcaagcgcctccattgtggatgtgttgcttcaaagaactcttatgatctacttgacagtggaggaattcaatgtgtcacttgcatgaaaaattcagcagctcagtctgcttctggacaagtggttccaaagctctttccatgtccaaacaatctgctgttttttggtaaaagcgacgagttattgtcaagcagaaaatttgaacaaccaccctctcttatgttggattccagaaatgatgatattgctattgtaaataagagtagtcacctgttcatggtaagcggcatagaggctggacagagcagtaacatcttgagacaaaaagagatagagaatggtccaaggcagattaaatgggaacaaccaacccttaatattggggacatgggaagacctttactaactaggtctcaaagtgcattagagtcacctcagtgtactcgaagagatgacaataaggatccaactacagatagcacaacaagtgaatcgtttccagaggcatgtctgagcatgaacctaggtattgcaaacaatggaaacaggatggaggctacttcaacagcggaaagacctatgctatcgccaacgacagccattgctgaaggaagagaacttaccactgcactgtccccctttcagcacgcacaaagggctcggcatttcctgaccagaccaccaagggttggtgagggtgcagcttttgatccaactagagacatgtttccgcatcttcgtgttgctaggccacctgctgaaggaaggggccgcaatcaattacttcctcggtattggccaagaataacagaccaagagctgcaacaaatatctggagattcaaattccacaatcgttccattgttcgagaaggtcctgagtgcgagtgatgcaggccgcatagggcgccttgttcttccaaaagcttgtgccgaggcatattttcccccaatttctcaaccagaaggacgccccttgacaattcaagatgcaagaggaaaagaatggcattttcagtttaggttttggccaaataataacagcagaatgtatgtcttggagggtgttacaccatgcatacaatcattgcaattacaagctggcgatacagtgacctttagtcgtatagatcctggagggaaacttgttatgggctttcggaaggccacaaatactgtcagtctgccagactcacagatttcagctattgcgaatggttcccttctcagtgagacactcttttctactgcaaatgaaagcataggagtagtaagtggttatcctggatttcttcactcaataaagggagctgcagatttccatccaagctctctatatgatcatcatattaactcagctgacggggatgtcagttggaataaggcagataaatttggcagcaggccagatgaggggtctttgcaatttctacaaaaacgaagtcgcaatattggttccaaaagcaggaggttcttaatcgacgctgaagatgccatggaactaaagcttacctgggaagaagctcaagagttgttgcgccctgctcccactgcaaaaccaactgttgtgatgattgaggactatgaatttgaagaatatgatgaaccccctgtctttgcaaagagatcaatttttaccatccgtgcaacaggggaacaagaccagtggattcaatgtgacgagtgctcaaaatggcgccggttgcctcttaatgttattgttgcatccaaatggacatgcaccgacaactcatgggacccaaaatgctgctcctgctctgcgcctgaagagttgaccccaaaagagttgcaaagtgttatgcagcagtatgaagaaatgaggaggcgaaagggcagctatggtctgaagctgaatgtcgctgaaatggatgcatccagctttgacgccttggccacgggtgcagtattcggtgaagtcgggaaccaaggtacggcttcagtcgcgacgaccacaaggcaccccaggcatcgccccggctgcacatgcatcgtgtgcatccagccacccagtggcaagggcccgaagcacaaccctgcgtgcacctgcaacgtgtgcatgacggtgaggcgccggttcaagacactgatgatgaggaagaagcagcggcagtcggagcgagaggaggcggaggcaagcaagaagatcgcgtgggtgaacagagacgagcccgaggggagcagcctgtcgagatccccgcagacgctggacacgacccgagacagcagcgatgtcaccatgttcgacaaggtggccgccgacgtgaacaaggggcacatcgacctcaacttccaccctgcagcccctgccgtccgtggcgctggcgaccagggacagaatggcgcgcagcagccccgggcggtgagcatgatgggcctcctggaagtggcgagccggccccttgataactacatgaagcagaacggcctgacgagcctggcgggggagcaaggaggtggcagctccagcacggccacggtcccgccggctccagtggagagtgaggaccggacgtccgatgagggccgtgtcgcgtcagcagagcgggaagcagacgccatggccatcgacgaggccggcgagaaccagcaggacaagcctgccgactctgccgctgccgctgctacttgacggcgtgcgtctgttgtgaaagtgactgatgggtgttgtcagcgtgctttgatgtgcgtatcttatcggctcctcttggtttttttttcttttctttcaggaatagctggtgagtttttgatgtgaaagttctaaactaaatttctgtagggtttcaaggtgttgctcctggaggctggagttacttacgtgtacgtatgaggctgtgcaaccaacccccaggttgtatgttgtagaagttctgtaaaccacgatgctcttgtgttggttgctgctgtaatctaaaaacgcttagacctttggattcaataactcaccacatacttgatctgtactgtacatctcatctaagacatcttttggaaaacaggaatttcacaggagtcacggacggactcagtgcttaagtttaaatatacatgccttttatat

SEQ ID NO: 70746 - DNA, 3568 bp, Zea Mays
ctttgccctcccccctcctttccacttccttttttttagacaatatatacagaggaaaagaggacgtgatttcgtacgagtacctacctggctacctgctaataaaggcgcggcgatttgcgcatcattcgtcgccgtggattccctagcgaaacgccgaaacccaacaacatactacaagcggatttatgcggaaattcggaaaacgtgccgtactccggaaagctgcgttgactctgcctcgtttgctggagtgtctgggtgggtcgtggaattctgaccgagcgatttggtgccagttgttggttcacggccctcgagctgcaatcgacaattccgttggcatatgaacagttcgtgttttgtgatatatttcaccaaaaggaatcaggatggagagactgctcattttgtggcaagcgcctccattgtggatgtgttgcttcaaagaactcttatgatctacttgacagtggaggaattcaatgtgtcacttgcatgaaaaattcagcagctcagtctgcttctggacaagtggttccaaagctctttccatgtccaaacaatctgctgttttttggtaaaagcgacgagttattgtcaagcagaaaatttgaacaaccaccctctcttatgttggattccagaaatgatgatattgctattgtaaataagagtagtcacctgttcatggtaagcggcatagaggctggacagagcagtaacatcttgagacaaaaagagatagagaatggtccaaggcagattaaatgggaacaaccaacccttaatattggggacatgggaagacctttactaactaggtctcaaagtgcattagagtcacctcagtgtactcgaagagatgacaataaggatccaactacagatagcacaacaagtgaatcgtttccagaggcatgtctgagcatgaacctaggtattgcaaacaatggaaacaggatggaggctacttcaacagcggaaagacctatgctatcgccaacgacagccattgctgaaggaagagaacttaccactgcactgtccccctttcagcacgcacaaagggctcggcatttcctgaccagaccaccaagggttggtgagggtgcagcttttgatccaactagagacatgtttccgcatcttcgtgttgctaggccacctgctgaaggaaggggccgcaatcaattacttcctcggtattggccaagaataacagaccaagagctgcaacaaatatctggagagtatccttgataaggtctccatacatttgaaactgtgaacttcctggtgacattgatctcagacatttagtaacttatacatcaaggctctagaatagctcattaggcttaaacccttataatatgatgcataaatttcttgtgtaacagatatagtttttcttttatcttccttgactatattttgcaagttcaaattccacaatcgttccattgttcgagaaggtcctgagtgcgagtgatgcaggccgcatagggcgccttgttcttccaaaagcttgtgccgaggcatattttcccccaatttctcaaccagaaggacgccccttgacaattcaagatgcaagaggaaaagaatggcattttcagtttaggttttggccaaataataacagcagaatgtatgtcttggagggtgttacaccatgcatacaatcattgcaattacaagctggcgatacagtgacctttagtcgtatagatcctggagggaaacttgttatgggctttcggaaggccacaaatactgactcacagatttcagctattgcgaatggttcccttctcagtgagacactcttttctactgcaaatgaaagcataggagtagtaagtggttatcctggatttcttcactcaataaagggagctgcagatttccatccaagctctctatatgatcatcatattaactcagctgacggggatgtcagttggaataaggcagataaatttggcagcaggccagatgaggggtctttgcaatttctacaaaaacgaagtcgcaatattggttccaaaagcaggaggttcttaatcgacgctgaagatgccatggaactaaagcttacctgggaagaagctcaagagttgttgcgccctgctcccactgcaaaaccaactgttgtgatgattgaggactatgaatttgaagaatatgatgaaccccctgtctttgcaaagagatcaatttttaccatccgtgcaacaggggaacaagaccagtggattcaatgtgacgagtgctcaaaatggcgccggttgcctcttaatgttattgttgcatccaaatggacatgcaccgacaactcatgggacccaaaatgctgctcctgctctgcgcctgaagagttgaccccaaaagagttgcaaagtgttatgcagcagtatgaagaaatgaggaggcgaaagggcagctatggtctgaagctgaatgtcgctgaaatggatgcatccagctttgacgccttggccacgggtgcagtattcggtgaagtcgggaaccaaggtacggcttcagtcgcgacgaccacaaggcaccccaggcatcgccccggctgcacatgcatcgtgtgcatccagccacccagtggcaagggcccgaagcacaaccctgcgtgcacctgcaacgtgtgcatgacggtgaggcgccggttcaagacactgatgatgaggaagaagcagcggcagtcggagcgagaggaggcggaggcaagcaagaagatcgcgtgggtgaacagagacgagcccgaggggagcagcctgtcgagatccccgcagacgctggacacgacccgagacagcagcgatgtcaccatgttcgacaaggtggccgccgacgtgaacaaggggcacatcgacctcaacttccaccctgcagcccctgccgtccgtggcgctggcgaccagggacagaatggcgcgcagcagccccgggcggtgagcatgatgggcctcctggaagtggcgagccggccccttgataactacatgaagcagaacggcctgacgagcctggcgggggagcaaggaggtggcagctccagcacggccacggtcccgccggctccagtggagagtgaggaccggacgtccgatgagggccgtgtcgcgtcagcagagcgggaagcagacgccatggccatcgacgaggccggcgagaaccagcaggacaagcctgccgactctgccgctgccgctgctacttgacggcgtgcgtctgttgtgaaagtgactgatgggtgttgtcagcgtgctttgatgtgttgctcctggaggctggagttacttacgtgtacgtatgaggctgtgcaaccaacccccaggttgtatgttgtagaagttctgtaaaccacgatgctcttgtgttggttgctgctgtaatctaaaaacgcttagacctttggattcaataactcaccacatacttgatctgtactgtacatctcatctaagacatcttttggaaaacaggaatttcacaggagtcacggacggactcagtgcttaagtttaaatatacatgccttttatat

SEQ ID NO: 70747 - DNA, 3448 bp, Zea Mays
gttctgtttgttttactactactatactactagtacaaccacccctgcctcccgtctcgttttccattccttgtcttccccgcaccgcacccgcatccgcatgcaccaatcgccaccagcgaccgccccgcggctgtgcctgtgggtgcgcgcgttcgttgtcccctccacgtccaccggaaagctacgcctcccccaccgcctcctctagcgtctcggcccgtctccctctcactctctctcgctctcgctctctctctccgtgggtgatgcgctcagccgacctcttctgaccggcggagtggctgcgctcgccggtcacccatggctatggcgggcgccggcgcggcggcggcggcggccaagaggtgcatgaacccggcctgcggcgcgctgccggcgtcatctgtggtggtcggggcgggaggggactggaggaagggctggccgctgcgatccggaggcttcgccctgctctgcgacaagtgtggcgcctccattgtggatgtgttgcttcaaagaactcttatgatctacttgacagtggaggaattcaatgtgtcacttgcatgaaaaattcagcagctcagtctgcttctggacaagtggttccaaagctctttccatgtccaaacaatctgctgttttttggtaaaagcgacgagttattgtcaagcagaaaatttgaacaaccaccctctcttatgttggattccagaaatgatgatattgctattgtaaataagagtagtcacctgttcatggtaagcggcatagaggctggacagagcagtaacatcttgagacaaaaagagatagagaatggtccaaggcagattaaatgggaacaaccaacccttaatattggggacatgggaagacctttactaactaggtctcaaagtgcattagagtcacctcagtgtactcgaagagatgacaataaggatccaactacagatagcacaacaagtgaatcgtttccagaggcatgtctgagcatgaacctaggtattgcaaacaatggaaacaggatggaggctacttcaacagcggaaagacctatgctatcgccaacgacagccattgctgaaggaagagaacttaccactgcactgtccccctttcagcacgcacaaagggctcggcatttcctgaccagaccaccaagggttggtgagggtgcagcttttgatccaactagagacatgtttccgcatcttcgtgttgctaggccacctgctgaaggaaggggccgcaatcaattacttcctcggtattggccaagaataacagaccaagagctgcaacaaatatctggagattcaaattccacaatcgttccattgttcgagaaggtcctgagtgcgagtgatgcaggccgcatagggcgccttgttcttccaaaagcttgtgccgaggcatattttcccccaatttctcaaccagaaggacgccccttgacaattcaagatgcaagaggaaaagaatggcattttcagtttaggttttggccaaataataacagcagaatgtatgtcttggagggtgttacaccatgcatacaatcattgcaattacaagctggcgatacagtgacctttagtcgtatagatcctggagggaaacttgttatgggctttcggaaggccacaaatactgactcacagatttcagctattgcgaatggttcccttctcagtgagacactcttttctactgcaaatgaaagcataggagtagtaagtggttatcctggatttcttcactcaataaagggagctgcagatttccatccaagctctctatatgatcatcatattaactcagctgacggggatgtcagttggaataaggcagataaatttggcagcaggccagatgaggggtctttgcaatttctacaaaaacgaagtcgcaatattggttccaaaagcaggaggttcttaatcgacgctgaagatgccatggaactaaagcttacctgggaagaagctcaagagttgttgcgccctgctcccactgcaaaaccaactgttgtgatgattgaggactatgaatttgaagaatatgatgaaccccctgtctttgcaaagagatcaatttttaccatccgtgcaacaggggaacaagaccagtggattcaatgtgacgagtgctcaaaatggcgccggttgcctcttaatgttattgttgcatccaaatggacatgcaccgacaactcatgggacccaaaatgctgctcctgctctgcgcctgaagagttgaccccaaaagagttgcaaagtgttatgcagcagtatgaagaaatgaggaggcgaaagggcagctatggtctgaagctgaatgtcgctgaaatggatgcatccagctttgacgccttggccacgggtgcagtattcggtgaagtcgggaaccaaggtacggcttcagtcgcgacgaccacaaggcaccccaggcatcgccccggctgcacatgcatcgtgtgcatccagccacccagtggcaagggcccgaagcacaaccctgcgtgcacctgcaacgtgtgcatgacggtgaggcgccggttcaagacactgatgatgaggaagaagcagcggcagtcggagcgagaggaggcggaggcaagcaagaagatcgcgtgggtgaacagagacgagcccgaggggagcagcctgtcgagatccccgcagacgctggacacgacccgagacagcagcgatgtcaccatgttcgacaaggtggccgccgacgtgaacaaggggcacatcgacctcaacttccaccctgcagcccctgccgtccgtggcgctggcgaccagggacagaatggcgcgcagcagccccgggcggtgagcatgatgggcctcctggaagtggcgagccggccccttgataactacatgaagcagaacggcctgacgagcctggcgggggagcaaggaggtggcagctccagcacggccacggtcccgccggctccagtggagagtgaggaccggacgtccgatgagggccgtgtcgcgtcagcagagcgggaagcagacgccatggccatcgacgaggccggcgagaaccagcaggacaagcctgccgactctgccgctgccgctgctacttgacggcgtgcgtctgttgtgaaagtgactgatgggtgttgtcagcgtgctttgatgtgttgctcctggaggctggagttacttacgtgtacgtatgaggctgtgcaaccaacccccaggttgtatgttgtagaagttctgtaaaccacgatgctcttgtgttggttgctgctgtaatctaaaaacgcttagacctttggattcaataactcaccacatacttgatctgtactgtacatctcatctaagacatcttttggaaaacaggaatttcacaggagtcacggacggactcagtgcttaagtttaaatatacatgccttttatat

SEQ ID NO: 70748 - DNA, 3508 bp, Zea Mays
gcactactctatctctatgctgcgcgcctgcgacgagaggagaggaggatgggctgttgctgttctgtttgttttactactactatactactagtacaaccacccctgcctcccgtctcgttttccattccttgtcttccccgcaccgcacccgcatccgcatgcaccaatcgccaccagcgaccgccccgcggctgtgcctgtgggtgcgcgcgttcgttgtcccctccacgtccaccggaaagctacgcctcccccaccgcctcctctagcgtctcggcccgtctccctctcactctctctcgctctcgctctctctctccgtgggtgatgcgctcagccgacctcttctgaccggcggagtggctgcgctcgccggtcacccatggctatggcgggcgccggcgcggcggcggcggcggccaagaggtgcatgaacccggcctgcggcgcgctgccggcgtcatctgtggtggtcggggcgggaggggactggaggaagggctggccgctgcgatccggaggcttcgccctgctctgcgacaagtgtgggttggcatatgaacagttcgtgttttgtgatatatttcaccaaaaggaatcaggatggagagactgctcattttgtggcaagcgcctccattgtggatgtgttgcttcaaagaactcttatgatctacttgacagtggaggaattcaatgtgtcacttgcatgaaaaattcagcagctcagtctgcttctggacaagtggttccaaagctctttccatgtccaaacaatctgctgttttttggtaaaagcgacgagttattgtcaagcagaaaatttgaacaaccaccctctcttatgttggattccagaaatgatgatattgctattgtaaataagagtagtcacctgttcatggtaagcggcatagaggctggacagagcagtaacatcttgagacaaaaagagatagagaatggtccaaggcagattaaatgggaacaaccaacccttaatattggggacatgggaagacctttactaactaggtctcaaagtgcattagagtcacctcagtgtactcgaagagatgacaataaggatccaactacagatagcacaacaagtgaatcgtttccagaggcatgtctgagcatgaacctaggtattgcaaacaatggaaacaggatggaggctacttcaacagcggaaagacctatgctatcgccaacgacagccattgctgaaggaagagaacttaccactgcactgtccccctttcagcacgcacaaagggctcggcatttcctgaccagaccaccaagggttggtgagggtgcagcttttgatccaactagagacatgtttccgcatcttcgtgttgctaggccacctgctgaaggaaggggccgcaatcaattacttcctcggtattggccaagaataacagaccaagagctgcaacaaatatctggagattcaaattccacaatcgttccattgttcgagaaggtcctgagtgcgagtgatgcaggccgcatagggcgccttgttcttccaaaagcttgtgccgaggcatattttcccccaatttctcaaccagaaggacgccccttgacaattcaagatgcaagaggaaaagaatggcattttcagtttaggttttggccaaataataacagcagaatgtatgtcttggagggtgttacaccatgcatacaatcattgcaattacaagctggcgatacagtgacctttagtcgtatagatcctggagggaaacttgttatgggctttcggaaggccacaaatactgtcagtctgccagactcacagatttcagctattgcgaatggttcccttctcagtgagacactcttttctactgcaaatgaaagcataggagtattggaataaggcagataaatttggcagcaggccagatgaggggtctttgcaatttctacaaaaacgaagtcgcaatattggttccaaaagcaggaggttcttaatcgacgctgaagatgccatggaactaaagcttacctgggaagaagctcaagagttgttgcgccctgctcccactgcaaaaccaactgttgtgatgattgaggactatgaatttgaagaatatgatgaaccccctgtctttgcaaagagatcaatttttaccatccgtgcaacaggggaacaagaccagtggattcaatgtgacgagtgctcaaaatggcgccggttgcctcttaatgttattgttgcatccaaatggacatgcaccgacaactcatgggacccaaaatgctgctcctgctctgcgcctgaagagttgaccccaaaagagttgcaaagtgttatgcagcagtatgaagaaatgaggaggcgaaagggcagctatggtctgaagctgaatgtcgctgaaatggatgcatccagctttgacgccttggccacgggtgcagtattcggtgaagtcgggaaccaaggtacggcttcagtcgcgacgaccacaaggcaccccaggcatcgccccggctgcacatgcatcgtgtgcatccagccacccagtggcaagggcccgaagcacaaccctgcgtgcacctgcaacgtgtgcatgacggtgaggcgccggttcaagacactgatgatgaggaagaagcagcggcagtcggagcgagaggaggcggaggcaagcaagaagatcgcgtgggtgaacagagacgagcccgaggggagcagcctgtcgagatccccgcagacgctggacacgacccgagacagcagcgatgtcaccatgttcgacaaggtggccgccgacgtgaacaaggggcacatcgacctcaacttccaccctgcagcccctgccgtccgtggcgctggcgaccagggacagaatggcgcgcagcagccccgggcggtgagcatgatgggcctcctggaagtggcgagccggccccttgataactacatgaagcagaacggcctgacgagcctggcgggggagcaaggaggtggcagctccagcacggccacggtcccgccggctccagtggagagtgaggaccggacgtccgatgagggccgtgtcgcgtcagcagagcgggaagcagacgccatggccatcgacgaggccggcgagaaccagcaggacaagcctgccgactctgccgctgccgctgctacttgacggcgtgcgtctgttgtgaaagtgactgatgggtgttgtcagcgtgctttgatggtttcaaggtgttgctcctggaggctggagttacttacgtgtacgtatgaggctgtgcaaccaacccccaggttgtatgttgtagaagttctgtaaaccacgatgctcttgtgttggttgctgctgtaatctaaaaacgcttagacctttggattcaataactcaccacatacttgatctgtactgtacatctcatctaagacatcttttggaaaacaggaatttcacaggagtcacggacggactcagtgcttaagtttaaatatacatgccttttatat

SEQ ID NO: 70749 - DNA, 3498 bp, Zea Mays
gcactactctatctctatgctgcgcgcctgcgacgagaggagaggaggatgggctgttgctgttctgtttgttttactactactatactactagtacaaccacccctgcctcccgtctcgttttccattccttgtcttccccgcaccgcacccgcatccgcatgcaccaatcgccaccagcgaccgccccgcggctgtgcctgtgggtgcgcgcgttcgttgtcccctccacgtccaccggaaagctacgcctcccccaccgcctcctctagcgtctcggcccgtctccctctcactctctctcgctctcgctctctctctccgtgggtgatgcgctcagccgacctcttctgaccggcggagtggctgcgctcgccggtcacccatggctatggcgggcgccggcgcggcggcggcggcggccaagaggtgcatgaacccggcctgcggcgcgctgccggcgtcatctgtggtggtcggggcgggaggggactggaggaagggctggccgctgcgatccggaggcttcgccctgctctgcgacaagtgtgggttggcatatgaacagttcgtgttttgtgatatatttcaccaaaaggaatcaggatggagagactgctcattttgtggcaagcgcctccattgtggatgtgttgcttcaaagaactcttatgatctacttgacagtggaggaattcaatgtgtcacttgcatgaaaaattcagcagctcagtctgcttctggacaagtggttccaaagctctttccatgtccaaacaatctgctgttttttggtaaaagcgacgagttattgtcaagcagaaaatttgaacaaccaccctctcttatgttggattccagaaatgatgatattgctattgtaaataagagtagtcacctgttcatggtaagcggcatagaggctggacagagcagtaacatcttgagacaaaaagagatagagaatggtccaaggcagattaaatgggaacaaccaacccttaatattggggacatgggaagacctttactaactaggtctcaaagtgcattagagtcacctcagtgtactcgaagagatgacaataaggatccaactacagatagcacaacaagtgaatcgtttccagaggcatgtctgagcatgaacctaggtattgcaaacaatggaaacaggatggaggctacttcaacagcggaaagacctatgctatcgccaacgacagccattgctgaaggaagagaacttaccactgcactgtccccctttcagcacgcacaaagggctcggcatttcctgaccagaccaccaagggttggtgagggtgcagcttttgatccaactagagacatgtttccgcatcttcgtgttgctaggccacctgctgaaggaaggggccgcaatcaattacttcctcggtattggccaagaataacagaccaagagctgcaacaaatatctggagattcaaattccacaatcgttccattgttcgagaaggtcctgagtgcgagtgatgcaggccgcatagggcgccttgttcttccaaaagcttgtgccgaggcatattttcccccaatttctcaaccagaaggacgccccttgacaattcaagatgcaagaggaaaagaatggcattttcagtttaggttttggccaaataataacagcagaatgtatgtcttggagggtgttacaccatgcatacaatcattgcaattacaagctggcgatacagtgacctttagtcgtatagatcctggagggaaacttgttatgggctttcggaaggccacaaatactgtcagtctgccagactcacagatttcagctattgcgaatggttcccttctcagtgagacactcttttctactgcaaatgaaagcataggagtagcagataaatttggcagcaggccagatgaggggtctttgcaatttctacaaaaacgaagtcgcaatattggttccaaaagcaggaggttcttaatcgacgctgaagatgccatggaactaaagcttacctgggaagaagctcaagagttgttgcgccctgctcccactgcaaaaccaactgttgtgatgattgaggactatgaatttgaagaatatgatgaaccccctgtctttgcaaagagatcaatttttaccatccgtgcaacaggggaacaagaccagtggattcaatgtgacgagtgctcaaaatggcgccggttgcctcttaatgttattgttgcatccaaatggacatgcaccgacaactcatgggacccaaaatgctgctcctgctctgcgcctgaagagttgaccccaaaagagttgcaaagtgttatgcagcagtatgaagaaatgaggaggcgaaagggcagctatggtctgaagctgaatgtcgctgaaatggatgcatccagctttgacgccttggccacgggtgcagtattcggtgaagtcgggaaccaaggtacggcttcagtcgcgacgaccacaaggcaccccaggcatcgccccggctgcacatgcatcgtgtgcatccagccacccagtggcaagggcccgaagcacaaccctgcgtgcacctgcaacgtgtgcatgacggtgaggcgccggttcaagacactgatgatgaggaagaagcagcggcagtcggagcgagaggaggcggaggcaagcaagaagatcgcgtgggtgaacagagacgagcccgaggggagcagcctgtcgagatccccgcagacgctggacacgacccgagacagcagcgatgtcaccatgttcgacaaggtggccgccgacgtgaacaaggggcacatcgacctcaacttccaccctgcagcccctgccgtccgtggcgctggcgaccagggacagaatggcgcgcagcagccccgggcggtgagcatgatgggcctcctggaagtggcgagccggccccttgataactacatgaagcagaacggcctgacgagcctggcgggggagcaaggaggtggcagctccagcacggccacggtcccgccggctccagtggagagtgaggaccggacgtccgatgagggccgtgtcgcgtcagcagagcgggaagcagacgccatggccatcgacgaggccggcgagaaccagcaggacaagcctgccgactctgccgctgccgctgctacttgacggcgtgcgtctgttgtgaaagtgactgatgggtgttgtcagcgtgctttgatggtttcaaggtgttgctcctggaggctggagttacttacgtgtacgtatgaggctgtgcaaccaacccccaggttgtatgttgtagaagttctgtaaaccacgatgctcttgtgttggttgctgctgtaatctaaaaacgcttagacctttggattcaataactcaccacatacttgatctgtactgtacatctcatctaagacatcttttggaaaacaggaatttcacaggagtcacggacggactcagtgcttaagtttaaatatacatgccttttatat

SEQ ID NO: 70750 - DNA, 3525 bp, Zea Mays
gcactactctatctctatgctgcgcgcctgcgacgagaggagaggaggatgggctgttgctgttctgtttgttttactactactatactactagtacaaccacccctgcctcccgtctcgttttccattccttgtcttccccgcaccgcacccgcatccgcatgcaccaatcgccaccagcgaccgccccgcggctgtgcctgtgggtgcgcgcgttcgttgtcccctccacgtccaccggaaagctacgcctcccccaccgcctcctctagcgtctcggcccgtctccctctcactctctctcgctctcgctctctctctccgtgggtgatgcgctcagccgacctcttctgaccggcggagtggctgcgctcgccggtcacccatggctatggcgggcgccggcgcggcggcggcggcggccaagaggtgcatgaacccggcctgcggcgcgctgccggcgtcatctgtggtggtcggggcgggaggggactggaggaagggctggccgctgcgatccggaggcttcgccctgctctgcgacaagtgtgggcttctggacaagtggttccaaagctctttccatgtccaaacaatctgctgttttttggtaaaagcgacgagttattgtcaagcagaaaatttgaacaaccaccctctcttatgttggattccagaaatgatgatattgctattgtaaataagagtagtcacctgttcatggtaagcggcatagaggctggacagagcagtaacatcttgagacaaaaagagatagagaatggtccaaggcagattaaatgggaacaaccaacccttaatattggggacatgggaagacctttactaactaggtctcaaagtgcattagagtcacctcagtgtactcgaagagatgacaataaggatccaactacagatagcacaacaagtgaatcgtttccagaggcatgtctgagcatgaacctaggtattgcaaacaatggaaacaggatggaggctacttcaacagcggaaagacctatgctatcgccaacgacagccattgctgaaggaagagaacttaccactgcactgtccccctttcagcacgcacaaagggctcggcatttcctgaccagaccaccaagggttggtgagggtgcagcttttgatccaactagagacatgtttccgcatcttcgtgttgctaggccacctgctgaaggaaggggccgcaatcaattacttcctcggtattggccaagaataacagaccaagagctgcaacaaatatctggagattcaaattccacaatcgttccattgttcgagaaggtcctgagtgcgagtgatgcaggccgcatagggcgccttgttcttccaaaagcttgtgccgaggcatattttcccccaatttctcaaccagaaggacgccccttgacaattcaagatgcaagaggaaaagaatggcattttcagtttaggttttggccaaataataacagcagaatgtatgtcttggagggtgttacaccatgcatacaatcattgcaattacaagctggcgatacagtgacctttagtcgtatagatcctggagggaaacttgttatgggctttcggaaggccacaaatactgtcagtctgccagactcacagatttcagctattgcgaatggttcccttctcagtgagacactcttttctactgcaaatgaaagcataggagtagtaagtggttatcctggatttcttcactcaataaagggagctgcagatttccatccaagctctctatatgatcatcatattaactcagctgacggggatgtcagttggaataaggcagataaatttggcagcaggccagatgaggggtctttgcaatttctacaaaaacgaagtcgcaatattggttccaaaagcaggaggttcttaatcgacgctgaagatgccatggaactaaagcttacctgggaagaagctcaagagttgttgcgccctgctcccactgcaaaaccaactgttgtgatgattgaggactatgaatttgaagaatatgatgaaccccctgtctttgcaaagagatcaatttttaccatccgtgcaacaggggaacaagaccagtggattcaatgtgacgagtgctcaaaatggcgccggttgcctcttaatgttattgttgcatccaaatggacatgcaccgacaactcatgggacccaaaatgctgctcctgctctgcgcctgaagagttgaccccaaaagagttgcaaagtgttatgcagcagtatgaagaaatgaggaggcgaaagggcagctatggtctgaagctgaatgtcgctgaaatggatgcatccagctttgacgccttggccacgggtgcagtattcggtgaagtcgggaaccaaggtacggcttcagtcgcgacgaccacaaggcaccccaggcatcgccccggctgcacatgcatcgtgtgcatccagccacccagtggcaagggcccgaagcacaaccctgcgtgcacctgcaacgtgtgcatgacggtgaggcgccggttcaagacactgatgatgaggaagaagcagcggcagtcggagcgagaggaggcggaggcaagcaagaagatcgcgtgggtgaacagagacgagcccgaggggagcagcctgtcgagatccccgcagacgctggacacgacccgagacagcagcgatgtcaccatgttcgacaaggtggccgccgacgtgaacaaggggcacatcgacctcaacttccaccctgcagcccctgccgtccgtggcgctggcgaccagggacagaatggcgcgcagcagccccgggcggtgagcatgatgggcctcctggaagtggcgagccggccccttgataactacatgaagcagaacggcctgacgagcctggcgggggagcaaggaggtggcagctccagcacggccacggtcccgccggctccagtggagagtgaggaccggacgtccgatgagggccgtgtcgcgtcagcagagcgggaagcagacgccatggccatcgacgaggccggcgagaaccagcaggacaagcctgccgactctgccgctgccgctgctacttgacggcgtgcgtctgttgtgaaagtgactgatgggtgttgtcagcgtgctttgatgtgcgtatcttatcggctcctcttggtttttttttcttttctttcaggaatagctggtgagtttttgatgtgaaagttctaaactaaatttctgtagggtttcaaggtgttgctcctggaggctggagttacttacgtgtacgtatgaggctgtgcaaccaacccccaggttgtatgttgtagaagttctgtaaaccacgatgctcttgtgttggttgctgctgtaatctaaaaacgcttagacctttggattcaataactcaccacatacttgatctgtactgtacatctcatctaagacatcttttggaaaacaggaatttcacaggagtcacggacggactcagtgcttaagtttaaatatacatgccttttatat

SEQ ID NO: 70751 - DNA, 3600 bp, Zea Mays
gcactactctatctctatgctgcgcgcctgcgacgagaggagaggaggatgggctgttgctgttctgtttgttttactactactatactactagtacaaccacccctgcctcccgtctcgttttccattccttgtcttccccgcaccgcacccgcatccgcatgcaccaatcgccaccagcgaccgccccgcggctgtgcctgtgggtgcgcgcgttcgttgtcccctccacgtccaccggaaagctacgcctcccccaccgcctcctctagcgtctcggcccgtctccctctcactctctctcgctctcgctctctctctccgtgggtgatgcgctcagccgacctcttctgaccggcggagtggctgcgctcgccggtcacccatggctatggcgggcgccggcgcggcggcggcggcggccaagaggtgcatgaacccggcctgcggcgcgctgccggcgtcatctgtggtggtcggggcgggaggggactggaggaagggctggccgctgcgatccggaggcttcgccctgctctgcgacaagtgtgggttggcatatgaacagttcgtgttttgtgatatatttcaccaaaaggaatcaggatggagagactgctcattttgtggcaagcgcctccattgtggatgtgttgcttcaaagaactcttatgatctacttgacagtggaggaattcaatgtgtcacttgcatgaaaaattcagcagctcagtctgcttctggacaagtggttccaaagctctttccatgtccaaacaatctgctgttttttggtaaaagcgacgagttattgtcaagcagaaaatttgaacaaccaccctctcttatgttggattccagaaatgatgatattgctattgtaaataagagtagtcacctgttcatggtaagcggcatagaggctggacagagcagtaacatcttgagacaaaaagagatagagaatggtccaaggcagattaaatgggaacaaccaacccttaatattggggacatgggaagacctttactaactaggtctcaaagtgcattagagtcacctcagtgtactcgaagagatgacaataaggatccaactacagatagcacaacaagtgaatcgtttccagaggcatgtctgagcatgaacctaggtattgcaaacaatggaaacaggatggaggctacttcaacagcggaaagacctatgctatcgccaacgacagccattgctgaaggaagagaacttaccactgcactgtccccctttcagcacgcacaaagggctcggcatttcctgaccagaccaccaagggttggtgagggtgcagcttttgatccaactagagacatgtttccgcatcttcgtgttgctaggccacctgctgaaggaaggggccgcaatcaattacttcctcggtattggccaagaataacagaccaagagctgcaacaaatatctggagattcaaattccacaatcgttccattgttcgagaaggtcctgagtgcgagtgatgcaggccgcatagggcgccttgttcttccaaaagcttgtgccgaggcatattttcccccaatttctcaaccagaaggacgccccttgacaattcaagatgcaagaggaaaagaatggcattttcagtttaggttttggccaaataataacagcagaatgtatgtcttggagggtgttacaccatgcatacaatcattgcaattacaagctggcgatacagtgacctttagtcgtatagatcctggagggaaacttgttatgggctttcggaaggccacaaatactgactcacagatttcagctattgcgaatggttcccttctcagtgagacactcttttctactgcaaatgaaagcataggagtagtaagtggttatcctggatttcttcactcaataaagggagctgcagatttccatccaagctctctatatgatcatcatattaactcagctgacggggatgtcagttggaataaggcagataaatttggcagcaggccagatgaggggtctttgcaatttctacaaaaacgaagtcgcaatattggttccaaaagcaggaggttcttaatcgacgctgaagatgccatggaactaaagcttacctgggaagaagctcaagagttgttgcgccctgctcccactgcaaaaccaactgttgtgatgattgaggactatgaatttgaagaatatgatgaaccccctgtctttgcaaagagatcaatttttaccatccgtgcaacaggggaacaagaccagtggattcaatgtgacgagtgctcaaaatggcgccggttgcctcttaatgttattgttgcatccaaatggacatgcaccgacaactcatgggacccaaaatgctgctcctgctctgcgcctgaagagttgaccccaaaagagttgcaaagtgttatgcagcagtatgaagaaatgaggaggcgaaagggcagctatggtctgaagctgaatgtcgctgaaatggatgcatccagctttgacgccttggccacgggtgcagtattcggtgaagtcgggaaccaaggtacggcttcagtcgcgacgaccacaaggcaccccaggcatcgccccggctgcacatgcatcgtgtgcatccagccacccagtggcaagggcccgaagcacaaccctgcgtgcacctgcaacgtgtgcatgacggtgaggcgccggttcaagacactgatgatgaggaagaagcagcggcagtcggagcgagaggaggcggaggcaagcaagaagatcgcgtgggtgaacagagacgagcccgaggggagcagcctgtcgagatccccgcagacgctggacacgacccgagacagcagcgatgtcaccatgttcgacaaggtggccgccgacgtgaacaaggggcacatcgacctcaacttccaccctgcagcccctgccgtccgtggcgctggcgaccagggacagaatggcgcgcagcagccccgggcggtgagcatgatgggcctcctggaagtggcgagccggccccttgataactacatgaagcagaacggcctgacgagcctggcgggggagcaaggaggtggcagctccagcacggccacggtcccgccggctccagtggagagtgaggaccggacgtccgatgagggccgtgtcgcgtcagcagagcgggaagcagacgccatggccatcgacgaggccggcgagaaccagcaggacaagcctgccgactctgccgctgccgctgctacttgacggcgtgcgtctgttgtgaaagtgactgatgggtgttgtcagcgtgctttgatggtttcaaggtgttgctcctggaggctggagttacttacgtgtacgtatgaggctgtgcaaccaacccccaggttgtatgttgtagaagttctgtaaaccacgatgctcttgtgttggttgctgctgtaatctaaaaacgcttagacctttggattcaataactcaccacatacttgatctgtactgtacatctcatctaagacatcttttggaaaacaggaatttcacaggagtcacggacggactcagtgcttaagtttaaatatacatgccttttatat

SEQ ID NO: 70752 - DNA, 3205 bp, Zea Mays
gcagcaccccgaaagtgcccatcactttgcttgctttcctgtccctttttttcccagaagaaatatataaaaaatttcgtccacctgcaactctcctgtcctgcaagagagttggcatatgaacagttcgtgttttgtgatatatttcaccaaaaggaatcaggatggagagactgctcattttgtggcaagcgcctccattgtggatgtgttgcttcaaagaactcttatgatctacttgacagtggaggaattcaatgtgtcacttgcatgaaaaattcagcagctcagtctgcttctggacaagtggttccaaagctctttccatgtccaaacaatctgctgttttttggtaaaagcgacgagttattgtcaagcagaaaatttgaacaaccaccctctcttatgttggattccagaaatgatgatattgctattgtaaataagagtagtcacctgttcatggtaagcggcatagaggctggacagagcagtaacatcttgagacaaaaagagatagagaatggtccaaggcagattaaatgggaacaaccaacccttaatattggggacatgggaagacctttactaactaggtctcaaagtgcattagagtcacctcagtgtactcgaagagatgacaataaggatccaactacagatagcacaacaagtgaatcgtttccagaggcatgtctgagcatgaacctaggtattgcaaacaatggaaacaggatggaggctacttcaacagcggaaagacctatgctatcgccaacgacagccattgctgaaggaagagaacttaccactgcactgtccccctttcagcacgcacaaagggctcggcatttcctgaccagaccaccaagggttggtgagggtgcagcttttgatccaactagagacatgtttccgcatcttcgtgttgctaggccacctgctgaaggaaggggccgcaatcaattacttcctcggtattggccaagaataacagaccaagagctgcaacaaatatctggagattcaaattccacaatcgttccattgttcgagaaggtcctgagtgcgagtgatgcaggccgcatagggcgccttgttcttccaaaagcttgtgccgaggcatattttcccccaatttctcaaccagaaggacgccccttgacaattcaagatgcaagaggaaaagaatggcattttcagtttaggttttggccaaataataacagcagaatgtatgtcttggagggtgttacaccatgcatacaatcattgcaattacaagctggcgatacagtgacctttagtcgtatagatcctggagggaaacttgttatgggctttcggaaggccacaaatactgactcacagatttcagctattgcgaatggttcccttctcagtgagacactcttttctactgcaaatgaaagcataggagtagtaagtggttatcctggatttcttcactcaataaagggagctgcagatttccatccaagctctctatatgatcatcatattaactcagctgacggggatgtcagttggaataaggcagataaatttggcagcaggccagatgaggggtctttgcaatttctacaaaaacgaagtcgcaatattggttccaaaagcaggaggttcttaatcgacgctgaagatgccatggaactaaagcttacctgggaagaagctcaagagttgttgcgccctgctcccactgcaaaaccaactgttgtgatgattgaggactatgaatttgaagaatatgataagtacaagtacttgaatgatcttcaacctgatctaaccatactacatacatgcaggaaccccctgtctttgcaaagagatcaatttttaccatccgtgcaacaggggaacaagaccagtggattcaatgtgacgagtgctcaaaatggcgccggttgcctcttaatgttattgttgcatccaaatggacatgcaccgacaactcatgggacccaaaatgctgctcctgctctgcgcctgaagagttgaccccaaaagagttgcaaagtgttatgcagcagtatgaagaaatgaggaggcgaaagggcagctatggtctgaagctgaatgtcgctgaaatggatgcatccagctttgacgccttggccacgggtgcagtattcggtgaagtcgggaaccaaggtacggcttcagtcgcgacgaccacaaggcaccccaggcatcgccccggctgcacatgcatcgtgtgcatccagccacccagtggcaagggcccgaagcacaaccctgcgtgcacctgcaacgtgtgcatgacggtgaggcgccggttcaagacactgatgatgaggaagaagcagcggcagtcggagcgagaggaggcggaggcaagcaagaagatcgcgtgggtgaacagagacgagcccgaggggagcagcctgtcgagatccccgcagacgctggacacgacccgagacagcagcgatgtcaccatgttcgacaaggtggccgccgacgtgaacaaggggcacatcgacctcaacttccaccctgcagcccctgccgtccgtggcgctggcgaccagggacagaatggcgcgcagcagccccgggcggtgagcatgatgggcctcctggaagtggcgagccggccccttgataactacatgaagcagaacggcctgacgagcctggcgggggagcaaggaggtggcagctccagcacggccacggtcccgccggctccagtggagagtgaggaccggacgtccgatgagggccgtgtcgcgtcagcagagcgggaagcagacgccatggccatcgacgaggccggcgagaaccagcaggacaagcctgccgactctgccgctgccgctgctacttgacggcgtgcgtctgttgtgaaagtgactgatgggtgttgtcagcgtgctttgatgtgttgctcctggaggctggagttacttacgtgtacgtatgaggctgtgcaaccaacccccaggttgtatgttgtagaagttctgtaaaccacgatgctcttgtgttggttgctgctgtaatctaaaaacgcttagacctttggattcaataactcaccacatacttgatctgtactgtacatctcatctaagacatcttttggaaaacaggaatttcacaggagtcacggacggactcagtgcttaagtttaaatatacatgccttttatat

SEQ ID NO: 70753 - DNA, 2256 bp, Zea Mays
gcactactctatctctatgctgcgcgcctgcgacgagaggagaggaggatgggctgttgctgttctgtttgttttactactactatactactagtacaaccacccctgcctcccgtctcgttttccattccttgtcttccccgcaccgcacccgcatccgcatgcaccaatcgccaccagcgaccgccccgcggctgtgcctgtgggtgcgcgcgttcgttgtcccctccacgtccaccggaaagctacgcctcccccaccgcctcctctagcgtctcggcccgtctccctctcactctctctcgctctcgctctctctctccgtgggtgatgcgctcagccgacctcttctgaccggcggagtggctgcgctcgccggtcacccatggctatggcgggcgccggcgcggcggcggcggcggccaagaggtgcatgaacccggcctgcggcgcgctgccggcgtcatctgtggtggtcggggcgggaggggactggaggaagggctggccgctgcgatccggaggcttcgccctgctctgcgacaagtgtgggttggcatatgaacagttcgtgttttgtgatatatttcaccaaaaggaatcaggatggagagactgctcattttgtggcaagcgcctccattgtggatgtgttgcttcaaagaactcttatgatctacttgacagtggaggaattcaatgtgtcacttgcatgaaaaattcagcagctcagtctgcttctggacaagtggttccaaagctctttccatgtccaaacaatctgctgttttttggtaaaagcgacgagttattgtcaagcagaaaatttgaacaaccaccctctcttatgttggattccagaaatgatgatattgctattgtaaataagagtagtcacctgttcatggtaagcggcatagaggctggacagagcagtaacatcttgagacaaaaagagatagagaatggtccaaggcagattaaatgggaacaaccaacccttaatattggggacatgggaagacctttactaactaggtctcaaagtgcattagagtcacctcagtgtactcgaagagatgacaataaggatccaactacagatagcacaacaagtgaatcgtttccagaggcatgtctgagcatgaacctaggtattgcaaacaatggaaacaggatggaggctacttcaacagcggaaagacctatgctatcgccaacgacagccattgctgaaggaagagaacttaccactgcactgtccccctttcagcacgcacaaagggctcggcatttcctgaccagaccaccaagggttggtgagggtgcagcttttgatccaactagagacatgtttccgcatcttcgtgttgctaggccacctgctgaaggaaggggccgcaatcaattacttcctcggtattggccaagaataacagaccaagagctgcaacaaatatctggagattcaaattccacaatcgttccattgttcgagaaggtcctgagtgcgagtgatgcaggccgcatagggcgccttgttcttccaaaagcttgtgccgaggcatattttcccccaatttctcaaccagaaggacgccccttgacaattcaagatgcaagaggaaaagaatggcattttcagtttaggttttggccaaataataacagcagaatgtatgtcttggagggtgttacaccatgcatacaatcattgcaattacaagctggcgatacagtgacctttagtcgtatagatcctggagggaaacttgttatgggctttcggaaggccacaaatactgactcacagatttcagctattgcgaatggttcccttctcagtgagacactcttttctactgcaaatgaaagcataggagtagtaagtggttatcctggatttcttcactcaataaagggagctgcagatttccatccaagctctctatatgatcatcatattaactcagctgacggggatgtcagttggaataaggcagataaatttggcagcaggccagatgaggggtctttgcaatttctacaaaaacgaagtcgcaatattggttccaaaagcaggaggttcttaatcgacgctgaagatgccatggaactaaagcttacctgggaagaagctcaagagttgttgcgccctgctcccactgcaaaaccaactgttgtgatgattgaggactatgaatttgaagaatatgataagtacaagtacttgaatgatcttcaacctgatctaac

SEQ ID NO: 70754 - DNA, 1464 bp, Zea Mays
ctactgttgactggttgtctttacatgacagaacaaactgcagcacaattcggaaagcgtaaacaatggattatgtgccccacatgccgccagcgaacagatattgagaacattgcttttgtagttgagaaaccttgggacaaacatgaaaagagcattgaagatttggctgaaagcactatttctgtccaagtttgaagctgtcacaagaagaatcttgagaatcacttcaactgatggaacagctaaagttcttgttttctcaagttggaatgatgtactggacgtactagagcactcccttgctgctaacaacatttcatatgttcggatgaaaggaggaagaaaatcacaggcagcactctcccaattcaagggtcaggagagcaatataaatgtagataaagtgaacagggcagcctgcaaaatgcagcctgttcaagtacttctgatgcttatacagcatggagcaaacggtcttaatctactagaggcacagcatgttattctagtggagccattactaaatcctgctgctgaggcacaagctatcagcaggatccatagagttggacaagacaaaagcacatttgttcaccgttttatagtgaagaaaacaatagaagagagcatctacaaattgaacaggagcagagctgtctgctctactataaaccgtaaatccaaaaacttcaaagatgagcctgttttgacgctgaaggatgtggagtcgctattcccgatggcaggacctgatgaacccctagaacaggcagatcaaaattacggcgatagcttgaggagtttgcctccatctgttgccgctgggttagctgctgaaagaaggcgactaatggagcaataagttaatggagtttgcctccatctgttgccgctgggttagctgctgaaagaaggcgactaatcaagggacctccatccatcgttgtggcagttgtgctaattttacttgatcagaatttctcttcgcagcacagtaacgacagtaggagaatgatgctccttagttatgaagcacccccatcatgagaatcaggctatttacgttgtaactttaggattttttttttatgtacctgtaggccttttagactcttgtacataagcttctagttttagttcgtttatacggcccatcctgtagttttgatgtagcagctctcagctctgccactgctacaccaacttatggcatgtataagtgtactaatacatggtcatcagcatgatacattctttagatgcttggtcaattttttagatgcttggtggtggcagagccagtagtcattatggaagaaaattgtcggttgtcctatgctgtctgcagatgtgccggatggtcagtcaggaagatgcagcaaggctttctgatagcttctgcatccgggcccctgctgtgccaggctcgacggcgggcgtcggcgcacgacatccgagtgc

SEQ ID NO: 70755 - DNA, 1533 bp, Zea Mays
gttcaaagctacaccaactgaagaaaaacaatactcctagataagatagatactactgttgactggttgtctttacatgacagaacaaactgcagcacaattcggaaagcgtaaacaatggattatgtgccccacatgccgccagcgaacagatattgagaacattgcttttgtagttgagaaaccttgggacaaacatgaaaagagcattgaagatttggctgaaagcactatttctgtccaaggttcatatggaacaaagtttgaagctgtcacaagaagaatcttgagaatcacttcaactgatggaacagctaaagttcttgttttctcaagttggaatgatgtactggacgtactagagcactcccttgctgctaacaacatttcatatgttcggatgaaaggaggaagaaaatcacaggcagcactctcccaattcaagggtcaggagagcaatataaatgtagataaagtgaacagggcagcctgcaaaatgcagcctgttcaagtacttctgatgcttatacagcatggagcaaacggtcttaatctactagaggcacagcatgttattctagtggagccattactaaatcctgctgctgaggcacaagctatcagcaggatccatagagttggacaagacaaaagcacatttgttcaccgttttatagtgaagaaaacaatagaagagagcatctacaaattgaacaggagcagagctgtctgctctactataaaccgtaaatccaaaaacttcaaagatgagcctgttttgacgctgaaggatgtggagtcgctattcccgatggcaggacctgatgaacccctagaacaggcagatcaaaattacggcgatagcttgaggagtttgcctccatctgttgccgctgggttagctgctgaaagaaggcgactaatggagcaataagttaatggagtttgcctccatctgttgccgctgggttagctgctgaaagaaggcgactaatcaagggacctccatccatcgttgtggcagttgtgctaattttacttgatcagaatttctcttcgcagcacagtaacgacagtaggagaatgatgctccttagttatgaagcacccccatcatgagaatcaggctatttacgttgtaactttaggattttttttttatgtacctgtaggccttttagactcttgtacataagcttctagttttagttcgtttatacggcccatcctgtagttttgatgtagcagctctcagctctgccactgctacaccaacttatggcatgtataagtgtactaatacatggtcatcagcatgatacattctttagatgcttggtcaattttttagatgcttggtggtggcagagccagtagtcattatggaagaaaattgtcggttgtcctatgctgtctgcagatgtgccggatggtcagtcaggaagatgcagcaaggctttctgatagcttctgcatccgggcccctgctgtgccaggctcgacggcgggcgtcggcgcacgacatccgagtgc

SEQ ID NO: 70756 - DNA, 3292 bp, Zea Mays
atggacttgtttgcaatttcaccgcggttctattacacgcaaagacctcctggccgaccaatcgtggatgaacgacccagattgaataaccgaaccaattcaaatgctttgctaaatgtttacctctccaatgacgacattgccaagctcctagtcccactgctgaaacttcggcaggcatgttgccacccacaagtggggagttctggtctctgctccctgcagcataaccctttgtcaatggatgaaattttacaggttcttattggtaaagcaaaaattgaaggagaggaagagctcaggaaaattgtagttgccctgaatggtcttgctggattagctgttattgaacaaaggaaccaagaagccatttctttatacaaagaagcactagcattggctcatgaaaatattaatgatttccgtgttgaccctctgttgaatcttcatatcaactacaatcttgcagaactgcttagaattagttctgagtatttacaagaatgcccattaaaaaatccggcttttgaagttgcaatcagccgaaaaagaaaggaaatagatactgttgagacaaatgtacttagtgtaaaacgaaataaaatatgtgaaaacagtgttttgagtttgacagctaatgggctagaaatatctgaagataaaaacactattggacaaacatgcatgactagagatgtggatgtggagaatgtcactgggtgccactcatcatttgaatgttttgctgatgactgcttgaggaagacttgcaatacaatcacagaaaaatacctgtcaacttttacttcaaggctggtagtagcgcagaaggattttaatgcatcattcacagaggtcttgaatatcactaaagagctacagagtgagtatatgaattggtggctgtatgctttggactgcattgaagagaacaacatttctgctgacgatctgatcaagaagattgataattcttctagtaagagcaccactggtttgggttcatggggaatatcttccaggtctgcagcaaacttgttttaatattctccatgggttaaaagtattgctggcttaaaatatgcaattcaagctgatattgattctctacaaagttcgaggcaacatcttatggatagacttctggaagttgacaaaacaatggctaacccaagggatgaggacattgagggccagcgatattgtccaaactgctatgatggcactggttctctatgtatccagtgtgagctagatgaactctttcagaggtatgaatcacgcctgtttcttgttaagaaatcgaacaatggttctgtcattgattcagtagaagaagcacatgatctactgaggcgaaaatatgagctcaatcacttcttccgtaatagaaaatccaaggagggacctgaacctgactatgacaataacaaccctaggtcagctcgagaaaacatacaggtctataggcatccttctagaaccgagactgcattaagggttatctggaatcactcaaagacagtattgggaaagcaatattccacaatggctaaaaaacatttacttctttttgaggctatgcgcaaggaatttcctcaagcaaggtttctgtcaattgctcaaacacaattattgcgtgctcatgatgagatcaagatgtccatctcaagacttcagctcaaagagaaagaggatgatcctagcgctgccaatattgtaactagagaggaactcataccatataatgttcagtttacaagtgaaaaattcatgtcactctcatctttagcccgtgtaagaggtcaactccggtacttaaaggttgtctttacatgacagaacaaactgcagcacaattcggaaagcgtaaacaatggattatgtgccccacatgccgccagcgaacagatattgagaacattgcttttgtagttgagaaaccttgggacaaacatgaaaagagcattgaagatttggctgaaagcactatttctgtccaaggttcatatggaacaaagtttgaagctgtcacaagaagaatcttgagaatcacttcaactgatggaacagctaaagttcttgttttctcaagttggaatgatgtactggacgtactagagcactcccttgctgctaacaacatttcatatgttcggatgaaaggaggaagaaaatcacaggcagcactctcccaattcaagggtcaggagagcaatataaatgtagataaagtgaacagggcagcctgcaaaatgcagcctgttcaagtacttctgatgcttatacagcatggagcaaacggtcttaatctactagaggcacagcatgttattctagtggagccattactaaatcctgctgctgaggcacaagctatcagcaggatccatagagttggacaagacaaaagcacatttgttcaccgttttatagtgaagaaaacaatagaagagagcatctacaaattgaacaggagcagagctgtctgctctactataaaccgtaaatccaaaaacttcaaagatgagcctgttttgacgctgaaggatgtggagtcgctattcccgatggcaggacctgatgaacccctagaacaggcagatcaaaattacggcgatagcttgaggagtttgcctccatctgttgccgctgggttagctgctgaaagaaggcgactaatggagcaataagttaatggagtttgcctccatctgttgccgctgggttagctgctgaaagaaggcgactaatcaagggacctccatccatcgttgtggcagttgtgctaattttacttgatcagaatttctcttcgcagcacagtaacgacagtaggagaatgatgctccttagttatgaagcacccccatcatgagaatcaggctatttacgttgtaactttaggattttttttttatgtacctgtaggccttttagactcttgtacataagcttctagttttagttcgtttatacggcccatcctgtagttttgatgtagcagctctcagctctgccactgctacaccaacttatggcatgtataagtgtactaatacatggtcatcagcatgatacattctttagatgcttggtcaattttttagatgcttggtggtggcagagccagtagtcattatggaagaaaattgtcggttgtcctatgctgtctgcagatgtgccggatggtcagtcaggaagatgcagcaaggctttctgatagcttctgcatccgggcccctgctgtgccaggctcgacggcgggcgtcggcgcacgacatccgagtgc

SEQ ID NO: 70757 - DNA, 3259 bp, Zea Mays
atggacttgtttgcaatttcaccgcggttctattacacgcaaagacctcctggccgaccaatcgtggatgaacgacccagattgaataaccgaaccaattcaaatgctttgctaaatgtttacctctccaatgacgacattgccaagctcctagtcccactgctgaaacttcggcaggcatgttgccacccacaagtggggagttctggtctctgctccctgcagcataaccctttgtcaatggatgaaattttacaggttcttattggtaaagcaaaaattgaaggagaggaagagctcaggaaaattgtagttgccctgaatggtcttgctggattagctgttattgaacaaaggaaccaagaagccatttctttatacaaagaagcactagcattggctcatgaaaatattaatgatttccgtgttgaccctctgttgaatcttcatatcaactacaatcttgcagaactgcttagaattagttctgagtatttacaagaatgcccattaaaaaatccggcttttgaagttgcaatcagccgaaaaagaaaggaaatagatactgttgagacaaatgtacttagtgtaaaacgaaataaaatatgtgaaaacagtgttttgagtttgacagctaatgggctagaaatatctgaagataaaaacactattggacaaacatgcatgactagagatgtggatgtggagaatgtcactgggtgccactcatcatttgaatgttttgctgatgactgcttgaggaagacttgcaatacaatcacagaaaaatacctgtcaacttttacttcaaggctggtagtagcgcagaaggattttaatgcatcattcacagaggtcttgaatatcactaaagagctacagagtgagtatatgaattggtggctgtatgctttggactgcattgaagagaacaacatttctgctgacgatctgatcaagaagattgataattcttctagtaagagcaccactggtttgggttcatggggaatatcttccagggttaaaagtattgctggcttaaaatatgcaattcaagctgatattgattctctacaaagttcgaggcaacatcttatggatagacttctggaagttgacaaaacaatggctaacccaagggatgaggacattgagggccagcgatattgtccaaactgctatgatggcactggttctctatgtatccagtgtgagctagatgaactctttcagaggtatgaatcacgcctgtttcttgttaagaaatcgaacaatggttctgtcattgattcagtagaagaagcacatgatctactgaggcgaaaatatgagctcaatcacttcttccgtaatagaaaatccaaggagggacctgaacctgactatgacaataacaaccctaggtcagctcgagaaaacatacaggtctataggcatccttctagaaccgagactgcattaagggttatctggaatcactcaaagacagtattgggaaagcaatattccacaatggctaaaaaacatttacttctttttgaggctatgcgcaaggaatttcctcaagcaaggtttctgtcaattgctcaaacacaattattgcgtgctcatgatgagatcaagatgtccatctcaagacttcagctcaaagagaaagaggatgatcctagcgctgccaatattgtaactagagaggaactcataccatataatgttcagtttacaagtgaaaaattcatgtcactctcatctttagcccgtgtaagaggtcaactccggtacttaaaggttgtctttacatgacagaacaaactgcagcacaattcggaaagcgtaaacaatggattatgtgccccacatgccgccagcgaacagatattgagaacattgcttttgtagttgagaaaccttgggacaaacatgaaaagagcattgaagatttggctgaaagcactatttctgtccaaggttcatatggaacaaagtttgaagctgtcacaagaagaatcttgagaatcacttcaactgatggaacagctaaagttcttgttttctcaagttggaatgatgtactggacgtactagagcactcccttgctgctaacaacatttcatatgttcggatgaaaggaggaagaaaatcacaggcagcactctcccaattcaagggtcaggagagcaatataaatgtagataaagtgaacagggcagcctgcaaaatgcagcctgttcaagtacttctgatgcttatacagcatggagcaaacggtcttaatctactagaggcacagcatgttattctagtggagccattactaaatcctgctgctgaggcacaagctatcagcaggatccatagagttggacaagacaaaagcacatttgttcaccgttttatagtgaagaaaacaatagaagagagcatctacaaattgaacaggagcagagctgtctgctctactataaaccgtaaatccaaaaacttcaaagatgagcctgttttgacgctgaaggatgtggagtcgctattcccgatggcaggacctgatgaacccctagaacaggcagatcaaaattacggcgatagcttgaggagtttgcctccatctgttgccgctgggttagctgctgaaagaaggcgactaatggagcaataagttaatggagtttgcctccatctgttgccgctgggttagctgctgaaagaaggcgactaatcaagggacctccatccatcgttgtggcagttgtgctaattttacttgatcagaatttctcttcgcagcacagtaacgacagtaggagaatgatgctccttagttatgaagcacccccatcatgagaatcaggctatttacgttgtaactttaggattttttttttatgtacctgtaggccttttagactcttgtacataagcttctagttttagttcgtttatacggcccatcctgtagttttgatgtagcagctctcagctctgccactgctacaccaacttatggcatgtataagtgtactaatacatggtcatcagcatgatacattctttagatgcttggtcaattttttagatgcttggtggtggcagagccagtagtcattatggaagaaaattgtcggttgtcctatgctgtctgcagatgtgccggatggtcagtcaggaagatgcagcaaggctttctgatagcttctgcatccgggcccctgctgtgccaggctcgacggcgggcgtcggcgcacgacatccgagtgc

SEQ ID NO: 70758 - DNA, 3745 bp, Zea Mays
atggacttgtttgcaatttcaccgcggttctattacacgcaaagacctcctggccgaccaatcgtggatgaacgacccagattgaataaccgaaccaattcaaatgctttgctaaatgtttacctctccaatgacgacattgccaagctcctagtcccactgctgaaacttcggcaggcatgttgccacccacaagtggggagttctggtctctgctccctgcagcataaccctttgtcaatggatgaaattttacaggttcttattggtaaagcaaaaattgaaggagaggaagagctcaggaaaattgtagttgccctgaatggtcttgctggattagctgttattgaacaaaggaaccaagaagccatttctttatacaaagaagcactagcattggctcatgaaaatattaatgatttccgtgttgaccctctgttgaatcttcatatcaactacaatcttgcagaactgcttagaattagttctgagtatttacaagaatgcccattaaaaaatccggcttttgaagttgcaatcagccgaaaaagaaaggaaatagatactgttgagacaaatgtacttagtgtaaaacgaaataaaatatgtgaaaacagtgttttgagtttgacagctaatgggctagaaatatctgaagataaaaacactattggacaaacatgcatgactagagatgtggatgtggagaatgtcactgggtgccactcatcatttgaatgttttgctgatgactgcttgaggaagacttgcaatacaatcacagaaaaatacctgtcaacttttacttcaaggctggtagtagcgcagaaggattttaatgcatcattcacagaggtcttgaatatcactaaagagctacagagtgagtatatgaattggtggctgtatgctttggactgcattgaagagaacaacatttctgctgacgatctgatcaagaagattgataattcttctagtaagagcaccactggtttgggttcatggggaatatcttccagggttaaaagtattgctggcttaaaatatgcaattcaagctgatattgattctctacaaagttcgaggcaacatcttatggatagacttctggaagttgacaaaacaatggctaacccaagggatgaggacattgagggccagcgatattgtccaaactgctatgatggcactggttctctatgtatccagtgtgagctagatgaactctttcagaggtatgaatcacgcctgtttcttgttaagaaatcgaacaatggttctgtcattgattcagtagaagaagcacatgatctactgaggcgaaaatatgagctcaatcacttcttccgtaatagaaaatccaaggagggacctgaacctgactatgacaataacaaccctaggtcagctcgagaaaacatacaggtgtgttacatacttccattcctgcatgtaatataagtcaatagtcgtcacttgtttttcctcacctttttcaaggataacattacaccttctacttgtcttttaccatgtgtcttctatgatctgcattgatcagtccatctgcctttgtgttctgtgaaaggtgttacaaggaccatcatcacttaaagtttcttcacctggcattcaaagggatattgatccatttatgcgttgtctatttgttatatatatatttttaatactgccgatgtttacaggtctataggcatccttctagaaccgagactgcattaagggttatctggaatcactcaaagacagtattgggaaagcaatattccacaatggctaaaaaacatttacttctttttgaggctatgcgcaaggaatttcctcaagcaaggtttctgtcaattgctcaaacacaattattgcgtgctcatgatgagatcaagatgtccatctcaagacttcagctcaaagagaaagaggatgatcctagcgctgccaatattgtaactagagaggaactcataccatataatgttcagtttacaagtgaaaaattcatgtcactctcatctttagcccgtgtaagaggtcaactccggtacttaaagggattggcggtatgtaacaagaaaacacataaccagcatgatgaatcactggctaaagcaggcgatgctgttgatacagctacttcatgttcagccacagggcaaactgtttctgattttcgtaatgaaccatgcccgatatgccaggagaaggtttttgaccagaaaatggttttccagtgtggtcattttgtatgctgcaagtgttgtctttacatgacagaacaaactgcagcacaattcggaaagcgtaaacaatggattatgtgccccacatgccgccagcgaacagatattgagaacattgcttttgtagttgagaaaccttgggacaaacatgaaaagagcattgaagatttggctgaaagcactatttctgtccaaggttcatatggaacaaagtttgaagctgtcacaagaagaatcttgagaatcacttcaactgatggaacagctaaagttcttgttttctcaagttggaatgatgtactggacgtactagagcactcccttgctgctaacaacatttcatatgttcggatgaaaggaggaagaaaatcacaggcagcactctcccaattcaagggtcaggagagcaatataaatgtagataaagtgaacagggcagcctgcaaaatgcagcctgttcaagtacttctgatgcttatacagcatggagcaaacggtcttaatctactagaggcacagcatgttattctagtggagccattactaaatcctgctgctgaggcacaagctatcagcaggatccatagagttggacaagacaaaagcacatttgttcaccgttttatagtgaagaaaacaatagaagagagcatctacaaattgaacaggagcagagctgtctgctctactataaaccgtaaatccaaaaacttcaaagatgagcctgttttgacgctgaaggatgtggagtcgctattcccgatggcaggacctgatgaacccctagaacaggcagatcaaaattacggcgatagcttgaggagtttgcctccatctgttgccgctgggttagctgctgaaagaaggcgactaatggagcaataagttaatggagtttgcctccatctgttgccgctgggttagctgctgaaagaaggcgactaatcaagggacctccatccatcgttgtggcagttgtgctaattttacttgatcagaatttctcttcgcagcacagtaacgacagtaggagaatgatgctccttagttatgaagcacccccatcatgagaatcaggctatttacgttgtaactttaggattttttttttatgtacctgtaggccttttagactcttgtacataagcttctagttttagttcgtttatacggcccatcctgtagttttgatgtagcagctctcagctctgccactgctacaccaacttatggcatgtataagtgtactaatacatggtcatcagcatgatacattctttagatgcttggtcaattttttagatgcttggtggtggcagagccagtagtcattatggaagaaaattgtcggttgtcctatgctgtctgcagatgtgccggatggtcagtcaggaagatgcagcaaggctttctgatagcttctgcatccgggcccctgctgtgccaggctcgacggcgggcgtcggcgcacgacatccgagtgc

SEQ ID NO: 70759 - DNA, 3543 bp, Zea Mays
atggacttgtttgcaatttcaccgcggttctattacacgcaaagacctcctggccgaccaatcgtggatgaacgacccagattgaataaccgaaccaattcaaatgctttgctaaatgtttacctctccaatgacgacattgccaagctcctagtcccactgctgaaacttcggcaggcatgttgccacccacaagtggggagttctggtctctgctccctgcagcataaccctttgtcaatggatgaaattttacaggttcttattggtaaagcaaaaattgaaggagaggaagagctcaggaaaattgtagttgccctgaatggtcttgctggattagctgttattgaacaaaggaaccaagaagccatttctttatacaaagaagcactagcattggctcatgaaaatattaatgatttccgtgttgaccctctgttgaatcttcatatcaactacaatcttgcagaactgcttagaattagttctgagtatttacaagaatgcccattaaaaaatccggcttttgaagttgcaatcagccgaaaaagaaaggaaatagatactgttgagacaaatgtacttagtgtaaaacgaaataaaatatgtgaaaacagtgttttgagtttgacagctaatgggctagaaatatctgaagataaaaacactattggacaaacatgcatgactagagatgtggatgtggagaatgtcactgggtgccactcatcatttgaatgttttgctgatgactgcttgaggaagacttgcaatacaatcacagaaaaatacctgtcaacttttacttcaaggctggtagtagcgcagaaggattttaatgcatcattcacagaggtcttgaatatcactaaagagctacagagtgagtatatgaattggtggctgtatgctttggactgcattgaagagaacaacatttctgctgacgatctgatcaagaagattgataattcttctagtaagagcaccactggtttgggttcatggggaatatcttccaggtctgcagcaaacttgttttaatattctccatgggttaaaagtattgctggcttaaaatatgcaattcaagctgatattgattctctacaaagttcgaggcaacatcttatggatagacttctggaagttgacaaaacaatggctaacccaagggatgaggacattgagggccagcgatattgtccaaactgctatgatggcactggttctctatgtatccagtgtgagctagatgaactctttcagaggtatgaatcacgcctgtttcttgttaagaaatcgaacaatggttctgtcattgattcagtagaagaagcacatgatctactgaggcgaaaatatgagctcaatcacttcttccgtaatagaaaatccaaggagggacctgaacctgactatgacaataacaaccctaggtcagctcgagaaaacatacaggtctataggcatccttctagaaccgagactgcattaagggttatctggaatcactcaaagacagtattgggaaagcaatattccacaatggctaaaaaacatttacttctttttgaggtacaaaatgtttcctcctcttttgacataatcaagcttgctaaccatgacatgataatttaggctatgcgcaaggaatttcctcaagcaaggtttctgtcaattgctcaaacacaattattgcgtgctcatgatgagatcaagatgtccatctcaagacttcagctcaaagagaaagaggatgatcctagcgctgccaatattgtaactagagaggaactcataccatataatgttcagtttacaagtgaaaaattcatgtcactctcatctttagcccgtgtaagaggtcaactccggtacttaaagggattggcggtatgtaacaagaaaacacataaccagcatgatgaatcactggctaaagcaggcgatgctgttgatacagctacttcatgttcagccacagggcaaactgtttctgattttcgtaatgaaccatgcccgatatgccaggagaaggtttttgaccagaaaatggttttccagtgtggtcattttgtatgctgcaagtgttgtctttacatgacagaacaaactgcagcacaattcggaaagcgtaaacaatggattatgtgccccacatgccgccagcgaacagatattgagaacattgcttttgtagttgagaaaccttgggacaaacatgaaaagagcattgaagatttggctgaaagcactatttctgtccaagtttgaagctgtcacaagaagaatcttgagaatcacttcaactgatggaacagctaaagttcttgttttctcaagttggaatgatgtactggacgtactagagcactcccttgctgctaacaacatttcatatgttcggatgaaaggaggaagaaaatcacaggcagcactctcccaattcaagggtcaggagagcaatataaatgtagataaagtgaacagggcagcctgcaaaatgcagcctgttcaagtacttctgatgcttatacagcatggagcaaacggtcttaatctactagaggcacagcatgttattctagtggagccattactaaatcctgctgctgaggcacaagctatcagcaggatccatagagttggacaagacaaaagcacatttgttcaccgttttatagtgaagaaaacaatagaagagagcatctacaaattgaacaggagcagagctgtctgctctactataaaccgtaaatccaaaaacttcaaagatgagcctgttttgacgctgaaggatgtggagtcgctattcccgatggcaggacctgatgaacccctagaacaggcagatcaaaattacggcgatagcttgaggagtttgcctccatctgttgccgctgggttagctgctgaaagaaggcgactaatggagcaataagttaatggagtttgcctccatctgttgccgctgggttagctgctgaaagaaggcgactaatcaagggacctccatccatcgttgtggcagttgtgctaattttacttgatcagaatttctcttcgcagcacagtaacgacagtaggagaatgatgctccttagttatgaagcacccccatcatgagaatcaggctatttacgttgtaactttaggattttttttttatgtacctgtaggccttttagactcttgtacataagcttctagttttagttcgtttatacggcccatcctgtagttttgatgtagcagctctcagctctgccactgctacaccaacttatggcatgtataagtgtactaatacatggtcatcagcatgatacattctttagatgcttggtcaattttttagatgcttggtggtggcagagccagtagtcattatggaagaaaattgtcggttgtcctatgctgtctgcagatgtgccggatggtcagtcaggaagatgcagcaaggctttctgatagcttctgcatccgggcccctgctgtgccaggctcgacggcgggcgtcggcgcacgacatccgagtgc

SEQ ID NO: 70760 - DNA, 3778 bp, Zea Mays
atggacttgtttgcaatttcaccgcggttctattacacgcaaagacctcctggccgaccaatcgtggatgaacgacccagattgaataaccgaaccaattcaaatgctttgctaaatgtttacctctccaatgacgacattgccaagctcctagtcccactgctgaaacttcggcaggcatgttgccacccacaagtggggagttctggtctctgctccctgcagcataaccctttgtcaatggatgaaattttacaggttcttattggtaaagcaaaaattgaaggagaggaagagctcaggaaaattgtagttgccctgaatggtcttgctggattagctgttattgaacaaaggaaccaagaagccatttctttatacaaagaagcactagcattggctcatgaaaatattaatgatttccgtgttgaccctctgttgaatcttcatatcaactacaatcttgcagaactgcttagaattagttctgagtatttacaagaatgcccattaaaaaatccggcttttgaagttgcaatcagccgaaaaagaaaggaaatagatactgttgagacaaatgtacttagtgtaaaacgaaataaaatatgtgaaaacagtgttttgagtttgacagctaatgggctagaaatatctgaagataaaaacactattggacaaacatgcatgactagagatgtggatgtggagaatgtcactgggtgccactcatcatttgaatgttttgctgatgactgcttgaggaagacttgcaatacaatcacagaaaaatacctgtcaacttttacttcaaggctggtagtagcgcagaaggattttaatgcatcattcacagaggtcttgaatatcactaaagagctacagagtgagtatatgaattggtggctgtatgctttggactgcattgaagagaacaacatttctgctgacgatctgatcaagaagattgataattcttctagtaagagcaccactggtttgggttcatggggaatatcttccaggtctgcagcaaacttgttttaatattctccatgggttaaaagtattgctggcttaaaatatgcaattcaagctgatattgattctctacaaagttcgaggcaacatcttatggatagacttctggaagttgacaaaacaatggctaacccaagggatgaggacattgagggccagcgatattgtccaaactgctatgatggcactggttctctatgtatccagtgtgagctagatgaactctttcagaggtatgaatcacgcctgtttcttgttaagaaatcgaacaatggttctgtcattgattcagtagaagaagcacatgatctactgaggcgaaaatatgagctcaatcacttcttccgtaatagaaaatccaaggagggacctgaacctgactatgacaataacaaccctaggtcagctcgagaaaacatacaggtgtgttacatacttccattcctgcatgtaatataagtcaatagtcgtcacttgtttttcctcacctttttcaaggataacattacaccttctacttgtcttttaccatgtgtcttctatgatctgcattgatcagtccatctgcctttgtgttctgtgaaaggtgttacaaggaccatcatcacttaaagtttcttcacctggcattcaaagggatattgatccatttatgcgttgtctatttgttatatatatatttttaatactgccgatgtttacaggtctataggcatccttctagaaccgagactgcattaagggttatctggaatcactcaaagacagtattgggaaagcaatattccacaatggctaaaaaacatttacttctttttgaggctatgcgcaaggaatttcctcaagcaaggtttctgtcaattgctcaaacacaattattgcgtgctcatgatgagatcaagatgtccatctcaagacttcagctcaaagagaaagaggatgatcctagcgctgccaatattgtaactagagaggaactcataccatataatgttcagtttacaagtgaaaaattcatgtcactctcatctttagcccgtgtaagaggtcaactccggtacttaaagggattggcggtatgtaacaagaaaacacataaccagcatgatgaatcactggctaaagcaggcgatgctgttgatacagctacttcatgttcagccacagggcaaactgtttctgattttcgtaatgaaccatgcccgatatgccaggagaaggtttttgaccagaaaatggttttccagtgtggtcattttgtatgctgcaagtgttgtctttacatgacagaacaaactgcagcacaattcggaaagcgtaaacaatggattatgtgccccacatgccgccagcgaacagatattgagaacattgcttttgtagttgagaaaccttgggacaaacatgaaaagagcattgaagatttggctgaaagcactatttctgtccaaggttcatatggaacaaagtttgaagctgtcacaagaagaatcttgagaatcacttcaactgatggaacagctaaagttcttgttttctcaagttggaatgatgtactggacgtactagagcactcccttgctgctaacaacatttcatatgttcggatgaaaggaggaagaaaatcacaggcagcactctcccaattcaagggtcaggagagcaatataaatgtagataaagtgaacagggcagcctgcaaaatgcagcctgttcaagtacttctgatgcttatacagcatggagcaaacggtcttaatctactagaggcacagcatgttattctagtggagccattactaaatcctgctgctgaggcacaagctatcagcaggatccatagagttggacaagacaaaagcacatttgttcaccgttttatagtgaagaaaacaatagaagagagcatctacaaattgaacaggagcagagctgtctgctctactataaaccgtaaatccaaaaacttcaaagatgagcctgttttgacgctgaaggatgtggagtcgctattcccgatggcaggacctgatgaacccctagaacaggcagatcaaaattacggcgatagcttgaggagtttgcctccatctgttgccgctgggttagctgctgaaagaaggcgactaatggagcaataagttaatggagtttgcctccatctgttgccgctgggttagctgctgaaagaaggcgactaatcaagggacctccatccatcgttgtggcagttgtgctaattttacttgatcagaatttctcttcgcagcacagtaacgacagtaggagaatgatgctccttagttatgaagcacccccatcatgagaatcaggctatttacgttgtaactttaggattttttttttatgtacctgtaggccttttagactcttgtacataagcttctagttttagttcgtttatacggcccatcctgtagttttgatgtagcagctctcagctctgccactgctacaccaacttatggcatgtataagtgtactaatacatggtcatcagcatgatacattctttagatgcttggtcaattttttagatgcttggtggtggcagagccagtagtcattatggaagaaaattgtcggttgtcctatgctgtctgcagatgtgccggatggtcagtcaggaagatgcagcaaggctttctgatagcttctgcatccgggcccctgctgtgccaggctcgacggcgggcgtcggcgcacgacatccgagtgc

SEQ ID NO: 70761 - DNA, 4163 bp, Zea Mays
ctgaaatagaagtgaagtagcttgttcggtccaagtacttcattgagttcttacaatatcccgtcattccaactgtcctgacaaggatccactggtggcgactttgtttggatgaagctcagatggtagagtcaggcaggacttctgtgactgagatggcattgaggctaaatgctcaacaccgttggtgtatcacaggaaccccgatacaacgcaagcttgatgatctctttgggcttctacgttttcttaggacaaacccatttgacacatatagatggtgggtggacattattagagatccatatgagagggggaacaaagtagcaatgaattatgcacacaatttctttagggaaatcatgtggcgttcctccaaaattcatgtctcggctgaactgcagctgcctccacaagaagagtgtttttcatggctcatcttttcttccattgaagagtatttctataagaagcaacatgccacctgcatggaccatgcacatcaaattattagaagtttgagaaatgacaccaatagaagagaatcaatttctgattcaaatgctttgctaaatgtttacctctccaatgacgacattgccaagctcctagtcccactgctgaaacttcggcaggcatgttgccacccacaagtggggagttctggtctctgctccctgcagcataaccctttgtcaatggatgaaattttacaggttcttattggtaaagcaaaaattgaaggagaggaagagctcaggaaaattgtagttgccctgaatggtcttgctggattagctgttattgaacaaaggaaccaagaagccatttctttatacaaagaagcactagcattggctcatgaaaatattaatgatttccgtgttgaccctctgttgaatcttcatatcaactacaatcttgcagaactgcttagaattagttctgagtatttacaagaatgcccattaaaaaatccggcttttgaagttgcaatcagccgaaaaagaaaggaaatagatactgttgagacaaatgtacttagtgtaaaacgaaataaaatatgtgaaaacagtgttttgagtttgacagctaatgggctagaaatatctgaagataaaaacactattggacaaacatgcatgactagagatgtggatgtggagaatgtcactgggtgccactcatcatttgaatgttttgctgatgactgcttgaggaagacttgcaatacaatcacagaaaaatacctgtcaacttttacttcaaggctggtagtagcgcagaaggattttaatgcatcattcacagaggtcttgaatatcactaaagagctacagagtgagtatatgaattggtggctgtatgctttggactgcattgaagagaacaacatttctgctgacgatctgatcaagaagattgataattcttctagtaagagcaccactggtttgggttcatggggaatatcttccaggtctgcagcaaacttgttttaatattctccatgggttaaaagtattgctggcttaaaatatgcaattcaagctgatattgattctctacaaagttcgaggcaacatcttatggatagacttctggaagttgacaaaacaatggctaacccaagggatgaggacattgagggccagcgatattgtccaaactgctatgatggcactggttctctatgtatccagtgtgagctagatgaactctttcagaggtatgaatcacgcctgtttcttgttaagaaatcgaacaatggttctgtcattgattcagtagaagaagcacatgatctactgaggcgaaaatatgagctcaatcacttcttccgtaatagaaaatccaaggagggacctgaacctgactatgacaataacaaccctaggtcagctcgagaaaacatacagtccatctgcctttgtgttctgtgaaaggtgttacaaggaccatcatcacttaaagtttcttcacctggcattcaaagggatattgatccatttatgcgttgtctatttgttatatatatatttttaatactgccgatgtttacaggtctataggcatccttctagaaccgagactgcattaagggttatctggaatcactcaaagacagtattgggaaagcaatattccacaatggctaaaaaacatttacttctttttgaggtacaaaatgtttcctcctcttttgacataatcaagcttgctaaccatgacatgataatttaggctatgcgcaaggaatttcctcaagcaaggtttctgtcaattgctcaaacacaattattgcgtgctcatgatgagatcaagatgtccatctcaagacttcagctcaaagagaaagaggatgatcctagcgctgccaatattgtaactagagaggaactcataccatataatgttcagtttacaagtgaaaaattcatgtcactctcatctttagcccgtgtaagaggtcaactccggtacttaaagggattggcggtatgtaacaagaaaacacataaccagcatgatgaatcactggctaaagcaggcgatgctgttgatacagctacttcatgttcagccacagggcaaactgtttctgattttcgtaatgaaccatgcccgatatgccaggagaaggtttttgaccagaaaatggttttccagtgtggtcattttgtatgctgcaagtgttgtctttacatgacagaacaaactgcagcacaattcggaaagcgtaaacaatggattatgtgccccacatgccgccagcgaacagatattgagaacattgcttttgtagttgagaaaccttgggacaaacatgaaaagagcattgaagatttggctgaaagcactatttctgtccaaggttcatatggaacaaagtttgaagctgtcacaagaagaatcttgagaatcacttcaactgatggaacagctaaagttcttgttttctcaagttggaatgatgtactggacgtactagagcactcccttgctgctaacaacatttcatatgttcggatgaaaggaggaagaaaatcacaggcagcactctcccaattcaagggtcaggagagcaatataaatgtagataaagtgaacagggcagcctgcaaaatgcagcctgttcaagtacttctgatgcttatacagcatggagcaaacggtcttaatctactagaggcacagcatgttattctagtggagccattactaaatcctgctgctgaggcacaagctatcagcaggatccatagagttggacaagacaaaagcacatttgttcaccgttttatagtgaagaaaacaatagaagagagcatctacaaattgaacaggagcagagctgtctgctctactataaaccgtaaatccaaaaacttcaaagatgagcctgttttgacgctgaaggatgtggagtcgctattcccgatggcaggacctgatgaacccctagaacaggcagatcaaaattacggcgatagcttgaggagtttgcctccatctgttgccgctgggttagctgctgaaagaaggcgactaatggagcaataagttaatggagtttgcctccatctgttgccgctgggttagctgctgaaagaaggcgactaatcaagggacctccatccatcgttgtggcagttgtgctaattttacttgatcagaatttctcttcgcagcacagtaacgacagtaggagaatgatgctccttagttatgaagcacccccatcatgagaatcaggctatttacgttgtaactttaggattttttttttatgtacctgtaggccttttagactcttgtacataagcttctagttttagttcgtttatacggcccatcctgtagttttgatgtagcagctctcagctctgccactgctacaccaacttatggcatgtataagtgtactaatacatggtcatcagcatgatacattctttagatgcttggtcaattttttagatgcttggtggtggcagagccagtagtcattatggaagaaaattgtcggttgtcctatgctgtctgcagatgtgccggatggtcagtcaggaagatgcagcaaggctttctgatagcttctgcatccgggcccctgctgtgccaggctcgacggcgggcgtcggcgcacgacatccgagtgc

SEQ ID NO: 70762 - DNA, 3961 bp, Zea Mays
ctatacctgaaatagaagtgaagtagcttgttcggtccaagtacttcattgagttcttacaatatcccgtcattccaactgtcctgacaaggatccactggtggcgactttgtttggatgaagctcagatggtagagtcaggcaggacttctgtgactgagatggcattgaggctaaatgctcaacaccgttggtgtatcacaggaaccccgatacaacgcaagcttgatgatctctttgggcttctacgttttcttaggacaaacccatttgacacatatagatggtgggtggacattattagagatccatatgagagggggaacaaagtagcaatgaattatgcacacaatttctttagggaaatcatgtggcgttcctccaaaattcatgtctcggctgaactgcagctgcctccacaagaagagtgtttttcatggctcatcttttcttccattgaagagtatttctataagaagcaacatgccacctgcatggaccatgcacatcaaattattagaagtttgagaaatgacaccaatagaagagaatcaatttctgattcaaatgctttgctaaatgtttacctctccaatgacgacattgccaagctcctagtcccactgctgaaacttcggcaggcatgttgccacccacaagtggggagttctggtctctgctccctgcagcataaccctttgtcaatggatgaaattttacaggttcttattggtaaagcaaaaattgaaggagaggaagagctcaggaaaattgtagttgccctgaatggtcttgctggattagctgttattgaacaaaggaaccaagaagccatttctttatacaaagaagcactagcattggctcatgaaaatattaatgatttccgtgttgaccctctgttgaatcttcatatcaactacaatcttgcagaactgcttagaattagttctgagtatttacaagaatgcccattaaaaaatccggcttttgaagttgcaatcagccgaaaaagaaaggaaatagatactgttgagacaaatgtacttagtgtaaaacgaaataaaatatgtgaaaacagtgttttgagtttgacagctaatgggctagaaatatctgaagataaaaacactattggacaaacatgcatgactagagatgtggatgtggagaatgtcactgggtgccactcatcatttgaatgttttgctgatgactgcttgaggaagacttgcaatacaatcacagaaaaatacctgtcaacttttacttcaaggctggtagtagcgcagaaggattttaatgcatcattcacagaggtcttgaatatcactaaagagctacagagtgagtatatgaattggtggctgtatgctttggactgcattgaagagaacaacatttctgctgacgatctgatcaagaagattgataattcttctagtaagagcaccactggtttgggttcatggggaatatcttccaggtctgcagcaaacttgttttaatattctccatgggttaaaagtattgctggcttaaaatatgcaattcaagctgatattgattctctacaaagttcgaggcaacatcttatggatagacttctggaagttgacaaaacaatggctaacccaagggatgaggacattgagggccagcgatattgtccaaactgctatgatggcactggttctctatgtatccagtgtgagctagatgaactctttcagaggtatgaatcacgcctgtttcttgttaagaaatcgaacaatggttctgtcattgattcagtagaagaagcacatgatctactgaggcgaaaatatgagctcaatcacttcttccgtaatagaaaatccaaggagggacctgaacctgactatgacaataacaaccctaggtcagctcgagaaaacatacaggtctataggcatccttctagaaccgagactgcattaagggttatctggaatcactcaaagacagtattgggaaagcaatattccacaatggctaaaaaacatttacttctttttgaggctatgcgcaaggaatttcctcaagcaaggtttctgtcaattgctcaaacacaattattgcgtgctcatgatgagatcaagatgtccatctcaagacttcagctcaaagagaaagaggatgatcctagcgctgccaatattgtaactagagaggaactcataccatataatgttcagtttacaagtgaaaaattcatgtcactctcatctttagcccgtgtaagaggtcaactccggtacttaaagggattggcggtatgtaacaagaaaacacataaccagcatgatgaatcactggctaaagcaggcgatgctgttgatacagctacttcatgttcagccacagggcaaactgtttctgattttcgtaatgaaccatgcccgatatgccaggagaaggtttttgaccagaaaatggttttccagtgtggtcattttgtatgctgcaagtgttgtctttacatgacagaacaaactgcagcacaattcggaaagcgtaaacaatggattatgtgccccacatgccgccagcgaacagatattgagaacattgcttttgtagttgagaaaccttgggacaaacatgaaaagagcattgaagatttggctgaaagcactatttctgtccaaggttcatatggaacaaagtttgaagctgtcacaagaagaatcttgagaatcacttcaactgatggaacagctaaagttcttgttttctcaagttggaatgatgtactggacgtactagagcactcccttgctgctaacaacatttcatatgttcggatgaaaggaggaagaaaatcacaggcagcactctcccaattcaagggtcaggagagcaatataaatgtagataaagtgaacagggcagcctgcaaaatgcagcctgttcaagtacttctgatgcttatacagcatggagcaaacggtcttaatctactagaggcacagcatgttattctagtggagccattactaaatcctgctgctgaggcacaagctatcagcaggatccatagagttggacaagacaaaagcacatttgttcaccgttttatagtgaagaaaacaatagaagagagcatctacaaattgaacaggagcagagctgtctgctctactataaaccgtaaatccaaaaacttcaaagatgagcctgttttgacgctgaaggatgtggagtcgctattcccgatggcaggacctgatgaacccctagaacaggcagatcaaaattacggcgatagcttgaggagtttgcctccatctgttgccgctgggttagctgctgaaagaaggcgactaatggagcaataagttaatggagtttgcctccatctgttgccgctgggttagctgctgaaagaaggcgactaatcaagggacctccatccatcgttgtggcagttgtgctaattttacttgatcagaatttctcttcgcagcacagtaacgacagtaggagaatgatgctccttagttatgaagcacccccatcatgagaatcaggctatttacgttgtaactttaggattttttttttatgtacctgtaggccttttagactcttgtacataagcttctagttttagttcgtttatacggcccatcctgtagttttgatgtagcagctctcagctctgccactgctacaccaacttatggcatgtataagtgtactaatacatggtcatcagcatgatacattctttagatgcttggtcaattttttagatgcttggtggtggcagagccagtagtcattatggaagaaaattgtcggttgtcctatgctgtctgcagatgtgccggatggtcagtcaggaagatgcagcaaggctttctgatagcttctgcatccgggcccctgctgtgccaggctcgacggcgggcgtcggcgcacgacatccgagtgc

SEQ ID NO: 70763 - DNA, 5139 bp, Zea Mays
ctcgatgctcccatagtcccatctcgtgatccttccgctcctatcaaagttcgaggtttctcagaacttgcactcccgattccgcgccggcgtccaaagccccaccgaatggtccaccacaccgtctgaatcatcacatatggggaggaagaaatcgagaccggttcgagctgcgggcgccgcctttgcggcggctgaggccgacccctgtgcgccgagccctagcggcagcacgaagcgtaggaccaagggcgaggcgaggagagacgtctgcgtggaggtggataggagcacgtggggtcacgccgacatcgagcaccgcgacgtcgccgaggtggtcctccgcgacgtgagcgtctacggcgacggggatggggaagtaatgcaggacagttggaaagggaccttcctgatttaattcctcagctcagaccatatcaacttcgcgcagcgcattggatggttcaacgtgaaaacggaaatacgctccatcaagaatacgctaattctgcaccatattgtgttccttttgattttgttcacaagaattccaggatgttctacaatccgttcaacggaaatatttcatcgcaaccagagccttctccaccttacatctctgggggcattttggctgaacaaaaccgaaatggatcaaattaagaggcagaaagtagaaagggttgagtgcatctgtggtgctgcgagtgaaagttctgcatacacgggtctatgggtccaatgtgacatttgtgatgcttggcaacatgctgattgtgttggttactcacccaagaggaatatactttttgctgataccactgaagatgtagtatcaacaaacaaaaaaagcaccatgaagtctggatttagaaggaaaaagaaacccaggtgttctattgttgagacagaagacaaatacatttgtgcactgtgcttggagcttattgaagcaactcaaactaatatactcagccatgctacattgatagtatgtcccgcaccaatattggcacaatggcactctgaaattacccgacacacaaggccaggatctctgaaagtttgcatttatgaaggtgcaaggaacttggatccttctaccatccaaaaaaatgatatgactgaaataattactgctgatgttgtcttgacaacatatgatgtcttgaaagaagatctatcacatgattttgatcgtcatgatggcgatcgccgtttcttgagatttcaaaagagatatcccgtcattccaactgtcctgacaaggatccactggtggcgactttgtttggatgaagctcagatggtagagtcaggcaggacttctgtgactgagatggcattgaggctaaatgctcaacaccgttggtgtatcacaggaaccccgatacaacgcaagcttgatgatctctttgggcttctacgttttcttaggacaaacccatttgacacatatagatggtgggtggacattattagagatccatatgagagggggaacaaagtagcaatgaattatgcacacaatttctttagggaaatcatgtggcgttcctccaaaattcatgtctcggctgaactgcagctgcctccacaagaagagtgtttttcatggctcatcttttcttccattgaagagtatttctataagaagcaacatgccacctgcatggaccatgcacatcaaattattagaagtttgagaaatgacaccaatagaagagaatcaatttctgattcaaatgctttgctaaatgtttacctctccaatgacgacattgccaagctcctagtcccactgctgaaacttcggcaggcatgttgccacccacaagtggggagttctggtctctgctccctgcagcataaccctttgtcaatggatgaaattttacaggttcttattggtaaagcaaaaattgaaggagaggaagagctcaggaaaattgtagttgccctgaatggtcttgctggattagctgttattgaacaaaggaaccaagaagccatttctttatacaaagaagcactagcattggctcatgaaaatattaatgatttccgtgttgaccctctgttgaatcttcatatcaactacaatcttgcagaactgcttagaattagttctgagtatttacaagaatgcccattaaaaaatccggcttttgaagttgcaatcagccgaaaaagaaaggaaatagatactgttgagacaaatgtacttagtgtaaaacgaaataaaatatgtgaaaacagtgttttgagtttgacagctaatgggctagaaatatctgaagataaaaacactattggacaaacatgcatgactagagatgtggatgtggagaatgtcactgggtgccactcatcatttgaatgttttgctgatgactgcttgaggaagacttgcaatacaatcacagaaaaatacctgtcaacttttacttcaaggctggtagtagcgcagaaggattttaatgcatcattcacagaggtcttgaatatcactaaagagctacagagtgagtatatgaattggtggctgtatgctttggactgcattgaagagaacaacatttctgctgacgatctgatcaagaagattgataattcttctagtaagagcaccactggtttgggttcatggggaatatcttccaggtctgcagcaaacttgttttaatattctccatgggttaaaagtattgctggcttaaaatatgcaattcaagctgatattgattctctacaaagttcgaggcaacatcttatggatagacttctggaagttgacaaaacaatggctaacccaagggatgaggacattgagggccagcgatattgtccaaactgctatgatggcactggttctctatgtatccagtgtgagctagatgaactctttcagaggtatgaatcacgcctgtttcttgttaagaaatcgaacaatggttctgtcattgattcagtagaagaagcacatgatctactgaggcgaaaatatgagctcaatcacttcttccgtaatagaaaatccaaggagggacctgaacctgactatgacaataacaaccctaggtcagctcgagaaaacatacaggtctataggcatccttctagaaccgagactgcattaagggttatctggaatcactcaaagacagtattgggaaagcaatattccacaatggctaaaaaacatttacttctttttgaggctatgcgcaaggaatttcctcaagcaaggtttctgtcaattgctcaaacacaattattgcgtgctcatgatgagatcaagatgtccatctcaagacttcagctcaaagagaaagaggatgatcctagcgctgccaatattgtaactagagaggaactcataccatataatgttcagtttacaagtgaaaaattcatgtcactctcatctttagcccgtgtaagaggtcaactccggtacttaaagggattggcggtatgtaacaagaaaacacataaccagcatgatgaatcactggctaaagcaggcgatgctgttgatacagctacttcatgttcagccacagggcaaactgtttctgattttcgtaatgaaccatgcccgatatgccaggagaaggtttttgaccagaaaatggttttccagtgtggtcattttgtatgctgcaagtgttgtctttacatgacagaacaaactgcagcacaattcggaaagcgtaaacaatggattatgtgccccacatgccgccagcgaacagatattgagaacattgcttttgtagttgagaaaccttgggacaaacatgaaaagagcattgaagatttggctgaaagcactatttctgtccaaggttcatatggaacaaagtttgaagctgtcacaagaagaatcttgagaatcacttcaactgatggaacagctaaagttcttgttttctcaagttggaatgatgtactggacgtactagagcactcccttgctgctaacaacatttcatatgttcggatgaaaggaggaagaaaatcacaggcagcactctcccaattcaagggtcaggagagcaatataaatgtagataaagtgaacagggcagcctgcaaaatgcagcctgttcaagtacttctgatgcttatacagcatggagcaaacggtcttaatctactagaggcacagcatgttattctagtggagccattactaaatcctgctgctgaggcacaagctatcagcaggatccatagagttggacaagacaaaagcacatttgttcaccgttttatagtgaagaaaacaatagaagagagcatctacaaattgaacaggagcagagctgtctgctctactataaaccgtaaatccaaaaacttcaaagatgagcctgttttgacgctgaaggatgtggagtcgctattcccgatggcaggacctgatgaacccctagaacaggcagatcaaaattacggcgatagcttgaggagtttgcctccatctgttgccgctgggttagctgctgaaagaaggcgactaatggagcaataagttaatggagtttgcctccatctgttgccgctgggttagctgctgaaagaaggcgactaatcaagggacctccatccatcgttgtggcagttgtgctaattttacttgatcagaatttctcttcgcagcacagtaacgacagtaggagaatgatgctccttagttatgaagcacccccatcatgagaatcaggctatttacgttgtaactttaggattttttttttatgtacctgtaggccttttagactcttgtacataagcttctagttttagttcgtttatacggcccatcctgtagttttgatgtagcagctctcagctctgccactgctacaccaacttatggcatgtataagtgtactaatacatggtcatcagcatgatacattctttagatgcttggtcaattttttagatgcttggtggtggcagagccagtagtcattatggaagaaaattgtcggttgtcctatgctgtctgcagatgtgccggatggtcagtcaggaagatgcagcaaggctttctgatagcttctgcatccgggcccctgctgtgccaggctcgacggcgggcgtcggcgcacgacatccgagtgc

SEQ ID NO: 70764 - DNA, 6349 bp, Zea Mays
ccagtctccctcgcatcgcgtcgtcaccagcctatgctcgatgctcccatagtcccatctcgtgatccttccgctcctatcaaagttcgaggtttctcagaacttgcactcccgattccgcgccggcgtccaaagccccaccgaatggtccaccacaccgtctgaatcatcacatatggggaggaagaaatcgagaccggttcgagctgcgggcgccgcctttgcggcggctgaggccgacccctgtgcgccgagccctagcggcagcacgaagcgtaggaccaagggcgaggcgaggagagacgtctgcgtggaggtggataggagcacgtggggtcacgccgacatcgagcaccgcgacgtcgccgaggtggtcctccgcgacgtgagcgtctacggcgacggggatggggaaggtgcgttggaggaggcattcggggcgtcgacgttctcgttgcgtctgcgggtgcgcgacgcgccggaggaggggttcaggatgggccagtggcccgttgtagagtcggattgcgtgctcctggagtatgtcgtccacgggggccgtgaagggaagcacgcagaatatgtggtctcaggatgttttgatggtcctgatgaaggtgtatcgggtctcgtccatttggtgagcttgagattcatcacgctccgggtccaatcgttcagagcatttcagcatatgggtgaggtgagagttgagtcgtttagggttagagtggaggtgatggaacaggctttcagtgcgtgcggttcgctgctggaggtggctagacatccatggaggaagagtttgatgaatgtgattgcttggctgcgtcctgaggtcacgacatcagctgcgatatatgggttggataaccttggtgtgccaatggatgatggtggtaatgctgatttggtacctaagagtgattcacagtttgatcttgctgctttttatgaggccattaagccttcggcgtgagtatcttacatattactatcactctaacctcataatcatgtgctttaacatgaatatgaaatgaaagcatttaaacttacagacaactacttgctgccattattatgatatacaatatgttcttgtgtgatcagaatctatgatgtgagttatccaaagcatcgttacgattcttaggttgtatcatacttctttactttctggcaattttatgatacttatcttttattcctgttgttagtaatgcaggacagttggaaagggaccttcctgatttaattcctcagctcagaccatatcaacttcgcgcagcgcattggatggttcaacgtgaaaacggaaatacgctccatcaagaatacgctaattctgcaccatattgtgttccttttgattttgttcacaagaattccaggatgttctacaatccgttcaacggaaatatttcatcgcaaccagagccttctccaccttacatctctgggggcattttggctgatgaaatgggcttggggaaaactgtcgagcttttagcgtgcatttttgctcatcgtagaccaatttcattagacttttctgtcttccagaacaaaaccgaaatggatcaaattaagaggcagaaagtagaaagggttgagtgcatctgtggtgctgcgagtgaaagttctgcatacacgggtctatgggtccaatgtgacatttgtgatgcttggcaacatgctgattgtgttggttactcacccaagaggaatatactttttgctgataccactgaagatgtagtatcaacaaacaaaaaaagcaccatgaagtctggatttagaaggaaaaagaaacccaggtgttctattgttgagacagaagacaaatacatttgtgcactgtgcttggagcttattgaagcaactcaaactaatatactcagccatgctacattgatagtatgtcccgcaccaatattggcacaatggcactctgaaattacccgacacacaaggccaggatctctgaaagtttgcatttatgaaggtgcaaggaacttggatccttctaccatccaaaaaaatgatatgactgaaataattactgctgatgttgtcttgacaacatatgatgtcttgaaagaagatctatcacatgattttgatcgtcatgatggcgatcgccgtttcttgagatttcaaaagagatatcccgtcattccaactgtcctgacaaggatccactggtggcgactttgtttggatgaagctcagatggtagagtcaggcaggacttctgtgactgagatggcattgaggctaaatgctcaacaccgttggtgtatcacaggaaccccgatacaacgcaagcttgatgatctctttgggcttctacgttttcttaggacaaacccatttgacacatatagatggtgggtggacattattagagatccatatgagagggggaacaaagtagcaatgaattatgcacacaatttctttagggaaatcatgtggcgttcctccaaaattcatgtctcggctgaactgcagctgcctccacaagaagagtgtttttcatggctcatcttttcttccattgaagagtatttctataagaagcaacatgccacctgcatggaccatgcacatcaaattattagaagtttgagaaatgacaccaatagaagagaatcaatttctgattcaaatgctttgctaaatgtttacctctccaatgacgacattgccaagctcctagtcccactgctgaaacttcggcaggcatgttgccacccacaagtggggagttctggtctctgctccctgcagcataaccctttgtcaatggatgaaattttacaggttcttattggtaaagcaaaaattgaaggagaggaagagctcaggaaaattgtagttgccctgaatggtcttgctggattagctgttattgaacaaaggaaccaagaagccatttctttatacaaagaagcactagcattggctcatgaaaatattaatgatttccgtgttgaccctctgttgaatcttcatatcaactacaatcttgcagaactgcttagaattagttctgagtatttacaagaatgcccattaaaaaatccggcttttgaagttgcaatcagccgaaaaagaaaggaaatagatactgttgagacaaatgtacttagtgtaaaacgaaataaaatatgtgaaaacagtgttttgagtttgacagctaatgggctagaaatatctgaagataaaaacactattggacaaacatgcatgactagagatgtggatgtggagaatgtcactgggtgccactcatcatttgaatgttttgctgatgactgcttgaggaagacttgcaatacaatcacagaaaaatacctgtcaacttttacttcaaggctggtagtagcgcagaaggattttaatgcatcattcacagaggtcttgaatatcactaaagagctacagagtgagtatatgaattggtggctgtatgctttggactgcattgaagagaacaacatttctgctgacgatctgatcaagaagattgataattcttctagtaagagcaccactggtttgggttcatggggaatatcttccaggtctgcagcaaacttgttttaatattctccatgggttaaaagtattgctggcttaaaatatgcaattcaagctgatattgattctctacaaagttcgaggcaacatcttatggatagacttctggaagttgacaaaacaatggctaacccaagggatgaggacattgagggccagcgatattgtccaaactgctatgatggcactggttctctatgtatccagtgtgagctagatgaactctttcagaggtatgaatcacgcctgtttcttgttaagaaatcgaacaatggttctgtcattgattcagtagaagaagcacatgatctactgaggcgaaaatatgagctcaatcacttcttccgtaatagaaaatccaaggagggacctgaacctgactatgacaataacaaccctaggtcagctcgagaaaacatacaggtgtgttacatacttccattcctgcatgtaatataagtcaatagtcgtcacttgtttttcctcacctttttcaaggataacattacaccttctacttgtcttttaccatgtgtcttctatgatctgcattgatcagtccatctgcctttgtgttctgtgaaaggtgttacaaggaccatcatcacttaaagtttcttcacctggcattcaaagggatattgatccatttatgcgttgtctatttgttatatatatatttttaatactgccgatgtttacaggtctataggcatccttctagaaccgagactgcattaagggttatctggaatcactcaaagacagtattgggaaagcaatattccacaatggctaaaaaacatttacttctttttgaggctatgcgcaaggaatttcctcaagcaaggtttctgtcaattgctcaaacacaattattgcgtgctcatgatgagatcaagatgtccatctcaagacttcagctcaaagagaaagaggatgatcctagcgctgccaatattgtaactagagaggaactcataccatataatgttcagtttacaagtgaaaaattcatgtcactctcatctttagcccgtgtaagaggtcaactccggtacttaaagggattggcggtatgtaacaagaaaacacataaccagcatgatgaatcactggctaaagcaggcgatgctgttgatacagctacttcatgttcagccacagggcaaactgtttctgattttcgtaatgaaccatgcccgatatgccaggagaaggtttttgaccagaaaatggttttccagtgtggtcattttgtatgctgcaagtgttgtctttacatgacagaacaaactgcagcacaattcggaaagcgtaaacaatggattatgtgccccacatgccgccagcgaacagatattgagaacattgcttttgtagttgagaaaccttgggacaaacatgaaaagagcattgaagatttggctgaaagcactatttctgtccaaggttcatatggaacaaagtttgaagctgtcacaagaagaatcttgagaatcacttcaactgatggaacagctaaagttcttgttttctcaagttggaatgatgtactggacgtactagagcactcccttgctgctaacaacatttcatatgttcggatgaaaggaggaagaaaatcacaggcagcactctcccaattcaagggtcaggagagcaatataaatgtagataaagtgaacagggcagcctgcaaaatgcagcctgttcaagtacttctgatgcttatacagcatggagcaaacggtcttaatctactagaggcacagcatgttattctagtggagccattactaaatcctgctgctgaggcacaagctatcagcaggatccatagagttggacaagacaaaagcacatttgttcaccgttttatagtgaagaaaacaatagaagagagcatctacaaattgaacaggagcagagctgtctgctctactataaaccgtaaatccaaaaacttcaaagatgagcctgttttgacgctgaaggatgtggagtcgctattcccgatggcaggacctgatgaacccctagaacaggcagatcaaaattacggcgatagcttgaggagtttgcctccatctgttgccgctgggttagctgctgaaagaaggcgactaatggagcaataagttaatggagtttgcctccatctgttgccgctgggttagctgctgaaagaaggcgactaatcaagggacctccatccatcgttgtggcagttgtgctaattttacttgatcagaatttctcttcgcagcacagtaacgacagtaggagaatgatgctccttagttatgaagcacccccatcatgagaatcaggctatttacgttgtaactttaggattttttttttatgtacctgtaggccttttagactcttgtacataagcttctagttttagttcgtttatacggcccatcctgtagttttgatgtagcagctctcagctctgccactgctacaccaacttatggcatgtataagtgtactaatacatggtcatcagcatgatacattctttagatgcttggtcaattttttagatgcttggtggtggcagagccagtagtcattatggaagaaaattgtcggttgtcctatgctgtctgcagatgtgccggatggtcagtcaggaagatgcagcaaggctttctgatagcttctgcatccgggcccctgctgtgccaggctcgacggcgggcgtcggcgcacgacatccgagtgc

SEQ ID NO: 70765 - DNA, 5855 bp, Zea Mays
caccagtctccctcgcatcgcgtcgtcaccagcctatgctcgatgctcccatagtcccatctcgtgatccttccgctcctatcaaagttcgaggtttctcagaacttgcactcccgattccgcgccggcgtccaaagccccaccgaatggtccaccacaccgtctgaatcatcacatatggggaggaagaaatcgagaccggttcgagctgcgggcgccgcctttgcggcggctgaggccgacccctgtgcgccgagccctagcggcagcacgaagcgtaggaccaagggcgaggcgaggagagacgtctgcgtggaggtggataggagcacgtggggtcacgccgacatcgagcaccgcgacgtcgccgaggtggtcctccgcgacgtgagcgtctacggcgacggggatggggaaggtgcgttggaggaggcattcggggcgtcgacgttctcgttgcgtctgcgggtgcgcgacgcgccggaggaggggttcaggatgggccagtggcccgttgtagagtcggattgcgtgctcctggagtatgtcgtccacgggggccgtgaagggaagcacgcagaatatgtggtctcaggatgttttgatggtcctgatgaaggtgtatcgggtctcgtccatttggtgagcttgagattcatcacgctccgggtccaatcgttcagagcatttcagcatatgggtgaggtgagagttgagtcgtttagggttagagtggaggtgatggaacaggctttcagtgcgtgcggttcgctgctggaggtggctagacatccatggaggaagagtttgatgaatgtgattgcttggctgcgtcctgaggtcacgacatcagctgcgatatatgggttggataaccttggtgtgccaatggatgatggtggtaatgctgatttggtacctaagagtgattcacagtttgatcttgctgctttttatgaggccattaagccttcggcgtgagtatcttacatattactatcactctaacctcataatcatgtgctttaacatgaatatgaaatgaaagcatttaaacttacagacaactacttgctgccattattatgatatacaatatgttcttgtgtgatcagaatctatgatgtgagttatccaaagcatcgttacgattcttaggttgtatcatacttctttactttctggcaattttatgatacttatcttttattcctgttgttagtaatgcaggacagttggaaagggaccttcctgatttaattcctcagctcagaccatatcaacttcgcgcagcgcattggatggttcaacgtgaaaacggaaatacgctccatcaagaatacgctaattctgcaccatattgtgttccttttgattttgttcacaagaattccaggatgttctacaatccgttcaacggaaatatttcatcgcaaccagagccttctccaccttacatctctgggggcattttggctgatgaaatgggcttggggaaaactgtcgagcttttagcgtgcatttttgctcatcgtagaccaatttcattagacttttctgtcttccagaacaaaaccgaaatggatcaaattaagaggcagaaagtagaaagggttgagtgcatctgtggtgctgcgagtgaaagttctgcatacacgggtctatgggtccaatgtgacatttgtgatgcttggcaacatgctgattgtgttggttactcacccaagaggaatatactttttgctgataccactgaagatgtagtatcaacaaacaaaaaaagcaccatgaagtctggatttagaaggaaaaagaaacccaggtgttctattgttgagacagaagacaaatacatttgtgcactgtgcttggagcttattgaagcaactcaaactaatatactcagccatgctacattgatagtatgtcccgcaccaatattggcacaatggcactctgaaattacccgacacacaaggccaggatctctgaaagtttgcatttatgaaggtgcaaggaacttggatccttctaccatccaaaaaaatgatatgactgaaataattactgctgatgttgtcttgacaacatatgatgtcttgaaagaagatctatcacatgattttgatcgtcatgatggcgatcgccgtttcttgagatttcaaaagagatatcccgtcattccaactgtcctgacaaggatccactggtggcgactttgtttggatgaagctcagatggtagagtcaggcaggacttctgtgactgagatggcattgaggctaaatgctcaacaccgttggtgtatcacaggaaccccgatacaacgcaagcttgatgatctctttgggcttctacgttttcttaggacaaacccatttgacacatatagatggtgggtggacattattagagatccatatgagagggggaacaaagtagcaatgaattatgcacacaatttctttagggaaatcatgtggcgttcctccaaaattcatgtctcggctgaactgcagctgcctccacaagaagagtgtttttcatggctcatcttttcttccattgaagagtatttctataagaagcaacatgccacctgcatggaccatgcacatcaaattattagaagtttgagaaatgacaccaatagaagagaatcaatttctgattcaaatgctttgctaaatgtttacctctccaatgacgacattgccaagctcctagtcccactgctgaaacttcggcaggcatgttgccacccacaagtggggagttctggtctctgctccctgcagcataaccctttgtcaatggatgaaattttacaggttcttattggtaaagcaaaaattgaaggagaggaagagctcaggaaaattgtagttgccctgaatggtcttgctggattagctgttattgaacaaaggaaccaagaagccatttctttatacaaagaagcactagcattggctcatgaaaatattaatgatttccgtgttgaccctctgttgaatcttcatatcaactacaatcttgcagaactgcttagaattagttctgagtatttacaagaatgcccattaaaaaatccggcttttgaagttgcaatcagccgaaaaagaaaggaaatagatactgttgagacaaatgtacttagtgtaaaacgaaataaaatatgtgaaaacagtgttttgagtttgacagctaatgggctagaaatatctgaagataaaaacactattggacaaacatgcatgactagagatgtggatgtggagaatgtcactgggtgccactcatcatttgaatgttttgctgatgactgcttgaggaagacttgcaatacaatcacagaaaaatacctgtcaacttttacttcaaggctggtagtagcgcagaaggattttaatgcatcattcacagaggtcttgaatatcactaaagagctacagagtgagtatatgaattggtggctgtatgctttggactgcattgaagagaacaacatttctgctgacgatctgatcaagaagattgataattcttctagtaagagcaccactggtttgggttcatggggaatatcttccaggtctgcagcaaacttgttttaatattctccatgggttaaaagtattgctggcttaaaatatgcaattcaagctgatattgattctctacaaagttcgaggcaacatcttatggatagacttctggaagttgacaaaacaatggctaacccaagggatgaggacattgagggccagcgatattgtccaaactgctatgatggcactggttctctatgtatccagtgtgagctagatgaactctttcagaggtatgaatcacgcctgtttcttgttaagaaatcgaacaatggttctgtcattgattcagtagaagaagcacatgatctactgaggcgaaaatatgagctcaatcacttcttccgtaatagaaaatccaaggagggacctgaacctgactatgacaataacaaccctaggtcagctcgagaaaacatacaggtctataggcatccttctagaaccgagactgcattaagggttatctggaatcactcaaagacagtattgggaaagcaatattccacaatggctaaaaaacatttacttctttttgaggctatgcgcaaggaatttcctcaagcaaggtttctgtcaattgctcaaacacaattattgcgtgctcatgatgagatcaagatgtccatctcaagacttcagctcaaagagaaagaggatgatcctagcgctgccaatattgtaactagagaggaactcataccatataatgttcagtttacaagtgaaaaattcatgtcactctcatctttagcccgtgtaagaggtcaactccggtacttaaaggttgtctttacatgacagaacaaactgcagcacaattcggaaagcgtaaacaatggattatgtgccccacatgccgccagcgaacagatattgagaacattgcttttgtagttgagaaaccttgggacaaacatgaaaagagcattgaagatttggctgaaagcactatttctgtccaaggttcatatggaacaaagtttgaagctgtcacaagaagaatcttgagaatcacttcaactgatggaacagctaaagttcttgttttctcaagttggaatgatgtactggacgtactagagcactcccttgctgctaacaacatttcatatgttcggatgaaaggaggaaggcagcactctcccaattcaagggtcaggagagcaatataaatgtagataaagtgaacagggcagcctgcaaaatgcagcctgttcaagtacttctgatgcttatacagcatggagcaaacggtcttaatctactagaggcacagcatgttattctagtggagccattactaaatcctgctgctgaggcacaagctatcagcaggatccatagagttggacaagacaaaagcacatttgttcaccgttttatagtgaagaaaacaatagaagagagcatctacaaattgaacaggagcagagctgtctgctctactataaaccgtaaatccaaaaacttcaaagatgagcctgttttgacgctgaaggatgtggagtcgctattcccgatggcaggacctgatgaacccctagaacaggcagatcaaaattacggcgatagcttgaggagtttgcctccatctgttgccgctgggttagctgctgaaagaaggcgactaatggagcaataagttaatggagtttgcctccatctgttgccgctgggttagctgctgaaagaaggcgactaatcaagggacctccatccatcgttgtggcagttgtgctaattttacttgatcagaatttctcttcgcagcacagtaacgacagtaggagaatgatgctccttagttatgaagcacccccatcatgagaatcaggctatttacgttgtaactttaggattttttttttatgtacctgtaggccttttagactcttgtacataagcttctagttttagttcgtttatacggcccatcctgtagttttgatgtagcagctctcagctctgccactgctacaccaacttatggcatgtataagtgtactaatacatggtcatcagcatgatacattctttagatgcttggtcaattttttagatgcttggtggtggcagagccagtagtcattatggaagaaaattgtcggttgtcctatgctgtctgcagatgtgccggatggtcagtcaggaagatgcagcaaggctttctgatagcttctgcatccgggcccctgctgtgccaggctcgacggcgggcgtcggcgcacgacatccgagtgc

SEQ ID NO: 70766 - DNA, 5215 bp, Zea Mays
agccaccagtctccctcgcatcgcgtcgtcaccagcctatgctcgatgctcccatagtcccatctcgtgatccttccgctcctatcaaagttcgaggtttctcagaacttgcactcccgattccgcgccggcgtccaaagccccaccgaatggtccaccacaccgtctgaatcatcacatatggggaggaagaaatcgagaccggttcgagctgcgggcgccgcctttgcggcggctgaggccgacccctgtgcgccgagccctagcggcagcacgaagcgtaggaccaagggcgaggcgaggagagacgtctgcgtggaggtggataggagcacgtggggtcacgccgacatcgagcaccgcgacgtcgccgaggacagttggaaagggaccttcctgatttaattcctcagctcagaccatatcaacttcgcgcagcgcattggatggttcaacgtgaaaacggaaatacgctccatcaagaatacgctaattctgcaccatattgtgttccttttgattttgttcacaagaattccaggatgttctacaatccgttcaacggaaatatttcatcgcaaccagagccttctccaccttacatctctgggggcattttggctgatgaaatgggcttggggaaaactgtcgagcttttagcgtgcatttttgctcatcgtagaccaatttcattagacttttctgtcttccagaacaaaaccgaaatggatcaaattaagaggcagaaagtagaaagggttgagtgcatctgtggtgctgcgagtgaaagttctgcatacacgggtctatgggtccaatgtgacatttgtgatgcttggcaacatgctgattgtgttggttactcacccaagaggaatatactttttgctgataccactgaagatgtagtatcaacaaacaaaaaaagcaccatgaagtctggatttagaaggaaaaagaaacccaggtgttctattgttgagacagaagacaaatacatttgtgcactgtgcttggagcttattgaagcaactcaaactaatatactcagccatgctacattgatagtatgtcccgcaccaatattggcacaatggcactctgaaattacccgacacacaaggccaggatctctgaaagtttgcatttatgaaggtgcaaggaacttggatccttctaccatccaaaaaaatgatatgactgaaataattactgctgatgttgtcttgacaacatatgatgtcttgaaagaagatctatcacatgattttgatcgtcatgatggcgatcgccgtttcttgagatttcaaaagagatatcccgtcattccaactgtcctgacaaggatccactggtggcgactttgtttggatgaagctcagatggtagagtcaggcaggacttctgtgactgagatggcattgaggctaaatgctcaacaccgttggtgtatcacaggaaccccgatacaacgcaagcttgatgatctctttgggcttctacgttttcttaggacaaacccatttgacacatatagatggtgggtggacattattagagatccatatgagagggggaacaaagtagcaatgaattatgcacacaatttctttagggaaatcatgtggcgttcctccaaaattcatgtctcggctgaactgcagctgcctccacaagaagagtgtttttcatggctcatcttttcttccattgaagagtatttctataagaagcaacatgccacctgcatggaccatgcacatcaaattattagaagtttgagaaatgacaccaatagaagagaatcaatttctgattcaaatgctttgctaaatgtttacctctccaatgacgacattgccaagctcctagtcccactgctgaaacttcggcaggcatgttgccacccacaagtggggagttctggtctctgctccctgcagcataaccctttgtcaatggatgaaattttacaggttcttattggtaaagcaaaaattgaaggagaggaagagctcaggaaaattgtagttgccctgaatggtcttgctggattagctgttattgaacaaaggaaccaagaagccatttctttatacaaagaagcactagcattggctcatgaaaatattaatgatttccgtgttgaccctctgttgaatcttcatatcaactacaatcttgcagaactgcttagaattagttctgagtatttacaagaatgcccattaaaaaatccggcttttgaagttgcaatcagccgaaaaagaaaggaaatagatactgttgagacaaatgtacttagtgtaaaacgaaataaaatatgtgaaaacagtgttttgagtttgacagctaatgggctagaaatatctgaagataaaaacactattggacaaacatgcatgactagagatgtggatgtggagaatgtcactgggtgccactcatcatttgaatgttttgctgatgactgcttgaggaagacttgcaatacaatcacagaaaaatacctgtcaacttttacttcaaggctggtagtagcgcagaaggattttaatgcatcattcacagaggtcttgaatatcactaaagagctacagagtgagtatatgaattggtggctgtatgctttggactgcattgaagagaacaacatttctgctgacgatctgatcaagaagattgataattcttctagtaagagcaccactggtttgggttcatggggaatatcttccaggtctgcagcaaacttgttttaatattctccatgggttaaaagtattgctggcttaaaatatgcaattcaagctgatattgattctctacaaagttcgaggcaacatcttatggatagacttctggaagttgacaaaacaatggctaacccaagggatgaggacattgagggccagcgatattgtccaaactgctatgatggcactggttctctatgtatccagtgtgagctagatgaactctttcagaggtatgaatcacgcctgtttcttgttaagaaatcgaacaatggttctgtcattgattcagtagaagaagcacatgatctactgaggcgaaaatatgagctcaatcacttcttccgtaatagaaaatccaaggagggacctgaacctgactatgacaataacaaccctaggtcagctcgagaaaacatacaggtctataggcatccttctagaaccgagactgcattaagggttatctggaatcactcaaagacagtattgggaaagcaatattccacaatggctaaaaaacatttacttctttttgaggctatgcgcaaggaatttcctcaagcaaggtttctgtcaattgctcaaacacaattattgcgtgctcatgatgagatcaagatgtccatctcaagacttcagctcaaagagaaagaggatgatcctagcgctgccaatattgtaactagagaggaactcataccatataatgttcagtttacaagtgaaaaattcatgtcactctcatctttagcccgtgtaagaggtcaactccggtacttaaagggattggcggtatgtaacaagaaaacacataaccagcatgatgaatcactggctaaagcaggcgatgctgttgatacagctacttcatgttcagccacagggcaaactgtttctgattttcgtaatgaaccatgcccgatatgccaggagaaggtttttgaccagaaaatggttttccagtgtggtcattttgtatgctgcaagtgttgtctttacatgacagaacaaactgcagcacaattcggaaagcgtaaacaatggattatgtgccccacatgccgccagcgaacagatattgagaacattgcttttgtagttgagaaaccttgggacaaacatgaaaagagcattgaagatttggctgaaagcactatttctgtccaaggttcatatggaacaaagtttgaagctgtcacaagaagaatcttgagaatcacttcaactgatggaacagctaaagttcttgttttctcaagttggaatgatgtactggacgtactagagcactcccttgctgctaacaacatttcatatgttcggatgaaaggaggaagaaaatcacaggcagcactctcccaattcaagggtcaggagagcaatataaatgtagataaagtgaacagggcagcctgcaaaatgcagcctgttcaagtacttctgatgcttatacagcatggagcaaacggtcttaatctactagaggcacagcatgttattctagtggagccattactaaatcctgctgctgaggcacaagctatcagcaggatccatagagttggacaagacaaaagcacatttgttcaccgttttatagtgaagaaaacaatagaagagagcatctacaaattgaacaggagcagagctgtctgctctactataaaccgtaaatccaaaaacttcaaagatgagcctgttttgacgctgaaggatgtggagtcgctattcccgatggcaggacctgatgaacccctagaacaggcagatcaaaattacggcgatagcttgaggagtttgcctccatctgttgccgctgggttagctgctgaaagaaggcgactaatggagcaataagttaatggagtttgcctccatctgttgccgctgggttagctgctgaaagaaggcgactaatcaagggacctccatccatcgttgtggcagttgtgctaattttacttgatcagaatttctcttcgcagcacagtaacgacagtaggagaatgatgctccttagttatgaagcacccccatcatgagaatcaggctatttacgttgtaactttaggattttttttttatgtacctgtaggccttttagactcttgtacataagcttctagttttagttcgtttatacggcccatcctgtagttttgatgtagcagctctcagctctgccactgctacaccaacttatggcatgtataagtgtactaatacatggtcatcagcatgatacattctttagatgcttggtcaattttttagatgcttggtggtggcagagccagtagtcattatggaagaaaattgtcggttgtcctatgctgtctgcagatgtgccggatggtcagtcaggaagatgcagcaaggctttctgatagcttctgcatccgggcccctgctgtgccaggctcgacggcgggcgtcggcgcacgacatccgagtgc

SEQ ID NO: 70767 - DNA, 5298 bp, Zea Mays
aggatacaagccaccagtctccctcgcatcgcgtcgtcaccagcctatgctcgatgctcccatagtcccatctcgtgatccttccgctcctatcaaagttcgaggtttctcagaacttgcactcccgattccgcgccggcgtccaaagccccaccgaatggtccaccacaccgtctgaatcatcacatatggggaggaagaaatcgagaccggttcgagctgcgggcgccgcctttgcggcggctgaggccgacccctgtgcgccgagccctagcggcagcacgaagcgtaggaccaagggcgaggcgaggagagacgtctgcgtggaggtggataggagcacgtggggtcacgccgacatcgagcaccgcgacgtcgccgaggtggtcctccgcgacgtgagcgtctacggcgacggggatggggaaggtgcgttggaggaggcattcggggcgtcgacgttctcgttgcgtctgcgggtgcgcgacgcgccggaggaggggttcaggatgggccagtggcccgttgtagagtcggattgcgtgctcctggagtatgtcgtccacgggggccgtgaagggaagcacgcagaatatgtggtctcaggatgttttgatggtcctgatgaaggtgtatcgggtctcgtccatttggtgagcttgagattcatcacgctccgggtccaatcgttcagagcatttcagcatatgggtgaggtgagagttgagtcgtttagggttagagtggaggtgatggaacaggctttcagtgcgtgcggttcgctgctggaggtggctagacatccatggaggaagagtttgatgaatgtgattgcttggctgcgtcctgaggtcacgacatcagctgcgatatatgggttggataaccttggtgtgccaatggatgatggtggtaatgctgatttggtacctaagagtgattcacagtttgatcttgctgctttttatgaggccattaagccttcggctaatgcaggacagttggaaagggaccttcctgatttaattcctcagctcagaccatatcaacttcgcgcagcgcattggatggttcaacgtgaaaacggaaatacgctccatcaagaatacgctaattctgcaccatattgtgttccttttgattttgttcacaagaattccaggatgttctacaatccgttcaacggaaatatttcatcgcaaccagagccttctccaccttacatctctgggggcattttggctgaacaaaaccgaaatggatcaaattaagaggcagaaagtagaaagggttgagtgcatctgtggtgctgcgagtgaaagttctgcatacacgggtctatgggtccaatgtgacatttgtgatgcttggcaacatgctgattgtgttggttactcacccaagaggaatatactttttgctgataccactgaagatgtagtatcaacaaacaaaaaaagcaccatgaagtctggatttagaaggaaaaagaaacccaggtgttctattgttgagacagaagacaaatacatttgtgcactgtgcttggagcttattgaagcaactcaaactaatatactcagccatgctacattgatagtatgtcccgcaccaatattggcacaatggcactctgaaattacccgacacacaaggccaggatctctgaaagtttgcatttatgaaggtgcaaggaacttggatccttctaccatccaaaaaaatgatatgactgaaataattactgctgatgttgtcttgacaacatatgatgtcttgaaagaagatctatcacatgattttgatcgtcatgatggcgatcgccgtttcttgagatttcaaaagagatatcccgtcattccaactgtcctgacaaggatccactggtggcgactttgtttggatgaagctcagatggtagagtcaggcaggacttctgtgactgagatggcattgaggctaaatgctcaacaccgttggtgtatcacaggaaccccgatacaacgcaagcttgatgatctctttgggcttctacgttttcttaggacaaacccatttgacacatatagatggtgggtggacattattagagatccatatgagattcaaatgctttgctaaatgtttacctctccaatgacgacattgccaagctcctagtcccactgctgaaacttcggcaggcatgttgccacccacaagtggggagttctggtctctgctccctgcagcataaccctttgtcaatggatgaaattttacaggttcttattggtaaagcaaaaattgaaggagaggaagagctcaggaaaattgtagttgccctgaatggtcttgctggattagctgttattgaacaaaggaaccaagaagccatttctttatacaaagaagcactagcattggctcatgaaaatattaatgatttccgtgttgaccctctgttgaatcttcatatcaactacaatcttgcagaactgcttagaattagttctgagtatttacaagaatgcccattaaaaaatccggcttttgaagttgcaatcagccgaaaaagaaaggaaatagatactgttgagacaaatgtacttagtgtaaaacgaaataaaatatgtgaaaacagtgttttgagtttgacagctaatgggctagaaatatctgaagataaaaacactattggacaaacatgcatgactagagatgtggatgtggagaatgtcactgggtgccactcatcatttgaatgttttgctgatgactgcttgaggaagacttgcaatacaatcacagaaaaatacctgtcaacttttacttcaaggctggtagtagcgcagaaggattttaatgcatcattcacagaggtcttgaatatcactaaagagctacagagtgagtatatgaattggtggctgtatgctttggactgcattgaagagaacaacatttctgctgacgatctgatcaagaagattgataattcttctagtaagagcaccactggtttgggttcatggggaatatcttccaggtctgcagcaaacttgttttaatattctccatgggttaaaagtattgctggcttaaaatatgcaattcaagctgatattgattctctacaaagttcgaggcaacatcttatggatagacttctggaagttgacaaaacaatggctaacccaagggatgaggacattgagggccagcgatattgtccaaactgctatgatggcactggttctctatgtatccagtgtgagctagatgaactctttcagaggtatgaatcacgcctgtttcttgttaagaaatcgaacaatggttctgtcattgattcagtagaagaagcacatgatctactgaggcgaaaatatgagctcaatcacttcttccgtaatagaaaatccaaggagggacctgaacctgactatgacaataacaaccctaggtcagctcgagaaaacatacaggtctataggcatccttctagaaccgagactgcattaagggttatctggaatcactcaaagacagtattgggaaagcaatattccacaatggctaaaaaacatttacttctttttgaggctatgcgcaaggaatttcctcaagcaaggtttctgtcaattgctcaaacacaattattgcgtgctcatgatgagatcaagatgtccatctcaagacttcagctcaaagagaaagaggatgatcctagcgctgccaatattgtaactagagaggaactcataccatataatgttcagtttacaagtgaaaaattcatgtcactctcatctttagcccgtgtaagaggtcaactccggtacttaaaggttgtctttacatgacagaacaaactgcagcacaattcggaaagcgtaaacaatggattatgtgccccacatgccgccagcgaacagatattgagaacattgcttttgtagttgagaaaccttgggacaaacatgaaaagagcattgaagatttggctgaaagcactatttctgtccaaggttcatatggaacaaagtttgaagctgtcacaagaagaatcttgagaatcacttcaactgatggaacagctaaagttcttgttttctcaagttggaatgatgtactggacgtactagagcactcccttgctgctaacaacatttcatatgttcggatgaaaggaggaagaaaatcacaggcagcactctcccaattcaagggtcaggagagcaatataaatgtagataaagtgaacagggcagcctgcaaaatgcagcctgttcaagtacttctgatgcttatacagcatggagcaaacggtcttaatctactagaggcacagcatgttattctagtggagccattactaaatcctgctgctgaggcacaagctatcagcaggatccatagagttggacaagacaaaagcacatttgttcaccgttttatagtgaagaaaacaatagaagagagcatctacaaattgaacaggagcagagctgtctgctctactataaaccgtaaatccaaaaacttcaaagatgagcctgttttgacgctgaaggatgtggagtcgctattcccgatggcaggacctgatgaacccctagaacaggcagatcaaaattacggcgatagcttgaggagtttgcctccatctgttgccgctgggttagctgctgaaagaaggcgactaatggagcaataagttaatggagtttgcctccatctgttgccgctgggttagctgctgaaagaaggcgactaatcaagggacctccatccatcgttgtggcagttgtgctaattttacttgatcagaatttctcttcgcagcacagtaacgacagtaggagaatgatgctccttagttatgaagcacccccatcatgagaatcaggctatttacgttgtaactttaggattttttttttatgtacctgtaggccttttagactcttgtacataagcttctagttttagttcgtttatacggcccatcctgtagttttgatgtagcagctctcagctctgccactgctacaccaacttatggcatgtataagtgtactaatacatggtcatcagcatgatacattctttagatgcttggtcaattttttagatgcttggtggtggcagagccagtagtcattatggaagaaaattgtcggttgtcctatgctgtctgcagatgtgccggatggtcagtcaggaagatgcagcaaggctttctgatagcttctgcatccgggcccctgctgtgccaggctcgacggcgggcgtcggcgcacgacatccgagtgc

SEQ ID NO: 70768 - DNA, 5632 bp, Zea Mays
aaggatacaagccaccagtctccctcgcatcgcgtcgtcaccagcctatgctcgatgctcccatagtcccatctcgtgatccttccgctcctatcaaagttcgaggtttctcagaacttgcactcccgattccgcgccggcgtccaaagccccaccgaatggtccaccacaccgtctgaatcatcacatatggggaggaagaaatcgagaccggttcgagctgcgggcgccgcctttgcggcggctgaggccgacccctgtgcgccgagccctagcggcagcacgaagcgtaggaccaagggcgaggcgaggagagacgtctgcgtggaggtggataggagcacgtggggtcacgccgacatcgagcaccgcgacgtcgccgaggtggtcctccgcgacgtgagcgtctacggcgacggggatggggaaggtgcgttggaggaggcattcggggcgtcgacgttctcgttgcgtctgcgggtgcgcgacgcgccggaggaggggttcaggatgggccagtggcccgttgtagagtcggattgcgtgctcctggagtatgtcgtccacgggggccgtgaagggaagcacgcagaatatgtggtctcaggatgttttgatggtcctgatgaaggtgtatcgggtctcgtccatttggtgagcttgagattcatcacgctccgggtccaatcgttcagagcatttcagcatatgggtgaggtgagagttgagtcgtttagggttagagtggaggtgatggaacaggctttcagtgcgtgcggttcgctgctggaggtggctagacatccatggaggaagagtttgatgaatgtgattgcttggctgcgtcctgaggtcacgacatcagctgcgatatatgggttggataaccttggtgtgccaatggatgatggtggtaatgctgatttggtacctaagagtgattcacagtttgatcttgctgctttttatgaggccattaagccttcggctaatgcaggacagttggaaagggaccttcctgatttaattcctcagctcagaccatatcaacttcgcgcagcgcattggatggttcaacgtgaaaacggaaatacgctccatcaagaatacgctaattctgcaccatattgtgttccttttgattttgttcacaagaattccaggatgttctacaatccgttcaacggaaatatttcatcgcaaccagagccttctccaccttacatctctgggggcattttggctgatgaaatgggcttggggaaaactgtcgagcttttagcgtgcatttttgctcatcgtagaccaatttcattagacttttctgtcttccagaacaaaaccgaaatggatcaaattaagaggcagaaagtagaaagggttgagtgcatctgtggtgctgcgagtgaaagttctgcatacacgggtctatgggtccaatgtgacatttgtgatgcttggcaacatgctgattgtgttggttactcacccaagaggaatatactttttgctgataccactgaagatgtagtatcaacaaacaaaaaaagcaccatgaagtctggatttagaaggaaaaagaaacccaggtgttctattgttgagacagaagacaaatacatttgtgcactgtgcttggagcttattgaagcaactcaaactaatatactcagccatgctacattgatagtatgtcccgcaccaatattggcacaatggcactctgaaattacccgacacacaaggccaggatctctgaaagtttgcatttatgaaggtgcaaggaacttggatccttctaccatccaaaaaaatgatatgactgaaataattactgctgatgttgtcttgacaacatatgatgtcttgaaagaagatctatcacatgattttgatcgtcatgatggcgatcgccgtttcttgagatttcaaaagagatatcccgtcattccaactgtcctgacaaggatccactggtggcgactttgtttggatgaagctcagatggtagagtcaggcaggacttctgtgactgagatggcattgaggctaaatgctcaacaccgttggtgtatcacaggaaccccgatacaacgcaagcttgatgatctctttgggcttctacgttttcttaggacaaacccatttgacacatatagatggtgggtggacattattagagatccatatgagagggggaacaaagtagcaatgaattatgcacacaatttctttagggaaatcatgtggcgttcctccaaaattcatgtctcggctgaactgcagctgcctccacaagaagagtgtttttcatggctcatcttttcttccattgaagagtatttctataagaagcaacatgccacctgcatggaccatgcacatcaaattattagaagtttgagaaatgacaccaatagaagagaatcaatttctgattcaaatgctttgctaaatgtttacctctccaatgacgacattgccaagctcctagtcccactgctgaaacttcggcaggcatgttgccacccacaagtggggagttctggtctctgctccctgcagcataaccctttgtcaatggatgaaattttacaggttcttattggtaaagcaaaaattgaaggagaggaagagctcaggaaaattgtagttgccctgaatggtcttgctggattagctgttattgaacaaaggaaccaagaagccatttctttatacaaagaagcactagcattggctcatgaaaatattaatgatttccgtgttgaccctctgttgaatcttcatatcaactacaatcttgcagaactgcttagaattagttctgagtatttacaagaatgcccattaaaaaatccggcttttgaagttgcaatcagccgaaaaagaaaggaaatagatactgttgagacaaatgtacttagtgtaaaacgaaataaaatatgtgaaaacagtgttttgagtttgacagctaatgggctagaaatatctgaagataaaaacactattggacaaacatgcatgactagagatgtggatgtggagaatgtcactgggtgccactcatcatttgaatgttttgctgatgactgcttgaggaagacttgcaatacaatcacagaaaaatacctgtcaacttttacttcaaggctggtagtagcgcagaaggattttaatgcatcattcacagaggtcttgaatatcactaaagagctacagagtgagtatatgaattggtggctgtatgctttggactgcattgaagagaacaacatttctgctgacgatctgatcaagaagattgataattcttctagtaagagcaccactggtttgggttcatggggaatatcttccaggtctgcagcaaacttgttttaatattctccatgggttaaaagtattgctggcttaaaatatgcaattcaagctgatattgattctctacaaagttcgaggcaacatcttatggatagacttctggaagttgacaaaacaatggctaacccaagggatgaggacattgagggccagcgatattgtccaaactgctatgatggcactggttctctatgtatccagtgtgagctagatgaactctttcagaggtatgaatcacgcctgtttcttgttaagaaatcgaacaatggttctgtcattgattcagtagaagaagcacatgatctactgaggcgaaaatatgagctcaatcacttcttccgtaatagaaaatccaaggagggacctgaacctgactatgacaataacaaccctaggtcagctcgagaaaacatacaggtctataggcatccttctagaaccgagactgcattaagggttatctggaatcactcaaagacagtattgggaaagcaatattccacaatggctaaaaaacatttacttctttttgaggctatgcgcaaggaatttcctcaagcaaggtttctgtcaattgctcaaacacaattattgcgtgctcatgatgagatcaagatgtccatctcaagacttcagctcaaagagaaagaggatgatcctagcgctgccaatattgtaactagagaggaactcataccatataatgttcagtttacaagtgaaaaattcatgtcactctcatctttagcccgtgtaagaggtcaactccggtacttaaaggttgtctttacatgacagaacaaactgcagcacaattcggaaagcgtaaacaatggattatgtgccccacatgccgccagcgaacagatattgagaacattgcttttgtagttgagaaaccttgggacaaacatgaaaagagcattgaagatttggctgaaagcactatttctgtccaaggttcatatggaacaaagtttgaagctgtcacaagaagaatcttgagaatcacttcaactgatggaacagctaaagttcttgttttctcaagttggaatgatgtactggacgtactagagcactcccttgctgctaacaacatttcatatgttcggatgaaaggaggaagaaaatcacaggcagcactctcccaattcaagggtcaggagagcaatataaatgtagataaagtgaacagggcagcctgcaaaatgcagcctgttcaagtacttctgatgcttatacagcatggagcaaacggtcttaatctactagaggcacagcatgttattctagtggagccattactaaatcctgctgctgaggcacaagctatcagcaggatccatagagttggacaagacaaaagcacatttgttcaccgttttatagtgaagaaaacaatagaagagagcatctacaaattgaacaggagcagagctgtctgctctactataaaccgtaaatccaaaaacttcaaagatgagcctgttttgacgctgaaggatgtggagtcgctattcccgatggcaggacctgatgaacccctagaacaggcagatcaaaattacggcgatagcttgaggagtttgcctccatctgttgccgctgggttagctgctgaaagaaggcgactaatggagcaataagttaatggagtttgcctccatctgttgccgctgggttagctgctgaaagaaggcgactaatcaagggacctccatccatcgttgtggcagttgtgctaattttacttgatcagaatttctcttcgcagcacagtaacgacagtaggagaatgatgctccttagttatgaagcacccccatcatgagaatcaggctatttacgttgtaactttaggattttttttttatgtacctgtaggccttttagactcttgtacataagcttctagttttagttcgtttatacggcccatcctgtagttttgatgtagcagctctcagctctgccactgctacaccaacttatggcatgtataagtgtactaatacatggtcatcagcatgatacattctttagatgcttggtcaattttttagatgcttggtggtggcagagccagtagtcattatggaagaaaattgtcggttgtcctatgctgtctgcagatgtgccggatggtcagtcaggaagatgcagcaaggctttctgatagcttctgcatccgggcccctgctgtgccaggctcgacggcgggcgtcggcgcacgacatccgagtgc

SEQ ID NO: 70769 - DNA, 5560 bp, Zea Mays
aaggatacaagccaccagtctccctcgcatcgcgtcgtcaccagcctatgctcgatgctcccatagtcccatctcgtgatccttccgctcctatcaaagttcgaggtttctcagaacttgcactcccgattccgcgccggcgtccaaagccccaccgaatggtccaccacaccgtctgaatcatcacatatggggaggaagaaatcgagaccggttcgagctgcgggcgccgcctttgcggcggctgaggccgacccctgtgcgccgagccctagcggcagcacgaagcgtaggaccaagggcgaggcgaggagagacgtctgcgtggaggtggataggagcacgtggggtcacgccgacatcgagcaccgcgacgtcgccgaggtggtcctccgcgacgtgagcgtctacggcgacggggatggggaaggtgcgttggaggaggcattcggggcgtcgacgttctcgttgcgtctgcgggtgcgcgacgcgccggaggaggggttcaggatgggccagtggcccgttgtagagtcggattgcgtgctcctggagtatgtcgtccacgggggccgtgaagggaagcacgcagaatatgtggtctcaggatgttttgatggtcctgatgaaggtgtatcgggtctcgtccatttggtgagcttgagattcatcacgctccgggtccaatcgttcagagcatttcagcatatgggtgaggtgagagttgagtcgtttagggttagagtggaggtgatggaacaggctttcagtgcgtgcggttcgctgctggaggtggctagacatccatggaggaagagtttgatgaatgtgattgcttggctgcgtcctgaggtcacgacatcagctgcgatatatgggttggataaccttggtgtgccaatggatgatggtggtaatgctgatttggtacctaagagtgattcacagtttgatcttgctgctttttatgaggccattaagccttcggctaatgcaggacagttggaaagggaccttcctgatttaattcctcagctcagaccatatcaacttcgcgcagcgcattggatggttcaacgtgaaaacggaaatacgctccatcaagaatacgctaattctgcaccatattgtgttccttttgattttgttcacaagaattccaggatgttctacaatccgttcaacggaaatatttcatcgcaaccagagccttctccaccttacatctctgggggcattttggctgatgaaatgggcttggggaaaactgtcgagcttttagcgtgcatttttgctcatcgtagaccaatttcattagacttttctgtcttccagaacaaaaccgaaatggatcaaattaagaggcagaaagtagaaagggttgagtgcatctgtggtgctgcgagtgaaagttctgcatacacgggtctatgggtccaatgtgacatttgtgatgcttggcaacatgctgattgtgttggttactcacccaagaggaatatactttttgctgataccactgaagatgtagtatcaacaaacaaaaaaagcaccatgaagtctggatttagaaggaaaaagaaacccaggtgttctattgttgagacagaagacaaatacatttgtgcactgtgcttggagcttattgaagcaactcaaactaatatactcagccatgctacattgatagtatgtcccgcaccaatattggcacaatggcactctgaaattacccgacacacaaggccaggatctctgaaagtttgcatttatgaaggtgcaaggaacttggatccttctaccatccaaaaaaatgatatgactgaaataattactgctgatgttgtcttgacaacatatgatgtcttgaaagaagatctatcacatgattttgatcgtcatgatggcgatcgccgtttcttgagatttcaaaagagatatcccgtcattccaactgtcctgacaaggatccactggtggcgactttgtttggatgaagctcagatggtagagtcaggcaggacttctgtgactgagatggcattgaggctaaatgctcaacaccgttggtgtatcacaggaaccccgatacaacgcaagcttgatgatctctttgggcttctacgttttcttaggacaaacccatttgacacatatagatggtgggtggacattattagagatccatatgagattcaaatgctttgctaaatgtttacctctccaatgacgacattgccaagctcctagtcccactgctgaaacttcggcaggcatgttgccacccacaagtggggagttctggtctctgctccctgcagcataaccctttgtcaatggatgaaattttacaggttcttattggtaaagcaaaaattgaaggagaggaagagctcaggaaaattgtagttgccctgaatggtcttgctggattagctgttattgaacaaaggaaccaagaagccatttctttatacaaagaagcactagcattggctcatgaaaatattaatgatttccgtgttgaccctctgttgaatcttcatatcaactacaatcttgcagaactgcttagaattagttctgagtatttacaagaatgcccattaaaaaatccggcttttgaagttgcaatcagccgaaaaagaaaggaaatagatactgttgagacaaatgtacttagtgtaaaacgaaataaaatatgtgaaaacagtgttttgagtttgacagctaatgggctagaaatatctgaagataaaaacactattggacaaacatgcatgactagagatgtggatgtggagaatgtcactgggtgccactcatcatttgaatgttttgctgatgactgcttgaggaagacttgcaatacaatcacagaaaaatacctgtcaacttttacttcaaggctggtagtagcgcagaaggattttaatgcatcattcacagaggtcttgaatatcactaaagagctacagagtgagtatatgaattggtggctgtatgctttggactgcattgaagagaacaacatttctgctgacgatctgatcaagaagattgataattcttctagtaagagcaccactggtttgggttcatggggaatatcttccagggttaaaagtattgctggcttaaaatatgcaattcaagctgatattgattctctacaaagttcgaggcaacatcttatggatagacttctggaagttgacaaaacaatggctaacccaagggatgaggacattgagggccagcgatattgtccaaactgctatgatggcactggttctctatgtatccagtgtgagctagatgaactctttcagaggtatgaatcacgcctgtttcttgttaagaaatcgaacaatggttctgtcattgattcagtagaagaagcacatgatctactgaggcgaaaatatgagctcaatcacttcttccgtaatagaaaatccaaggagggacctgaacctgactatgacaataacaaccctaggtcagctcgagaaaacatacaggtctataggcatccttctagaaccgagactgcattaagggttatctggaatcactcaaagacagtattgggaaagcaatattccacaatggctaaaaaacatttacttctttttgaggctatgcgcaaggaatttcctcaagcaaggtttctgtcaattgctcaaacacaattattgcgtgctcatgatgagatcaagatgtccatctcaagacttcagctcaaagagaaagaggatgatcctagcgctgccaatattgtaactagagaggaactcataccatataatgttcagtttacaagtgaaaaattcatgtcactctcatctttagcccgtgtaagaggtcaactccggtacttaaagggattggcggtatgtaacaagaaaacacataaccagcatgatgaatcactggctaaagcaggcgatgctgttgatacagctacttcatgttcagccacagggcaaactgtttctgattttcgtaatgaaccatgcccgatatgccaggagaaggtttttgaccagaaaatggttttccagtgtggtcattttgtatgctgcaagtgttgtctttacatgacagaacaaactgcagcacaattcggaaagcgtaaacaatggattatgtgccccacatgccgccagcgaacagatattgagaacattgcttttgtagttgagaaaccttgggacaaacatgaaaagagcattgaagatttggctgaaagcactatttctgtccaaggttcatatggaacaaagtttgaagctgtcacaagaagaatcttgagaatcacttcaactgatggaacagctaaagttcttgttttctcaagttggaatgatgtactggacgtactagagcactcccttgctgctaacaacatttcatatgttcggatgaaaggaggaagaaaatcacaggcagcactctcccaattcaagggtcaggagagcaatataaatgtagataaagtgaacagggcagcctgcaaaatgcagcctgttcaagtacttctgatgcttatacagcatggagcaaacggtcttaatctactagaggcacagcatgttattctagtggagccattactaaatcctgctgctgaggcacaagctatcagcaggatccatagagttggacaagacaaaagcacatttgttcaccgttttatagtgaagaaaacaatagaagagagcatctacaaattgaacaggagcagagctgtctgctctactataaaccgtaaatccaaaaacttcaaagatgagcctgttttgacgctgaaggatgtggagtcgctattcccgatggcaggacctgatgaacccctagaacaggcagatcaaaattacggcgatagcttgaggagtttgcctccatctgttgccgctgggttagctgctgaaagaaggcgactaatggagcaataagttaatggagtttgcctccatctgttgccgctgggttagctgctgaaagaaggcgactaatcaagggacctccatccatcgttgtggcagttgtgctaattttacttgatcagaatttctcttcgcagcacagtaacgacagtaggagaatgatgctccttagttatgaagcacccccatcatgagaatcaggctatttacgttgtaactttaggattttttttttatgtacctgtaggccttttagactcttgtacataagcttctagttttagttcgtttatacggcccatcctgtagttttgatgtagcagctctcagctctgccactgctacaccaacttatggcatgtataagtgtactaatacatggtcatcagcatgatacattctttagatgcttggtcaattttttagatgcttggtggtggcagagccagtagtcattatggaagaaaattgtcggttgtcctatgctgtctgcagatgtgccggatggtcagtcaggaagatgcagcaaggctttctgatagcttctgcatccgggcccctgctgtgccaggctcgacggcgggcgtcggcgcacgacatccgagtgc

SEQ ID NO: 70770 - DNA, 5804 bp, Zea Mays
aaggatacaagccaccagtctccctcgcatcgcgtcgtcaccagcctatgctcgatgctcccatagtcccatctcgtgatccttccgctcctatcaaagttcgaggtttctcagaacttgcactcccgattccgcgccggcgtccaaagccccaccgaatggtccaccacaccgtctgaatcatcacatatggggaggaagaaatcgagaccggttcgagctgcgggcgccgcctttgcggcggctgaggccgacccctgtgcgccgagccctagcggcagcacgaagcgtaggaccaagggcgaggcgaggagagacgtctgcgtggaggtggataggagcacgtggggtcacgccgacatcgagcaccgcgacgtcgccgaggtggtcctccgcgacgtgagcgtctacggcgacggggatggggaaggtgcgttggaggaggcattcggggcgtcgacgttctcgttgcgtctgcgggtgcgcgacgcgccggaggaggggttcaggatgggccagtggcccgttgtagagtcggattgcgtgctcctggagtatgtcgtccacgggggccgtgaagggaagcacgcagaatatgtggtctcaggatgttttgatggtcctgatgaaggtgtatcgggtctcgtccatttggtgagcttgagattcatcacgctccgggtccaatcgttcagagcatttcagcatatgggtgaggtgagagttgagtcgtttagggttagagtggaggtgatggaacaggctttcagtgcgtgcggttcgctgctggaggtggctagacatccatggaggaagagtttgatgaatgtgattgcttggctgcgtcctgaggtcacgacatcagctgcgatatatgggttggataaccttggtgtgccaatggatgatggtggtaatgctgatttggtacctaagagtgattcacagtttgatcttgctgctttttatgaggccattaagccttcggctaatgcaggacagttggaaagggaccttcctgatttaattcctcagctcagaccatatcaacttcgcgcagcgcattggatggttcaacgtgaaaacggaaatacgctccatcaagaatacgctaattctgcaccatattgtgttccttttgattttgttcacaagaattccaggatgttctacaatccgttcaacggaaatatttcatcgcaaccagagccttctccaccttacatctctgggggcattttggctgatgaaatgggcttggggaaaactgtcgagcttttagcgtgcatttttgctcatcgtagaccaatttcattagacttttctgtcttccagaacaaaaccgaaatggatcaaattaagaggcagaaagtagaaagggttgagtgcatctgtggtgctgcgagtgaaagttctgcatacacgggtctatgggtccaatgtgacatttgtgatgcttggcaacatgctgattgtgttggttactcacccaagaggaatatactttttgctgataccactgaagatgtagtatcaacaaacaaaaaaagcaccatgaagtctggatttagaaggaaaaagaaacccaggtgttctattgttgagacagaagacaaatacatttgtgcactgtgcttggagcttattgaagcaactcaaactaatatactcagccatgctacattgatagtatgtcccgcaccaatattggcacaatggcactctgaaattacccgacacacaaggccaggatctctgaaagtttgcatttatgaaggtgcaaggaacttggatccttctaccatccaaaaaaatgatatgactgaaataattactgctgatgttgtcttgacaacatatgatgtcttgaaagaagatctatcacatgattttgatcgtcatgatggcgatcgccgtttcttgagatttcaaaagagatatcccgtcattccaactgtcctgacaaggatccactggtggcgactttgtttggatgaagctcagatggtagagtcaggcaggacttctgtgactgagatggcattgaggctaaatgctcaacaccgttggtgtatcacaggaaccccgatacaacgcaagcttgatgatctctttgggcttctacgttttcttaggacaaacccatttgacacatatagatggtgggtggacattattagagatccatatgagagggggaacaaagtagcaatgaattatgcacacaatttctttagggaaatcatgtggcgttcctccaaaattcatgtctcggctgaactgcagctgcctccacaagaagagtgtttttcatggctcatcttttcttccattgaagagtatttctataagaagcaacatgccacctgcatggaccatgcacatcaaattattagaagtttgagaaatgacaccaatagaagagaatcaatttctgattcaaatgctttgctaaatgtttacctctccaatgacgacattgccaagctcctagtcccactgctgaaacttcggcaggcatgttgccacccacaagtggggagttctggtctctgctccctgcagcataaccctttgtcaatggatgaaattttacaggttcttattggtaaagcaaaaattgaaggagaggaagagctcaggaaaattgtagttgccctgaatggtcttgctggattagctgttattgaacaaaggaaccaagaagccatttctttatacaaagaagcactagcattggctcatgaaaatattaatgatttccgtgttgaccctctgttgaatcttcatatcaactacaatcttgcagaactgcttagaattagttctgagtatttacaagaatgcccattaaaaaatccggcttttgaagttgcaatcagccgaaaaagaaaggaaatagatactgttgagacaaatgtacttagtgtaaaacgaaataaaatatgtgaaaacagtgttttgagtttgacagctaatgggctagaaatatctgaagataaaaacactattggacaaacatgcatgactagagatgtggatgtggagaatgtcactgggtgccactcatcatttgaatgttttgctgatgactgcttgaggaagacttgcaatacaatcacagaaaaatacctgtcaacttttacttcaaggctggtagtagcgcagaaggattttaatgcatcattcacagaggtcttgaatatcactaaagagctacagagtgagtatatgaattggtggctgtatgctttggactgcattgaagagaacaacatttctgctgacgatctgatcaagaagattgataattcttctagtaagagcaccactggtttgggttcatggggaatatcttccagggttaaaagtattgctggcttaaaatatgcaattcaagctgatattgattctctacaaagttcgaggcaacatcttatggatagacttctggaagttgacaaaacaatggctaacccaagggatgaggacattgagggccagcgatattgtccaaactgctatgatggcactggttctctatgtatccagtgtgagctagatgaactctttcagaggtatgaatcacgcctgtttcttgttaagaaatcgaacaatggttctgtcattgattcagtagaagaagcacatgatctactgaggcgaaaatatgagctcaatcacttcttccgtaatagaaaatccaaggagggacctgaacctgactatgacaataacaaccctaggtcagctcgagaaaacatacaggtctataggcatccttctagaaccgagactgcattaagggttatctggaatcactcaaagacagtattgggaaagcaatattccacaatggctaaaaaacatttacttctttttgaggctatgcgcaaggaatttcctcaagcaaggtttctgtcaattgctcaaacacaattattgcgtgctcatgatgagatcaagatgtccatctcaagacttcagctcaaagagaaagaggatgatcctagcgctgccaatattgtaactagagaggaactcataccatataatgttcagtttacaagtgaaaaattcatgtcactctcatctttagcccgtgtaagaggtcaactccggtacttaaagggattggcggtatgtaacaagaaaacacataaccagcatgatgaatcactggctaaagcaggcgatgctgttgatacagctacttcatgttcagccacagggcaaactgtttctgattttcgtaatgaaccatgcccgatatgccaggagaaggtttttgaccagaaaatggttttccagtgtggtcattttgtatgctgcaagtgttgtctttacatgacagaacaaactgcagcacaattcggaaagcgtaaacaatggattatgtgccccacatgccgccagcgaacagatattgagaacattgcttttgtagttgagaaaccttgggacaaacatgaaaagagcattgaagatttggctgaaagcactatttctgtccaaggttcatatggaacaaagtttgaagctgtcacaagaagaatcttgagaatcacttcaactgatggaacagctaaagttcttgttttctcaagttggaatgatgtactggacgtactagagcactcccttgctgctaacaacatttcatatgttcggatgaaaggaggaagaaaatcacaggcagcactctcccaattcaagggtcaggagagcaatataaatgtagataaagtgaacagggcagcctgcaaaatgcagcctgttcaagtacttctgatgcttatacagcatggagcaaacggtcttaatctactagaggcacagcatgttattctagtggagccattactaaatcctgctgctgaggcacaagctatcagcaggatccatagagttggacaagacaaaagcacatttgttcaccgttttatagtgaagaaaacaatagaagagagcatctacaaattgaacaggagcagagctgtctgctctactataaaccgtaaatccaaaaacttcaaagatgagcctgttttgacgctgaaggatgtggagtcgctattcccgatggcaggacctgatgaacccctagaacaggcagatcaaaattacggcgatagcttgaggagtttgcctccatctgttgccgctgggttagctgctgaaagaaggcgactaatggagcaataagttaatggagtttgcctccatctgttgccgctgggttagctgctgaaagaaggcgactaatcaagggacctccatccatcgttgtggcagttgtgctaattttacttgatcagaatttctcttcgcagcacagtaacgacagtaggagaatgatgctccttagttatgaagcacccccatcatgagaatcaggctatttacgttgtaactttaggattttttttttatgtacctgtaggccttttagactcttgtacataagcttctagttttagttcgtttatacggcccatcctgtagttttgatgtagcagctctcagctctgccactgctacaccaacttatggcatgtataagtgtactaatacatggtcatcagcatgatacattctttagatgcttggtcaattttttagatgcttggtggtggcagagccagtagtcattatggaagaaaattgtcggttgtcctatgctgtctgcagatgtgccggatggtcagtcaggaagatgcagcaaggctttctgatagcttctgcatccgggcccctgctgtgccaggctcgacggcgggcgtcggcgcacgacatccgagtgc

SEQ ID NO: 70771 - DNA, 6049 bp, Zea Mays
aaggatacaagccaccagtctccctcgcatcgcgtcgtcaccagcctatgctcgatgctcccatagtcccatctcgtgatccttccgctcctatcaaagttcgaggtttctcagaacttgcactcccgattccgcgccggcgtccaaagccccaccgaatggtccaccacaccgtctgaatcatcacatatggggaggaagaaatcgagaccggttcgagctgcgggcgccgcctttgcggcggctgaggccgacccctgtgcgccgagccctagcggcagcacgaagcgtaggaccaagggcgaggcgaggagagacgtctgcgtggaggtggataggagcacgtggggtcacgccgacatcgagcaccgcgacgtcgccgaggtggtcctccgcgacgtgagcgtctacggcgacggggatggggaaggtgcgttggaggaggcattcggggcgtcgacgttctcgttgcgtctgcgggtgcgcgacgcgccggaggaggggttcaggatgggccagtggcccgttgtagagtcggattgcgtgctcctggagtatgtcgtccacgggggccgtgaagggaagcacgcagaatatgtggtctcaggatgttttgatggtcctgatgaaggtgtatcgggtctcgtccatttggtgagcttgagattcatcacgctccgggtccaatcgttcagagcatttcagcatatgggtgaggtgagagttgagtcgtttagggttagagtggaggtgatggaacaggctttcagtgcgtgcggttcgctgctggaggtggctagacatccatggaggaagagtttgatgaatgtgattgcttggctgcgtcctgaggtcacgacatcagctgcgatatatgggttggataaccttggtgtgccaatggatgatggtggtaatgctgatttggtacctaagagtgattcacagtttgatcttgctgctttttatgaggccattaagccttcggcgtgagtatcttacatattactatcactctaacctcataatcatgtgctttaacatgaatatgaaatgaaagcatttaaacttacagacaactacttgctgccattattatgatatacaatatgttcttgtgtgatcagaatctatgatgtgagttatccaaagcatcgttacgattcttaggttgtatcatacttctttactttctggcaattttatgatacttatcttttattcctgttgttagtaatgcaggacagttggaaagggaccttcctgatttaattcctcagctcagaccatatcaacttcgcgcagcgcattggatggttcaacgtgaaaacggaaatacgctccatcaagaatacgctaattctgcaccatattgtgttccttttgattttgttcacaagaattccaggatgttctacaatccgttcaacggaaatatttcatcgcaaccagagccttctccaccttacatctctgggggcattttggctgatgaaatgggcttggggaaaactgtcgagcttttagcgtgcatttttgctcatcgtagaccaatttcattagacttttctgtcttccagaacaaaaccgaaatggatcaaattaagaggcagaaagtagaaagggttgagtgcatctgtggtgctgcgagtgaaagttctgcatacacgggtctatgggtccaatgtgacatttgtgatgcttggcaacatgctgattgtgttggttactcacccaagaggaatatactttttgctgataccactgaagatgtagtatcaacaaacaaaaaaagcaccatgaagtctggatttagaaggaaaaagaaacccaggtgttctattgttgagacagaagacaaatacatttgtgcactgtgcttggagcttattgaagcaactcaaactaatatactcagccatgctacattgatagtatgtcccgcaccaatattggcacaatggcactctgaaattacccgacacacaaggccaggatctctgaaagtttgcatttatgaaggtgcaaggaacttggatccttctaccatccaaaaaaatgatatgactgaaataattactgctgatgttgtcttgacaacatatgatgtcttgaaagaagatctatcacatgattttgatcgtcatgatggcgatcgccgtttcttgagatttcaaaagagatatcccgtcattccaactgtcctgacaaggatccactggtggcgactttgtttggatgaagctcagatggtagagtcaggcaggacttctgtgactgagatggcattgaggctaaatgctcaacaccgttggtgtatcacaggaaccccgatacaacgcaagcttgatgatctctttgggcttctacgttttcttaggacaaacccatttgacacatatagatggtgggtggacattattagagatccatatgagagggggaacaaagtagcaatgaattatgcacacaatttctttagggaaatcatgtggcgttcctccaaaattcatgtctcggctgaactgcagctgcctccacaagaagagtgtttttcatggctcatcttttcttccattgaagagtatttctataagaagcaacatgccacctgcatggaccatgcacatcaaattattagaagtttgagaaatgacaccaatagaagagaatcaatttctgattcaaatgctttgctaaatgtttacctctccaatgacgacattgccaagctcctagtcccactgctgaaacttcggcaggcatgttgccacccacaagtggggagttctggtctctgctccctgcagcataaccctttgtcaatggatgaaattttacaggttcttattggtaaagcaaaaattgaaggagaggaagagctcaggaaaattgtagttgccctgaatggtcttgctggattagctgttattgaacaaaggaaccaagaagccatttctttatacaaagaagcactagcattggctcatgaaaatattaatgatttccgtgttgaccctctgttgaatcttcatatcaactacaatcttgcagaactgcttagaattagttctgagtatttacaagaatgcccattaaaaaatccggcttttgaagttgcaatcagccgaaaaagaaaggaaatagatactgttgagacaaatgtacttagtgtaaaacgaaataaaatatgtgaaaacagtgttttgagtttgacagctaatgggctagaaatatctgaagataaaaacactattggacaaacatgcatgactagagatgtggatgtggagaatgtcactgggtgccactcatcatttgaatgttttgctgatgactgcttgaggaagacttgcaatacaatcacagaaaaatacctgtcaacttttacttcaaggctggtagtagcgcagaaggattttaatgcatcattcacagaggtcttgaatatcactaaagagctacagagtgagtatatgaattggtggctgtatgctttggactgcattgaagagaacaacatttctgctgacgatctgatcaagaagattgataattcttctagtaagagcaccactggtttgggttcatggggaatatcttccagggttaaaagtattgctggcttaaaatatgcaattcaagctgatattgattctctacaaagttcgaggcaacatcttatggatagacttctggaagttgacaaaacaatggctaacccaagggatgaggacattgagggccagcgatattgtccaaactgctatgatggcactggttctctatgtatccagtgtgagctagatgaactctttcagaggtatgaatcacgcctgtttcttgttaagaaatcgaacaatggttctgtcattgattcagtagaagaagcacatgatctactgaggcgaaaatatgagctcaatcacttcttccgtaatagaaaatccaaggagggacctgaacctgactatgacaataacaaccctaggtcagctcgagaaaacatacaggtctataggcatccttctagaaccgagactgcattaagggttatctggaatcactcaaagacagtattgggaaagcaatattccacaatggctaaaaaacatttacttctttttgaggctatgcgcaaggaatttcctcaagcaaggtttctgtcaattgctcaaacacaattattgcgtgctcatgatgagatcaagatgtccatctcaagacttcagctcaaagagaaagaggatgatcctagcgctgccaatattgtaactagagaggaactcataccatataatgttcagtttacaagtgaaaaattcatgtcactctcatctttagcccgtgtaagaggtcaactccggtacttaaagggattggcggtatgtaacaagaaaacacataaccagcatgatgaatcactggctaaagcaggcgatgctgttgatacagctacttcatgttcagccacagggcaaactgtttctgattttcgtaatgaaccatgcccgatatgccaggagaaggtttttgaccagaaaatggttttccagtgtggtcattttgtatgctgcaagtgttgtctttacatgacagaacaaactgcagcacaattcggaaagcgtaaacaatggattatgtgccccacatgccgccagcgaacagatattgagaacattgcttttgtagttgagaaaccttgggacaaacatgaaaagagcattgaagatttggctgaaagcactatttctgtccaaggttcatatggaacaaagtttgaagctgtcacaagaagaatcttgagaatcacttcaactgatggaacagctaaagttcttgttttctcaagttggaatgatgtactggacgtactagagcactcccttgctgctaacaacatttcatatgttcggatgaaaggaggaagaaaatcacaggcagcactctcccaattcaagggtcaggagagcaatataaatgtagataaagtgaacagggcagcctgcaaaatgcagcctgttcaagtacttctgatgcttatacagcatggagcaaacggtcttaatctactagaggcacagcatgttattctagtggagccattactaaatcctgctgctgaggcacaagctatcagcaggatccatagagttggacaagacaaaagcacatttgttcaccgttttatagtgaagaaaacaatagaagagagcatctacaaattgaacaggagcagagctgtctgctctactataaaccgtaaatccaaaaacttcaaagatgagcctgttttgacgctgaaggatgtggagtcgctattcccgatggcaggacctgatgaacccctagaacaggcagatcaaaattacggcgatagcttgaggagtttgcctccatctgttgccgctgggttagctgctgaaagaaggcgactaatggagcaataagttaatggagtttgcctccatctgttgccgctgggttagctgctgaaagaaggcgactaatcaagggacctccatccatcgttgtggcagttgtgctaattttacttgatcagaatttctcttcgcagcacagtaacgacagtaggagaatgatgctccttagttatgaagcacccccatcatgagaatcaggctatttacgttgtaactttaggattttttttttatgtacctgtaggccttttagactcttgtacataagcttctagttttagttcgtttatacggcccatcctgtagttttgatgtagcagctctcagctctgccactgctacaccaacttatggcatgtataagtgtactaatacatggtcatcagcatgatacattctttagatgcttggtcaattttttagatgcttggtggtggcagagccagtagtcattatggaagaaaattgtcggttgtcctatgctgtctgcagatgtgccggatggtcagtcaggaagatgcagcaaggctttctgatagcttctgcatccgggcccctgctgtgccaggctcgacggcgggcgtcggcgcacgacatccgagtgc

SEQ ID NO: 70772 - DNA, 6001 bp, Zea Mays
gaacctccaaggatacaagccaccagtctccctcgcatcgcgtcgtcaccagcctatgctcgatgctcccatagtcccatctcgtgatccttccgctcctatcaaagttcgaggtttctcagaacttgcactcccgattccgcgccggcgtccaaagccccaccgaatggtccaccacaccgtctgaatcatcacatatggggaggaagaaatcgagaccggttcgagctgcgggcgccgcctttgcggcggctgaggccgacccctgtgcgccgagccctagcggcagcacgaagcgtaggaccaagggcgaggcgaggagagacgtctgcgtggaggtggataggagcacgtggggtcacgccgacatcgagcaccgcgacgtcgccgaggtggtcctccgcgacgtgagcgtctacggcgacggggatggggaaggtgcgttggaggaggcattcggggcgtcgacgttctcgttgcgtctgcgggtgcgcgacgcgccggaggaggggttcaggatgggccagtggcccgttgtagagtcggattgcgtgctcctggagtatgtcgtccacgggggccgtgaagggaagcacgcagaatatgtggtctcaggatgttttgatggtcctgatgaaggtgtatcgggtctcgtccatttggtgagcttgagattcatcacgctccgggtccaatcgttcagagcatttcagcatatgggtgaggtgagagttgagtcgtttagggttagagtggaggtgatggaacaggctttcagtgcgtgcggttcgctgctggaggtggctagacatccatggaggaagagtttgatgaatgtgattgcttggctgcgtcctgaggtcacgacatcagctgcgatatatgggttggataaccttggtgtgccaatggatgatggtggtaatgctgatttggtacctaagagtgattcacagtttgatcttgctgctttttatgaggccattaagccttcggcgtgagtatcttacatattactatcactctaacctcataatcatgtgctttaacatgaatatgaaatgaaagcatttaaacttacagacaactacttgctgccattattatgatatacaatatgttcttgtgtgatcagaatctatgatgtgagttatccaaagcatcgttacgattcttaggttgtatcatacttctttactttctggcaattttatgatacttatcttttattcctgttgttagtaatgcaggacagttggaaagggaccttcctgatttaattcctcagctcagaccatatcaacttcgcgcagcgcattggatggttcaacgtgaaaacggaaatacgctccatcaagaatacgctaattctgcaccatattgtgttccttttgattttgttcacaagaattccaggatgttctacaatccgttcaacggaaatatttcatcgcaaccagagccttctccaccttacatctctgggggcattttggctgaacaaaaccgaaatggatcaaattaagaggcagaaagtagaaagggttgagtgcatctgtggtgctgcgagtgaaagttctgcatacacgggtctatgggtccaatgtgacatttgtgatgcttggcaacatgctgattgtgttggttactcacccaagaggaatatactttttgctgataccactgaagatgtagtatcaacaaacaaaaaaagcaccatgaagtctggatttagaaggaaaaagaaacccaggtgttctattgttgagacagaagacaaatacatttgtgcactgtgcttggagcttattgaagcaactcaaactaatatactcagccatgctacattgatagtatgtcccgcaccaatattggcacaatggcactctgaaattacccgacacacaaggccaggatctctgaaagtttgcatttatgaaggtgcaaggaacttggatccttctaccatccaaaaaaatgatatgactgaaataattactgctgatgttgtcttgacaacatatgatgtcttgaaagaagatctatcacatgattttgatcgtcatgatggcgatcgccgtttcttgagatttcaaaagagatatcccgtcattccaactgtcctgacaaggatccactggtggcgactttgtttggatgaagctcagatggtagagtcaggcaggacttctgtgactgagatggcattgaggctaaatgctcaacaccgttggtgtatcacaggaaccccgatacaacgcaagcttgatgatctctttgggcttctacgttttcttaggacaaacccatttgacacatatagatggtgggtggacattattagagatccatatgagagggggaacaaagtagcaatgaattatgcacacaatttctttagggaaatcatgtggcgttcctccaaaattcatgtctcggctgaactgcagctgcctccacaagaagagtgtttttcatggctcatcttttcttccattgaagagtatttctataagaagcaacatgccacctgcatggaccatgcacatcaaattattagaagtttgagaaatgacaccaatagaagagaatcaatttctgattcaaatgctttgctaaatgtttacctctccaatgacgacattgccaagctcctagtcccactgctgaaacttcggcaggcatgttgccacccacaagtggggagttctggtctctgctccctgcagcataaccctttgtcaatggatgaaattttacaggttcttattggtaaagcaaaaattgaaggagaggaagagctcaggaaaattgtagttgccctgaatggtcttgctggattagctgttattgaacaaaggaaccaagaagccatttctttatacaaagaagcactagcattggctcatgaaaatattaatgatttccgtgttgaccctctgttgaatcttcatatcaactacaatcttgcagaactgcttagaattagttctgagtatttacaagaatgcccattaaaaaatccggcttttgaagttgcaatcagccgaaaaagaaaggaaatagatactgttgagacaaatgtacttagtgtaaaacgaaataaaatatgtgaaaacagtgttttgagtttgacagctaatgggctagaaatatctgaagataaaaacactattggacaaacatgcatgactagagatgtggatgtggagaatgtcactgggtgccactcatcatttgaatgttttgctgatgactgcttgaggaagacttgcaatacaatcacagaaaaatacctgtcaacttttacttcaaggctggtagtagcgcagaaggattttaatgcatcattcacagaggtcttgaatatcactaaagagctacagagtgagtatatgaattggtggctgtatgctttggactgcattgaagagaacaacatttctgctgacgatctgatcaagaagattgataattcttctagtaagagcaccactggtttgggttcatggggaatatcttccaggtctgcagcaaacttgttttaatattctccatgggttaaaagtattgctggcttaaaatatgcaattcaagctgatattgattctctacaaagttcgaggcaacatcttatggatagacttctggaagttgacaaaacaatggctaacccaagggatgaggacattgagggccagcgatattgtccaaactgctatgatggcactggttctctatgtatccagtgtgagctagatgaactctttcagaggtatgaatcacgcctgtttcttgttaagaaatcgaacaatggttctgtcattgattcagtagaagaagcacatgatctactgaggcgaaaatatgagctcaatcacttcttccgtaatagaaaatccaaggagggacctgaacctgactatgacaataacaaccctaggtcagctcgagaaaacatacaggtctataggcatccttctagaaccgagactgcattaagggttatctggaatcactcaaagacagtattgggaaagcaatattccacaatggctaaaaaacatttacttctttttgaggctatgcgcaaggaatttcctcaagcaaggtttctgtcaattgctcaaacacaattattgcgtgctcatgatgagatcaagatgtccatctcaagacttcagctcaaagagaaagaggatgatcctagcgctgccaatattgtaactagagaggaactcataccatataatgttcagtttacaagtgaaaaattcatgtcactctcatctttagcccgtgtaagaggtcaactccggtacttaaagggattggcggtatgtaacaagaaaacacataaccagcatgatgaatcactggctaaagcaggcgatgctgttgatacagctacttcatgttcagccacagggcaaactgtttctgattttcgtaatgaaccatgcccgatatgccaggagaaggtttttgaccagaaaatggttttccagtgtggtcattttgtatgctgcaagtgttgtctttacatgacagaacaaactgcagcacaattcggaaagcgtaaacaatggattatgtgccccacatgccgccagcgaacagatattgagaacattgcttttgtagttgagaaaccttgggacaaacatgaaaagagcattgaagatttggctgaaagcactatttctgtccaaggttcatatggaacaaagtttgaagctgtcacaagaagaatcttgagaatcacttcaactgatggaacagctaaagttcttgttttctcaagttggaatgatgtactggacgtactagagcactcccttgctgctaacaacatttcatatgttcggatgaaaggaggaagaaaatcacaggcagcactctcccaattcaagggtcaggagagcaatataaatgtagataaagtgaacagggcagcctgcaaaatgcagcctgttcaagtacttctgatgcttatacagcatggagcaaacggtcttaatctactagaggcacagcatgttattctagtggagccattactaaatcctgctgctgaggcacaagctatcagcaggatccatagagttggacaagacaaaagcacatttgttcaccgttttatagtgaagaaaacaatagaagagagcatctacaaattgaacaggagcagagctgtctgctctactataaaccgtaaatccaaaaacttcaaagatgagcctgttttgacgctgaaggatgtggagtcgctattcccgatggcaggacctgatgaacccctagaacaggcagatcaaaattacggcgatagcttgaggagtttgcctccatctgttgccgctgggttagctgctgaaagaaggcgactaatggagcaataagttaatggagtttgcctccatctgttgccgctgggttagctgctgaaagaaggcgactaatcaagggacctccatccatcgttgtggcagttgtgctaattttacttgatcagaatttctcttcgcagcacagtaacgacagtaggagaatgatgctccttagttatgaagcacccccatcatgagaatcaggctatttacgttgtaactttaggattttttttttatgtacctgtaggccttttagactcttgtacataagcttctagttttagttcgtttatacggcccatcctgtagttttgatgtagcagctctcagctctgccactgctacaccaacttatggcatgtataagtgtactaatacatggtcatcagcatgatacattctttagatgcttggtcaattttttagatgcttggtggtggcagagccagtagtcattatggaagaaaattgtcggttgtcctatgctgtctgcagatgtgccggatggtcagtcaggaagatgcagcaaggctttctgatagcttctgcatccgggcccctgctgtgccaggctcgacggcgggcgtcggcgcacgacatccgagtgc

SEQ ID NO: 70773 - DNA, 6119 bp, Zea Mays
cttctctaatgttgtgttcaatggatattgaacctccaaggatacaagccaccagtctccctcgcatcgcgtcgtcaccagcctatgctcgatgctcccatagtcccatctcgtgatccttccgctcctatcaaagttcgaggtttctcagaacttgcactcccgattccgcgccggcgtccaaagccccaccgaatggtccaccacaccgtctgaatcatcacatatggggaggaagaaatcgagaccggttcgagctgcgggcgccgcctttgcggcggctgaggccgacccctgtgcgccgagccctagcggcagcacgaagcgtaggaccaagggcgaggcgaggagagacgtctgcgtggaggtggataggagcacgtggggtcacgccgacatcgagcaccgcgacgtcgccgaggtggtcctccgcgacgtgagcgtctacggcgacggggatggggaaggtgcgttggaggaggcattcggggcgtcgacgttctcgttgcgtctgcgggtgcgcgacgcgccggaggaggggttcaggatgggccagtggcccgttgtagagtcggattgcgtgctcctggagtatgtcgtccacgggggccgtgaagggaagcacgcagaatatgtggtctcaggatgttttgatggtcctgatgaaggtgtatcgggtctcgtccatttggtgagcttgagattcatcacgctccgggtccaatcgttcagagcatttcagcatatgggtgaggtgagagttgagtcgtttagggttagagtggaggtgatggaacaggctttcagtgcgtgcggttcgctgctggaggtggctagacatccatggaggaagagtttgatgaatgtgattgcttggctgcgtcctgaggtcacgacatcagctgcgatatatgggttggataaccttggtgtgccaatggatgatggtggtaatgctgatttggtacctaagagtgattcacagtttgatcttgctgctttttatgaggccattaagccttcggcgtgagtatcttacatattactatcactctaacctcataatcatgtgctttaacatgaatatgaaatgaaagcatttaaacttacagacaactacttgctgccattattatgatatacaatatgttcttgtgtgatcagaatctatgatgtgagttatccaaagcatcgttacgattcttaggttgtatcatacttctttactttctggcaattttatgatacttatcttttattcctgttgttagtaatgcaggacagttggaaagggaccttcctgatttaattcctcagctcagaccatatcaacttcgcgcagcgcattggatggttcaacgtgaaaacggaaatacgctccatcaagaatacgctaattctgcaccatattgtgttccttttgattttgttcacaagaattccaggatgttctacaatccgttcaacggaaatatttcatcgcaaccagagccttctccaccttacatctctgggggcattttggctgatgaaatgggcttggggaaaactgtcgagcttttagcgtgcatttttgctcatcgtagaccaatttcattagacttttctgtcttccagaacaaaaccgaaatggatcaaattaagaggcagaaagtagaaagggttgagtgcatctgtggtgctgcgagtgaaagttctgcatacacgggtctatgggtccaatgtgacatttgtgatgcttggcaacatgctgattgtgttggttactcacccaagaggaatatactttttgctgataccactgaagatgtagtatcaacaaacaaaaaaagcaccatgaagtctggatttagaaggaaaaagaaacccaggtgttctattgttgagacagaagacaaatacatttgtgcactgtgcttggagcttattgaagcaactcaaactaatatactcagccatgctacattgatagtatgtcccgcaccaatattggcacaatggcactctgaaattacccgacacacaaggccaggatctctgaaagtttgcatttatgaaggtgcaaggaacttggatccttctaccatccaaaaaaatgatatgactgaaataattactgctgatgttgtcttgacaacatatgatgtcttgaaagaagatctatcacatgattttgatcgtcatgatggcgatcgccgtttcttgagatttcaaaagagatatcccgtcattccaactgtcctgacaaggatccactggtggcgactttgtttggatgaagctcagatggtagagtcaggcaggacttctgtgactgagatggcattgaggctaaatgctcaacaccgttggtgtatcacaggaaccccgatacaacgcaagcttgatgatctctttgggcttctacgttttcttaggacaaacccatttgacacatatagatggtgggtggacattattagagatccatatgagagggggaacaaagtagcaatgaattatgcacacaatttctttagggaaatcatgtggcgttcctccaaaattcatgtctcggctgaactgcagctgcctccacaagaagagtgtttttcatggctcatcttttcttccattgaagagtatttctataagaagcaacatgccacctgcatggaccatgcacatcaaattattagaagtttgagaaatgacaccaatagaagagaatcaatttctgattcaaatgctttgctaaatgtttacctctccaatgacgacattgccaagctcctagtcccactgctgaaacttcggcaggcatgttgccacccacaagtggggagttctggtctctgctccctgcagcataaccctttgtcaatggatgaaattttacaggttcttattggtaaagcaaaaattgaaggagaggaagagctcaggaaaattgtagttgccctgaatggtcttgctggattagctgttattgaacaaaggaaccaagaagccatttctttatacaaagaagcactagcattggctcatgaaaatattaatgatttccgtgttgaccctctgttgaatcttcatatcaactacaatcttgcagaactgcttagaattagttctgagtatttacaagaatgcccattaaaaaatccggcttttgaagttgcaatcagccgaaaaagaaaggaaatagatactgttgagacaaatgtacttagtgtaaaacgaaataaaatatgtgaaaacagtgttttgagtttgacagctaatgggctagaaatatctgaagataaaaacactattggacaaacatgcatgactagagatgtggatgtggagaatgtcactgggtgccactcatcatttgaatgttttgctgatgactgcttgaggaagacttgcaatacaatcacagaaaaatacctgtcaacttttacttcaaggctggtagtagcgcagaaggattttaatgcatcattcacagaggtcttgaatatcactaaagagctacagagtgagtatatgaattggtggctgtatgctttggactgcattgaagagaacaacatttctgctgacgatctgatcaagaagattgataattcttctagtaagagcaccactggtttgggttcatggggaatatcttccaggtctgcagcaaacttgttttaatattctccatgggttaaaagtattgctggcttaaaatatgcaattcaagctgatattgattctctacaaagttcgaggcaacatcttatggatagacttctggaagttgacaaaacaatggctaacccaagggatgaggacattgagggccagcgatattgtccaaactgctatgatggcactggttctctatgtatccagtgtgagctagatgaactctttcagaggtatgaatcacgcctgtttcttgttaagaaatcgaacaatggttctgtcattgattcagtagaagaagcacatgatctactgaggcgaaaatatgagctcaatcacttcttccgtaatagaaaatccaaggagggacctgaacctgactatgacaataacaaccctaggtcagctcgagaaaacatacaggtctataggcatccttctagaaccgagactgcattaagggttatctggaatcactcaaagacagtattgggaaagcaatattccacaatggctaaaaaacatttacttctttttgaggctatgcgcaaggaatttcctcaagcaaggtttctgtcaattgctcaaacacaattattgcgtgctcatgatgagatcaagatgtccatctcaagacttcagctcaaagagaaagaggatgatcctagcgctgccaatattgtaactagagaggaactcataccatataatgttcagtttacaagtgaaaaattcatgtcactctcatctttagcccgtgtaagaggtcaactccggtacttaaagggattggcggtatgtaacaagaaaacacataaccagcatgatgaatcactggctaaagcaggcgatgctgttgatacagctacttcatgttcagccacagggcaaactgtttctgattttcgtaatgaaccatgcccgatatgccaggagaaggtttttgaccagaaaatggttttccagtgtggtcattttgtatgctgcaagtgttgtctttacatgacagaacaaactgcagcacaattcggaaagcgtaaacaatggattatgtgccccacatgccgccagcgaacagatattgagaacattgcttttgtagttgagaaaccttgggacaaacatgaaaagagcattgaagatttggctgaaagcactatttctgtccaaggttcatatggaacaaagtttgaagctgtcacaagaagaatcttgagaatcacttcaactgatggaacagctaaagttcttgttttctcaagttggaatgatgtactggacgtactagagcactcccttgctgctaacaacatttcatatgttcggatgaaaggaggaagaaaatcacaggcagcactctcccaattcaagggtcaggagagcaatataaatgtagataaagtgaacagggcagcctgcaaaatgcagcctgttcaagtacttctgatgcttatacagcatggagcaaacggtcttaatctactagaggcacagcatgttattctagtggagccattactaaatcctgctgctgaggcacaagctatcagcaggatccatagagttggacaagacaaaagcacatttgttcaccgttttatagtgaagaaaacaatagaagagagcatctacaaattgaacaggagcagagctgtctgctctactataaaccgtaaatccaaaaacttcaaagatgagcctgttttgacgctgaaggatgtggagtcgctattcccgatggcaggacctgatgaacccctagaacaggcagatcaaaattacggcgatagcttgaggagtttgcctccatctgttgccgctgggttagctgctgaaagaaggcgactaatggagcaataagttaatggagtttgcctccatctgttgccgctgggttagctgctgaaagaaggcgactaatcaagggacctccatccatcgttgtggcagttgtgctaattttacttgatcagaatttctcttcgcagcacagtaacgacagtaggagaatgatgctccttagttatgaagcacccccatcatgagaatcaggctatttacgttgtaactttaggattttttttttatgtacctgtaggccttttagactcttgtacataagcttctagttttagttcgtttatacggcccatcctgtagttttgatgtagcagctctcagctctgccactgctacaccaacttatggcatgtataagtgtactaatacatggtcatcagcatgatacattctttagatgcttggtcaattttttagatgcttggtggtggcagagccagtagtcattatggaagaaaattgtcggttgtcctatgctgtctgcagatgtgccggatggtcagtcaggaagatgcagcaaggctttctgatagcttctgcatccgggcccctgctgtgccaggctcgacggcgggcgtcggcgcacgacatccgagtgc

SEQ ID NO: 70774 - DNA, 1354 bp, Zea Mays
atctcgtgatccttccgctcctatcaaagttcgaggtttctcagaacttgcactcccgattccgcgccggcgtccaaagccccaccgaatggtccaccacaccgtctgaatcatcacatatggggaggaagaaatcgagaccggttcgagctgcgggcgccgcctttgcggcggctgaggccgacccctgtgcgccgagccctagcggcagcacgaagcgtaggaccaagggcgaggcgaggagagacgtctgcgtggaggtggataggagcacgtggggtcacgccgacatcgagcaccgcgacgtcgccgaggtggtcctccgcgacgtgagcgtctacggcgacggggatggggaagtaatgcaggacagttggaaagggaccttcctgatttaattcctcagctcagaccatatcaacttcgcgcagcgcattggatggttcaacgtgaaaacggaaatacgctccatcaagaatacgctaattctgcaccatattgtgttccttttgattttgttcacaagaattccaggatgttctacaatccgttcaacggaaatatttcatcgcaaccagagccttctccaccttacatctctgggggcattttggctgatgaaatgggcttggggaaaactgtcgagcttttagcgtgcatttttgctcatcgtagaccaatttcattagacttttctgtcttccagaacaaaaccgaaatggatcaaattaagaggcagaaagtagaaagggttgagtgcatctgtggtgctgcgagtgaaagttctgcatacacgggtctatgggtccaatgtgacatttgtgatgcttggcaacatgctgattgtgttggttactcacccaagaggaatatactttttgctgataccactgaagatgtagtatcaacaaacaaaaaaagcaccatgaagtctggatttagaaggaaaaagaaacccaggtgttctattgttgagacagaagacaaatacatttgtgcactgtgcttggagcttattgaagcaactcaaactaatatactcagccatgctacattgatagtatgtcccgcaccaatattggcacaatggcactctgaaattacccgacacacaaggccaggatctctgaaagtttgcatttatgaaggtgcaaggaacttggatccttctaccatccaaaaaaatgatatgactgaaataattactgctgatgttgtcttgacaacatatgatgtcttgaaagaagatctatcacatgattttgatcgtcatgatggcgatcgccgtttcttgagatttcaaaagaggcaagtcatgtttagttttcacttttcacaacgaaggttaacatga

SEQ ID NO: 70775 - DNA, 2733 bp, Zea Mays
cgccaaccgcgtataaatatctgccgagaacgcgccatggcctcaccctccgctccgccgcccctcttcattttctattgctcccccggtgccggccccggtctccacccacgtatccgcggaggcggaggagctgccgctcagcgaactcgacgcgcccatcccgtctcccccctggcgattcattcggccgcccaaacccacagggagtcggagccggaggagggaggcgttctggagtccgtccaaggagcagttggcgacgacggaaggcgcagcacacgagcaacgtacgagggaaaggggaaacaaagagccttctccgatcgtcgccagctagctacccacctgtcctccggatgtcctggagttctgcatgcccatggaaaattcagttcgccgcgtgagatgcccgaggtgccacagcgttctcgaggagcccagcgcgccggtgtaccagtgcggcggatgcggcactagccttcgagcaaagaaccgtaccggcaccggcaccggcagcacgggagacgcggccggggcgtcgccggcgcggagctggctgcctcctcagagcaggcacctggacgccagcgacgtcgcgagcaccagcaggtccggcaccccgacccctcctgacgtcgggaccagctggcaccgagacaccgacgcgacaggcacccggcatggttccggtgatctcgctctcgtgtcggccgggacgcgtgggtccggtgacgtcgcgagcaccagcagtactcctgttgccaccgcgagaagcaggcgccaagacaccgacgcgacgacccgtggctccggcgacgttgccagcaccagcagcacacctgacgccagtgccgacacgacgagacggggcgagtccggtggtcccgtgccggcgaggaatcgtgtccctgagcaagcggcagcggcactgatcgagaaaagagggcgcgaacagagcgcggccggtcaggaagtccgtgacgactctgaaggccgcggaacacgagatgccagtggtgcggagtccggcgtcggtggtgtcggcttctccggaggaaacagagatgccactcctgaattgcaggatgacacggagaaggggatgaaacgccatgacgaatctaacgatgctgcgagaaaggaacgtcgtggtgaagctgcagagcagccgcgttacgaccatgaccgacgccaagaacttgcaccgaaatcatcggctcaacccgcggctgctcagcttgcacgcgaagatgaagctgctactgccggagaaaaggcgccgagcccttctcgccacgaggttcaagaggaacatctgcggcccctgcggaagaagattctgaagacggtggatgagctgaaaggcgatctctctgaacttttcagcaagtcccccgagctcaacgcgccacgcgcgcgccctcctcgtcttcccaggcaagaagcctacgtgtcccacgcggtggcgggggcggcctcgggcctccctgccagagctcgccacgtcgcttctgctgccgaaggtcaccgtggcagcgtagctcgtgcggcgaagccccgtccagccgcggctcctccccgtggcttgccatcccggcgctaccgccagtgcagagcgcacccgtgctgccatgacgtggatccgaggccgtgccatcacgggcacggctgctgcggccaccacggcaaaccggagtgcagcagctgccgaggatactgctgcaggcccagagcgctggagccgtccgcgccgcggaagcccccggcagccaaggagcccaagcggcggctgccgccccgcaaccactgccggccagtactgaagggcgcgccgttcatcgtgtgctccagctgcttcaagctggtgcaggtgcccgccgacttcgccgtctcgaccaggatggtgcgcaggatgcggtgcggctcctgctccaccgtcctctcctactcctacagggacccggccaggaagaaagcctaccaggactcggtcaatcggtgcagcacagacggctccgagctgcacggcggcacaggcgaccaacggtcggacccgttcgcgccgttcatcgatggcttcggcctcagcagctactcgacggaggacgagcggcggctgcccgtctcgaggaacacgtcgttcgacaccctcgacgggacgaaaggcgtgggacggctgcaccggctgatggggtacgggtcagctagcgagctgctgcggcactcccctgacctgtacgagagcttcagtgagcgaacgacgcctgacgtgagacagcacgacacgaaagggaaaggcgtttgcatcgacgatgacgactacgactacgacttggatgacactgacgatgaagacattggtgcgctgaagagatcagcgaggaaagggtccggctggacgctcccatggattcccggcaagcggcaaggggactcgggagccatcaggatcaagtaaatagcaggaaaggcctgtgtatattgcaggaataggttcgggttttggaattcgaattggaatttatttcatagttttgctattccttttaggcgcactattggatttataggctgtttgtttgccattttttgaagcgtgaaaaatgctgttcaatgaaatgtaaatatcctgcgatgagtctcagaaagaataacattatggactttttaaggaacaagaaaaatcgaggtgcctagtgaagaaacagacgttctaatgcaatattgcaa

SEQ ID NO: 70776 - DNA, 3759 bp, Zea Mays
aggcagagacagtggacgtctccaccagaccactcgttgtcgttgaagcggtcgctccgcacccgccgcgcccccgccctccccggctccggctccccctttctccgccaccgccaaccgcgtataaatatctgccgagaacgcgccatggcctcaccctccgctccgccgcccctcttcattttctattgctcccccggtgccggccccggtctccacccacgtatccgcggaggcggaggagctgccgctcagcgaactcgacgcgcccatcccgtctcccccctggcgattcattcggccgcccaaacccacagggagtcggagccggaggagggaggcgttctggagtccgtccaaggagcagttggcgacgacggaaggcgcagcacacgagcaacgtacgagggaaaggggaaacaaagaggtgagtgtgagtcctccgcccccggcctgctgtgctcctgttcccattcttggaattgcttttctctctttgctctgcttgtttcttggtactgctcctacgctacttcggattatagatagatgacagaattccttgaaagatattgttatcacttgagaccaaaatgctccagcccattagtattattatagcatccatatagaaatggactcccgactgatgtttgaagtgtcccagattaaacctctttttttttgtcgatcgcaaggtaatccctagagaacccttggaacaagcaaatgtgtttgccaaacagtccaatctatcaagaggaacattggtaggcacgcacaattatagatttggagtagttatctctcaagccacacgagtctgcaactgtatttgttaaaaattttatgggactgctgacaagtcttgagttttgacaagattaagattggaacattggacttctgttttactgttaccctcattcttttcttttggttggcagcaaatgagcgttttgatgcatttattttttaccgaaaaagaacagttcaaacgtagcggggtcgcttttaccattctttctgtgtcaccaataccattcgccacctcgtcagactttgcctgctaggcatataagcacagaatttgtctgctagcgatgcccgtttatttatctcttcaattacaaggcgccagaatagacagatgaactcatgaacagaatgctgatggtgtttccctgttgcttgcttttgacgccacacgcagccttctccgatcgtcgccagctagctacccacctgtcctccggatgtcctggagttctgcatgcccatggaaaattcagttcgccgcgtgagatgcccgaggtgccacagcgttctcgaggagcccagcgcgccggtgtaccagtgcggcggatgcggcactagccttcgagcaaagaaccgtaccggcaccggcaccggcagcacgggagacgcggccggggcgtcgccggcgcggagctggctgcctcctcagagcaggcacctggacgccagcgacgtcgcgagcaccagcaggtccagcaccccgacccctcctcgtgtcgccagcaccagcaggtccggcaccccgacccctcctgacgtcgggaccagctggcaccgagacaccgacgcgacaggcacccggcatggttccggtgatctcgctctcgtgtcggccgggacgcgtgggtccggtgacgtcgcgagcaccagcagtactcctgttgccaccgcgagaagcaggcgccgccaaggcaccgacgcgacgagccgtggctccggcgacgttgccagcaccagcagtactcctgacaccaccgcgagaatcaggcgccaagacaccgacgcgacgacccgtggctccggcgacgttgccagcaccagcagcacacctgacgccagtgccgacacgacgagacggggcgagtccggtggtcccgtgccggcgaggaatcgtgtccctgagcaagcggcagcggcactgatcgagaaaagagggcgcgaacagagcgcggccggtcaggaagtccgtgacgactctgaaggccgcggaacacgagatgccagtggtgcggagtccggcgtcggtggtgtcggcttctccggaggaaacagagatgccactcctgaattgcaggatgacacggagaaggggatgaaacgccatgacgaatctaacgatgctgcgagaaaggaacgtcgtggtgaagctgcagagcagccgcgttacgaccatgaccgacgccaagaacttgcaccgaaatcatcggctcaacccgcggctgctcagcttgcacgcgaagatgaagctgctactgccggagaaaaggcgccgagcccttctcgccacgaggttcaagaggaacatctgcggcccctgcggaagaagattctgaagacggtggatgagctgaaaggcgatctctctgaacttttcagcaagtcccccgagctcaacgcgccacgcgcgcgccctcctcgtcttcccaggcaagaagcctacgtgtcccacgcggtggcgggggcggcctcgggcctccctgccagagctcgccacgtcgcttctgctgccgaaggtcaccgtggcagcgtagctcgtgcggcgaagccccgtccagccgcggctcctccccgtggcttgccatcccggcgctaccgccagtgcagagcgcacccgtgctgccatgacgtggatccgaggccgtgccatcacgggcacggctgctgcggccaccacggcaaaccggagtgcagcagctgccgaggatactgctgcaggcccagagcgctggagccgtccgcgccgcggaagcccccggcagccaaggagcccaagcggcggctgccgccccgcaaccactgccggccagtactgaagggcgcgccgttcatcgtgtgctccagctgcttcaagctggtgcaggtgcccgccgacttcgccgtctcgaccaggatggtgcgcaggatgcggtgcggctcctgctccaccgtcctctcctactcctacagggacccggccaggaagaaagcctaccaggactcggtcaatcggtgcagcacagacggctccgagctgcacggcggcacaggcgaccaacggtcggacccgttcgcgccgttcatcgatggcttcggcctcagcagctactcgacggaggacgagcggcggctgcccgtctcgaggaacacgtcgttcgacaccctcgacgggacgaaaggcgtgggacggctgcaccggctgatggggtacgggtcagctagcgagctgctgcggcactcccctgacctgtacgagagcttcagtgagcgaacgacgcctgacgtgagacagcacgacacgaaagggaaaggcgtttgcatcgacgatgacgactacgactacgacttggatgacactgacgatgaagacattggtgcgctgaagagatcagcgaggaaagggtccggctggacgctcccatggattcccggcaagcggcaaggggactcgggagccatcaggatcaagtaaatagcaggaaaggcctgtgtatattgcaggaataggttcgggttttggaattcgaattggaatttatttcatagttttgctattccttttaggcgcactattggatttataggctgtttgtttgccattttttgaagcgtgaaaaatgctgttcaatgaaatgtaaatatcctgcgatgagtctcagaaagaataacattatggactttttaaggaacaagaaaaatcgaggtgcctagtgaagaaacagacgttctaatgcaatattgcaa

SEQ ID NO: 70777 - DNA, 473 bp, Zea Mays
gtcttcgtccagcactcgtcgaagttggcgatacaggtaagcccggcgacgttcggccgaaagctcggctggatctgccgggcctccagcttcctccagttgattggcttgaaccacttgtggttttttatctcgttgctgcctccggggcagctgcccagccgcttgttgggttccttgtgtagcagctaaaaaacggagggggtatagaacgtgagcacaaatcaagctaacgcttctgcactgatgaaatgaatgtaaaagcttacgcctctcaggagggaatgagcttcactagacagaaatgaaggaagcttcagtttgtcttttataatcttctgctgaactttctccctattcccaacaaatgggggctgcagtgtgttgccaagtgtatgaacaattagcaacgaaggcaaaatgacatggtaacatctgttgagaagttgagaaccatgcaaactcaccttgcc

SEQ ID NO: 70778 - DNA, 896 bp, Zea Mays
gttgttatgacttgcatggtatctacatctgtttctttctgctggacagggtgttcaacattctacgtgagaacaacccagatcttgctggggataggcgtaggaccgttatgaggccaccacaagttcttagggagggaacaaagaagacagtttttgttaactttatggatttgtgtaaaacgatgcataggcaacctgagcatgtgatgatgtttttacttgctgaaatgggaacaagcgggtcacttgatgggcagcaaaggttggtgatcaaaggaagatttgcccccaaaaactttgaagcaatcctgaggagatacatcaatgagtacgtcatctgcaatggatgcaagagccctgataccattctgtccaaggaaaatcgtctgttcttccttcgctgcgaacagtgtggatcttcaaggtccgttgctccaatcaaagctggattcgttgctcaagtcggtcgtcggaaggcatgagcatctatatgtggatggtgttggggtcaataccaactcaacaatagttgattatttgttgactagagattctgcggcgcaatgttgagcaagatatatcaacgatgccctttgtctgcattcaaaggattcatctattgatgtcacaagcctatgaaaactggcgagtgtgaatcctgatctacgactccctgcgatcataatcctgtgactgctggttagtgtcaaatgcagtctgttaaacttcttgatgcggtcactaatacaagttcatcaaagttttgtccgaatgccataattctgtcataaaatttactttctctgtaatacacaatgaatctaagtgtttacttcattattcgatccttggaattcagctgattcattcaaacaaacattctctttagcttc

SEQ ID NO: 70779 - DNA, 1243 bp, Zea Mays
gttcgtgttcgttgtacttctagttttattgctgttcggttgcttggcctgatttgatgcggttccagctaagcttgcccccttcgacccgaccaagaagaagaaaaagaagaaggttgtcatccaagaaccttctgatgaagtggacaagcttgcagagaagacagaaacactggcagtcgcagaacccgctgaacttaacttcactggaatgaagaagaaaaagaagaagccggtggatcttgattcaactcttgatgagcttggagatggggaggacactcaagatgatcaagctgtagaggaacaaggggaaggcattgtgctgggaagtgtccctacatacccttgggagggaactgatcgggattataaatatgaagagctgctggacagggtgttcaacattctacgtgagaacaacccagatcttgctggggataggcgtaggaccgttatgaggccaccacaagttcttagggagggaacaaagaagacagtttttgttaactttatggatttgtgtaaaacgatgcataggcaacctgagcatgtgatgatgtttttacttgctgaaatgggaacaagcgggtcacttgatgggcagcaaaggttggtgatcaaaggaagatttgcccccaaaaactttgaagcaatcctgaggagatacatcaatgagtacgtcatctgcaatggatgcaagagccctgataccattctgtccaaggaaaatcgtctgttcttccttcgctgcgaacagtgtggatcttcaaggtccgttgctccaatcaaagctggattcgttgctcaagtcggtcgtcggaaggcatgagcatctatatgtggatggtgttggggtcaataccaactcaacaatagttgattatttgttgactagagattctgcggcgcaatgttgagcaagatatatcaacgatgccctttgtctgcattcaaaggattcatctattgatgtcacaagcctatgaaaactggcgagtgtgaatcctgatctacgactccctgcgatcataatcctgtgactgctggttagtgtcaaatgcagtctgttaaacttcttgatgcggtcactaatacaagttcatcaaagttttgtccgaatgccataattctgtcataaaatttactttctctgtaatacacaatgaatctaagtgtttacttcattattcgatccttggaattcagctgattcattcaaacaaacattctctttagcttc

SEQ ID NO: 70780 - DNA, 1388 bp, Zea Mays
ggtagacgtttttccgttgcattaccgagacgatctccgaggagtatatagaaatggaaaagataaggcgaacgatgtccacctagaaaccctagttcgaacgcgccgccgtcaccgtcgtcgctcgcgctctccgcccgggcgtgtcggcggtgaaagcgactgcgtcagccatggcggacgaggagcattcggagaggagagaggaggcctccgagcttgcccccttcgacccgaccaagaagaagaaaaagaagaaggttgtcatccaagaaccttctgatgaagtggacaagcttgcagagaagacagaaacactggcagtcgcagaacccgctgaacttaacttcactggaatgaagaagaaaaagaagaagccggtggatcttgattcaactcttgatgagcttggagatggggaggacactcaagatgatcaagctgtagaggaacaaggggaaggcattgtgctgggaagtgtccctacatacccttgggagggaactgatcgggattataaatatgaagagctgctggacagggtgttcaacattctacgtgagaacaacccagatcttgctggggataggcgtaggaccgttatgaggccaccacaagttcttagggagggaacaaagaagacagtttttgttaactttatggatttgtgtaaaacgatgcataggcaacctgagcatgtgatgatgtttttacttgctgaaatgggaacaagcgggtcacttgatgggcagcaaaggttggtgatcaaaggaagatttgcccccaaaaactttgaagcaatcctgaggagatacatcaatgagtacgtcatctgcaatggatgcaagagccctgataccattctgtccaaggaaaatcgtctgttcttccttcgctgcgaacagtgtggatcttcaaggtccgttgctccaatcaaagctggattcgttgctcaagtcggtcgtcggaaggcatgagcatctatatgtggatggtgttggggtcaataccaactcaacaatagttgattatttgttgactagagattctgcggcgcaatgttgagcaagatatatcaacgatgccctttgtctgcattcaaaggattcatctattgatgtcacaagcctatgaaaactggcgagtgtgaatcctgatctacgactccctgcgatcataatcctgtgactgctggttagtgtcaaatgcagtctgttaaacttcttgatgcggtcactaatacaagttcatcaaagttttgtccgaatgccataattctgtcataaaatttactttctctgtaatacacaatgaatctaagtgtttacttcattattcgatccttggaattcagctgattcattcaaacaaacattctctttagcttc

SEQ ID NO: 70781 - DNA, 2340 bp, Zea Mays
ctcgcaaacaaatagcagcgcgttgatcttgggtttccgagcactgctcccaggtcacttgctggcttcaataaggaattgggttgcttaccttgactgatataggcaattgagtatgctgctactttaatttgcccgtggaaattcatcagatggattgtctcaaccttaggacatctttccgtgttctgctctcgatacagttgctgctatcatcgttcagtcccttgattgtagcgaacttatcttcggagaagcaagcccttcttgactttgtctctgcagtctatcatggaaacaagctcaactgggataaacatacctcagtttgttcatggcatggcgtaaaatgctcagaagatcagtcacaagtttttgaattgagggtaccggctgctggtcttatcggagtaatttctccaaacactcttggcaagctttattctcttcaagtactgagcctgcggtctaatcgattgaccggaagtcttccagctgatgtggcctcccttccgtctttacgttccatatacctacagcacaatgaactttcaggagggttgccttcttccttcagtcctaacctcagtgtaatagatttctcctacaattccttcacaggagaagtacctgcaagtttacaaaacctcactcagttaaccgttcttaatttgcaagataactctttctctggatccatccctgacctcaagcttcacagtctgaaactattaaatctgagcaacaatgaactgaaaggctcaattcctcgatctctccagaaatttccaaagggttcattttcaaggaatcctggactgtgtgggctacctctagctgaatgctcacatccttcaccagcacgctcacctgaatcatctccatcgcctcaatctccacctttgacacatcatgataagaaactaggcacgggtttcatagttgcagttgctgttggtgggtttgcattgctgacgctaatcgtggttgtgtgcttttcaaagaggaaaggcaaggacgagattgatgtggaatccaaaggaaagggtactgccaccaggagcgagaagccgaagcaagaattcagtagcggcggccaaattgctgagaagaataagttggtgttcttggagggttgcacctatagctttgacctggaggatctactgagggcttctgcagaagtccttggcaagggtagttatggaactgcttacaaagctgtactcgaagatggtactgtcgtggtagtgaagagattaaaagatgttgtggcagggaaaagagagtttgagcagcagatggagctcatcgagaggttgggcaaacatgcaaacctactcccactacgcgcctactactattccaaagacgagaagctcatcgtctatgattatattgacactggaagtgtttcggccatgttgcatggtatccggggcgttaccgcgaagacaccgttagattggaactccagaatgaagatcatccttggaacagcatatggaattgcacatatacattcagaagggggcgcgaagctcacccatggcaatgtcaagtcaaccaacgtactcgtagaccaagatcacaatccttccgtctcggactatggcctcagcgctctgacgagtgtgccggtcaacgcatctcgcgtcgtggtcggctaccgtgctccagagatagtcgagaaccgcaagatcacccagaagtccgacgtctacagcttcggcgtcctcctcatggagatgctcacagggaaggccccgctccagacgcaggggaacgacgacgtcgtcgacctgccgagatgggtgcactcggtggtccgggaggagtggacggccgaggtgtttgacgtggagctgatgaagcaccagaacatcgaggaggagctggtacagatgctgcagatagccatggtgtgcactgccaagtcgccagaccggcgcccgacgatggaggaggtgatcaggatgattgaggggctccgccagtccacctcggagagccgcgcgtcttctgatgagaaatccaaggagtcgaaccctccatcggtgtaaatcctgcgcagctcccttcgtccgcttgatcggttgttgttgccagttgcacctcatttgatttgttagctaatttatttatgattgagtttcttgtaaaccgtggttagcatctgctgcatttagcctcagatagaaagaactgagctttcttattgatagtctgaaactctgtttcatggcgagcgtagaattcttccgctggaaaattgaaattgttagcctgctcgattgcaaatcctttttatacagttgcatctatcagaccatttgacaa

SEQ ID NO: 70782 - DNA, 2298 bp, Zea Mays
ggcttctgcagtaatgttgtctttggcgccaaacgacagggttgcttaccttgactgatataggcaattgagtatgctgctactttaatttgcccgtggaaattcatcagatggattgtctcaaccttaggacatctttccgtgttctgctctcgatacagttgctgctatcatcgttcagtcccttgattgtagcgaacttatcttcggagaagcaagcccttcttgactttgtctctgcagtctatcatggaaacaagctcaactgggataaacatacctcagtttgttcatggcatggcgtaaaatgctcagaagatcagtcacaagtttttgaattgagggtaccggctgctggtcttatcggagtaatttctccaaacactcttggcaagctttattctcttcaagtactgagcctgcggtctaatcgattgaccggaagtcttccagctgatgtggcctcccttccgtctttacgttccatatacctacagcacaatgaactttcaggagggttgccttcttccttcagtcctaacctcagtgtaatagatttctcctacaattccttcacaggagaagtacctgcaagtttacaaaacctcactcagttaaccgttcttaatttgcaagataactctttctctggatccatccctgacctcaagcttcacagtctgaaactattaaatctgagcaacaatgaactgaaaggctcaattcctcgatctctccagaaatttccaaagggttcattttcaaggaatcctggactgtgtgggctacctctagctgaatgctcacatccttcaccagcacgctcacctgaatcatctccatcgcctcaatctccacctttgacacatcatgataagaaactaggcacgggtttcatagttgcagttgctgttggtgggtttgcattgctgacgctaatcgtggttgtgtgcttttcaaagaggaaaggcaaggacgagattgatgtggaatccaaaggaaagggtactgccaccaggagcgagaagccgaagcaagaattcagtagcggcggccaaattgctgagaagaataagttggtgttcttggagggttgcacctatagctttgacctggaggatctactgagggcttctgcagaagtccttggcaagggtagttatggaactgcttacaaagctgtactcgaagatggtactgtcgtggtagtgaagagattaaaagatgttgtggcagggaaaagagagtttgagcagcagatggagctcatcgagaggttgggcaaacatgcaaacctactcccactacgcgcctactactattccaaagacgagaagctcatcgtctatgattatattgacactggaagtgtttcggccatgttgcatggtatccggggcgttaccgcgaagacaccgttagattggaactccagaatgaagatcatccttggaacagcatatggaattgcacatatacattcagaagggggcgcgaagctcacccatggcaatgtcaagtcaaccaacgtactcgtagaccaagatcacaatccttccgtctcggactatggcctcagcgctctgacgagtgtgccggtcaacgcatctcgcgtcgtggtcggctaccgtgctccagagatagtcgagaaccgcaagatcacccagaagtccgacgtctacagcttcggcgtcctcctcatggagatgctcacagggaaggccccgctccagacgcaggggaacgacgacgtcgtcgacctgccgagatgggtgcactcggtggtccgggaggagtggacggccgaggtgtttgacgtggagctgatgaagcaccagaacatcgaggaggagctggtacagatgctgcagatagccatggtgtgcactgccaagtcgccagaccggcgcccgacgatggaggaggtgatcaggatgattgaggggctccgccagtccacctcggagagccgcgcgtcttctgatgagaaatccaaggagtcgaaccctccatcggtgtaaatcctgcgcagctcccttcgtccgcttgatcggttgttgttgccagttgcacctcatttgatttgttagctaatttatttatgattgagtttcttgtaaaccgtggttagcatctgctgcatttagcctcagatagaaagaactgagctttcttattgatagtctgaaactctgtttcatggcgagcgtagaattcttccgctggaaaattgaaattgttagcctgctcgattgcaaatcctttttatacagttgcatctatcagaccatttgacaa

SEQ ID NO: 70783 - DNA, 1835 bp, Zea Mays
gaggcagcccagccaagccagagctcagaggcgccgttgcttgctactgtactggttgccttcttccttcagtcctaacctcagtgtaatagatttctcctacaattccttcacaggagaagtacctgcaagtttacaaaacctcactcagttaaccgttcttaatttgcaagataactctttctctggatccatccctgacctcaagcttcacagtctgaaactattaaatctgagcaacaatgaactgaaaggctcaattcctcgatctctccagaaatttccaaagggttcattttcaaggaatcctggactgtgtgggctacctctagctgaatgctcacatccttcaccagcacgctcacctgaatcatctccatcgcctcaatctccacctttgacacatcatgataagaaactaggcacgggtttcatagttgcagttgctgttggtgggtttgcattgctgacgctaatcgtggttgtgtgcttttcaaagaggaaaggcaaggacgagattgatgtggaatccaaaggaaagggtactgccaccaggagcgagaagccgaagcaagaattcagtagcggcggccaaattgctgagaagaataagttggtgttcttggagggttgcacctatagctttgacctggaggatctactgagggcttctgcagaagtccttggcaagggtagttatggaactgcttacaaagctgtactcgaagatggtactgtcgtggtagtgaagagattaaaagatgttgtggcagggaaaagagagtttgagcagcagatggagctcatcgagaggttgggcaaacatgcaaacctactcccactacgcgcctactactattccaaagacgagaagctcatcgtctatgattatattgacactggaagtgtttcggccatgttgcatggtatccggggcgttaccgcgaagacaccgttagattggaactccagaatgaagatcatccttggaacagcatatggaattgcacatatacattcagaagggggcgcgaagctcacccatggcaatgtcaagtcaaccaacgtactcgtagaccaagatcacaatccttccgtctcggactatggcctcagcgctctgacgagtgtgccggtcaacgcatctcgcgtcgtggtcggctaccgtgctccagagatagtcgagaaccgcaagatcacccagaagtccgacgtctacagcttcggcgtcctcctcatggagatgctcacagggaaggccccgctccagacgcaggggaacgacgacgtcgtcgacctgccgagatgggtgcactcggtggtccgggaggagtggacggccgaggtgtttgacgtggagctgatgaagcaccagaacatcgaggaggagctggtacagatgctgcagatagccatggtgtgcactgccaagtcgccagaccggcgcccgacgatggaggaggtgatcaggatgattgaggggctccgccagtccacctcggagagccgcgcgtcttctgatgagaaatccaaggagtcgaaccctccatcggtgtaaatcctgcgcagctcccttcgtccgcttgatcggttgttgttgccagttgcacctcatttgatttgttagctaatttatttatgattgagtttcttgtaaaccgtggttagcatctgctgcatttagcctcagatagaaagaactgagctttcttattgatagtctgaaactctgtttcatggcgagcgtagaattcttccgctggaaaattgaaattgttagcctgctcgattgcaaatcctttttatacagttgcatctatcagaccatttgacaa

SEQ ID NO: 70784 - DNA, 1642 bp, Zea Mays
tgggaaccaccccgtctcccgtctccgtctgccgtgccgtccccactcccctccgccccaacaacaaagcctctgcctgcccaccagcagcactgaaccagcaccagcgcaaatcctcgcccctgccgacacgggcgcgccacgcccgagccctaagcccgcacgcgcattcgccgggctcccgctgcgccccgccccgccctccgctctgtaccggcgccaatcgccggcggagggttgcttaccttgactgatataggcaattgagtatgctgctactttaatttgcccgtggaaattcatcagatggattgtctcaaccttaggacatctttccgtgttctgctctcgatacagttgctgctatcatcgttcagtcccttgattgtagcgaacttatcttcggagaagcaagcccttcttgactttgtctctgcagtctatcatggaaacaagctcaactgggataaacatacctcagtttgttcatggcatggcgtaaaatgctcagaagatcagtcacaagtttttgaattgagggtaccggctgctggtcttatcggagtaatttctccaaacactcttggcaagctttattctcttcaagtactgagcctgcggtctaatcgattgaccggaagtcttccagctgatgtggcctcccttccgtctttacgttccatatacctacagcacaatgaactttcaggagggttgccttcttccttcagtcctaacctcagtgtaatagatttctcctacaattccttcacaggagaagtacctgcaagtttacaaaacctcactcagttaaccgttcttaatttgcaagataactctttctctggatccatccctgacctcaagcttcacagtctgaaactattaaatctgagcaacaatgaactgaaaggctcaattcctcgatctctccagaaatttccaaagggttcattttcaaggaatcctggactgtgtgggctacctctagctgaatgctcacatccttcaccagcacgctcacctgaatcatctccatcgcctcaatctccacctttgacacatcatgataagaaactaggcacgggtttcatagttgcagttgctgttggtgggtttgcattgctgacgctaatcgtggttgtgtgcttttcaaagaggaaaggcaaggacgagattgatgtggaatccaaaggaaagggtactgccaccaggagcgagaagccgaagcaagaattcagtagcggcggccaaattgctgagaagaataagttggtgttcttggagggttgcacctatagctttgacctggaggatctactgagggcttctgcagaagtccttggcaagggtagttatggaactgcttacaaagctgtactcgaagatggtactgtcgtggtagtgaagagattaaaagatgttgtggcagggaaaagagagtttgagcagcagatggagctcatcgagaggttgggcaaacatgcaaacctactcccactacgcgcctactactattccaaagacgagaagctcatcgtctatgattatattgacactggaagtgtttcggccatgttgcatggagagctgcgtatgtcactgactagatattagttgcttcttttcttcaatatggttg

SEQ ID NO: 70785 - DNA, 1938 bp, Zea Mays
gagaagggcaaggtccccgacaagaagcagcagctgcaaggcgagagggcggtggatttcttctccaacgggttagacggcagagaaaaccacttggatctgcaccagctgggtgcgaggatgctccagcactcgcacagcgcgaacgagatgctgctgaggaggaagctggaggagcagcagcaggccgctgctgccgagctgcagcaggccatggagctccagagccgccgcctgatgaggctgcagctgctggacctgaagccgcgcgcgtcgccgagccccatcggcagcatgcccctgggccccacccaaagggccgtcgactcgccgcccgattccggcagggaggagtcgtccgccggcgacgcgagcccgaacgcggacagcgaccaaaggtggaattagcggctaagcatgcgtcgttatcgccatcatttgttgcgtccgtgtcgcgttttgctgtcgtccagcagcgcagcgaagcaacatctcaccaactgattctccatggggggactccatgcagcgccgagcacaacctgccggacagcccgttcgcgtcgccgacgaggtccgcggccttggctcgcgaccctttcgcggccatcgaccgggagatggctgcctcgcccggtcgtcgaaacggcgccggttccttcgctggcatcagcagcagcagcggcgtcctcgccggccatctgaggccgtcggctctggacatcccttcgccgttcttccccatgtcgatgaccaggctgtcctccgatcacggcgccggcgcgatcgggatgtaaagttatatagtcctcgctgctacttgcctaatcatagaatacttaactagaagcaaaggaaagaagatatagtagtgggagtagtataggagaaacaaaacatcgcagcgtagttcctttttttttactttgtttgtttgtttgtttttttaccatgaaaccaaaggtcagcagatggcagcagcaagcaacagattatagcgcttgctctcctattacattacattacatgatgcatttagcactaattagtagtagttactattaccagcccatctaggtagctgctcctccatgaccatgatatgcacagcagtactaggggggaggaggggtgtgtgatgcacaagaagatgctgctgctacccacatgggactacactggatgcagacagacgtgacagaccagctggtccagcgtgaagatctcacaggattagaagaaacaaacgagtcccggtcccaccagtgtaggtgtcattgaaggaggaccggcccacagcctgctgctgctgctgtgcaaatcattgttggctgcgtcccttcagccctctagcactagcagtagcagcgccggatgcagctcactacaaacaaacaaaaaagttgtgttttttcctgttctttgaattttacttttgcctctgtcgaatgaaatctctactctagttgatacaaagaaatgaaagtggaagatatggaaataatttgctctggtgcttttctccgtggctggcactggcgtctggcatctggcaacgcaacgcgtggaaaaggcgatgcttttggcgatgatgctgctgctgctggctagtgcgatgcagcagccaccaccagcagtacttcagtcgacggagtagcagcaatatcaagagacaattagactaatctcttatgtacccatatatcatacacacaaaaaatatcttgtatatgttattcagtgacatacaagagatgagtataaatttcacaaacagcaatccgccgagccccagcgacgacatccactgtccacatctcaaacaccaatgttaagattggctatgcttcttgctccgggattatggagcatgattgacgcacacaggtatatttaaaacatgctagcccttgcagatgaaccagcgcggtacgtact

SEQ ID NO: 70786 - DNA, 2391 bp, Zea Mays
aggttcagttcagcagccagtcagtcagtcctcgatctgatatcctctcctccctgcagcgactccagctccgatcgattccattccatccatcgagctgcagcagggccatgacgatggcagctacgacgacgatgatgtcagcagcagcgcaggcggcgacgtcgcagctgccgccggggttccggttccacccgacggacgaggagctcatcctgcactacctccgcaaccgcgccgcgtcggcgccgtgccccgtgcccatcatcgccgacgtcgacatctacaagttcgacccatgggacctgccggccaaggcgctgtacggcgacggcgagtactacttcttcagcccgcgggaccgcaagtaccccaacggcatccgccccaaccgcgccgccggctccggctactggaaggccaccggcaccgacaagcccatccacgacgccgccaccggcgagggcgtcggcgtcaagaaggcgctcgtcttctacaagggccgcccgcccaggggctccaagaccaactggatcatgcacgagtaccgcctcgccgccgtcgccggctgcaccagccccctcgccgcctaccgcccgccctccaagttcaggaacgtctccatgagggtaagtcaatcgacctcgatcatccctgaatcatatccattgcatgacctgtacatatgttcttcccattatctatcctatccatggtgtcatgttgagctgagctggtggtcacacgcatgcacgggccgctttcatctgattcgttcgtaacgaccgcaacaatattcgtgggtcacgccggtcgcatgcacgccacgcccgcccggcggtgtgcagtgtgcggcggcatgtcgctcgtcgtgcaccgccagccgccgttggtttggctgcttttccagatcgatgaccaaactgccctcaccggccgaattcgtcgttctccaaaagcgccgtagctagagctaggcagctagccatgcatcaatcagccgccaaaccagcagcgcgtcacatctaccggcactagctcgcatcgcctcgcatctcatcgccgtgaaggtgaatggcagcttgccggcgcacgcaaaggaaaagacgcatgcattatacattcacacgactgctctgctggccatggtggctctatagctggctgtacgcgttgacagcgacggccatgacggtgacgacgacgataacgtttccttgtttgcatgcccttgctggtgtcgttgttgcgtgcagctggacgactgggtgctgtgccggatctacaagaagtccggccacgcgtcgccgatggtgccgccgctcgccgactacgagcacctcgaccgcgacggaccttctcccggcggcttcttcgacgactacttctgcggcagcaccagcttgtacgccgccgccgcgccggccatcggcggcggtgctgctgctgctggtactacaaacactactacgacgccggccgtcgtcatgcagcagcaccagcagccggcggcgctgccgaggctccccaagatcccctccatctccgagctgctgtgggacgagtacgcgctcgcgcagatcttggaccccccggccgacgtggccgccgaccacgcctcgttcgccgtgcacccgtccctcaaccagctcctggccgtcggcgacgacggctccgatctcatgatgttctcgccgcccccggccgccgcagcaggcgggaagcgcaaggcgatggtggcgatgaacatgagcccagctgacgagtgcgccgccactgcccaccagcaccagtctccggcggccaagcggctcaacggtggctcctgcttcgacgacgcgccgcagccggccagcggcttgccggcgacgatgtcgtccgtgcttggcggcggcctcaaccaccacatgctcccacagttctagatagacgacttctggtagctgactttgttgggggcacatcttccgtgcatgtactgcgtcatcaactgatcaatatggtggatcgtctacgcggaatagctagcaacctgcggcgacatggaaagcaaggatcgagctcgtggattggaggccattaataaagatgggtcgtgcggtgaagaacaattgtagcagtacgtagcactatttgtactggagccagtgttgatcaacgttaggcgtaaccatggtatgtatcccatttttttccctccgttgtagagtacaggtactctatattcatttcaggcgcagtgcgaaggtagctggagcttgatgggtccatgtactactacactagtactcttatttattattcaatatgaagtatatattatattgtcttgctagatcaatgggatatttctagaatgtaattttaattccagatatatagacagattat

SEQ ID NO: 70787 - DNA, 696 bp, Zea Mays
cgaagttgaggtagatgttgttgaccatgacgagtccgtgctctggaccgagagccgcgacgtcggcaacggcttccgctgcgtccgcatggtcaacaacatctacctcaacttcgacgccttccacggcgacaaggcccacggcggcgtccatgacggtaccgagatcgtgctctggaagtggtgcgagggcgacaaccagcgctggaagatcctcccttggtgaacgaacgaaagaaactactagctggtaccctaataataattctgctggctgcggcgatcccaaaataaaagaggccgggtgcgatgcatctcggacttctcgagtggtgtttgcgtcagacagccagccactgtggggctagtgttccaacatttgtcagcctgcttgcgcgaggaaggggggtcactgactcaagagaagggcctggtcataggctgctgcattatgaatttctgatgatgtcttatgtctgtactctgaatcaactatgtatgagatctcatctcctttctcctactgaatgaatgaatcattattggctttgctttgcttcacctgcttgaaagcaatgcattgtatggattacaaagatatgaccttttcgttgagcgagaaaaataatgttggtgacgagcaaataataaaactatgtataaatggagattcgaactataattgttggttctaaa

SEQ ID NO: 70788 - DNA, 588 bp, Zea Mays
tgtcgccctcgcaccacttccagagcccacggcggcgtccatgacggtaccgagatcgtgctctggaagtggtgcgagggcgacaaccagcgctggaagatcctcccttggtgtaagaacgaacgaaagaaactactagctggtaccctaataataattctgctggctgcggcgatcccaaaataaaagaggccgggtgcgatgcatctcggacttctcgagtggtgtttgcgtcagacagccagccactgtggggctagtgttccaacatttgtcagcctgcttgcgcgaggaaggggggtcactgactcaagagaagggcctggtcataggctgctgcattatgaatttctgatgatgtcttatgtctgtactctgaatcaactatgtatgagatctcatctcctttctcctactgaatgaatgaatcattattggctttgctttgcttcacctgcttgaaagcaatgcattgtatggattacaaagatatgaccttttcgttgagcgagaaaaataatgttggtgacgagcaaataataaaactatgtataaatggagattcgaactataattgttggttctaaa

SEQ ID NO: 70789 - DNA, 1683 bp, Zea Mays
tcgacgaccgcgtacacgaacgtacgtcatgcatgtgtccatgcatcatcatcagctgctcatcacacctacctgatgggtggtcagataatcaatccgtctggacgaatgaataaccaaccaattaatcaacagcatatatagtatgtttcatccatttttctcatcactcaacgacgacgacgacgactcctacctattattatgtacacaatgcgtgcttcaatcctgtcgaccagaggcaacgacacgcgcgcggttacacactactgctagctgttctaattactcagtacgtagctagctactgaagattagccaactaaccaatcatcacaaaccacaccgccggcgaggtctcgacacatcttcgtcagacagacctcgtccatgccaatcggcgcggccggcctttccttccactcttctgcgtctaataacaggttaatatatccaatcaaccaactaatcaatccatccgcccggcaaaccgatggacccaaattaaatagggactaaatggaactaattacgtatagtactagtgtccggccggccggtcgatcccagcctaactagaccttccacatgttcatgttgtagtagtcctccatgaagccgccgtccagctggagcagctcgtccacatgctggagctggaacatgtccgcgcccggcgtctcgcgcgacgggctcagcaccatcgccggcgccggcgcctccgccttgcagtgcctccgtatggcctgctgctggtgctggtacgggctgttgctcggcgcgggcagctgcggctgcggctccgccttggtggcttgttggtacccgccgctgtcgtcgttcgtcgtcgtggtcgtccccgccgcggcgaagagggagccggcggcgtacgttgtcgagtcgacgagcgggggcaggtcgtcggcgttgtcgagcaccaggtcgtcgaggaaggccagcgagtcgctgcgctccatgcccacggacacggcgtgcggcggtactcgtgcatgacccacggcgtcttgcctccgcgcggcgcgcggcccgtgtagaagacgagcgtcttcttcatgccgacgagcacgcggcggggactactgctactgccgcggaagatctccttgtccttccccgtggccttccagtacccgctggcggtggcgcggttggtgcgcatccccgtcgggtacttgcggtccttgtggcagaagaagaaccactccttctcgcccatcttagccttgcctgcatgcagaggagaggcggaggagcatattatatgaaccaaccacgcacggagcggaggaggtagaggtaggctgctagcagctagcttagcttagcttacttgggagatcccacggctcgatcttgttgaggtcggcgtcggcgatgacgacgcaggagaagcggctgtccagcgccttgtgggtcaggtagtgcgacaccacctcctcgtcggtggggtggaagcggaaccccggcgggagatccagccgcgacgacgatgccatctggctctgcctccaaccaaccaaagaacttgtcacttgcgcaagcttagcttagcttagcttagcttagcacggcgtggccacagccactgacggaggaggaggaggagagaggcaggcggcggcgaccaattccttccttctccgccggcggtacgtgtgaatg

SEQ ID NO: 70790 - DNA, 1305 bp, Zea Mays
gtaccaaacacgcactagcagcagtccggccaccaccaccaccaccgccgcctgcgatgcggcgacggcggtgaactgtaaaagagatggcatcgggtccgagatgcgtgcatgcccctcgaaaagacgggtaacgaactgccagcaggctagcccgcccgctttcggcctgcccaaatgggaaccgaggcccagcaaaggttgctgctgtccgtttctgcaagcttccagtccagttctcttgagtgcctctctctccatcccttctggcatatccatgcagacagacatgcatcaaccgaggatcactattcactcacaccagtcgtgagtcgtctcgtctccagccagtgcatatcctaatccatcgtgccccccaagcaaggcccttgcttgttgcttctaaaactctcgaaatccaaggatttgcatagacacatcagctgcacgcttatgtccatatgtgctcgcgcgccacttgttcatcaccaaagagccaaggaattagaaggcctgctacatactagctagggcgctacgacgagaggtcaccgtcaggagtgccccggtggcacactcaacgtggcaacaagccagcagcagagagagacgaccacgacatcgtcccctggatgcatcaatgcatatacgatgagccaccaaaaagaaaaaaaaagattcctggcccctgctggcggttttatttatttatttatttacacccgatcgaaggagataggacaagctagcggggtccttgaaatccatacggacatggacgacgacgactccactctccatcgcatgcacgctggctaagcttgcttgttcggggatgcacggacaaaacaacacggggaggaaaaaaaaacacatgagacgggcgctgtatatgcatgatgcaggtagctagatgttccatgcattccaagcatttatgcatgtgtttatggtgatcgattgagtctaagtttgtaagtttttttaaaaaagtctcgttaataaatatgactagcgagtacggctcctgcaatggaaaagacatgcatgacgttcgtggatttttcattggctcgtgtcaacagcactgtgaagaaaaaaaaaattggaattgtgaaatgtatcggagtgacagggctccacataggaaggatgtcgtacatacgtacattcattcccctgtagaagcgtacattcattccctttgtcttttcctgtagatactacagtgacgccgtgtacgtggcatctaattaatcatccgatgcaaatcgcgatcgcgcgagagaaaactccatcattttt

SEQ ID NO: 70791 - DNA, 2433 bp, Zea Mays
cgcctttattattgtcgtcgtgctgcctgcctttgtaccatcagcttggtcgtaaagcttgctagcttcgtggttcagtaccctctctttgcagatgtgacaggtgaccgggtgcagagaattgaagtgtgtgctgggtcatgcggcgcccagcttttagggttacagctagtgctctgctgccaccgatccagcacagctccagcctccaaatgggtcgttggtaaactgacttgactgggggagtatgtcgtctcttaacacacacacacctagaacgaattggtcgtaatcggactgtttccttcatcccagagaagtataagagattgatcacttgtgcttgaactgatgtctgtctatggcaactacagtacggtgaagaatgaagagggtgggtagctgctgctcgctctgttgagtgttgtctgcttctagctgattgctgattgctgaagctggcgggcgggcgggcggtcggtcggtcggcagagatagaggtctcggaaggagacacgcggtggcctccatttggccggcgcgggcggtgaggtcgccacttgcggccgagtgcgctcgacacgccgtccgatgccagcccgatggatggatggataatgcctgatgtgacttgacccgagcacaccacgcagcagcagcaagttgcaacatgcattgcattcaggttcattaaagcaaatgcgtgcaatggtgcgactcatcatatgattgatcattacatacatacttagtatagatgttcgatgtggatgcgtcgtaggtacactctatttgtttgtgtgtgtctgtctgtctctctctatatagtaaacacacacacactgctggtatcgaattctttgcctcctttttctgatctacaccggacggacggacggcaagagctgacagacattcactgaagaacacgtacacagagatactaggtactgcagcatgcatgcgtctccgacgatccaaataacatccaattccatgcatggtaaggaggagtacgtgtactgcagctagctctggggtctccatgtcggcaatgcaatgtgctatagctagctacctagtagcccctcgtgacctgtccaacattaggggaacaaaacaacaagacggcccagatgcttgctgcttgcatatgggatgtcgatcgtcgtctatcgttcatcatcattcaggtaaatcattgtacctagttaattaaatcgtgtggccaaatcttagagagagagagagatactgaccaggaagtagctctcgcccatctgcaggctctgcgtgagcacgccgtactcgttgacggggaggaggccggcggtggagtgcaccagcatcacgtcctgcccgaacatggaccgcaggtcgatcggcccccgcggcacctccgtcgccacgccattgatgaacaccgtcatgctcgctgctgcatgcatatatcatacaacacaccgtacgtcttgttaacttaattggacgatgtctgtctgcccaattatattgctatgttatcttctgatcatgcgtgcagcatgtgtactagaaattagaatactggaactgggtccccattactcttaatatcacagcatgcatgagcaaaacatgttagtatttgcttgcaggtccagctgcatatcgcatgcaagcactcatgcggccggcatgtgttaaggtactagatagtatttgtattatactactactactgatgatgctacataattaagcacaacacaattgagtagtgatgcagcgagctgtcttgtctgaattagcagatacggcggtggacgatagctcccggtcaaacgaaaaatgaacacccaccgtccatcataagaactcaactgttcctccagttaagttcctgtggtagatgtgattgatctaatacccagcaggatctagttcttcgcattggcatgatatgcttgtcgctaactacccgaagataacagctaggtagcaccaatcgagactcgatcgacctctgctgcacagcatgcatagcaaattatgcatggatcttttgcctttgcatgccagtatgggtatgatctttataggagggctagcagtgaaagggtctaatttccctgaattcgaaacccaagttcttgattaagagcacagattaaactggacgaaaaccaagcatggacgatggacccatgcatccatggatcgagagcacgaagcatgcatgcatgcatagcgtggcgtggcttttggcgcgctcacctggctggcacggcgagtagtaaagctgctgctgctgctgctcgtggtgtgcgatggccgccgaggacgcggagccggagccaccgccgctggcgtagcccatctgccgcgagatggcgaacaggtcgtcgccgccgccgtagtccaggtcgcccatcatcccctcgcacgacggcg

SEQ ID NO: 70792 - DNA, 544 bp, Zea Mays
agtaaatgtaatagacatattttacatcatcttacaatcatatttccttctatctcaatacatctattttacttagtcttcgtgtatttgtcaggatttatgtgaagatagaggggacatgagtgtcaccggcgaaaagccatgcacacatcgggaatcagatgttggtcagacaaatagttgtagccttaacaattccagtgagtgtgagaatcatacacccagcaacgacgaaatatcggaaccagagtccaatttggagatggccaagactgatcagggcggcgatgtgccgagcggagagaaggtcctgaagaagccagacaagatcctgccgtgccctcgctgcaacagcatggacacgaagttctgctactacaacaactacaacatcaagcagccaaggcatttctgcaagagctgtcagagccataggtcatgccttcgagataaaacaactcgacgtcatagactatgacgacgaggtaactggttacagctcgacatcataaactatggcgacgaggtaactgatgcacttagc

SEQ ID NO: 70793 - DNA, 2187 bp, Zea Mays
atgcatcacagccgttgatttttgcagctaagcaaggatttatgtgaagatagaggggacatgagtgtcaccggcgaaaagccatgcacacatcgggaatcagatgttggtcagacaaatagttgtagccttaacaattccagtgagtgtgagaatcatacacccagcaacgacgaaatatcggaaccagagtccaatttggagatggccaagactgatcagggcggcgatgtgccgagcggagagaaggtcctgaagaagccagacaagatcctgccgtgccctcgctgcaacagcatggacacgaagttctgctactacaacaactacaacatcaagcagccaaggcatttctgcaagagctgtcagaggtactggaccgcaggcggaagcatgagaaacatccccgttggtgctgggaggcgcaagagcaagagctccagcgcgagttgccgcagcgtgttgattcccgttccaggcagcagtagtgtagctaatcctggcggagaggcttccctgtttccgttgtccgtaaaagcaaaccaagcagcagttagcttcgggcctgattcccccctctgcacctccatggcctccgtgctgaagatcggaggaggaggagagcaggttaagagctgcagccctgcctcagcagcagcacagcccaggaacggagaaacccagacccagacgtgcgcaccttcttctgctgctacaacaccatcagatggtccagggaatggattgcagaaaggagcagagagcgcacaccaaaaccaaaaccaaaaccaaaacggaatcattgggcacagcaacggagtcactccagtgcatcctataccgttcttccccggaccgcctttcgtgtacccctggagtccagcatggaacggcattcccgccatggcagcggcggtgtgcgcagccccagcgacagccgaagcagcgatttcatcagaacacggcaccgcgagcagcaccgtccagtggaacgtgccaccagcgatcgtgcccgtgctgccaccgggattctgcggcccgatcccagtcccggtaatcccgccgccttccgtctggccactgatcactccctggcccaacgcagcatggagcgcgccgtggctcgggcctagcgctagcgtgccgccggggtcatctcggagcagcggcagcagcacgtgctccgacagcggctgcggctccggctcccccgtcctgggaaagcactcgagggagtcgaggccgcagggcgacgagaaggcggaacgacggtgcctgtggatccccaagacgctccggatcgacgaccctgtcgaggccgccaagagctcgatctggacgacgctcgggatcgagcctggcgaccggggcatgttcaggccgttccagtcgaagcatggacggcagcaggagctgcaagcgtccggcgccgctcgcgccctgcaggccaacccggcggctctgtcgcgctcgcagtcttttcaggagacgacgtgattactacactacagagcagagcgttgctgaaacctgtgtggcattactattcagagacgattgtatttcaacttcaaggggggaaatgagagagagagcgcgagagagagattggcctgtttggttcactacctcagttgccacactttgcctaacttttctgactaaggttagttattcaattcgaacgactaacattaggcaaagtgtggcatatttagtcataaaccaaacatgccatatatgttctgtacaatatgattggcaacataggtgctgctgctgtacaaggcagcggacaccgttactgtaactgtaaccattggaagagtgcatcctcaaacagtgtgttgtttccatgtagagcgtgcccccaacatgttgggttggaggtgatcaggtttccagcgcgtgcgtgcttggttgtacaagaataactgtcaatagcttcccttcgcttccctcgagtcattgtgttacgctggtcctgaattttttgcaacttacttttatttaaaaaaaaatcacatttagacctctacacaacttattgttgtttttgatcttttgctcagccataggtcatgccttcgagataaaacaactcgacgtcatagactatgacgacgaggtaactggttacagctcgacatcataaactatggcgacgaggtaactgatgcacttagc

SEQ ID NO: 70794 - DNA, 2212 bp, Zea Mays
ccagcactgaacgttgggatggccatgcatcacagccgttgatttttgcagctaagcaagggatttatgtgaagatagaggggacatgagtgtcaccggcgaaaagccatgcacacatcgggaatcagatgttggtcagacaaatagttgtagccttaacaattccagtgagtgtgagaatcatacacccagcaacgacgaaatatcggaaccagagtccaatttggagatggccaagactgatcagggcggcgatgtgccgagcggagagaaggtcctgaagaagccagacaagatcctgccgtgccctcgctgcaacagcatggacacgaagttctgctactacaacaactacaacatcaagcagccaaggcatttctgcaagagctgtcagaggtactggaccgcaggcggaagcatgagaaacatccccgttggtgctgggaggcgcaagagcaagagctccagcgcgagttgccgcagcgtgttgattcccgttccaggcagcagtagtgtagctaatcctggcggagaggcttccctgtttccgttgtccgtaaaagcaaaccaagcagcagttagcttcgggcctgattcccccctctgcacctccatggcctccgtgctgaagatcggaggaggaggagagcaggttaagagctgcagccctgcctcagcagcagcacagcccaggaacggagaaacccagacccagacgtgcgcaccttcttctgctgctacaacaccatcagatggtccagggaatggattgcagaaaggagcagagagcgcacaccaaaaccaaaaccaaaaccaaaacggaatcattgggcacagcaacggagtcactccagtgcatcctataccgttcttccccggaccgcctttcgtgtacccctggagtccagcatggaacggcattcccgccatggcagcggcggtgtgcgcagccccagcgacagccgaagcagcgatttcatcagaacacggcaccgcgagcagcaccgtccagtggaacgtgccaccagcgatcgtgcccgtgctgccaccgggattctgcggcccgatcccagtcccggtaatcccgccgccttccgtctggccactgatcactccctggcccaacgcagcatggagcgcgccgtggctcgggcctagcgctagcgtgccgccggggtcatctcggagcagcggcagcagcacgtgctccgacagcggctgcggctccggctcccccgtcctgggaaagcactcgagggagtcgaggccgcagggcgacgagaaggcggaacgacggtgcctgtggatccccaagacgctccggatcgacgaccctgtcgaggccgccaagagctcgatctggacgacgctcgggatcgagcctggcgaccggggcatgttcaggccgttccagtcgaagcatggacggcagcaggagctgcaagcgtccggcgccgctcgcgccctgcaggccaacccggcggctctgtcgcgctcgcagtcttttcaggagacgacgtgattactacactacagagcagagcgttgctgaaacctgtgtggcattactattcagagacgattgtatttcaacttcaaggggggaaatgagagagagagcgcgagagagagattggcctgtttggttcactacctcagttgccacactttgcctaacttttctgactaaggttagttattcaattcgaacgactaacattaggcaaagtgtggcatatttagtcataaaccaaacatgccatatatgttctgtacaatatgattggcaacataggtgctgctgctgtacaaggcagcggacaccgttactgtaactgtaaccattggaagagtgcatcctcaaacagtgtgttgtttccatgtagagcgtgcccccaacatgttgggttggaggtgatcaggtttccagcgcgtgcgtgcttggttgtacaagaataactgtcaatagcttcccttcgcttccctcgagtcattgtgttacgctggtcctgaattttttgcaacttacttttatttaaaaaaaaatcacatttagacctctacacaacttattgttgtttttgatcttttgctcagccataggtcatgccttcgagataaaacaactcgacgtcatagactatgacgacgaggtaactggttacagctcgacatcataaactatggcgacgaggtaactgatgcacttagc

SEQ ID NO: 70795 - DNA, 1953 bp, Zea Mays
ctcggcaagaggagacaggaggtcggtagtttagttttcagaagccaaattaaattaaaggctgtctgtctcactcactcactcactcccagaagagagaagaccacaccacacaaacaaacacctctttggtttctacaaatagaggacgcactgccactgactgagctacaccggtaaaagctgccaaggatatatatcccaccagtcaggaatgcccgcaaccagacatttcagtacataacaggagctgaacaactaacgtacaggctgacagcagcagatgtatcatcagcaacagctccacacccataaccagcacctgtcctcgtcaaggccaggcttacctcctgagaagcagttcctcctgcacggagcaggcggcggcggcggcggcggagatgcagggctcgtcctctccaccgatgctaagcctcgcctgaaatggacacccgagctgcacgagcgttttgttgaggcggtgcatcagctcggaggcccagacaaggccacgccgaaaaccatcatgaggctcatggggatccctggactcaccctgtaccatctcaagagccatctccagactcagcaagaacctccaggcccaagctcatactgccagcgcaaagaatgcgttggtaggctgccggacgggagcagacaacgccctatgccaagggagtgcttcaccgccgccaccaccgccgccgccgcacctgaacctagaaccgccgcagataaacaggtcaatgcacataagtgaagccctccagatgcagatcgaagtccagagacggctgcatgagcagctagaggttcagagacacctgcagctgcggatcgaagcgcagggcaagtacttgcagtccgtgctggagaaggcgcaggaggcgctggccaagcagagcggcggcgctgacgagacgacgacgacgacgcagcagcagcagcagttgctgctgccggatctcatctcgagagccacggcgacgaggcgcggcaatgtccagcaggagcacctccaccagcagcaccacctcggaggcgacgggtcggtggacagctgcctgaccgcgtgcgaggggtctcggtgccagagggagagggaccaggacctgctgtccatcggcctctcgtccgctccgcctcccactcccactcccagcagaggctacaacgacagaggaggcggcggcagcgccagctgcgaggagttcctgcagtttcttgacgagcccagcagaagaggagcaggaggaggagggtcctcggatgagcagcaggagcttgacctcagcatcagcggcggcaggagcaatccaaggcctcgcggcagccaaagccaaaggatcgacctcaacggatccagctggaactgaatggtcgtccttttagcaatggtctccttcctcgtagctttagctgcagtagggaaaatggccagggtcacagcaggtgccctgtgtgtgggtgcacttccatgccctgcagccatttgcagcaaataactaagcagtgactgatgatgatggtgaattggcatgcgagaaagagaacccagatgcacgttctcctttgacgtctgattagttaactctatagatctgtattccagacatggaaaagtacactgctgagatcctctcatcagtttcaggaatgtacagaactcgcagcggatgcacacgaatccatgctgctgcttctgccttggcccaccagtcagtaagctattcctcgctcggccaagccaacacaagcgatggaaatatccagctcggagctcgctattccactgtagcatgcttcttgtttcgtttgtctgtgcgtggccatcttcgtcccactagtcgctttctgtattcttttcttcctcttttcaactgcccattgctggtttgacacacaacgttgctctgtatttctggaataataaatggtactcaatcagtt

SEQ ID NO: 70796 - DNA, 2017 bp, Zea Mays
ctcttgccttataagacagacagacggccgggggagtctgctgcgtaacataacatctcggcaagaggagacaggaggtcggtagtttagttttcagaagccaaattaaattaaaggctgtctgtctcactcactcactcactcccagaagagagaagaccacaccacacaaacaaacacctctttggtttctacaaatagaggacgcactgccactgactgagctacaccggtaaaagctgccaaggatatatatcccaccagtcaggaatgcccgcaaccagacatttcagtacataacaggagctgaacaactaacgtacaggctgacagcagcagatgtatcatcagcaacagctccacacccataaccagcacctgtcctcgtcaaggccaggcttacctcctgagaagcagttcctcctgcacggagcaggcggcggcggcggcggcggagatgcagggctcgtcctctccaccgatgctaagcctcgcctgaaatggacacccgagctgcacgagcgttttgttgaggcggtgcatcagctcggaggcccagacaaggccacgccgaaaaccatcatgaggctcatggggatccctggactcaccctgtaccatctcaagagccatctccagaaatacagactcagcaagaacctccaggcccaagctcatactgccagcgcaaagaatgcgttggtaggctgccggacgggagcagacaacgccctatgccaagggagtgcttcaccgccgccaccaccgccgccgccgcacctgaacctagaaccgccgcagataaacaggtcaatgcacataagtgaagccctccagatgcagatcgaagtccagagacggctgcatgagcagctagaggttcagagacacctgcagctgcggatcgaagcgcagggcaagtacttgcagtccgtgctggagaaggcgcaggaggcgctggccaagcagagcggcggcgctgacgagacgacgacgacgacgcagcagcagcagcagttgctgctgccggatctcatctcgagagccacggcgacgaggcgcggcaatgtccagcaggagcacctccaccagcagcaccacctcggaggcgacgggtcggtggacagctgcctgaccgcgtgcgaggggtctcggtgccagagggagagggaccaggacctgctgtccatcggcctctcgtccgctccgcctcccactcccactcccagcagaggctacaacgacagaggaggcggcggcagcgccagctgcgaggagttcctgcagtttcttgacgagcccagcagaagaggagcaggaggaggagggtcctcggatgagcagcaggagcttgacctcagcatcagcggcggcaggagcaatccaaggcctcgcggcagccaaagccaaaggatcgacctcaacggatccagctggaactgaatggtcgtccttttagcaatggtctccttcctcgtagctttagctgcagtagggaaaatggccagggtcacagcaggtgccctgtgtgtgggtgcacttccatgccctgcagccatttgcagcaaataactaagcagtgactgatgatgatggtgaattggcatgcgagaaagagaacccagatgcacgttctcctttgacgtctgattagttaactctatagatctgtattccagacatggaaaagtacactgctgagatcctctcatcagtttcaggaatgtacagaactcgcagcggatgcacacgaatccatgctgctgcttctgccttggcccaccagtcagtaagctattcctcgctcggccaagccaacacaagcgatggaaatatccagctcggagctcgctattccactgtagcatgcttcttgtttcgtttgtctgtgcgtggccatcttcgtcccactagtcgctttctgtattcttttcttcctcttttcaactgcccattgctggtttgacacacaacgttgctctgtatttctggaataataaatggtactcaatcagtt

SEQ ID NO: 70797 - DNA, 6511 bp, Zea Mays
ctccgcggaccttccttgatccgaaagctcaactcaaaagtccattgttttcgcgaatgaaatcaatcaataaaaactgatgaaccaggccatcaccatggccggcggcggtcactctgcttacacaccacgccgagccacccactaaagcgtcgccgtgaaaaactaccaaaccccttcactgctccctcccatccaaaaccctaaccctacagccaccgcagtggctggccatgggggcgccgcgcgagctcgagctctccgacgaggtggagggcgaggaggacggcaccaccgactttgttttccgccttgccggtgaccccatcccgctcctcccgaccgactccaacccgctcccgctcttcgacctgctgtcccctcccgcgcgcccgctcgccgtctccgaccgacacgccaccgtcttcctcgcccaccccagcgggtttatagctgtgaggaccaaggagttaatcgaagccagcaaggaggcgcgcgagaagggcaagtcgagcactcgctgcgcgcaggactgctgcgtcgccgacgtgcccctccccggtgtatcccttatcgcgctctcccatgatgagtccgtgttagccgcctgcacacatactgagatccagttcttctcgctggcgtctctgctcacacataaggacgtggtaccatcctcatcatgtagcctggaacgagctgtcactgtgaaagatttcaagtggttaaatcatgcctctgcagcatatattgtactctcaaatggtgggttgctgtgtcatgggaatttgggtgaaggcctgaaagatgtgatggaaaacgtcgatgcagttgactgttgcaaagaaggaaatcatattgctgttgcaagagggaacaaacttaccatattatcaccagattttacggaaacatgctccatgtccctcttgttccagttgtggtctgacggaagtgattcaaagggcactaccatcaaagtggattctattggctgggtacatggtgatagtattgttattgggtgtgttcgattaaacgaagatgacaatgaagaaggataccttgttcaagttataaggactgaagaaagcacattttgtgagagcccaggcaagacagatgtttatacctataacgattttttccatggcattatggatgatgttttaccacccggagctggacctaatcttcttttgggttatctgcatcgctggggtctcatggtggcttccaataaaaagagcgtcgatgaacacattgcccttcttaagtggccatctgcacatgatgatgaaaaaactgtaacatatcttgaaatgttggaggataaatacagtcctaggattgacttgcaagagaatggcgatgacaatgtcatactagggtttggtgttgagaatgtttcattatttcaaaagatcactgtaccagttggacctgaacaaaaggaggttgcccctcaacatattctcctatgtttgactggtgagggcaaagtagctgtatattacctcgccaggatttcggacccttctgatttacctcatgctactgtgtctaccaatgaggactatggtgaaaaacatatttcacctgcaactgtatctgaaaaggagttgactccaagtgttgcaggctcagtatataagagtactctcacagaacatggtgctgagccatctagtgcgcaaacaggtagcaaccagcaggaatcaataaatgtgaaaaacagtagctcagcttcaaaagaacaggaaacaactgacaattcattgtttatctcttccaataagaagcccttagacaccaagcaagtgaatgtgactggtccacctgcagccttgcgtagcttagcgttaacaggaaacacaaaacctacaatattttccagcttttctactgaaggcatgaatccaacaggaggcaatgcacctaatgaattagcttcttccttgcaaccaagcagcagaagttttggaaacaaccaaactggtaaagaaggcctggattcagttcaatcagtgggaatatttggtggatctcaaaactccaataaagatggcaatgtctatggtttcaagtcttcattattcacctctagtggatctgtccctgccaagatcggagaaaggaatgaggttggttttggagttccttcgctgcaaaccagttacaccgctgatagaaaagtttttggtgctccagttgccttaagctctgtaccttcatcatctatatctccggctaaaccttccccaattggatattcatcaagtggatttcggacagcaaactctgaagcacctcaatcattgcgtggatcacctccgtcacagcaatctatgggcaaatcacataacagcaggacacaagcaccggcagaatattctagaaactccaagaagggcacaggattcgattctgaacaagacttgtctaaaaaattttacagtataaatgaaatgacgaaggagttagatgccctactagcatatatagaaaaggatggtggttttagagatgcctgcataaccatccaacagcgtcctctttctatgtttgaggatggcttacaaaactttttgcagctgttgcaggtcttcaagggcaaagtagaggagcaatgttcaaaaattgaagatctgaggaacaacatgtttcaagtttctgctaggcaaacttacatgaaaggaattgttagccagtcttcagataatcagtactgggatatatggaaccgtcagaaattgagtccagaattcgaagtgaagagacaaaatattctcagagctaaccaggatttgacaaatcagctggttgagctggagaggcacttcaataatctggagatgaacagatccagtgaaacaggaagagtggcttctaatcgaagagctgtttattctaacaagacaagttcgagtcagacacaattatccagtgtatatagtgcactgaactcgcagttggcagctgctgagcagctatctgaatgcctttcaaagcagatatctgtgttaaatattggttctcctagtaggaagcaggggatggtgaccaaaaagttgtttgagtcaattggtttagcccacacaactgatgcaaccaaattttcaggcagcactcctaagccagttaagcggtttccatcagtgaatgagcattcaaagggaatattagggtcttccaagggtggtgagcctgagactgctcgaaggaggagggaatcactggatatgagcctggctagtttggaacctcagaaaacaactgttaaaagaataacacagcaacaacgcctcaagatcagcagtgatctaccattcaggtcaaacaagaaaatatttgattctcaaatggcagcaatatcacaggaaaagtcaagcgatagctccaattcatctatagtagaatcatatgtaagcagactgcgttctctgagtgaagatgtaaacgataaactgtcaggaccccaacagaaccctttgttcaaatgggtaaaggaatcaactgggtcatctcaaacctcagagcaaaagcatttcgagttaccagggcaaatgaaaagtactgcacagtcttcaaaactgacaccatcttcaccaccatcattcagttacacacgtatgggtgcacaagatagtatcaacccatccagtgttccatcctttggaacaaaacatactgtgtctaagccaaatactctaaccttcaaaaccactataagccctaaaagtaatgccaacacagagccaaatatattaccttctataacagctccaaaaacttctctaagtccactgtctgtaaaaactgctggggagtctggagatttgcctacattaactatgaagaacagacaggatggtcagtcaatgccatctttggggaacataaaaggaccgggtgcttctctgcagaacaagggtggcatatttagagatctcgacaaatcgtcttttaattctgaacattccaagcctgctgcattacatgagaagactgaccagctaagtggggttggcgatgctgtgcagaacactgtgaaagatacctccaaaatggcacctcaaccttctgctttcttgccagctcctgttactcagaccaattcatactccttaaggccgactgtttcttcttcagccacatcaggtgcgaaaacttcagatgttttatctagctcaatgcagaaagtttctccaatagtacctgggggtactgtgtctagctcagtccctactcctgctaaggattcatcaactggattgagtcaaaatgcttccaaacctgaaacgctaatatcaaagcaccaacaacatcggaatcagttttcacttccacaggaaaaaatgtaggaccaaacactgacaccatctcaaccgatgaagatgacatggaagaggaggcaccttctgcaagtgccgaactgaacttgggagcccttggtggattcggccttgggtcccagccttcttcaagtcctcaaaagtctaatccttttggtgcctcctttggtacatctggcaataaaagttcaggcacaccatttactttgacaaccagtccaggacagcttttccggccagcgtcgctaagcattccttcagctcagccagcccaaccatctcaatcaactagttctagttctttttctaattcgttctcaagtgggcttactggatttggacagcctgcacaaattggatctggccagcagtcagcttttgggaagcctgcacagattggagctggccagcatgcaggatttgggcagactgcccaaattcaatctggttttggccagcctgcccaaattcaatctggttttggccagtcagcacaaatcggaactgggcaacagtcaggatttgggaagcctgcacaaattggggctgtccagtcaggatttgggcagcctgcacagtttgctgctcaacagacacttggatcagtgctgggttcttttggacaacctccccagttaggaggcataggttctggaggatttggtggattttcaagtgcttctacatctgctggttttagttctttatcttcaggtaatgctggatttgctggtgctgcatcaggtgggggcttttcagcaccaactgcttctgcaggtggtggttttgctgctgctgctactggtggaggttttgctgctcttgcttccaaaagtggtggttttgttggtgcagcttcatctggtggtggttttggaggtgcctcccagggaggtggctttggcagtggtggtggtggattcggatcctttggtggtaatcaaggagctgggttctcggcatttggagcaagtggggctggaagaccggcagctgatttcttgacgcagatgagaaagttcagagacacctgcagctgcggatcgaagcgcagggcaagtacttgcagtccgtgctggagaaggcgcaggaggcgctggccaagcagagcggcggcgctgacgagacgacgacgacgacgcagcagcagcagcagttgctgctgccggatctcatctcgagagccacggcgacgaggcgcggcaatgtccagcaggagcacctccaccagcagcaccacctcggaggcgacgggtcggtggacagctgcctgaccgcgtgcgaggggtctcggtgccagagggagagggaccaggacctgctgtccatcggcctctcgtccgctccgcctcccactcccactcccagcagaggctacaacgacagaggaggcggcggcagcgccagctgcgaggagttcctgcagtttcttgacgagcccagcagaagaggagcaggaggaggagggtcctcggatgagcagcaggagcttgacctcagcatcagcggcggcaggagcaatccaaggcctcgcggcagccaaagccaaaggatcgacctcaacggatccagctggaactgaatggtcgtccttttagcaatggtctccttcctcgtagctttagctgcagtagggaaaatggccagggtcacagcaggtgccctgtgtgtgggtgcacttccatgccctgcagccatttgcagcaaataactaagcagtgactgatgatgatggtgaattggcatgcgagaaagagaacccagatgcacgttctcctttgacgtctgattagttaactctatagatctgtattccagacatggaaaagtacactgctgagatcctctcatcagtttcaggaatgtacagaactcgcagcggatgcacacgaatccatgctgctgcttctgccttggcccaccagtcagtaagctattcctcgctcggccaagccaacacaagcgatggaaatatccagctcggagctcgctattccactgtagcatgcttcttgtttcgtttgtctgtgcgtggccatcttcgtcccactagtcgctttctgtattcttttcttcctcttttcaactgcccattgctggtttgacacacaacgttgctctgtatttctggaataataaatggtactcaatcagtt

SEQ ID NO: 70798 - DNA, 5500 bp, Zea Mays
ggtcactctgcttacacaccacgccgagccacccactaaagcgtcgccgtgaaaaactaccaaaccccttcactgctccctcccatccaaaaccctaaccctacagccaccgcagtggctggccatgggggcgccgcgcgagctcgagctctccgacgaggtggagggcgaggaggacggcaccaccgactttgttttccgccttgccggtgaccccatcccgctcctcccgaccgactccaacccgctcccgctcttcgacctgctgtcccctcccgcgcgcccgctcgccgtctccgaccgacacgccaccgtcttcctcgcccaccccagcgggtttatagctgtgaggaccaaggagttaatcgaagccagcaaggaggcgcgcgagaagggcaagtcgagcactcgctgcgcgcaggactgctgcgtcgccgacgtgcccctccccggtgtatcccttatcgcgctctcccatgatgagtccgtgttagccgcctgcacacatactgagatccagttcttctcgctggcgtctctgctcacacataaggacgtggtaccatcctcatcatgtagcctggaacgagctgtcactgtgaaagatttcaagtggttaaatcatgcctctgcagcatatattgtactctcaaatgttgactgttgcaaagaaggaaatcatattgctgttgcaagagggaacaaacttaccatattatcaccagattttacggaaacatgctccatgtccctcttgttccagttgtggtctgacggaagtgattcaaagggcactaccatcaaagtggattctattggctgggtacatggtgatagtattgttattgggtgtgttcgattaaacgaagatgacaatgaagaaggataccttgttcaagttataaggactgaagaaagcacattttgtgagagcccaggcaagacagatgtttatacctataacgattttttccatggcattatggatgatgttttaccacccggagctggacctaatcttcttttgggttatctgcatcgctggggtctcatggtggcttccaataaaaagagcgtcgatgaacacattgcccttcttaagtggccatctgcacatgatgatgaaaaaactgtaacatatcttgaaatgttggaggataaatacagtcctaggattgacttgcaagagaatggcgatgacaatgtcatactagggtttggtgttgagaatgtttcattatttcaaaagatcactgtaccagttggacctgaacaaaaggaggttgcccctcaacatattctcctatgtttgactggtgagggcaaagtagctgtatattacctcgccaggatttcggacccttctgatttacctcatgctactgtgtctaccaatgaggactatggtgaaaaacatatttcacctgcaactgtatctgaaaaggagttgactccaagtgttgcaggctcagtatataagagtactctcacagaacatggtgctgagccatctagtgcgcaaacaggtagcaaccagcaggaatcaataaatgtgaaaaacagtagctcagcttcaaaagaacaggaaacaactgacaattcattgtttatctcttccaataagaagcccttagacaccaagcaagtgaatgtgactggtccacctgcagccttgcgtagcttagcgttaacaggaaacacaaaacctacaatattttccagcttttctactgaaggcatgaatccaacaggaggcaatgcacctaatgaattagcttcttccttgcaaccaagcagcagaagttttggaaacaaccaaactggtaaagaaggcctggattcagttcaatcagtgggaatatttggtggatctcaaaactccaataaagatggcaatgtctatggtttcaagtcttcattattcacctctagtggatctgtccctgccaagatcggagaaaggaatgaggttggttttggagttccttcgctgcaaaccagttacaccgctgatagaaaagtttttggtgctccagttgccttaagctctgtaccttcatcatctatatctccggctaaaccttccccaattggatattcatcaagtggatttcggacagcaaactctgaagcacctcaatcattgcgtggatcacctccgtcacagcaatctatgggcaaatcacataacagcaggacacaagcaccggcagaatattctagaaactccaagaagggcacaggattcgattctgaacaagacttgtctaaaaaattttacagtataaatgaaatgacgaaggagttagatgccctactagcatatatagaaaaggatggtggttttagagatgcctgcataaccatccaacagcgtcctctttctatgtttgaggatggcttacaaaactttttgcagctgttgcaggtcttcaagggcaaagtagaggagcaatgttcaaaaattgaagatctgaggaacaacatgtttcaagtttctgctaggcaaacttacatgaaaggaattgttagccagtcttcagataatcagtactgggatatatggaaccgtcagaaattgagtccagaattcgaagtgaagagacaaaatattctcagagctaaccaggatttgacaaatcagctggttgagctggagaggcacttcaataatctggagatgaacagatccagtgaaacaggaagagtggcttctaatcgaagagctgtttattctaacaagacaagttcgaggcagcactcctaagccagttaagcggtttccatcagtgaatgagcattcaaagggaatattagggtcttccaagggtggtgagcctgagactgctcgaaggaggagggaatcactggatatgagcctggctagtttggaacctcagaaaacaactgttaaaagaataacacagcaacaacgcctcaagatcagcagtgatctaccattcaggtcaaacaagaaaatatttgattctcaaatggcagcaatatcacaggaaaagtcaagcgatagctccaattcatctatagtagaatcatatgtaagcagactgcgttctctgagtgaagatgtaaacgataaactgtcaggaccccaacagaaccctttgttcaaatgggtaaaggaatcaactgggtcatctcaaacctcagagcaaaagcatttcgagttaccagggcaaatgaaaagtactgcacagtcttcaaaactgacaccatcttcaccaccatcattcagttacacacgtatgggtgcacaagatagtatcaacccatccagtgttccatcctttggaacaaaacatactgtgtctaagccaaatactctaaccttcaaaaccactataagccctaaaagtaatgccaacacagagccaaatatattaccttctataacagctccaaaaacttctctaagtccactgtctgtaaaaactgctggggagtctggagatttgcctacattaactatgaagaacagacaggatggtcagtcaatgccatctttggggaacataaaaggaccgggtgcttctctgcagaacaagggtggcatatttagagatctcgacaaatcgtcttttaattctgaacattccaagcctgctgcattacatgagaagactgaccagctaagtggggttggcgatgctgtgcagaacactgtgaaagatacctccaaaatggcacctcaaccttctgctttcttgccagctcctgttactcagaccaattcatactccttaaggccgactgtttcttcttcagccacatcaggtgcgaaaacttcagatgttttatctagctcaatgcagaaagtttctccaatagtacctgggggtactgtgtctagctcagtccctactcctgctaaggattcatcaactggattgagtcaaaatgcttccaaacctgaaacgctaatatcaaaggtaactagtaccatagtttctgcaagttcgacttctgtcatatcagtcactgaaagcaaaccttcagtgcctccaacaactggcgccagcttgccttctactcatgtctctgctcctcaaacagcaccaacaacatcggaatcagttttcacttccacaggaaaaaatgtaggaccaaacactgacaccatctcaaccgatgaagatgacatggaagaggaggcaccttctgcaagtgccgaactgaacttgggagcccttggtggattcggccttgggtcccagccttcttcaagtcctcaaaagtctaatccttttggtgcctcctttggtacatctggcaataaaagttcaggcacaccatttactttgacaaccagtccaggacagcttttccggccagcgtcgctaagcattccttcagctcagccagcccaaccatctcaatcaactagttctagttctttttctaattcgttctcaagtgggcttactggatttggacagcctgcacaaattggatctggccagcagtcagcttttgggaagcctgcacagattggagctggccagcatgcaggatttgggcagactgcccaaattcaatctggttttggccagcctgcccaaattcaatctggttttggccagtcagcacaaatcggaactgggcaacagtcaggatttgggaagcctgcacaaattggggctgtccagtcaggatttgggcagcctgcacagtttgctgctcaacagacacttggatcagtgctgggttcttttggacaacctccccagttaggaggcataggttctggaggatttggtggattttcaagtgcttctacatctgctggttttagttctttatcttcaggtaatgctggatttgctggtgctgcatcaggtgggggcttttcagcaccaactgcttctgcaggtggtggttttgctgctgctgctactggtggaggttttgctgctcttgcttccaaaagtggtggttttgttggtgcagcttcatctggtggtggttttggaggtgcctcccagggaggtggctttggcagtggtggtggtggattcggatcctttggtggtaatcaaggagctgggttctcggcatttggagcaagtggggctggaagaccggcagctgatttcttgacgcagatgagaaagtaggctccaggcaaatccccagacaggtttacgcattagctatagcatacacatgaggcgagttacttttatgttccactcttaagcgttgtttcggcacaggagctgtagcataaacatgaccgcagtataccctggactggatgagccctcgcttcgctccatctattgatgatggaggggggctaccatttgggagccttattgttttctcttcttttacaagacacagcaggtgtcaacagcagcatcgacggttccatggctgcatgaaatgtagaagaaaaaaaaagaggtcgtgtaaaggtcattgcttggacgtgattcccctccagctttgtcaatacaattcccagcctctttcccacaat

SEQ ID NO: 70799 - DNA, 4805 bp, Zea Mays
attgttttcgcgaatgaaatcaatcaataaaaactgatgaaccaggccatcaccatggccggcggcggtcactctgcttacacaccacgccgagccacccactaaagcgtcgccgtgaaaaactaccaaaccccttcactgctccctcccatccaaaaccctaaccctacagccaccgcagtggctggccatgggggcgccgcgcgagctcgagctctccgacgaggtggagggcgaggaggacggcaccaccgactttgttttccgccttgccggtgaccccatcccgctcctcccgaccgactccaacccgctcccgctcttcgacctgctgtcccctcccgcgcgcccgctcgccgtctccgaccgacacgccaccgtcttcctcgcccaccccagcgggtttatagctgtgaggaccaaggagttaatcgaagccagcaaggaggcgcgcgagaagggcaagtcgagcactcgctgcgcgcaggactgctgcgtcgccgacgtgcccctccccggtgtatcccttatcgcgctctcccatgatgagtccgtgttagccgcctgcacacatactgagatccagttcttctcgctggcgtctctgctcacacataaggacgtggtaccatcctcatcatgtagcctggaacgagctgtcactgtgaaagatttcaagtggttaaatcatgcctctgcagcatatattgtactctcaaatggtgggttgctgtgtcatgggaatttgggtgaaggcctgaaagatgtgatggaaaacgtcgatgcagttgactgttgcaaagaaggaaatcatattgctgttgcaagagggaacaaacttaccatattatcaccagattttacggaaacatgctccatgtccctcttgttccagttgtggtctgacggaagtgattcaaagggcactaccatcaaagtggattctattggctgggtacatggtgatagtattgttattgggtgtgttcgattaaacgaagatgacaatgaagaaggataccttgttcaagttataaggactgaagaaagcacattttgtgagagcccaggcaagacagatgtttatacctataacgattttttccatggcattatggatgatgttttaccacccggagctggacctaatcttcttttgggttatctgcatcgctggggtctcatggtggcttccaataaaaagagcgtcgatgaacacattgcccttcttaagtggccatctgcacatgatgatgaaaaaactgtaacatatcttgaaatgttggaggataaatacagtcctaggattgacttgcaagagaatggcgatgacaatgtcatactagggtttggtgttgagaatgtttcattatttcaaaagatcactgtaccagttggacctgaacaaaaggaggttgcccctcaacatattctcctatgtttgactggtgagggcaaagtagctgtatattacctcgccaggatttcggacccttctgatttacctcatgctactgtgtctaccaatgaggactatggtgaaaaacatatttcacctgcaactgtatctgaaaaggagttgactccaagtgttgcaggctcagtatataagagtactctcacagaacatggtgctgagccatctagtgcgcaaacaggtagcaaccagcaggaatcaataaatgtgaaaaacagtagctcagcttcaaaagaacaggaaacaactgacaattcattgtttatctcttccaataagaagcccttagacaccaagcaagtgaatgtgactggtccacctgcagccttgcgtagcttagcgttaacaggaaacacaaaacctacaatattttccagcttttctactgaaggcatgaatccaacaggaggcaatgcacctaatgaattagcttcttccttgcaaccaagcagcagaagttttggaaacaaccaaactggtaaagaaggcctggattcagttcaatcagtgggaatatttggtggatctcaaaactccaataaagatggcaatgtctatggtttcaagtcttcattattcacctctagtggatctgtccctgccaagatcggagaaaggaatgaggttggttttggagttccttcgctgcaaaccagttacaccgctgatagaaaagtttttggtgctccagttgccttaagctctgtaccttcatcatctatatctccggctaaaccttccccaattggatattcatcaagtggatttcggacagcaaactctgaagcacctcaatcattgcgtggatcacctccgtcacagcaatctatgggcaaatcacataacagcaggacacaagcaccggcagaatattctagaaactccaagaagggcacaggattcgattctgaacaagacttgtctaaaaaattttacagtataaatgaaatgacgaaggagttagatgccctactagcatatatagaaaaggatggtggttttagagatgcctgcataaccatccaacagcgtcctctttctatgtttgaggatggcttacaaaactttttgcagctgttgcaggtcttcaagggcaaagtagaggagcaatgttcaaaaattgaagatctgaggaacaacatgtttcaagtttctgctaggcaaacttacatgaaaggaattgttagccagtcttcagataatcagtactgggatatatggaaccgtcagaaattgagtccagaattcgaagtgaagagacaaaatattctcagagctaaccaggatttgacaaatcagctggttgagctggagaggcacttcaataatctggagatgaacagatccagtgaaacaggaagagtggcttctaatcgaagagctgtttattctaacaagacaagttcgagtcagacacaattatccagtgtatatagtgcactgaactcgcagttggcagctgctgagcagctatctgaatgcctttcaaagcagatatctgtgttaaatattggttctcctagtaggaagcaggggatggtgaccaaaaagttgtttgagtcaattggtttagcccacacaactgatgcaaccaaattttcaggcagcactcctaagccagttaagcggtttccatcagtgaatgagcattcaaagggaatattagggtcttccaagggtggtgagcctgagactgctcgaaggaggagggaatcactggatatgagcctggctagtttggaacctcagaaaacaactgttaaaagaataacacagcaacaacgcctcaagatcagcagtgatctaccattcaggtcaaacaagaaaatatttgattctcaaatggcagcaatatcacaggaaaagtcaagcgatagctccaattcatctatagtagaatcatatgtaagcagactgcgttctctgagtgaagatgtaaacgataaactgtcaggaccccaacagaaccctttgttcaaatgggtaaaggaatcaactgggtcatctcaaacctcagagcaaaagcatttcgagttaccagggcaaatgaaaagtactgcacagtcttcaaaactgacaccatcttcaccaccatcattcagttacacacgtatgggtgcacaagatagtatcaacccatccagtgttccatcctttggaacaaaacatactgtgtctaagccaaatactctaaccttcaaaaccactataagccctaaaagtaatgccaacacagagccaaatatattaccttctataacagctccaaaaacttctctaagtccactgtctgtaaaaactgctggggagtctggagatttgcctacattaactatgaagaacagacaggatggtcagtcaatgccatctttggggaacataaaaggaccgggtgcttctctgcagaacaagggtggcatatttagagatctcgacaaatcgtcttttaattctgaacattccaagcctgctgcattacatgagaagactgaccagctaagtggggttggcgatgctgtgcagaacactgtgaaagatacctccaaaatggcacctcaaccttctgctttcttgccagctcctgttactcagaccaattcatactccttaaggccgactgtttcttcttcagccacatcaggtggtggttttgctgctgctgctactggtggaggttttgctgctcttgcttccaaaagtggtggttttgttggtgcagcttcatctggtggtggttttggaggtgcctcccagggaggtggctttggcagtggtggtggtggattcggatcctttggtggtaatcaaggagctgggttctcggcatttggagcaagtggggctggaagaccggcagctgatttcttgacgcagatgagaaagtaggctccaggcaaatccccagacaggtttacgcattagctatagcatacacatgaggcgagttacttttatgttccactcttaagcgttgtttcggcacaggagctgtagcataaacatgaccgcagtataccctggactggatgagccctcgcttcgctccatctattgatgatggaggggggctaccatttgggagccttattgttttctcttcttttacaagacacagcaggtgtcaacagcagcatcgacggttggtcttggattccctactggtttctctccagggcgaccaacttgctaaggctttcatggctctctcttcaggttccatggctgcatgaaatgtagaagaaaaaaaaagaggtcgtgtaaaggtcattgcttggacgtgattcccctccagctttgtcaatacaattcccagcctctttcccacaat

SEQ ID NO: 70800 - DNA, 5772 bp, Zea Mays
ctcaactcaaaagtccattgttttcgcgaatgaaatcaatcaataaaaactgatgaaccaggccatcaccatggccggcggcggtcactctgcttacacaccacgccgagccacccactaaagcgtcgccgtgaaaaactaccaaaccccttcactgctccctcccatccaaaaccctaaccctacagccaccgcagtggctggccatgggggcgccgcgcgagctcgagctctccgacgaggtggagggcgaggaggacggcaccaccgactttgttttccgccttgccggtgaccccatcccgctcctcccgaccgactccaacccgctcccgctcttcgacctgctgtcccctcccgcgcgcccgctcgccgtctccgaccgacacgccaccgtcttcctcgcccaccccagcgggtttatagctgtgaggaccaaggagttaatcgaagccagcaaggaggcgcgcgagaagggcaagtcgagcactcgctgcgcgcaggactgctgcgtcgccgacgtgcccctccccggtgtatcccttatcgcgctctcccatgatgagtccgtgttagccgcctgcacacatactgagatccagttcttctcgctggcgtctctgctcacacataaggacgtggtaccatcctcatcatgtagcctggaacgagctgtcactgtgaaagatttcaagtggttaaatcatgcctctgcagcatatattgtactctcaaatggtgggttgctgtgtcatgggaatttgggtgaaggcctgaaagatgtgatggaaaacgtcgatgcagttgactgttgcaaagaaggaaatcatattgctgttgcaagagggaacaaacttaccatattatcaccagattttacggaaacatgctccatgtccctcttgttccagttgtggtctgacggaagtgattcaaagggcactaccatcaaagtggattctattggctgggtacatggtgatagtattgttattgggtgtgttcgattaaacgaagatgacaatgaagaaggataccttgttcaagttataaggactgaagaaagcacattttgtgagagcccaggcaagacagatgtttatacctataacgattttttccatggcattatggatgatgttttaccacccggagctggacctaatcttcttttgggttatctgcatcgctggggtctcatggtggcttccaataaaaagagcgtcgatgaacacattgcccttcttaagtggccatctgcacatgatgatgaaaaaactgtaacatatcttgaaatgttggaggataaatacagtcctaggattgacttgcaagagaatggcgatgacaatgtcatactagggtttggtgttgagaatgtttcattatttcaaaagatcactgtaccagttggacctgaacaaaaggaggttgcccctcaacatattctcctatgtttgactggtgagggcaaagtagctgtatattacctcgccaggatttcggacccttctgatttacctcatgctactgtgtctaccaatgaggactatggtgaaaaacatatttcacctgcaactgtatctgaaaaggagttgactccaagtgttgcaggctcagtatataagagtactctcacagaacatggtgctgagccatctagtgcgcaaacaggtagcaaccagcaggaatcaataaatgtgaaaaacagtagctcagcttcaaaagaacaggaaacaactgacaattcattgtttatctcttccaataagaagcccttagacaccaagcaagtgaatgtgactggtccacctgcagccttgcgtagcttagcgttaacaggaaacacaaaacctacaatattttccagcttttctactgaaggcatgaatccaacaggaggcaatgcacctaatgaattagcttcttccttgcaaccaagcagcagaagttttggaaacaaccaaactggtaaagaaggcctggattcagttcaatcagtgggaatatttggtggatctcaaaactccaataaagatggcaatgtctatggtttcaagtcttcattattcacctctagtggatctgtccctgccaagatcggagaaaggaatgaggttggttttggagttccttcgctgcaaaccagttacaccgctgatagaaaagtttttggtgctccagttgccttaagctctgtaccttcatcatctatatctccggctaaaccttccccaattggatattcatcaagtggatttcggacagcaaactctgaagcacctcaatcattgcgtggatcacctccgtcacagcaatctatgggcaaatcacataacagcaggacacaagcaccggcagaatattctagaaactccaagaagggcacaggattcgattctgaacaagacttgtctaaaaaattttacagtataaatgaaatgacgaaggagttagatgccctactagcatatatagaaaaggatggtggttttagagatgcctgcataaccatccaacagcgtcctctttctatgtttgaggatggcttacaaaactttttgcagctgttgcaggtcttcaagggcaaagtagaggagcaatgttcaaaaattgaagatctgaggaacaacatgtttcaagtttctgctaggcaaacttacatgaaaggaattgttagccagtcttcagataatcagtactgggatatatggaaccgtcagaaattgagtccagaattcgaagtgaagagacaaaatattctcagagctaaccaggatttgacaaatcagctggttgagctggagaggcacttcaataatctggagatgaacagatccagtgaaacaggaagagtggcttctaatcgaagagctgtttattctaacaagacaagttcgagtcagacacaattatccagtgtatatagtgcactgaactcgcagttggcagctgctgagcagctatctgaatgcctttcaaagcagatatctgtgttaaatattggttctcctagtaggaagcaggggatggtgaccaaaaagttgtttgagtcaattggtttagcccacacaactgatgcaaccaaattttcaggcagcactcctaagccagttaagcggtttccatcagtgaatgagcattcaaagggaatattagggtcttccaagggtggtgagcctgagactgctcgaaggaggagggaatcactggatatgagcctggctagtttggaacctcagaaaacaactgttaaaagaataacacagcaacaacgcctcaagatcagcagtgatctaccattcaggtcaaacaagaaaatatttgattctcaaatggcagcaatatcacaggaaaagtcaagcgatagctccaattcatctatagtagaatcatatgtaagcagactgcgttctctgagtgaagatgtaaacgataaactgtcaggaccccaacagaaccctttgttcaaatgggtaaaggaatcaactgggtcatctcaaacctcagagcaaaagcatttcgagttaccagggcaaatgaaaagtactgcacagtcttcaaaactgacaccatcttcaccaccatcattcagttacacacgtatgggtgcacaagatagtatcaacccatccagtgttccatcctttggaacaaaacatactgtgtctaagccaaatactctaaccttcaaaaccactataagccctaaaagtaatgccaacacagagccaaatatattaccttctataacagctccaaaaacttctctaagtccactgtctgtaaaaactgctggggagtctggagatttgcctacattaactatgaagaacagacaggatggtcagtcaatgccatctttggggaacataaaaggaccgggtgcttctctgcagaacaagggtggcatatttagagatctcgacaaatcgtcttttaattctgaacattccaagcctgctgcattacatgagaagactgaccagctaagtggggttggcgatgctgtgcagaacactgtgaaagatacctccaaaatggcacctcaaccttctgctttcttgccagctcctgttactcagaccaattcatactccttaaggccgactgtttcttcttcagccacatcaggtgcgaaaacttcagatgttttatctagctcaatgcagaaagtttctccaatagtacctgggggtactgtgtctagctcagtccctactcctgctaaggattcatcaactggattgagtcaaaatgcttccaaacctgaaacgctaatatcaaaggtaactagtaccatagtttctgcaagttcgacttctgtcatatcagtcactgaaagcaaaccttcagtgcctccaacaactggcgccagcttgccttctactcatgtctctgctcctcaaacagcaccaacaacatcggaatcagttttcacttccacaggaaaaaatgtaggaccaaacactgacaccatctcaaccgatgaagatgacatggaagaggaggcaccttctgcaagtgccgaactgaacttgggagcccttggtggattcggccttgggtcccagccttcttcaagtcctcaaaagtctaatccttttggtgcctcctttggtacatctggcaataaaagttcaggcacaccatttactttgacaaccagtccaggacagcttttccggccagcgtcgctaagcattccttcagctcagccagcccaaccatctcaatcaactagttctagttctttttctaattcgttctcaagtgggcttactggatttggacagcctgcacaaattggatctggccagcagtcagcttttgggaagcctgcacagattggagctggccagcatgcaggatttgggcagactgcccaaattcaatctggttttggccagcctgcccaaattcaatctggttttggccagtcagcacaaatcggaactgggcaacagtcaggatttgggaagcctgcacaaattggggctgtccagtcaggatttgggcagcctgcacagtttgctgctcaacagacacttggatcagtgctgggttcttttggacaacctccccagttaggaggcataggttctggaggatttggtggattttcaagtgcttctacatctgctggttttagttctttatcttcagcttcatctggtggtggttttggaggtgcctcccagggaggtggctttggcagtggtggtggattcggatcctttggtggtaatcaaggagctgggttctcggcatttggagcaagtggggctggaagaccggcagctgatttcttgacgcagatgagaaagtaggctccaggcaaatccccagacaggtttacgcattagctatagcatacacatgaggcgagttacttttatgttccactcttaagcgttgtttcggcacaggagctgtagcataaacatgaccgcagtataccctggactggatgagccctcgcttcgctccatctattgatgatggaggggggctaccatttgggagccttattgttttctcttcttttacaagacacagcaggtgtcaacagcagcatcgacggttggtcttggattccctactggtttctctccagggcgaccaacttgctaaggctttcatggctctctcttcaggttccatggctgcatgaaatgtagaagaaaaaaaaagaggtcgtgtaaaggtcattgcttggacgtgattcccctccagctttgtcaatacaattcccagcctctttcccacaat

SEQ ID NO: 70801 - DNA, 5726 bp, Zea Mays
gaaagctcaactcaaaagtccattgttttcgcgaatgaaatcaatcaataaaaactgatgaaccaggccatcaccatggccggcggcggtcactctgcttacacaccacgccgagccacccactaaagcgtcgccgtgaaaaactaccaaaccccttcactgctccctcccatccaaaaccctaaccctacagccaccgcagtggctggccatgggggcgccgcgcgagctcgagctctccgacgaggtggagggcgaggaggacggcaccaccgactttgttttccgccttgccggtgaccccatcccgctcctcccgaccgactccaacccgctcccgctcttcgacctgctgtcccctcccgcgcgcccgctcgccgtctccgaccgacacgccaccgtcttcctcgcccaccccagcgggtttatagctgtgaggaccaaggagttaatcgaagccagcaaggaggcgcgcgagaagggcaagtcgagcactcgctgcgcgcaggactgctgcgtcgccgacgtgcccctccccggtgtatcccttatcgcgctctcccatgatgagtccgtgttagccgcctgcacacatactgagatccagttcttctcgctggcgtctctgctcacacataaggacgtggtaccatcctcatcatgtagcctggaacgagctgtcactgtgaaagatttcaagtggttaaatcatgcctctgcagcatatattgtactctcaaatggtgggttgctgtgtcatgggaatttgggtgaaggcctgaaagatgtgatggaaaacgtcgatgcagttgactgttgcaaagaaggaaatcatattgctgttgcaagagggaacaaacttaccatattatcaccagattttacggaaacatgctccatgtccctcttgttccagttgtggtctgacggaagtgattcaaagggcactaccatcaaagtggattctattggctgggtacatggtgatagtattgttattgggtgtgttcgattaaacgaagatgacaatgaagaaggataccttgttcaagttataaggactgaagaaagcacattttgtgagagcccaggcaagacagatgtttatacctataacgattttttccatggcattatggatgatgttttaccacccggagctggacctaatcttcttttgggttatctgcatcgctggggtctcatggtggcttccaataaaaagagcgtcgatgaacacattgcccttcttaagtggccatctgcacatgatgatgaaaaaactgtaacatatcttgaaatgttggaggataaatacagtcctaggattgacttgcaagagaatggcgatgacaatgtcatactagggtttggtgttgagaatgtttcattatttcaaaagatcactgtaccagttggacctgaacaaaaggaggttgcccctcaacatattctcctatgtttgactggtgagggcaaagtagctgtatattacctcgccaggatttcggacccttctgatttacctcatgctactgtgtctaccaatgaggactatggtgaaaaacatatttcacctgcaactgtatctgaaaaggagttgactccaagtgttgcaggctcagtatataagagtactctcacagaacatggtgctgagccatctagtgcgcaaacaggtagcaaccagcaggaatcaataaatgtgaaaaacagtagctcagcttcaaaagaacaggaaacaactgacaattcattgtttatctcttccaataagaagcccttagacaccaagcaagtgaatgtgactggtccacctgcagccttgcgtagcttagcgttaacaggaaacacaaaacctacaatattttccagcttttctactgaaggcatgaatccaacaggaggcaatgcacctaatgaattagcttcttccttgcaaccaagcagcagaagttttggaaacaaccaaactggtaaagaaggcctggattcagttcaatcagtgggaatatttggtggatctcaaaactccaataaagatggcaatgtctatggtttcaagtcttcattattcacctctagtggatctgtccctgccaagatcggagaaaggaatgaggttggttttggagttccttcgctgcaaaccagttacaccgctgatagaaaagtttttggtgctccagttgccttaagctctgtaccttcatcatctatatctccggctaaaccttccccaattggatattcatcaagtggatttcggacagcaaactctgaagcacctcaatcattgcgtggatcacctccgtcacagcaatctatgggcaaatcacataacagcaggacacaagcaccggcagaatattctagaaactccaagaagggcacaggattcgattctgaacaagacttgtctaaaaaattttacagtataaatgaaatgacgaaggagttagatgccctactagcatatatagaaaaggatggtggttttagagatgcctgcataaccatccaacagcgtcctctttctatgtttgaggatggcttacaaaactttttgcagctgttgcaggtcttcaagggcaaagtagaggagcaatgttcaaaaattgaagatctgaggaacaacatgtttcaagtttctgctaggcaaacttacatgaaaggaattgttagccagtcttcagataatcagtactgggatatatggaaccgtcagaaattgagtccagaattcgaagtgaagagacaaaatattctcagagctaaccaggatttgacaaatcagctggttgagctggagaggcacttcaataatctggagatgaacagatccagtgaaacaggaagagtggcttctaatcgaagagctgtttattctaacaagacaagttcgagtcagacacaattatccagtgtatatagtgcactgaactcgcagttggcagctgctgagcagctatctgaatgcctttcaaagcagatatctgtgttaaatattggttctcctagtaggaagcaggggatggtgaccaaaaagttgtttgagtcaattggtttagcccacacaactgatgcaaccaaattttcaggcagcactcctaagccagttaagcggtttccatcagtgaatgagcattcaaagggaatattagggtcttccaagggtggtgagcctgagactgctcgaaggaggagggaatcactggatatgagcctggctagtttggaacctcagaaaacaactgttaaaagaataacacagcaacaacgcctcaagatcagcagtgatctaccattcaggtcaaacaagaaaatatttgattctcaaatggcagcaatatcacaggaaaagtcaagcgatagctccaattcatctatagtagaatcatatgtaagcagactgcgttctctgagtgaagatgtaaacgataaactgtcaggaccccaacagaaccctttgttcaaatgggtaaaggaatcaactgggtcatctcaaacctcagagcaaaagcatttcgagttaccagggcaaatgaaaagtactgcacagtcttcaaaactgacaccatcttcaccaccatcattcagttacacacgtatgggtgcacaagatagtatcaacccatccagtgttccatcctttggaacaaaacatactgtgtctaagccaaatactctaaccttcaaaaccactataagccctaaaagtaatgccaacacagagccaaatatattaccttctataacagctccaaaaacttctctaagtccactgtctgtaaaaactgctggggagtctggagatttgcctacattaactatgaagaacagacaggatggtcagtcaatgccatctttggggaacataaaaggaccgggtgcttctctgcagaacaagggtggcatatttagagatctcgacaaatcgtcttttaattctgaacattccaagcctgctgcattacatgagaagactgaccagctaagtggggttggcgatgctgtgcagaacactgtgaaagatacctccaaaatggcacctcaaccttctgctttcttgccagctcctgttactcagaccaattcatactccttaaggccgactgtttcttcttcagccacatcaggtgcgaaaacttcagatgttttatctagctcaatgcagaaagtttctccaatagtacctgggggtactgtgtctagctcagtccctactcctgctaaggattcatcaactggattgagtcaaaatgcttccaaacctgaaacgctaatatcaaaggtaactagtaccatagtttctgcaagttcgacttctgtcatatcagtcactgaaagcaaaccttcagtgcctccaacaactggcgccagcttgccttctactcatgtctctgctcctcaaacagcaccaacaacatcggaatcagttttcacttccacaggaaaaaatgtaggaccaaacactgacaccatctcaaccgatgaagatgacatggaagaggaggcaccttctgcaagtgccgaactgaacttgggagcccttggtggattcggccttgggtcccagccttcttcaagtcctcaaaagtctaatccttttggtgcctcctttggtacatctggcaataaaagttcaggcacaccatttactttgacaaccagtccaggacagcttttccggccagcgtcgctaagcattccttcagctcagccagcccaaccatctcaatcaactagttctagttctttttctaattcgttctcaagtgggcttactggatttggacagcctgcacaaattggatctggccagcagtcagcttttgggaagcctgcacagattggagctggccagcatgcaggatttgggcagactgcccaaattcaatctggttttggccagcctgcccaaattcaatctggttttggccagtcagcacaaatcggaactgggcaacagtcaggatttgggaagcctgcacaaattggggctgtccagtcaggatttgggcagcctgcacagtttgctgctcaacagacacttggatcagtgctgggttcttttggacaacctccccagttaggaggcataggttctggaggatttggtggattttcaagtgcttctacatctgctggttttagttctttatcttcaggtggtggtggattcggatcctttggtggtaatcaaggagctgggttctcggcatttggagcaagtggggctggaagaccggcagctgatttcttgacgcagatgagaaagtaggctccaggcaaatccccagacaggtttacgcattagctatagcatacacatgaggcgagttacttttatgttccactcttaagcgttgtttcggcacaggagctgtagcataaacatgaccgcagtataccctggactggatgagccctcgcttcgctccatctattgatgatggaggggggctaccatttgggagccttattgttttctcttcttttacaagacacagcaggtgtcaacagcagcatcgacggttggtcttggattccctactggtttctctccagggcgaccaacttgctaaggctttcatggctctctcttcaggttccatggctgcatgaaatgtagaagaaaaaaaaagaggtcgtgtaaaggtcattgcttggacgtgattcccctccagctttgtcaatacaattcccagcctctttcccacaat

SEQ ID NO: 70802 - DNA, 5783 bp, Zea Mays
ccgaaagctcaactcaaaagtccattgttttcgcgaatgaaatcaatcaataaaaactgatgaaccaggccatcaccatggccggcggcggtcactctgcttacacaccacgccgagccacccactaaagcgtcgccgtgaaaaactaccaaaccccttcactgctccctcccatccaaaaccctaaccctacagccaccgcagtggctggccatgggggcgccgcgcgagctcgagctctccgacgaggtggagggcgaggaggacggcaccaccgactttgttttccgccttgccggtgaccccatcccgctcctcccgaccgactccaacccgctcccgctcttcgacctgctgtcccctcccgcgcgcccgctcgccgtctccgaccgacacgccaccgtcttcctcgcccaccccagcgggtttatagctgtgaggaccaaggagttaatcgaagccagcaaggaggcgcgcgagaagggcaagtcgagcactcgctgcgcgcaggactgctgcgtcgccgacgtgcccctccccggtgtatcccttatcgcgctctcccatgatgagtccgtgttagccgcctgcacacatactgagatccagttcttctcgctggcgtctctgctcacacataaggacgtggtaccatcctcatcatgtagcctggaacgagctgtcactgtgaaagatttcaagtggttaaatcatgcctctgcagcatatattgtactctcaaatgttgactgttgcaaagaaggaaatcatattgctgttgcaagagggaacaaacttaccatattatcaccagattttacggaaacatgctccatgtccctcttgttccagttgtggtctgacggaagtgattcaaagggcactaccatcaaagtggattctattggctgggtacatggtgatagtattgttattgggtgtgttcgattaaacgaagatgacaatgaagaaggataccttgttcaagttataaggactgaagaaagcacattttgtgagagcccaggcaagacagatgtttatacctataacgattttttccatggcattatggatgatgttttaccacccggagctggacctaatcttcttttgggttatctgcatcgctggggtctcatggtggcttccaataaaaagagcgtcgatgaacacattgcccttcttaagtggccatctgcacatgatgatgaaaaaactgtaacatatcttgaaatgttggaggataaatacagtcctaggattgacttgcaagagaatggcgatgacaatgtcatactagggtttggtgttgagaatgtttcattatttcaaaagatcactgtaccagttggacctgaacaaaaggaggttgcccctcaacatattctcctatgtttgactggtgagggcaaagtagctgtatattacctcgccaggatttcggacccttctgatttacctcatgctactgtgtctaccaatgaggactatggtgaaaaacatatttcacctgcaactgtatctgaaaaggagttgactccaagtgttgcaggctcagtatataagagtactctcacagaacatggtgctgagccatctagtgcgcaaacaggtagcaaccagcaggaatcaataaatgtgaaaaacagtagctcagcttcaaaagaacaggaaacaactgacaattcattgtttatctcttccaataagaagcccttagacaccaagcaagtgaatgtgactggtccacctgcagccttgcgtagcttagcgttaacaggaaacacaaaacctacaatattttccagcttttctactgaaggcatgaatccaacaggaggcaatgcacctaatgaattagcttcttccttgcaaccaagcagcagaagttttggaaacaaccaaactggtaaagaaggcctggattcagttcaatcagtgggaatatttggtggatctcaaaactccaataaagatggcaatgtctatggtttcaagtcttcattattcacctctagtggatctgtccctgccaagatcggagaaaggaatgaggttggttttggagttccttcgctgcaaaccagttacaccgctgatagaaaagtttttggtgctccagttgccttaagctctgtaccttcatcatctatatctccggctaaaccttccccaattggatattcatcaagtggatttcggacagcaaactctgaagcacctcaatcattgcgtggatcacctccgtcacagcaatctatgggcaaatcacataacagcaggacacaagcaccggcagaatattctagaaactccaagaagggcacaggattcgattctgaacaagacttgtctaaaaaattttacagtataaatgaaatgacgaaggagttagatgccctactagcatatatagaaaaggatggtggttttagagatgcctgcataaccatccaacagcgtcctctttctatgtttgaggatggcttacaaaactttttgcagctgttgcaggtcttcaagggcaaagtagaggagcaatgttcaaaaattgaagatctgaggaacaacatgtttcaagtttctgctaggcaaacttacatgaaaggaattgttagccagtcttcagataatcagtactgggatatatggaaccgtcagaaattgagtccagaattcgaagtgaagagacaaaatattctcagagctaaccaggatttgacaaatcagctggttgagctggagaggcacttcaataatctggagatgaacagatccagtgaaacaggaagagtggcttctaatcgaagagctgtttattctaacaagacaagttcgagtcagacacaattatccagtgtatatagtgcactgaactcgcagttggcagctgctgagcagctatctgaatgcctttcaaagcagatatctgtgttaaatattggttctcctagtaggaagcaggggatggtgaccaaaaagttgtttgagtcaattggtttagcccacacaactgatgcaaccaaattttcaggcagcactcctaagccagttaagcggtttccatcagtgaatgagcattcaaagggaatattagggtcttccaagggtggtgagcctgagactgctcgaaggaggagggaatcactggatatgagcctggctagtttggaacctcagaaaacaactgttaaaagaataacacagcaacaacgcctcaagatcagcagtgatctaccattcaggtcaaacaagaaaatatttgattctcaaatggcagcaatatcacaggaaaagtcaagcgatagctccaattcatctatagtagaatcatatgtaagcagactgcgttctctgagtgaagatgtaaacgataaactgtcaggaccccaacagaaccctttgttcaaatgggtaaaggaatcaactgggtcatctcaaacctcagagcaaaagcatttcgagttaccagggcaaatgaaaagtactgcacagtcttcaaaactgacaccatcttcaccaccatcattcagttacacacgtatgggtgcacaagatagtatcaacccatccagtgttccatcctttggaacaaaacatactgtgtctaagccaaatactctaaccttcaaaaccactataagccctaaaagtaatgccaacacagagccaaatatattaccttctataacagctccaaaaacttctctaagtccactgtctgtaaaaactgctggggagtctggagatttgcctacattaactatgaagaacagacaggatggtcagtcaatgccatctttggggaacataaaaggaccgggtgcttctctgcagaacaagggtggcatatttagagatctcgacaaatcgtcttttaattctgaacattccaagcctgctgcattacatgagaagactgaccagctaagtggggttggcgatgctgtgcagaacactgtgaaagatacctccaaaatggcacctcaaccttctgctttcttgccagctcctgttactcagaccaattcatactccttaaggccgactgtttcttcttcagccacatcaggtgcgaaaacttcagatgttttatctagctcaatgcagaaagtttctccaatagtacctgggggtactgtgtctagctcagtccctactcctgctaaggattcatcaactggattgagtcaaaatgcttccaaacctgaaacgctaatatcaaaggtaactagtaccatagtttctgcaagttcgacttctgtcatatcagtcactgaaagcaaaccttcagtgcctccaacaactggcgccagcttgccttctactcatgtctctgctcctcaaacagcaccaacaacatcggaatcagttttcacttccacaggaaaaaatgtaggaccaaacactgacaccatctcaaccgatgaagatgacatggaagaggaggcaccttctgcaagtgccgaactgaacttgggagcccttggtggattcggccttgggtcccagccttcttcaagtcctcaaaagtctaatccttttggtgcctcctttggtacatctggcaataaaagttcaggcacaccatttactttgacaaccagtccaggacagcttttccggccagcgtcgctaagcattccttcagctcagccagcccaaccatctcaatcaactagttctagttctttttctaattcgttctcaagtgggcttactggatttggacagcctgcacaaattggatctggccagcagtcagcttttgggaagcctgcacagattggagctggccagcatgcaggatttgggcagactgcccaaattcaatctggttttggccagcctgcccaaattcaatctggttttggccagtcagcacaaatcggaactgggcaacagtcaggatttgggaagcctgcacaaattggggctgtccagtcaggatttgggcagcctgcacagtttgctgctcaacagacacttggatcagtgctgggttcttttggacaacctccccagttaggaggcataggttctggaggatttggtggattttcaagtgcttctacatctgctggttttagttctttatcttcaggtaatgctggatttgctggtgctgcatcaggtgggggcttttcagcaccaactgcttctgcaggtggtggttttgctgctgctgctactggtggaggttttgctgctcttgcttccaaaagtggtggttttgttggtgcagcttcatctggtggtggttttggaggtgcctcccagggaggtggctttggcagtggtggtggtggattcggatcctttggtggtaatcaaggagctgggttctcggcatttggagcaagtggggctggaagaccggcagctgatttcttgacgcagatgagaaagtaggctccaggcaaatccccagacaggtttacgcattagctatagcatacacatgaggcgagttacttttatgttccactcttaagcgttgtttcggcacaggagctgtagcataaacatgaccgcagtataccctggactggatgagccctcgcttcgctccatctattgatgatggaggggggctaccatttgggagccttattgttttctcttcttttacaagacacagcaggtgtcaacagcagcatcgacggttccatggctgcatgaaatgtagaagaaaaaaaaagaggtcgtgtaaaggtcattgcttggacgtgattcccctccagctttgtcaatacaattcccagcctctttcccacaat

SEQ ID NO: 70803 - DNA, 5822 bp, Zea Mays
caacatacaagcctcactccgcggaccttccttgatccgaaagctcaactcaaaagtccattgttttcgcgaatgaaatcaatcaataaaaactgatgaaccaggccatcaccatggccggcggcggtcactctgcttacacaccacgccgagccacccactaaagcgtcgccgtgaaaaactaccaaaccccttcactgctccctcccatccaaaaccctaaccctacagccaccgcagtggctggccatgggggcgccgcgcgagctcgagctctccgacgaggtggagggcgaggaggacggcaccaccgactttgttttccgccttgccggtgaccccatcccgctcctcccgaccgactccaacccgctcccgctcttcgacctgctgtcccctcccgcgcgcccgctcgccgtctccgaccgacacgccaccgtcttcctcgcccaccccagcgggtttatagctgtgaggaccaaggagttaatcgaagccagcaaggaggcgcgcgagaagggcaagtcgagcactcgctgcgcgcaggactgctgcgtcgccgacgtgcccctccccggtgtatcccttatcgcgctctcccatgatgagtccgtgttagccgcctgcacacatactgagatccagttcttctcgctggcgtctctgctcacacataaggacgtggtaccatcctcatcatgtagcctggaacgagctgtcactgtgaaagatttcaagtggttaaatcatgcctctgcagcatatattgtactctcaaatggtgggttgctgtgtcatgggaatttgggtgaaggcctgaaagatgtgatggaaaacgtcgatgcagttgactgttgcaaagaaggaaatcatattgctgttgcaagagggaacaaacttaccatattatcaccagattttacggaaacatgctccatgtccctcttgttccagttgtggtctgacggaagtgattcaaagggcactaccatcaaagtggattctattggctgggtacatggtgatagtattgttattgggtgtgttcgattaaacgaagatgacaatgaagaaggataccttgttcaagttataaggactgaagaaagcacattttgtgagagcccaggcaagacagatgtttatacctataacgattttttccatggcattatggatgatgttttaccacccggagctggacctaatcttcttttgggttatctgcatcgctggggtctcatggtggcttccaataaaaagagcgtcgatgaacacattgcccttcttaagtggccatctgcacatgatgatgaaaaaactgtaacatatcttgaaatgttggaggataaatacagtcctaggattgacttgcaagagaatggcgatgacaatgtcatactagggtttggtgttgagaatgtttcattatttcaaaagatcactgtaccagttggacctgaacaaaaggaggttgcccctcaacatattctcctatgtttgactggtgagggcaaagtagctgtatattacctcgccaggatttcggacccttctgatttacctcatgctactgtgtctaccaatgaggactatggtgaaaaacatatttcacctgcaactgtatctgaaaaggagttgactccaagtgttgcaggctcagtatataagagtactctcacagaacatggtgctgagccatctagtgcgcaaacaggtagcaaccagcaggaatcaataaatgtgaaaaacagtagctcagcttcaaaagaacaggaaacaactgacaattcattgtttatctcttccaataagaagcccttagacaccaagcaagtgaatgtgactggtccacctgcagccttgcgtagcttagcgttaacaggaaacacaaaacctacaatattttccagcttttctactgaaggcatgaatccaacaggaggcaatgcacctaatgaattagcttcttccttgcaaccaagcagcagaagttttggaaacaaccaaactggtaaagaaggcctggattcagttcaatcagtgggaatatttggtggatctcaaaactccaataaagatggcaatgtctatggtttcaagtcttcattattcacctctagtggatctgtccctgccaagatcggagaaaggaatgaggttggttttggagttccttcgctgcaaaccagttacaccgctgatagaaaagtttttggtgctccagttgccttaagctctgtaccttcatcatctatatctccggctaaaccttccccaattggatattcatcaagtggatttcggacagcaaactctgaagcacctcaatcattgcgtggatcacctccgtcacagcaatctatgggcaaatcacataacagcaggacacaagcaccggcagaatattctagaaactccaagaagggcacaggattcgattctgaacaagacttgtctaaaaaattttacagtataaatgaaatgacgaaggagttagatgccctactagcatatatagaaaaggatggtggttttagagatgcctgcataaccatccaacagcgtcctctttctatgtttgaggatggcttacaaaactttttgcagctgttgcaggtcttcaagggcaaagtagaggagcaatgttcaaaaattgaagatctgaggaacaacatgtttcaagtttctgctaggcaaacttacatgaaaggaattgttagccagtcttcagataatcagtactgggatatatggaaccgtcagaaattgagtccagaattcgaagtgaagagacaaaatattctcagagctaaccaggatttgacaaatcagctggttgagctggagaggcacttcaataatctggagatgaacagatccagtgaaacaggaagagtggcttctaatcgaagagctgtttattctaacaagacaagttcgagtcagacacaattatccagtgtatatagtgcactgaactcgcagttggcagctgctgagcagctatctgaatgcctttcaaagcagatatctgtgttaaatattggttctcctagtaggaagcaggggatggtgaccaaaaagttgtttgagtcaattggtttagcccacacaactgatgcaaccaaattttcaggcagcactcctaagccagttaagcggtttccatcagtgaatgagcattcaaagggaatattagggtcttccaagggtggtgagcctgagactgctcgaaggaggagggaatcactggatatgagcctggctagtttggaacctcagaaaacaactgttaaaagaataacacagcaacaacgcctcaagatcagcagtgatctaccattcaggtcaaacaagaaaatatttgattctcaaatggcagcaatatcacaggaaaagtcaagcgatagctccaattcatctatagtagaatcatatgtaagcagactgcgttctctgagtgaagatgtaaacgataaactgtcaggaccccaacagaaccctttgttcaaatgggtaaaggaatcaactgggtcatctcaaacctcagagcaaaagcatttcgagttaccagggcaaatgaaaagtactgcacagtcttcaaaactgacaccatcttcaccaccatcattcagttacacacgtatgggtgcacaagatagtatcaacccatccagtgttccatcctttggaacaaaacatactgtgtctaagccaaatactctaaccttcaaaaccactataagccctaaaagtaatgccaacacagagccaaatatattaccttctataacagctccaaaaacttctctaagtccactgtctgtaaaaactgctggggagtctggagatttgcctacattaactatgaagaacagacaggatggtcagtcaatgccatctttggggaacataaaaggaccgggtgcttctctgcagaacaagggtggcatatttagagatctcgacaaatcgtcttttaattctgaacattccaagcctgctgcattacatgagaagactgaccagctaagtggggttggcgatgctgtgcagaacactgtgaaagatacctccaaaatggcacctcaaccttctgctttcttgccagctcctgttactcagaccaattcatactccttaaggccgactgtttcttcttcagccacatcaggtgcgaaaacttcagatgttttatctagctcaatgcagaaagtttctccaatagtacctgggggtactgtgtctagctcagtccctactcctgctaaggattcatcaactggattgagtcaaaatgcttccaaacctgaaacgctaatatcaaaggtaactagtaccatagtttctgcaagttcgacttctgtcatatcagtcactgaaagcaaaccttcagtgcctccaacaactggcgccagcttgccttctactcatgtctctgctcctcaaacagcaccaacaacatcggaatcagttttcacttccacaggaaaaaatgtaggaccaaacactgacaccatctcaaccgatgaagatgacatggaagaggaggcaccttctgcaagtgccgaactgaacttgggagcccttggtggattcggccttgggtcccagccttcttcaagtcctcaaaagtctaatccttttggtgcctcctttggtacatctggcaataaaagttcaggcacaccatttactttgacaaccagtccaggacagcttttccggccagcgtcgctaagcattccttcagctcagccagcccaaccatctcaatcaactagttctagttctttttctaattcgttctcaagtgggcttactggatttggacagcctgcacaaattggatctggccagcagtcagcttttgggaagcctgcacagattggagctggccagcatgcaggatttgggcagactgcccaaattcaatctggttttggccagcctgcccaaattcaatctggttttggccagtcagcacaaatcggaactgggcaacagtcaggatttgggaagcctgcacaaattggggctgtccagtcaggatttgggcagcctgcacagtttgctgctcaacagacacttggatcagtgctgggttcttttggacaacctccccagttaggaggcataggttctggaggatttggtggattttcaagtgcttctacatctgctggttttagttctttatcttcaggtggtggttttgctgctgctgctactggtggaggttttgctgctcttgcttccaaaagtggtggttttgttggtgcagcttcatctggtggtggttttggaggtgcctcccagggaggtggctttggcagtggtggtggtggattcggatcctttggtggtaatcaaggagctgggttctcggcatttggagcaagtggggctggaagaccggcagctgatttcttgacgcagatgagaaagtaggctccaggcaaatccccagacaggtttacgcattagctatagcatacacatgaggcgagttacttttatgttccactcttaagcgttgtttcggcacaggagctgtagcataaacatgaccgcagtataccctggactggatgagccctcgcttcgctccatctattgatgatggaggggggctaccatttgggagccttattgttttctcttcttttacaagacacagcaggtgtcaacagcagcatcgacggttccatggctgcatgaaatgtagaagaaaaaaaaagaggtcgtgtaaaggtcattgcttggacgtgattcccctccagctttgtcaatacaattcccagcctctttcccacaat

SEQ ID NO: 70804 - DNA, 1996 bp, Zea Mays
aacaaactccactcatctactcgctaccattaccaagtagtagcaagcagcaagctcgcgtctggtgcgcctgcctgccactagaactctacttacctctaagcgcggcgcaataatgggaggaggagggacgctgatgctggaccagcgcttggcggcggatgacaaggtcctcttcgggttcccggcaggcgagtgcttctttggagagggtgacctcgccaacccggcgccggcgaccgaggagatgactatgagcttcctccccttggatgcggacgagatgatgatgagtgacgacgacgatgtggacggcgtcgaggagctggagcgccgcatgtggcgcgaccgcgtgcggctgaggcgcctcaaggagcagcagcagcagagcggccgcccttccggcggcaagcacgaggccagccgcagcaggcagcggcagtcgcaggagcaggcgcggcgcaagaagatgtcgcgcgcgcaggacgggatcctcaagtacatgctcaagatgatggaggtctgcaacgcgcagggcttcgtgtacggcatcatcccggagaacggcaagcccgtcaccggcgcctccgacaacctccgcgcctggtggaaggagaaggtccgcttcgaccgcaacgggcccgccgccgccgccaagtaccaggcagacaccgccgccgcgggaggcggggccgcggacgggtgcggaggcgccgacgcggaaggccagcatcactccctgcacgagctgcaggacaccacgctgggctcgctgctctccgcgctcatgcagcactgcgacccgccccagcgccggttcccgctcgagaagggcgtgccgccgccgtggtggccgctggccgccgtgcccggggacctcggcccaccgccgtacaagaagccgcacgacctcaagaaggcgtggaaggtggccgtgctcacggccgtcatcaagcacatgtcgcccgacgtcgacaaggcgcgccgcctcgtccggcagtccaagtgcctgcaggacaagatgaccgccagggagatcgtcgcgtggctcgccgtgctcaggcaggaggaggagctctacatccagctgcaccctggcgcccgcccggcgccgtcctccgccgccatgttccccttctgcgccagctccggcgagtacgatgtcgacggtgaagacgacaccggccggaaccagcagccaacctccaaccccgccgccgcagcattcctggacctttcgtcgtcgttcatggacgatgcgggccacaacaaattcgtcgtggccgagcccgcgccgccgattaagcaggaggccgccgacgccgtgttcttccagaaaagaagcgcgccggccgccgccgtggagccggagctgatgctgggcggcagcttccgccgcgcctacacatgcggcaacgtgcagtgctcgcacagcagcagcgcgcatgggttcctggaccgcaacacgcgcaacgcgcaccagtactcgtgcatgttcaacaacagcgtcggccagacggcggcgcttggcggcttggacttggatttgcccctggacggccagaggtcgctcggggagctgatggacatgtacgaggccaacgtgggcaacgtggacacggccgcccccggccccgaagtgcagctgcccggtccgttcccgacgccgtgccgatttggcgacatcatcagcaatgtgatacagcagagcgcagcggcggcggtctacgtccgtgacgacgacgcgcagttcggaggcgacatcgccgccgcgtcaccggggctgaggttcggctcaggcctggacgtggcgggaggcggcgggttgcagcagccgcacaagtccacgggatccaacggcagttggttctactgactgcgcatgcggcagaatcatggatggaatggacaatggaggttggatattagaattcacgagtagacgacgagatcgtcgaataagggagtagctaaggttcacgatttcgacgattca

SEQ ID NO: 70805 - DNA, 2131 bp, Zea Mays
ggaaatctctctgcagtgtctgcactgcacccatccgcttctcctctcccgccggctatccagagccccaaaccctacccttcttgttcgcgccgctccctccgccgccgcctgcggggtgcccacttcttcctcccccagccccgatcgtcatacagctccagccccaccccagcttgctcgcggaggtggatcatcgccgcagcagttctctcgtgcagttcttgaaggatgagggggccgttttgtcgccggaggatgaaaataagagggagaaggtgatccgagagctcaagaagatagtgatgcattgggccaacgcggtggcttatgagcagagtgtgccccaggggctggccacagctaccgtcctgacatacggttcttacacattaggggctcatggacctgaatctgacattgatttactttgtcttggaccttgtattgcaacactgcagtaccatttctttgttgttttgagacaaattcttcagggcagaccagaagtatcagaagtacacactgttgagaaggctaaggttcccttgatgcgatttagattcactgggattgcagttgatttgacatatgcccaactccctgttattgatgcattaaaggctataaatacgtttagccctcaactactacagaaaatagacacacggagctggaggagtttatctggagttcgtgtcaatgaacaaattgttcagctagtaccaaatgcggagaagtttcaaactctgttgcgatgcatcaaactatgggctaggaaaagaggacttcattgccattatcttggcttctttgctgggattcatttagcaatccttgcggcatatgtctgtcggaaatttccagatgccagtgtcagtggtttgttcgcagtgttctttcagacgtttgctcactggccttggcaagttccatccattcaaatttcagtgtgcacaatcatttggaagtgagattgcagttttattctgggaaattggttggtggcaaggggatccagcttctatttgcaagtatgctttgagtgtacagtgtacaaccaaaaattgtctcttttgcactatgctgtattttctttttcatgattatatgcatggctcactcttgcgtgctaatatttttttatcacttattaagtccatatatctttgttccaggatccattgaggcatgatttccagtggagctggctttttgaacccttcccatatgatcagaaatatcagcagtttctccgcattgctttacgtgcgccaactattgctgaactaggagactgggctggatgggtgaaatctcgattccgtttcctgattctgaagctggaaagggctgggattgagtgtgatccatgcccctcggaggaagttgatcatacagacaatgaccccaacgtggtcttctactggggccttatccctaaaagaatcattcaggtcgacactagctccctgaaaggagatttcatggaagacctcaccaatgatgtgtacggcacggtgaagtgcacgcattcagatgtgacaatatctgtggttgggctgccacagctgcctaagagcatgtgcagccgggtctatccaccggcagtacatgcagcactgtatgatgggctacgagggcacagatgaaggccagatcgagcgcaggttcgttagatcatactaccacgaccgatgctccagtcttccggggcaaccgtgtacagaattgatgagttttttcatcccatagcacagggattcaaggtactggaccgggtattcttttgagctgggaggagtgcttgtgtgcgcaagaatatgggaggactactgaccggtagaagagcaaagaaaatgtgtatagcagaggcatgtaaaaacttaggccctgtcggcataggcagtgtacacttcttttgtgttctaagtgctgctggatcctgattcattcaaattttgcaatgaacaagatggcaagatgtgtatatagttggttctattggctgggtggatgttgattttgagtacaatgccttgtttatgactgacagagttaggcaatacccgatttagttattcagtagggcgatggggtgacgactgaataaccgaatggtgtattggct

SEQ ID NO: 70806 - DNA, 2639 bp, Zea Mays
ggaaatctctctgcagtgtctgcactgcacccatccgcttctcctcgtccgccgcggccgtcgccggcgacgagcatggcgtacatgacagctgtcgcgcccgtcccctggtggccgcctcccccggagctggcgcatgcgggcctcctcgtcgcgtcctctcccgccggctatccagagccccaaaccctacccttcttgttcgcgccgctccctccgccgccgcctgcggggtgcccacttcttcctcccccagccccgatcgtcatacagctccagccccaccccagcttgctcgcggaggtggatcatcgccgcagcagttctctcgtgcagttcttgaaggatgagggggccgttttgtcgccggaggatgaaaataagagggagaaggtgatccgagagctcaagaaggctcatggacctgaatctgacattgatttactttgtcttggaccttgtattgcaacactgcagtaccatttctttgttgttttgagacaaattcttcagggcagaccagaagtatcagaagtacacactgttgagaaggctaaggttcccttgatgcgatttagattcactgggattgcagttgatttgacatatgcccaactccctgttattgatgcattaaaggctataaatacgtttagccctcaactactacagaaaatagacacacggagctggaggagtttatctggagttcgtgtcaatgaacaaattgttcagctagtaccaaatgcggagttttgttttactggaaatacaatgcagaagtttcaaactctgttgcgatgcatcaaactatgggctaggaaaagaggacttcattgccatgtatgtggtttaattttctctgctgactgttcagctttagtccagctatatgaacatgaggtcatcattttggtctaacaatgtttttcttgtgccatgacattcagtatcttggcttctttgctgggattcatttagcaatccttgcggcatatgtctgtcggaaatttccagatgccagtgtcagtggtttgttcgcagtgttctttcagacgtttgctcactggccttggcaagttccagtaagtctgcatgatgagctaactacatgcttgcattcggagggacgtctcatgcctatagtgatgccttgtaccccgccagagttttgtgcgtccactgtgacaaaaggcagcttaaaaaaaataagagaggaacttacacgtggttatgttttgacaagggtgagtttaaaatcaacttaagttttttattgtgctcacaaataaatcatccaagtaaaggatagattgaattaaagttcattggagtttggagtctgatttccaaaccgggagtcatttcaattattagttttccgtacagatctaaattagaatagttgttttagtttggacggttatttaagagcactgggaattgttgcttttcactgttgaatgcataactggaaatttctgtatggaattatggaagacaaagcattattgtgtatttgttagcattattcatgttcaaataattagtatattttcactctagtgttagtctgtactttgttgtcgtgtgagaccgaccctgatttccctcatttccgtccattttgtgtatggattctcttggattcactgtaggtttaaaccatttttgtagtccattcaaatttcagtgtgcacaatcatttggaagtgagattgcagttttattctgggaaattggttggtggcaaggggatccagcttctatttgcaagatccattgaggcatgatttccagtggagctggctttttgaacccttcccatatgatcagaaatatcagcagtttctccgcattgctttacgtgcgccaactattgctgaactaggagactgggctggatgggtgaaatctcgattccgtttcctgattctgaagctggaaagggctgggattgagtgtgatccatgcccctcggaggaagttgatcatacagacaatgaccccaacgtggtcttctactggggccttatccctaaaagaatcattcaggtcgacactagctccctgaaaggagatttcatggaagacctcaccaatgatgtgtacggcacggtgaagtgcacgcattcagatgtgacaatatctgtggttgggctgccacagctgcctaagagcatgtgcagccgggtctatccaccggcagtacatgcagcactgtatgatgggctacgagggcacagatgaaggccagatcgagcgcagggattcaaggtactggaccgggtattcttttgagctgggaggagtgcttgtgtgcgcaagaatatgggaggactactgaccggtagaagagcaaagaaaatgtgtatagcagaggcatgtaaaaacttaggccctgtcggcataggcagtgtacacttcttttgtgttctaagtgctgctggatcctgattcattcaaattttgcaatgaacaagatggcaagatgtgtatatagttggttctattggctgggtggatgttgattttgagtacaatgccttgtttatgactgacagagttaggcaatacccgatttagttattcagtagggcgatggggtgacgactgaataaccgaatggtgtattggct

SEQ ID NO: 70807 - DNA, 1809 bp, Zea Mays
aagaaacggcaggaaatctctctgcagtgtctgcactgcacccatccgcttctcctctcccgccggctatccagagccccaaaccctacccttcttgttcgcgccgctccctccgccgccgcctgcggggtgcccacttcttcctcccccagccccgatcgtcatacagctccagccccaccccagcttgctcgcggaggtggatcatcgccgcagcagttctctcgtgcagttcttgaaggatgagggggccgttttgtcgccggaggatgaaaataagagggagaaggtgatccgagagctcaagaagatagtgatgcattgggccaacgcggtggcttatgagcagagtgtgccccaggggctggccacagctaccgtcctgacatacggttcttacacattaggggctcatggacctgaatctgacattgatttactttgtcttggaccttgtattgcaacactgcagtaccatttctttgttgttttgagacaaattcttcagggcagaccagaagtatcagaagtacacactgttgagaaggctaaggttcccttgatgcgatttagattcactgggattgcagttgatttgacatatgcccaactccctgttattgatgcattaaaggctataaatacgtttagccctcaactactacagaaaatagacacacggagctggaggagtttatctggagttcgtgtcaatgaacaaattgttcagctagtaccaaatgcggagaagtttcaaactctgttgcgatgcatcaaactatgggctaggaaaagaggacttcattgccattatcttggcttctttgctgggattcatttagcaatccttgcggcatatgtctgtcggaaatttccagatgccagtgtcagtggtttgttcgcagtgttctttcagacgtttgctcactggccttggcaagttccagatccattgaggcatgatttccagtggagctggctttttgaacccttcccatatgatcagaaatatcagcagtttctccgcattgctttacgtgcgccaactattgctgaactaggagactgggctggatgggtgaaatctcgattccgtttcctgattctgaagctggaaagggctgggattgagtgtgatccatgcccctcggaggaagttgatcatacagacaatgaccccaacgtggtcttctactggggccttatccctaaaagaatcattcaggtcgacactagctccctgaaaggagatttcatggaagacctcaccaatgatgtgtacggcacggtgaagtgcacgcattcagatgtgacaatatctgtggttgggctgccacagctgcctaagagcatgtgcagccgggtctatccaccggcagtacatgcagcactgtatgatgggctacgagggcacagatgaaggccagatcgagcgcagggattcaaggtactggaccgggtattcttttgagctgggaggagtgcttgtgtgcgcaagaatatgggaggactactgaccggtagaagagcaaagaaaatgtgtatagcagaggcatgtaaaaacttaggccctgtcggcataggcagtgtacacttcttttgtgttctaagtgctgctggatcctgattcattcaaattttgcaatgaacaagatggcaagatgtgtatatagttggttctattggctgggtggatgttgattttgagtacaatgccttgtttatgactgacagagttaggcaatacccgatttagttattcagtagggcgatggggtgacgactgaataaccgaatggtgtattggct

SEQ ID NO: 70808 - DNA, 2013 bp, Zea Mays
cgttctccacaagaaacggcaggaaatctctctgcagtgtctgcactgcacccatccgcttctcctctcccgccggctatccagagccccaaaccctacccttcttgttcgcgccgctccctccgccgccgcctgcggggtgcccacttcttcctcccccagccccgatcgtcatacagctccagccccaccccagcttgctcgcggaggtggatcatcgccgcagcagttctctcgtgcagttcttgaaggatgagggggccgttttgtcgccggaggatgaaaataagagggagaaggtgatccgagagctcaagaagatagtgatgcattgggccaacgcggtggcttatgagcagagtgtgccccaggggctggccacagctaccgtcctgacatacggttcttacacattaggggctcatggacctgaatctgacattgatttactttgtcttggaccttgtattgcaacactgcagtaccatttctttgttgttttgagacaaattcttcagggcagaccagaagtatcagaagtacacactgttgagaaggctaaggttcccttgatgcgatttagattcactgggattgcagttgatttgacatatgcccaactccctgttattgatgcattaaaggctataaatacgtttagccctcaactactacagaaaatagacacacggagctggaggagtttatctggagttcgtgtcaatgaacaaattgttcagctagtaccaaatgcggagttttgttttactggaaatacaatgcagaagtttcaaactctgttgcgatgcatcaaactatgggctaggaaaagaggacttcattgccattatcttggcttctttgctgggattcatttagcaatccttgcggcatatgtctgtcggaaatttccagatgccagtgtcagtggtttgttcgcagtgttctttcagacgtttgctcactggccttggcaagttccagtaagtctgcatgatgagctaactacatgcttgcattcggagggacgtctcatgcctatagtgatgccttgtaccccgccagagttttgtgcgtccactgtgacaaaaggcagcttaaaaaaaataagagaggaacttacacgtggttatgttttgacaagggatccattgaggcatgatttccagtggagctggctttttgaacccttcccatatgatcagaaatatcagcagtttctccgcattgctttacgtgcgccaactattgctgaactaggagactgggctggatgggtgaaatctcgattccgtttcctgattctgaagctggaaagggctgggattgagtgtgatccatgcccctcggaggaagttgatcatacagacaatgaccccaacgtggtcttctactggggccttatccctaaaagaatcattcaggtcgacactagctccctgaaaggagatttcatggaagacctcaccaatgatgtgtacggcacggtgaagtgcacgcattcagatgtgacaatatctgtggttgggctgccacagctgcctaagagcatgtgcagccgggtctatccaccggcagtacatgcagcactgtatgatgggctacgagggcacagatgaaggccagatcgagcgcagcacagggattcaaggtactggaccgggtattcttttgagctgggaggagtgcttgtgtgcgcaagaatatgggaggactactgaccggtagaagagcaaagaaaatgtgtatagcagaggcatgtaaaaacttaggccctgtcggcataggcagtgtacacttcttttgtgttctaagtgctgctggatcctgattcattcaaattttgcaatgaacaagatggcaagatgtgtatatagttggttctattggctgggtggatgttgattttgagtacaatgccttgtttatgactgacagagttaggcaatacccgatttagttattcagtagggcgatggggtgacgactgaataaccgaatggtgtattggct

SEQ ID NO: 70809 - DNA, 1984 bp, Zea Mays
cctcgttctccacaagaaacggcaggaaatctctctgcagtgtctgcactgcacccatccgcttctcctctcccgccggctatccagagccccaaaccctacccttcttgttcgcgccgctccctccgccgccgcctgcggggtgcccacttcttcctcccccagccccgatcgtcatacagctccagccccaccccagcttgctcgcggaggtggatcatcgccgcagcagttctctcgtgcagttcttgaaggatgagggggccgttttgtcgccggaggatgaaaataagagggagaaggtgatccgagagctcaagaagatagtgatgcattgggccaacgcggtggcttatgagcagagtgtgccccaggggctggccacagctaccgtcctgacatacggttcttacacattaggggctcatggacctgaatctgacattgatttactttgtcttggaccttgtattgcaacactgcagtaccatttctttgttgttttgagacaaattcttcagggcagaccagaagtatcagaagtacacactgttgagaaggctaaggttcccttgatgcgatttagattcactgggattgcagttgatttgacatatgcccaactccctgttattgatgcattaaaggctataaatacgtttagccctcaactactacagaaaatagacacacggagctggaggagtttatctggagttcgtgtcaatgaacaaattgttcagctagtaccaaatgcggagaagtttcaaactctgttgcgatgcatcaaactatgggctaggaaaagaggacttcattgccattatcttggcttctttgctgggattcatttagcaatccttgcggcatatgtctgtcggaaatttccagatgccagtgtcagtggtttgttcgcagtgttctttcagacgtttgctcactggccttggcaagttccagtaagtctgcatgatgagctaactacatgcttgcattcggagggacgtctcatgcctatagtgatgccttgtaccccgccagagttttgtgcgtccactgtgacaaaaggcagcttaaaaaaaataagagaggaacttacacgtggttatgttttgacaagggatccattgaggcatgatttccagtggagctggctttttgaacccttcccatatgatcagaaatatcagcagtttctccgcattgctttacgtgcgccaactattgctgaactaggagactgggctggatgggtgaaatctcgattccgtttcctgattctgaagctggaaagggctgggattgagtgtgatccatgcccctcggaggaagttgatcatacagacaatgaccccaacgtggtcttctactggggccttatccctaaaagaatcattcaggtcgacactagctccctgaaaggagatttcatggaagacctcaccaatgatgtgtacggcacggtgaagtgcacgcattcagatgtgacaatatctgtggttgggctgccacagctgcctaagagcatgtgcagccgggtctatccaccggcagtacatgcagcactgtatgatgggctacgagggcacagatgaaggccagatcgagcgcagggattcaaggtactggaccgggtattcttttgagctgggaggagtgcttgtgtgcgcaagaatatgggaggactactgaccggtagaagagcaaagaaaatgtgtatagcagaggcatgtaaaaacttaggccctgtcggcataggcagtgtacacttcttttgtgttctaagtgctgctggatcctgattcattcaaattttgcaatgaacaagatggcaagatgtgtatatagttggttctattggctgggtggatgttgattttgagtacaatgccttgtttatgactgacagagttaggcaatacccgatttagttattcagtagggcgatggggtgacgactgaataaccgaatggtgtattggct

SEQ ID NO: 70810 - DNA, 1680 bp, Zea Mays
ctgccaaacttccaccaacggtcgatcctgtgaaacactaagacacccgttgccactggaaaggagagagcaaagtgatttgctgtctcctggcgatcgttgctcgtgaggcctagtgatggcagatgctagctcaaggactgacacctcaattgttttagacgacaacgacaagaatcatagggatctcactacgcattggcacctctgaaggtcttcgttggatatgaccaaactatttcaaccaattttgaacaagcttttcttcaattagtgctacccctagcctatcagatggagaatggaagtggtgcggttgtaccttctaattcttcagataggtccgacaggtctgataaacctttggaccaaaagacaatgcgacggcttgcccaaaatcgtgaggcagcaagaaaaagtcggctgaggaaaaaggcatatgtgcagcagctggagagcagtaagctgaaacttgcacaactggaacaggaactccagaaagctcgccagcagggaatcttcatttctagctctggagaccaaacccatgccatgagtggaaatggagctttgacttttgacatagaatatgctagatggctagaggaccaaaataagcagataaatgagttgaggactgcagtgaatgctcatgcatgtggaagacacctgctgaaaggtgcttcctatggcttgggggttttcgtccatctgagcttttaaagctcctagcgaatcacctcgagcctctaactgagcagcaaatgctgggtttgaccaacctccagcaatcttcccaacaagcagaggatgcgttgtcacagggcatggaagcactgcagcaatctttggcagagactttggctggatctctcggtccagcaggttcttcaggaaatgtggcaaactacatgggtcagatggccatggccatgggcaaactcgggacgctagagaattttcttcgccaagccgacaacctgcgacagcagacgttgcatcaaatgcaacgtatcctaacgatccgacaggcttctcgtgctcttcttgcaatccacgactatttttcacgattgcgcgctttaagttctctgtggcttgctaggccacgtgaataacgaagggccgtcagtattttgagttccctctgccttacggtgctgctgcgtcgttcgcagcgatgcatcacagatctttggtggtactgtttttgttgtacaattacttttggccgctgcttggtccaaattgtactcaggtgggtgtacaagtaggtcaatataatcctgtaagttatggtgatttatgggtgtgttagcaatgcaataataattagagagggcaggatcagggtttctgttgtttgtactggttagagatttagtcctaatgtaacttcctgggacatggggggcggaatgggaagagagtaacaagaatcttcctttggttactgtagtatatgttggtattgttgcatcccattttctcattttgctgttaggagaatgattattctgtccatttgtgtactttttgattaatgttgtttgtagccccaacatgattatggatatgactgctagttcattcccattcataccactgcagtagctggccttattattaatatcatcatccatacaagagcagtggttgaagttgaaggcggcattcctg

SEQ ID NO: 70811 - DNA, 1684 bp, Zea Mays
agctgccaaacttccaccaacggtcgatcctgtgaaacactaagacacccgttgccactggaaaggagagagcaaagtgatttgctgtctcctggcgatcgttgctcgtgaggcctagtgatggcagatgctagctcaaggactgacacctcaattgttttagacgacaacgacaagaatcataggatggagaatggaagtggtgcggttgtaccttctaattcttcagataggtccgacaggtctgataaacctttggaccaaaagacaatgcgacggcttgcccaaaatcgtgaggcagcaagaaaaagtcggctgaggaaaaaggcatatgtgcagcagctggagagcagtaagctgaaacttgcacaactggaacaggaactccagaaagctcgccagcagggaatcttcatttctagctctggagaccaaacccatgccatgagtggaaatggagctttgacttttgacatagaatatgctagatggctagaggaccaaaataagcagataaatgagttgaggactgcagtgaatgctcatgcaagtgatagtgatctacgacttattgtagatggcataatggcacactatgatgaaatattcaaggtcaaaggtgttgctgcaaaggctgatgtgtttcatatactttcaggcatgtggaagacacctgctgaaaggtgcttcctatggcttgggggttttcgtccatctgagcttttaaagctcctagcgaatcacctcgagcctctaactgagcagcaaatgctgggtttgaccaacctccagcaatcttcccaacaagcagaggatgcgttgtcacagggcatggaagcactgcagcaatctttggcagagactttggctggatctctcggtccagcaggttcttcaggaaatgtggcaaactacatgggtcagatggccatggccatgggcaaactcgggacgctagagaattttcttcgccaagccgacaacctgcgacagcagacgttgcatcaaatgcaacgtatcctaacgatccgacaggcttctcgtgctcttcttgcaatccacgactatttttcacgattgcgcgctttaagttctctgtggcttgctaggccacgtgaataacgaagggccgtcagtattttgagttccctctgccttacggtgctgctgcgtcgttcgcagcgatgcatcacagatctttggtggtactgtttttgttgtacaattacttttggccgctgcttggtccaaattgtactcaggtgggtgtacaagtaggtcaatataatcctgtaagttatggtgatttatgggtgtgttagcaatgcaataataattagagagggcaggatcagggtttctgttgtttgtactggttagagatttagtcctaatgtaacttcctgggacatggggggcggaatgggaagagagtaacaagaatcttcctttggttactgtagtatatgttggtattgttgcatcccattttctcattttgctgttaggagaatgattattctgtccatttgtgtactttttgattaatgttgtttgtagccccaacatgattatggatatgactgctagttcattcccattcataccactgcagtagctggccttattattaatatcatcatccatacaagagcagtggttgaagttgaaggcggcattcctg

SEQ ID NO: 70812 - DNA, 1811 bp, Zea Mays
gagagagcgagcgagcatctgggggaagaaggggcggggctcgggaagaaacagaacaggtcagcgttggcgggctgcccgcttcccagccgttcgatgcagcttcgacggccgcgatctccccaacggacggctactgttgcacgcacggggtcgcccagtcagagatcagaggagaggacagttgccgaggccaaggcagcccaccccgcccgccgcgccgcttcttcattcccccaccacacgccatcccttgtccgtctctccgtcctctcctccccaccctcgccctgccctcgcgcccgccgccgcgcacacgccagatccgtctagactgactccgattggtttcggcttcttcgcttctccttctcggtcatatgattgcaatgaatcctgacatggtactactgtcttggaaacaaatggagaatggaagtggtgcggttgtaccttctaattcttcagataggtccgacaggtctgataaacctttggaccaaaagacaatgcgacggcttgcccaaaatcgtgaggcagcaagaaaaagtcggctgaggaaaaaggcatatgtgcagcagctggagagcagtaagctgaaacttgcacaactggaacaggaactccagaaagctcgccagcagggaatcttcatttctagctctggagaccaaacccatgccatgagtggaaatggagctttgacttttgacatagaatatgctagatggctagaggaccaaaataagcagataaatgagttgaggactgcagtgaatgctcatgcatgtggaagacacctgctgaaaggtgcttcctatggcttgggggttttcgtccatctgagcttttaaagctcctagcgaatcacctcgagcctctaactgagcagcaaatgctgggtttgaccaacctccagcaatcttcccaacaagcagaggatgcgttgtcacagggcatggaagcactgcagcaatctttggcagagactttggctggatctctcggtccagcaggttcttcaggaaatgtggcaaactacatgggtcagatggccatggccatgggcaaactcgggacgctagagaattttcttcgccaagccgacaacctgcgacagcagacgttgcatcaaatgcaacgtatcctaacgatccgacaggcttctcgtgctcttcttgcaatccacgactatttttcacgattgcgcgctttaagttctctgtggcttgctaggccacgtgaataacgaagggccgtcagtattttgagttccctctgccttacggtgctgctgcgtcgttcgcagcgatgcatcacagatctttggtggtactgtttttgttgtacaattacttttggccgctgcttggtccaaattgtactcaggtgggtgtacaagtaggtcaatataatcctgtaagttatggtgatttatgggtgtgttagcaatgcaataataattagagagggcaggatcagggtttctgttgtttgtactggttagagatttagtcctaatgtaacttcctgggacatggggggcggaatgggaagagagtaacaagaatcttcctttggttactgtagtatatgttggtattgttgcatcccattttctcattttgctgttaggagaatgattattctgtccatttgtgtactttttgattaatgttgtttgtagccccaacatgattatggatatgactgctagttcattcccattcataccactgcagtagctggccttattattaatatcatcatccatacaagagcagtggttgaagttgaaggcggcattcctg

SEQ ID NO: 70813 - DNA, 1522 bp, Zea Mays
gtcaactcacatgcgaattcggagatggagaatggaagtggtgcggttgtaccttctaattcttcagataggtccgacaggtctgataaacctttggaccaaaagacaatgcgacggcttgcccaaaatcgtgaggcagcaagaaaaagtcggctgaggaaaaaggcatatgtgcagcagctggagagcagtaagctgaaacttgcacaactggaacaggaactccagaaagctcgccagcagggaatcttcatttctagctctggagaccaaacccatgccatgagtggaaatggagctttgacttttgacatagaatatgctagatggctagaggaccaaaataagcagataaatgagttgaggactgcagtgaatgctcatgcaagtgatagtgatctacgacttattgtagatggcataatggcacactatgatgaaatattcaaggtcaaaggtgttgctgcaaaggctgatgtgtttcatatactttcaggcatgtggaagacacctgctgaaaggtgcttcctatggcttgggggttttcgtccatctgagcttttaaagctcctagcgaatcacctcgagcctctaactgagcagcaaatgctgggtttgaccaacctccagcaatcttcccaacaagcagaggatgcgttgtcacagggcatggaagcactgcagcaatctttggcagagactttggctggatctctcggtccagcaggttcttcaggaaatgtggcaaactacatgggtcagatggccatggccatgggcaaactcgggacgctagagaattttcttcgccaagccgacaacctgcgacagcagacgttgcatcaaatgcaacgtatcctaacgatccgacaggcttctcgtgctcttcttgcaatccacgactatttttcacgattgcgcgctttaagttctctgtggcttgctaggccacgtgaataacgaagggccgtcagtattttgagttccctctgccttacggtgctgctgcgtcgttcgcagcgatgcatcacagatctttggtggtactgtttttgttgtacaattacttttggccgctgcttggtccaaattgtactcaggtgggtgtacaagtaggtcaatataatcctgtaagttatggtgatttatgggtgtgttagcaatgcaataataattagagagggcaggatcagggtttctgttgtttgtactggttagagatttagtcctaatgtaacttcctgggacatggggggcggaatgggaagagagtaacaagaatcttcctttggttactgtagtatatgttggtattgttgcatcccattttctcattttgctgttaggagaatgattattctgtccatttgtgtactttttgattaatgttgtttgtagccccaacatgattatggatatgactgctagttcattcccattcataccactgcagtagctggccttattattaatatcatcatccatacaagagcagtggttgaagttgaaggcggcattcctg

SEQ ID NO: 70814 - DNA, 1619 bp, Zea Mays
agacactgctcgatgcaagctcctcctgttcgattgcgggaatggaagtcaactcacatgcgaattcggaggtcatatgattgcaatgaatcctgacatggtactactgtcttggaaacaaatggagaatggaagtggtgcggttgtaccttctaattcttcagataggtccgacaggtctgataaacctttggaccaaaagacaatgcgacggcttgcccaaaatcgtgaggcagcaagaaaaagtcggctgaggaaaaaggcatatgtgcagcagctggagagcagtaagctgaaacttgcacaactggaacaggaactccagaaagctcgccagcagggaatcttcatttctagctctggagaccaaacccatgccatgagtggaaatggagctttgacttttgacatagaatatgctagatggctagaggaccaaaataagcagataaatgagttgaggactgcagtgaatgctcatgcaagtgatagtgatctacgacttattgtagatggcataatggcacactatgatgaaatattcaaggtcaaaggtgttgctgcaaaggctgatgtgtttcatatactttcaggcatgtggaagacacctgctgaaaggtgcttcctatggcttgggggttttcgtccatctgagcttttaaagctcctagcgaatcacctcgagcctctaactgagcagcaaatgctgggtttgaccaacctccagcaatcttcccaacaagcagaggatgcgttgtcacagggcatggaagcactgcagcaatctttggcagagactttggctggatctctcggtccagcaggttcttcaggaaatgtggcaaactacatgggtcagatggccatggccatgggcaaactcgggacgctagagaattttcttcgccaagccgacaacctgcgacagcagacgttgcatcaaatgcaacgtatcctaacgatccgacaggcttctcgtgctcttcttgcaatccacgactatttttcacgattgcgcgctttaagttctctgtggcttgctaggccacgtgaataacgaagggccgtcagtattttgagttccctctgccttacggtgctgctgcgtcgttcgcagcgatgcatcacagatctttggtggtactgtttttgttgtacaattacttttggccgctgcttggtccaaattgtactcaggtgggtgtacaagtaggtcaatataatcctgtaagttatggtgatttatgggtgtgttagcaatgcaataataattagagagggcaggatcagggtttctgttgtttgtactggttagagatttagtcctaatgtaacttcctgggacatggggggcggaatgggaagagagtaacaagaatcttcctttggttactgtagtatatgttggtattgttgcatcccattttctcattttgctgttaggagaatgattattctgtccatttgtgtactttttgattaatgttgtttgtagccccaacatgattatggatatgactgctagttcattcccattcataccactgcagtagctggccttattattaatatcatcatccatacaagagcagtggttgaagttgaaggcggcattcctg

SEQ ID NO: 70815 - DNA, 2041 bp, Zea Mays
gacccacctactaatccagccagccaatgagtcccccgtttcatcacgcaacgccaacccacaccaacgccaaccggacccacccacccctcccgtccgtcgcataccatcccatcccacccccgtgcgccgagttcacggccgccaccaccaccaccaccacaaccgattacacaaggccacgcggcttctggaagcttcccttgccttgccttccctctcaacccaaatcgccacggctccctccgcccgcaagcgccctcggcacgaccgccggattcgcctctgggtggggttggttttgtctcccccaccacccacccacccctctcctctcctctcctccaaggcttggcttgcctcgtgtcgtgtgtccctccaccgcccgccatgccgacgaggcttgccccccaccgccgatcgcacacggtcatatgattgcaatgaatcctgacatggtactactgtcttggaaacaacttccaccaacggtcgatcctgtgaaacactaagacacccgttgccactggaaaggagagagcaaagtgatttgctgtctcctggcgatcgttgctcgtgaggcctagtgatggcagatgctagctcaaggactgacacctcaattgttttagacgacaacgacaagaatcataggatggagaatggaagtggtgcggttgtaccttctaattcttcagataggtccgacaggtctgataaacctttggaccaaaagacaatgcgacggcttgcccaaaatcgtgaggcagcaagaaaaagtcggctgaggaaaaaggcatatgtgcagcagctggagagcagtaagctgaaacttgcacaactggaacaggaactccagaaagctcgccagcagggaatcttcatttctagctctggagaccaaacccatgccatgagtggaaatggagctttgacttttgacatagaatatgctagatggctagaggaccaaaataagcagataaatgagttgaggactgcagtgaatgctcatgcatgtggaagacacctgctgaaaggtgcttcctatggcttgggggttttcgtccatctgagcttttaaagctcctagcgaatcacctcgagcctctaactgagcagcaaatgctgggtttgaccaacctccagcaatcttcccaacaagcagaggatgcgttgtcacagggcatggaagcactgcagcaatctttggcagagactttggctggatctctcggtccagcaggttcttcaggaaatgtggcaaactacatgggtcagatggccatggccatgggcaaactcgggacgctagagaattttcttcgccaagccgacaacctgcgacagcagacgttgcatcaaatgcaacgtatcctaacgatccgacaggcttctcgtgctcttcttgcaatccacgactatttttcacgattgcgcgctttaagttctctgtggcttgctaggccacgtgaataacgaagggccgtcagtattttgagttccctctgccttacggtgctgctgcgtcgttcgcagcgatgcatcacagatctttggtggtactgtttttgttgtacaattacttttggccgctgcttggtccaaattgtactcaggtgggtgtacaagtaggtcaatataatcctgtaagttatggtgatttatgggtgtgttagcaatgcaataataattagagagggcaggatcagggtttctgttgtttgtactggttagagatttagtcctaatgtaacttcctgggacatggggggcggaatgggaagagagtaacaagaatcttcctttggttactgtagtatatgttggtattgttgcatcccattttctcattttgctgttaggagaatgattattctgtccatttgtgtactttttgattaatgttgtttgtagccccaacatgattatggatatgactgctagttcattcccattcataccactgcagtagctggccttattattaatatcatcatccatacaagagcagtggttgaagttgaaggcggcattcctg

SEQ ID NO: 70816 - DNA, 2122 bp, Zea Mays
gacccacctactaatccagccagccaatgagtcccccgtttcatcacgcaacgccaacccacaccaacgccaaccggacccacccacccctcccgtccgtcgcataccatcccatcccacccccgtgcgccgagttcacggccgccaccaccaccaccaccacaaccgattacacaaggccacgcggcttctggaagcttcccttgccttgccttccctctcaacccaaatcgccacggctccctccgcccgcaagcgccctcggcacgaccgccggattcgcctctgggtggggttggttttgtctcccccaccacccacccacccctctcctctcctctcctccaaggcttggcttgcctcgtgtcgtgtgtccctccaccgcccgccatgccgacgaggcttgccccccaccgccgatcgcacacggtcatatgattgcaatgaatcctgacatggtactactgtcttggaaacaacttccaccaacggtcgatcctgtgaaacactaagacacccgttgccactggaaaggagagagcaaagtgatttgctgtctcctggcgatcgttgctcgtgaggcctagtgatggcagatgctagctcaaggactgacacctcaattgttttagacgacaacgacaagaatcatagggtcttcgttggatatgaccaaactatttcaaccaattttgaacaagcttttcttcaattagtgctacccctagcctatcagatggagaatggaagtggtgcggttgtaccttctaattcttcagataggtccgacaggtctgataaacctttggaccaaaagacaatgcgacggcttgcccaaaatcgtgaggcagcaagaaaaagtcggctgaggaaaaaggcatatgtgcagcagctggagagcagtaagctgaaacttgcacaactggaacaggaactccagaaagctcgccagcagggaatcttcatttctagctctggagaccaaacccatgccatgagtggaaatggagctttgacttttgacatagaatatgctagatggctagaggaccaaaataagcagataaatgagttgaggactgcagtgaatgctcatgcatgtggaagacacctgctgaaaggtgcttcctatggcttgggggttttcgtccatctgagcttttaaagctcctagcgaatcacctcgagcctctaactgagcagcaaatgctgggtttgaccaacctccagcaatcttcccaacaagcagaggatgcgttgtcacagggcatggaagcactgcagcaatctttggcagagactttggctggatctctcggtccagcaggttcttcaggaaatgtggcaaactacatgggtcagatggccatggccatgggcaaactcgggacgctagagaattttcttcgccaagccgacaacctgcgacagcagacgttgcatcaaatgcaacgtatcctaacgatccgacaggcttctcgtgctcttcttgcaatccacgactatttttcacgattgcgcgctttaagttctctgtggcttgctaggccacgtgaataacgaagggccgtcagtattttgagttccctctgccttacggtgctgctgcgtcgttcgcagcgatgcatcacagatctttggtggtactgtttttgttgtacaattacttttggccgctgcttggtccaaattgtactcaggtgggtgtacaagtaggtcaatataatcctgtaagttatggtgatttatgggtgtgttagcaatgcaataataattagagagggcaggatcagggtttctgttgtttgtactggttagagatttagtcctaatgtaacttcctgggacatggggggcggaatgggaagagagtaacaagaatcttcctttggttactgtagtatatgttggtattgttgcatcccattttctcattttgctgttaggagaatgattattctgtccatttgtgtactttttgattaatgttgtttgtagccccaacatgattatggatatgactgctagttcattcccattcataccactgcagtagctggccttattattaatatcatcatccatacaagagcagtggttgaagttgaaggcggcattcctg

SEQ ID NO: 70817 - DNA, 2151 bp, Zea Mays
gacccacctactaatccagccagccaatgagtcccccgtttcatcacgcaacgccaacccacaccaacgccaaccggacccacccacccctcccgtccgtcgcataccatcccatcccacccccgtgcgccgagttcacggccgccaccaccaccaccaccacaaccgattacacaaggccacgcggcttctggaagcttcccttgccttgccttccctctcaacccaaatcgccacggctccctccgcccgcaagcgccctcggcacgaccgccggattcgcctctgggtggggttggttttgtctcccccaccacccacccacccctctcctctcctctcctccaaggcttggcttgcctcgtgtcgtgtgtccctccaccgcccgccatgccgacgaggcttgccccccaccgccgatcgcacacggtcatatgattgcaatgaatcctgacatggtactactgtcttggaaacaacttccaccaacggtcgatcctgtgaaacactaagacacccgttgccactggaaaggagagagcaaagtgatttgctgtctcctggcgatcgttgctcgtgaggcctagtgatggcagatgctagctcaaggactgacacctcaattgttttagacgacaacgacaagaatcatagggatctcactacgcattggcacctctgaaggtcttcgttggatatgaccaaactatttcaaccaattttgaacaagcttttcttcaattagtgctacccctagcctatcagatggagaatggaagtggtgcggttgtaccttctaattcttcagataggtccgacaggtctgataaacctttggaccaaaagacaatgcgacggcttgcccaaaatcgtgaggcagcaagaaaaagtcggctgaggaaaaaggcatatgtgcagcagctggagagcagtaagctgaaacttgcacaactggaacaggaactccagaaagctcgccagcagggaatcttcatttctagctctggagaccaaacccatgccatgagtggaaatggagctttgacttttgacatagaatatgctagatggctagaggaccaaaataagcagataaatgagttgaggactgcagtgaatgctcatgcatgtggaagacacctgctgaaaggtgcttcctatggcttgggggttttcgtccatctgagcttttaaagctcctagcgaatcacctcgagcctctaactgagcagcaaatgctgggtttgaccaacctccagcaatcttcccaacaagcagaggatgcgttgtcacagggcatggaagcactgcagcaatctttggcagagactttggctggatctctcggtccagcaggttcttcaggaaatgtggcaaactacatgggtcagatggccatggccatgggcaaactcgggacgctagagaattttcttcgccaagccgacaacctgcgacagcagacgttgcatcaaatgcaacgtatcctaacgatccgacaggcttctcgtgctcttcttgcaatccacgactatttttcacgattgcgcgctttaagttctctgtggcttgctaggccacgtgaataacgaagggccgtcagtattttgagttccctctgccttacggtgctgctgcgtcgttcgcagcgatgcatcacagatctttggtggtactgtttttgttgtacaattacttttggccgctgcttggtccaaattgtactcaggtgggtgtacaagtaggtcaatataatcctgtaagttatggtgatttatgggtgtgttagcaatgcaataataattagagagggcaggatcagggtttctgttgtttgtactggttagagatttagtcctaatgtaacttcctgggacatggggggcggaatgggaagagagtaacaagaatcttcctttggttactgtagtatatgttggtattgttgcatcccattttctcattttgctgttaggagaatgattattctgtccatttgtgtactttttgattaatgttgtttgtagccccaacatgattatggatatgactgctagttcattcccattcataccactgcagtagctggccttattattaatatcatcatccatacaagagcagtggttgaagttgaaggcggcattcctg

SEQ ID NO: 70818 - DNA, 2088 bp, Zea Mays
gacccacctactaatccagccagccaatgagtcccccgtttcatcacgcaacgccaacccacaccaacgccaaccggacccacccacccctcccgtccgtcgcataccatcccatcccacccccgtgcgccgagttcacggccgccaccaccaccaccaccacaaccgattacacaaggccacgcggcttctggaagcttcccttgccttgccttccctctcaacccaaatcgccacggctccctccgcccgcaagcgccctcggcacgaccgccggattcgcctctgggtggggttggttttgtctcccccaccacccacccacccctctcctctcctctcctccaaggcttggcttgcctcgtgtcgtgtgtccctccaccgcccgccatgccgacgaggcttgccccccaccgccgatcgcacacggtcatatgattgcaatgaatcctgacatggtactactgtcttggaaacaacttccaccaacggtcgatcctgtgaaacactaagacacccgttgccactggaaaggagagagcaaagtgatttgctgtctcctggcgatcgttgctcgtgaggcctagtgatggcagatgctagctcaaggactgacacctcaattgttttagacgacaacgacaagaatcatagggatctcactacgcattggcacctctgaaggtcttcgttggatatgaccaaactatttcaaccaattttgaacaagcttttcttcaattagtgctacccctagcctatcagatggagaatggaagtggtgcggttgtaccttctaattcttcagataggtccgacaggtctgataaacctttggaccaaaagacaatgcgacggcttgcccaaaatcgtgaggcagcaagaaaaagtcggctgaggaaaaaggcatatgtgcagcagctggagagcagtaagctgaaacttgcacaactggaacaggaactccagaaagctcgccagcagggaatcttcatttctagctctggagaccaaacccatgccatgagtggaaatggagctttgacttttgacatagaatatgctagatggctagaggaccaaaataagcagataaatgagttgaggactgcagtgaatgctcatgcatgtggaagacacctgctgaaaggtgcttcctatggcttgggggttttcgtccatctgagcttttaaagcaatcttcccaacaagcagaggatgcgttgtcacagggcatggaagcactgcagcaatctttggcagagactttggctggatctctcggtccagcaggttcttcaggaaatgtggcaaactacatgggtcagatggccatggccatgggcaaactcgggacgctagagaattttcttcgccaagccgacaacctgcgacagcagacgttgcatcaaatgcaacgtatcctaacgatccgacaggcttctcgtgctcttcttgcaatccacgactatttttcacgattgcgcgctttaagttctctgtggcttgctaggccacgtgaataacgaagggccgtcagtattttgagttccctctgccttacggtgctgctgcgtcgttcgcagcgatgcatcacagatctttggtggtactgtttttgttgtacaattacttttggccgctgcttggtccaaattgtactcaggtgggtgtacaagtaggtcaatataatcctgtaagttatggtgatttatgggtgtgttagcaatgcaataataattagagagggcaggatcagggtttctgttgtttgtactggttagagatttagtcctaatgtaacttcctgggacatggggggcggaatgggaagagagtaacaagaatcttcctttggttactgtagtatatgttggtattgttgcatcccattttctcattttgctgttaggagaatgattattctgtccatttgtgtactttttgattaatgttgtttgtagccccaacatgattatggatatgactgctagttcattcccattcataccactgcagtagctggccttattattaatatcatcatccatacaagagcagtggttgaagttgaaggcggcattcctg

SEQ ID NO: 70819 - DNA, 1815 bp, Zea Mays
gacccacctactaatccagccagccaatgagtcccccgtttcatcacgcaacgccaacccacaccaacgccaaccggacccacccacccctcccgtccgtcgcataccatcccatcccacccccgtgcgccgagttcacggccgccaccaccaccaccaccacaaccgattacacaaggccacgcggcttctggaagcttcccttgccttgccttccctctcaacccaaatcgccacggctccctccgcccgcaagcgccctcggcacgaccgccggattcgcctctgggtggggttggttttgtctcccccaccacccacccacccctctcctctcctctcctccaaggcttggcttgcctcgtgtcgtgtgtccctccaccgcccgccatgccgacgaggcttgccccccaccgccgatcgcacacgatggagaatggaagtggtgcggttgtaccttctaattcttcagataggtccgacaggtctgataaacctttggaccaaaagacaatgcgacggcttgcccaaaatcgtgaggcagcaagaaaaagtcggctgaggaaaaaggcatatgtgcagcagctggagagcagtaagctgaaacttgcacaactggaacaggaactccagaaagctcgccagcagggaatcttcatttctagctctggagaccaaacccatgccatgagtggaaatggagctttgacttttgacatagaatatgctagatggctagaggaccaaaataagcagataaatgagttgaggactgcagtgaatgctcatgcatgtggaagacacctgctgaaaggtgcttcctatggcttgggggttttcgtccatctgagcttttaaagctcctagcgaatcacctcgagcctctaactgagcagcaaatgctgggtttgaccaacctccagcaatcttcccaacaagcagaggatgcgttgtcacagggcatggaagcactgcagcaatctttggcagagactttggctggatctctcggtccagcaggttcttcaggaaatgtggcaaactacatgggtcagatggccatggccatgggcaaactcgggacgctagagaattttcttcgccaagccgacaacctgcgacagcagacgttgcatcaaatgcaacgtatcctaacgatccgacaggcttctcgtgctcttcttgcaatccacgactatttttcacgattgcgcgctttaagttctctgtggcttgctaggccacgtgaataacgaagggccgtcagtattttgagttccctctgccttacggtgctgctgcgtcgttcgcagcgatgcatcacagatctttggtggtactgtttttgttgtacaattacttttggccgctgcttggtccaaattgtactcaggtgggtgtacaagtaggtcaatataatcctgtaagttatggtgatttatgggtgtgttagcaatgcaataataattagagagggcaggatcagggtttctgttgtttgtactggttagagatttagtcctaatgtaacttcctgggacatggggggcggaatgggaagagagtaacaagaatcttcctttggttactgtagtatatgttggtattgttgcatcccattttctcattttgctgttaggagaatgattattctgtccatttgtgtactttttgattaatgttgtttgtagccccaacatgattatggatatgactgctagttcattcccattcataccactgcagtagctggccttattattaatatcatcatccatacaagagcagtggttgaagttgaaggcggcattcctg

SEQ ID NO: 70820 - DNA, 1752 bp, Zea Mays
gacccacctactaatccagccagccaatgagtcccccgtttcatcacgcaacgccaacccacaccaacgccaaccggacccacccacccctcccgtccgtcgcataccatcccatcccacccccgtgcgccgagttcacggccgccaccaccaccaccaccacaaccgattacacaaggccacgcggcttctggaagcttcccttgccttgccttccctctcaacccaaatcgccacggctccctccgcccgcaagcgccctcggcacgaccgccggattcgcctctgggtggggttggttttgtctcccccaccacccacccacccctctcctctcctctcctccaaggcttggcttgcctcgtgtcgtgtgtccctccaccgcccgccatgccgacgaggcttgccccccaccgccgatcgcacacgatggagaatggaagtggtgcggttgtaccttctaattcttcagataggtccgacaggtctgataaacctttggaccaaaagacaatgcgacggcttgcccaaaatcgtgaggcagcaagaaaaagtcggctgaggaaaaaggcatatgtgcagcagctggagagcagtaagctgaaacttgcacaactggaacaggaactccagaaagctcgccagcagggaatcttcatttctagctctggagaccaaacccatgccatgagtggaaatggagctttgacttttgacatagaatatgctagatggctagaggaccaaaataagcagataaatgagttgaggactgcagtgaatgctcatgcatgtggaagacacctgctgaaaggtgcttcctatggcttgggggttttcgtccatctgagcttttaaagcaatcttcccaacaagcagaggatgcgttgtcacagggcatggaagcactgcagcaatctttggcagagactttggctggatctctcggtccagcaggttcttcaggaaatgtggcaaactacatgggtcagatggccatggccatgggcaaactcgggacgctagagaattttcttcgccaagccgacaacctgcgacagcagacgttgcatcaaatgcaacgtatcctaacgatccgacaggcttctcgtgctcttcttgcaatccacgactatttttcacgattgcgcgctttaagttctctgtggcttgctaggccacgtgaataacgaagggccgtcagtattttgagttccctctgccttacggtgctgctgcgtcgttcgcagcgatgcatcacagatctttggtggtactgtttttgttgtacaattacttttggccgctgcttggtccaaattgtactcaggtgggtgtacaagtaggtcaatataatcctgtaagttatggtgatttatgggtgtgttagcaatgcaataataattagagagggcaggatcagggtttctgttgtttgtactggttagagatttagtcctaatgtaacttcctgggacatggggggcggaatgggaagagagtaacaagaatcttcctttggttactgtagtatatgttggtattgttgcatcccattttctcattttgctgttaggagaatgattattctgtccatttgtgtactttttgattaatgttgtttgtagccccaacatgattatggatatgactgctagttcattcccattcataccactgcagtagctggccttattattaatatcatcatccatacaagagcagtggttgaagttgaaggcggcattcctg

SEQ ID NO: 70821 - DNA, 1978 bp, Zea Mays
gacccacctactaatccagccagccaatgagtcccccgtttcatcacgcaacgccaacccacaccaacgccaaccggacccacccacccctcccgtccgtcgcataccatcccatcccacccccgtgcgccgagttcacggccgccaccaccaccaccaccacaaccgattacacaaggccacgcggcttctggaagcttcccttgccttgccttccctctcaacccaaatcgccacggctccctccgcccgcaagcgccctcggcacgaccgccggattcgcctctgggtggggttggttttgtctcccccaccacccacccacccctctcctctcctctcctccaaggcttggcttgcctcgtgtcgtgtgtccctccaccgcccgccatgccgacgaggcttgccccccaccgccgatcgcacacggtcatatgattgcaatgaatcctgacatggtactactgtcttggaaacaacttccaccaacggtcgatcctgtgaaacactaagacacccgttgccactggaaaggagagagcaaagtgatttgctgtctcctggcgatcgttgctcgtgaggcctagtgatggcagatgctagctcaaggactgacacctcaattgttttagacgacaacgacaagaatcataggatggagaatggaagtggtgcggttgtaccttctaattcttcagataggtccgacaggtctgataaacctttggaccaaaagacaatgcgacggcttgcccaaaatcgtgaggcagcaagaaaaagtcggctgaggaaaaaggcatatgtgcagcagctggagagcagtaagctgaaacttgcacaactggaacaggaactccagaaagctcgccagcagggaatcttcatttctagctctggagaccaaacccatgccatgagtggaaatggagctttgacttttgacatagaatatgctagatggctagaggaccaaaataagcagataaatgagttgaggactgcagtgaatgctcatgcatgtggaagacacctgctgaaaggtgcttcctatggcttgggggttttcgtccatctgagcttttaaagcaatcttcccaacaagcagaggatgcgttgtcacagggcatggaagcactgcagcaatctttggcagagactttggctggatctctcggtccagcaggttcttcaggaaatgtggcaaactacatgggtcagatggccatggccatgggcaaactcgggacgctagagaattttcttcgccaagccgacaacctgcgacagcagacgttgcatcaaatgcaacgtatcctaacgatccgacaggcttctcgtgctcttcttgcaatccacgactatttttcacgattgcgcgctttaagttctctgtggcttgctaggccacgtgaataacgaagggccgtcagtattttgagttccctctgccttacggtgctgctgcgtcgttcgcagcgatgcatcacagatctttggtggtactgtttttgttgtacaattacttttggccgctgcttggtccaaattgtactcaggtgggtgtacaagtaggtcaatataatcctgtaagttatggtgatttatgggtgtgttagcaatgcaataataattagagagggcaggatcagggtttctgttgtttgtactggttagagatttagtcctaatgtaacttcctgggacatggggggcggaatgggaagagagtaacaagaatcttcctttggttactgtagtatatgttggtattgttgcatcccattttctcattttgctgttaggagaatgattattctgtccatttgtgtactttttgattaatgttgtttgtagccccaacatgattatggatatgactgctagttcattcccattcataccactgcagtagctggccttattattaatatcatcatccatacaagagcagtggttgaagttgaaggcggcattcctg

SEQ ID NO: 70822 - DNA, 2106 bp, Zea Mays
cagccatcgtcttgcgcctttgctgcacaaaccgccagccccttttcattcatatccgttttcttattttagccggcgaaaacggccaggcggaggcccttgacttgcccgacgatcacacggcctcggaaagcgatgcagcaagcaaagctagctaagtggagtgagtcgagtgggtttcaggtgcgctgcggcggagttggttggtgaggagggaggaggaaagcgagcggcgagaggcgacccacctactaatccagccagccaatgagtcccccgtttcatcacgcaacgccaacccacaccaacgccaaccggacccacccacccctcccgtccgtcgcataccatcccatcccacccccgtgcgccgagttcacggccgccaccaccaccaccaccacaaccgattacacaaggccacgcggcttctggaagcttcccttgccttgccttccctctcaacccaaatcgccacggctccctccgcccgcaagcgccctcggcacgaccgccggattcgcctctgggtggggttggttttgtctcccccaccacccacccacccctctcctctcctctcctccaaggcttggcttgcctcgtgtcgtgtgtccctccaccgcccgccatgccgacgaggcttgccccccaccgccgatcgcacacggtcatatgattgcaatgaatcctgacatggtactactgtcttggaaacaaatggagaatggaagtggtgcggttgtaccttctaattcttcagataggtccgacaggtctgataaacctttggaccaaaagacaatgcgacggcttgcccaaaatcgtgaggcagcaagaaaaagtcggctgaggaaaaaggcatatgtgcagcagctggagagcagtaagctgaaacttgcacaactggaacaggaactccagaaagctcgccagcagggaatcttcatttctagctctggagaccaaacccatgccatgagtggaaatggagctttgacttttgacatagaatatgctagatggctagaggaccaaaataagcagataaatgagttgaggactgcagtgaatgctcatgcatgtggaagacacctgctgaaaggtgcttcctatggcttgggggttttcgtccatctgagcttttaaagctcctagcgaatcacctcgagcctctaactgagcagcaaatgctgggtttgaccaacctccagcaatcttcccaacaagcagaggatgcgttgtcacagggcatggaagcactgcagcaatctttggcagagactttggctggatctctcggtccagcaggttcttcaggaaatgtggcaaactacatgggtcagatggccatggccatgggcaaactcgggacgctagagaattttcttcgccaagccgacaacctgcgacagcagacgttgcatcaaatgcaacgtatcctaacgatccgacaggcttctcgtgctcttcttgcaatccacgactatttttcacgattgcgcgctttaagttctctgtggcttgctaggccacgtgaataacgaagggccgtcagtattttgagttccctctgccttacggtgctgctgcgtcgttcgcagcgatgcatcacagatctttggtggtactgtttttgttgtacaattacttttggccgctgcttggtccaaattgtactcaggtgggtgtacaagtaggtcaatataatcctgtaagttatggtgatttatgggtgtgttagcaatgcaataataattagagagggcaggatcagggtttctgttgtttgtactggttagagatttagtcctaatgtaacttcctgggacatggggggcggaatgggaagagagtaacaagaatcttcctttggttactgtagtatatgttggtattgttgcatcccattttctcattttgctgttaggagaatgattattctgtccatttgtgtactttttgattaatgttgtttgtagccccaacatgattatggatatgactgctagttcattcccattcataccactgcagtagctggccttattattaatatcatcatccatacaagagcagtggttgaagttgaaggcggcattcctg

SEQ ID NO: 70823 - DNA, 553 bp, Zea Mays
cagcgctcttcctccatgggtgcttcggcctccatgggtgccccgttgcgactggaaagggaaggcagggggacgcatgggcgcggagacggtaggcctaccgacactcctgcgggagatccaacggatcgacaccatccggctctacgcgggtcagcatctcttcctctcgtcactttcctttcccaattgtcaagtaacaataccccattcttattcataataacttacacggtttattataatctgttgatccatttttttgttcacctatttgtctaccgcttaataaatgtccgctgtaggcgtagcactgacattctggatcgccgggaaatgtggtgatagttcctttatatgtacaagcctcagtattagttggtttgtttataactaagatgagatactcgtgaaggtcagggcctcgaaaaccaagtatcctaagttcgcaactgaatcgatcgacaccatctgaataaataaatgtctcctgcacagtatcaaacctgctgctccagctcatagtttggttgtgatttggatttcccctctg

SEQ ID NO: 70824 - DNA, 902 bp, Zea Mays
gacgaggctacgttctcgtttgggttaaaagttatttgtcatgtttgttaccatgatatcatagaagtttgatatgggctgtcactggtggggacttccggtagtaccgtaccgcctgcccttgtccttgtccgtccgcggtaggcatcctcttcctcctcgcccagacttgttccccgcaggagctagcaaggccgtggcagcgctcttcctccatgggtgcttcggcctccatgggtgccccgttgcgactggaaagggaaggcagtccctctcatgccgcggccgccgccggcccaacgtgcggggcttcctggacacgcacttcgccacccccgacgacctcgcggtcgcgccggcgctcgcggagctcctgcgccgagctcgacgcctcgcgcggctgcgaccggtcacgagggggacgcatgggcgcggagacggtaggcctaccgacactcctgcgggagatccaacggatcgacaccatccggctctacgcgggtcagcatctcttcctctcgtcactttcctttcccaattgtcaagtaacaataccccattcttattcataataacttacacggtttattataatctgttgatccatttttttgttcacctatttgtctaccgcttaataaatgtccgctgtaggcgtagcactgacattctggatcgccgggaaatgtggtgatagttcctttatatgtacaagcctcagtattagttggtttgtttataactaagatgagatactcgtgaaggtcagggcctcgaaaaccaagtatcctaagttcgcaactgaatcgatcgacaccatctgaataaataaatgtctcctgcacagtatcaaacctgctgctccagctcatagtttggttgtgatttggatttcccctctg

SEQ ID NO: 70825 - DNA, 801 bp, Zea Mays
ttcagagtcctgtaactccgttgcaaagagctacagaagtgcctcctccggtgttcaaccaaatattgatgaatcaacaacaagaggattctgatggtccgcctcaaaagaaaattcccacgttgctcatgtggactcttggagggaggaatatctacgttgaaggatcatgggacaactggacatcaaagacttcgttcctgacagcgtggaaagtgtgtctgagctgatggcccctccctccccggactccagctacggtttccatgttcccggcgaaaaggagttctccaaggagcctcctcagctgccgtcccagctctacctcggcgtgctgaattcccggagcaccgaagaaggctgcgcgaggccgaggcacgtcgtcctcgaccatctctacatcgagaagggctggggcgcacagccgctggtggccctcggctacacccacaggttccgctccaagtacgtcacctgcgtcctgtacaaggccatcgagcggtagcctgaccattgctggctgtgctgttgtgggccggcaactatagctagccgtggtggacttggcagttcattcaggtttagaagtctctcctgcataattcgttcatctgctaaactaaagaggtgggtgcaaatccatgtgaatcttgttttttttttagctgccagagcttacatattcttattattcgattgttttgttgggggataatggtaaattcgacggcttagtgccggacagtaaggatgccagtctcatgcctgctttattgtcactgtgcaaatggtggagatttt

SEQ ID NO: 70826 - DNA, 2280 bp, Zea Mays
agcgagcaccgtcgtcgtccaaggtgatcccaatggcccatgtgcggctgcttctcccctccactagctccgatcacctagctagcctctcgctgtactacagatcggacaggggccgcgcaggcacaggcgcagcgtcccaaccaatcgtatttactccgatccgccccgccactgcacagccgccttctgccctccttccatcgcgctcgctcgctcgctctcctatataaacgccctgcagtcctgcagcacctaccagtccagtctcgcagagcagatagcatcagtgcctactgcggtactgcatagctagcttagcttggtcttcgatctcgaccagagccagagagtgtggtgtgaccgtgtgagcgacgatggggaagcacgtctgggcggcagcgctcatggcgctggccgtgattgtcgggctcggtgtgccccccggccgcatcgccgaggcgcgcaccttagagaaggacgacctgctgggcggcggcggtgactttggtgctggagagggaggaggcttcggtggtggtgctggtggaggtcttggaggtgggtttggtggaggaggaggccttgggggaggcggcggtgctggtggtggttttggtggcggggctggtcatggtggtggccttggaggtggcttcggaggtggaaaaggtggtggtgcaggtggaggtggtggtcttggagggggtgtaggcgggggcggcggccttggtacaggtggaggaggtggctttggaggtgggaaaggtggtggacttggcggaggtggtggccttggcagtggaggtggtgcaggcgtaggcggtggtcttggagggggtgccggtggaggcggcgaccttggaggtgggaaaggtggtggccttggtggagggggtggcctcggcggtggaggtggacttggcggtggtgcaggtgggggcggcggccttggtgccggtggaggaggtggctttggaggtgggaaaggtggtggtcttggtggaggtggtggcctcggtggtggaggtggtgcaggcgaaggcggtggtcttggagtaggtgccggtggaggaggtggactaggcggtggtgccggtggcgggtttggtggtggcgcaggaggaggtgttggtggaggtggtggccttggtgacggtgctggcggtggtgctggagctggcagtggtcttggaggaggtgctggtggaggaggtggactaggcggtggtgccggtggcgggtttggtggtggcgcaggaggaggtgttggtggaggtgcgggaggcggtgctggcggtggtgctggagctggcggtggtctcggtggtggtgcaggcagtggtgtcggtggtgggtttggaggaggcaaaggcggaggctttggtggtgggattggcgggggcgggggcgcaggtggtggtgccggtggtgggttcggaggaggcaaaggtggcggttttggtggtggcaagggaggtggttttggcggaggcgccggtggtgggttcggaggaggcaaaggtggtggttttggcggtggcaagggaggtggtttcggcggaggtgcgggtggtggctttggaggaggcaagggtggtggttttggcggaggtgcaggtggtggcttcggaggtggcggaggttcgggtggtggcatcggtggtggactctagaggtggcgggagctcggcgcgcgcacgttgagtgcgtgcatgccatgaaattaaaaagcgatacatggagtgtgtggtacggtatggacattgctagagttacattacatcatcactagtatatataaggttgactcttatttgtaagcctaatgaaagtgaataattggatgcgttatgtaagcctactctactatatatatgtttgttttggaaaatcgagggagtgtgttacttgactatccccaatcacactcataaaaacttgacttgtgtgttgtttgtactcgaccaattatatactacaatacatatttggtcatgcctgtgtgatcgctgtgctttgtgcttttaggaaggaatgcacgtgcgcgcaatgggtgttaatgagaaaatagaacacaagagagagtgcagcttcaaaattgataagttatcctgatatcgtcttggtattgtattgaatggtacacattagcagagagtgaaatatgtgataattcacaaaactggcgtacttgttagttccacgagtcttgtttttttttttgaaagggtaaatgatttagttaaaacacctctatttttttttaaaaaaaaaaaa

SEQ ID NO: 70827 - DNA, 1956 bp, Zea Mays
agcgagcaccgtcgtcgtccaaggtgatcccaatggcccatgtgcggctgcttctcccctccactagctccgatcacctagctagcctctcgctgtactacagatcggacaggggccgcgcaggcacaggcgcagcgtcccaaccaatcgtatttactccgatccgccccgccactgcacagccgccttctgccctccttccatcgcgctcgctcgctcgctctcctatataaacgccctgcagtcctgcagcacctaccagtccagtctcgcagagcagatagcatcagtgcctactgcggtactgcatagctagcttagcttggtcttcgatctcgaccagagccagagagtgtggtgtgaccgtgtgagcgacgatggggaagcacgtctgggcggcagcgctcatggcgctggccgtgattgtcgggctcggtgtgccccccggccgcatcgccgaggcgcgcaccttagagaaggacgacctgctgggcggcggcggtgactttggtgctggagagggaggaggcttcggtggtggtgctggtggaggtcttggaggtgggtttggtggaggaggaggccttgggggaggcggcggtgctggtggtggttttggtggcggggctggtcatggtggtggccttggaggtggcttcggaggtggaaaaggtggtggtgcaggtggaggtggtggtcttggagggggtgtaggaggtggctttggaggtgggaaaggtggtggtcttggtggaggtggtggcctcggtggtggaggtggtgcaggcgaaggcggtggtcttggagtaggtgccggtggaggaggtggactaggcggtggtgccggtggcgggtttggtggtggcgcaggaggaggtgctggtggaggaggtggactaggcggtggtgccggtggcgggtttggtggtggcgcaggaggaggtgttggtggaggtgcgggaggcggtgctggcggtggtgctggagctggcggtggtctcggtggtggtgcaggcagtggtgtcggtggtgggtttggaggaggcaaaggcggaggctttggtggtgggattggcgggggcgggggcgcaggtggtggtgccggtggtgggttcggaggaggcaaaggtggcggttttggtggtggcaagggaggtggttttggcggaggcgccggtggtgggttcggaggaggcaaaggtggtggttttggcggtggcaagggaggtggtttcggcggaggtgcgggtggtggctttggaggaggcaagggtggtggttttggcggaggtgcaggtggtggcttcggaggtggcggaggttcgggtggtggcatcggtggtggactctagaggtggcgggagctcggcgcgcgcacgttgagtgcgtgcatgccatgaaattaaaaagcgatacatggagtgtgtggtacggtatggacattgctagagttacattacatcatcactagtatatataaggttgactcttatttgtaagcctaatgaaagtgaataattggatgcgttatgtaagcctactctactatatatatgtttgttttggaaaatcgagggagtgtgttacttgactatccccaatcacactcataaaaacttgacttgtgtgttgtttgtactcgaccaattatatactacaatacatatttggtcatgcctgtgtgatcgctgtgctttgtgcttttaggaaggaatgcacgtgcgcgcaatgggtgttaatgagaaaatagaacacaagagagagtgcagcttcaaaattgataagttatcctgatatcgtcttggtattgtattgaatggtacacattagcagagagtgaaatatgtgataattcacaaaactggcgtacttgttagttccacgagtcttgtttttttttttgaaagggtaaatgatttagttaaaacacctctatttttttttaaaaaaaaaaaa

SEQ ID NO: 70828 - DNA, 1780 bp, Zea Mays
caagtgagagataccaggcgaagaaaaaagaaaccgcggtcgggatgccagagcagcgctaagatccgtgacgtcgagcgcgggaccaaaatctatagtggtctcaatatgattttttaaaagagactaaaatggggaaaaaactggctagcacctagcacgtatgacattgctcgctgccacttgggtcccatgcgccatagctgggtcccctctcgcggccacttgggcccatcatgcacgctaaccccacacgcagaggacggcccatggcgtctgttggtctgccctgccctgccagctgccatctcatctatatatatgcggcatcaggtcggccactccagtcttccaaaacgaagcaaaagcaaccgtcgagcttgcaacgccttacgcctccacactcaacagtcatggtcgtcatgggcaaggagcagcaacacgaggaggaggaggtgcaagggaaggtcgtccaagaagaagtgcaagtcgtccaagagacggtggtgccggtgccgtcggaggaggacaaggaggccgaggcgggcgcactactccgacctgctggcctccttcgacaacccgctggagcacctgtcgctcttcccctacatcaacaactacatcctgctgagccagctggagcacgggctgctggcgcggcacgtgccgggcccagcgccggcgcgcgtggccttcgtcgggtccggcccgctcccgctgagctccctggtgctcgcggcgcgccaccttccgggcgcctccttcgacaactacgacatctgcggggaggccaacgaccgggcgcggcgcctggtgcgcggcgacggcgcgctccaggcgcgcatggcgttccgcacctcggacgtggcggacgtgacccgggagctggcgtcgtacgacgccgtgttcctggcggcgctggtgggcatggcggccgaggagaaggcccgcgtggtggcgcacctcgggaggcacatggcccccggcgccgcgctggtggtgcggagcgcgcacggcgcgcgcgggttcctgtaccccgtggtggaccccgaggagatccggcgcggcggattcgacgtgctcgccgtgcaccacccggagggggaggtgatcaactccgtgatcatcgcgcgcaagcccgttgccgtcgacgcgcacgccaccggcggggtggggcacgcgcacgcgcacgcgcacggcgccgtgctcaaccggccctgcctctgctgcgagatggaggcccgggcgcaccagaagatggaggaggtggccgtcgagcagctgccgtcctaggcaggcgcacaccggcgtcctcgctttcttgtccgtccggccgcccatttgattttcggagttgcatctatctcatctaatatggatccatccatccatccatctatagcagtattatgtatgcatccacatggtaataatctggctgaccgcatccgcatatcgtcgtctcatcgtccatctataccttgaaagctactaattaattactgagttattattactactgtttttactactactacgtacaactacctcatctagctggtgtattaattgattttgtttgttactgctgtactactgttgttgtggagatgaaccatgcatggagtggttagtcactctttagtactttcatgacgttgttttcaacggtcatatcatcatcattgttgttactgctgctgctagctcatctagctgctgtattgtctatatactgatgcatgtgtggaaacgaatcatggagcggttattgttc

SEQ ID NO: 70829 - DNA, 1779 bp, Zea Mays
caagtgagagataccaggcgaagaaaaaagaaaccgcggtcgggatgccagagcagcgctaagatccgtgacgtcgagcgcgggaccaaaatctatagtggtctcaatatgattttttaaaagagactaaaatggggaaaaaactggctagcacctagcacgtatgacattgctcgctgccacttgggtcccatgcgccatagctgggtcccctctcgcggccacttgggcccatcatgcacgctaaccccacacgcagaggacggcccatggcgtctgttggtctgccctgccctgccagctgccatctcatctatatatatgcggcatcaggtcggccactccagtcttccaaaacgaagcaaaagcaaccgtcgagcttgcaacgccttacgcctccacactcaacagtcatggtcgtcatgggcaaggagcagcaacacgaggaggaggaggtgcaagggaaggtcgtccaagaagaagtgcaagtcgtccaagagacggtggtgccggtgccgtcggaggaggacaaggaggccgaggcggcgcactactccgacctgctggcctccttcgacaacccgctggagcacctgtcgctcttcccctacatcaacaactacatcctgctgagccagctggagcacgggctgctggcgcggcacgtgccgggcccagcgccggcgcgcgtggccttcgtcgggtccggcccgctcccgctgagctccctggtgctcgcggcgcgccaccttccgggcgcctccttcgacaactacgacatctgcggggaggccaacgaccgggcgcggcgcctggtgcgcggcgacggcgcgctccaggcgcgcatggcgttccgcacctcggacgtggcggacgtgacccgggagctggcgtcgtacgacgccgtgttcctggcggcgctggtgggcatggcggccgaggagaaggcccgcgtggtggcgcacctcgggaggcacatggcccccggcgccgcgctggtggtgcggagcgcgcacggcgcgcgcgggttcctgtaccccgtggtggaccccgaggagatccggcgcggcggattcgacgtgctcgccgtgcaccacccggagggggaggtgatcaactccgtgatcatcgcgcgcaagcccgttgccgtcgacgcgcacgccaccggcggggtggggcacgcgcacgcgcacgcgcacggcgccgtgctcaaccggccctgcctctgctgcgagatggaggcccgggcgcaccagaagatggaggaggtggccgtcgagcagctgccgtcctaggcaggcgcacaccggcgtcctcgctttcttgtccgtccggccgcccatttgattttcggagttgcatctatctcatctaatatggatccatccatccatccatctatagcagtattatgtatgcatccacatggtaataatctggctgaccgcatccgcatatcgtcgtctcatcgtccatctataccttgaaagctactaattaattactgagttattattactactgtttttactactactacgtacaactacctcatctagctggtgtattaattgattttgtttgttactgctgtactactgttgttgtggagatgaaccatgcatggagtggttagtcactctttagtactttcatgacgttgttttcaacggtcatatcatcatcattgttgttactgctgctgctagctcatctagctgctgtattgtctatatactgatgcatgtgtggaaacgaatcatggagcggttattgttc

SEQ ID NO: 70830 - DNA, 1807 bp, Zea Mays
cacacgtactaaacagaatagtataatgtgccatgcatactacaatgcatgattgctagctagggtgctgttctacccacttgtggaataataaaaaaaagatctgagagaacctcttttaatttaagcaacataatcgaccactattaacattttccatcatcgggtatatatagtctcgccagttttcacacacacacacacaaaaaaaacggttttagatttatatattttcatagatcgagctagctagcacgggaaatcaaaggagaggggaaggagaggatgactcaacagtacagtgcactatatagaacaaaaaaatgtgtgcatatgtaggatctatgcatgctgccactaaccctatatatctagcaacggtatatatatagggtcctcaatgaatgacgacaccatgaacacataaggctatcgccaatggatcaaatgcattcgacatgccttttgtcgagtgccacactcgacaaagagggtttggtgaaccaaccatcggcaactgtttctttgacgagtgcttttgtaaagctgctatgacagtggcaagtgacgatgacagagattttgtcgagtgttggctcagaggcactcgacaaataaagcttatgtgggccttccatacgtagtgtctttaccgagtgccatggttgtagcattcatcaaagtatgttccctagtgcccatgatgctttctttgccgaccacggcactcggcaaagacaccctttggcgagttcaacactcggcaaggtgaccataggcccccatttttatttacttttaatattacattgaaataaataaaagatatatatcatcaacatcacataaatcaaagataccacatatctcacaaacaacacaagttcttcacaaacatctcaaaagtcacatgtctgccaaaatagttcacaaaactcacaaatcgtcacacacataagttcagaaacatcaagtgtatgtcacaaacatatatttgaacaacattagcgaggtgaccaattactttggttcgacgaagggttggacgaagcatgagagtcatttaaggacgccgattgattctgcacagaaaatagattgcatgtgtgtgacaagataaataatatcgtacatgactcaaaatttcatacccacatgactataaaaccaatgaggtgcatttggagtgaacaacagaggtggcggagctacacccgctacagcgccaagagtctgcatgtactgaaacatctgctcggtcatcatcctcacctccaactccacacgttgcctcctctcttcttctagctgagattataatgtttctccccaatgttacgataatgcaaagaaaagatatataataattaatcaacgacgaataaagacgaaataacctagaattcttgtatccgatactatgatgtgtcctgtcgaggtcgtatggttgagcttgcacttgtgctccttactcgaacgtgagatagagtttgagtggaggacgtgtcgattgcgcggtcggccaatcagtaccacacatgcctcttgcctcctccaaccctcatgaggacttctccgttgatgccctcggtcctcgaatcatattttggctcatagacctcctttgccatcgtggtgtactcactcatgcagttgtgagcgatggtgttgatttatgccttgggtccgtctttcgggttgtagctaacgtacgacgtcgtcttgcccttgtgggccatagcatataccgagtagatggagcaaggctggccaccatgtgacatggactatgagaaaaccaacaaac

SEQ ID NO: 70831 - DNA, 2193 bp, Zea Mays
actaacgacacgagtagtactgatcagggtcagggaccgtccgtagtttcagtcccgctcccgcagtctggttcgtcttctcttctccccacctgtctccacaattccccataggaggagggggaggtagagaagcgcgaatggagagcaggaacgtagtggtgtgcgacaatggtaccgggtatgtgaagtgtggctttgctggtgagaacttccctacatctgtgttcccttgtgttgtcggacgaccgctacttcgctatgaggagtcacttcaggaacaagaattgacggatattgttgttggagcagcttgtgctgacttgagacatcaacttgatgtatcatatcctgttaccaatggcattgttcaaaattgggatgacatgggccatatctgggatcatgccttctacagtgagctcaaggttgatccatctgagtgtaaaatcctactgacagatccaccactcaatcccgtgaaaaaccgagaaaaaatgatcgagacaatgttcgagaaatataactttgctggggtcttcatccagatccaagcagttctttcactgtatgctcaaggcttgctaactggacttgtgatagattctggtgatggtgttactcatgtggtgcctgtagttgatggatactcttatccacatctgacaaagagaatgaatgtagctggaaggcatataacatcttatcttgttgacctactctcaaggagagggtatgctatgaataaatctgctgactttgagactgtcagagaaataaaagagaagctatgttatataagttatgattacaaacgagaataccagctaggacttgagaccacaatccttgtgaaaagttacactcttccagatggaagagttattaaagtaggcactgaacgatttcaagctcctgaagctcttttcactcctgaactgatagatgttgaaggtgatgggatggcggatatggcattccgttgcattcaggaaatggatattgacaacaggatgacgctctatcaacatattgtcttaagtggaggaagtaccatgtaccctggtctgccaagtcgttttgaagggaaacaaagatggcctaaagaaattacggctgaggatagaggatcctcctcggagaaagcacatggtgtatctgggaggtgcagtgcttgctgggatcatgaaggatgcacctgagttctggataaccaggcaggagtaccaggaagaaggtgtagcgtgcctaaggaagtgcgggcagtcataagtcttgccacatatcatccacagaagaaatggaggttgcatgtgtaaagaagagctctgttgttggtgttgtgtattgtagtgagctatagctgtcctgaacatgcttggggataaaccatgtttgtattggcctactcaatttgacctctgttattgatcatcctttttagatatggaacatgacggccacctttatttgtattttttttggttgccccgattgattccacgaacctgattgacggagtctattaggtggtcccaaatcagaaatttggcactgtgctgtagaatcacaagttttaaactgtgtgtgcaacaggagaagtggaggatctgatttggtaaatatatatttacttcatctgatctgatggtgaagcctttggtgcaggtttagattgctccgacaggtttctttatcatggtatgcaccgcataaaaaaagaagtcagaaaattcatttgtggtaatatggccctctttaagaatcttgagcaacagtaggtagtcatgggaatctcatcctctctttggatcagttgactggttctgtcattcagaataaccaatcaatcttgtcttgaaccatatactactatatattatatattctattctcgcaagcagcggaggcgtgcaaatatgcaatgcacgtcgttttcgaggaaccgattccagcaagcatgcatttggagaccttgcacagccacacgacggcggaaattccccatctccaggagagctgcagcttgtgtgatcgtggaagacgtactagctagctcgtgcccgccacaagcctgcacgcaatgtaacagtaagtacaacttggtgagtgggagaaccgtagatttttttatattctattctattctatcaggatacgtatagctatctacgactacgactacgatacccc

SEQ ID NO: 70832 - DNA, 1496 bp, Zea Mays
actaacgacacgagtagtactgatcagggtcagggaccgtccgtagtttcagtcccgctcccgcagtctggttcgtcttctcttctccccacctgtctccacaattccccataggaggagggggaggtagagaagcgcgaatggagagcaggaacgtagtggtgtgcgacaatggtaccgggtatgtgaagtgtggctttgctggtgagaacttccctacatctgtgttcccttgtgttgtcggacgaccgctacttcgctatgaggagtcacttcaggaacaagaattgacggatattgttgttggagcagcttgtgctgacttgagacatcaacttgatgtatcatatcctgttaccaatggcattgttcaaaattgggatgacatgggccatatctgggatcatgccttctacagtgagctcaaggttgatccatctgagtgtaaaatcctactgacagatccaccactcaatcccgtgaaaaaccgagaaaaaatgatcgagacaatgttcgagaaatataactttgctggggtcttcatccagatccaagcagttctttcactgtatgctcaaggcttgctaactggacttgtgatagattctggtgatggtgttactcatgtggtgcctgtagttgatggatactcttatccacatctgacaaagagaatgaatgtagctggaaggcatataacatcttatcttgttgacctactctcaaggagagggtatgctatgaataaatctgctgactttgagactgtcagagaaataaaagagaagctatgttatataagttatgattacaaacgagaataccagctaggacttgagaccacaatccttgtgaaaagttacactatggaagagttattaaagtaggcactgaacgatttcaagctcctgaagctcttttcactcctgaactgatagatgttgaaggtgatgggatggcggatatggcattccgttgcattcaggaaatggatattgacaacaggatgacgctctatcaacatattgtcttaagtggaggaagtaccatgtaccctggtctgccaagtcggttggagaaagaaattcttgaccgttatcttgatgtagttttgaagggaaacaaagatggcctaaagaaattacggctgaggatagaggatcctcctcggagaaagcacatggtgtatctgggaggtgcagtgcttgctgggatcatgaaggatgcacctgagttctggataaccaggcaggagtaccaggaagaaggtgtagcgtgcctaaggaagtgcgggcagtcataagtcttgccacatatcatccacagaagaaatggaggttgcatgtgtaaagaagagctctgttgttggtgttgtgtattgtagtgagctatagctgtcctgaacatgcttggggataaaccatgtttgtattggcctactcaatttgacctctgttattgatcatcctttttagatatggaacatgacggccacc

SEQ ID NO: 70833 - DNA, 1441 bp, Zea Mays
actaacgacacgagtagtactgatcagggtcagggaccgtccgtagtttcagtcccgctcccgcagtctggttcgtcttctcttctccccacctgtctccacaattccccataggaggagggggaggtagagaagcgcgaatggagagcaggaacgtagtggtgtgcgacaatggtaccgggtatgtgaagtgtggctttgctggtgagaacttccctacatctgtgttcccttgtgttgtcggacgaccgctacttcgctatgaggagtcacttcaggaacaagaattgacggatattgttgttggagcagcttgtgctgacttgagacatcaacttgatgtatcatatcctgttaccaatggcattgttcaaaattgggatgacatgggccatatctgggatcatgccttctacagtgagctcaaggtatatctatattgctggttgatccatctgagtgtaaaatcctactgacagatccaccactcaatcccgtgaaaaaccgagaaaaaatgatcgagacaatgttcgagaaatataactttgctggggtcttcatccagatccaagcagttctttcactgtatgctcaaggcttgctaactggacttgtgatagattctggtgatggtgttactcatgtggtgcctgtagttgatggatactcttatccacatctgacaaagagaatgaatgtagctggaaggcatataacatcttatcttgttgacctactctcaaggagagggtatgctatgaataaatctgctgactttgagactgtcagagaaataaaagagaagctatgttatataagttatgattacaaacgagaataccagctaggacttgagaccacaatccttgtgaaaagttacactatgttgaaggtgatgggatggcggatatggcattccgttgcattcaggaaatggatattgacaacaggatgacgctctatcaacatattgtcttaagtggaggaagtaccatgtaccctggtctgccaagtcggttggagaaagaaattcttgaccgttatcttgatgtagttttgaagggaaacaaagatggcctaaagaaattacggctgaggatagaggatcctcctcggagaaagcacatggtgtatctgggaggtgcagtgcttgctgggatcatgaaggatgcacctgagttctggataaccaggcaggagtaccaggaagaaggtgtagcgtgcctaaggaagtgcgggcagtcataagtcttgccacatatcatccacagaagaaatggaggttgcatgtgtaaagaagagctctgttgttggtgttgtgtattgtagtgagctatagctgtcctgaacatgcttggggataaaccatgtttgtattggcctactcaatttgacctctgttattgatcatcctttttagatatggaacatgacggccacc

SEQ ID NO: 70834 - DNA, 1509 bp, Zea Mays
actaacgacacgagtagtactgatcagggtcagggaccgtccgtagtttcagtcccgctcccgcagtctggttcgtcttctcttctccccacctgtctccacaattccccataggaggagggggaggtagagaagcgcgaatggagagcaggaacgtagtggtgtgcgacaatggtaccgggtatgtgaagtgtggctttgctggtgagaacttccctacatctgtgttcccttgtgttgtcggacgaccgctacttcgctatgaggagtcacttcaggaacaagaattgacggatattgttgttggagcagcttgtgctgacttgagacatcaacttgatgtatcatatcctgttaccaatggcattgttcaaaattgggatgacatgggccatatctgggatcatgccttctacagtgagctcaaggtatatctatattgctggttgatccatctgagtgtaaaatcctactgacagatccaccactcaatcccgtgaaaaaccgagaaaaaatgatcgagacaatgttcgagaaatataactttgctggggtcttcatccagatccaagcagttctttcactgcttgctaactggacttgtgatagattctggtgatggtgttactcatgtggtgcctgtagttgatggatactcttatccacatctgacaaagagaatgaatgtagctggaaggcatataacatcttatcttgttgacctactctcaaggagagggtatgctatgaataaatctgctgactttgagactgtcagagaaataaaagagaagctatgttatataagttatgattacaaacgagaataccagctaggacttgagaccacaatccttgtgaaaagttacactcttccagatggaagagttattaaagtaggcactgaacgatttcaagctcctgaagctcttttcactcctgaactgatagatgttgaaggtgatgggatggcggatatggcattccgttgcattcaggaaatggatattgacaacaggatgacgctctatcaacatattgtcttaagtggaggaagtaccatgtaccctggtctgccaagtcggttggagaaagaaattcttgaccgttatcttgatgtagttttgaagggaaacaaagatggcctaaagaaattacggctgaggatagaggatcctcctcggagaaagcacatggtgtatctgggaggtgcagtgcttgctgggatcatgaaggatgcacctgagttctggataaccaggcaggagtaccaggaagaaggtgtagcgtgcctaaggaagtgcgggcagtcataagtcttgccacatatcatccacagaagaaatggaggttgcatgtgtaaagaagagctctgttgttggtgttgtgtattgtagtgagctatagctgtcctgaacatgcttggggataaaccatgtttgtattggcctactcaatttgacctctgttattgatcatcctttttagatatggaacatgacggccacc

SEQ ID NO: 70835 - DNA, 1492 bp, Zea Mays
actaacgacacgagtagtactgatcagggtcagggaccgtccgtagtttcagtcccgctcccgcagtctggttcgtcttctcttctccccacctgtctccacaattccccataggaggagggggaggtagagaagcgcgaatggagagcaggaacgtagtggtgtgcgacaatggtaccgggtatgtgaagtgtggctttgctggtgagaacttccctacatctgtgttcccttgtgttgtcggacgaccgctacttcgctatgaggagtcacttcaggaacaagaattgacggatattgttgttggagcagcttgtgctgacttgagacatcaacttgatgtatcatatcctgttaccaatggcattgttcaaaattgggatgacatgggccatatctgggatcatgccttctacagtgagctcaaggttgatccatctgagtgtaaaatcctactgacagatccaccactcaatcccgtgaaaaaccgagaaaaaatgatcgagacaatgttcgagaaatataactttgctggggtcttcatccagatccaagcagttctttcactgcttgctaactggacttgtgatagattctggtgatggtgttactcatgtggtgcctgtagttgatggatactcttatccacatctgacaaagagaatgaatgtagctggaaggcatataacatcttatcttgttgacctactctcaaggagagggtatgctatgaataaatctgctgactttgagactgtcagagaaataaaagagaagctatgttatataagttatgattacaaacgagaataccagctaggacttgagaccacaatccttgtgaaaagttacactcttccagatggaagagttattaaagtaggcactgaacgatttcaagctcctgaagctcttttcactcctgaactgatagatgttgaaggtgatgggatggcggatatggcattccgttgcattcaggaaatggatattgacaacaggatgacgctctatcaacatattgtcttaagtggaggaagtaccatgtaccctggtctgccaagtcggttggagaaagaaattcttgaccgttatcttgatgtagttttgaagggaaacaaagatggcctaaagaaattacggctgaggatagaggatcctcctcggagaaagcacatggtgtatctgggaggtgcagtgcttgctgggatcatgaaggatgcacctgagttctggataaccaggcaggagtaccaggaagaaggtgtagcgtgcctaaggaagtgcgggcagtcataagtcttgccacatatcatccacagaagaaatggaggttgcatgtgtaaagaagagctctgttgttggtgttgtgtattgtagtgagctatagctgtcctgaacatgcttggggataaaccatgtttgtattggcctactcaatttgacctctgttattgatcatcctttttagatatggaacatgacggccacc

SEQ ID NO: 70836 - DNA, 1700 bp, Zea Mays
gccgcagcttgccgccccggagcgcggcgtcgtacaggagcttgaggtggtccaggtcccggaggcagtccgggagcgccccgaccgactccagcaggtcggcgcgcgctcgcagcgccgggatggaggccgggtccagcgccagcgcgcggttgcagtccgcgatggcgtccgcggggcgccccgccgaccggaacgcggcggcgcggcccaccaggcaggccgtggcgaaggggtgcggcagcacgctgcggcgcgtgtccagcaccttgttgaaatgccgcactgcctcgccggggagcccggcgtccagcgccgccaccgccgccgcgcgccgccggaggaggagcttcacgtgcgcgagcagctgcgacacggactccgcctcggacgctgcggcgctgttggccgtcagcgggttcgacggcgagaagctgtcctccgaccagcacacgctctcgcgccggaacgccgcggtggcgaggcggcgggcggtttggaggagcaccaccgcgtcttccatcaggccgaggtggaagcaggctctgcccaggaccaggtacctccactgcgcctcggtgctcgagctcctgcagaagctggcgacgaggcggcgcttgaggtcggacacgtggaggcagcagaggaagcgggcggcgccggcgcaggcgtcggaacggtcgcggtccccggaggcagacgagcaggacgaggatgacgaggcgcaggtggcgtcatcgtcgcccgagcacgacctggcgtaactggggatgtagtcgcggagcatgtcggcgacgtcgcggtagcgcctgagcgcgaggagcgcgcgcgcccggagctccagcgccgcctcggcccgcggcgacatctccagggcggccgtgaccaggccgagcgccgccgccgccgccgccgcgtcgtcggtgtcctgcgcggccgcagcgagagccgcccgcgcctcgctgaggtacgtgtcgaacacctgtcgcacatggacgcatcgccatcagattccatccaaccaccaaaccgtacgaggaggaaaaggacaacgaaataaatcaagccgcgtcctcgaacaagtcaaacagaaagaatgcatcacacacacggcacggaagagccatctggagacgaaaggcgagagcgcctggtggatggaaacagcaagagtggcacctcgggctctcctctcgctctcgggattgcaaaggcgaaatcggggagagcaatgcaatacaatgcaggcacgaaccttgttgttgcctctcagccagttaatgcgtttcttggccggagcggaggaaggggacggcggcgccattgcgtcccgccaggcatcaacagcggatcaaaaaaaagggaagaagggggagttctcccctccgtctgtgtcgtctggagtagattgggctgagggatgagtgtttttttgttgttgttgctttgagcaggcagaggcaggtgtgctgctgctgcagtatactaaccctaattcttaataaagggaaaaaaatagaagtgcattgcatggtattcacatgtggagggtagtgtgagcatggtctttccagcagagcagagcaggagcaggagcaggagcattatccagcctaaagccatgtgtttagcagctcaacatccaccacaccatcgctcatgggatgctctgctctccgccgccatcctgtcctgtcctg

SEQ ID NO: 70837 - DNA, 332 bp, Zea Mays
cgcagccggattgcagccgcagcaagccgcagcgaacaagctgcaaatacaaaaaaaactgcaatctccctgacgcttcttgcactcgcgttcattcctattttgtgctcatgcatctcttattcccaaactgtacagcgcttgctactactacaagcaaattcgaacctccactccagtcccgccaactccaggttctgctgctgctgcttcaccttccattggacccgcctcgcgacatcagcagctcatcgcctcgcacttcaccggaatcggccggtcgaacccccctcgggacagcagggtgtcgcggcagaacacgaacggttggc

SEQ ID NO: 70838 - DNA, 3945 bp, Zea Mays
ctttgatcccttcctcatgtctcattcagaaacagtgaatgaaaatggtttctttgatgggagcaaacttctccaagtctctggcagcaaacataattacccatctcatttgctacaaatttgaaggtgagaaatacgaacttgctaaaagggtgaatataaagcttgtcaatcaccggtggctggaagaatgcttaaaggcttgggaaatccttccggtcgaccattatacgaaaagtggttgggaagtagagataatgggagctcaagctaaggactctgaagatgaaacagaatatgctggtacatgctcattaagtagcagacgtattgacagaaggacccctattagagagatcagcacaaaatctcatgttgactctgctctacatgcacccagtggaggtcctactgtctctgctagcaatgtagtgggtgctactggaaaacacttgagcactccagagcagtttatgaaagcacacgatgcgagcacaaaatcatctgacattagaactgactcaggaactgcccctgacacaaagtgtgctgcaatgtctgttgataatgatactcttaaacctacccgctctcacatttaccacaatgagaatgatgaggttcctgcagataaggccagtagggatgaagctaaagatgatcacagaagggaacttgacaccagggatagtacccttcgtactcccagtgtacataaaagcattgcacccactattccaggagacaatatagagaacactaacaggaattgtttccatggtttcagtcagatcaatgtcaacagtgatcttcagttaaactcttctgaagaaaatttctccaagaaaatattacactcaacaaacttgagcagaaaggtagaccagaaggatgacgggcatgtacctgatcccaaacccaacatttctcagtcatcagttgaagaaaacctaaacatgtgtgagtttaatccaagatcagaaggcaattcagcatcaagaaatgatcaacccttaggctattcaagaaggcgatcttcaaagtcaggatcacttaatgttcataggaagaaaagcattctttcttcagtcagttcaaaggcaccaaatgaagccccagactcgggaagtggaatatcaagcgcaactgcttctgatgtgggtagaagccccaccgaacctaccaaagttgatggtcatgtaaacagtggtccaactatgaattcaacagagaaccagatgtccggttgtaaaagcaacctgttaagttataggagaacatctttgaagcttgtaagctctgctgaagtagaaaagcttcctgaaaattctgttaatgataagaacatggtggagccagatgtagtaaagacaccagcactgcacgaggcaacaactgaggagccttccccttccgtctgttctgaagttagaaaagaaagtttaggtgttcatcagaatagggacgctgaaatgactgatgctcagctgctaagcaaaactgaagatgcagctccttgctcaaaacctgataaagtggtttcttgtcagaactcgggactagaaggttgtaaagatgtcccagttaacaagatcactgatgaacatggaatatttccctcgaaaatatcaacttctagagtgaagaaggttggtgccaagcggtctcgcaatgccggcagtaaagctgctagtgaatttacaaatagtagaagtgaggttgcagctttgaagcctaagcatgataaagttgcttctcatgaaaacgtggaggcacaacagggagaaggatgttgtagtccaaatgctgctgaatgtacaccaccatctcctgcagaagccctgaacaacaaatcaacgaatgaagttctaaccagctcccagggccccaatcataagacaaacgaatcactagtggcttccaaggcggagtctgttaatatgactctgcaaagaaacaagaaggggaaccgcagaaagcttccaaacacttcaaatgcagatgaaaatcaaagaagttcatctcggacagtaccaaattccaaatcaggaaatggtgaagaaaaacataaaaggctttcaagcagtgcaaacgcagatgaccctgaagcatgtacagcaaataaagtaccaaacaatagagtccgtaaggtcgtagccaagaggaagctatctgatgtccaaagccacaaatctggtagtgagccttgcaagactgcgaaggtattggtatctgaagttaaagttgtgtcaccagccagagttgcgcagagttctagaaatgctaacaaggtaacagtggttcaagacctgcagaacaccaatactggtaggacgaacgatacagttggatcattttgcaaagatgtcacggaagactgctcaaaagacatgcagagctctaaaactagaagcagcaggagacaaaagattgcagatctagtggatggttcaacggaccatgacaaggagaacatactagtcgatagtaattttacttccaatacaaaacgtggaaataacagcatgagttccaaatccaacacaaagacattacaaagtagcaaagctgtgcttgatgagagtagtgtgatcaaaaggaatggttatggaaccttggatgtgccagaaccaacatggtttattctaagtggacatcgcctgctgagaaaagagtatagggctatacttagacgtttgagaggtagagtttgcagggattcacatcactggtctttccaagcaacacaccttgtcaccactgagatgcgcagaactgaaaaattcttcgcagctgctgcggctggcaggtggatactgaagcctgattacttgactgctagcaatgaggctggcaagttcttagaggaagagccatttgagtggcacggtgaaggccttaatatcggtgatacgatcagcttggatgctccaaggaagtggcgccagctgcggcagcgtactggctatggcgctttctatgggatgcaggtcatcatatatggggaatgcattgctccaacactggacacgttaaaacgcgcgatcaggtgtggtgatggcaccatcttagcaacctccccaccttacacccggttctttaagtccagtgttgacttcgctgttgtatccgcgggcatgccaagcgcggacgcgtgggtgcaggaattcatgcggcatagcatcccctgcatcagcgcagattacctggtggagtacgtgtgcaagcccgggcaccccttgggcaagcacgtcctcttcaacatgcacgatctggccgagaggtccctgcagaagctcatgaagaaccaagaagatgctcccgggagctgttccgcttgtgggtcagacaaccgggaagtgccgatgctggtgtgcggcggcgacgggaggagccagtcttccggctgtggggtccggacgcatgccgattgctgcaaccctcccgtggaaggctgcgatggtggcgagtggctgtgcggtaggtgcgaccagcagaaatctgcaaagaaggctaagaagaccgctgcgaaaccgagggtgctgaaacagagatgattctggtttggcccgtacaagcgatgcaaaaggtcgtctcccaaggtaacgacgaatgatggcagcgggggtgctcttgctctctacaagttgatgacaactagctcgttgcctttggaaagcacccgtgcatgtgatctgatgaatgaaaacaaagtgatgggtgtaaacgtataaggactttagactggtgccaataaatattacgtatttatgtaaatgcacggatctgatggaatgctgtgatcaacttgaacatatatggtgcccatcaatctgggcattgggcgctgtcgaatgtccggtaaagcgcgctatttccggatcgtccttcatggttgtgtgcgtccgagtaaaggcaatggccgtgcaaaagtttcttcgacgg

SEQ ID NO: 70839 - DNA, 4132 bp, Zea Mays
atgccttgtgctgtttgttcggatgatccagtgtgtgtggcggcgaggaaggccgggaagaaggtcgtcgttgatcagtgggtggaagacagctttgatctcggagaattggcagatgcagatcgggtgctatatgctccagtcagagattttaaaggcattccaggttgcgataaacttcacatttgtttgacagggtaccagaagaattggcgcgacgacataatgaaaatggtttctttgatgggagcaaacttctccaagtctctggcagcaaacataattacccatctcatttgctacaaatttgaaggtgagaaatacgaacttgctaaaagggtgaatataaagcttgtcaatcaccggtggctggaagaatgcttaaaggcttgggaaatccttccggtcgaccattatacgaaaagtggttgggaagtagagataatgggagctcaagctaaggactctgaagatgaaacagaatatgctggtacatgctcattaagtagcagacgtattgacagaaggacccctattagagagatcagcacaaaatctcatgttgactctgctctacatgcacccagtggaggtcctactgtctctgctagcaatgtagtgggtgctactggaaaacacttgagcactccagagcagtttatgaaagcacacgatgcgagcacaaaatcatctgacattagaactgactcaggaactgcccctgacacaaagtgtgctgcaatgtctgttgataatgatactcttaaacctacccgctctcacatttaccacaatgagaatgatgaggttcctgcagataaggccagtagggatgaagctaaagatgatcacagaagggaacttgacaccagggatagtacccttcgtactcccagtgtacataaaagcattgcacccactattccaggagacaatatagagaacactaacaggaattgtttccatggtttcagtcagatcaatgtcaacagtgatcttcagttaaactcttctgaagaaaatttctccaagaaaatattacactcaacaaacttgagcagaaaggtagaccagaaggatgacgggcatgtacctgatcccaaacccaacatttctcagtcatcagttgaagaaaacctaaacatgtgtgagtttaatccaagatcagaaggcaattcagcatcaagaaatgatcaacccttaggctattcaagaaggcgatcttcaaagtcaggatcacttaatgttcataggaagaaaagcattctttcttcagtcagttcaaaggcaccaaatgaagccccagactcgggaagtggaatatcaagcgcaactgcttctgatgtgggtagaagccccaccgaacctaccaaagttgatggtcatgtaaacagtggtccaactatgaattcaacagagaaccagatgtccggttgtaaaagcaacctgttaagttataggagaacatctttgaagcttgtaagctctgctgaagtagaaaagcttcctgaaaattctgttaatgataagaacatggtggagccagatgtagtaaagacaccagcactgcacgaggcaacaactgaggagccttccccttccgtctgttctgaagttagaaaagaaagtttaggtgttcatcagaatagggacgctgaaatgactgatgctcagctgctaagcaaaactgaagatgcagctccttgctcaaaacctgataaagtggtttcttgtcagaactcgggactagaaggttgtaaagatgtcccagttaacaagatcactgatgaacatggaatatttccctcgaaaatatcaacttctagagtgaagaaggttggtgccaagcggtctcgcaatgccggcagtaaagctgctagtgaatttacaaatagtagaagtgaggttgcagctttgaagcctaagcatgataaagttgcttctcatgaaaacgtggaggcacaacagggagaaggatgttgtagtccaaatgctgctgaatgtacaccaccatctcctgcagaagccctgaacaacaaatcaacgaatgaagttctaaccagctcccagggccccaatcataagacaaacgaatcactagtggcttccaaggcggagtctgttaatatgactctgcaaagaaacaagaaggggaaccgcagaaagcttccaaacacttcaaatgcagatgaaaatcaaagaagttcatctcggacagtaccaaattccaaatcaggaaatggtgaagaaaaacataaaaggctttcaagcagtgcaaacgcagatgaccctgaagcatgtacagcaaataaagtaccaaacaatagagtccgtaaggtcgtagccaagaggaagctatctgatgtccaaagccacaaatctggtagtgagccttgcaagactgcgaaggtattggtatctgaagttaaagttgtgtcaccagccagagttgcgcagagttctagaaatgctaacaaggtaacagtggttcaagacctgcagaacaccaatactggtaggacgaacgatacagttggatcattttgcaaagatgtcacggaagactgctcaaaagacatgcagagctctaaaactagaagcagcaggagacaaaagattgcagatctagtggatggttcaacggaccatgacaaggagaacatactagtcgatagtaattttacttccaatacaaaacgtggaaataacagcatgagttccaaatccaacacaaagacattacaaagtagcaaagctgtgcttgatgagagtagtgtgatcaaaaggaatggttatggaaccttggatgtgccagaaccaacatggtttattctaagtggacatcgcctgctgagaaaagagtatagggctatacttagacgtttgagaggtagagtttgcagggattcacatcactggtctttccaagcaacacaccttgtcaccactgagatgcgcagaactgaaaaattcttcgcagctgctgcggctggcaggtggatactgaagcctgattacttgactgctagcaatgaggctggcaagttcttagaggaagagccatttgagtggcacggtgaaggccttaatatcggtgatacgatcagcttggatgctccaaggaagtggcgccagctgcggcagcgtactggctatggcgctttctatgggatgcaggtcatcatatatggggaatgcattgctccaacactggacacgttaaaacgcgcgatcaggtgtggtgatggcaccatcttagcaacctccccaccttacacccggttctttaagtccagtgttgacttcgctgttgtatccgcgggcatgccaagcgcggacgcgtgggtgcaggaattcatgcggcatagcatcccctgcatcagcgcagattacctggtggagtacgtgtgcaagcccgggcaccccttgggcaagcacgtcctcttcaacatgcacgatctggccgagaggtccctgcagaagctcatgaagaaccaagaagatgctcccgggagctgttccgcttgtgggtcagacaaccgggaagtgccgatgctggtgtgcggcggcgacgggaggagccagtcttccggctgtggggtccggacgcatgccgattgctgcaaccctcccgtggaaggctgcgatggtggcgagtggctgtgcggtaggtgcgaccagcagaaatctgcaaagaaggctaagaagaccgctgcgaaaccgagggtgctgaaacagagatgattctggtttggcccgtacaagcgatgcaaaaggtcgtctcccaaggtaacgacgaatgatggcagcgggggtgctcttgctctctacaagttgatgacaactagctcgttgcctttggaaagcacccgtgcatgtgatctgatgaatgaaaacaaagtgatgggtgtaaacgtataaggactttagactggtgccaataaatattacgtatttatgtaaatgcacggatctgatggaatgctgtgatcaacttgaacatatatggtgcccatcaatctgggcattgggcgctgtcgaatgtccggtaaagcgcgctatttccggatcgtccttcatggttgtgtgcgtccgagtaaaggcaatggccgtgcaaaagtttcttcgacgg

SEQ ID NO: 70840 - DNA, 4308 bp, Zea Mays
agacaatccaatcacccagcgccagcgatcccaaacaaaccctagccaccaatctccgctccggcctgcgccctcgccatgcccccgcacggccccgaagaagacgccgccgacgcgcacctcttcgctggcgtccgcttcgcgctccacggcttcgaccagatctccgcgtcccagtttcggttggagatagagcggtgcggcggcgtccacgcgggaggttgggacgcagactgcacccacgttatagtttccaacaccttatatgatgatccagtgtgtgtggcggcgaggaaggccgggaagaaggtcgtcgttgatcagtgggtggaagacagctttgatctcggagaattggcagatgcagatcggggtaccagaagaattggcgcgacgacataatgaaaatggtttctttgatgggagcaaacttctccaagtctctggcagcaaacataattacccatctcatttgctacaaatttgaaggtgagaaatacgaacttgctaaaagggtgaatataaagcttgtcaatcaccggtggctggaagaatgcttaaaggcttgggaaatccttccggtcgaccattatacgaaaagtggttgggaagtagagataatgggagctcaagctaaggactctgaagatgaaacagaatatgctggtacatgctcattaagtagcagacgtattgacagaaggacccctattagagagatcagcacaaaatctcatgttgactctgctctacatgcacccagtggaggtcctactgtctctgctagcaatgtagtgggtgctactggaaaacacttgagcactccagagcagtttatgaaagcacacgatgcgagcacaaaatcatctgacattagaactgactcaggaactgcccctgacacaaagtgtgctgcaatgtctgttgataatgatactcttaaacctacccgctctcacatttaccacaatgagaatgatgaggttcctgcagataaggccagtagggatgaagctaaagatgatcacagaagggaacttgacaccagggatagtacccttcgtactcccagtgtacataaaagcattgcacccactattccaggagacaatatagagaacactaacaggaattgtttccatggtttcagtcagatcaatgtcaacagtgatcttcagttaaactcttctgaagaaaatttctccaagaaaatattacactcaacaaacttgagcagaaaggtagaccagaaggatgacgggcatgtacctgatcccaaacccaacatttctcagtcatcagttgaagaaaacctaaacatgtgtgagtttaatccaagatcagaaggcaattcagcatcaagaaatgatcaacccttaggctattcaagaaggcgatcttcaaagtcaggatcacttaatgttcataggaagaaaagcattctttcttcagtcagttcaaaggcaccaaatgaagccccagactcgggaagtggaatatcaagcgcaactgcttctgatgtgggtagaagccccaccgaacctaccaaagttgatggtcatgtaaacagtggtccaactatgaattcaacagagaaccagatgtccggttgtaaaagcaacctgttaagttataggagaacatctttgaagcttgtaagctctgctgaagtagaaaagcttcctgaaaattctgttaatgataagaacatggtggagccagatgtagtaaagacaccagcactgcacgaggcaacaactgaggagccttccccttccgtctgttctgaagttagaaaagaaagtttaggtgttcatcagaatagggacgctgaaatgactgatgctcagctgctaagcaaaactgaagatgcagctccttgctcaaaacctgataaagtggtttcttgtcagaactcgggactagaaggttgtaaagatgtcccagttaacaagatcactgatgaacatggaatatttccctcgaaaatatcaacttctagagtgaagaaggttggtgccaagcggtctcgcaatgccggcagtaaagctgctagtgaatttacaaatagtagaagtgaggttgcagctttgaagcctaagcatgataaagttgcttctcatgaaaacgtggaggcacaacagggagaaggatgttgtagtccaaatgctgctgaatgtacaccaccatctcctgcagaagccctgaacaacaaatcaacgaatgaagttctaaccagctcccagggccccaatcataagacaaacgaatcactagtggcttccaaggcggagtctgttaatatgactctgcaaagaaacaagaaggggaaccgcagaaagcttccaaacacttcaaatgcagatgaaaatcaaagaagttcatctcggacagtaccaaattccaaatcaggaaatggtgaagaaaaacataaaaggctttcaagcagtgcaaacgcagatgaccctgaagcatgtacagcaaataaagtaccaaacaatagagtccgtaaggtcgtagccaagaggaagctatctgatgtccaaagccacaaatctggtagtgagccttgcaagactgcgaaggtattggtatctgaagttaaagttgtgtcaccagccagagttgcgcagagttctagaaatgctaacaaggtaacagtggttcaagacctgcagaacaccaatactggtaggacgaacgatacagttggatcattttgcaaagatgtcacggaagactgctcaaaagacatgcagagctctaaaactagaagcagcaggagacaaaagattgcagatctagtggatggttcaacggaccatgacaaggagaacatactagtcgatagtaattttacttccaatacaaaacgtggaaataacagcatgagttccaaatccaacacaaagacattacaaagtagcaaagctgtgcttgatgagagtagtgtgatcaaaaggaatggttatggaaccttggatgtgccagaaccaacatggtttattctaagtggacatcgcctgctgagaaaagagtatagggctatacttagacgtttgagaggtagagtttgcagggattcacatcactggtctttccaagcaacacaccttgtcaccactgagatgcgcagaactgaaaaattcttcgcagctgctgcggctggcaggtggatactgaagcctgattacttgactgctagcaatgaggctggcaagttcttagaggaagagccatttgagtggcacggtgaaggccttaatatcggtgatacgatcagcttggatgctccaaggaagtggcgccagctgcggcagcgtactggctatggcgctttctatgggatgcaggtcatcatatatggggaatgcattgctccaacactggacacgttaaaacgcgcgatcaggtgtggtgatggcaccatcttagcaacctccccaccttacacccggttctttaagtccagtgttgacttcgctgttgtatccgcgggcatgccaagcgcggacgcgtgggtgcaggaattcatgcggcatagcatcccctgcatcagcgcagattacctggtggagtacgtgtgcaagcccgggcaccccttgggcaagcacgtcctcttcaacatgcacgatctggccgagaggtccctgcagaagctcatgaagaaccaagaagatgctcccgggagctgttccgcttgtgggtcagacaaccgggaagtgccgatgctggtgtgcggcggcgacgggaggagccagtcttccggctgtggggtccggacgcatgccgattgctgcaaccctcccgtggaaggctgcgatggtggcgagtggctgtgcggtaggtgcgaccagcagaaatctgcaaagaaggctaagaagaccgctgcgaaaccgagggtgctgaaacagagatgattctggtttggcccgtacaagcgatgcaaaaggtcgtctcccaaggtaacgacgaatgatggcagcgggggtgctcttgctctctacaagttgatgacaactagctcgttgcctttggaaagcacccgtgcatgtgatctgatgaatgaaaacaaagtgatgggtgtaaacgtataaggactttagactggtgccaataaatattacgtatttatgtaaatgcacggatctgatggaatgctgtgatcaacttgaacatatatggtgcccatcaatctgggcattgggcgctgtcgaatgtccggtaaagcgcgctatttccggatcgtccttcatggttgtgtgcgtccgagtaaaggcaatggccgtgcaaaagtttcttcgacgg

SEQ ID NO: 70841 - DNA, 4361 bp, Zea Mays
ctccctcccaaattcccactctctctcctcctctctccctccatttttcgagacaatccaatcacccagcgccagcgatcccaaacaaaccctagccaccaatctccgctccggcctgcgccctcgccatgcccccgcacggccccgaagaagacgccgccgacgcgcacctcttcgctggcgtccgcttcgcgctccacggcttcgaccagatctccgcgtcccagtttcggttggagatagagcggtgcggcggcgtccacgcgggaggttgggacgcagactgcacccacgttatagtttccaacaccttatatgatgatccagtgtgtgtggcggcgaggaaggccgggaagaaggtcgtcgttgatcagtgggtggaagacagctttgatctcggagaattggcagatgcagatcgggtgctatatgctccagtcagagattttaaaggcattccaggttgcgataaacttcacatttgtttgacagggtaccagaagaattggcgcgacgacataatgaaaatggtttctttgatgggagcaaacttctccaagtctctggcagcaaacataattacccatctcatttgctacaaatttgaagcttaaaggcttgggaaatccttccggtcgaccattatacgaaaagtggttgggaagtagagataatgggagctcaagctaaggactctgaagatgaaacagaatatgctggtacatgctcattaagtagcagacgtattgacagaaggacccctattagagagatcagcacaaaatctcatgttgactctgctctacatgcacccagtggaggtcctactgtctctgctagcaatgtagtgggtgctactggaaaacacttgagcactccagagcagtttatgaaagcacacgatgcgagcacaaaatcatctgacattagaactgactcaggaactgcccctgacacaaagtgtgctgcaatgtctgttgataatgatactcttaaacctacccgctctcacatttaccacaatgagaatgatgaggttcctgcagataaggccagtagggatgaagctaaagatgatcacagaagggaacttgacaccagggatagtacccttcgtactcccagtgtacataaaagcattgcacccactattccaggagacaatatagagaacactaacaggaattgtttccatggtttcagtcagatcaatgtcaacagtgatcttcagttaaactcttctgaagaaaatttctccaagaaaatattacactcaacaaacttgagcagaaaggtagaccagaaggatgacgggcatgtacctgatcccaaacccaacatttctcagtcatcagttgaagaaaacctaaacatgtgtgagtttaatccaagatcagaaggcaattcagcatcaagaaatgatcaacccttaggctattcaagaaggcgatcttcaaagtcaggatcacttaatgttcataggaagaaaagcattctttcttcagtcagttcaaaggcaccaaatgaagccccagactcgggaagtggaatatcaagcgcaactgcttctgatgtgggtagaagccccaccgaacctaccaaagttgatggtcatgtaaacagtggtccaactatgaattcaacagagaaccagatgtccggttgtaaaagcaacctgttaagttataggagaacatctttgaagcttgtaagctctgctgaagtagaaaagcttcctgaaaattctgttaatgataagaacatggtggagccagatgtagtaaagacaccagcactgcacgaggcaacaactgaggagccttccccttccgtctgttctgaagttagaaaagaaagtttaggtgttcatcagaatagggacgctgaaatgactgatgctcagctgctaagcaaaactgaagatgcagctccttgctcaaaacctgataaagtggtttcttgtcagaactcgggactagaaggttgtaaagatgtcccagttaacaagatcactgatgaacatggaatatttccctcgaaaatatcaacttctagagtgaagaaggttggtgccaagcggtctcgcaatgccggcagtaaagctgctagtgaatttacaaatagtagaagtgaggttgcagctttgaagcctaagcatgataaagttgcttctcatgaaaacgtggaggcacaacagggagaaggatgttgtagtccaaatgctgctgaatgtacaccaccatctcctgcagaagccctgaacaacaaatcaacgaatgaagttctaaccagctcccagggccccaatcataagacaaacgaatcactagtggcttccaaggcggagtctgttaatatgactctgcaaagaaacaagaaggggaaccgcagaaagcttccaaacacttcaaatgcagatgaaaatcaaagaagttcatctcggacagtaccaaattccaaatcaggaaatggtgaagaaaaacataaaaggctttcaagcagtgcaaacgcagatgaccctgaagcatgtacagcaaataaagtaccaaacaatagagtccgtaaggtcgtagccaagaggaagctatctgatgtccaaagccacaaatctggtagtgagccttgcaagactgcgaaggtattggtatctgaagttaaagttgtgtcaccagccagagttgcgcagagttctagaaatgctaacaaggtaacagtggttcaagacctgcagaacaccaatactggtaggacgaacgatacagttggatcattttgcaaagatgtcacggaagactgctcaaaagacatgcagagctctaaaactagaagcagcaggagacaaaagattgcagatctagtggatggttcaacggaccatgacaaggagaacatactagtcgatagtaattttacttccaatacaaaacgtggaaataacagcatgagttccaaatccaacacaaagacattacaaagtagcaaagctgtgcttgatgagagtagtgtgatcaaaaggaatggttatggaaccttggatgtgccagaaccaacatggtttattctaagtggacatcgcctgctgagaaaagagtatagggctatacttagacgtttgagaggtagagtttgcagggattcacatcactggtctttccaagcaacacaccttgtcaccactgagatgcgcagaactgaaaaattcttcgcagctgctgcggctggcaggtggatactgaagcctgattacttgactgctagcaatgaggctggcaagttcttagaggaagagccatttgagtggcacggtgaaggccttaatatcggtgatacgatcagcttggatgctccaaggaagtggcgccagctgcggcagcgtactggctatggcgctttctatgggatgcaggtcatcatatatggggaatgcattgctccaacactggacacgttaaaacgcgcgatcaggtgtggtgatggcaccatcttagcaacctccccaccttacacccggttctttaagtccagtgttgacttcgctgttgtatccgcgggcatgccaagcgcggacgcgtgggtgcaggaattcatgcggcatagcatcccctgcatcagcgcagattacctggtggagtacgtgtgcaagcccgggcaccccttgggcaagcacgtcctcttcaacatgcacgatctggccgagaggtccctgcagaagctcatgaagaaccaagaagatgctcccgggagctgttccgcttgtgggtcagacaaccgggaagtgccgatgctggtgtgcggcggcgacgggaggagccagtcttccggctgtggggtccggacgcatgccgattgctgcaaccctcccgtggaaggctgcgatggtggcgagtggctgtgcggtaggtgcgaccagcagaaatctgcaaagaaggctaagaagaccgctgcgaaaccgagggtgctgaaacagagatgattctggtttggcccgtacaagcgatgcaaaaggtcgtctcccaaggtaacgacgaatgatggcagcgggggtgctcttgctctctacaagttgatgacaactagctcgttgcctttggaaagcacccgtgcatgtgatctgatgaatgaaaacaaagtgatgggtgtaaacgtataaggactttagactggtgccaataaatattacgtatttatgtaaatgcacggatctgatggaatgctgtgatcaacttgaacatatatggtgcccatcaatctgggcattgggcgctgtcgaatgtccggtaaagcgcgctatttccggatcgtccttcatggttgtgtgcgtccgagtaaaggcaatggccgtgcaaaagtttcttcgacgg

SEQ ID NO: 70842 - DNA, 4478 bp, Zea Mays
cgaaatccaaaattccaaatcccggccagtttctagcagcagtgttttccctccctcccaaattcccactctctctcctcctctctccctccatttttcgagacaatccaatcacccagcgccagcgatcccaaacaaaccctagccaccaatctccgctccggcctgcgccctcgccatgcccccgcacggccccgaagaagacgccgccgacgcgcacctcttcgctggcgtccgcttcgcgctccacggcttcgaccagatctccgcgtcccagtttcggttggagatagagcggtgcggcggcgtccacgcgggaggttgggacgcagactgcacccacgttatagtttccaacaccttatatgatgatccagtgtgtgtggcggcgaggaaggccgggaagaaggtcgtcgttgatcagtgggtggaagacagctttgatctcggagaattggcagatgcagatcgggtgctatatgctccagtcagagattttaaaggcattccaggttgcgataaacttcacatttgtttgacagggtaccagaagaattggcgcgacgacataatgaaaatggtttctttgatgggagcaaacttctccaagtctctggcagcaaacataattacccatctcatttgctacaaatttgaaggtgagaaatacgaacttgctaaaagggtgaatataaagcttgtcaatcaccggtggctggaagaatgcttaaaggcttgggaaatccttccggtcgaccattatacgaaaagtggttgggaagtagagataatgggagctcaagctaaggactctgaagatgaaacagaatatgctggtacatgctcattaagtagcagacgtattgacagaaggacccctattagagagatcagcacaaaatctcatgttgactctgctctacatgcacccagtggaggtcctactgtctctgctagcaatgtagtgggtgctactggaaaacacttgagcactccagagcagtttatgaaagcacacgatgcgagcacaaaatcatctgacattagaactgactcaggaactgcccctgacacaaagtgtgctgcaatgtctgttgataatgatactcttaaacctacccgctctcacatttaccacaatgagaatgatgaggttcctgcagataaggccagtagggatgaagctaaagatgatcacagaagggaacttgacaccagggatagtacccttcgtactcccagtgtacataaaagcattgcacccactattccaggagacaatatagagaacactaacaggaattgtttccatggtttcagtcagatcaatgtcaacagtgatcttcagttaaactcttctgaagaaaatttctccaagaaaatattacactcaacaaacttgagcagaaaggtagaccagaaggatgacgggcatgtacctgatcccaaacccaacatttctcagtcatcagttgaagaaaacctaaacatgtgtgagtttaatccaagatcagaaggcaattcagcatcaagaaatgatcaacccttaggctattcaagaaggcgatcttcaaagtcaggatcacttaatgttcataggaagaaaagcattctttcttcagtcagttcaaaggcaccaaatgaagccccagactcgggaagtggaatatcaagcgcaactgcttctgatgtgggtagaagccccaccgaacctaccaaagttgatggtcatgtaaacagtggtccaactatgaattcaacagagaaccagatgtccggttgtaaaagcaacctgttaagttataggagaacatctttgaagcttgtaagctctgctgaagtagaaaagcttcctgaaaattctgttaatgataagaacatggtggagccagatgtagtaaagacaccagcactgcacgaggcaacaactgaggagccttccccttccgtctgttctgaagttagaaaagaaagtttaggtgttcatcagaatagggacgctgaaatgactgatgctcagctgctaagcaaaactgaagatgcagctccttgctcaaaacctgataaagtggtttcttgtcagaactcgggactagaaggttgtaaagatgtcccagttaacaagatcactgatgaacatggaatatttccctcgaaaatatcaacttctagagtgaagaaggttggtgccaagcggtctcgcaatgccggcagtaaagctgctagtgaatttacaaatagtagaagtgaggttgcagctttgaagcctaagcatgataaagttgcttctcatgaaaacgtggaggcacaacagggagaaggatgttgtagtccaaatgctgctgaatgtacaccaccatctcctgcagaagccctgaacaacaaatcaacgaatgaagttctaaccagctcccagggccccaatcataagacaaacgaatcactagtggcttccaaggcggagtctgttaatatgactctgcaaagaaacaagaaggggaaccgcagaaagcttccaaacacttcaaatgcagatgaaaatcaaagaagttcatctcggacagtaccaaattccaaatcaggaaatggtgaagaaaaacataaaaggctttcaagcagtgcaaacgcagatgaccctgaagcatgtacagcaaataaagtaccaaacaatagagtccgtaaggtcgtagccaagaggaagctatctgatgtccaaagccacaaatctggtagtgagccttgcaagactgcgaaggtattggtatctgaagttaaagttgtgtcaccagccagagttgcgcagagttctagaaatgctaacaaggtaacagtggttcaagacctgcagaacaccaatactggtaggacgaacgatacagttggatcattttgcaaagatgtcacggaagactgctcaaaagacatgcagagctctaaaactagaagcagcaggagacaaaagattgcagatctagtggatggttcaacggaccatgacaaggagaacatactagtcgatagtaattttacttccaatacaaaacgtggaaataacagcatgagttccaaatccaacacaaagacattacaaagtagcaaagctgtgcttgatgagagtagtgtgatcaaaaggaatggttatggaaccttggatgtgccagaaccaacatggtttattctaagtggacatcgcctgctgagaaaagagtatagggctatacttagacgtttgagaggtagagtttgcagggattcacatcactggtctttccaagcaacacaccttgtcaccactgagatgcgcagaactgaaaaattcttcgcagctgctgcggctggcaggtggatactgaagcctgattacttgactgctagcaatgaggctggcaagttcttagaggaagagccatttgagtggcacggtgaaggccttaatatcggtgatacgatcagcttggatgctccaaggaagtggcgccagctgcggcagcgtactggctatggcgctttctatgggatgcaggtcatcatatatggggaatgcattgctccaacactggacacgttaaaacgcgcgatcaggtgtggtgatggcaccatcttagcaacctccccaccttacacccggttctttaagtccagtgttgacttcgctgttgtatccgcgggcatgccaagcgcggacgcgtgggtgcaggaattcatgcggcatagcatcccctgcatcagcgcagattacctggtggagtacgtgtgcaagcccgggcaccccttgggcaagcacgtcctcttcaacatgcacgatctggccgagaggtccctgcagaagctcatgaagaaccaagaagatgctcccgggagctgttccgcttgtgggtcagacaaccgggaagtgccgatgctggtgtgcggcggcgacgggaggagccagtcttccggctgtggggtccggacgcatgccgattgctgcaaccctcccgtggaaggctgcgatggtggcgagtggctgtgcggtaggtgcgaccagcagaaatctgcaaagaaggctaagaagaccgctgcgaaaccgagggtgctgaaacagagatgattctggtttggcccgtacaagcgatgcaaaaggtcgtctcccaaggtaacgacgaatgatggcagcgggggtgctcttgctctctacaagttgatgacaactagctcgttgcctttggaaagcacccgtgcatgtgatctgatgaatgaaaacaaagtgatgggtgtaaacgtataaggactttagactggtgccaataaatattacgtatttatgtaaatgcacggatctgatggaatgctgtgatcaacttgaacatatatggtgcccatcaatctgggcattgggcgctgtcgaatgtccggtaaagcgcgctatttccggatcgtccttcatggttgtgtgcgtccgagtaaaggcaatggccgtgcaaaagtttcttcgacgg

SEQ ID NO: 70843 - DNA, 3643 bp, Zea Mays
ctctcctcctctctccctccatttttcgagacaatccaatcacccagcgccagcgatcccaaacaaaccctagccaccaatctccgctccggcctgcgccctcgccatgcccccgcacggccccgaagaagacgccgccgacgcgcacctcttcgctggcgtccgcttcgcgctccacggcttcgaccagatctccgcgtcccagtttcggttggagatagagcggtgcggcggcgtccacgcgggaggttgggacgcagactgcacccacgttatagtttccaacaccttatatgatgatccagtgtgtgtggcggcgaggaaggccgggaagaaggtcgtcgttgatcagtgggtggaagacagctttgatctcggagaattggcagatgcagatcgggtgctatatgctccagtcagagattttaaaggcattccaggttgcgataaacttcacatttgtttgacagggtaccagaagaattggcgcgacgacataatgaaaatggtttctttgatgggagcaaacttctccaagtctctggcagcaaacataattacccatctcatttgctacaaatttgaaggtgagaaatacgaacttgctaaaagggtgaatataaagcttgtcaatcaccggtggctggaagaatgcttaaaggcttgggaaatccttccggtcgaccattatacgaaaagtggttgggaagtagagataatgggagctcaagctaaggactctgaagatgaaacagaatatgctggtacatgctcattaagtagcagacgtattgacagaaggacccctattagagagatcagcacaaaatctcatgttgactctgctctacatgcacccagtggaggtcctactgtctctgctagcaatgtagtgggtgctactggaaaacacttgagcactccagagcagtttatgaaagcacacgatgcgagcacaaaatcatctgacattagaactgactcaggaactgcccctgacacaaagtgtgctgcaatgtctgttgataatgatactcttaaacctacccgctctcacatttaccacaatgagaatgatgaggttcctgcagataaggccagtagggatgaagctaaagatgatcacagaagggaacttgacaccagggatagtacccttcgtactcccagtgtacataaaagcattgcacccactattccaggagacaatatagagaacactaacaggaattgtttccatggtttcagtcagatcaatgtcaacagtgatcttcagttaaactcttctgaagaaaatttctccaagaaaatattacactcaacaaacttgagcagaaaggtagaccagaaggatgacgggcatgtacctgatcccaaacccaacatttctcagtcatcagttgaagaaaacctaaacatgtgtgagtttaatccaagatcagaaggcaattcagcatcaagaaatgatcaacccttaggctattcaagaaggcgatcttcaaagtcaggatcacttaatgttcataggaagaaaagcattctttcttcagtcagttcaaaggcaccaaatgaagccccagactcgggaagtggaatatcaagcgcaactgcttctgatgtgggtagaagccccaccgaacctaccaaagttgatggtcatgtaaacagtggtccaactatgaattcaacagagaaccagatgtccggttgtaaaagcaacctgttaagttataggagaacatctttgaagcttgtaagctctgctgaagtagaaaagcttcctgaaaattctgttaatgataagaacatggtggagccagatgtagtaaagacaccagcactgcacgaggcaacaactgaggagccttccccttccgtctgttctgaagttagaaaagaaagtttaggtgttcatcagaatagggacgctgaaatgactgatgctcagctgctaagcaaaactgaagatgcagctccttgctcaaaacctgataaagtggtttcttgtcagaactcgggactagaaggttgtaaagatgtcccagttaacaagatcactgatgaacatggaatatttccctcgaaaatatcaacttctagagtgaagaaggttggtgccaagcggtctcgcaatgccggcagtaaagctgctagtgaatttacaaatagtagaagtgaggttgcagctttgaagcctaagcatgataaagttgcttctcatgaaaacgtggaggcacaacagggagaaggatgttgtagtccaaatgctgctgaatgtacaccaccatctcctgcagaagccctgaacaacaaatcaacgaatgaagttctaaccagctcccagggccccaatcataagacaaacgaatcactagtggcttccaaggcggagtctgttaatatgactctgcaaagaaacaagaaggggaaccgcagaaagcttccaaacacttcaaatgcagatgaaaatcaaagaagttcatctcggacagtaccaaattccaaatcaggtaatttggttgcaaaggggtctcggactgctgatttcaatatatctgactcaccaactgtcgatgaaactgagacagtgccatcaaattcgagttttaatgaggcagttcctccaggaaatggtgaagaaaaacataaaaggctttcaagcagtgcaaacgcagatgaccctgaagcatgtacagcaaataaagtaccaaacaatagagtccgtaaggtcgtagccaagaggaagctatctgatgtccaaagccacaaatctggtagtgagccttgcaagactgcgaaggtattggtatctgaagttaaagttgtgtcaccagccagagttgcgcagagttctagaaatgctaacaaggtaacagtggttcaagacctgcagaacaccaatactggtaggacgaacgatacagttggatcattttgcaaagatgtcacggaagactgctcaaaagacatgcagagctctaaaactagaagcagcaggagacaaaagattgcagatctagtggatggttcaacggaccatgacaaggagaacatactagtcgatagtaattttacttccaatacaaaacgtggaaataacagcatgagttccaaatccaacacaaagacattacaaagtagcaaagctgtgcttgatgagagtagtgtgatcaaaaggaatggttatggaaccttggatgtgccagaaccaacatggtttattctaagtggacatcgcctgctgagaaaagagtatagggctatacttagacgtttgagaggtagagtttgcagggattcacatcactggtctttccaagcaacacaccttgtcaccactgagatgcgcagaactgaaaaattcttcgcagctgctgcggctggcaggtggatactgaagcctgattacttgactgctagcaatgaggctggcaagttcttagaggaagagccatttgagtggcacggtgaaggccttaatatcggtgatacgatcagcttggatgctccaaggaagtggcgccagctgcggcagcgtactggctatggcgctttctatgggatgcaggtcatcatatatggggaatgcattgctccaacactgcggcgacatgttttcattaccatctggttgagatgtcct

SEQ ID NO: 70844 - DNA, 1184 bp, Zea Mays
ctcactcctttcctcctaccgatctagtgctagctgctcactggctgaagggtgttcggttctctctgtggttggtatattgcaagatgaagttgatcctatggtatctgtgatgaaagttgagaaagcgcctttggaatcttatgctgacattggtggactggatgctcagattcaagaaattaaagaggcagttgagcttcccttgactcaccctgagctgtatgaagacattggtattaggcctcccaagggagtcatattatatggagaacctggaacaggaaaaactcttcttgccaaggctgtggctaactcaacatctgcgactttcttgcgtgttgttggtagtgaactcattcaaaagtaccttggggatggtcccaaactagtccgagaattgtttagggtggctgatgaactttctccctcaattgtctttattgatgagattgacgctgttggaacaaagaggtatgatgctcattcaggaggagagcgtgagattcaaagaactatgttggagctgctgaatcagctagatggttttgactcgcgtggagatgttaaagttattctagcaacaaaccgcattgaaagtcttgatcctgctttgcttcggccaggccgtatagaccggaagattgaattccctctcccagatattaaaactagaagacgcatcttccagattcacacatcaaaaatgacattagctgacgatgtgaacttggaagagtttgttatgaccaaagatgagttctcgggcgctgatattaaggccatctgcacggaggctggattgctcgccttaagagaacgtagaatgaaagtgacccatgcagatttcaagaaagcaaaggagaaggtgatgtacaagaagaaggaaggtgttccggatggtctctacatgtagtagacgtctcctgccttgtcagaacaagttatcctcgtctctctcgtcatgggagatttgattgccacggcacttgttgcacacctataagtggtctgagaacgtgtattatgctttgattgtttcaagtaaaatttctcttggagaacgctggaaagtttgtgcatcggctacctaccagcatcctcgtaaacacccattaatcagtttgtgcatcggctgcctcacacgtgttggctgctcaatcccatggatgaaaatatgctgg

SEQ ID NO: 70845 - DNA, 2351 bp, Zea Mays
ttttttttcgataccatctaatccagaaataagagaacaaggtgtaataaaaagaaatttggatggtgtcatcaatgagagaggaaatactatgtttgcttgactagtctcgcagcgcagggttagacgtgtgcggagcaggtagcacacaagggagagggagacagagggaggagggagagaggaatcttcctgtttccttgcctgggactgggactccgtctccgtctccgtctccatccccatcccctgccgttgcgcccatctcatccccgcgtcttttcctctcgactctcctctctctctctctctctctctctctctctctctgcgctgctctcggtttaggtcgaggagttgctagctagctagggggtttggatccctgctggtgctggctgctccgctgctgcgtgctagtcctactccagccccccagccccagcgaagcaggcaagcatagatagaggctggggtgggcagggaggtgcgcggacggagatccatcagatcagaatcagatcacatcatcggccctcggatgcgatgcagcaccggcgcaagcccgcttccgccgcggcgccgccggccgccaagcagccggccgcgcgcaggcccacggcgcggctgtcgctcgcgggcctcgtcgtctccatcttcctcgtcgccaccttcctgtacaacgaggacgtggtgaaggcggcctccggctcctccagctcagcaacaacagccgacgccgctgaggtaggcgtctccgggcgggcgaggtcacccgacctaagggtgctgcaggaggcggcgcaccagggggtggaagctgaggagcgggaggttggagatcgtacggaagcggagcagaagcagaagcccctgaccctccccatccccatccccgtggtggcgctggcggaggaggaactcgtggagaatactaagggaaggcagaagcagcagcagcaggaggaggagcaaacccagaagccaccgccaccgccgccgcctcctccccaggttgccgggtgcgacctgtaccggggtcggtggacgttcgacgcggccggcgagcaggcgccgctgtaccgcgagtcggagtgcgagttcctgacggagcaggtgacgtgcatgcgcaacggccgccgcgacgactcgtaccagaagtggcggtggcagcccgatggatgcgacctgcccaggtacgatgctcggttgctgcttgagcggctgcgcaacaagcggctcatgttcgtgggtgactcgctgaaccgcaaccagtgggagtccatggtgtgcctggtgcagtctgtggtgccctggggccacaagacgctgcacaagttcgtcaacaacggatcgctcaacgtgttcacggcgcatgattacaacgccaccgtggagttctactgggcgcccttcctggtggagtccaactcggatgacccgcaggcgcacagcgtcatgaaccgtgtcatcgcctggcgcgccatcgccaagcacgccaagaactggaagggcgtggactacctcgtcttcaactcatacatctggtggctcaacacattcgagatgaaagtcattcgccgtcatcagcatcagcttgaaaaggaggaggagggggtgaggtggagcaagtacgcccttgtggaccggccggtggcgtaccgggaggtgctcaagacgtgggccaggccgtgggcgtggggtaacgacggcggcatcaagtgcgccatggagacgcagcccatcagcaacaaccggacggggcgactggacatcggcacggattggcgcctgcacggcgtggcgcgcggggtgctggcgcgctacctccgccgcgtgccggtgcacttcgtcgacatcacggggctgtcggagctgcgcaaggacgcgcacacctccgtgcacacgctgcggcaggggaagctgctcacaccggagcagcaggccgaccccaagacctacgccgactgcatccactggtgcctcccgggactccccgacacctggaaccacttcctctacgcgcacatcctctcgctctcctcgtccgcccaggatcactaaccatttttgcccagcctcacaatgtcaagcgcttcctttcaactcctctccctagaccacccacccaccctggatacctattactactgctgctgctgtagatcttcgtttcattttgacaaatgcatgcaggtcttctcttgtaatttctataaaaaacatccctgatttaattttgactagcagtaccaattactttttcatttttagtgttgagagagagagagataaccatgatgattaccaatcaagaaactgtggtccggcaagcaacaaacagatggcga

SEQ ID NO: 70846 - DNA, 2203 bp, Zea Mays
ttttttttcgataccatctaatccagaaataagagaacaaggtgtaataaaaagaaatttggatggtgtcatcaatgagagaggaaatactatgtttgcttgactagtctcgcagcgcagggttagacgtgtgcggagcaggtagcacacaagggagagggagacagagggaggagggagagaggaatcttcctgtttccttgcctgggactgggactccgtctccgtctccgtctccatccccatcccctgccgttgcgcccatctcatccccgcgtcttttcctctcgactctcctctctctctctctctctctctctctctctctctgcgctgctctcggtttaggtcgaggagttgctagctagctagggggtttggatccctgctggtgctggctgctccgctgctgcgtgctagtcctactccagccccccagccccagcgaagcaggcaagcatagatagaggctggggtgggcagggaggtgcgcggacggagatccatcagatcagaatcagatcacatcatcggccctcggatgcgatgcagcaccggcgcaagcccgcttccgccgcggcgccgccggccgccaagcagccggccgcgcgcaggcccacggcgcggctgtcgctcgcgggcctcgtcgtctccatcttcctcgtcgccaccttcctgtacaacgaggacgtggtgaaggcggcctccggctcctccagctcagcaacaacagccgacgccgctgaggtaggcgtctccgggcgggcgaggtcacccgacctaagggtgctgcaggaggcggcgcaccagggggtggaagctgaggagcgggaggttggagatcgtacggaagcggagcagaagcagaagcccctgaccctccccatccccatccccgtggtggcgctggcggaggaggaactcgtggagaatactaagggaaggcagaagcagcagcagcaggaggaggagcaaacccagaagccaccgccaccgccgccgcctcctccccaggttgccgggtgcgacctgtaccggggtcggtggacgttcgacgcggccggcgagcaggcgccgctgtaccgcgagtcggagtgcgagttcctgacggagcaggtgacgtgcatgcgcaacggccgccgcgacgactcgtaccagaagtggcggtggcagcccgatggatgcgacctgcccaggtacgatgctcggttgctgcttgagcggctgcgcaacaagcggctcatgttcgtgggtgactcgctgaaccgcaaccagtgggagtccatggtgtgcctggtgcagtctgtggtgccctggggccacaagacgctgcacaagttcgtcaacaacggatcgctcaacgtgttcacggcgcatgattacaacgccaccgtggagttctactgggcgcccttcctggtggagtccaactcggatgacccgcaggcgcacagcgtcatgaaccgtgtcatcgcctggcgcgccatcgccaagcacgccaagaactggaagggcgtggactacctcgtcttcaactcatacatctggtggctcaacacattcgagatgaaagtcattcgccgtcatcagcatcagcttgaaaaggaggaggagggggtgaggtggagcaagtacgcccttgtggaccggccggtggcgtaccgggaggtgctcaagacgtgggccaggtgggtggaccgccacatcgaccccaaccgaacaagagtcttcttcatgggcatgtcgcccaaccacgtcacgccgtgggcgtggggtaacgacggcggcatcaagtgcgccatggagacgcagcccatcagcaacaaccggacggggcgactggactccccgacacctggaaccacttcctctacgcgcacatcctctcgctctcctcgtccgcccaggatcactaaccatttttgcccagcctcacaatgtcaagcgcttcctttcaactcctctccctagaccacccacccaccctggatacctattactactgctgctgctgtagatcttcgtttcattttgacaaatgcatgcaggtcttctcttgtaatttctataaaaaacatccctgatttaattttgactagcagtaccaattactttttcatttttagtgttgagagagagagagataaccatgatgattaccaatcaagaaactgtggtccggcaagcaacaaacagatggcga

SEQ ID NO: 70847 - DNA, 1936 bp, Zea Mays
gtaccaatccagcgaaaccatgcgaggggagtactacaatcgcaaataactcttcccttccctctccacccccccgttccatccctaccactgacaccatgtccgcccgcatcgacctcaacaacaacgccggatccgcctcccaaaccctggcggcacacaagcgcggccgcggccgcccccgcaagaaccccccgccccccgctcacccgcgccctccgcatcccgacacccccatggtcagcggcttcgctccgggcgacatggtctggggaaagaagctgaaccacgccgcctggccgggcctcatctactccgccggagggaacggcaccggccacgagggccagcttctcgtatcctactttggcgacaaggccttcgcctggtgcgacacagccgagctcaggccctatgaaccctacttccctgtcgccgagctctatgacgacggcggcgaggatttcgacgccgccgtcgaggcctccctcgacgagttctccagccgcgtcgagtccgccctcgcctccgccgcccgccctttcgcccccgccgatttccttgcctcgctccatgatctcgccgcggatcgcatgggcttcaccaatagggtgcaggccgccgtcgtcaaggcgcatctcagagccttcgacgccttcagggctctgccggacccacctcagtacaccttggagctcggtctactcccagacgtcccgctcccgctgcccaatcctaaagctgccacggatgccgccttcagctcctacaccacccccgcttccagtttcaggaggggcaggaagaggaaggaggaactcatcaaggacgatgactccgatgaggactgggaccctagcaagaggggtgccaccgacttggattctgatgtggactttgactgcaggagaggatccagaggcaggggcaggggcggcggcggcactggtgcgtcgcgtggcaggcctcgagggaggcccaggaaagcagatgcctgcatggacgaagatgagattcaagacaaactggagtatccgtcggctgctgagatgttgctgcagcttctgtccatcgccacggatcctgtaaatggcaattatgactctgctcctgtgattgttagcttcttctcaaagcacaaggactccgatgtgcctagtttatatgaagacaaagaactgattgagaattttggtggcaagaagggtaagaaaaagtccatcggaagcttgggcccagctacaaagccagaagccagcgatgatactgtggatggtcagaggggccgtaggaagtctgctgggagcttgtactcagctagaaaggccgaagattcatattggtgtgatattatcatcagcgatttcgatgacggagacagtgactatgacagtcacaagaggaagcggccctgtaacaggagcaccaataagaagatgaagcaggaggagccacctcaaggagccccatcatcgaatgcaaaacctgcagatggtccagccgcccttattctacatttcagcagtccagaagctattccttctgttgatgacatcaatagcatattccgtattcatggacctattgtggagcgtgagactgtgatcactaagaagtcaaagattgcaaaagtagttttctctaagagtgttgatgcagagcaggcacatcacagttccggaaagcgtaatgcatttggtccatcgcttctcacatctgaaattaagtacttgccatcggcacctcaggtttcttaaatgccgcagtctggactggtggatacgccgtggaaatgcgccatgaagcttggagcaacggagcataagttggtgtcactgactttactgaccaggtcacagtagtcactgagttgagtgagcaaattttaggctttctgtggttacatgcatccatttgactgattgtcgacccggag

SEQ ID NO: 70848 - DNA, 2140 bp, Zea Mays
tccaaagttgaacgtgagctcgagatagaacatggcccagctcagccccgagccgaccctgtcttctccgttcagcctccgccctccgctctgcctctgcgtcttccaccctttgccatttgcttgcaatgtctaatacctgagtgagagagcttcctcagtccatggaggtgtcgtcgaggctccaaagcctcctcagacccttcctactctgccgctcccgcgccgcagggatgaccctccaaaccctagctctttgctccccgccgcctcctccgcgcatcccatcttccttcctcctccgaacgcgccgtctacctcctccctttccccatggcggcccatcccgtcttcttttccacagcaccttcgcctccgtctccccggcccccgcccctgctccagggagggaccacctcaactccaaggaacagggacccccgcccgcgcccttgcctccgccaccgccagaggagctcgcctccgaagacgagtcctactaccacgagcaccttctcgaagtggcgcaggagaaccagtcacgggtcgtccccgtcaaggcattctttctatgcaccagtcccagaattccttcaatgtcattccacccacatcgcgtgccaccaactacgttgtccttagatactacgatgtcaagggagaccccgaggtacttcctgcttcatcaccctggaatccctaagtgttgactgttgaattgcaaactactctcactttgttgagatgctaaactattttctgagatggagctgacatagatgagagccattgccactacataaagggctgtgtttattttctgagatggtttgttaaggacctgacatagagtggagacttgctgggttggttcttatctcattctctcacagggttttaagtctggtgtcatagatgagagccattgccactacatggtcgttttccaatatgggtccattgtgctgtttaatgtttctgatcatgaagcagatggatacctgaaaattgttgagaagcatgcatctggtttacttccagagatgagaaaggatgactatgctgttgttgaaaagcctaccctagagacatggatgcaaggtggtcttgactatatcgtgcttcgggatctgagtattgatgggatccgtacaattggaagtgtcctgggtcagagtattgctcttgactactatatccgtcaagtggatggaatggtagctgagttcacagatatcaaccgtggaatggaaaaaactggtaccttcactatggagaggaagaagcttttccagcttgtagggaaggccaactctaacttggctgatgttattcttaagcttggactctttgagaggtcagacatagcgtggaagaatgcaaactatgctcagatctgggaataccttcgagatgaatacgagctaacccagagatttgggaaccttgattttaagttgaaatttgttgagcacaacatcaggtttcttcaggagatccttcagaacaggaagtcggattttctggaatggcttatcatcatcctgatcagtgttgagatcttgatatctgtttataacataatacaggagcagatgtagggctttgttccatcctgaacacgagatgcatatgttttgaccgtggattctgtgatgccctgctgccgttggcacaacctcgatttgtaaagaaacatacgtactagagactggatccgattcgacctctatactccttataaattaattcctcagacatatggtttggtgattgcatttgcatgttgtcagtcagtcagctgtcctttctactggtaaaggaatgtcaccatgttctcgtctgcttgcccactcaaaagtgctgatgctgggcaggtacccttctagaaattgaatgtgcttattagtttactttgagtcctgtagtgtcatgaggtggtagcctagagcatagaggttcatatggataggatcagggttaagattagtagataaagattagataagattaagttagttatttgggattagattaaataagattgagttagttacttggtagccaagtcttcctatctatataaggatgtgttgtacctccttaagaaaaaaagaaataaagaagaattagtcataga

SEQ ID NO: 70849 - DNA, 1917 bp, Zea Mays
tccaaagttgaacgtgagctcgagatagaacatggcccagctcagccccgagccgaccctgtcttctccgttcagcctccgccctccgctctgcctctgcgtcttccaccctttgccatttgcttgcaatgtctaatacctgagtgagagagcttcctcagtccatggaggtgtcgtcgaggctccaaagcctcctcagacccttcctactctgccgctcccgcgccgcagggatgaccctccaaaccctagctctttgctccccgccgcctcctccgcgcatcccatcttccttcctcctccgaacgcgccgtctacctcctccctttccccatggcggcccatcccgtcttcttttccacagcaccttcgcctccgtctccccggcccccgcccctgctccagggagggaccacctcaactccaaggaacagggacccccgcccgcgcccttgcctccgccaccgccagaggagctcgcctccgaagacgagtcctactaccacgagcaccttctcgaagtggcgcaggagaaccagtcacgggtcgtccccgtcaaggcattctttctatgcaccagtcccagaattccttcaatgtcattccacccacatcgcgtgccaccaactacgttgtccttagatactacgatgtcaagggagaccccgagggttttaagtctggtgtcatagatgagagccattgccactacatggtcgttttccaatatgggtccattgtgctgtttaatgtttctgatcatgaagcagatggatacctgaaaattgttgagaagcatgcatctggtttacttccagagatgagaaaggatgactatgctgttgttgaaaagcctaccctagagacatggatgcaaggtggtcttgactatatcgtgcttcgggatctgagtattgatgggatccgtacaattggaagtgtcctgggtcagagtattgctcttgactactatatccgtcaagtggatggaatggtagctgagttcacagatatcaaccgtggaatggaaaaaactggtaccttcactatggagaggaagaagcttttccagcttgtagggaaggccaactctaacttggctgatgttattcttaagcttggactctttgagaggtcagacatagcgtggaagaatgcaaactatgctcagatctgggaataccttcgagatgaatacgagctaacccagagatttgggaaccttgattttaagttgaaatttgttgagcacaacatcaggtttcttcaggagatccttcagaacaggaagtcggattttctggaatggcttatcatcatcctgatcagtgttgagatcttgatatctgtttataacataatacaggagcagatgtagggctttgttccatcctgaacacgagatgcatatgttttgaccgtggattctgtgatgccctgctgccgttggcacaacctcgatttgtaaagaaacatacgtactagagactggatccgattcgacctctatactccttataaattaattcctcagacatatggtttggtgattgcatttgcatgttgtcagtcagtcagctgtcctttctactggtaaaggaatgtcaccatgttctcgtctgcttgcccactcaaaagtgctgatgctgggcaggtacccttctagaaattgaatgtgcttattagtttactttgagtcctgtagtgtcatgaggtggtagcctagagcatagaggttcatatggataggatcagggttaagattagtagataaagattagataagattaagttagttatttgggattagattaaataagattgagttagttacttggtagccaagtcttcctatctatataaggatgtgttgtacctccttaagaaaaaaagaaataaagaagaattagtcataga

SEQ ID NO: 70850 - DNA, 2222 bp, Zea Mays
gaccttattgtcctaacgggaaatagatgaaatgggccctgcgatttggcgggagcctagtccaaagttgaacgtgagctcgagatagaacatggcccagctcagccccgagccgaccctgtcttctccgttcagcctccgccctccgctctgcctctgcgtcttccaccctttgccatttgcttgcaatgtctaatacctgagtgagagagcttcctcagtccatggaggtgtcgtcgaggctccaaagcctcctcagacccttcctactctgccgctcccgcgccgcagggatgaccctccaaaccctagctctttgctccccgccgcctcctccgcgcatcccatcttccttcctcctccgaacgcgccgtctacctcctccctttccccatggcggcccatcccgtcttcttttccacagcaccttcgcctccgtctccccggcccccgcccctgctccagggagggaccacctcaactccaaggaacagggacccccgcccgcgcccttgcctccgccaccgccagaggagctcgcctccgaagacgagtcctactaccacgagcaccttctcgaagtggcgcaggagaaccagtcacgggtcgtccccgtcaaggcattctttctatgcaccagcatcgacctgcggagcctgcagtcccagaattccttcaatgtcattccacccacatcgcgtgccaccaactacgttgtccttagatactacgatgtcaagggagaccccgaggtacttcctgcttcatcaccctggaatccctaagtgttgactgttgaattgcaaactactctcactttgttgagatgctaaactattttctgagatggagctgacatagatgagagccattgccactacataaagggctgtgtttattttctgagatggtttgttaaggacctgacatagagtggagacttgctgggttggttcttatctcattctctcacagggttttaagtctggtgtcatagatgagagccattgccactacatggtcgttttccaatatgggtccattgtgctgtttaatgtttctgatcatgaagcagatggatacctgaaaattgttgagaagcatgcatctggtttacttccagagatgagaaaggatgactatgctgttgttgaaaagcctaccctagagacatggatgcaaggtggtcttgactatatcgtgcttcgggatctgagtattgatgggatccgtacaattggaagtgtcctgggtcagagtattgctcttgactactatatccgtcaagtggatggaatggtagctgagttcacagatatcaaccgtggaatggaaaaaactggtaccttcactatggagaggaagaagcttttccagcttgtagggaaggccaactctaacttggctgatgttattcttaagcttggactctttgagaggtcagacatagcgtggaagaatgcaaactatgctcagatctgggaataccttcgagatgaatacgagctaacccagagatttgggaaccttgattttaagttgaaatttgttgagcacaacatcaggtttcttcaggagatccttcagaacaggaagtcggattttctggaatggcttatcatcatcctgatcagtgttgagatcttgatatctgtttataacataatacaggagcagatgtagggctttgttccatcctgaacacgagatgcatatgttttgaccgtggattctgtgatgccctgctgccgttggcacaacctcgatttgtaaagaaacatacgtactagagactggatccgattcgacctctatactccttataaattaattcctcagacatatggtttggtgattgcatttgcatgttgtcagtcagtcagctgtcctttctactggtaaaggaatgtcaccatgttctcgtctgcttgcccactcaaaagtgctgatgctgggcaggtacccttctagaaattgaatgtgcttattagtttactttgagtcctgtagtgtcatgaggtggtagcctagagcatagaggttcatatggataggatcagggttaagattagtagataaagattagataagattaagttagttatttgggattagattaaataagattgagttagttacttggtagccaagtcttcctatctatataaggatgtgttgtacctccttaagaaaaaaagaaataaagaagaattagtcataga

SEQ ID NO: 70851 - DNA, 590 bp, Zea Mays
aaaaagcattgctcttcagccacaccactcaaaggataatagaaaaaaaagcagatgatgcgttcagaatctgatgacacaagccaagccattgaacagttagttttcaggactcaggaggagtggttcctacttcctagctgctagcatgtactgtagtagctaattaagctgctagctcatcgctggatagatgtctgaacaagcttaatttggcacttgtgtattctgaccacgatctcttctagtactacttgtgtggtgctattgtctggagctttaacggaagatgcatccaagagaaagacatgttgtgctggctccgatcgaatacacgcatgcatggcgaggcagccaggggacgtcgtcatggtggcgtcgttgttccggctgcatagtcagccttgtcaacgacgattgtggcagcgttgggtacttcaccaaccaaaggggtttatagtgatgccgagcgaggtcactgaacatggtgtgtaatgttagattgtttttaatgggtagacatattttttatgtacaactaaactcactgcttgcgcatgttcctattatggggcgtgccccgagcgaag

SEQ ID NO: 70852 - DNA, 2378 bp, Zea Mays
aaaagtctcactgatgatatactactagtataataaacgcaactaaaatcgcatagtactactactatttcgagctaaattgccaaatctcgagatccaatcgaagcgccccctcccgcattgccgtttccgaccgccaactctcccaaggctgctctgctcgcccaccggaattcccgccgcggagggtgctgtggtataagcttgctttaggattggagggctctggttggttgcctagacgccggcgatggcgtcgccggccggcggcgagtctccggcgaagcccgtcctcctgcacggcgacctcgacctctggatcctcgaggcgcgcctgctgcccaacatggacatgttctccgagcacgtgcgccgctgcttcgccgcatgccgcccgccctcctcctgcgggaccaagcacccgccgcccgccgccgctggccgccgccaccaccaccaccaccggaacatcatcaccagcgatccctacgtcacgctgtccgtgtccggcgccgtcgtggcgcgcaccgccgtcatccccaactcccaggaccccgtctgggaggagcgcttcgccgtgccgctcgcgcaccgcgccgccgacctcgagttccaggtcaaggacaacgacaccttcggcgcgcagctcatcggcaccgtcgccgtccccgccgaccgcgttgtctcgggcgacgaggtcgaggactggttccccgtcataggcaccaacggcaagccgtacaagcccgacaccgcgctgcgcctccgcttcaagttccagcccatcgccgacaacccggcctaccgccacggcatcgccggcgaccccgaccacaggggcatccaggactcctacttcccgctccgccacggcggccaactcacgctgtaccaggacgcgcacgtcagggaaggggacctgccagagattgagctcgacaacggcaagacgttccagcacaacgcgtgctgggaggacatctgccacgccatcctagaggcgcaccacatgatatatatcgtcggctggtcggtgtacgacaaggtgcgcctcgtgcgcgaaccatctccgtcgcggccattgcccgagggtggagaccttacgcttggggacctgctcaagttcaagtcgcaggagggtgtcagagtgtgcctgcttgtgtgggatgataagacttcacatgacaagttcttcatcaagacgggtggggttatggcaactcatgatgaagaaactcggaagtttttcaaacattcctcagtcatctgtgttctctctcctcgatatgctagcaataagctcagcattttcaaacagcaggttgttgggactttgtttacacaccatcaaaagtgtgtgctggttgatacacaagccaggggaaacaagcggaaaattacagctttcattgggggcctagatctttgtgatggccgctatgacacacctgaacacaggcttttcaaagatcttgacacagtattccaaaatgattaccataaccctacattttcggcaggtgcaaagggtcccaggcaaccatggcatgatttacattgcaggattgatggccctgctgcctatgatgtcttgacaaattttgagcaaaggtggcgaaaggcaacaaaatggcgtgaccggtttagaagagtatctcattggaaagacgatgctttaattaaactggagcgtatctcatggattttaagcccttcacccaatgttccaaataatcatcctagtttgtgggtttcaaaagaagaggatcatgaaaattggcacgttcaggtattcaggtcaattgactctggttccctaaaaggatttcctagtgattgcaaagcagcttcaaagctgaatcttgtgtgccgaaagaacctggtaattgataagagcatccacactgcatatgtccgagcaatcagatctgcacaacatttcatttatattgagaaccagtactttcttggttcttcatatgcttggccatcctatgtgaattcaggtgctgataatctggtaccaatagaattggccctcaaaattgcaagtaagattaaagcgggagaacgctttgcagtgtatgtagtgataccaatgtggccggaaggagtccctactgcagcatctgtgcaagaaatccttttctttcaggcccagacaatggagatgatgtataaaataattgcagatgagctcaaggcaacggacaataaggatatgcaccctgaagattacttgaacttcttttgtcttggaaatcgggaagaaccaccatctaatggtagtccagaatcagagaaatctacagataaaagtgcagcgggttatcccatttccaacaattcatatcgaagccaggttatagtggaccatc

SEQ ID NO: 70853 - DNA, 1796 bp, Zea Mays
ctctttctttcatggatactggactgaactagaagaagggactttcttagggttgttgggactttgtttacacaccatcaaaagtgtgtgctggttgatacacaagccaggggaaacaagcggaaaattacagctttcattgggggcctagatctttgtgatggccgctatgacacacctgaacacaggcttttcaaagatcttgacacagtattccaaaatgattaccataaccctacattttcggcaggtgcaaagggtcccaggcaaccatggcatgatttacattgcaggattgatggccctgctgcctatgatgtcttgacaaattttgagcaaaggtggcgaaaggcaacaaaatggcgtgaccggtttagaagagtatctcattggaaagacgatgctttaattaaactggagcgtatctcatggattttaagcccttcacccaatgttccaaataatcatcctagtttgtgggtttcaaaagaagaggatcatgaaaattggcacgttcaggtattcaggtcaattgactctggttccctaaaaggatttcctagtgattgcaaagcagcttcaaagctgaatcttgtgtgccgaaagaacctggtaattgataagagcatccacactgcatatgtccgagcaatcagatctgcacaacatttcatttatattgagaaccagtactttcttggttcttcatatgcttggccatcctatgtgaattcaggtgctgataatctggtaccaatagaattggccctcaaaattgcaagtaagattaaagcgggagaacgctttgcagtgtatgtagtgataccaatgtggccggaaggagtccctactgcagcatctgtgcaagaaatccttttctttcaggcccagacaatggagatgatgtataaaataattgcagatgagctcaaggcaacggacaataaggatatgcaccctgaagattacttgaacttcttttgtcttggaaatcgggaagaaccaccatctaatggtagtccagaatcagagaaatctacagataaaagtgcagcggccttagcttcgaaatatcgacggttcatgatctatgttcacgcaaaagggatgattgtggatgatgaatatgtcattctgggttcagcaaacatcaaccagagatccctggctggttctagagatactgagatcgcaatgggtgcataccagcctcattatgcatggtctacaaagaatggacatcctcacggccaggtatatgggtacagaacgtctctgtgggcagagcaccttggaacggttgatgatcgcttcaaggatccttcgagtttggagtgtgtaaggtttgtgaatcaaatagctgtagagaactggcaaaggtttacagcagaagaaatgagtacgttacaagggcacctcctcaagtacccagttaaggtggaggctgatggtaagatcagcccactgtcagaccaggagtgctttcctgatgttgggggcaagattctgggagctccaacttcacttcctgattcactgactatgtagtgttattacataaaaaaacttctttcagagttgaactttgtaattgtctaaaattggcgggtttatcgcagaacttgtactatatctgtaatcatcgatagttggcgcagggaaagttcaagatgttagtggtgctaagttttcccagcgtttgtaaatgaaccatatgataggatcctagacaatgcttccatttccattatgattatacaacagttttcaacatttttgctcaaccccttattcac

SEQ ID NO: 70854 - DNA, 2811 bp, Zea Mays
gcgatggcgtcgccggccggcggcgagtctccggcgaagcccgtcctcctgcacggcgacctcgacctctggatcctcgaggcgcgcctgctgcccaacatggacatgttctccgagcacgtgcgccgctgcttcgccgcatgccgcccgccctcctcctgcgggaccaagcacccgccgcccgccgccgctggccgccgccaccaccaccaccaccggaacatcatcaccagcgatccctacgtcacgctgtccgtgtccggcgccgtcgtggcgcgcaccgccgtcatccccaactcccaggaccccgtctgggaggagcgcttcgccgtgccgctcgcgcaccgcgccgccgacctcgagttccaggtcaaggacaacgacaccttcggcgcgcagctcatcggcaccgtcgccgtccccgccgaccgcgttgtctcgggcgacgaggtcgaggactggttccccgtcataggcaccaacggcaagccgtacaagcccgacaccgcgctgcgcctccgcttcaagttccagcccatcgccgacaacccggcctaccgccacggcatcgccggcgaccccgaccacaggggcatccaggactcctacttcccgctccgccacggcggccaactcacgctgtaccaggacgcgcacgtcagggaaggggacctgccagagattgagctcgacaacggcaagacgttccagcacaacgcgtgctgggaggacatctgccacgccatcctagaggcgcaccacatgatatatatcgtcggctggtcggtgtacgacaaggtgcgcctcgtgcgcgaaccatctccgtcgcggccattgcccgagggtggagaccttacgcttggggacctgctcaagttcaagtcgcaggagggtgtcagagtgtgcctgcttgtgtgggatgataagacttcacatgacaagttcttcatcaagacgggtggggttatggcaactcatgatgaagaaactcggaagtttttcaaacattcctcagtcatctgtgttctctctcctcgatatgctagcaataagctcagcattttcaaacagcaggttgttgggactttgtttacacaccatcaaaagtgtgtgctggttgatacacaagccaggggaaacaagcggaaaattacagctttcattgggggcctagatctttgtgatggccgctatgacacacctgaacacaggcttttcaaagatcttgacacagtattccaaaatgattaccataaccctacattttcggcaggtgcaaagggtcccaggcaaccatggcatgatttacattgcaggattgatggccctgctgcctatgatgtcttgacaaattttgagcaaaggtggcgaaaggcaacaaaatggcgtgaccggtttagaagagtatctcattggaaagacgatgctttaattaaactggagcgtatctcatggattttaagcccttcacccaatgttccaaataatcatcctagtttgtgggtttcaaaagaagaggatcatgaaaattggcacgttcaggtcaattgactctggttccctaaaaggatttcctagtgattgcaaagcagcttcaaagctgaatcttgtgtgccgaaagaacctggtaattgataagagcatccacactgcatatgtccgagcaatcagatctgcacaacatttcatttatattgagaaccagtactttcttggttcttcatatgcttggccatcctatgtgaattcaggtgctgataatctggtaccaatagaattggccctcaaaattgcaagtaagattaaagcgggagaacgctttgcagtgtatgtagtgataccaatgtggccggaaggagtccctactgcagcatctgtgcaagaaatccttttctttcaggcccagacaatggagatgatgtataaaataattgcagatgagctcaaggcaacggacaataaggatatgcaccctgaagattacttgaacttcttttgtcttggaaatcgggaagaaccaccatctaatggtagtccagaatcagagaaatctacagataaaagtgcagcggccttagcttcgaaatatcgacggttcatgatctatgttcacgcaaaagggatgattgtggatgatgaatatgtcattctgggttcagcaaacatcaaccagagatccctggctggttctagagatactgagatcgcaatgggtgcataccagcctcattatgcatggtctacaaagaatggacatcctcacggccaggtatatgggtacagaacgtctctgtgggcagagcaccttggaacggttgatgatcgcttcaaggatccttcgagtttggagtgtgtaaggtttgtgaatcaaatagctgtagagaactggcaaaggtttacagcagaagaaatgagtacgttacaagggcacctcctcaagtacccagttaaggtggaggctgatggtaagatcagcccactgtcagaccaggagtgctttcctgatgttgggggcaagattctgggagctccaacttcacttcctgattcactgactatgtagtgttattacataaaaaaacttctttcagagttgaactttgtaattgtctaaaattggcgggtttatcgcagaacttgtactatatctgtaatcatcgatagttggcgcagggaaagttcaagatgttagtggtgctaagttttcccagcgtttgtaaatgaaccatatgataggatcctagacaatgcttccatttccattatgattatacaacagttttcaacatttttgctcaaccccttattcac

SEQ ID NO: 70855 - DNA, 2904 bp, Zea Mays
gtttccgaccgccaactctcccaaggctgctctgctcgcccaccggaattcccgccgcggagggtgctgtggtataagcttgctttaggattggagggctctggttggttgcctagacgccggcgatggcgtcgccggccggcggcgagtctccggcgaagcccgtcctcctgcacggcgacctcgacctctggatcctcgaggcgcgcctgctgcccaacatggacatgttctccgagcacgtgcgccgctgcttcgccgcatgccgcccgccctcctcctgcgggaccaagcacccgccgcccgccgccgctggccgccgccaccaccaccaccaccggaacatcatcaccagcgatccctacgtcacgctgtccgtgtccggcgccgtcgtggcgcgcaccgccgtcatccccaactcccaggaccccgtctgggaggagcgcttcgccgtgccgctcgcgcaccgcgccgccgacctcgagttccaggtcaaggacaacgacaccttcggcgcgcagctcatcggcaccgtcgccgtccccgccgaccgcgttgtctcgggcgacgaggtcgaggactggttccccgtcataggcaccaacggcaagccgtacaagcccgacaccgcgctgcgcctccgcttcaagttccagcccatcgccgacaacccggcctaccgccacggcatcgccggcgaccccgaccacaggggcatccaggactcctacttcccgctccgccacggcggccaactcacgctgtaccaggacgcgcacgtcagggaaggggacctgccagagattgagctcgacaacggcaagacgttccagcacaacgcgtgctgggaggacatctgccacgccatcctagaggcgcaccacatgatatatatcgtcggctggtcggtgtacgacaaggtgcgcctcgtgcgcgaaccatctccgtcgcggccattgcccgagggtggagaccttacgcttggggacctgctcaagttcaagtcgcaggagggtgtcagagtgtgcctgcttgtgtgggatgataagacttcacatgacaagttcttcatcaagacgggtggggttatggcaactcatgatgaagaaactcggaagtttttcaaacattcctcagtcatctgtgttctctctcctcgatatgctagcaataagctcagcattttcaaacagcaggttgttgggactttgtttacacaccatcaaaagtgtgtgctggttgatacacaagccaggggaaacaagcggaaaattacagctttcattgggggcctagatctttgtgatggccgctatgacacacctgaacacaggcttttcaaagatcttgacacagtattccaaaatgattaccataaccctacattttcggcaggtgcaaagggtcccaggcaaccatggcatgatttacattgcaggattgatggccctgctgcctatgatgtcttgacaaattttgagcaaaggtggcgaaaggcaacaaaatggcgtgaccggtttagaagagtatctcattggaaagacgatgctttaattaaactggagcgtatctcatggattttaagcccttcacccaatgttccaaataatcatcctagtttgtgggtttcaaaagaagaggatcatgaaaattggcacgttcaggtattcaggtcaattgactctggttccctaaaaggatttcctagtgattgcaaagcagcttcaaagctgaatcttgtgtgccgaaagaacctggtaattgataagagcatccacactgcatatgtccgagcaatcagatctgcacaacatttcatttatattgagaaccagtactttcttggttcttcatatgcttggccatcctatgtgaattcaggtgctgataatctggtaccaatagaattggccctcaaaattgcaagtaagattaaagcgggagaacgctttgcagtgtatgtagtgataccaatgtggccggaaggagtccctactgcagcatctgtgcaagaaatccttttctttcagatgagctcaaggcaacggacaataaggatatgcaccctgaagattacttgaacttcttttgtcttggaaatcgggaagaaccaccatctaatggtagtccagaatcagagaaatctacagataaaagtgcagcggccttagcttcgaaatatcgacggttcatgatctatgttcacgcaaaagggatgattgtggatgatgaatatgtcattctgggttcagcaaacatcaaccagagatccctggctggttctagagatactgagatcgcaatgggtgcataccagcctcattatgcatggtctacaaagaatggacatcctcacggccaggtatatgggtacagaacgtctctgtgggcagagcaccttggaacggttgatgatcgcttcaaggatccttcgagtttggagtgtgtaaggtttgtgaatcaaatagctgtagagaactggcaaaggtttacagcagaagaaatgagtacgttacaagggcacctcctcaagtacccagttaaggtggaggctgatggtaagatcagcccactgtcagaccaggagtgctttcctgatgttgggggcaagattctgggagctccaacttcacttcctgattcactgactatgtagtgttattacataaaaaaacttctttcagagttgaactttgtaattgtctaaaattggcgggtttatcgcagaacttgtactatatctgtaatcatcgatagttggcgcagggaaagttcaagatgttagtggtgctaagttttcccagcgtttgtaaatgaaccatatgataggatcctagacaatgcttccatttccattatgattatacaacagttttcaacatttttgctcaaccccttattcac

SEQ ID NO: 70856 - DNA, 2912 bp, Zea Mays
cccgcattgccgtttccgaccgccaactctcccaaggctgctctgctcgcccaccggaattcccgccgcggagggtgctgtggtataagcttgctttaggattggagggctctggttggttgcctagacgccggcgatggcgtcgccggccggcggcgagtctccggcgaagcccgtcctcctgcacggcgacctcgacctctggatcctcgaggcgcgcctgctgcccaacatggacatgttctccgagcacgtgcgccgctgcttcgccgcatgccgcccgccctcctcctgcgggaccaagcacccgccgcccgccgccgctggccgccgccaccaccaccaccaccggaacatcatcaccagcgatccctacgtcacgctgtccgtgtccggcgccgtcgtggcgcgcaccgccgtcatccccaactcccaggaccccgtctgggaggagcgcttcgccgtgccgctcgcgcaccgcgccgccgacctcgagttccaggtcaaggacaacgacaccttcggcgcgcagctcatcggcaccgtcgccgtccccgccgaccgcgttgtctcgggcgacgaggtcgaggactggttccccgtcataggcaccaacggcaagccgtacaagcccgacaccgcgctgcgcctccgcttcaagttccagcccatcgccgacaacccggcctaccgccacggcatcgccggcgaccccgaccacaggggcatccaggactcctacttcccgctccgccacggcggccaactcacgctgtaccaggacgcgcacgtcagggaaggggacctgccagagattgagctcgacaacggcaagacgttccagcacaacgcgtgctgggaggacatctgccacgccatcctagaggcgcaccacatgatatatatcgtcggctggtcggtgtacgacaaggtgcgcctcgtgcgcgaaccatctccgtcgcggccattgcccgagggtggagaccttacgcttggggacctgctcaagttcaagtcgcaggagggtgtcagagtgtgcctgcttgtgtgggatgataagacttcacatgacaagttcttcatcaagacgggtggggttatggcaactcatgatgaagaaactcggaagtttttcaaacattcctcagtcatctgtgttctctctcctcgatatgctagcaataagctcagcattttcaaacagcagctggcaggttgttgggactttgtttacacaccatcaaaagtgtgtgctggttgatacacaagccaggggaaacaagcggaaaattacagctttcattgggggcctagatctttgtgatggccgctatgacacacctgaacacaggcttttcaaagatcttgacacagtattccaaaatgattaccataaccctacattttcggattgatggccctgctgcctatgatgtcttgacaaattttgagcaaaggtggcgaaaggcaacaaaatggcgtgaccggtttagaagagtatctcattggaaagacgatgctttaattaaactggagcgtatctcatggattttaagcccttcacccaatgttccaaataatcatcctagtttgtgggtttcaaaagaagaggatcatgaaaattggcacgttcaggtattcaggtcaattgactctggttccctaaaaggatttcctagtgattgcaaagcagcttcaaagctgaatcttgtgtgccgaaagaacctggtaattgataagagcatccacactgcatatgtccgagcaatcagatctgcacaacatttcatttatattgagaaccagtactttcttggttcttcatatgcttggccatcctatgtgaattcaggtgctgataatctggtaccaatagaattggccctcaaaattgcaagtaagattaaagcgggagaacgctttgcagtgtatgtagtgataccaatgtggccggaaggagtccctactgcagcatctgtgcaagaaatccttttctttcaggcccagacaatggagatgatgtataaaataattgcagatgagctcaaggcaacggacaataaggatatgcaccctgaagattacttgaacttcttttgtcttggaaatcgggaagaaccaccatctaatggtagtccagaatcagagaaatctacagataaaagtgcagcggccttagcttcgaaatatcgacggttcatgatctatgttcacgcaaaagggatgattgtggatgatgaatatgtcattctgggttcagcaaacatcaaccagagatccctggctggttctagagatactgagatcgcaatgggtgcataccagcctcattatgcatggtctacaaagaatggacatcctcacggccaggtatatgggtacagaacgtctctgtgggcagagcaccttggaacggttgatgatcgcttcaaggatccttcgagtttggagtgtgtaaggtttgtgaatcaaatagctgtagagaactggcaaaggtttacagcagaagaaatgagtacgttacaagggcacctcctcaagtacccagttaaggtggaggctgatggtaagatcagcccactgtcagaccaggagtgctttcctgatgttgggggcaagattctgggagctccaacttcacttcctgattcactgactatgtagtgttattacataaaaaaacttctttcagagttgaactttgtaattgtctaaaattggcgggtttatcgcagaacttgtactatatctgtaatcatcgatagttggcgcagggaaagttcaagatgttagtggtgctaagttttcccagcgtttgtaaatgaaccatatgataggatcctagacaatgcttccatttccattatgattatacaacagttttcaacatttttgctcaaccccttattcac

SEQ ID NO: 70857 - DNA, 2913 bp, Zea Mays
cgccccctcccgcattgccgtttccgaccgccaactctcccaaggctgctctgctcgcccaccggaattcccgccgcggagggtgctgtggtataagcttgctttaggattggagggctctggttggttgcctagacgccggcgatggcgtcgccggccggcggcgagtctccggcgaagcccgtcctcctgcacggcgacctcgacctctggatcctcgaggcgcgcctgctgcccaacatggacatgttctccgagcacgtgcgccgctgcttcgccgcatgccgcccgccctcctcctgcgggaccaagcacccgccgcccgccgccgctggccgccgccaccaccaccaccaccggaacatcatcaccagcgatccctacgtcacgctgtccgtgtccggcgccgtcgtggcgcgcaccgccgtcatccccaactcccaggaccccgtctgggaggagcgcttcgccgtgccgctcgcgcaccgcgccgccgacctcgagttccaggtcaaggacaacgacaccttcggcgcgcagctcatcggcaccgtcgccgtccccgccgaccgcgttgtctcgggcgacgaggtcgaggactggttccccgtcataggcaccaacggcaagccgtacaagcccgacaccgcgctgcgcctccgcttcaagttccagcccatcgccgacaacccggcctaccgccacggcatcgccggcgaccccgaccacaggggcatccaggactcctacttcccgctccgccacggcggccaactcacgctgtaccaggacgcgcacgtcagggaaggggacctgccagagattgagctcgacaacggcaagacgttccagcacaacgcgtgctgggaggacatctgccacgccatcctagaggcgcaccacatgatatatatcgtcggctggtcggtgtacgacaaggtgcgcctcgtgcgcgaaccatctccgtcgcggccattgcccgagggtggagaccttacgcttggggacctgctcaagttcaagtcgcaggagggtgtcagagtgtgcctgcttgtgtgggatgataagacttcacatgacaagttcttcatcaagacgggtggggttatggcaactcatgatgaagaaactcggaagtttttcaaacattcctcagtcatctgtgttctctctcctcgatatgctagcaataagctcagcattttcaaacagcaggttgttgggactttgtttacacaccatcaaaagtgtgtgctggttgatacacaagccaggggaaacaagcggaaaattacagctttcattgggggcctagatctttgtgatggccgctatgacacacctgaacacaggcttttcaaagatcttgacacagtattccaaaatgattaccataaccctacattttcggattgatggccctgctgcctatgatgtcttgacaaattttgagcaaaggtggcgaaaggcaacaaaatggcgtgaccggtttagaagagtatctcattggaaagacgatgctttaattaaactggagcgtatctcatggattttaagcccttcacccaatgttccaaataatcatcctagtttgtgggtttcaaaagaagaggatcatgaaaattggcacgttcaggtattcaggtcaattgactctggttccctaaaaggatttcctagtgattgcaaagcagcttcaaagctgaatcttgtgtgccgaaagaacctggtaattgataagagcatccacactgcatatgtccgagcaatcagatctgcacaacatttcatttatattgagaaccagtactttcttggttcttcatatgcttggccatcctatgtgaattcaggtgctgataatctggtaccaatagaattggccctcaaaattgcaagtaagattaaagcgggagaacgctttgcagtgtatgtagtgataccaatgtggccggaaggagtccctactgcagcatctgtgcaagaaatccttttctttcaggcccagacaatggagatgatgtataaaataattgcagatgagctcaaggcaacggacaataaggatatgcaccctgaagattacttgaacttcttttgtcttggaaatcgggaagaaccaccatctaatggtagtccagaatcagagaaatctacagataaaagtgcagcggccttagcttcgaaatatcgacggttcatgatctatgttcacgcaaaagggatgattgtggatgatgaatatgtcattctgggttcagcaaacatcaaccagagatccctggctggttctagagatactgagatcgcaatgggtgcataccagcctcattatgcatggtctacaaagaatggacatcctcacggccaggtatatgggtacagaacgtctctgtgggcagagcaccttggaacggttgatgatcgcttcaaggatccttcgagtttggagtgtgtaaggtttgtgaatcaaatagctgtagagaactggcaaaggtttacagcagaagaaatgagtacgttacaagggcacctcctcaagtacccagttaaggtggaggctgatggtaagatcagcccactgtcagaccaggagtgctttcctgatgttgggggcaagattctgggagctccaacttcacttcctgattcactgactatgtagtgttattacataaaaaaacttctttcagagttgaactttgtaattgtctaaaattggcgggtttatcgcagaacttgtactatatctgtaatcatcgatagttggcgcagggaaagttcaagatgttagtggtgctaagttttcccagcgtttgtaaatgaaccatatgataggatcctagacaatgcttccatttccattatgattatacaacagttttcaacatttttgctcaaccccttattcac

SEQ ID NO: 70858 - DNA, 2979 bp, Zea Mays
caaatctcgagatccaatcgaagcgccccctcccgcattgccgtttccgaccgccaactctcccaaggctgctctgctcgcccaccggaattcccgccgcggagggtgctgtggtataagcttgctttaggattggagggctctggttggttgcctagacgccggcgatggcgtcgccggccggcggcgagtctccggcgaagcccgtcctcctgcacggcgacctcgacctctggatcctcgaggcgcgcctgctgcccaacatggacatgttctccgagcacgtgcgccgctgcttcgccgcatgccgcccgccctcctcctgcgggaccaagcacccgccgcccgccgccgctggccgccgccaccaccaccaccaccggaacatcatcaccagcgatccctacgtcacgctgtccgtgtccggcgccgtcgtggcgcgcaccgccgtcatccccaactcccaggaccccgtctgggaggagcgcttcgccgtgccgctcgcgcaccgcgccgccgacctcgagttccaggtcaaggacaacgacaccttcggcgcgcagctcatcggcaccgtcgccgtccccgccgaccgcgttgtctcgggcgacgaggtcgaggactggttccccgtcataggcaccaacggcaagccgtacaagcccgacaccgcgctgcgcctccgcttcaagttccagcccatcgccgacaacccggcctaccgccacggcatcgccggcgaccccgaccacaggggcatccaggactcctacttcccgctccgccacggcggccaactcacgctgtaccaggacgcgcacgtcagggaaggggacctgccagagattgagctcgacaacggcaagacgttccagcacaacgcgtgctgggaggacatctgccacgccatcctagaggcgcaccacatgatatatatcgtcggctggtcggtgtacgacaaggtgcgcctcgtgcgcgaaccatctccgtcgcggccattgcccgagggtggagaccttacgcttggggacctgctcaagttcaagtcgcaggagggtgtcagagtgtgcctgcttgtgtgggatgataagacttcacatgacaagttcttcatcaagacgggtggggttatggcaactcatgatgaagaaactcggaagtttttcaaacattcctcagtcatctgtgttctctctcctcgatatgctagcaataagctcagcattttcaaacagcaggttgttgggactttgtttacacaccatcaaaagtgtgtgctggttgatacacaagccaggggaaacaagcggaaaattacagctttcattgggggcctagatctttgtgatggccgctatgacacacctgaacacaggcttttcaaagatcttgacacagtattccaaaatgattaccataaccctacattttcggtgcaaagggtcccaggcaaccatggcatgatttacattgcaggattgatggccctgctgcctatgatgtcttgacaaattttgagcaaaggtggcgaaaggcaacaaaatggcgtgaccggtttagaagagtatctcattggaaagacgatgctttaattaaactggagcgtatctcatggattttaagcccttcacccaatgttccaaataatcatcctagtttgtgggtttcaaaagaagaggatcatgaaaattggcacgttcaggtattcaggtcaattgactctggttccctaaaaggatttcctagtgattgcaaagcagcttcaaagctgaatcttgtgtgccgaaagaacctggtaattgataagagcatccacactgcatatgtccgagcaatcagatctgcacaacatttcatttatattgagaaccagtactttcttggttcttcatatgcttggccatcctatgtgaattcaggtgctgataatctggtaccaatagaattggccctcaaaattgcaagtaagattaaagcgggagaacgctttgcagtgtatgtagtgataccaatgtggccggaaggagtccctactgcagcatctgtgcaagaaatccttttctttcaggcccagacaatggagatgatgtataaaataattgcagatgagctcaaggcaacggacaataaggatatgcaccctgaagattacttgaacttcttttgtcttggaaatcgggaagaaccaccatctaatggtagtccagaatcagagaaatctacagataaaagtgcagcggccttagcttcgaaatatcgacggttcatgatctatgttcacgcaaaagggatgattgtggatgatgaatatgtcattctgggttcagcaaacatcaaccagagatccctggctggttctagagatactgagatcgcaatgggtgcataccagcctcattatgcatggtctacaaagaatggacatcctcacggccaggtatatgggtacagaacgtctctgtgggcagagcaccttggaacggttgatgatcgcttcaaggatccttcgagtttggagtgtgtaaggtttgtgaatcaaatagctgtagagaactggcaaaggtttacagcagaagaaatgagtacgttacaagggcacctcctcaagtacccagttaaggtggaggctgatggtaagatcagcccactgtcagaccaggagtgctttcctgatgttgggggcaagattctgggagctccaacttcacttcctgattcactgactatgtagtgttattacataaaaaaacttctttcagagttgaactttgtaattgtctaaaattggcgggtttatcgcagaacttgtactatatctgtaatcatcgatagttggcgcagggaaagttcaagatgttagtggtgctaagttttcccagcgtttgtaaatgaaccatatgataggatcctagacaatgcttccatttccattatgattatacaacagttttcaacatttttgctcaaccccttattcac

SEQ ID NO: 70859 - DNA, 3065 bp, Zea Mays
ataataaacgcaactaaaatcgcatagtactactactatttcgagctaaattgccaaatctcgagatccaatcgaagcgccccctcccgcattgccgtttccgaccgccaactctcccaaggctgctctgctcgcccaccggaattcccgccgcggagggtgctgtggtataagcttgctttaggattggagggctctggttggttgcctagacgccggcgatggcgtcgccggccggcggcgagtctccggcgaagcccgtcctcctgcacggcgacctcgacctctggatcctcgaggcgcgcctgctgcccaacatggacatgttctccgagcacgtgcgccgctgcttcgccgcatgccgcccgccctcctcctgcgggaccaagcacccgccgcccgccgccgctggccgccgccaccaccaccaccaccggaacatcatcaccagcgatccctacgtcacgctgtccgtgtccggcgccgtcgtggcgcgcaccgccgtcatccccaactcccaggaccccgtctgggaggagcgcttcgccgtgccgctcgcgcaccgcgccgccgacctcgagttccaggtcaaggacaacgacaccttcggcgcgcagctcatcggcaccgtcgccgtccccgccgaccgcgttgtctcgggcgacgaggtcgaggactggttccccgtcataggcaccaacggcaagccgtacaagcccgacaccgcgctgcgcctccgcttcaagttccagcccatcgccgacaacccggcctaccgccacggcatcgccggcgaccccgaccacaggggcatccaggactcctacttcccgctccgccacggcggccaactcacgctgtaccaggacgcgcacgtcagggaaggggacctgccagagattgagctcgacaacggcaagacgttccagcacaacgcgtgctgggaggacatctgccacgccatcctagaggcgcaccacatgatatatatcgtcggctggtcggtgtacgacaaggtgcgcctcgtgcgcgaaccatctccgtcgcggccattgcccgagggtggagaccttacgcttggggacctgctcaagttcaagtcgcaggagggtgtcagagtgtgcctgcttgtgtgggatgataagacttcacatgacaagttcttcatcaagacgggtggggttatggcaactcatgatgaagaaactcggaagtttttcaaacattcctcagtcatctgtgttctctctcctcgatatgctagcaataagctcagcattttcaaacagcagttgatgacattgaatttgtagctggcaggttgttgggactttgtttacacaccatcaaaagtgtgtgctggttgatacacaagccaggggaaacaagcggaaaattacagctttcattgggggcctagatctttgtgatggccgctatgacacacctgaacacaggcttttcaaagatcttgacacagtattccaaaatgattaccataaccctacattttcggcaggtgcaaagggtcccaggcaaccatggcatgatttacattgcaggattgatggccctgctgcctatgatgtcttgacaaattttgagcaaaggtggcgaaaggcaacaaaatggcgtgaccggtttagaagagtatctcattggaaagacgatgctttaattaaactggagcgtatctcatggattttaagcccttcacccaatgttccaaataatcatcctagtttgtgggtttcaaaagaagaggatcatgaaaattggcacgttcaggtattcaggtcaattgactctggttccctaaaaggatttcctagtgattgcaaagcagcttcaaagctgaatcttgtgtgccgaaagaacctggtaattgataagagcatccacactgcatatgtccgagcaatcagatctgcacaacatttcatttatattgagaaccagtactttcttggttcttcatatgcttggccatcctatgtgaattcaggtgctgataatctggtaccaatagaattggccctcaaaattgcaagtaagattaaagcgggagaacgctttgcagtgtatgtagtgataccaatgtggccggaaggagtccctactgcagcatctgtgcaagaaatccttttctttcaggcccagacaatggagatgatgtataaaataattgcagatgagctcaaggcaacggacaataaggatatgcaccctgaagattacttgaacttcttttgtcttggaaatcgggaagaaccaccatctaatggtagtccagaatcagagaaatctacagataaaagtgcagcggccttagcttcgaaatatcgacggttcatgatctatgttcacgcaaaagggatgattgtggatgatgaatatgtcattctgggttcagcaaacatcaaccagagatccctggctggttctagagatactgagatcgcaatgggtgcataccagcctcattatgcatggtctacaaagaatggacatcctcacggccaggtatatgggtacagaacgtctctgtgggcagagcaccttggaacggttgatgatcgcttcaaggatccttcgagtttggagtgtgtaaggtttgtgaatcaaatagctgtagagaactggcaaaggtttacagcagaagaaatgagtacgttacaagggcacctcctcaagtacccagttaaggtggaggctgatggtaagatcagcccactgtcagaccaggagtgctttcctgatgttgggggcaagattctgggagctccaacttcacttcctgattcactgactatgtagtgttattacataaaaaaacttctttcagagttgaactttgtaattgtctaaaattggcgggtttatcgcagaacttgtactatatctgtaatcatcgatagttggcgcagggaaagttcaagatgttagtggtgctaagttttcccagcgtttgtaaatgaaccatatgataggatcctagacaatgcttccatttccattatgattatacaacagttttcaacatttttgctcaaccccttattcac

SEQ ID NO: 70860 - DNA, 3147 bp, Zea Mays
aattagtcatcttaaactttattaatatctttatctttcttcgtaacgaaccaaacgtgcctacaccggcaagtaaaagtctcactgatgatatactactagtataataaacgcaactaaaatcgcatagtactactactatttcgagctaaattgccaaatctcgagatccaatcgaagcgccccctcccgcattgccgtttccgaccgccaactctcccaaggctgctctgctcgcccaccggaattcccgccgcggagggtgctgtggtataagcttgctttaggattggagggctctggttggttgcctagacgccggcgatggcgtcgccggccggcggcgagtctccggcgaagcccgtcctcctgcacggcgacctcgacctctggatcctcgaggcgcgcctgctgcccaacatggacatgttctccgagcacgtgcgccgctgcttcgccgcatgccgcccgccctcctcctgcgggaccaagcacccgccgcccgccgccgctggccgccgccaccaccaccaccaccggaacatcatcaccagcgatccctacgtcacgctgtccgtgtccggcgccgtcgtggcgcgcaccgccgtcatccccaactcccaggaccccgtctgggaggagcgcttcgccgtgccgctcgcgcaccgcgccgccgacctcgagttccaggtcaaggacaacgacaccttcggcgcgcagctcatcggcaccgtcgccgtccccgccgaccgcgttgtctcgggcgacgaggtcgaggactggttccccgtcataggcaccaacggcaagccgtacaagcccgacaccgcgctgcgcctccgcttcaagttccagcccatcgccgacaacccggcctaccgccacggcatcgccggcgaccccgaccacaggggcatccaggactcctacttcccgctccgccacggcggccaactcacgctgtaccaggacgcgcacgtcagggaaggggacctgccagagattgagctcgacaacggcaagacgttccagcacaacgcgtgctgggaggacatctgccacgccatcctagaggcgcaccacatgatatatatcgtcggctggtcggtgtacgacaaggtgcgcctcgtgcgcgaaccatctccgtcgcggccattgcccgagggtggagaccttacgcttggggacctgctcaagttcaagtcgcaggagggtgtcagagtgtgcctgcttgtgtgggatgataagacttcacatgacaagttcttcatcaagacgggtggggttatggcaactcatgatgaagaaactcggaagtttttcaaacattcctcagtcatctgtgttctctctcctcgatatgctagcaataagctcagcattttcaaacagcagctggcaggttgttgggactttgtttacacaccatcaaaagtgtgtgctggttgatacacaagccaggggaaacaagcggaaaattacagctttcattgggggcctagatctttgtgatggccgctatgacacacctgaacacaggcttttcaaagatcttgacacagtattccaaaatgattaccataaccctacattttcggcaggtgcaaagggtcccaggcaaccatggcatgatttacattgcaggattgatggccctgctgcctatgatgtcttgacaaattttgagcaaaggtggcgaaaggcaacaaaatggcgtgaccggtttagaagagtatctcattggaaagacgatgctttaattaaactggagcgtatctcatggattttaagcccttcacccaatgttccaaataatcatcctagtttgtgggtttcaaaagaagaggatcatgaaaattggcacgttcaggtattcaggtcaattgactctggttccctaaaaggatttcctagtgattgcaaagcagcttcaaagctgaatcttgtgtgccgaaagaacctggtaattgataagagcatccacactgcatatgtccgagcaatcagatctgcacaacatttcatttatattgagaaccagtactttcttggttcttcatatgcttggccatcctatgtgaattcaggtgctgataatctggtaccaatagaattggccctcaaaattgcaagtaagattaaagcgggagaacgctttgcagtgtatgtagtgataccaatgtggccggaaggagtccctactgcagcatctgtgcaagaaatccttttctttcaggcccagacaatggagatgatgtataaaataattgcagatgagctcaaggcaacggacaataaggatatgcaccctgaagattacttgaacttcttttgtcttggaaatcgggaagaaccaccatctaatggtagtccagaatcagagaaatctacagataaaagtgcagcggccttagcttcgaaatatcgacggttcatgatctatgttcacgcaaaagggatgattgtggatgatgaatatgtcattctgggttcagcaaacatcaaccagagatccctggctggttctagagatactgagatcgcaatgggtgcataccagcctcattatgcatggtctacaaagaatggacatcctcacggccaggtatatgggtacagaacgtctctgtgggcagagcaccttggaacggttgatgatcgcttcaaggatccttcgagtttggagtgtgtaaggtttgtgaatcaaatagctgtagagaactggcaaaggtttacagcagaagaaatgagtacgttacaagggcacctcctcaagtacccagttaaggtggaggctgatggtaagatcagcccactgtcagaccaggagtgctttcctgatgttgggggcaagattctgggagctccaacttcacttcctgattcactgactatgtagtgttattacataaaaaaacttctttcagagttgaactttgtaattgtctaaaattggcgggtttatcgcagaacttgtactatatctgtaatcatcgatagttggcgcagggaaagttcaagatgttagtggtgctaagttttcccagcgtttgtaaatgaaccatatgataggatcctagacaatgcttccatttccattatgattatacaacagttttcaacatttttgctcaaccccttattcac

SEQ ID NO: 70861 - DNA, 2626 bp, Zea Mays
aaccccacaaaccacaaatcttcagccccacataacaaatcacgcaaagattcccctgccatcatcaccagaatttagcgcctccttccctcctcctccccacgaccaacaaaatttcactcttctccaccacgcacctgactcacacccccccgctgctttgactttgactacccatcctcactcccccctactccactctaaaccctgcgctaaaccttggctatcgatggggaactgcgccgcctaccgccttgccgccggcgggagcggcgacggcggggaccccgtggccgtgtgccgcgaccggaagcgcctcatcaaggcggcggccgaccgccggttcgcgctggccggcgcgcacgccgcttacgcggcggctctccgttccgtcgccgacgcactcgacgtcttcgtcgcgcgccacaccgcgcctgcgccgatcctcatcacgctccccacccccagcagctcgccctcggcttcccccaagccaacgcaggttcaagtgcaggggcttccctctctcgccacgccgccgccgccgcctccgcaggagggggaggaagaagaggaggcgccggcatcaccgcccgccgaggaagatggggacggcggcgtgcagacgccggagatggagtgcccgtactactacgcacccccggcggtgacgccgccaccgccaccgctccctgcggcgtcgccggtcggcggctgggacttctttaacccgttctacgggacggaggaggtggctgcggccatcagcgacgaggagatgcgagcggtcagggagcgagagggcatccccgaactggaggaggcggaggaagaggagggggcgaaggcggcggcggcggcggaaaccaagcccccaaaggcacagccctctcttggacttggagtcttgacgccccaagaggaggctagagatgcgtgcgagatggcggggaacaacggcgggctggaggtggccgtggcgccgcaggggcgcgagctgctcgcagcgctcaaggaggtggaggagctcttcgcggccgccgccgaggcaggcaaggaggtgtctgccatgctcgaagcagccacgcgcgtccccgacctcaaagaaaactcgtcaaaaataatccacgccatcacatggcatcgctctccatcatctgtatcctcatcctacaggagcgagctgggagcgagctcgaatagtttgtcatggacagacaagagtgaaactaggagtgatatattcgaagactatggtggaatgaagtcaggaagtcactcacagactttagggagactgtatgcttgggagaagaaactttatgaagaagttaagatcaaatccgacaaacctatgagaagaaatgtgttcagctgaggaaccaagatgccaaaggttcagagctgcgttgtgctgaaaaaaccaggacaactgttagagacctgtacacaagaatctgggtttctctacgagcagcggaatccatatctgatagaatacaaaagttacgggacgaggaactgcagccacaactcgtcgagctgttgcagggctttacaaaatcttggaaaataatggtggactcgcatgaaacccagaggcagattatgttcgaggtgaattcatttacatgccctgcttatggcaaattctgcaacgatgcacagcgtcatgcaactctgaagttggaggttgagctgaggaactggagatcctgctttactagctatttcaatgctcagaaagcgtatatcgaggctcttgaaggatgggtatccaagtttgttctgaccgacaccatccggtactcgcgggggatctcgtcgattgctccagatagagctggtgctccaactctagttgtgatgtgccatgactggtacactacaatgtccaagtttccgagcaagcgggtctcgttcaccatgaggaattttctcaggagcgtgagggtgctatggctgaagcaaggagaggagcagcagcagaaaaggaaggtggacagcctggcaaaggagctggacaagaagctgaccgcctacaaaagggcagagaacaggatcataggcaccaagcttctggagcacagtcctgagacagacgccaagcagcgcatggagcacctgtcggagaagaaagaggtgctgaacctcctaaagaggaggatcgaggcagagaaagggaagcatcatgcgtgcatgcgggacacgcacgacgtcactctcaacgggttcaagatcggcctcgccagcatcttcgagtcgctggctgagttctcgaaggattcggtgaagctctacgaagacctcctaggccgagcccatggcaaggattcagagaaggctcacatagtggtggatgatggtaatctgcatgtgttaggacctagctagctgcattggcccagtttttgggcccctagaatctttgtctgattttagcgtgtagagagtaccatgttgtttggtttggttggttggttgcttgaaggtagtagggtcattcttgtgggcgacctgctgtgcttgtaattatccttttagcttgatatcggtggggattcgatctattgtggtgctgtgctgtgctgctgctcgttccatgtgactgtcaggtatgtatgtg

SEQ ID NO: 70862 - DNA, 349 bp, Zea Mays
agccttggaactctggaaatggaaaggtctcggctgtgtccgcggcctgctatttatccagagggggaggagaggatggaaggaggaaggaggaaacccaacctgcctacctgccgcctccgagtgctgcgactgcgaggtgggtttccgcgggaagggtgggtggtggggcccacggagcagagagagagagggaaggttgagggccccgtcggggtcagacgtcacgcgtcagtgcgctggaagtttcgctttggactccctgccgcctgtcgccttttcttttgtctgtctgtgtgatttcgattttgccttgaaaaaagatcttgccttgtgttttttcatcaaa

SEQ ID NO: 70863 - DNA, 125 bp, Zea Mays
gcagcatgctaatgattccatccctctccccgatcccaagccaagccaactgagaggattatagattgacgaggacggcaagcgagcgagtctgagcagagtagtagtggctctcacaatcccag

SEQ ID NO: 70864 - DNA, 94 bp, Zea Mays
agttaatagatgaagataccttatagagtagcaaaattcaaagggcagagaagagtcaagctggcttggcttatcctggacttgtgagttgaac

SEQ ID NO: 70865 - DNA, 1323 bp, Zea Mays
ccacagccgtcgtgggccaccgtccggctcccccggtatacggccaccacctgtccttccgcacgtccccgtcggccatcgtccacggatcctatcggtctctcctgtgtcctcttcagtctccacgccgttccagaagtcgccaaccttccctcgccgccgcgccgcaacagccgcctcccctccaaggtagcccaatcgaaaccactcgcccggccaccatggcctttgccagctcgctgcttcccgtgccgccctaccgcgtctgcgcgacccccgcgtcggaggtcgccgccttctcgccggccaagaagagcgtctcgctcgccgctgcgcgccagcgccgaggatcccgtcacggagattgtagattgcttacaacgtggacaaacaacaaacttgaattccatatggagcttgagtgccatgtgcctgtgcgtccttaagccaaagacagtttaagtgagggcagaagtaaatgaatctggaagtgttttggctgttgatgcactctcgcaagttaaacatgttctgcttccagtccttgatcgcaacccttacctttctgaaggcacaagacaggctgcagcaacaaccgcttccctcgcaaagaagtatggagcagatattactgtagttgttattgacgataaaccaaaggagtctgtcccagagcatgatactcaaatgtcaagcattagatggcatctctcagaaggcggattttcggagtttagattgatggagcgtcttggggaagggcagaaaccaacagttatcatcggggaagttgctgatgagtgggacttagacctggttgtgctaagcatggaggcaatccactccaagcatgtcgatgggaatttgctcgctgaattcatcccttgccctgttctactgctcccgctctgacatagagctgatttgcatctgtcatgtttttttgagacaaatgatctgtttgtccttgaagatgtaactcccgcatgttccctggatacgaggggtttgcgtcagctgatgattctattatgttgatgcagtttttttcgaatttgtgtgcctgtgaatattgctaagaaaattatgttactcttttctttatttcttctgaatgagcagtttcaggtatatgctgctgctgtggttgggttaggatgcgttttttggggtgtttaaaagaaccagcatgtttaaaagaataaatcagtattaatgtcagacaaacagagaaaacaaataataaaaacatttggagatgcggggtatcgatccccgtacctctcgcatgctaagcgagcgctctaccatctgagctacatc

SEQ ID NO: 70866 - DNA, 1225 bp, Zea Mays
gtgcattcaaacacccctttagttggcgacaagggaacacataaatatttagttggtagtcattgttttaacgcatttgtgaatcattcaagtagatttttttttgaaaatataaacaatatatttttgaaacttctgtaactaatggaggcatatgccatcaggcaaattaagcaaataactaaaaaactggaagagacttacactttgtagttctcagttgggtatagaagacccaaaaatgtctcattcaatgtaggtgcactcctcttaggattgctcactgtcaacagaacgaatgttgaggcagataagaaaacgacagaatgtctctcagatgaaaaaaaaaagcaatagcctaacagcactgagaaaaaggagattgatatttctgtatgccaataaatcactgggttaaaactacactaataagattgaatcaaccattgcatttgtccataataatcatctagaaccactaagcttctatgcatatccaagccctcacaaggcaggtctgctcttgtccgcatatgccacatgatttgaatttgcccccttttgtacaagttggatcgattctcaagttttaatgctcattccagtaactaagggcctgttttggttggaggcctggcaggcaaatgccaggccccatataattggaagagtagattttgattcttctgacctgaaactggtgatgcagcttctaaatttcagttttaatttaactccagagcaacaagcacacaatttaacgaacatgatctcctccgtttctcaaatgactgcaaactagagatttgaacagatataaactaactagagctcccagctattcacagccgggctaaaaagaaggacgtctagatctggatcacgatggtcctcagcggcggcggcgggtgagacgcttagctacctcgctcgtcgatgacgtcgagagagcagtggacgatgtggtggagcttgagggcgtcgtccgcctccgtgaagctctgcaggtacagcggattgttctgcagcaccgacggaaaagctcacgacgagatcgcatcaggccagatctgcacgatcggacgcgagggccgagtggggcggtgagggtcctgacctggtggccgacaacggcgacgcagacgatcatgattcctccgggaagaggacttggggaggaacggaagaagaagccgccagccggtagcaagacctccggtgccgg

SEQ ID NO: 70867 - DNA, 4199 bp, Zea Mays
caacttccagatcgttctcatcccatcgtttcctcctctgctcaagcacggcagccagtccagccaccatttgggtgctcatctccctctgctcggcacccagccccagctcgcccgagctccctgcgccgacctcatcctccccatggtgcgtcaccttctactcctctccttcccacggcacagcagcgcccctgcagctccccttctccagatccatggcgcccaacaccttgagcgcccctgccgctgctcctccaccgggatctcctcctccactaggcgtccaggcttgtcccaccatggctgcccctcctccatctcctccctccccaccaggttacccagattccatggccgccgccgccccagccatctccctggtggccgacctcgcccctgccccagccacagctcccccttcggccctgctgctgcaagcactcagcccctcccatggcacacgccccatctgcaacaccgtcgacccccgacgaggtcctgttctcgccctgtcgttttagtactcggcgtcgattaagtagatgctaaccgtgtgtatattcgtgtgttcttgtgaggagaaatcccatgatttgggggaagacgaagtccaagcacaacccccgccaatcgctcgatgaaaaatctaaaccaaaaccctcagcgttttcatgggttccggagggattttatgttggtaaggtgttgtgcggtgtgatctccaattccctattgctgatgtcttactccatcatgaccttagggaaggatgttttcctctaaattactcgtaataattatgcttggtgtatgtgttgttttagctacttgatgaaatgttttagttgtgtgcgataatatggttgccgttcgagtggaaagtagatgtgttgtatgacctgagttggagttgaagcaagtatgtgtgtctcgtattacgaaactaattagagatatgcatgatgtttgtagatggattatgtgtagagtgttttagtacaagtatttttttaggtatagttgaaccaattattgtatatgaattgtgcgatatcaaggttgttctaatgttcttttaacatcttgctaataaggtgttagagtattctaaatgccaaacataggataattttacaagccaaatagaagttaaattgaaggtattgatgtttagggctgtaggtatagttttagttatgcagctagtccaataaagtagatcatgttttctgtagaagcgttatatataaaacttgtagataatctctttatcttacttgtgtaaaaatttcatgaccataggtgtagtagtttaggagttatgatttttccaagtccagtctcagaatctgtccgaattctatacaggtttcgaaaattggattgtttggctaagctaaactgagaatcagcccttagtaattatagaagaattgtagtacttttcttaagctttccaacaaattttggagcaccctttttggtggtctagagatcaagttacagctgtttgaactatagagtctgaatctgtccaaatctggacagcgaagtctgtttgtagtaactgactttgatatgtattgaattaacctgagatgtttataaatgaattgtagacaattctattaactttctaaaaagtctaggatcaccggatttggatttcggaaactccagttctggacttttgaagtagttagtcgaattctgtccaaatctggacaaaatttatgtttagcgctgtttgacctttctaaaggtcgaatcttgttgtgatggtaatacaaaagttatagaggactttataagctttccaaaaagtcctagtttactatttttggatacatattttatgaattgtgagctaaacagatagttgttgacttgctgttctgctgtccaaacacatgtctactgtctgaaaatagctcattttgtagttacatttgcatcaggctttgatgattgctgtacaaggatgatatggcctcccgcccaaagctgtctggtattcagaagcaggttttggcgctgtacaggggattccttcggacagcacgccttaaggcccctgaagaacgccgcaggatcgagtctgttatcttggcagagttccgtgacaacgcaaggagtgttgaccgtaggaactttgtacacatagagtacttgttgaggagagggaagaagcagcttgagcagctcaagaatcctgatattactggactcgctacccttgtagtaaagaaatgagcaagagaagaaggaagacaagtcagacaaaacagaagacgagaagaggttcctaccataacacttaagcaaggaatcctgtacacttctctcctggggttgtgacttgtatattgtcaaggatcacttggatgtggtaaatgctatactggacactgatgatagctgcataaggattgtgcgaaaaaacgggaagacatccctacatactgctgcaaggattggataccatcgtattgtcaaggcactcatagagagggatccaggaattgttccgatcaaggataggaagggacaaactgcacttcacatggctgtgaaaggcaagaacacagatgtagtggaagagttactgatggctgatgtttccattctcaatgtgcgggacaagaagggaaatactgctttgcacatagctacatggaaatgggagaattttgggattatgaaacaccgcagacgtggcttcgacgaaacggaggcgtaggcgagggattcgacattatgaaaaaccagagaagatactacactctaaaatggacatgaatcctctattaccagggaaggatgatgtttattacactgaaacagacgctgtctcacatccgttacccgcactagacgcacccagtctttctacagagagaatcgcgccgttcttgaatctgccattcgctgaatctgccattcgctgctgttgtttctggacagtgaagcagtattccggacagtgaacaaaaatctgggaacacatttcattttcactgtcattggctaccagagtccgggaacaaaatctgggaacaaaatctgggaacacaaaaatctgggaacaaaatctgcctttggctaccagagtttattgctcccatatcattcgctgtccatttcactgtccattcgctgaacacaaaaagctgggaacaaactcattttcccagtgaacaggtagcacaatttagttcacaaaatctgggagcacaatttagttcacaaaatctgggagcaataaacaggttgaacaggtagaacaaaatctgggagcaataaactgccatcccagaacaaaattcgcagctcacatttcagttcacaagctagttcacaatttagttcccaggtaccacaatttagttcacaagctagttcacaagctcacatttcaatggagcaatacacaggtagcagtttgacaagctattacacaagctcacatttctgggagcaatacacaggtagcagtttcacaagctatcacacaagctcacatttctgggagcaaaaaacaggtggcgtagtagcagtcgtgtgttcatcttcatttgcagcaacgacaagttcacggcttggtgcttcatcttcatttccagctacaagtattgcaacgacaagccacctgctttggcgcggactagggttgtggtcgcagcgccgccgccacctgctttggcgcggggccgcgagcagcaagggagaagacgcggagtttggagagaaggaggtgcagcgccgccgccacctgctttggcgcgggaccacgggcagcagatctccgggcagcaggggaggagactagcaggggagggaaatggagattgaagaaaatgagatggaaggaagaggcttgacgggagagagaagaaccttgaagagagaagaacggctctggacggcagaagaaaacggcgcgtgggctgatagcgacggaagatcattattcgttctcctgaacgactaataacgatgggatctggaataacaggagcctgatggttgcatcagtagagttgaccacttctcagtattgcgagatgcatcttacatggtcaagaagataattcctattctgaactacttgctcgtgttcgtgttgatcagttttgcctagtcccagtaccatacaaagatgttcaggtgaacctgaaaattcttctcaatttgac

SEQ ID NO: 70868 - DNA, 4144 bp, Zea Mays
caacttccagatcgttctcatcccatcgtttcctcctctgctcaagcacggcagccagtccagccaccatttgggtgctcatctccctctgctcggcacccagccccagctcgcccgagctccctgcgccgacctcatcctccccatggtgcgtcaccttctactcctctccttcccacggcacagcagcgcccctgcagctccccttctccagatccatggcgcccaacaccttgagcgcccctgccgctgctcctccaccgggatctcctcctccactaggcgtccaggcttgtcccaccatggctgcccctcctccatctcctccctccccaccaggttacccagattccatggccgccgccgccccagccatctccctggtggccgacctcgcccctgccccagccacagctcccccttcggccctgctgctgcaagcactcagcccctcccatggcacacgccccatctgcaacaccgtcgacccccgacgaggtcctgttctcgccctgtcgttttagtactcggcgtcgattaagtagatgctaaccgtgtgtatattcgtgtgttcttgtgaggagaaatcccatgatttgggggaagacgaagtccaagcacaacccccgccaatcgctcgatgaaaaatctaaaccaaaaccctcagcgttttcatgggttccggagggattttatgttggtgttgtgcggtgtgatctccaattccctattgctgatgtcttactccatcatgaccttagggaaggatgttttcctctaaattactcgtaataattatgcttggtgtatgtgttgttttagctacttgatgaaatgttttagttgtgtgcgataatatggttgccgttcgagtggaaagtagatgtgttgtatgacctgagttggagttgaagcaagtatgtgtgtctcgtattacgaaactaattagagatatgcatgatgtttgtagatggattatgtgtagagtgttttagtacaagtatttttttaggtatagttgaaccaattattgtatatgaattgtgcgatatcaaggttgttctaatgttcttttaacatcttgctaataaggtgttagagtattctaaatgccaaacataggataattttacaagccaaatagaagttaaattgaaggtattgatgtttagggctgtaggtatagttttagttatgcagctagtccaataaagtagatcatgttttctgtagaagcgttatatataaaacttgtagataatctctttatcttacttgtgtaaaaatttcatgaccataggtgtagtagtttaggagttatgatttttccaagtccagtctcagaatctgtccgaattctatacaggtttcgaaaattggattgtttggctaagctaaactgagaatcagcccttagtaattatagaagaattgtagtacttttcttaagctttccaacaaattttggagcaccctttttggtggtctagagatcaagttacagctgtttgaactatagagtctgaatctgtccaaatctggacagcgaagtctgtttgtagtaactgactttgatatgtattgaattaacctgagatgtttataaatgaattgtagacaattctattaactttctaaaaagtctaggatcaccggatttggatttcggaaactccagttctggacttttgaagtagttagtcgaattctgtccaaatctggacaaaatttatgtttagcgctgtttgacctttctaaaggtcgaatcttgttgtgatggtaatacaaaagttatagaggactttataagctttccaaaaagtcctagtttactatttttggatacatattttatgaattgtgagctaaacagatagttgttgacttgctgttctgctgtccaaacacatgtctactgtctgaaaatagctcattttgtagttacatttgcatcaggctttgatgattgctgtacaaggatgatatggcctcccgcccaaagctgtctggtattcagaagcaggttttggcgctgtacaggggattccttcggacagcacgccttaaggcccctgaagaacgccgcaggatcgagtctgttatcttggcagagttccgtgacaacgcaaggagtgttgaccgtaggaactttgtacacatagagtacttgttgaggagagggaagaagcagcttgagcagctcaagaatcctgatattactggactcgctacccttgtagtaaagaaatgagcaagagaagaaggaagacaagtcagacaaaacagaagacgagaagaggttcctaccataacacttaagcaaggaatcctgtacacttctctcctggggttgtgacttgtatattgtcaaggatcacttggatgtggtaaatgctatactggacactgatgatagctgcataaggattgtgcgaaaaaacgggaagacatccctacatactgctgcaaggattggataccatcgtattgtcaaggcactcatagagagggatccaggaattgttccgatcaaggataggaagggacaaactgcacttcacatggctgtgaaaggcaagaacacagatgtagtggaagagttactgatggctgatgtttccattctcaatgtgcgggacaagaagggaaatactgctttgcacatagctacatggaaatgggagaattttgggattatgaaacaccgcagacgtggcttcgacgaaacggaggcgtaggcgagggattcgacattatgaaaaaccagagaagatactacactctaaaatggacatgaatcctctattaccagggaaggatgatgtttattacactgaaacagacgctgtctcacatccgttacccgcactagacgcacccagtctttctacagagagaatcgcgccgttcttgaatctgccattcgctgaatctgccattcgctgctgttgtttctggacagtgaagcagtattccggacagtgaacaaaaatctgggaacacatttcattttcactgtcattggctaccagagtccgggaacaaaatctgggaacaaaatctgggaacacaaaaatctgggaacaaaatctgcctttggctaccagagtttattgctcccatatcattcgctgtccatttcactgtccattcgctgaacacaaaaagctgggaacaaactcattttcccagtgaacaggtagcacaatttagttcacaaaatctgggagcacaatttagttcacaaaatctgggagcaataaacaggttgaacaggtagaacaaaatctgggagcaataaactgccatcccagaacaaaattcgcagctcacatttcagttcacaagctagttcacaatttagttcccaggtaccacaatttagttcacaagctagttcacaagctcacatttcaatggagcaatacacaggtagcagtttgacaagctattacacaagctcacatttctgggagcaatacacaggtagcagtttcacaagctatcacacaagctcacatttctgggagcaaaaaacaggtggcgtagtagcagtcgtgtgttcatcttcatttgcagcaacgacaagttcacggcttggtgcttcatcttcatttccagctacaacaacgacaagccacctgctttggcgcggactagggttgtggtcgcagcgccgccgccacctgctttggcgcggggccgcgagcagcaagggagaagacgcggagtttggagagaaggaggtgcagcgccgccgccacctgctttggcgcgggaccacgggcagcagatctccgggcagcaggggaggagactagcaggggagggaaatggagattgaagaaaatgagatggaaggaagaggcttgacgggagagagaagaaccttgaagagagaagaacggctctggacggcagaagaaaacggcgcgtgggctgatagcgacggaagatcattattcgttctcctgaacgactaataacgatgggatctggaataacaggagcctgatggttgcatcagtagagttgaccacttctcagtattgcgagatgcatcttacatggttgatcagttttgcctagtcccagtaccatacaaagatgttcaggtgaacctgaaaattcttctcaatttgac

SEQ ID NO: 70869 - DNA, 2945 bp, Zea Mays
caacttccagatcgttctcatcccatcgtttcctcctctgctcaagcacggcagccagtccagccaccatttgggtgctcatctccctctgctcggcacccagccccagctcgcccgagctccctgcgccgacctcatcctccccatggtgcgtcaccttctactcctctccttcccacggcacagcagcgcccctgcagctccccttctccagatccatggcgcccaacaccttgagcgcccctgccgctgctcctccaccgggatctcctcctccactaggcgtccaggcttgtcccaccatggctgcccctcctccatctcctccctccccaccaggttacccagattccatggccgccgccgccccagccatctccctggtggccgacctcgcccctgccccagccacagctcccccttcggccctgctgctgcaagcactcagcccctcccatggcacacgccccatctgcaacaccgtcgacccccgacgaggtcctgttctcgccctgtcgttttagtactcggcgtcgattaagtagatgctaaccgtgtgtatattcgtgtgttcttgtgaggagaaatcccatgatttgggggaagacgaagtccaagcacaacccccgccaatcgctcgatgaaaaatctaaaccaaaaccctcagcgttttcatgggttccggagggattttatgttggtaaggtgttgtgcggtgtgatctccaattccctattgctgatgtcttactccatcatgaccttagggctttgatgattgctgtacaaggatgatatggcctcccgcccaaagctgtctggtattcagaagcaggttttggcgctgtacaggggattccttcggacagcacgccttaaggcccctgaagaacgccgcaggatcgagtctgttatcttggcagagttccgtgacaacgcaaggagtgttgaccgtaggaactttgtacacatagagtacttgttgaggagagggaagaagcagcttgagcagctcaagaatcctgatattactggactcgctacccttgtagtaaagaaatgagcaagagaagaaggaagacaagtcagacaaaacagaagacgagaagaggggttgtgacttgtatattgtcaaggatcacttggatgtggtaaatgctatactggacactgatgatagctgcataaggattgtgcgaaaaaacgggaagacatccctacatactgctgcaaggattggataccatcgtattgtcaaggcactcatagagagggatccaggaattgttccgatcaaggataggaagggacaaactgcacttcacatggctgtgaaaggcaagaacacagatgtagtggaagagttactgatggctgatgtttccattctcaatgtgcgggacaagaagggaaatactgctttgcacatagctacatggaaatgggagaattttgggattatgaaacaccgcagacgtggcttcgacgaaacggaggcgtaggcgagggattcgacattatgaaaaaccagagaagatactacactctaaaatggacatgaatcctctattaccagggaaggatgatgtttattacactgaaacagacgctgtctcacatccgttacccgcactagacgcacccagtctttctacagagagaatcgcgccgttcttgaatctgccattcgctgaatctgccattcgctgctgttgtttctggacagtgaagcagtattccggacagtgaacaaaaatctgggaacacatttcattttcactgtcattggctaccagagtccgggaacaaaatctgggaacaaaatctgggaacacaaaaatctgggaacaaaatctgcctttggctaccagagtttattgctcccatatcattcgctgtccatttcactgtccattcgctgaacacaaaaagctgggaacaaactcattttcccagtgaacaggtagcacaatttagttcacaaaatctgggagcacaatttagttcacaaaatctgggagcaataaacaggttgaacaggtagaacaaaatctgggagcaataaactgccatcccagaacaaaattcgcagctcacatttcagttcacaagctagttcacaatttagttcccaggtaccacaatttagttcacaagctagttcacaagctcacatttcaatggagcaatacacaggtagcagtttgacaagctattacacaagctcacatttctgggagcaatacacaggtagcagtttcacaagctatcacacaagctcacatttctgggagcaaaaaacaggtggcgtagtagcagtcgtgtgttcatcttcatttgcagcaacgacaagttcacggcttggtgcttcatcttcatttccagctacaacaacgacaagccacctgctttggcgcggactagggttgtggtcgcagcgccgccgccacctgctttggcgcggggccgcgagcagcaagggagaagacgcggagtttggagagaaggaggtgcagcgccgccgccacctgctttggcgcgggaccacgggcagcagatctccgggcagcaggggaggagactagcaggggagggaaatggagattgaagaaaatgagatggaaggaagaggcttgacgggagagagaagaaccttgaagagagaagaacggctctggacggcagaagaaaacggcgcgtgggctgatagcgacggaagatcattattcgttctcctgaacgactaataacgatgggatctggaataacaggagcctgatggttgcatcagtagagttgaccacttctcagtattgcgagatgcatcttacatggtcaagaagataattcctattctgaactacttgctcgtgttgatcagttttgcctagtcccagtaccatacaaagatgttcaggtgaacctgaaaattcttctcaatttgac

SEQ ID NO: 70870 - DNA, 2756 bp, Zea Mays
caacttccagatcgttctcatcccatcgtttcctcctctgctcaagcacggcagccagtccagccaccatttgggtgctcatctccctctgctcggcacccagccccagctcgcccgagctccctgcgccgacctcatcctccccatggtgcgtcaccttctactcctctccttcccacggcacagcagcgcccctgcagctccccttctccagatccatggcgcccaacaccttgagcgcccctgccgctgctcctccaccgggatctcctcctccactaggcgtccaggcttgtcccaccatggctgcccctcctccatctcctccctccccaccaggttacccagattccatggccgccgccgccccagccatctccctggtggccgacctcgcccctgccccagccacagctcccccttcggccctgctgctgcaagcactcagcccctcccatggcacacggagaaatcccatgatttgggggaagacgaagtccaagcacaacccccgccaatcgctcgatgaaaaatctaaaccaaaaccctcagcgttttcatgggttccggagggattttatgttggtaaggatgatatggcctcccgcccaaagctgtctggtattcagaagcaggttttggcgctgtacaggggattccttcggacagcacgccttaaggcccctgaagaacgccgcaggatcgagtctgttatcttggcagagttccgtgacaacgcaaggagtgttgaccgtaggaactttgtacacatagagtacttgttgaggagagggaagaagcagcttgagcagctcaagaatcctgatattactggactcgctacccttgtagtaaagaaatgagcaagagaagaaggaagacaagtcagacaaaacagaagacgagaagaggttcctaccataacacttaagcaaggaatcctgtacacttctctcctggggttgtgacttgtatattgtcaaggatcacttggatgtggtaaatgctatactggacactgatgatagctgcataaggattgtgcgaaaaaacgggaagacatccctacatactgctgcaaggattggataccatcgtattgtcaaggcactcatagagagggatccaggaattgttccgatcaaggataggaagggacaaactgcacttcacatggctgtgaaaggcaagaacacagatgtagtggaagagttactgatggctgatgtttccattctcaatgtgcgggacaagaagggaaatactgctttgcacatagctacatggaaatgggagaattttgggattatgaaacaccgcagacgtggcttcgacgaaacggaggcgtaggcgagggattcgacattatgaaaaaccagagaagatactacactctaaaatggacatgaatcctctattaccagggaaggatgatgtttattacactgaaacagacgctgtctcacatccgttacccgcactagacgcacccagtctttctacagagagaatcgcgccgttcttgaatctgccattcgctgaatctgccattcgctgctgttgtttctggacagtgaagcagtattccggacagtgaacaaaaatctgggaacacatttcattttcactgtcattggctaccagagtccgggaacaaaatctgggaacaaaatctgggaacacaaaaatctgggaacaaaatctgcctttggctaccagagtttattgctcccatatcattcgctgtccatttcactgtccattcgctgaacacaaaaagctgggaacaaactcattttcccagtgaacaggtagcacaatttagttcacaaaatctgggagcacaatttagttcacaaaatctgggagcaataaacaggttgaacaggtagaacaaaatctgggagcaataaactgccatcccagaacaaaattcgcagctcacatttcagttcacaagctagttcacaatttagttcccaggtaccacaatttagttcacaagctagttcacaagctcacatttcaatggagcaatacacaggtagcagtttgacaagctattacacaagctcacatttctgggagcaatacacaggtagcagtttcacaagctatcacacaagctcacatttctgggagcaaaaaacaggtggcgtagtagcagtcgtgtgttcatcttcatttgcagcaacgacaagttcacggcttggtgcttcatcttcatttccagctacaacaacgacaagccacctgctttggcgcggactagggttgtggtcgcagcgccgccgccacctgctttggcgcggggccgcgagcagcaagggagaagacgcggagtttggagagaaggaggtgcagcgccgccgccacctgctttggcgcgggaccacgggcagcagatctccgggcagcaggggaggagactagcaggggagggaaatggagattgaagaaaatgagatggaaggaagaggcttgacgggagagagaagaaccttgaagagagaagaacggctctggacggcagaagaaaacggcgcgtgggctgatagcgacggaagatcattattcgttctcctgaacgactaataacgatgggatctggaataacaggagcctgatggttgcatcagtagagttgaccacttctcagtattgcgagatgcatcttacatggttgatcagttttgcctagtcccagtaccatacaaagatgttcaggtgaacctgaaaattcttctcaatttgac

SEQ ID NO: 70871 - DNA, 2915 bp, Zea Mays
caacttccagatcgttctcatcccatcgtttcctcctctgctcaagcacggcagccagtccagccaccatttgggtgctcatctccctctgctcggcacccagccccagctcgcccgagctccctgcgccgacctcatcctccccatggtgcgtcaccttctactcctctccttcccacggcacagcagcgcccctgcagctccccttctccagatccatggcgcccaacaccttgagcgcccctgccgctgctcctccaccgggatctcctcctccactaggcgtccaggcttgtcccaccatggctgcccctcctccatctcctccctccccaccaggttacccagattccatggccgccgccgccccagccatctccctggtggccgacctcgcccctgccccagccacagctcccccttcggccctgctgctgcaagcactcagcccctcccatggcacacgccccatctgcaacaccgtcgacccccgacgaggtcctgttctcgccctgtcgttttagtactcggcgtcgattaagtagatgctaaccgtgtgtatattcgtgtgttcttgtgaggagaaatcccatgatttgggggaagacgaagtccaagcacaacccccgccaatcgctcgatgaaaaatctaaaccaaaaccctcagcgttttcatgggttccggagggattttatgttggtaaggatgatatggcctcccgcccaaagctgtctggtattcagaagcaggttttggcgctgtacaggggattccttcggacagcacgccttaaggcccctgaagaacgccgcaggatcgagtctgttatcttggcagagttccgtgacaacgcaaggagtgttgaccgtaggaactttgtacacatagagtacttgttgaggagagggaagaagcagcttgagcagctcaagaatcctgatattactggactcgctacccttgtagtaaagaaatgagcaagagaagaaggaagacaagtcagacaaaacagaagacgagaagaggttcctaccataacacttaagcaaggaatcctgtacacttctctcctggggttgtgacttgtatattgtcaaggatcacttggatgtggtaaatgctatactggacactgatgatagctgcataaggattgtgcgaaaaaacgggaagacatccctacatactgctgcaaggattggataccatcgtattgtcaaggcactcatagagagggatccaggaattgttccgatcaaggataggaagggacaaactgcacttcacatggctgtgaaaggcaagaacacagatgtagtggaagagttactgatggctgatgtttccattctcaatgtgcgggacaagaagggaaatactgctttgcacatagctacatggaaatgggagaattttgggattatgaaacaccgcagacgtggcttcgacgaaacggaggcgtaggcgagggattcgacattatgaaaaaccagagaagatactacactctaaaatggacatgaatcctctattaccagggaaggatgatgtttattacactgaaacagacgctgtctcacatccgttacccgcactagacgcacccagtctttctacagagagaatcgcgccgttcttgaatctgccattcgctgaatctgccattcgctgctgttgtttctggacagtgaagcagtattccggacagtgaacaaaaatctgggaacacatttcattttcactgtcattggctaccagagtccgggaacaaaatctgggaacaaaatctgggaacacaaaaatctgggaacaaaatctgcctttggctaccagagtttattgctcccatatcattcgctgtccatttcactgtccattcgctgaacacaaaaagctgggaacaaactcattttcccagtgaacaggtagcacaatttagttcacaaaatctgggagcacaatttagttcacaaaatctgggagcaataaacaggttgaacaggtagaacaaaatctgggagcaataaactgccatcccagaacaaaattcgcagctcacatttcagttcacaagctagttcacaatttagttcccaggtaccacaatttagttcacaagctagttcacaagctcacatttcaatggagcaatacacaggtagcagtttgacaagctattacacaagctcacatttctgggagcaatacacaggtagcagtttcacaagctatcacacaagctcacatttctgggagcaaaaaacaggtggcgtagtagcagtcgtgtgttcatcttcatttgcagcaacgacaagttcacggcttggtgcttcatcttcatttccagctacaacaacgacaagccacctgctttggcgcggactagggttgtggtcgcagcgccgccgccacctgctttggcgcggggccgcgagcagcaagggagaagacgcggagtttggagagaaggaggtgcagcgccgccgccacctgctttggcgcgggaccacgggcagcagatctccgggcagcaggggaggagactagcaggggagggaaatggagattgaagaaaatgagatggaaggaagaggcttgacgggagagagaagaaccttgaagagagaagaacggctctggacggcagaagaaaacggcgcgtgggctgatagcgacggaagatcattattcgttctcctgaacgactaataacgatgggatctggaataacaggagcctgatggttgcatcagtagagttgaccacttctcagtattgcgagatgcatcttacatggtcaagaagataattcctattctgaactacttgctcgtgttcgtgttgatcagttttgcctagtcccagtaccatacaaagatgttcaggtgaacctgaaaattcttctcaatttgac

SEQ ID NO: 70872 - DNA, 2931 bp, Zea Mays
caacttccagatcgttctcatcccatcgtttcctcctctgctcaagcacggcagccagtccagccaccatttgggtgctcatctccctctgctcggcacccagccccagctcgcccgagctccctgcgccgacctcatcctccccatggtgcgtcaccttctactcctctccttcccacggcacagcagcgcccctgcagctccccttctccagatccatggcgcccaacaccttgagcgcccctgccgctgctcctccaccgggatctcctcctccactaggcgtccaggcttgtcccaccatggctgcccctcctccatctcctccctccccaccaggttacccagattccatggccgccgccgccccagccatctccctggtggccgacctcgcccctgccccagccacagctcccccttcggccctgctgctgcaagcactcagcccctcccatggcacacgccccatctgcaacaccgtcgacccccgacgaggtcctgttctcgccctgtcgttttagtactcggcgtcgattaagtagatgctaaccgtgtgtatattcgtgtgttcttgtgaggagaaatcccatgatttgggggaagacgaagtccaagcacaacccccgccaatcgctcgatgaaaaatctaaaccaaaaccctcagcgttttcatgggttccggagggattttatgttggtaaggctttgatgattgctgtacaaggatgatatggcctcccgcccaaagctgtctggtattcagaagcaggttttggcgctgtacaggggattccttcggacagcacgccttaaggcccctgaagaacgccgcaggatcgagtctgttatcttggcagagttccgtgacaacgcaaggagtgttgaccgtaggaactttgtacacatagagtacttgttgaggagagggaagaagcagcttgagcagctcaagaatcctgatattactggactcgctacccttgtagtaaagaaatgagcaagagaagaaggaagacaagtcagacaaaacagaagacgagaagaggttcctaccataacacttaagcaaggaatcctgtacacttctctcctggggttgtgacttgtatattgtcaaggatcacttggatgtggtaaatgctatactggacactgatgatagctgcataaggattgtgcgaaaaaacgggaagacatccctacatactgctgcaaggattggataccatcgtattgtcaaggcactcatagagagggatccaggaattgttccgatcaaggataggaagggacaaactgcacttcacatggctgtgaaaggcaagaacacagatgtagtggaagagttactgatggctgatgtttccattctcaatgtgcgggacaagaagggaaatactgctttgcacatagctacatggaaatgggagaattttgggattatgaaacaccgcagacgtggcttcgacgaaacggaggcgtaggcgagggattcgacattatgaaaaaccagagaagatactacactctaaaatggacatgaatcctctattaccagggaaggatgatgtttattacactgaaacagacgctgtctcacatccgttacccgcactagacgcacccagtctttctacagagagaatcgcgccgttcttgaatctgccattcgctgaatctgccattcgctgctgttgtttctggacagtgaagcagtattccggacagtgaacaaaaatctgggaacacatttcattttcactgtcattggctaccagagtccgggaacaaaatctgggaacaaaatctgggaacacaaaaatctgggaacaaaatctgcctttggctaccagagtttattgctcccatatcattcgctgtccatttcactgtccattcgctgaacacaaaaagctgggaacaaactcattttcccagtgaacaggtagcacaatttagttcacaaaatctgggagcacaatttagttcacaaaatctgggagcaataaacaggttgaacaggtagaacaaaatctgggagcaataaactgccatcccagaacaaaattcgcagctcacatttcagttcacaagctagttcacaatttagttcccaggtaccacaatttagttcacaagctagttcacaagctcacatttcaatggagcaatacacaggtagcagtttgacaagctattacacaagctcacatttctgggagcaatacacaggtagcagtttcacaagctatcacacaagctcacatttctgggagcaaaaaacaggtggcgtagtagcagtcgtgtgttcatcttcatttgcagcaacgacaagttcacggcttggtgcttcatcttcatttccagctacaacaacgacaagccacctgctttggcgcggactagggttgtggtcgcagcgccgccgccacctgctttggcgcggggccgcgagcagcaagggagaagacgcggagtttggagagaaggaggtgcagcgccgccgccacctgctttggcgcgggaccacgggcagcagatctccgggcagcaggggaggagactagcaggggagggaaatggagattgaagaaaatgagatggaaggaagaggcttgacgggagagagaagaaccttgaagagagaagaacggctctggacggcagaagaaaacggcgcgtgggctgatagcgacggaagatcattattcgttctcctgaacgactaataacgatgggatctggaataacaggagcctgatggttgcatcagtagagttgaccacttctcagtattgcgagatgcatcttacatggtcaagaagataattcctattctgaactacttgctcgtgttgatcagttttgcctagtcccagtaccatacaaagatgttcaggtgaacctgaaaattcttctcaatttgac

SEQ ID NO: 70873 - DNA, 4281 bp, Zea Mays
caacttccagatcgttctcatcccatcgtttcctcctctgctcaagcacggcagccagtccagccaccatttgggtgctcatctccctctgctcggcacccagccccagctcgcccgagctccctgcgccgacctcatcctccccatggtgcgtcaccttctactcctctccttcccacggcacagcagcgcccctgcagctccccttctccagatccatggcgcccaacaccttgagcgcccctgccgctgctcctccaccgggatctcctcctccactaggcgtccaggcttgtcccaccatggctgcccctcctccatctcctccctccccaccaggttacccagattccatggccgccgccgccccagccatctccctggtggccgacctcgcccctgccccagccacagctcccccttcggccctgctgctgcaagcactcagcccctcccatggcacacgccccatctgcaacaccgtcgacccccgacgaggtcctgttctcgccctgtcgttttagtactcggcgtcgattaagtagatgctaaccgtgtgtatattcgtgtgttcttgtgaggagaaatcccatgatttgggggaagacgaagtccaagcacaacccccgccaatcgctcgatgaaaaatctaaaccaaaaccctcagcgttttcatgggttccggagggattttatgttggtgttgtgcggtgtgatctccaattccctattgctgatgtcttactccatcatgaccttagggaaggatgttttcctctaaattactcgtaataattatgcttggtgtatgtgttgttttagctacttgatgaaatgttttagttgtgtgcgataatatggttgccgttcgagtggaaagtagatgtgttgtatgacctgagttggagttgaagcaagtatgtgtgtctcgtattacgaaactaattagagatatgcatgatgtttgtagatggattatgtgtagagtgttttagtacaagtatttttttaggtatagttgaaccaattattgtatatgaattgtgcgatatcaaggttgttctaatgttcttttaacatcttgctaataaggtgttagagtattctaaatgccaaacataggataattttacaagccaaatagaagttaaattgaaggtattgatgtttagggctgtaggtatagttttagttatgcagctagtccaataaagtagatcatgttttctgtagaagcgttatatataaaacttgtagataatctctttatcttacttgtgtaaaaatttcatgaccataggtgtagtagtttaggagttatgatttttccaagtccagtctcagaatctgtccgaattctatacaggtttcgaaaattggattgtttggctaagctaaactgagaatcagcccttagtaattatagaagaattgtagtacttttcttaagctttccaacaaattttggagcaccctttttggtggtctagagatcaagttacagctgtttgaactatagagtctgaatctgtccaaatctggacagcgaagtctgtttgtagtaactgactttgatatgtattgaattaacctgagatgtttataaatgaattgtagacaattctattaactttctaaaaagtctaggatcaccggatttggatttcggaaactccagttctggacttttgaagtagttagtcgaattctgtccaaatctggacaaaatttatgtttagcgctgtttgacctttctaaaggtcgaatcttgttgtgatggtaatacaaaagttatagaggactttataagctttccaaaaagtcctagtttactatttttggatacatattttatgaattgtgagctaaacagatagttgttgacttgctgttctgctgtccaaacacatgtctactgtctgaaaatagctcattttgtagttacatttgcatcaggctttgatgattgctgtacaaggatgatatggcctcccgcccaaagctgtctggtattcagaagcaggttttggcgctgtacaggggattccttcggacagcacgccttaaggcccctgaagaacgccgcaggatcgagtctgttatcttggcagagttccgtgacaacgcaaggagtgttgaccgtaggaactttgtacacatagagtacttgttgaggagagggaagaagcagcttgagcagctcaagaatcctgatattactggactcgctacccttgtagtaaagaaatgagcaagagaagaaggaagacaagtcagacaaaacagaagacgagaagaggttcctaccataacacttaagcaaggaatcctgtacacttctctcctggggttgtgacttgtatattgtcaaggatcacttggatgtggtaaatgctatactggacactgatgatagctgcataaggattgtgcgaaaaaacgggaagacatccctacatactgctgcaaggattggataccatcgtattgtcaaggcactcatagagagggatccaggaattgttccgatcaaggataggaagggacaaactgcacttcacatggctgtgaaaggcaagaacacagatgtagtggaagagttactgatggctgatgtttccattctcaatgtgcgggacaagaagggaaatactgctttgcacatagctacatggaaatgggagaattttgggattatgaaacaccgcagacgtggcttcgacgaaacggaggcgtaggcgagggattcgacattatgaaaaaccagagaagatactacactctaaaatggacatgaatcctctattaccagggaaggatgatgtttattacactgaaacagacgctgtctcacatccgttacccgcactagacgcacccagtctttctacagagagaatcgcgccgttcttgaatctgccattcgctgaatctgccattcgctgctgttgtttctggacagtgaagcagtattccggacagtgaacaaaaatctgggaacacatttcattttcactgtcattggctaccagagtccgggaacaaaatctgggaacaaaatctgggaacacaaaaatctgggaacaaaatctgcctttggctaccagagtttattgctcccatatcattcgctgtccatttcactgtccattcgctgaacacaaaaagctgggaacaaactcattttcccagtgaacaggtagcacaatttagttcacaaaatctgggagcacaatttagttcacaaaatctgggagcaataaacaggttgaacaggtagaacaaaatctgggagcaataaactgccatcccagaacaaaattcgcagctcacatttcagttcacaagctagttcacaatttagttcccaggtaccacaatttagttcacaagctagttcacaagctcacatttcaatggagcaatacacaggtagcagtttgacaagctattacacaagctcacatttctgggagcaatacacaggtagcagtttcacaagctatcacacaagctcacatttctgggagcaaaaaacaggtggcgtagtagcagtcgtgtgttcatcttcatttgcagcaacgacaagttcacggcttggtgcttcatcttcatttccagctacaagtattggtgcttcatcttcatttgcagcttcgactattggtgcttctacttcatttgcagcttcgactattggtgcttctacttcatttgcagcaacgacaagccacctgctttggcgcggactagggttgtggtcgcagcgccgccgccacctgctttggcgcggggccgcgagcagcaagggagaagacgcggagtttggagagaaggaggtgcagcgccgccgccacctgctttggcgcgggaccacgggcagcagatctccgggcagcaggggaggagactagcaggggagggaaatggagattgaagaaaatgagatggaaggaagaggcttgacgggagagagaagaaccttgaagagagaagaacggctctggacggcagaagaaaacggcgcgtgggctgatagcgacggaagatcattattcgttctcctgaacgactaataacgatgggatctggaataacaggagcctgatggttgcatcagtagagttgaccacttctcagtattgcgagatgcatcttacatggtcaagaagataattcctattctgaactacttgctcgtgttcgtgttgatcagttttgcctagtcccagtaccatacaaagatgttcaggtgaacctgaaaattcttctcaatttgac

SEQ ID NO: 70874 - DNA, 2941 bp, Zea Mays
caacttccagatcgttctcatcccatcgtttcctcctctgctcaagcacggcagccagtccagccaccatttgggtgctcatctccctctgctcggcacccagccccagctcgcccgagctccctgcgccgacctcatcctccccatggtgcgtcaccttctactcctctccttcccacggcacagcagcgcccctgcagctccccttctccagatccatggcgcccaacaccttgagcgcccctgccgctgctcctccaccgggatctcctcctccactaggcgtccaggcttgtcccaccatggctgcccctcctccatctcctccctccccaccaggttacccagattccatggccgccgccgccccagccatctccctggtggccgacctcgcccctgccccagccacagctcccccttcggccctgctgctgcaagcactcagcccctcccatggcacacgccccatctgcaacaccgtcgacccccgacgaggtcctgttctcgccctgtcgttttagtactcggcgtcgattaagtagatgctaaccgtgtgtatattcgtgtgttcttgtgaggagaaatcccatgatttgggggaagacgaagtccaagcacaacccccgccaatcgctcgatgaaaaatctaaaccaaaaccctcagcgttttcatgggttccggagggattttatgttgttacatttgcatcaggctttgatgattgctgtacaaggatgatatggcctcccgcccaaagctgtctggtattcagaagcaggttttggcgctgtacaggggattccttcggacagcacgccttaaggcccctgaagaacgccgcaggatcgagtctgttatcttggcagagttccgtgacaacgcaaggagtgttgaccgtaggaactttgtacacatagagtacttgttgaggagagggaagaagcagcttgagcagctcaagaatcctgatattactggactcgctacccttgtagtaaagaaatgagcaagagaagaaggaagacaagtcagacaaaacagaagacgagaagaggttcctaccataacacttaagcaaggaatcctgtacacttctctcctggggttgtgacttgtatattgtcaaggatcacttggatgtggtaaatgctatactggacactgatgatagctgcataaggattgtgcgaaaaaacgggaagacatccctacatactgctgcaaggattggataccatcgtattgtcaaggcactcatagagagggatccaggaattgttccgatcaaggataggaagggacaaactgcacttcacatggctgtgaaaggcaagaacacagatgtagtggaagagttactgatggctgatgtttccattctcaatgtgcgggacaagaagggaaatactgctttgcacatagctacatggaaatgggagaattttgggattatgaaacaccgcagacgtggcttcgacgaaacggaggcgtaggcgagggattcgacattatgaaaaaccagagaagatactacactctaaaatggacatgaatcctctattaccagggaaggatgatgtttattacactgaaacagacgctgtctcacatccgttacccgcactagacgcacccagtctttctacagagagaatcgcgccgttcttgaatctgccattcgctgaatctgccattcgctgctgttgtttctggacagtgaagcagtattccggacagtgaacaaaaatctgggaacacatttcattttcactgtcattggctaccagagtccgggaacaaaatctgggaacaaaatctgggaacacaaaaatctgggaacaaaatctgcctttggctaccagagtttattgctcccatatcattcgctgtccatttcactgtccattcgctgaacacaaaaagctgggaacaaactcattttcccagtgaacaggtagcacaatttagttcacaaaatctgggagcacaatttagttcacaaaatctgggagcaataaacaggttgaacaggtagaacaaaatctgggagcaataaactgccatcccagaacaaaattcgcagctcacatttcagttcacaagctagttcacaatttagttcccaggtaccacaatttagttcacaagctagttcacaagctcacatttcaatggagcaatacacaggtagcagtttgacaagctattacacaagctcacatttctgggagcaatacacaggtagcagtttcacaagctatcacacaagctcacatttctgggagcaaaaaacaggtggcgtagtagcagtcgtgtgttcatcttcatttgcagcaacgacaagttcacggcttggtgcttcatcttcatttccagctacaacaacgacaagccacctgctttggcgcggactagggttgtggtcgcagcgccgccgccacctgctttggcgcggggccgcgagcagcaagggagaagacgcggagtttggagagaaggaggtgcagcgccgccgccacctgctttggcgcgggaccacgggcagcagatctccgggcagcaggggaggagactagcaggggagggaaatggagattgaagaaaatgagatggaaggaagaggcttgacgggagagagaagaaccttgaagagagaagaacggctctggacggcagaagaaaacggcgcgtgggctgatagcgacggaagatcattattcgttctcctgaacgactaataacgatgggatctggaataacaggagcctgatggttgcatcagtagagttgaccacttctcagtattgcgagatgcatcttacatggtcaagaagataattcctattctgaactacttgctcgtgttgatcagttttgcctagtcccagtaccatacaaagatgttcaggtgaacctgaaaattcttctcaatttgac

SEQ ID NO: 70875 - DNA, 3014 bp, Zea Mays
caacttccagatcgttctcatcccatcgtttcctcctctgctcaagcacggcagccagtccagccaccatttgggtgctcatctccctctgctcggcacccagccccagctcgcccgagctccctgcgccgacctcatcctccccatggtgcgtcaccttctactcctctccttcccacggcacagcagcgcccctgcagctccccttctccagatccatggcgcccaacaccttgagcgcccctgccgctgctcctccaccgggatctcctcctccactaggcgtccaggcttgtcccaccatggctgcccctcctccatctcctccctccccaccaggttacccagattccatggccgccgccgccccagccatctccctggtggccgacctcgcccctgccccagccacagctcccccttcggccctgctgctgcaagcactcagcccctcccatggcacacggtactcgtccagcccctttctactggtggctgacccatctctatggtgctcgacgaaatgaccatgaggagttttgtgttgtgtgcagccccatctgcaacaccgtcgacccccgacgaggtcctgttctcgccctgtcgttttagtactcggcgtcgattaagtagatgctaaccgtgtgtatattcgtgtgttcttgtgaggagaaatcccatgatttgggggaagacgaagtccaagcacaacccccgccaatcgctcgatgaaaaatctaaaccaaaaccctcagcgttttcatgggttccggagggattttatgttggctttgatgattgctgtacaaggatgatatggcctcccgcccaaagctgtctggtattcagaagcaggttttggcgctgtacaggggattccttcggacagcacgccttaaggcccctgaagaacgccgcaggatcgagtctgttatcttggcagagttccgtgacaacgcaaggagtgttgaccgtaggaactttgtacacatagagtacttgttgaggagagggaagaagcagcttgagcagctcaagaatcctgatattactggactcgctacccttgtagtaaagaaatgagcaagagaagaaggaagacaagtcagacaaaacagaagacgagaagaggttcctaccataacacttaagcaaggaatcctgtacacttctctcctggggttgtgacttgtatattgtcaaggatcacttggatgtggtaaatgctatactggacactgatgatagctgcataaggattgtgcgaaaaaacgggaagacatccctacatactgctgcaaggattggataccatcgtattgtcaaggcactcatagagagggatccaggaattgttccgatcaaggataggaagggacaaactgcacttcacatggctgtgaaaggcaagaacacagatgtagtggaagagttactgatggctgatgtttccattctcaatgtgcgggacaagaagggaaatactgctttgcacatagctacatggaaatgggagaattttgggattatgaaacaccgcagacgtggcttcgacgaaacggaggcgtaggcgagggattcgacattatgaaaaaccagagaagatactacactctaaaatggacatgaatcctctattaccagggaaggatgatgtttattacactgaaacagacgctgtctcacatccgttacccgcactagacgcacccagtctttctacagagagaatcgcgccgttcttgaatctgccattcgctgaatctgccattcgctgctgttgtttctggacagtgaagcagtattccggacagtgaacaaaaatctgggaacacatttcattttcactgtcattggctaccagagtccgggaacaaaatctgggaacaaaatctgggaacacaaaaatctgggaacaaaatctgcctttggctaccagagtttattgctcccatatcattcgctgtccatttcactgtccattcgctgaacacaaaaagctgggaacaaactcattttcccagtgaacaggtagcacaatttagttcacaaaatctgggagcacaatttagttcacaaaatctgggagcaataaacaggttgaacaggtagaacaaaatctgggagcaataaactgccatcccagaacaaaattcgcagctcacatttcagttcacaagctagttcacaatttagttcccaggtaccacaatttagttcacaagctagttcacaagctcacatttcaatggagcaatacacaggtagcagtttgacaagctattacacaagctcacatttctgggagcaatacacaggtagcagtttcacaagctatcacacaagctcacatttctgggagcaaaaaacaggtggcgtagtagcagtcgtgtgttcatcttcatttgcagcaacgacaagttcacggcttggtgcttcatcttcatttccagctacaacaacgacaagccacctgctttggcgcggactagggttgtggtcgcagcgccgccgccacctgctttggcgcggggccgcgagcagcaagggagaagacgcggagtttggagagaaggaggtgcagcgccgccgccacctgctttggcgcgggaccacgggcagcagatctccgggcagcaggggaggagactagcaggggagggaaatggagattgaagaaaatgagatggaaggaagaggcttgacgggagagagaagaaccttgaagagagaagaacggctctggacggcagaagaaaacggcgcgtgggctgatagcgacggaagatcattattcgttctcctgaacgactaataacgatgggatctggaataacaggagcctgatggttgcatcagtagagttgaccacttctcagtattgcgagatgcatcttacatggtcaagaagataattcctattctgaactacttgctcgtgttgatcagttttgcctagtcccagtaccatacaaagatgttcaggtgaacctgaaaattcttctcaatttgac

SEQ ID NO: 70876 - DNA, 4420 bp, Zea Mays
caacttccagatcgttctcatcccatcgtttcctcctctgctcaagcacggcagccagtccagccaccatttgggtgctcatctccctctgctcggcacccagccccagctcgcccgagctccctgcgccgacctcatcctccccatggtgcgtcaccttctactcctctccttcccacggcacagcagcgcccctgcagctccccttctccagatccatggcgcccaacaccttgagcgcccctgccgctgctcctccaccgggatctcctcctccactaggcgtccaggcttgtcccaccatggctgcccctcctccatctcctccctccccaccaggttacccagattccatggccgccgccgccccagccatctccctggtggccgacctcgcccctgccccagccacagctcccccttcggccctgctgctgcaagcactcagcccctcccatggcacacgccccatctgcaacaccgtcgacccccgacgaggtcctgttctcgccctgtcgttttagtactcggcgtcgattaagtagatgctaaccgtgtgtatattcgtgtgttcttgtgaggagaaatcccatgatttgggggaagacgaagtccaagcacaacccccgccaatcgctcgatgaaaaatctaaaccaaaaccctcagcgttttcatgggttccggagggattttatgttggtaaggtgttgtgcggtgtgatctccaattccctattgctgatgtcttactccatcatgaccttagggaaggatgttttcctctaaattactcgtaataattatgcttggtgtatgtgttgttttagctacttgatgaaatgttttagttgtgtgcgataatatggttgccgttcgagtggaaagtagatgtgttgtatgacctgagttggagttgaagcaagtatgtgtgtctcgtattacgaaactaattagagatatgcatgatgtttgtagatggattatgtgtagagtgttttagtacaagtatttttttaggtatagttgaaccaattattgtatatgaattgtgcgatatcaaggttgttctaatgttcttttaacatcttgctaataaggtgttagagtattctaaatgccaaacataggataattttacaagccaaatagaagttaaattgaaggtattgatgtttagggctgtaggtatagttttagttatgcagctagtccaataaagtagatcatgttttctgtagaagcgttatatataaaacttgtagataatctctttatcttacttgtgtaaaaatttcatgaccataggtgtagtagtttaggagttatgatttttccaagtccagtctcagaatctgtccgaattctatacaggtttcgaaaattggattgtttggctaagctaaactgagaatcagcccttagtaattatagaagaattgtagtacttttcttaagctttccaacaaattttggagcaccctttttggtggtctagagatcaagttacagctgtttgaactatagagtctgaatctgtccaaatctggacagcgaagtctgtttgtagtaactgactttgatatgtattgaattaacctgagatgtttataaatgaattgtagacaattctattaactttctaaaaagtctaggatcaccggatttggatttcggaaactccagttctggacttttgaagtagttagtcgaattctgtccaaatctggacaaaatttatgtttagcgctgtttgacctttctaaaggtcgaatcttgttgtgatggtaatacaaaagttatagaggactttataagctttccaaaaagtcctagtttactatttttggatacatattttatgaattgtgagctaaacagatagttgttgacttgctgttctgctgtccaaacacatgtctactgtctgaaaatagctcattttgtagttacatttgcatcaggctttgatgattgctgtacaaggatgatatggcctcccgcccaaagctgtctggtattcagaagcaggttttggcgctgtacaggggattccttcggacagcacgccttaaggcccctgaagaacgccgcaggatcgagtctgttatcttggcagagttccgtgacaacgcaaggagtgttgaccgtaggaactttgtacacatagagtacttgttgaggagagggaagaagcagcttgagcagctcaagaatcctgatattactggactcgctacccttgtagtaaagaaatgaggggttgtgacttgtatattgtcaaggatcacttggatgtggtaaatgctatactggacactgatgatagctgcataaggattgtgcgaaaaaacgggaagacatccctacatactgctgcaaggattggataccatcgtattgtcaaggcactcatagagagggatccaggaattgttccgatcaaggataggaagggacaaactgcacttcacatggctgtgaaaggcaagaacacagatgtagtggaagagttactgatggctgatgtttccattctcaatgtgcgggacaagaagggaaatactgctttgcacatagctacatggaaatgggagaattttgggattatgaaacaccgcagacgtggcttcgacgaaacggaggcgtaggcgagggattcgacattatgaaaaaccagagaagatactacactctaaaatggacatgaatcctctattaccagggaaggatgatgtttattacactgaaacagacgctgtctcacatccgttacccgcactagacgcacccagtctttctacagagagaatcgcgccgttcttgaatctgccattcgctgaatctgccattcgctgctgttgtttctggacagtgaagcagtattccggacagtgaacaaaaatctgggaacacatttcattttcactgtcattggctaccagagtccgggaacaaaatctgggaacaaaatctgggaacacaaaaatctgggaacaaaatctgcctttggctaccagagtttattgctcccatatcattcgctgtccatttcactgtccattcgctgaacacaaaaagctgggaacaaactcattttcccagtgaacaggtagcacaatttagttcacaaaatctgggagcacaatttagttcacaaaatctgggagcaataaacaggttgaacaggtagaacaaaatctgggagcaataaactgccatcccagaacaaaattcgcagctcacatttcagttcacaagctagttcacaatttagttcccaggtaccacaatttagttcacaagctagttcacaagctcacatttcaatggagcaatacacaggtagcagtttgacaagctattacacaagctcacatttctgggagcaatacacaggtagcagtttcacaagctatcacacaagctcacatttctgggagcaaaaaacaggtggcgtagtagcagtcgtgtgttcatcttcatttgcagcaacgacaagttcacggcttggtgcttcatcttcatttccagctacaacaacgacaagccacctgctttggcgcggactagggttgtggtcgcagcgccgccgccacctgctttggcgcggggccgcgagcagcaagggagaagacgcggagtttggagagaaggaggtgcagcgccgccgccacctgctttggcgcgggaccacgggcagcagatctccgggcagcaggggaggagactagcaggggagggaaatggagattgaagaaaatgagatggaaggaagaggcttgacgggagagagaagaaccttgaagagagaagaacggctctggacggcagaagaaaacggcgcgtgggctgatagcgacggaagatcattattcgttctcctgaacgactaataacgatgggatctggaataacaggagcctgatggttgcatcagtagagttgaccacttctcagtattgcgagatgcatcttacatggtcaagaagataattcctattctgaactacttgctcgtgttcgtgtacaagtctccttatcatgtcctcctttcaagccagtctattctttgcttgattcatcacgggtgcacattattgtaattagaatcttcagagtactcgaaggatagttaaagctgtttggctagtccttcagattactaaaaatatagttaagaacatttgtattttgctatttcgatttccaacagtacaactattggggatgattgcttttctttataaaagcaatcaagtaatttcttagctaagttctagctataagttctgcatgacatgctattgcccatgataattctgacaggattgcttcaactctttcaggttgatcagttttgcctagtcccagtaccatacaaagatgttcaggtgaacctgaaaattcttctcaatttgac

SEQ ID NO: 70877 - DNA, 2950 bp, Zea Mays
caacttccagatcgttctcatcccatcgtttcctcctctgctcaagcacggcagccagtccagccaccatttgggtgctcatctccctctgctcggcacccagccccagctcgcccgagctccctgcgccgacctcatcctccccatggtgcgtcaccttctactcctctccttcccacggcacagcagcgcccctgcagctccccttctccagatccatggcgcccaacaccttgagcgcccctgccgctgctcctccaccgggatctcctcctccactaggcgtccaggcttgtcccaccatggctgcccctcctccatctcctccctccccaccaggttacccagattccatggccgccgccgccccagccatctccctggtggccgacctcgcccctgccccagccacagctcccccttcggccctgctgctgcaagcactcagcccctcccatggcacacgccccatctgcaacaccgtcgacccccgacgaggtcctgttctcgccctgtcgttttagtactcggcgtcgattaagtagatgctaaccgtgtgtatattcgtgtgttcttgtgaggagaaatcccatgatttgggggaagacgaagtccaagcacaacccccgccaatcgctcgatgaaaaatctaaaccaaaaccctcagcgttttcatgggttccggagggattttatgttggtgttgtgcggtgtgatctccaattccctattgctgatgtcttactccatcatgaccttagggctttgatgattgctgtacaaggatgatatggcctcccgcccaaagctgtctggtattcagaagcaggttttggcgctgtacaggggattccttcggacagcacgccttaaggcccctgaagaacgccgcaggatcgagtctgttatcttggcagagttccgtgacaacgcaaggagtgttgaccgtaggaactttgtacacatagagtacttgttgaggagagggaagaagcagcttgagcagctcaagaatcctgatattactggactcgctacccttgtagtaaagaaatgagcaagagaagaaggaagacaagtcagacaaaacagaagacgagaagaggttcctaccataacacttaagcaaggaatcctgtacacttctctcctggggttgtgacttgtatattgtcaaggatcacttggatgtggtaaatgctatactggacactgatgatagctgcataaggattgtgcgaaaaaacgggaagacatccctacatactgctgcaaggattggataccatcgtattgtcaaggcactcatagagagggatccaggaattgttccgatcaaggataggaagggacaaactgcacttcacatggctgtgaaaggcaagaacacagatgtagtggaagagttactgatggctgatgtttccattctcaatgtgcgggacaagaagggaaatactgctttgcacatagctacatggaaatgggagaattttgggattatgaaacaccgcagacgtggcttcgacgaaacggaggcgtaggcgagggattcgacattatgaaaaaccagagaagatactacactctaaaatggacatgaatcctctattaccagggaaggatgatgtttattacactgaaacagacgctgtctcacatccgttacccgcactagacgcacccagtctttctacagagagaatcgcgccgttcttgaatctgccattcgctgaatctgccattcgctgctgttgtttctggacagtgaagcagtattccggacagtgaacaaaaatctgggaacacatttcattttcactgtcattggctaccagagtccgggaacaaaatctgggaacaaaatctgggaacacaaaaatctgggaacaaaatctgcctttggctaccagagtttattgctcccatatcattcgctgtccatttcactgtccattcgctgaacacaaaaagctgggaacaaactcattttcccagtgaacaggtagcacaatttagttcacaaaatctgggagcacaatttagttcacaaaatctgggagcaataaacaggttgaacaggtagaacaaaatctgggagcaataaactgccatcccagaacaaaattcgcagctcacatttcagttcacaagctagttcacaatttagttcccaggtaccacaatttagttcacaagctagttcacaagctcacatttcaatggagcaatacacaggtagcagtttgacaagctattacacaagctcacatttctgggagcaatacacaggtagcagtttcacaagctatcacacaagctcacatttctgggagcaaaaaacaggtggcgtagtagcagtcgtgtgttcatcttcatttgcagcaacgacaagttcacggcttggtgcttcatcttcatttccagctacaacaacgacaagccacctgctttggcgcggactagggttgtggtcgcagcgccgccgccacctgctttggcgcggggccgcgagcagcaagggagaagacgcggagtttggagagaaggaggtgcagcgccgccgccacctgctttggcgcgggaccacgggcagcagatctccgggcagcaggggaggagactagcaggggagggaaatggagattgaagaaaatgagatggaaggaagaggcttgacgggagagagaagaaccttgaagagagaagaacggctctggacggcagaagaaaacggcgcgtgggctgatagcgacggaagatcattattcgttctcctgaacgactaataacgatgggatctggaataacaggagcctgatggttgcatcagtagagttgaccacttctcagtattgcgagatgcatcttacatggttgatcagttttgcctagtcccagtaccatacaaagatgttcaggtgaacctgaaaattcttctcaatttgac

SEQ ID NO: 70878 - DNA, 3204 bp, Zea Mays
caacttccagatcgttctcatcccatcgtttcctcctctgctcaagcacggcagccagtccagccaccatttgggtgctcatctccctctgctcggcacccagccccagctcgcccgagctccctgcgccgacctcatcctccccatggtgcgtcaccttctactcctctccttcccacggcacagcagcgcccctgcagctccccttctccagatccatggcgcccaacaccttgagcgcccctgccgctgctcctccaccgggatctcctcctccactaggcgtccaggcttgtcccaccatggctgcccctcctccatctcctccctccccaccaggttacccagattccatggccgccgccgccccagccatctccctggtggccgacctcgcccctgccccagccacagctcccccttcggccctgctgctgcaagcactcagcccctcccatggcacacggtactcgtccagcccctttctactggtggctgacccatctctatggtgctcgacgaaatgaccatgaggagttttgtgttgtgtgcagccccatctgcaacaccgtcgacccccgacgaggtcctgttctcgccctgtcgttttagtactcggcgtcgattaagtagatgctaaccgtgtgtatattcgtgtgttcttgtgaggagaaatcccatgatttgggggaagacgaagtccaagcacaacccccgccaatcgctcgatgaaaaatctaaaccaaaaccctcagcgttttcatgggttccggagggattttatgttggctttgatgattgctgtacaaggatgatatggcctcccgcccaaagctgtctggtattcagaagcaggttttggcgctgtacaggggattccttcggacagcacgccttaaggcccctgaagaacgccgcaggatcgagtctgttatcttggcagagttccgtgacaacgcaaggagtgttgaccgtaggaactttgtacacatagagtacttgttgaggagagggaagaagcagcttgagcagctcaagaatcctgatattactggactcgctacccttgtagtaaagaaatgagcaagagaagaaggaagacaagtcagacaaaacagaagacgagaagaggttcctaccataacacttaagcaaggaatcctgtacacttctctcctggggttgtgacttgtatattgtcaaggatcacttggatgtggtaaatgctatactggacactgatgatagctgcataaggattgtgcgaaaaaacgggaagacatccctacatactgctgcaaggattggataccatcgtattgtcaaggcactcatagagagggatccaggaattgttccgatcaaggataggaagggacaaactgcacttcacatggctgtgaaaggcaagaacacagatgtagtggaagagttactgatggctgatgtttccattctcaatgtgcgggacaagaagggaaatactgctttgcacatagctacatggaaatgggagaattttgggattatgaaacaccgcagacgtggcttcgacgaaacggaggcgtaggcgagggattcgacattatgaaaaaccagagaagatactacactctaaaatggacatgaatcctctattaccagggaaggatgatgtttattacactgaaacagacgctgtctcacatccgttacccgcactagacgcacccagtctttctacagagagaatcgcgccgttcttgaatctgccattcgctgaatctgccattcgctgctgttgtttctggacagtgaagcagtattccggacagtgaacaaaaatctgggaacacatttcattttcactgtcattggctaccagagtccgggaacaaaatctgggaacaaaatctgggaacacaaaaatctgggaacaaaatctgcctttggctaccagagtttattgctcccatatcattcgctgtccatttcactgtccattcgctgaacacaaaaagctgggaacaaactcattttcccagtgaacaggtagcacaatttagttcacaaaatctgggagcacaatttagttcacaaaatctgggagcaataaacaggttgaacaggtagaacaaaatctgggagcaataaactgccatcccagaacaaaattcgcagctcacatttcagttcacaagctagttcacaatttagttcccaggtaccacaatttagttcacaagctagttcacaagctcacatttcaatggagcaatacacaggtagcagtttgacaagctattacacaagctcacatttctgggagcaatacacaggtagcagtttcacaagctatcacacaagctcacatttctgggagcaaaaaacaggtagcagtttcacaagctcacatttcagatctatggtttttcagtttctttctaggggtaattttcttaactacccatttgacacttctaggtggcgtagtagcagtcgtgtgttcatcttcatttgcagcaacgacaagttcacggcttggtgcttcatcttcatttccagctacaagtattggtgcttcatcttcatttgcagcttcgactattggtgcttctacttcatttgcagcttcgactattggtgcttctacttcatttgcagcaacgacaagccacctgctttggcgcggactagggttgtggtcgcagcgccgccgccacctgctttggcgcggggccgcgagcagcaagggagaagacgcggagtttggagagaaggaggtgcagcgccgccgccacctgctttggcgcgggaccacgggcagcagatctccgggcagcaggggaggagactagcaggggagggaaatggagattgaagaaaatgagatggaaggaagaggcttgacgggagagagaagaaccttgaagagagaagaacggctctggacggcagaagaaaacggcgcgtgggctgatagcgacggaagatcattattcgttctcctgaacgactaataacgatgggatctggaataacaggagcctgatggttgcatcagtagagttgaccacttctcagtattgcgagatgcatcttacatggtcaagaagataattcctattctgaactacttgctcgtgttcgtgttgatcagttttgcctagtcccagtaccatacaaagatgttcaggtgaacctgaaaattcttctcaatttgac

SEQ ID NO: 70879 - DNA, 3347 bp, Zea Mays
caacttccagatcgttctcatcccatcgtttcctcctctgctcaagcacggcagccagtccagccaccatttgggtgctcatctccctctgctcggcacccagccccagctcgcccgagctccctgcgccgacctcatcctccccatggtgcgtcaccttctactcctctccttcccacggcacagcagcgcccctgcagctccccttctccagatccatggcgcccaacaccttgagcgcccctgccgctgctcctccaccgggatctcctcctccactaggcgtccaggcttgtcccaccatggctgcccctcctccatctcctccctccccaccaggttacccagattccatggccgccgccgccccagccatctccctggtggccgacctcgcccctgccccagccacagctcccccttcggccctgctgctgcaagcactcagcccctcccatggcacacggtactcgtccagcccctttctactggtggctgacccatctctatggtgctcgacgaaatgaccatgaggagttttgtgttgtgtgcagccccatctgcaacaccgtcgacccccgacgaggtcctgttctcgccctgtcgttttagtactcggcgtcgattaagtagatgctaaccgtgtgtatattcgtgtgttcttgtgaggagaaatcccatgatttgggggaagacgaagtccaagcacaacccccgccaatcgctcgatgaaaaatctaaaccaaaaccctcagcgttttcatgggttccggagggattttatgttggtaaggctttgatgattgctgtacaaggatgatatggcctcccgcccaaagctgtctggtattcagaagcaggttttggcgctgtacaggggattccttcggacagcacgccttaaggcccctgaagaacgccgcaggatcgagtctgttatcttggcagagttccgtgacaacgcaaggagtgttgaccgtaggaactttgtacacatagagtacttgttgaggagagggaagaagcagcttgagcagctcaagaatcctgatattactggactcgctacccttgtagtaaagaaatgagcaagagaagaaggaagacaagtcagacaaaacagaagacgagaagaggttcctaccataacacttaagcaaggaatcctgtacacttctctcctggggttgtgacttgtatattgtcaaggatcacttggatgtggtaaatgctatactggacactgatgatagctgcataaggattgtgcgaaaaaacgggaagacatccctacatactgctgcaaggattggataccatcgtattgtcaaggcactcatagagagggatccaggaattgttccgatcaaggataggaagggacaaactgcacttcacatggctgtgaaaggcaagaacacagatgtagtggaagagttactgatggctgatgtttccattctcaatgtgcgggacaagaagggaaatactgctttgcacatagctacatggaaatgggagaattttgggattatgaaacaccgcagacgtggcttcgacgaaacggaggcgtaggcgagggattcgacattatgaaaaaccagagaagatactacactctaaaatggacatgaatcctctattaccagggaaggatgatgtttattacactgaaacagacgctgtctcacatccgttacccgcactagacgcacccagtctttctacagagagaatcgcgccgttcttgaatctgccattcgctgaatctgccattcgctgctgttgtttctggacagtgaagcagtattccggacagtgaacaaaaatctgggaacacatttcattttcactgtcattggctaccagagtccgggaacaaaatctgggaacaaaatctgggaacacaaaaatctgggaacaaaatctgcctttggctaccagagtttattgctcccatatcattcgctgtccatttcactgtccattcgctgaacacaaaaagctgggaacaaactcattttcccagtgaacaggtagcacaatttagttcacaaaatctgggagcacaatttagttcacaaaatctgggagcaataaacaggttgaacaggtagaacaaaatctgggagcaataaactgccatcccagaacaaaattcgcagctcacatttcagttcacaagctagttcacaatttagttcccaggtaccacaatttagttcacaagctagttcacaagctcacatttcaatggagcaatacacaggtagcagtttgacaagctattacacaagctcacatttctgggagcaatacacaggtagcagtttcacaagctatcacacaagctcacatttctgggagcaaaaaacaggtggcgtagtagcagtcgtgtgttcatcttcatttgcagcaacgacaagttcacggcttggtgcttcatcttcatttccagctacaacaacgacaagccacctgctttggcgcggactagggttgtggtcgcagcgccgccgccacctgctttggcgcggggccgcgagcagcaagggagaagacgcggagtttggagagaaggaggtgcagcgccgccgccacctgctttggcgcgggaccacgggcagcagatctccgggcagcaggggaggagactagcaggggagggaaatggagattgaagaaaatgagatggaaggaagaggcttgacgggagagagaagaaccttgaagagagaagaacggctctggacggcagaagaaaacggcgcgtgggctgatagcgacggaagatcattattcgttctcctgaacgactaataacgatgggatctggaataacaggagcctgatggttgcatcagtagagttgaccacttctcagtattgcgagatgcatcttacatggtcaagaagataattcctattctgaactacttgctcgtgttcgtgtacaagtctccttatcatgtcctcctttcaagccagtctattctttgcttgattcatcacgggtgcacattattgtaattagaatcttcagagtactcgaaggatagttaaagctgtttggctagtccttcagattactaaaaatatagttaagaacatttgtattttgctatttcgatttccaacagtacaactattggggatgattgcttttctttataaaagcaatcaagtaatttcttagctaagttctagctataagttctgcatgacatgctattgcccatgataattctgacaggattgcttcaactctttcaggttgatcagttttgcctagtcccagtaccatacaaagatgttcaggtgaacctgaaaattcttctcaatttgac

SEQ ID NO: 70880 - DNA, 3178 bp, Zea Mays
caacttccagatcgttctcatcccatcgtttcctcctctgctcaagcacggcagccagtccagccaccatttgggtgctcatctccctctgctcggcacccagccccagctcgcccgagctccctgcgccgacctcatcctccccatggtgcgtcaccttctactcctctccttcccacggcacagcagcgcccctgcagctccccttctccagatccatggcgcccaacaccttgagcgcccctgccgctgctcctccaccgggatctcctcctccactaggcgtccaggcttgtcccaccatggctgcccctcctccatctcctccctccccaccaggttacccagattccatggccgccgccgccccagccatctccctggtggccgacctcgcccctgccccagccacagctcccccttcggccctgctgctgcaagcactcagcccctcccatggcacacgccccatctgcaacaccgtcgacccccgacgaggtcctgttctcgccctgtcgttttagtactcggcgtcgattaagtagatgctaaccgtgtgtatattcgtgtgttcttgtgaggagaaatcccatgatttgggggaagacgaagtccaagcacaacccccgccaatcgctcgatgaaaaatctaaaccaaaaccctcagcgttttcatgggttccggagggattttatgttggtgttgtgcggtgtgatctccaattccctattgctgatgtcttactccatcatgaccttagggctttgatgattgctgtacaaggatgatatggcctcccgcccaaagctgtctggtattcagaagcaggttttggcgctgtacaggggattccttcggacagcacgccttaaggcccctgaagaacgccgcaggatcgagtctgttatcttggcagagttccgtgacaacgcaaggagtgttgaccgtaggaactttgtacacatagagtacttgttgaggagagggaagaagcagcttgagcagctcaagaatcctgatattactggactcgctacccttgtagtaaagaaatgagcaagagaagaaggaagacaagtcagacaaaacagaagacgagaagaggttcctaccataacacttaagcaaggaatcctgtacacttctctcctggggttgtgacttgtatattgtcaaggatcacttggatgtggtaaatgctatactggacactgatgatagctgcataaggattgtgcgaaaaaacgggaagacatccctacatactgctgcaaggattggataccatcgtattgtcaaggcactcatagagagggatccaggaattgttccgatcaaggataggaagggacaaactgcacttcacatggctgtgaaaggcaagaacacagatgtagtggaagagttactgatggctgatgtttccattctcaatgtgcgggacaagaagggaaatactgctttgcacatagctacatggaaatgggagaattttgggattatgaaacaccgcagacgtggcttcgacgaaacggaggcgtaggcgagggattcgacattatgaaaaaccagagaagatactacactctaaaatggacatgaatcctctattaccagggaaggatgatgtttattacactgaaacagacgctgtctcacatccgttacccgcactagacgcacccagtctttctacagagagaatcgcgccgttcttgaatctgccattcgctgaatctgccattcgctgctgttgtttctggacagtgaagcagtattccggacagtgaacaaaaatctgggaacacatttcattttcactgtcattggctaccagagtccgggaacaaaatctgggaacaaaatctgggaacacaaaaatctgggaacaaaatctgcctttggctaccagagtttattgctcccatatcattcgctgtccatttcactgtccattcgctgaacacaaaaagctgggaacaaactcattttcccagtgaacaggtagcacaatttagttcacaaaatctgggagcacaatttagttcacaaaatctgggagcaataaacaggttgaacaggtagaacaaaatctgggagcaataaactgccatcccagaacaaaattcgcagctcacatttcagttcacaagctagttcacaatttagttcccaggtaccacaatttagttcacaagctagttcacaagctcacatttcaatggagcaatacacaggtagcagtttgacaagctattacacaagctcacatttctgggagcaatacacaggtagcagtttcacaagctatcacacaagctcacatttctgggagcaaaaaacaggtagcagtttcacaagctcacatttcagatctatggtttttcagtttctttctaggggtaattttcttaactacccatttgacacttctaggtggcgtagtagcagtcgtgtgttcatcttcatttgcagcaacgacaagttcacggcttggtgcttcatcttcatttccagctacaagtattggtgcttcatcttcatttgcagcttcgactattggtgcttctacttcatttgcagcttcgactattggtgcttctacttcatttgcagcaacgacaagccacctgctttggcgcggactagggttgtggtcgcagcgccgccgccacctgctttggcgcggggccgcgagcagcaagggagaagacgcggagtttggagagaaggaggtgcagcgccgccgccacctgctttggcgcgggaccacgggcagcagatctccgggcagcaggggaggagactagcaggggagggaaatggagattgaagaaaatgagatggaaggaagaggcttgacgggagagagaagaaccttgaagagagaagaacggctctggacggcagaagaaaacggcgcgtgggctgatagcgacggaagatcattattcgttctcctgaacgactaataacgatgggatctggaataacaggagcctgatggttgcatcagtagagttgaccacttctcagtattgcgagatgcatcttacatggtcaagaagataattcctattctgaactacttgctcgtgttcgtgttgatcagttttgcctagtcccagtaccatacaaagatgttcaggtgaacctgaaaattcttctcaatttgac

SEQ ID NO: 70881 - DNA, 2966 bp, Zea Mays
caacttccagatcgttctcatcccatcgtttcctcctctgctcaagcacggcagccagtccagccaccatttgggtgctcatctccctctgctcggcacccagccccagctcgcccgagctccctgcgccgacctcatcctccccatggtgcgtcaccttctactcctctccttcccacggcacagcagcgcccctgcagctccccttctccagatccatggcgcccaacaccttgagcgcccctgccgctgctcctccaccgggatctcctcctccactaggcgtccaggcttgtcccaccatggctgcccctcctccatctcctccctccccaccaggttacccagattccatggccgccgccgccccagccatctccctggtggccgacctcgcccctgccccagccacagctcccccttcggccctgctgctgcaagcactcagcccctcccatggcacacggagaaatcccatgatttgggggaagacgaagtccaagcacaacccccgccaatcgctcgatgaaaaatctaaaccaaaaccctcagcgttttcatgggttccggagggattttatgttggtgttgtgcggtgtgatctccaattccctattgctgatgtcttactccatcatgaccttagggctttgatgattgctgtacaaggatgatatggcctcccgcccaaagctgtctggtattcagaagcaggttttggcgctgtacaggggattccttcggacagcacgccttaaggcccctgaagaacgccgcaggatcgagtctgttatcttggcagagttccgtgacaacgcaaggagtgttgaccgtaggaactttgtacacatagagtacttgttgaggagagggaagaagcagcttgagcagctcaagaatcctgatattactggactcgctacccttgtagtaaagaaatgagcaagagaagaaggaagacaagtcagacaaaacagaagacgagaagaggttcctaccataacacttaagcaaggaatcctgtacacttctctcctggggttgtgacttgtatattgtcaaggatcacttggatgtggtaaatgctatactggacactgatgatagctgcataaggattgtgcgaaaaaacgggaagacatccctacatactgctgcaaggattggataccatcgtattgtcaaggcactcatagagagggatccaggaattgttccgatcaaggataggaagggacaaactgcacttcacatggctgtgaaaggcaagaacacagatgtagtggaagagttactgatggctgatgtttccattctcaatgtgcgggacaagaagggaaatactgctttgcacatagctacatggaaatgggagaattttgggattatgaaacaccgcagacgtggcttcgacgaaacggaggcgtaggcgagggattcgacattatgaaaaaccagagaagatactacactctaaaatggacatgaatcctctattaccagggaaggatgatgtttattacactgaaacagacgctgtctcacatccgttacccgcactagacgcacccagtctttctacagagagaatcgcgccgttcttgaatctgccattcgctgaatctgccattcgctgctgttgtttctggacagtgaagcagtattccggacagtgaacaaaaatctgggaacacatttcattttcactgtcattggctaccagagtccgggaacaaaatctgggaacaaaatctgggaacacaaaaatctgggaacaaaatctgcctttggctaccagagtttattgctcccatatcattcgctgtccatttcactgtccattcgctgaacacaaaaagctgggaacaaactcattttcccagtgaacaggtagcacaatttagttcacaaaatctgggagcacaatttagttcacaaaatctgggagcaataaacaggttgaacaggtagaacaaaatctgggagcaataaactgccatcccagaacaaaattcgcagctcacatttcagttcacaagctagttcacaatttagttcccaggtaccacaatttagttcacaagctagttcacaagctcacatttcaatggagcaatacacaggtagcagtttgacaagctattacacaagctcacatttctgggagcaatacacaggtagcagtttcacaagctatcacacaagctcacatttctgggagcaaaaaacaggtggcgtagtagcagtcgtgtgttcatcttcatttgcagcaacgacaagttcacggcttggtgcttcatcttcatttccagctacaagtattggtgcttcatcttcatttgcagcttcgactattggtgcttctacttcatttgcagcttcgactattggtgcttctacttcatttgcagcaacgacaagccacctgctttggcgcggactagggttgtggtcgcagcgccgccgccacctgctttggcgcggggccgcgagcagcaagggagaagacgcggagtttggagagaaggaggtgcagcgccgccgccacctgctttggcgcgggaccacgggcagcagatctccgggcagcaggggaggagactagcaggggagggaaatggagattgaagaaaatgagatggaaggaagaggcttgacgggagagagaagaaccttgaagagagaagaacggctctggacggcagaagaaaacggcgcgtgggctgatagcgacggaagatcattattcgttctcctgaacgactaataacgatgggatctggaataacaggagcctgatggttgcatcagtagagttgaccacttctcagtattgcgagatgcatcttacatggtcaagaagataattcctattctgaactacttgctcgtgttgatcagttttgcctagtcccagtaccatacaaagatgttcaggtgaacctgaaaattcttctcaatttgac

SEQ ID NO: 70882 - DNA, 2949 bp, Zea Mays
caacttccagatcgttctcatcccatcgtttcctcctctgctcaagcacggcagccagtccagccaccatttgggtgctcatctccctctgctcggcacccagccccagctcgcccgagctccctgcgccgacctcatcctccccatggtgcgtcaccttctactcctctccttcccacggcacagcagcgcccctgcagctccccttctccagatccatggcgcccaacaccttgagcgcccctgccgctgctcctccaccgggatctcctcctccactaggcgtccaggcttgtcccaccatggctgcccctcctccatctcctccctccccaccaggttacccagattccatggccgccgccgccccagccatctccctggtggccgacctcgcccctgccccagccacagctcccccttcggccctgctgctgcaagcactcagcccctcccatggcacacggagaaatcccatgatttgggggaagacgaagtccaagcacaacccccgccaatcgctcgatgaaaaatctaaaccaaaaccctcagcgttttcatgggttccggagggattttatgttggtaaggatgatatggcctcccgcccaaagctgtctggtattcagaagcaggttttggcgctgtacaggggattccttcggacagcacgccttaaggcccctgaagaacgccgcaggatcgagtctgttatcttggcagagttccgtgacaacgcaaggagtgttgaccgtaggaactttgtacacatagagtacttgttgaggagagggaagaagcagcttgagcagctcaagaatcctgatattactggactcgctacccttgtagtaaagaaatgagcaagagaagaaggaagacaagtcagacaaaacagaagacgagaagaggttcctaccataacacttaagcaaggaatcctgtacacttctctcctggggttgtgacttgtatattgtcaaggatcacttggatgtggtaaatgctatactggacactgatgatagctgcataaggattgtgcgaaaaaacgggaagacatccctacatactgctgcaaggattggataccatcgtattgtcaaggcactcatagagagggatccaggaattgttccgatcaaggataggaagggacaaactgcacttcacatggctgtgaaaggcaagaacacagatgtagtggaagagttactgatggctgatgtttccattctcaatgtgcgggacaagaagggaaatactgctttgcacatagctacatggaaatgggagaattttgggattatgaaacaccgcagacgtggcttcgacgaaacggaggcgtaggcgagggattcgacattatgaaaaaccagagaagatactacactctaaaatggacatgaatcctctattaccagggaaggatgatgtttattacactgaaacagacgctgtctcacatccgttacccgcactagacgcacccagtctttctacagagagaatcgcgccgttcttgaatctgccattcgctgaatctgccattcgctgctgttgtttctggacagtgaagcagtattccggacagtgaacaaaaatctgggaacacatttcattttcactgtcattggctaccagagtccgggaacaaaatctgggaacaaaatctgggaacacaaaaatctgggaacaaaatctgcctttggctaccagagtttattgctcccatatcattcgctgtccatttcactgtccattcgctgaacacaaaaagctgggaacaaactcattttcccagtgaacaggtagcacaatttagttcacaaaatctgggagcacaatttagttcacaaaatctgggagcaataaacaggttgaacaggtagaacaaaatctgggagcaataaactgccatcccagaacaaaattcgcagctcacatttcagttcacaagctagttcacaatttagttcccaggtaccacaatttagttcacaagctagttcacaagctcacatttcaatggagcaatacacaggtagcagtttgacaagctattacacaagctcacatttctgggagcaatacacaggtagcagtttcacaagctatcacacaagctcacatttctgggagcaaaaaacaggtggcgtagtagcagtcgtgtgttcatcttcatttgcagcaacgacaagttcacggcttggtgcttcatcttcatttccagctacaacaacgacaagccacctgctttggcgcggactagggttgtggtcgcagcgccgccgccacctgctttggcgcggggccgcgagcagcaagggagaagacgcggagtttggagagaaggaggtgcagcgccgccgccacctgctttggcgcgggaccacgggcagcagatctccgggcagcaggggaggagactagcaggggagggaaatggagattgaagaaaatgagatggaaggaagaggcttgacgggagagagaagaaccttgaagagagaagaacggctctggacggcagaagaaaacggcgcgtgggctgatagcgacggaagatcattattcgttctcctgaacgactaataacgatgggatctggaataacaggagcctgatggttgcatcagtagagttgaccacttctcagtattgcgagatgcatcttacatggtcaagaagataattcctattctgaactacttgctcgtgttcgtgtacaagtctccttatcatgtcctcctttcaagccagtctattctttgcttgattcatcacgggtgcacattattgtaattagaatcttcagagtactcgaaggatagttaaagctgtttggctagtccttcagattactaaaaatatagttgatcagttttgcctagtcccagtaccatacaaagatgttcaggtgaacctgaaaattcttctcaatttgac

SEQ ID NO: 70883 - DNA, 4197 bp, Zea Mays
caacttccagatcgttctcatcccatcgtttcctcctctgctcaagcacggcagccagtccagccaccatttgggtgctcatctccctctgctcggcacccagccccagctcgcccgagctccctgcgccgacctcatcctccccatgccccatctgcaacaccgtcgacccccgacgaggtcctgttctcgccctgtcgttttagtactcggcgtcgattaagtagatgctaaccgtgtgtatattcgtgtgttcttgtgaggagaaatcccatgatttgggggaagacgaagtccaagcacaacccccgccaatcgctcgatgaaaaatctaaaccaaaaccctcagcgttttcatgggttccggagggattttatgttggtaaggtgttgtgcggtgtgatctccaattccctattgctgatgtcttactccatcatgaccttagggaaggatgttttcctctaaattactcgtaataattatgcttggtgtatgtgttgttttagctacttgatgaaatgttttagttgtgtgcgataatatggttgccgttcgagtggaaagtagatgtgttgtatgacctgagttggagttgaagcaagtatgtgtgtctcgtattacgaaactaattagagatatgcatgatgtttgtagatggattatgtgtagagtgttttagtacaagtatttttttaggtatagttgaaccaattattgtatatgaattgtgcgatatcaaggttgttctaatgttcttttaacatcttgctaataaggtgttagagtattctaaatgccaaacataggataattttacaagccaaatagaagttaaattgaaggtattgatgtttagggctgtaggtatagttttagttatgcagctagtccaataaagtagatcatgttttctgtagaagcgttatatataaaacttgtagataatctctttatcttacttgtgtaaaaatttcatgaccataggtgtagtagtttaggagttatgatttttccaagtccagtctcagaatctgtccgaattctatacaggtttcgaaaattggattgtttggctaagctaaactgagaatcagcccttagtaattatagaagaattgtagtacttttcttaagctttccaacaaattttggagcaccctttttggtggtctagagatcaagttacagctgtttgaactatagagtctgaatctgtccaaatctggacagcgaagtctgtttgtagtaactgactttgatatgtattgaattaacctgagatgtttataaatgaattgtagacaattctattaactttctaaaaagtctaggatcaccggatttggatttcggaaactccagttctggacttttgaagtagttagtcgaattctgtccaaatctggacaaaatttatgtttagcgctgtttgacctttctaaaggtcgaatcttgttgtgatggtaatacaaaagttatagaggactttataagctttccaaaaagtcctagtttactatttttggatacatattttatgaattgtgagctaaacagatagttgttgacttgctgttctgctgtccaaacacatgtctactgtctgaaaatagctcattttgtagttacatttgcatcaggctttgatgattgctgtacaaggatgatatggcctcccgcccaaagctgtctggtattcagaagcaggttttggcgctgtacaggggattccttcggacagcacgccttaaggcccctgaagaacgccgcaggatcgagtctgttatcttggcagagttccgtgacaacgcaaggagtgttgaccgtaggaactttgtacacatagagtacttgttgaggagagggaagaagcagcttgagcagctcaagaatcctgatattactggactcgctacccttgtagtaaagaaatgagcaagagaagaaggaagacaagtcagacaaaacagaagacgagaagaggttcctaccataacacttaagcaaggaatcctgtacacttctctcctggggttgtgacttgtatattgtcaaggatcacttggatgtggtaaatgctatactggacactgatgatagctgcataaggattgtgcgaaaaaacgggaagacatccctacatactgctgcaaggattggataccatcgtattgtcaaggcactcatagagagggatccaggaattgttccgatcaaggataggaagggacaaactgcacttcacatggctgtgaaaggcaagaacacagatgtagtggaagagttactgatggctgatgtttccattctcaatgtgcgggacaagaagggaaatactgctttgcacatagctacatggaaatgggagaattttgggattatgaaacaccgcagacgtggcttcgacgaaacggaggcgtaggcgagggattcgacattatgaaaaaccagagaagatactacactctaaaatggacatgaatcctctattaccagggaaggatgatgtttattacactgaaacagacgctgtctcacatccgttacccgcactagacgcacccagtctttctacagagagaatcgcgccgttcttgaatctgccattcgctgaatctgccattcgctgctgttgtttctggacagtgaagcagtattccggacagtgaacaaaaatctgggaacacatttcattttcactgtcattggctaccagagtccgggaacaaaatctgggaacaaaatctgggaacacaaaaatctgggaacaaaatctgcctttggctaccagagtttattgctcccatatcattcgctgtccatttcactgtccattcgctgaacacaaaaagctgggaacaaactcattttcccagtgaacaggtagcacaatttagttcacaaaatctgggagcacaatttagttcacaaaatctgggagcaataaacaggttgaacaggtagaacaaaatctgggagcaataaactgccatcccagaacaaaattcgcagctcacatttcagttcacaagctagttcacaatttagttcccaggtaccacaatttagttcacaagctagttcacaagctcacatttcaatggagcaatacacaggtagcagtttgacaagctattacacaagctcacatttctgggagcaatacacaggtagcagtttcacaagctatcacacaagctcacatttctgggagcaaaaaacaggtggcgtagtagcagtcgtgtgttcatcttcatttgcagcaacgacaagttcacggcttggtgcttcatcttcatttccagctacaacaacgacaagccacctgctttggcgcggactagggttgtggtcgcagcgccgccgccacctgctttggcgcggggccgcgagcagcaagggagaagacgcggagtttggagagaaggaggtgcagcgccgccgccacctgctttggcgcgggaccacgggcagcagatctccgggcagcaggggaggagactagcaggggagggaaatggagattgaagaaaatgagatggaaggaagaggcttgacgggagagagaagaaccttgaagagagaagaacggctctggacggcagaagaaaacggcgcgtgggctgatagcgacggaagatcattattcgttctcctgaacgactaataacgatgggatctggaataacaggagcctgatggttgcatcagtagagttgaccacttctcagtattgcgagatgcatcttacatggtcaagaagataattcctattctgaactacttgctcgtgttcgtgtacaagtctccttatcatgtcctcctttcaagccagtctattctttgcttgattcatcacgggtgcacattattgtaattagaatcttcagagtactcgaaggatagttaaagctgtttggctagtccttcagattactaaaaatatagttaagaacatttgtattttgctatttcgatttccaacagtacaactattggggatgattgcttttctttataaaagcaatcaagtaatttcttagctaagttctagctataagttctgcatgacatgctattgcccatgataattctgacaggattgcttcaactctttcaggttgatcagttttgcctagtcccagtaccatacaaagatgttcaggtgaacctgaaaattcttctcaatttgac

SEQ ID NO: 70884 - DNA, 2910 bp, Zea Mays
gcaacttccagatcgttctcatcccatcgtttcctcctctgctcaagcacggcagccagtccagccaccatttgggtgctcatctccctctgctcggcacccagccccagctcgcccgagctccctgcgccgacctcatcctccccatggtgcgtcaccttctactcctctccttcccacggcacagcagcgcccctgcagctccccttctccagatccatggcgcccaacaccttgagcgcccctgccgctgctcctccaccgggatctcctcctccactaggcgtccaggcttgtcccaccatggctgcccctcctccatctcctccctccccaccaggttacccagattccatggccgccgccgccccagccatctccctggtggccgacctcgcccctgccccagccacagctcccccttcggccctgctgctgcaagcactcagcccctcccatggcacacgccccatctgcaacaccgtcgacccccgacgaggtcctgttctcgccctgtcgttttagtactcggcgtcgattaagtagatgctaaccgtgtgtatattcgtgtgttcttgtgaggagaaatcccatgatttgggggaagacgaagtccaagcacaacccccgccaatcgctcgatgaaaaatctaaaccaaaaccctcagcgttttcatgggttccggagggattttatgttggtaaggatgatatggcctcccgcccaaagctgtctggtattcagaagcaggttttggcgctgtacaggggattccttcggacagcacgccttaaggcccctgaagaacgccgcaggatcgagtctgttatcttggcagagttccgtgacaacgcaaggagtgttgaccgtaggaactttgtacacatagagtacttgttgaggagagggaagaagcagcttgagcagctcaagaatcctgatattactggactcgctacccttgtagtaaagaaatgagcaagagaagaaggaagacaagtcagacaaaacagaagacgagaagaggttcctaccataacacttaagcaaggaatcctgtacacttctctcctggggttgtgacttgtatattgtcaaggatcacttggatgtggtaaatgctatactggacactgatgatagctgcataaggattgtgcgaaaaaacgggaagacatccctacatactgctgcaaggattggataccatcgtattgtcaaggcactcatagagagggatccaggaattgttccgatcaaggataggaagggacaaactgcacttcacatggctgtgaaaggcaagaacacagatgtagtggaagagttactgatggctgatgtttccattctcaatgtgcgggacaagaagggaaatactgctttgcacatagctacatggaaatgggagaattttgggattatgaaacaccgcagacgtggcttcgacgaaacggaggcgtaggcgagggattcgacattatgaaaaaccagagaagatactacactctaaaatggacatgaatcctctattaccagggaaggatgatgtttattacactgaaacagacgctgtctcacatccgttacccgcactagacgcacccagtctttctacagagagaatcgcgccgttcttgaatctgccattcgctgaatctgccattcgctgctgttgtttctggacagtgaagcagtattccggacagtgaacaaaaatctgggaacacatttcattttcactgtcattggctaccagagtccgggaacaaaatctgggaacaaaatctgggaacacaaaaatctgggaacaaaatctgcctttggctaccagagtttattgctcccatatcattcgctgtccatttcactgtccattcgctgaacacaaaaagctgggaacaaactcattttcccagtgaacaggtagcacaatttagttcacaaaatctgggagcacaatttagttcacaaaatctgggagcaataaacaggttgaacaggtagaacaaaatctgggagcaataaactgccatcccagaacaaaattcgcagctcacatttcagttcacaagctagttcacaatttagttcccaggtaccacaatttagttcacaagctagttcacaagctcacatttcaatggagcaatacacaggtagcagtttgacaagctattacacaagctcacatttctgggagcaatacacaggtagcagtttcacaagctatcacacaagctcacatttctgggagcaaaaaacaggtggcgtagtagcagtcgtgtgttcatcttcatttgcagcaacgacaagttcacggcttggtgcttcatcttcatttccagctacaacaacgacaagccacctgctttggcgcggactagggttgtggtcgcagcgccgccgccacctgctttggcgcggggccgcgagcagcaagggagaagacgcggagtttggagagaaggaggtgcagcgccgccgccacctgctttggcgcgggaccacgggcagcagatctccgggcagcaggggaggagactagcaggggagggaaatggagattgaagaaaatgagatggaaggaagaggcttgacgggagagagaagaaccttgaagagagaagaacggctctggacggcagaagaaaacggcgcgtgggctgatagcgacggaagatcattattcgttctcctgaacgactaataacgatgggatctggaataacaggagcctgatggttgcatcagtagagttgaccacttctcagtattgcgagatgcatcttacatggtcaagaagataattcctattctgaactacttgctcgtgttgatcagttttgcctagtcccagtaccatacaaagatgttcaggtgaacctgaaaattcttctcaatttgac

SEQ ID NO: 70885 - DNA, 2872 bp, Zea Mays
ctgcaacttccagatcgttctcatcccatcgtttcctcctctgctcaagcacggcagccagtccagccaccatttgggtgctcatctccctctgctcggcacccagccccagctcgcccgagctccctgcgccgacctcatcctccccatggtgcgtcaccttctactcctctccttcccacggcacagcagcgcccctgcagctccccttctccagatccatggcgcccaacaccttgagcgcccctgccgctgctcctccaccgggatctcctcctccactaggcgtccaggcttgtcccaccatggctgcccctcctccatctcctccctccccaccaggttacccagattccatggccgccgccgccccagccatctccctggtggccgacctcgcccctgccccagccacagctcccccttcggccctgctgctgcaagcactcagcccctcccatggcacacgccccatctgcaacaccgtcgacccccgacgagaaatcccatgatttgggggaagacgaagtccaagcacaacccccgccaatcgctcgatgaaaaatctaaaccaaaaccctcagcgttttcatgggttccggagggattttatgttggtaaggtgttgtgcggtgtgatctccaattccctattgctgatgtcttactccatcatgaccttagggctttgatgattgctgtacaaggatgatatggcctcccgcccaaagctgtctggtattcagaagcaggttttggcgctgtacaggggattccttcggacagcacgccttaaggcccctgaagaacgccgcaggatcgagtctgttatcttggcagagttccgtgacaacgcaaggagtgttgaccgtaggaactttgtacacatagagtacttgttgaggagagggaagaagcagcttgagcagctcaagaatcctgatattactggactcgctacccttgtagtaaagaaatgagcaagagaagaaggaagacaagtcagacaaaacagaagacgagaagaggttcctaccataacacttaagcaaggaatcctgtacacttctctcctggggttgtgacttgtatattgtcaaggatcacttggatgtggtaaatgctatactggacactgatgatagctgcataaggattgtgcgaaaaaacgggaagacatccctacatactgctgcaaggattggataccatcgtattgtcaaggcactcatagagagggatccaggaattgttccgatcaaggataggaagggacaaactgcacttcacatggctgtgaaaggcaagaacacagatgtagtggaagagttactgatggctgatgtttccattctcaatgtgcgggacaagaagggaaatactgctttgcacatagctacatggaaatgggagaattttgggattatgaaacaccgcagacgtggcttcgacgaaacggaggcgtaggcgagggattcgacattatgaaaaaccagagaagatactacactctaaaatggacatgaatcctctattaccagggaaggatgatgtttattacactgaaacagacgctgtctcacatccgttacccgcactagacgcacccagtctttctacagagagaatcgcgccgttcttgaatctgccattcgctgaatctgccattcgctgctgttgtttctggacagtgaagcagtattccggacagtgaacaaaaatctgggaacacatttcattttcactgtcattggctaccagagtccgggaacaaaatctgggaacaaaatctgggaacacaaaaatctgggaacaaaatctgcctttggctaccagagtttattgctcccatatcattcgctgtccatttcactgtccattcgctgaacacaaaaagctgggaacaaactcattttcccagtgaacaggtagcacaatttagttcacaaaatctgggagcacaatttagttcacaaaatctgggagcaataaacaggttgaacaggtagaacaaaatctgggagcaataaactgccatcccagaacaaaattcgcagctcacatttcagttcacaagctagttcacaatttagttcccaggtaccacaatttagttcacaagctagttcacaagctcacatttcaatggagcaatacacaggtagcagtttgacaagctattacacaagctcacatttctgggagcaatacacaggtagcagtttcacaagctatcacacaagctcacatttctgggagcaaaaaacaggtggcgtagtagcagtcgtgtgttcatcttcatttgcagcaacgacaagttcacggcttggtgcttcatcttcatttccagctacaacaacgacaagccacctgctttggcgcggactagggttgtggtcgcagcgccgccgccacctgctttggcgcggggccgcgagcagcaagggagaagacgcggagtttggagagaaggaggtgcagcgccgccgccacctgctttggcgcgggaccacgggcagcagatctccgggcagcaggggaggagactagcaggggagggaaatggagattgaagaaaatgagatggaaggaagaggcttgacgggagagagaagaaccttgaagagagaagaacggctctggacggcagaagaaaacggcgcgtgggctgatagcgacggaagatcattattcgttctcctgaacgactaataacgatgggatctggaataacaggagcctgatggttgcatcagtagagttgaccacttctcagtattgcgagatgcatcttacatggttgatcagttttgcctagtcccagtaccatacaaagatgttcaggtgaacctgaaaattcttctcaatttgac

SEQ ID NO: 70886 - DNA, 3090 bp, Zea Mays
ctgcaacttccagatcgttctcatcccatcgtttcctcctctgctcaagcacggcagccagtccagccaccatttgggtgctcatctccctctgctcggcacccagccccagctcgcccgagctccctgcgccgacctcatcctccccatggtgcgtcaccttctactcctctccttcccacggcacagcagcgcccctgcagctccccttctccagatccatggcgcccaacaccttgagcgcccctgccgctgctcctccaccgggatctcctcctccactaggcgtccaggcttgtcccaccatggctgcccctcctccatctcctccctccccaccaggttacccagattccatggccgccgccgccccagccatctccctggtggccgacctcgcccctgccccagccacagctcccccttcggccctgctgctgcaagcactcagcccctcccatggcacacggtactcgtccagcccctttctactggtggctgacccatctctatggtgctcgacgaaatgaccatgaggagttttgtgttgtgtgcagccccatctgcaacaccgtcgacccccgacgaggtcctgttctcgccctgtcgttttagtactcggcgtcgattaagtagatgctaaccgtgtgtatattcgtgtgttcttgtgaggagaaatcccatgatttgggggaagacgaagtccaagcacaacccccgccaatcgctcgatgaaaaatctaaaccaaaaccctcagcgttttcatgggttccggagggattttatgttggtaaggtgttgtgcggtgtgatctccaattccctattgctgatgtcttactccatcatgaccttagggctttgatgattgctgtacaaggatgatatggcctcccgcccaaagctgtctggtattcagaagcaggttttggcgctgtacaggggattccttcggacagcacgccttaaggcccctgaagaacgccgcaggatcgagtctgttatcttggcagagttccgtgacaacgcaaggagtgttgaccgtaggaactttgtacacatagagtacttgttgaggagagggaagaagcagcttgagcagctcaagaatcctgatattactggactcgctacccttgtagtaaagaaatgagcaagagaagaaggaagacaagtcagacaaaacagaagacgagaagaggttcctaccataacacttaagcaaggaatcctgtacacttctctcctggggttgtgacttgtatattgtcaaggatcacttggatgtggtaaatgctatactggacactgatgatagctgcataaggattgtgcgaaaaaacgggaagacatccctacatactgctgcaaggattggataccatcgtattgtcaaggcactcatagagagggatccaggaattgttccgatcaaggataggaagggacaaactgcacttcacatggctgtgaaaggcaagaacacagatgtagtggaagagttactgatggctgatgtttccattctcaatgtgcgggacaagaagggaaatactgctttgcacatagctacatggaaatgggagaattttgggattatgaaacaccgcagacgtggcttcgacgaaacggaggcgtaggcgagggattcgacattatgaaaaaccagagaagatactacactctaaaatggacatgaatcctctattaccagggaaggatgatgtttattacactgaaacagacgctgtctcacatccgttacccgcactagacgcacccagtctttctacagagagaatcgcgccgttcttgaatctgccattcgctgaatctgccattcgctgctgttgtttctggacagtgaagcagtattccggacagtgaacaaaaatctgggaacacatttcattttcactgtcattggctaccagagtccgggaacaaaatctgggaacaaaatctgggaacacaaaaatctgggaacaaaatctgcctttggctaccagagtttattgctcccatatcattcgctgtccatttcactgtccattcgctgaacacaaaaagctgggaacaaactcattttcccagtgaacaggtagcacaatttagttcacaaaatctgggagcacaatttagttcacaaaatctgggagcaataaacaggttgaacaggtagaacaaaatctgggagcaataaactgccatcccagaacaaaattcgcagctcacatttcagttcacaagctagttcacaatttagttcccaggtaccacaatttagttcacaagctagttcacaagctcacatttcaatggagcaatacacaggtagcagtttgacaagctattacacaagctcacatttctgggagcaatacacaggtagcagtttcacaagctatcacacaagctcacatttctgggagcaaaaaacaggtggcgtagtagcagtcgtgtgttcatcttcatttgcagcaacgacaagttcacggcttggtgcttcatcttcatttccagctacaacaacgacaagccacctgctttggcgcggactagggttgtggtcgcagcgccgccgccacctgctttggcgcggggccgcgagcagcaagggagaagacgcggagtttggagagaaggaggtgcagcgccgccgccacctgctttggcgcgggaccacgggcagcagatctccgggcagcaggggaggagactagcaggggagggaaatggagattgaagaaaatgagatggaaggaagaggcttgacgggagagagaagaaccttgaagagagaagaacggctctggacggcagaagaaaacggcgcgtgggctgatagcgacggaagatcattattcgttctcctgaacgactaataacgatgggatctggaataacaggagcctgatggttgcatcagtagagttgaccacttctcagtattgcgagatgcatcttacatggtcaagaagataattcctattctgaactacttgctcgtgttcgtgttgatcagttttgcctagtcccagtaccatacaaagatgttcaggtgaacctgaaaattcttctcaatttgac

SEQ ID NO: 70887 - DNA, 4153 bp, Zea Mays
gctgcaacttccagatcgttctcatcccatcgtttcctcctctgctcaagcacggcagccagtccagccaccatttgggtgctcatctccctctgctcggcacccagccccagctcgcccgagctccctgcgccgacctcatcctccccatggtgcgtcaccttctactcctctccttcccacggcacagcagcgcccctgcagctccccttctccagatccatggcgcccaacaccttgagcgcccctgccgctgctcctccaccgggatctcctcctccactaggcgtccaggcttgtcccaccatggctgcccctcctccatctcctccctccccaccaggttacccagattccatggccgccgccgccccagccatctccctggtggccgacctcgcccctgccccagccacagctcccccttcggccctgctgctgcaagcactcagcccctcccatggcacacgccccatctgcaacaccgtcgacccccgacgaggtcctgttctcgccctgtcgttttagtactcggcgtcgattaagtagatgctaaccgtgtgtatattcgtgtgttcttgtgaggagaaatcccatgatttgggggaagacgaagtccaagcacaacccccgccaatcgctcgatgaaaaatctaaaccaaaaccctcagcgttttcatgggttccggagggattttatgttggtaaggtgttgtgcggtgtgatctccaattccctattgctgatgtcttactccatcatgaccttagggaaggatgttttcctctaaattactcgtaataattatgcttggtgtatgtgttgttttagctacttgatgaaatgttttagttgtgtgcgataatatggttgccgttcgagtggaaagtagatgtgttgtatgacctgagttggagttgaagcaagtatgtgtgtctcgtattacgaaactaattagagatatgcatgatgtttgtagatggattatgtgtagagtgttttagtacaagtatttttttaggtatagttgaaccaattattgtatatgaattgtgcgatatcaaggttgttctaatgttcttttaacatcttgctaataaggtgttagagtattctaaatgccaaacataggataattttacaagccaaatagaagttaaattgaaggtattgatgtttagggctgtaggtatagttttagttatgcagctagtccaataaagtagatcatgttttctgtagaagcgttatatataaaacttgtagataatctctttatcttacttgtgtaaaaatttcatgaccataggtgtagtagtttaggagttatgatttttccaagtccagtctcagaatctgtccgaattctatacaggtttcgaaaattggattgtttggctaagctaaactgagaatcagcccttagtaattatagaagaattgtagtacttttcttaagctttccaacaaattttggagcaccctttttggtggtctagagatcaagttacagctgtttgaactatagagtctgaatctgtccaaatctggacagcgaagtctgtttgtagtaactgactttgatatgtattgaattaacctgagatgtttataaatgaattgtagacaattctattaactttctaaaaagtctaggatcaccggatttggatttcggaaactccagttctggacttttgaagtagttagtcgaattctgtccaaatctggacaaaatttatgtttagcgctgtttgacctttctaaaggtcgaatcttgttgtgatggtaatacaaaagttatagaggactttataagctttccaaaaagtcctagtttactatttttggatacatattttatgaattgtgagctaaacagatagttgttgacttgctgttctgctgtccaaacacatgtctactgtctgaaaatagctcattttgtagttacatttgcatcaggctttgatgattgctgtacaaggatgatatggcctcccgcccaaagctgtctggtattcagaagcaggttttggcgctgtacaggggattccttcggacagcacgccttaaggcccctgaagaacgccgcaggatcgagtctgttatcttggcagagttccgtgacaacgcaaggagtgttgaccgtaggaactttgtacacatagagtacttgttgaggagagggaagaagcagcttgagcagctcaagaatcctgatattactggactcgctacccttgtagtaaagaaatgagcaagagaagaaggaagacaagtcagacaaaacagaagacgagaagaggttcctaccataacacttaagcaaggaatcctgtacacttctctcctggggttgtgacttgtatattgtcaaggatcacttggatgtggtaaatgctatactggacactgatgatagctgcataaggattgtgcgaaaaaacgggaagacatccctacatactgctgcaaggattggataccatcgtattgtcaaggcactcatagagagggatccaggaattgttccgatcaaggataggaagggacaaactgcacttcacatggctgtgaaaggcaagaacacagatgtagtggaagagttactgatggctgatgtttccattctcaatgtgcgggacaagaagggaaatactgctttgcacatagctacatggaaatgggagaattttgggattatgaaacaccgcagacgtggcttcgacgaaacggaggcgtaggcgagggattcgacattatgaaaaaccagagaagatactacactctaaaatggacatgaatcctctattaccagggaaggatgatgtttattacactgaaacagacgctgtctcacatccgttacccgcactagacgcacccagtctttctacagagagaatcgcgccgttcttgaatctgccattcgctgaatctgccattcgctgctgttgtttctggacagtgaagcagtattccggacagtgaacaaaaatctgggaacacatttcattttcactgtcattggctaccagagtccgggaacaaaatctgggaacaaaatctgggaacacaaaaatctgggaacaaaatctgcctttggctaccagagtttattgctcccatatcattcgctgtccatttcactgtccattcgctgaacacaaaaagctgggaacaaactcattttcccagtgaacaggtagcacaatttagttcacaaaatctgggagcacaatttagttcacaaaatctgggagcaataaacaggttgaacaggtagaacaaaatctgggagcaataaactgccatcccagaacaaaattcgcagctcacatttcagttcacaagctagttcacaatttagttcccaggtaccacaatttagttcacaagctagttcacaagctcacatttcaatggagcaatacacaggtagcagtttgacaagctattacacaagctcacatttctgggagcaatacacaggtagcagtttcacaagctatcacacaagctcacatttctgggagcaaaaaacaggtggcgtagtagcagtcgtgtgttcatcttcatttgcagcaacgacaagttcacggcttggtgcttcatcttcatttccagctacaacaacgacaagccacctgctttggcgcggactagggttgtggtcgcagcgccgccgccacctgctttggcgcggggccgcgagcagcaagggagaagacgcggagtttggagagaaggaggtgcagcgccgccgccacctgctttggcgcgggaccacgggcagcagatctccgggcagcaggggaggagactagcaggggagggaaatggagattgaagaaaatgagatggaaggaagaggcttgacgggagagagaagaaccttgaagagagaagaacggctctggacggcagaagaaaacggcgcgtgggctgatagcgacggaagatcattattcgttctcctgaacgactaataacgatgggatctggaataacaggagcctgatggttgcatcagtagagttgaccacttctcagtattgcgagatgcatcttacatggttgatcagttttgcctagtcccagtaccatacaaagatgttcaggtgaacctgaaaattcttctcaatttgac

SEQ ID NO: 70888 - DNA, 4203 bp, Zea Mays
cgaagctgcaacttccagatcgttctcatcccatcgtttcctcctctgctcaagcacggcagccagtccagccaccatttgggtgctcatctccctctgctcggcacccagccccagctcgcccgagctccctgcgccgacctcatcctccccatggtgcgtcaccttctactcctctccttcccacggcacagcagcgcccctgcagctccccttctccagatccatggcgcccaacaccttgagcgcccctgccgctgctcctccaccgggatctcctcctccactaggcgtccaggcttgtcccaccatggctgcccctcctccatctcctccctccccaccaggttacccagattccatggccgccgccgccccagccatctccctggtggccgacctcgcccctgccccagccacagctcccccttcggccctgctgctgcaagcactcagcccctcccatggcacacgccccatctgcaacaccgtcgacccccgacgagaaatcccatgatttgggggaagacgaagtccaagcacaacccccgccaatcgctcgatgaaaaatctaaaccaaaaccctcagcgttttcatgggttccggagggattttatgttggtaaggtgttgtgcggtgtgatctccaattccctattgctgatgtcttactccatcatgaccttagggaaggatgttttcctctaaattactcgtaataattatgcttggtgtatgtgttgttttagctacttgatgaaatgttttagttgtgtgcgataatatggttgccgttcgagtggaaagtagatgtgttgtatgacctgagttggagttgaagcaagtatgtgtgtctcgtattacgaaactaattagagatatgcatgatgtttgtagatggattatgtgtagagtgttttagtacaagtatttttttaggtatagttgaaccaattattgtatatgaattgtgcgatatcaaggttgttctaatgttcttttaacatcttgctaataaggtgttagagtattctaaatgccaaacataggataattttacaagccaaatagaagttaaattgaaggtattgatgtttagggctgtaggtatagttttagttatgcagctagtccaataaagtagatcatgttttctgtagaagcgttatatataaaacttgtagataatctctttatcttacttgtgtaaaaatttcatgaccataggtgtagtagtttaggagttatgatttttccaagtccagtctcagaatctgtccgaattctatacaggtttcgaaaattggattgtttggctaagctaaactgagaatcagcccttagtaattatagaagaattgtagtacttttcttaagctttccaacaaattttggagcaccctttttggtggtctagagatcaagttacagctgtttgaactatagagtctgaatctgtccaaatctggacagcgaagtctgtttgtagtaactgactttgatatgtattgaattaacctgagatgtttataaatgaattgtagacaattctattaactttctaaaaagtctaggatcaccggatttggatttcggaaactccagttctggacttttgaagtagttagtcgaattctgtccaaatctggacaaaatttatgtttagcgctgtttgacctttctaaaggtcgaatcttgttgtgatggtaatacaaaagttatagaggactttataagctttccaaaaagtcctagtttactatttttggatacatattttatgaattgtgagctaaacagatagttgttgacttgctgttctgctgtccaaacacatgtctactgtctgaaaatagctcattttgtagttacatttgcatcaggctttgatgattgctgtacaaggatgatatggcctcccgcccaaagctgtctggtattcagaagcaggttttggcgctgtacaggggattccttcggacagcacgccttaaggcccctgaagaacgccgcaggatcgagtctgttatcttggcagagttccgtgacaacgcaaggagtgttgaccgtaggaactttgtacacatagagtacttgttgaggagagggaagaagcagcttgagcagctcaagaatcctgatattactggactcgctacccttgtagtaaagaaatgagcaagagaagaaggaagacaagtcagacaaaacagaagacgagaagaggttcctaccataacacttaagcaaggaatcctgtacacttctctcctggggttgtgacttgtatattgtcaaggatcacttggatgtggtaaatgctatactggacactgatgatagctgcataaggattgtgcgaaaaaacgggaagacatccctacatactgctgcaaggattggataccatcgtattgtcaaggcactcatagagagggatccaggaattgttccgatcaaggataggaagggacaaactgcacttcacatggctgtgaaaggcaagaacacagatgtagtggaagagttactgatggctgatgtttccattctcaatgtgcgggacaagaagggaaatactgctttgcacatagctacatggaaatgggagaattttgggattatgaaacaccgcagacgtggcttcgacgaaacggaggcgtaggcgagggattcgacattatgaaaaaccagagaagatactacactctaaaatggacatgaatcctctattaccagggaaggatgatgtttattacactgaaacagacgctgtctcacatccgttacccgcactagacgcacccagtctttctacagagagaatcgcgccgttcttgaatctgccattcgctgaatctgccattcgctgctgttgtttctggacagtgaagcagtattccggacagtgaacaaaaatctgggaacacatttcattttcactgtcattggctaccagagtccgggaacaaaatctgggaacaaaatctgggaacacaaaaatctgggaacaaaatctgcctttggctaccagagtttattgctcccatatcattcgctgtccatttcactgtccattcgctgaacacaaaaagctgggaacaaactcattttcccagtgaacaggtagcacaatttagttcacaaaatctgggagcacaatttagttcacaaaatctgggagcaataaacaggttgaacaggtagaacaaaatctgggagcaataaactgccatcccagaacaaaattcgcagctcacatttcagttcacaagctagttcacaatttagttcccaggtagcagtttgacaagctattacacaagctcacatttctgggagcaatacacaggtagcagtttcacaagctatcacacaagctcacatttctgggagcaaaaaacaggtggcgtagtagcagtcgtgtgttcatcttcatttgcagcaacgacaagttcacggcttggtgcttcatcttcatttccagctacaacaacgacaagccacctgctttggcgcggactagggttgtggtcgcagcgccgccgccacctgctttggcgcggggccgcgagcagcaagggagaagacgcggagtttggagagaaggaggtgcagcgccgccgccacctgctttggcgcgggaccacgggcagcagatctccgggcagcaggggaggagactagcaggggagggaaatggagattgaagaaaatgagatggaaggaagaggcttgacgggagagagaagaaccttgaagagagaagaacggctctggacggcagaagaaaacggcgcgtgggctgatagcgacggaagatcattattcgttctcctgaacgactaataacgatgggatctggaataacaggagcctgatggttgcatcagtagagttgaccacttctcagtattgcgagatgcatcttacatggtcaagaagataattcctattctgaactacttgctcgtgttcgtgtacaagtctccttatcatgtcctcctttcaagccagtctattctttgcttgattcatcacgggtgcacattattgtaattagaatcttcagagtactcgaaggatagttaaagctgtttggctagtccttcagattactaaaaatatagttgatcagttttgcctagtcccagtaccatacaaagatgttcaggtgaacctgaaaattcttctcaatttgac

SEQ ID NO: 70889 - DNA, 2771 bp, Zea Mays
cgaagctgcaacttccagatcgttctcatcccatcgtttcctcctctgctcaagcacggcagccagtccagccaccatttgggtgctcatctccctctgctcggcacccagccccagctcgcccgagctccctgcgccgacctcatcctccccatgccccatctgcaacaccgtcgacccccgacgaggtcctgttctcgccctgtcgttttagtactcggcgtcgattaagtagatgctaaccgtgtgtatattcgtgtgttcttgtgaggagaaatcccatgatttgggggaagacgaagtccaagcacaacccccgccaatcgctcgatgaaaaatctaaaccaaaaccctcagcgttttcatgggttccggagggattttatgttggctttgatgattgctgtacaaggatgatatggcctcccgcccaaagctgtctggtattcagaagcaggttttggcgctgtacaggggattccttcggacagcacgccttaaggcccctgaagaacgccgcaggatcgagtctgttatcttggcagagttccgtgacaacgcaaggagtgttgaccgtaggaactttgtacacatagagtacttgttgaggagagggaagaagcagcttgagcagctcaagaatcctgatattactggactcgctacccttgtagtaaagaaatgagcaagagaagaaggaagacaagtcagacaaaacagaagacgagaagaggttcctaccataacacttaagcaaggaatcctgtacacttctctcctggggttgtgacttgtatattgtcaaggatcacttggatgtggtaaatgctatactggacactgatgatagctgcataaggattgtgcgaaaaaacgggaagacatccctacatactgctgcaaggattggataccatcgtattgtcaaggcactcatagagagggatccaggaattgttccgatcaaggataggaagggacaaactgcacttcacatggctgtgaaaggcaagaacacagatgtagtggaagagttactgatggctgatgtttccattctcaatgtgcgggacaagaagggaaatactgctttgcacatagctacatggaaatgggagaattttgggattatgaaacaccgcagacgtggcttcgacgaaacggaggcgtaggcgagggattcgacattatgaaaaaccagagaagatactacactctaaaatggacatgaatcctctattaccagggaaggatgatgtttattacactgaaacagacgctgtctcacatccgttacccgcactagacgcacccagtctttctacagagagaatcgcgccgttcttgaatctgccattcgctgaatctgccattcgctgctgttgtttctggacagtgaagcagtattccggacagtgaacaaaaatctgggaacacatttcattttcactgtcattggctaccagagtccgggaacaaaatctgggaacaaaatctgggaacacaaaaatctgggaacaaaatctgcctttggctaccagagtttattgctcccatatcattcgctgtccatttcactgtccattcgctgaacacaaaaagctgggaacaaactcattttcccagtgaacaggtagcacaatttagttcacaaaatctgggagcacaatttagttcacaaaatctgggagcaataaacaggttgaacaggtagaacaaaatctgggagcaataaactgccatcccagaacaaaattcgcagctcacatttcagttcacaagctagttcacaatttagttcccaggtaccacaatttagttcacaagctagttcacaagctcacatttcaatggagcaatacacaggtagcagtttgacaagctattacacaagctcacatttctgggagcaatacacaggtagcagtttcacaagctatcacacaagctcacatttctgggagcaaaaaacaggtggcgtagtagcagtcgtgtgttcatcttcatttgcagcaacgacaagttcacggcttggtgcttcatcttcatttccagctacaacaacgacaagccacctgctttggcgcggactagggttgtggtcgcagcgccgccgccacctgctttggcgcggggccgcgagcagcaagggagaagacgcggagtttggagagaaggaggtgcagcgccgccgccacctgctttggcgcgggaccacgggcagcagatctccgggcagcaggggaggagactagcaggggagggaaatggagattgaagaaaatgagatggaaggaagaggcttgacgggagagagaagaaccttgaagagagaagaacggctctggacggcagaagaaaacggcgcgtgggctgatagcgacggaagatcattattcgttctcctgaacgactaataacgatgggatctggaataacaggagcctgatggttgcatcagtagagttgaccacttctcagtattgcgagatgcatcttacatggtcaagaagataattcctattctgaactacttgctcgtgttcgtgtacaagtctccttatcatgtcctcctttcaagccagtctattctttgcttgattcatcacgggtgcacattattgtaattagaatcttcagagtactcgaaggatagttaaagctgtttggctagtccttcagattactaaaaatatagttgatcagttttgcctagtcccagtaccatacaaagatgttcaggtgaacctgaaaattcttctcaatttgac

SEQ ID NO: 70890 - DNA, 4104 bp, Zea Mays
cgaagctgcaacttccagatcgttctcatcccatcgtttcctcctctgctcaagcacggcagccagtccagccaccatttgggtgctcatctccctctgctcggcacccagccccagctcgcccgagctccctgcgccgacctcatcctccccatggtgcgtcaccttctactcctctccttcccacggcacagcagcgcccctgcagctccccttctccagatccatggcgcccaacaccttgagcgcccctgccgctgctcctccaccgggatctcctcctccactaggcgtccaggcttgtcccaccatggctgcccctcctccatctcctccctccccaccaggttacccagattccatggccgccgccgccccagccatctccctggtggccgacctcgcccctgccccagccacagctcccccttcggccctgctgctgcaagcactcagcccctcccatggcacacgccccatctgcaacaccgtcgacccccgacgagaaatcccatgatttgggggaagacgaagtccaagcacaacccccgccaatcgctcgatgaaaaatctaaaccaaaaccctcagcgttttcatgggttccggagggattttatgttggtgttgtgcggtgtgatctccaattccctattgctgatgtcttactccatcatgaccttagggaaggatgttttcctctaaattactcgtaataattatgcttggtgtatgtgttgttttagctacttgatgaaatgttttagttgtgtgcgataatatggttgccgttcgagtggaaagtagatgtgttgtatgacctgagttggagttgaagcaagtatgtgtgtctcgtattacgaaactaattagagatatgcatgatgtttgtagatggattatgtgtagagtgttttagtacaagtatttttttaggtatagttgaaccaattattgtatatgaattgtgcgatatcaaggttgttctaatgttcttttaacatcttgctaataaggtgttagagtattctaaatgccaaacataggataattttacaagccaaatagaagttaaattgaaggtattgatgtttagggctgtaggtatagttttagttatgcagctagtccaataaagtagatcatgttttctgtagaagcgttatatataaaacttgtagataatctctttatcttacttgtgtaaaaatttcatgaccataggtgtagtagtttaggagttatgatttttccaagtccagtctcagaatctgtccgaattctatacaggtttcgaaaattggattgtttggctaagctaaactgagaatcagcccttagtaattatagaagaattgtagtacttttcttaagctttccaacaaattttggagcaccctttttggtggtctagagatcaagttacagctgtttgaactatagagtctgaatctgtccaaatctggacagcgaagtctgtttgtagtaactgactttgatatgtattgaattaacctgagatgtttataaatgaattgtagacaattctattaactttctaaaaagtctaggatcaccggatttggatttcggaaactccagttctggacttttgaagtagttagtcgaattctgtccaaatctggacaaaatttatgtttagcgctgtttgacctttctaaaggtcgaatcttgttgtgatggtaatacaaaagttatagaggactttataagctttccaaaaagtcctagtttactatttttggatacatattttatgaattgtgagctaaacagatagttgttgacttgctgttctgctgtccaaacacatgtctactgtctgaaaatagctcattttgtagttacatttgcatcaggctttgatgattgctgtacaaggatgatatggcctcccgcccaaagctgtctggtattcagaagcaggttttggcgctgtacaggggattccttcggacagcacgccttaaggcccctgaagaacgccgcaggatcgagtctgttatcttggcagagttccgtgacaacgcaaggagtgttgaccgtaggaactttgtacacatagagtacttgttgaggagagggaagaagcagcttgagcagctcaagaatcctgatattactggactcgctacccttgtagtaaagaaatgagcaagagaagaaggaagacaagtcagacaaaacagaagacgagaagaggttcctaccataacacttaagcaaggaatcctgtacacttctctcctggggttgtgacttgtatattgtcaaggatcacttggatgtggtaaatgctatactggacactgatgatagctgcataaggattgtgcgaaaaaacgggaagacatccctacatactgctgcaaggattggataccatcgtattgtcaaggcactcatagagagggatccaggaattgttccgatcaaggataggaagggacaaactgcacttcacatggctgtgaaaggcaagaacacagatgtagtggaagagttactgatggctgatgtttccattctcaatgtgcgggacaagaagggaaatactgctttgcacatagctacatggaaatgggagaattttgggattatgaaacaccgcagacgtggcttcgacgaaacggaggcgtaggcgagggattcgacattatgaaaaaccagagaagatactacactctaaaatggacatgaatcctctattaccagggaaggatgatgtttattacactgaaacagacgctgtctcacatccgttacccgcactagacgcacccagtctttctacagagagaatcgcgccgttcttgaatctgccattcgctgaatctgccattcgctgctgttgtttctggacagtgaagcagtattccggacagtgaacaaaaatctgggaacacatttcattttcactgtcattggctaccagagtccgggaacaaaatctgggaacaaaatctgggaacacaaaaatctgggaacaaaatctgcctttggctaccagagtttattgctcccatatcattcgctgtccatttcactgtccattcgctgaacacaaaaagctgggaacaaactcattttcccagtgaacaggtagcacaatttagttcacaaaatctgggagcacaatttagttcacaaaatctgggagcaataaacaggttgaacaggtagaacaaaatctgggagcaataaactgccatcccagaacaaaattcgcagctcacatttcagttcacaagctagttcacaatttagttcccaggtaccacaatttagttcacaagctagttcacaagctcacatttcaatggagcaatacacaggtagcagtttgacaagctattacacaagctcacatttctgggagcaatacacaggtagcagtttcacaagctatcacacaagctcacatttctgggagcaaaaaacaggtggcgtagtagcagtcgtgtgttcatcttcatttgcagcaacgacaagttcacggcttggtgcttcatcttcatttccagctacaacaacgacaagccacctgctttggcgcggactagggttgtggtcgcagcgccgccgccacctgctttggcgcggggccgcgagcagcaagggagaagacgcggagtttggagagaaggaggtgcagcgccgccgccacctgctttggcgcgggaccacgggcagcagatctccgggcagcaggggaggagactagcaggggagggaaatggagattgaagaaaatgagatggaaggaagaggcttgacgggagagagaagaaccttgaagagagaagaacggctctggacggcagaagaaaacggcgcgtgggctgatagcgacggaagatcattattcgttctcctgaacgactaataacgatgggatctggaataacaggagcctgatggttgcatcagtagagttgaccacttctcagtattgcgagatgcatcttacatggtcaagaagataattcctattctgaactacttgctcgtgttgatcagttttgcctagtcccagtaccatacaaagatgttcaggtgaacctgaaaattcttctcaatttgac

SEQ ID NO: 70891 - DNA, 2802 bp, Zea Mays
cgaagctgcaacttccagatcgttctcatcccatcgtttcctcctctgctcaagcacggcagccagtccagccaccatttgggtgctcatctccctctgctcggcacccagccccagctcgcccgagctccctgcgccgacctcatcctccccatggtgcgtcaccttctactcctctccttcccacggcacagcagcgcccctgcagctccccttctccagatccatggcgcccaacaccttgagcgcccctgccgctgctcctccaccgggatctcctcctccactaggcgtccaggcttgtcccaccatggctgcccctcctccatctcctccctccccaccaggttacccagattccatggccgccgccgccccagccatctccctggtggccgacctcgcccctgccccagccacagctcccccttcggccctgctgctgcaagcactcagcccctcccatggcacacggagaaatcccatgatttgggggaagacgaagtccaagcacaacccccgccaatcgctcgatgaaaaatctaaaccaaaaccctcagcgttttcatgggttccggagggattttatgttggtaaggatgatatggcctcccgcccaaagctgtctggtattcagaagcaggttttggcgctgtacaggggattccttcggacagcacgccttaaggcccctgaagaacgccgcaggatcgagtctgttatcttggcagagttccgtgacaacgcaaggagtgttgaccgtaggaactttgtacacatagagtacttgttgaggagagggaagaagcagcttgagcagctcaagaatcctgatattactggactcgctacccttgtagtaaagaaatgagcaagagaagaaggaagacaagtcagacaaaacagaagacgagaagaggttcctaccataacacttaagcaaggaatcctgtacacttctctcctggggttgtgacttgtatattgtcaaggatcacttggatgtggtaaatgctatactggacactgatgatagctgcataaggattgtgcgaaaaaacgggaagacatccctacatactgctgcaaggattggataccatcgtattgtcaaggcactcatagagagggatccaggaattgttccgatcaaggataggaagggacaaactgcacttcacatggctgtgaaaggcaagaacacagatgtagtggaagagttactgatggctgatgtttccattctcaatgtgcgggacaagaagggaaatactgctttgcacatagctacatggaaatgggagaattttgggattatgaaacaccgcagacgtggcttcgacgaaacggaggcgtaggcgagggattcgacattatgaaaaaccagagaagatactacactctaaaatggacatgaatcctctattaccagggaaggatgatgtttattacactgaaacagacgctgtctcacatccgttacccgcactagacgcacccagtctttctacagagagaatcgcgccgttcttgaatctgccattcgctgaatctgccattcgctgctgttgtttctggacagtgaagcagtattccggacagtgaacaaaaatctgggaacacatttcattttcactgtcattggctaccagagtccgggaacaaaatctgggaacaaaatctgggaacacaaaaatctgggaacaaaatctgcctttggctaccagagtttattgctcccatatcattcgctgtccatttcactgtccattcgctgaacacaaaaagctgggaacaaactcattttcccagtgaacaggtagcacaatttagttcacaaaatctgggagcacaatttagttcacaaaatctgggagcaataaacaggttgaacaggtagaacaaaatctgggagcaataaactgccatcccagaacaaaattcgcagctcacatttcagttcacaagctagttcacaatttagttcccaggtaccacaatttagttcacaagctagttcacaagctcacatttcaatggagcaatacacaggtagcagtttgacaagctattacacaagctcacatttctgggagcaatacacaggtagcagtttcacaagctatcacacaagctcacatttctgggagcaaaaaacaggtggcgtagtagcagtcgtgtgttcatcttcatttgcagcaacgacaagttcacggcttggtgcttcatcttcatttccagctacaacaacgacaagccacctgctttggcgcggactagggttgtggtcgcagcgccgccgccacctgctttggcgcggggccgcgagcagcaagggagaagacgcggagtttggagagaaggaggtgcagcgccgccgccacctgctttggcgcgggaccacgggcagcagatctccgggcagcaggggaggagactagcaggggagggaaatggagattgaagaaaatgagatggaaggaagaggcttgacgggagagagaagaaccttgaagagagaagaacggctctggacggcagaagaaaacggcgcgtgggctgatagcgacggaagatcattattcgttctcctgaacgactaataacgatgggatctggaataacaggagcctgatggttgcatcagtagagttgaccacttctcagtattgcgagatgcatcttacatggtcaagaagataattcctattctgaactacttgctcgtgttgatcagttttgcctagtcccagtaccatacaaagatgttcaggtgaacctgaaaattcttctcaatttgac

SEQ ID NO: 70892 - DNA, 4080 bp, Zea Mays
cgaagctgcaacttccagatcgttctcatcccatcgtttcctcctctgctcaagcacggcagccagtccagccaccatttgggtgctcatctccctctgctcggcacccagccccagctcgcccgagctccctgcgccgacctcatcctccccatggtgcgtcaccttctactcctctccttcccacggcacagcagcgcccctgcagctccccttctccagatccatggcgcccaacaccttgagcgcccctgccgctgctcctccaccgggatctcctcctccactaggcgtccaggcttgtcccaccatggctgcccctcctccatctcctccctccccaccaggttacccagattccatggccgccgccgccccagccatctccctggtggccgacctcgcccctgccccagccacagctcccccttcggccctgctgctgcaagcactcagcccctcccatggcacacgccccatctgcaacaccgtcgacccccgacgaggtcctgttctcgccctgtcgttttagtactcggcgtcgattaagtagatgctaaccgtgtgtatattcgtgtgttcttgtgaggagaaatcccatgatttgggggaagacgaagtccaagcacaacccccgccaatcgctcgatgaaaaatctaaaccaaaaccctcagcgttttcatgggttccggagggattttatgttggtaaggtgttgtgcggtgtgatctccaattccctattgctgatgtcttactccatcatgaccttagggaaggatgttttcctctaaattactcgtaataattatgcttggtgtatgtgttgttttagctacttgatgaaatgttttagttgtgtgcgataatatggttgccgttcgagtggaaagtagatgtgttgtatgacctgagttggagttgaagcaagtatgtgtgtctcgtattacgaaactaattagagatatgcatgatgtttgtagatggattatgtgtagagtgttttagtacaagtatttttttaggtatagttgaaccaattattgtatatgaattgtgcgatatcaaggttgttctaatgttcttttaacatcttgctaataaggtgttagagtattctaaatgccaaacataggataattttacaagccaaatagaagttaaattgaaggtattgatgtttagggctgtaggtatagttttagttatgcagctagtccaataaagtagatcatgttttctgtagaagcgttatatataaaacttgtagataatctctttatcttacttgtgtaaaaatttcatgaccataggtgtagtagtttaggagttatgatttttccaagtccagtctcagaatctgtccgaattctatacaggtttcgaaaattggattgtttggctaagctaaactgagaatcagcccttagtaattatagaagaattgtagtacttttcttaagctttccaacaaattttggagcaccctttttggtggtctagagatcaagttacagctgtttgaactatagagtctgaatctgtccaaatctggacagcgaagtctgtttgtagtaactgactttgatatgtattgaattaacctgagatgtttataaatgaattgtagacaattctattaactttctaaaaagtctaggatcaccggatttggatttcggaaactccagttctggacttttgaagtagttagtcgaattctgtccaaatctggacaaaatttatgtttagcgctgtttgacctttctaaaggtcgaatcttgttgtgatggtaatacaaaagttatagaggactttataagctttccaaaaagtcctagtttactatttttggatacatattttatgaattgtgagctaaacagatagttgttgacttgctgttctgctgtccaaacacatgtctactgtctgaaaatagctcattttgtagttacatttgcatcaggctttgatgattgctgtacaaggatgatatggcctcccgcccaaagctgtctggtattcagaagcaggttttggcgctgtacaggggattccttcggacagcacgccttaaggcccctgaagaacgccgcaggatcgagtctgttatcttggcagagttccgtgacaacgcaaggagtgttgaccgtaggaactttgtacacatagagtacttgttgaggagagggaagaagcagcttgagcagctcaagaatcctgatattactggactcgctacccttgtagtaaagaaatgagcaagagaagaaggaagacaagtcagacaaaacagaagacgagaagaggttcctaccataacacttaagcaaggaatcctgtacacttctctcctggggttgtgacttgtatattgtcaaggatcacttggatgtggtaaatgctatactggacactgatgatagctgcataaggattgtgcgaaaaaacgggaagacatccctacatactgctgcaaggattggataccatcgtattgtcaaggcactcatagagagggatccaggaattgttccgatcaaggataggaagggacaaactgcacttcacatggctgtgaaaggcaagaacacagatgtagtggaagagttactgatggctgatgtttccattctcaatgtgcgggacaagaagggaaatactgctttgcacatagctacatggaaatgggagaattttgggattatgaaacaccgcagacgtggcttcgacgaaacggaggcgtaggcgagggattcgacattatgaaaaaccagagaagatactacactctaaaatggacatgaatcctctattaccagggaaggatgatgtttattacactgaaacagacgctgtctcacatccgttacccgcactagacgcacccagtctttctacagagagaatcgcgccgttcttgaatctgccattcgctgaatctgccattcgctgctgttgtttctggacagtgaagcagtattccggacagtgaacaaaaatctgggaacacatttcattttcactgtcattggctaccagagtccgggaacaaaatctgggaacaaaatctgggaacacaaaaatctgggaacaaaatctgcctttggctaccagagtttattgctcccatatcattcgctgtccatttcactgtccattcgctgaacacaaaaagctgggaacaaactcattttcccagtgaacaggtagcacaatttagttcacaaaatctgggagcacaatttagttcacaaaatctgggagcaataaacaggttgaacaggtagaacaaaatctgggagcaataaactgccatcccagaacaaaattcgcagctcacatttcagttcacaagctagttcacaatttagttcccaggtagcagtttcacaagctatcacacaagctcacatttctgggagcaaaaaacaggtggcgtagtagcagtcgtgtgttcatcttcatttgcagcaacgacaagttcacggcttggtgcttcatcttcatttccagctacaacaacgacaagccacctgctttggcgcggactagggttgtggtcgcagcgccgccgccacctgctttggcgcggggccgcgagcagcaagggagaagacgcggagtttggagagaaggaggtgcagcgccgccgccacctgctttggcgcgggaccacgggcagcagatctccgggcagcaggggaggagactagcaggggagggaaatggagattgaagaaaatgagatggaaggaagaggcttgacgggagagagaagaaccttgaagagagaagaacggctctggacggcagaagaaaacggcgcgtgggctgatagcgacggaagatcattattcgttctcctgaacgactaataacgatgggatctggaataacaggagcctgatggttgcatcagtagagttgaccacttctcagtattgcgagatgcatcttacatggtcaagaagataattcctattctgaactacttgctcgtgttgatcagttttgcctagtcccagtaccatacaaagatgttcaggtgaacctgaaaattcttctcaatttgac

SEQ ID NO: 70893 - DNA, 2997 bp, Zea Mays
ccgaagctgcaacttccagatcgttctcatcccatcgtttcctcctctgctcaagcacggcagccagtccagccaccatttgggtgctcatctccctctgctcggcacccagccccagctcgcccgagctccctgcgccgacctcatcctccccatggtgcgtcaccttctactcctctccttcccacggcacagcagcgcccctgcagctccccttctccagatccatggcgcccaacaccttgagcgcccctgccgctgctcctccaccgggatctcctcctccactaggcgtccaggcttgtcccaccatggctgcccctcctccatctcctccctccccaccaggttacccagattccatggccgccgccgccccagccatctccctggtggccgacctcgcccctgccccagccacagctcccccttcggccctgctgctgcaagcactcagcccctcccatggcacacgccccatctgcaacaccgtcgacccccgacgaggtcctgttctcgccctgtcgttttagtactcggcgtcgattaagtagatgctaaccgtgtgtatattcgtgtgttcttgtgaggagaaatcccatgatttgggggaagacgaagtccaagcacaacccccgccaatcgctcgatgaaaaatctaaaccaaaaccctcagcgttttcatgggttccggagggattttatgttggtgttgtgcggtgtgatctccaattccctattgctgatgtcttactccatcatgaccttagggctttgatgattgctgtacaaggatgatatggcctcccgcccaaagctgtctggtattcagaagcaggttttggcgctgtacaggggattccttcggacagcacgccttaaggcccctgaagaacgccgcaggatcgagtctgttatcttggcagagttccgtgacaacgcaaggagtgttgaccgtaggaactttgtacacatagagtacttgttgaggagagggaagaagcagcttgagcagctcaagaatcctgatattactggactcgctacccttgtagtaaagaaatgagcaagagaagaaggaagacaagtcagacaaaacagaagacgagaagaggttcctaccataacacttaagcaaggaatcctgtacacttctctcctggggttgtgacttgtatattgtcaaggatcacttggatgtggtaaatgctatactggacactgatgatagctgcataaggattgtgcgaaaaaacgggaagacatccctacatactgctgcaaggattggataccatcgtattgtcaaggcactcatagagagggatccaggaattgttccgatcaaggataggaagggacaaactgcacttcacatggctgtgaaaggcaagaacacagatgtagtggaagagttactgatggctgatgtttccattctcaatgtgcgggacaagaagggaaatactgctttgcacatagctacatggaaatgggagaattttgggattatgaaacaccgcagacgtggcttcgacgaaacggaggcgtaggcgagggattcgacattatgaaaaaccagagaagatactacactctaaaatggacatgaatcctctattaccagggaaggatgatgtttattacactgaaacagacgctgtctcacatccgttacccgcactagacgcacccagtctttctacagagagaatcgcgccgttcttgaatctgccattcgctgaatctgccattcgctgctgttgtttctggacagtgaagcagtattccggacagtgaacaaaaatctgggaacacatttcattttcactgtcattggctaccagagtccgggaacaaaatctgggaacaaaatctgggaacacaaaaatctgggaacaaaatctgcctttggctaccagagtttattgctcccatatcattcgctgtccatttcactgtccattcgctgaacacaaaaagctgggaacaaactcattttcccagtgaacaggtagcacaatttagttcacaaaatctgggagcacaatttagttcacaaaatctgggagcaataaacaggttgaacaggtagaacaaaatctgggagcaataaactgccatcccagaacaaaattcgcagctcacatttcagttcacaagctagttcacaatttagttcccaggtaccacaatttagttcacaagctagttcacaagctcacatttcaatggagcaatacacaggtagcagtttgacaagctattacacaagctcacatttctgggagcaatacacaggtagcagtttcacaagctatcacacaagctcacatttctgggagcaaaaaacaggtggcgtagtagcagtcgtgtgttcatcttcatttgcagcaacgacaagttcacggcttggtgcttcatcttcatttccagctacaacaacgacaagccacctgctttggcgcggactagggttgtggtcgcagcgccgccgccacctgctttggcgcggggccgcgagcagcaagggagaagacgcggagtttggagagaaggaggtgcagcgccgccgccacctgctttggcgcgggaccacgggcagcagatctccgggcagcaggggaggagactagcaggggagggaaatggagattgaagaaaatgagatggaaggaagaggcttgacgggagagagaagaaccttgaagagagaagaacggctctggacggcagaagaaaacggcgcgtgggctgatagcgacggaagatcattattcgttctcctgaacgactaataacgatgggatctggaataacaggagcctgatggttgcatcagtagagttgaccacttctcagtattgcgagatgcatcttacatggtcaagaagataattcctattctgaactacttgctcgtgttgatcagttttgcctagtcccagtaccatacaaagatgttcaggtgaacctgaaaattcttctcaatttgac

SEQ ID NO: 70894 - DNA, 1975 bp, Zea Mays
aacaaaggtaaacaattgatactaagcatataataagtaaaatcaatggtagaatacattggtttaagaagtacaggataaagcaccattacaatgatctgagatcagccctaaagttcataaatagtcagtaagacatgagcaggtaaaaatcgctagcatagaagattctactccaagcatacgatagaaaggcaactacaattgaaagccaacaaaatagagcagcttaccgagcactaatcctcatcatcttcttctgagctcccaacgtcactactgtactcgtcactactactgctcccaaaatcaagctgcacaggcttgacctgtattgtctctggtcccattggtgccactggtcgcactgaaacaggtgcctgcggcacaggggcctgtgcctcccgctcttcacccttgataccaggtagtatctcatcaagtggtagcgtgatcggatcaccaggcttccatcccggcggcggctttagctccttcgggaacatgggtggcaaggtgtttggtagcctcgacggcccctcctgtggtgcctcatacagcggcgcaacctccacttctgccgcgatcccgtccttcgcatccaatggcttcttgggtacccctacatccaaatcagcaaacagatacagctgcgacgctctcatctgattctcctgtggtacaggtggcaggctaacacggagaggcaacccagcaccatgctccggcggagcaaaggttgtgtaacttatgcggtgcgcgtaggtcaggatgtcatcaagcttaaggctggagtggagggacgtgccgaagtcgccctctgacgccggctcgggatcgtcagcagcagcggcgccacgcgggcgtttgggatcgcgacggtagtcagcgtagtcgtcgacgaggcggtcaagtacttggctcatgaggatctcgttgaagatgttgcttggcacctgaaggatgaacatatatttggatctgttggggatgactgtaagttgatgatgtgggacttgcgtacaaacaaaccagaacaatctattcttgcacatcgaaaggaggtcaactctttgtcattcaatccattcaatgaatggatattggctacagcatctggagacacaactatcaacctatttgacatgcgaaaactatctagaagcttgcatacttttgacagtcatgaggcggaggtgtttcaggttgaatggaatccaaatttggctactgtattagcttcatctgccgcagacaagagagtgatgatatgggatattaataggattggcgatgagcagtcagaggaagacgcagacgacggaccaccggagctgctgttcgttcatggaggccacacagacaagatatcagagctgtcgtggaatcctagcgagaaatgggccattgccagcgtgtctgaagacaacatcctgcagatatgggagatggcagaaagcatatactgtgatgacctctccatgcaggttaactgactcgtgcctcgaagcataaaggggaaactggtcgtccggacggctggcacacgtggagacggaggcgttcatttctctctctcttcttcttcttcgtcttctctgtccatcacatcttttttttcaatgaagttttatggatatagggactggaaggcaaccctctgatcggatcgttcgctgtcatgttgttttggattaaagttaattgtttacaactgtaatatatagtgataaaaacattatagaaagaaaggtagcgaatagtacgtaggggccgctgttggtccagcattggttgaggaggcaggcccgaggcacggtacgaaaggcaacagggccacgcacgcggcttcccaccgagtccgggcgccatcccgtcccgtgtggtcgcggtcaatcagtgacagtcccgtgtcggtccgggtcccctccatccacgtcttccttccttccttccttctccggtttaaaccaag

SEQ ID NO: 70895 - DNA, 1624 bp, Zea Mays
aaaaaaaaaaaaacctctccctccaaaactcctctcttccccttccgaattacagtttccctcgcatcctcctcctacatctatctcccacctcgcacaatcacagattcctgattcctcaatcctcagtaccccgctgcctgtcctccacgcacctcaccgcaaacatggcgaacgccgccgacgacctggacctcctgctatcactaggcgaggccgtcccggagacacctcccgcctccccccgcaccgccgatgtccccgtgtgcgacggcgctttcacaccaccaaggacggcgccccccggcggcaccgacatgtccgttttccgcgacgccgtcaaggattacctcgaggcggcccccgaaaccacctccccgcttgctaatcgccccaagcgacccaaggccaccgaaatcctcgtcgacaaatactccggcctccgcatcaagcaccttacgctctcgcctcttgagattagcaaccgcttcgctgacatccgatttgtgcgcatcaccgcgttaaagaactctgtggggagcgacaggttctccggctgttgggcaaccgcgggcgtgttactggacaagggcgtgcagcgggtgagtgcgaaggggagcagctacagcatctggaagatgggcgctctggacgagaccgacgtatctctgttcctgtttggggacgcgcacgttcactactccggagctgctgtgggttcagtgttcgctgtgttcaatggcaatgtccgcatggacaatgggggcaaagggttctctatgagtgttgcttctgttggacagatgttgaagatgggggtcgcatcagattttggtctctgcaaaggcaagaggaaagacggggtggcttgcaccatggctataaataaaaaacatcacaaaagtatactactggcagagtagagcttaagggcggaaatttcaaatttgcttccaaacttcgatctgaagggatttacatggtcaatccttcctcagaacgacccaatccaagaaattctttgcaaccggtgaaagtaatgtcaattgatgggctaaaaagggctttaagcaatgcagatagagtgactaataagaaccagtcccagggtataagatttctttcccatgttacagctaatatggacaatatggtaccaaaagccccaaccaccggctctaggaatcaacagagatcgaaggccggcttaaacaaaagtttgtcatcatctggcgccaaagccttgcccaaggagggattgcgaaaaccacaacaggatgttaaaaggcaaaagatgaacaatcctacagagaatattgttgagcttgatgcggtcagctcagacgatgacgagataaatatagtactgcgacgctgatgcttcatcaataatagcgtgacatgtaattgtactccaaatcggctaaacaattgtacgctcttgttttcatatatcccaagtcatccgaggcagaaaaattaaatcagatatatttgttgacttatggatcaggttggtccgtagtgttctattttctcttgacatgcagtttaacaattagatataaacatatatttttaatatttttatagaagagagaagtcagcccttgatcaaaagtta

SEQ ID NO: 70896 - DNA, 3141 bp, Zea Mays
cactgccaagcgcagttgtctctgatgtctggtcacgcctgacgacgccgctatcacgcgccaccctcctgccgacgaacgcggcctcctcctcattgctgagcgcagcccctcacttctctcctggctgcgccaccatgatgccgccacggaatgcgcagagccgccgaagagagcagagtcccagcgagaaacgcaggagctcttccttccacctctggcgaacctccaaggaaactcgacgcccagacctgctcgcgcacagggagcatctttgctccggcggctgctcgccggcctccctgtctcctccccagttcttcctctcacagccgtgcagcgccctcttctctacagtggccgctgctcctctctgaagctatgcgcaggagctctccaggacgccgcgcctcctccctgctacacgccccggtcgacgacgaacttcccgtggtctgggaggccgcgcccgcccagatccgccggaaggagcgaaaggagccccgccgccgctgtcatcacaggccgcacgggcttccggtggcctgctcaggcggcggctagggttttgaggggcgctcgggtcgcccagcgcggggacgaccgagcgccgtctgcttcaaacatttggagctcatcccctcgaaatacagaaggtgcatccacaaaggattaatctcttcgtctaattttcttgggcatacacagattcagagcatatggcgatcaagtagctatgcgttcagctgaggacattgcatatgctgtgttacggttttttgcaaagggtgggtcattggttaactactacatgtatcacggaggaacaaattttggaaggactggggcttcttatgtgctgactgggtactatgatgaagctcccatggatgaatatggtatgtacaaggagcccaaatttgggcatctcagggacttgcacaatgtaataaggtcatatcagaaagcattcctcttggggaagcattcgtctgagatattgggtcatgggcacacatctttgagttgcctgaagaaaatctttgcctctctttcctttccaacaataacacgggcgaagatggaacagtaatcttccgaggggagaagcactacgtgcctagccgttcagtctccattcttgcagggtgcaagaacgtggtttacaataccaagagggtgtttgtacaacacaatgaaaggtcataccatacctcagaggtaacaagcaagaataaccaatgggagatgtactcagaaaaaatcccgaagtaccgtgatactaaagtcaggatgaaggaacccctggagcaatttaaccaaaccaaggacgctagtgattacttatggtacaccacaagctttcgcttggagtcagacgatttgccttttagaaatgacatccggcctgtgcttcaggtcaaaagtagtgcacactcaatgatgggatttgccaatgatgctttcgtaggatgcgcacgcggaagcaagcaggtgaagggtttcatgtttgaaaaacccgttgatctgaaagtaggtgtgaaccatgttgtattgttgtcgtcaactatgggaatgaaggtaaaaattcgtcggaactgtggaatgtgtttggaatgtaagatgactgattatactgtcctagccgatatccaggcgaaaaaaatatggctgtattgacgcaagctacaaacactttattttggaaaggtggacatatataaatatcataaatagaagggtggcccatgcgctctgctaatgcaataatccttcccatcagctctaaatttgcatgtttcactatcttctgcaggacagtggtggtgaacttgctgaagtaaagagtggcattcaggagtgcctaatccagggtctgaacactgggacgttggatttacaagtcaatggctggggccataaggctgcactggaaggtgaggacaaggagatctactcagaaaaaggtgtgggcaaagttcagtggaaacctgccgagaacggccgggcagccacttggtataaggtaagttgaaccaggaatacgagcactataggttttggaaacatcaaacatccatttcaattttggttgcaaccctggcccttggtgtcactatgttcactgccatgctagagatacttcgatgagccagatggagatgatcccgttgtacttgacatgagctcaatggacaaaggaatgatttttgtgaatggtgaaggcgtgggtagatactgggtctcataccgaactcttgctggaactccttctcaagcactataccatattccgcgtcctttcttgaaatccaaggacaaccttttggttgtcttcgaggaggagatgggcaagccggatggcatcctcgtgcagacggtgacgagagacgacatatgtctgttcatctcggagcacaacccgggacagataaagacgtgggatacggatggtgacaaaatcaaactcattgcagaggatcacagcaggcggggcaccttgatgtgcccccctgagaagacaatccaagaagtcgtctttgccagcttcggcaacccagagggcatgtgcggcaacttcactgaatgcctcggcaagccatcctgcatgctgccggtggatcacacggtgtacggcgcggacatcaactgccaatcaacgactgctacactgggggtgcaggtgagatgcggaggcggcaagaagggtgcctgagaataacaagatggatgctgctaattaatggacgtttcagcttgtttgtttgttcatcccttcggtttggcactgatgcttacattgttctgacattgcaattgaaatgtgattggaacattcttgatcgggaactaacatgaaatgagtggagggtagatgctgatcagaccaaagatgtgtatttcccccctctttccttctgtctcgtgttgtttcatgtaaccatcacaatatatatagatgttgaataatcatgaccagtagtatagatcttagagcatccctaacttttgaataaaagactcttggagattggagctggactaactgattgcttcttgcaacatgtatatgaacatttcattaaaaaacgagcgatgagcaaaacaatataccctactaattaagatgttgcaaatgag

SEQ ID NO: 70897 - DNA, 2795 bp, Zea Mays
cactgccaagcgcagttgtctctgatgtctggtcacgcctgacgacgccgctatcacgcgccaccctcctgccgacgaacgcggcctcctcctcattgctgagcgcagcccctcacttctctcctggctgcgccaccatgatgccgccacggaatgcgcagagccgccgaagagagcagagtcccagcgagaaacgcaggagctcttccttccacctctggcgaacctccaaggaaactcgacgcccagacctgctcgcgcacagggagcatctttgctccggcggctgctcgccggcctccctgtctcctccccagttcttcctctcacagccgtgcagcgccctcttctctacagtggccgctgctcctctctgaagctatgcgcaggagctctccaggacgccgcgcctcctccctgctacacgccccggtcgacgacgaacttcccgtggtctgggaggccgcgcccgcccagatccgccggaaggagcgaaaggagccccgccgccgctgtcatcacaggccgcacgggcttccggtggcctgctcaggcggcggctagggttttgaggggcgctcgggtcgcccagcgcggggacgaccgagcgccgtctgcttcaaacatttggagctcatcccctcgaaatacagaaggtgcatccacaaaggattaatctcttcgtctaattttcttgggcatacacagattcagagcatatggcgatcaagtagctatgcgttcagctgaggacattgcatatgctgtgttacggttttttgcaaagggtgggtcattggttaactactacatgtatcacggaggaacaaattttggaaggactggggcttcttatgtgctgactgggtactatgatgaagctcccatggatgaatatggtatgtacaaggagcccaaatttgggcatctcagggacttgcacaatgtaataaggtcatatcagaaagcattcctcttggggaagcattcgtctgagatattgggtcatgggcacacatctttgagttgcctgaagaaaatctttgcctctctttcctttccaacaataacacgggcgaagatggaacagtaatcttccgaggggagaagcactacgtgcctagccgttcagtctccattcttgcagggtgcaagaacgtggtttacaataccaagagggtgtttgtacaacacaatgaaaggtcataccatacctcagaggtaacaagcaagaataaccaatgggagatgtactcagaaaaaatcccgaagtaccgtgatactaaagtcaggatgaaggaacccctggagcaatttaaccaaaccaaggacgctagtgattacttatggtacaccacaagctttcgcttggagtcagacgatttgccttttagaaatgacatccggcctgtgcttcaggtcaaaagtagtgcacactcaatgatgggatttgccaatgatgctttcgtaggatgcgcacgcggaagcaagcaggtgaagggtttcatgtttgaaaaacccgttgatctgaaagtaggtgtgaaccatgttgtattgttgtcgtcaactatgggaatgaaggacagtggtggtgaacttgctgaagtaaagagtggcattcaggagtgcctaatccagggtctgaacactgggacgttggatttacaagtcaatggctggggccataaggctgcactggaaggtgaggacaaggagatctactcagaaaaaggtgtgggcaaagttcagtggaaacctgccgagaacggccgggcagccacttggtataagagatacttcgatgagccagatggagatgatcccgttgtacttgacatgagctcaatggacaaaggaatgatttttgtgaatggtgaaggcgtgggtagatactgggtctcataccgaactcttgctggaactccttctcaagcactataccatattccgcgtcctttcttgaaatccaaggacaaccttttggttgtcttcgaggaggagatgggcaagccggatggcatcctcgtgcagacggtgacgagagacgacatatgtctgttcatctcggagcacaacccgggacagataaagacgtgggatacggatggtgacaaaatcaaactcattgcagaggatcacagcaggcggggcaccttgatgtgcccccctgagaagacaatccaagaagtcgtctttgccagcttcggcaacccagagggcatgtgcggcaacttcactgaatgcctcggcaagccatcctgcatgctgccggtggatcacacggtgtacggcgcggacatcaactgccaatcaacgactgctacactgggggtgcaggtgagatgcggaggcggcaagaagggtgcctgagaataacaagatggatgctgctaattaatggacgtttcagcttgtttgtttgttcatcccttcggtttggcactgatgcttacattgttctgacattgcaattgaaatgtgattggaacattcttgatcgggaactaacatgaaatgagtggagggtagatgctgatcagaccaaagatgtgtatttcccccctctttccttctgtctcgtgttgtttcatgtaaccatcacaatatatatagatgttgaataatcatgaccagtagtatagatcttagagcatccctaacttttgaataaaagactcttggagattggagctggactaactgattgcttcttgcaacatgtatatgaacatttcattaaaaaacgagcgatgagcaaaacaatataccctactaattaagatgttgcaaatgag

SEQ ID NO: 70898 - DNA, 3137 bp, Zea Mays
cactgccaagcgcagttgtctctgatgtctggtcacgcctgacgacgccgctatcacgcgccaccctcctgccgacgaacgcggcctcctcctcattgctgagcgcagcccctcacttctctcctggctgcgccaccatgatgccgccacggaatgcgcagagccgccgaagagagcagagtcccagcgagaaacgcaggagctcttccttccacctctggcgaacctccaaggaaactcgacgcccagacctgctcgcgcacagggagcatctttgctccggcggctgctcgccggcctccctgtctcctccccagttcttcctctcacagccgtgcagcgccctcttctctacagtggccgctgctcctctctgaagctatgcgcaggagctctccaggacgccgcgcctcctccctgctacacgccccggtcgacgacgaacttcccgtggtctgggaggccgcgcccgcccagatccgccggaaggagcgaaaggagccccgccgccgctgtcatcacaggccgcacgggcttccggtggcctgctcaggcggcggctagggttttgaggggcgctcgggtcgcccagcgcggggacgaccgagcgccgtctgcttcaaacatttggagctcatcccctcgaaatacagaaggtatgtacaaggagcccaaatttgggcatctcagggacttgcacaatgtaataaggtcatatcagaaagcattcctcttggggaagcattcgtctgagatattgggtcatgggtatgaggttgggagcaacttcttcaatcattttggttcctggaaacttgtgttctctgacctacaaatcaatcttctttggtgttgtgattaattttctatgttgcaggcacacatctttgagttgcctgaagaaaatctttgcctctctttcctttccaacaataacacgggcgaagatggaacagtaatcttccgaggggagaagcactacgtgcctagccgttcagtctccattcttgcagggtgcaagaacgtggtttacaataccaagagggtgtttgtacaacacaatgaaaggtcataccatacctcagaggtaacaagcaagaataaccaatgggagatgtactcagaaaaaatcccgaagtaccgtgatactaaagtcaggatgaaggaacccctggagcaatttaaccaaaccaaggacgctagtgattacttatggtacaccacaagctttcgcttggagtcagacgatttgccttttagaaatgacatccggcctgtgcttcaggtcaaaagtagtgcacactcaatgatgggatttgccaatgatgctttcgatgcgcacgcggaagcaagcaggtgaagggtttcatgtttgaaaaacccgttgatctgaaagtaggtgtgaaccatgttgtattgttgtcgtcaactatgggaatgaaggtaaaaattcgtcggaactgtggaatgtgtttggaatgtaagatgactgattatactgtcctagccgatatccaggcgaaaaaaatatggctgtattgacgcaagctacaaacactttattttggaaaggtggacatatataaatatcataaatagaagggtggcccatgcgctctgctaatgcaataatccttcccatcagctctaaatttgcatgtttcactatcttctgcaggacagtggtggtgaacttgctgaagtaaagagtggcattcaggagtgcctaatccagggtctgaacactgggacgttggatttacaagtcaatggctggggccataaggctgcactggaaggtgaggacaaggagatctactcagaaaaaggtgtgggcaaagttcagtggaaacctgccgagaacggccgggcagccacttggtataaggtaagttgaaccaggaatacgagcactataggttttggaaacatcaaacatccatttcaattttggttgcaaccctggcccttggtgtcactatgttcactgccatgctagagatacttcgatgagccagatggagatgatcccgttgtacttgacatgagctcaatggacaaaggaatgatttttgtgaatggtgaaggcgtgggtagatactgggtctcataccgaactcttgctggaactccttctcaagcactgtaagtttgtggagttaaccttattgaggcaggtatacaagcttgacaacaaaatgtcatttcatttgtctcttccgctctgccttcagataccatattccgcgtcctttcttgaaatccaaggacaaccttttggttgtcttcgaggaggagatgggcaagccggatggcatcctcgtgcagacggtgacgagagacgacatatgtctgttcatctcggagcacaacccgggacagataaagacgtgggatacggatggtgacaaaatcaaactcattgcagaggatcacagcaggcggggcaccttgatgtgcccccctgagaagacaatccaagaagtcgtctttgccagcttcggcaacccagagggcatgtgcggcaacttcactgtaggcacttgccacactcccaatgcaaagcagatcgttgagaaggaatgcctcggcaagccatcctgcatgctgccggtggatcacacggtgtacggcgcggacatcaactgccaatcaacgactgctacactgggggtgcaggtgagatgcggaggcggcaagaagggtgcctgagaataacaagatggatgctgctaattaatggacgtttcagcttgtttgtttgttcatcccttcggtttggcactgatgcttacattgttctgacattgcaattgaaatgtgattggaacattcttgatcgggaactaacatgaaatgagtggagggtagatgctgatcagaccaaagatgtgtatttcccccctctttccttctgtctcgtgttgtttcatgtaaccatcacaatatatatagatgttgaataatcatgaccagtagtatagatcttagagcatccctaacttttgaataaaagactcttggagattggagctggactaactgattgcttcttgcaacatgtatatgaacatttcattaaaaaacgagcgatgagcaaaacaatataccctactaattaagatgttgcaaatgag

SEQ ID NO: 70899 - DNA, 2847 bp, Zea Mays
cactgccaagcgcagttgtctctgatgtctggtcacgcctgacgacgccgctatcacgcgccaccctcctgccgacgaacgcggcctcctcctcattgctgagcgcagcccctcacttctctcctggctgcgccaccatgatgccgccacggaatgcgcagagccgccgaagagagcagagtcccagcgagaaacgcaggagctcttccttccacctctggcgaacctccaaggaaactcgacgcccagacctgctcgcgcacagggagcatctttgctccggcggctgctcgccggcctccctgtctcctccccagttcttcctctcacagccgtgcagcgccctcttctctacagtggccgctgctcctctctgaagctatgcgcaggagctctccaggacgccgcgcctcctccctgctacacgccccggtcgacgacgaacttcccgtggtctgggaggccgcgcccgcccagatccgccggaaggagcgaaaggagccccgccgccgctgtcatcacaggccgcacgggcttccggtggcctgctcaggcggcggctagggttttgaggggcgctcgggtcgcccagcgcggggacgaccgagcgccgtctgcttcaaacatttggagctcatcccctcgaaatacagaaggtgcatccacaaaggattaatctcttcgtctaattttcttgggcatacacagattcagagcatatggcgatcaagtagctatgcgttcagctgaggacattgcatatgctgtgttacggttttttgcaaagggtgggtcattggttaactactacatgtatcacggaggaacaaattttggaaggactggggcttcttatgtgctgactgggtactatgatgaagctcccatggatgaatatggtatgtacaaggagcccaaatttgggcatctcagggacttgcacaatgtaataaggtcatatcagaaagcattcctcttggggaagcattcgtctgagatattgggtcatgggtatgaggcacacatctttgagttgcctgaagaaaatctttgcctctctttcctttccaacaataacacgggcgaagatggaacagtaatcttccgaggggagaagcactacgtgcctagccgttcagtctccattcttgcagggtgcaagaacgtggtttacaataccaagagggtgtttgtacaacacaatgaaaggtcataccatacctcagaggtaacaagcaagaataaccaatgggagatgtactcagaaaaaatcccgaagtaccgtgatactaaagtcaggatgaaggaacccctggagcaatttaaccaaaccaaggacgctagtgattacttatggtacaccacaagctttcgcttggagtcagacgatttgccttttagaaatgacatccggcctgtgcttcaggtcaaaagtagtgcacactcaatgatgggatttgccaatgatgctttcgtaggatgcgcacgcggaagcaagcaggtgaagggtttcatgtttgaaaaacccgttgatctgaaagtaggtgtgaaccatgttgtattgttgtcgtcaactatgggaatgaaggacagtggtggtgaacttgctgaagtaaagagtggcattcaggagtgcctaatccagggtctgaacactgggacgttggatttacaagtcaatggctggggccataaggctgcactggaaggtgaggacaaggagatctactcagaaaaaggtgtgggcaaagttcagtggaaacctgccgagaacggccgggcagccacttggtataagagatacttcgatgagccagatggagatgatcccgttgtacttgacatgagctcaatggacaaaggaatgatttttgtgaatggtgaaggcgtgggtagatactgggtctcataccgaactcttgctggaactccttctcaagcactataccatattccgcgtcctttcttgaaatccaaggacaaccttttggttgtcttcgaggaggagatgggcaagccggatggcatcctcgtgcagacggtgacgagagacgacatatgtctgttcatctcggagcacaacccgggacagataaagacgtgggatacggatggtgacaaaatcaaactcattgcagaggatcacagcaggcggggcaccttgatgtgcccccctgagaagacaatccaagaagtcgtctttgccagcttcggcaacccagagggcatgtgcggcaacttcactgtaggcacttgccacactcccaatgcaaagcagatcgttgagaaggaatgcctcggcaagccatcctgcatgctgccggtggatcacacggtgtacggcgcggacatcaactgccaatcaacgactgctacactgggggtgcaggtgagatgcggaggcggcaagaagggtgcctgagaataacaagatggatgctgctaattaatggacgtttcagcttgtttgtttgttcatcccttcggtttggcactgatgcttacattgttctgacattgcaattgaaatgtgattggaacattcttgatcgggaactaacatgaaatgagtggagggtagatgctgatcagaccaaagatgtgtatttcccccctctttccttctgtctcgtgttgtttcatgtaaccatcacaatatatatagatgttgaataatcatgaccagtagtatagatcttagagcatccctaacttttgaataaaagactcttggagattggagctggactaactgattgcttcttgcaacatgtatatgaacatttcattaaaaaacgagcgatgagcaaaacaatataccctactaattaagatgttgcaaatgag

SEQ ID NO: 70900 - DNA, 2840 bp, Zea Mays
cactgccaagcgcagttgtctctgatgtctggtcacgcctgacgacgccgctatcacgcgccaccctcctgccgacgaacgcggcctcctcctcattgctgagcgcagcccctcacttctctcctggctgcgccaccatgatgccgccacggaatgcgcagagccgccgaagagagcagagtcccagcgagaaacgcaggagctcttccttccacctctggcgaacctccaaggaaactcgacgcccagacctgctcgcgcacagggagcatctttgctccggcggctgctcgccggcctccctgtctcctccccagttcttcctctcacagccgtgcagcgccctcttctctacagtggccgctgctcctctctgaagctatgcgcaggagctctccaggacgccgcgcctcctccctgctacacgccccggtcgacgacgaacttcccgtggtctgggaggccgcgcccgcccagatccgccggaaggagcgaaaggagccccgccgccgctgtcatcacaggccgcacgggcttccggtggcctgctcaggcggcggctagggttttgaggggcgctcgggtcgcccagcgcggggacgaccgagcgccgtctgcttcaaacatttggagctcatcccctcgaaatacagaaggtgcatccacaaaggattaatctcttcgtctaattttcttgggcatacacagattcagagcatatggcgatcaagtagctatgcgttcagctgaggacattgcatatgctgtgttacggttttttgcaaagggtgggtcattggttaactactacatgtatcacggaggaacaaattttggaaggactggggcttcttatgtgctgactgggtactatgatgaagctcccatggatgaatatggtatgtacaaggagcccaaatttgggcatctcagggacttgcacaatgtaataaggtcatatcagaaagcattcctcttggggaagcattcgtctgagatattgggtcatgggcacacatctttgagttgcctgaagaaaatctttgcctctctttcctttccaacaataacacgggcgaagatggaacagtaatcttccgaggggagaagcactacgtgcctagccgttcagtctccattcttgcagggtgcaagaacgtggtttacaataccaagagggtgtttgtacaacacaatgaaaggtcataccatacctcagaggtaacaagcaagaataaccaatgggagatgtactcagaaaaaatcccgaagtaccgtgatactaaagtcaggatgaaggaacccctggagcaatttaaccaaaccaaggacgctagtgattacttatggtacaccacaagctttcgcttggagtcagacgatttgccttttagaaatgacatccggcctgtgcttcaggtcaaaagtagtgcacactcaatgatgggatttgccaatgatgctttcgtaggatgcgcacgcggaagcaagcaggtgaagggtttcatgtttgaaaaacccgttgatctgaaagtaggtgtgaaccatgttgtattgttgtcgtcaactatgggaatgaaggacagtggtggtgaacttgctgaagtaaagagtggcattcaggagtgcctaatccagggtctgaacactgggacgttggatttacaagtcaatggctggggccataaggctgcactggaaggtgaggacaaggagatctactcagaaaaaggtgtgggcaaagttcagtggaaacctgccgagaacggccgggcagccacttggtataagagatacttcgatgagccagatggagatgatcccgttgtacttgacatgagctcaatggacaaaggaatgatttttgtgaatggtgaaggcgtgggtagatactgggtctcataccgaactcttgctggaactccttctcaagcactataccatattccgcgtcctttcttgaaatccaaggacaaccttttggttgtcttcgaggaggagatgggcaagccggatggcatcctcgtgcagacggtgacgagagacgacatatgtctgttcatctcggagcacaacccgggacagataaagacgtgggatacggatggtgacaaaatcaaactcattgcagaggatcacagcaggcggggcaccttgatgtgcccccctgagaagacaatccaagaagtcgtctttgccagcttcggcaacccagagggcatgtgcggcaacttcactgtaggcacttgccacactcccaatgcaaagcagatcgttgagaaggaatgcctcggcaagccatcctgcatgctgccggtggatcacacggtgtacggcgcggacatcaactgccaatcaacgactgctacactgggggtgcaggtgagatgcggaggcggcaagaagggtgcctgagaataacaagatggatgctgctaattaatggacgtttcagcttgtttgtttgttcatcccttcggtttggcactgatgcttacattgttctgacattgcaattgaaatgtgattggaacattcttgatcgggaactaacatgaaatgagtggagggtagatgctgatcagaccaaagatgtgtatttcccccctctttccttctgtctcgtgttgtttcatgtaaccatcacaatatatatagatgttgaataatcatgaccagtagtatagatcttagagcatccctaacttttgaataaaagactcttggagattggagctggactaactgattgcttcttgcaacatgtatatgaacatttcattaaaaaacgagcgatgagcaaaacaatataccctactaattaagatgttgcaaatgag

SEQ ID NO: 70901 - DNA, 2802 bp, Zea Mays
cactgccaagcgcagttgtctctgatgtctggtcacgcctgacgacgccgctatcacgcgccaccctcctgccgacgaacgcggcctcctcctcattgctgagcgcagcccctcacttctctcctggctgcgccaccatgatgccgccacggaatgcgcagagccgccgaagagagcagagtcccagcgagaaacgcaggagctcttccttccacctctggcgaacctccaaggaaactcgacgcccagacctgctcgcgcacagggagcatctttgctccggcggctgctcgccggcctccctgtctcctccccagttcttcctctcacagccgtgcagcgccctcttctctacagtggccgctgctcctctctgaagctatgcgcaggagctctccaggacgccgcgcctcctccctgctacacgccccggtcgacgacgaacttcccgtggtctgggaggccgcgcccgcccagatccgccggaaggagcgaaaggagccccgccgccgctgtcatcacaggccgcacgggcttccggtggcctgctcaggcggcggctagggttttgaggggcgctcgggtcgcccagcgcggggacgaccgagcgccgtctgcttcaaacatttggagctcatcccctcgaaatacagaaggtgcatccacaaaggattaatctcttcgtctaattttcttgggcatacacagattcagagcatatggcgatcaagtagctatgcgttcagctgaggacattgcatatgctgtgttacggttttttgcaaagggtgggtcattggttaactactacatgtatcacggaggaacaaattttggaaggactggggcttcttatgtgctgactgggtactatgatgaagctcccatggatgaatatggtatgtacaaggagcccaaatttgggcatctcagggacttgcacaatgtaataaggtcatatcagaaagcattcctcttggggaagcattcgtctgagatattgggtcatgggtatgaggcacacatctttgagttgcctgaagaaaatctttgcctctctttcctttccaacaataacacgggcgaagatggaacagtaatcttccgaggggagaagcactacgtgcctagccgttcagtctccattcttgcagggtgcaagaacgtggtttacaataccaagagggtgtttgtacaacacaatgaaaggtcataccatacctcagaggtaacaagcaagaataaccaatgggagatgtactcagaaaaaatcccgaagtaccgtgatactaaagtcaggatgaaggaacccctggagcaatttaaccaaaccaaggacgctagtgattacttatggtacaccacaagctttcgcttggagtcagacgatttgccttttagaaatgacatccggcctgtgcttcaggtcaaaagtagtgcacactcaatgatgggatttgccaatgatgctttcgtaggatgcgcacgcggaagcaagcaggtgaagggtttcatgtttgaaaaacccgttgatctgaaagtaggtgtgaaccatgttgtattgttgtcgtcaactatgggaatgaaggacagtggtggtgaacttgctgaagtaaagagtggcattcaggagtgcctaatccagggtctgaacactgggacgttggatttacaagtcaatggctggggccataaggctgcactggaaggtgaggacaaggagatctactcagaaaaaggtgtgggcaaagttcagtggaaacctgccgagaacggccgggcagccacttggtataagagatacttcgatgagccagatggagatgatcccgttgtacttgacatgagctcaatggacaaaggaatgatttttgtgaatggtgaaggcgtgggtagatactgggtctcataccgaactcttgctggaactccttctcaagcactataccatattccgcgtcctttcttgaaatccaaggacaaccttttggttgtcttcgaggaggagatgggcaagccggatggcatcctcgtgcagacggtgacgagagacgacatatgtctgttcatctcggagcacaacccgggacagataaagacgtgggatacggatggtgacaaaatcaaactcattgcagaggatcacagcaggcggggcaccttgatgtgcccccctgagaagacaatccaagaagtcgtctttgccagcttcggcaacccagagggcatgtgcggcaacttcactgaatgcctcggcaagccatcctgcatgctgccggtggatcacacggtgtacggcgcggacatcaactgccaatcaacgactgctacactgggggtgcaggtgagatgcggaggcggcaagaagggtgcctgagaataacaagatggatgctgctaattaatggacgtttcagcttgtttgtttgttcatcccttcggtttggcactgatgcttacattgttctgacattgcaattgaaatgtgattggaacattcttgatcgggaactaacatgaaatgagtggagggtagatgctgatcagaccaaagatgtgtatttcccccctctttccttctgtctcgtgttgtttcatgtaaccatcacaatatatatagatgttgaataatcatgaccagtagtatagatcttagagcatccctaacttttgaataaaagactcttggagattggagctggactaactgattgcttcttgcaacatgtatatgaacatttcattaaaaaacgagcgatgagcaaaacaatataccctactaattaagatgttgcaaatgag

SEQ ID NO: 70902 - DNA, 2901 bp, Zea Mays
cactgccaagcgcagttgtctctgatgtctggtcacgcctgacgacgccgctatcacgcgccaccctcctgccgacgaacgcggcctcctcctcattgctgagcgcagcccctcacttctctcctggctgcgccaccatgatgccgccacggaatgcgcagagccgccgaagagagcagagtcccagcgagaaacgcaggagctcttccttccacctctggcgaacctccaaggaaactcgacgcccagacctgctcgcgcacagggagcatctttgctccggcggctgctcgccggcctccctgtctcctccccagttcttcctctcacagccgtgcagcgccctcttctctacagtggccgctgctcctctctgaagctatgcgcaggagctctccaggacgccgcgcctcctccctgctacacgccccggtcgacgacgaacttcccgtggtctgggaggccgcgcccgcccagatccgccggaaggagcgaaaggagccccgccgccgctgtcatcacaggccgcacgggcttccggtggcctgctcaggcggcggctagggttttgaggggcgctcgggtcgcccagcgcggggacgaccgagcgccgtctgcttcaaacatttggagctcatcccctcgaaatacagaaggtgcatccacaaaggattaatctcttcgtctaattttcttgggcatacacagattcagagcatatggcgatcaagtagctatgcgttcagctgaggacattgcatatgctgtgttacggttttttgcaaagggtgggtcattggttaactactacatgtatcacggaggaacaaattttggaaggactggggcttcttatgtgctgactgggtactatgatgaagctcccatggatgaatatggtatgtacaaggagcccaaatttgggcatctcagggacttgcacaatgtaataaggtcatatcagaaagcattcctcttggggaagcattcgtctgagatattgggtcatgggtatgaggcacacatctttgagttgcctgaagaaaatctttgcctctctttcctttccaacaataacacgggcgaagatggaacagtaatcttccgaggggagaagcactacgtgcctagccgttcagtctccattcttgcagggtgcaagaacgtggtttacaataccaagagggtgtttgtacaacacaatgaaaggtcataccatacctcagaggtaacaagcaagaataaccaatgggagatgtactcagaaaaaatcccgaagtaccgtgatactaaagtcaggatgaaggaacccctggagcaatttaaccaaaccaaggacgctagtgattacttatggtacaccacaagctttcgcttggagtcagacgatttgccttttagaaatgacatccggcctgtgcttcaggtcaaaagtagtgcacactcaatgatgggatttgccaatgatgctttcgtaggatgcgcacgcggaagcaagcaggtgaagggtttcatgtttgaaaaacccgttgatctgaaagtaggtgtgaaccatgttgtattgttgtcgtcaactatgggaatgaaggcgaaaaaaatatggctgtattgacgcaagctacaaacactttattttggaaaggacagtggtggtgaacttgctgaagtaaagagtggcattcaggagtgcctaatccagggtctgaacactgggacgttggatttacaagtcaatggctggggccataaggctgcactggaaggtgaggacaaggagatctactcagaaaaaggtgtgggcaaagttcagtggaaacctgccgagaacggccgggcagccacttggtataagagatacttcgatgagccagatggagatgatcccgttgtacttgacatgagctcaatggacaaaggaatgatttttgtgaatggtgaaggcgtgggtagatactgggtctcataccgaactcttgctggaactccttctcaagcactataccatattccgcgtcctttcttgaaatccaaggacaaccttttggttgtcttcgaggaggagatgggcaagccggatggcatcctcgtgcagacggtgacgagagacgacatatgtctgttcatctcggagcacaacccgggacagataaagacgtgggatacggatggtgacaaaatcaaactcattgcagaggatcacagcaggcggggcaccttgatgtgcccccctgagaagacaatccaagaagtcgtctttgccagcttcggcaacccagagggcatgtgcggcaacttcactgtaggcacttgccacactcccaatgcaaagcagatcgttgagaaggaatgcctcggcaagccatcctgcatgctgccggtggatcacacggtgtacggcgcggacatcaactgccaatcaacgactgctacactgggggtgcaggtgagatgcggaggcggcaagaagggtgcctgagaataacaagatggatgctgctaattaatggacgtttcagcttgtttgtttgttcatcccttcggtttggcactgatgcttacattgttctgacattgcaattgaaatgtgattggaacattcttgatcgggaactaacatgaaatgagtggagggtagatgctgatcagaccaaagatgtgtatttcccccctctttccttctgtctcgtgttgtttcatgtaaccatcacaatatatatagatgttgaataatcatgaccagtagtatagatcttagagcatccctaacttttgaataaaagactcttggagattggagctggactaactgattgcttcttgcaacatgtatatgaacatttcattaaaaaacgagcgatgagcaaaacaatataccctactaattaagatgttgcaaatgag

SEQ ID NO: 70903 - DNA, 3098 bp, Zea Mays
atgaccgtccgggccgcggccgtgctggtggccgccgccgtgctcgttctcctcctcccgggatgggcggcggcggagtggaatctcacgaagaaaggcagcgtcgtcacctacgatgggcgctctctcatgatcgacggcaagcgggacctcttcttctccggcgccatccactaccccaggagcccgcctgaggtgtggccgaagctgatcgagcgggctaaggagggcggcctcaacacgatcgagacgtacatattctggaacgcgcacgaacctgagcctggcaagtacaattttgaaggccggttcgacttgatcaagtacctcaagatgatccaggagcatgacatgtatgcaattgtgcgcatcgggcccttcatccaggcagaatggaaccatggtggtctgccttattggcttagagagatcgaccacataatattccgggcaaacaatgatccctacaagaaagaaatggagaaattcgtgagattcatagtgcagaagttgaaggatgctgagttatttgcatctcaaggaggacccatcattctaacacagatcgagaatgaatatgggaacataaaaaaagatcatgcaacagacggtgacaagtacctcgaatgggcagctcaaatggcgctcagcacacaaacaggagttccatggataatgtgcaagcagtcttcagctcctggtgaagtgatccctacttgcaatggaaggcattgtggagatacatggacactacgcgacaaaaataagcctatgctttggactgagaattggactcaacaattcagagcatatggcgatcaagtagctatgcgttcagctgaggacattgcatatgctgtgttacggttttttgcaaagggtgggtcattggttaactactacatgtatcacggaggaacaaattttggaaggactggggcttcttatgtgctgactgggtactatgatgaagctcccatggatgaatatggtatgtacaaggagcccaaatttgggcatctcagggacttgcacaatgtaataaggtcatatcagaaagcattcctcttggggaagcattcgtctgagatattgggtcatgggtatgaggttgggagcaacttcttcaatcattttggttcctggaaacttgtgttctctgacctacaaatcaatcttctttggtgttgtgattaattttctatgttgcaggcacacatctttgagttgcctgaagaaaatctttgcctctctttcctttccaacaataacacgggcgaagatggaacagtaatcttccgaggggagaagcactacgtgcctagccgttcagtctccattcttgcagggtgcaagaacgtggtttacaataccaagagggtgtttgtacaacacaatgaaaggtcataccatacctcagaggtaacaagcaagaataaccaatgggagatgtactcagaaaaaatcccgaagtaccgtgatactaaagtcaggatgaaggaacccctggagcaatttaaccaaaccaaggacgctagtgattacttatggtacaccacaagctttcgcttggagtcagacgatttgccttttagaaatgacatccggcctgtgcttcaggtcaaaagtagtgcacactcaatgatgggatttgccaatgatgctttcgatgcgcacgcggaagcaagcaggtgaagggtttcatgtttgaaaaacccgttgatctgaaagtaggtgtgaaccatgttgtattgttgtcgtcaactatgggaatgaagtggtggtgaacttgctgaagtaaagagtggcattcaggagtgcctaatccagggtctgaacactgggacgttggatttacaagtcaatggctggggccataaggctgcactggaaggtgaggacaaggagatctactcagaaaaaggtgtgggcaaagttcagtggaaacctgccgagaacggccgggcagccacttggtataaggtaagttgaaccaggaatacgagcactataggttttggaaacatcaaacatccatttcaattttggttgcaaccctggcccttggtgtcactatgttcactgccatgctagagatacttcgatgagccagatggagatgatcccgttgtacttgacatgagctcaatggacaaaggaatgatttttgtgaatggtgaaggcgtgggtagatactgggtctcataccgaactcttgctggaactccttctcaagcactataccatattccgcgtcctttcttgaaatccaaggacaaccttttggttgtcttcgaggaggagatgggcaagccggatggcatcctcgtgcagacggtgacgagagacgacatatgtctgttcatctcggagcacaacccgggacagataaagacgtgggatacggatggtgacaaaatcaaactcattgcagaggatcacagcaggcggggcaccttgatgtgcccccctgagaagacaatccaagaagtcgtctttgccagcttcggcaacccagagggcatgtgcggcaacttcactgaatgcctcggcaagccatcctgcatgctgccggtggatcacacggtgtacggcgcggacatcaactgccaatcaacgactgctacactgggggtgcaggtgagatgcggaggcggcaagaagggtgcctgagaataacaagatggatgctgctaattaatggacgtttcagcttgtttgtttgttcatcccttcggtttggcactgatgcttacattgttctgacattgcaattgaaatgtgattggaacattcttgatcgggaactaacatgaaatgagtggagggtagatgctgatcagaccaaagatgtgtatttcccccctctttccttctgtctcgtgttgtttcatgtaaccatcacaatatatatagatgttgaataatcatgaccagtagtatagatcttagagcatccctaacttttgaataaaagactcttggagattggagctggactaactgattgcttcttgcaacatgtatatgaacatttcattaaaaaacgagcgatgagcaaaacaatataccctactaattaagatgttgcaaatgag

SEQ ID NO: 70904 - DNA, 3002 bp, Zea Mays
cttctcctgcgtgccctactgcccttcacctctcgtaccccccctcccccgcctttcccgcaattccggctcacatgaccgtccgggccgcggccgtgctggtggccgccgccgtgctcgttctcctcctcccgggatgggcggcggcggagtggaatctcacgaagaaaggcagcgtcgtcacctacgatgggcgctctctcatgatcgacggcaagcgggacctcttcttctccggcgccatccactaccccaggagcccgcctgaggtgtggccgaagctgatcgagcgggctaaggagggcggcctcaacacgatcgagacgtacatattctggaacgcgcacgaacctgagcctggcaagtacaattttgaaggccggttcgacttgatcaagtacctcaagatgatccaggagcatgacatgtatgcaattgtgcgcatcgggcccttcatccaggcagaatggaaccatggtggtctgccttattggcttagagagatcgaccacataatattccgggcaaacaatgatccctacaagaaagaaatggagaaattcgtgagattcatagtgcagaagttgaaggatgctgagttatttgcatctcaaggaggacccatcattctaacacagatcgagaatgaatatgggaacataaaaaaagatcatgcaacagacggtgacaagtacctcgaatgggcagctcaaatggcgctcagcacacaaacaggagttccatggataatgtgcaagcagtcttcagctcctggtgaagtgatccctacttgcaatggaaggcattgtggagatacatggacactacgcgacaaaaataagcctatgctttggactgagaattggactcaacaattcagagcatatggcgatcaagtagctatgcgttcagctgaggacattgcatatgctgtgttacggttttttgcaaagggtgggtcattggttaactactacatgtatcacggaggaacaaattttggaaggactggggcttcttatgtgctgactgggtactatgatgaagctcccatggatgaatatggtatgtacaaggagcccaaatttgggcatctcagggacttgcacaatgtaataaggtcatatcagaaagcattcctcttggggaagcattcgtctgagatattgggtcatgggcacacatctttgagttgcctgaagaaaatctttgcctctctttcctttccaacaataacacgggcgaagatggaacagtaatcttccgaggggagaagcactacgtgcctagccgttcagtctccattcttgcagggtgcaagaacgtggtttacaataccaagagggtgtttgtacaacacaatgaaaggtcataccatacctcagaggtaacaagcaagaataaccaatgggagatgtactcagaaaaaatcccgaagtaccgtgatactaaagtcaggatgaaggaacccctggagcaatttaaccaaaccaaggacgctagtgattacttatggtacaccacaagctttcgcttggagtcagacgatttgccttttagaaatgacatccggcctgtgcttcaggtcaaaagtagtgcacactcaatgatgggatttgccaatgatgctttcgatgcgcacgcggaagcaagcaggtgaagggtttcatgtttgaaaaacccgttgatctgaaagtaggtgtgaaccatgttgtattgttgtcgtcaactatgggaatgaaggacagtggtggtgaacttgctgaagtaaagagtggcattcaggagtgcctaatccagggtctgaacactgggacgttggatttacaagtcaatggctggggccataaggctgcactggaaggtgaggacaaggagatctactcagaaaaaggtgtgggcaaagttcagtggaaacctgccgagaacggccgggcagccacttggtataagagatacttcgatgagccagatggagatgatcccgttgtacttgacatgagctcaatggacaaaggaatgatttttgtgaatggtgaaggcgtgggtagatactgggtctcataccgaactcttgctggaactccttctcaagcactataccatattccgcgtcctttcttgaaatccaaggacaaccttttggttgtcttcgaggaggagatgggcaagccggatggcatcctcgtgcagacggtgacgagagacgacatatgtctgttcatctcggagcacaacccgggacagataaagacgtgggatacggatggtgacaaaatcaaactcattgcagaggatcacagcaggcggggcaccttgatgtgcccccctgagaagacaatccaagaagtcgtctttgccagcttcggcaacccagagggcatgtgcggcaacttcactgtaggcacttgccacactcccaatgcaaagcagatcgttgagaaggaatgcctcggcaagccatcctgcatgctgccggtggatcacacggtgtacggcgcggacatcaactgccaatcaacgactgctacactgggggtgcaggtgagatgcggaggcggcaagaagggtgcctgagaataacaagatggatgctgctaattaatggacgtttcagcttgtttgtttgttcatcccttcggtttggcactgatgcttacattgttctgacattgcaattgaaatgtgattggaacattcttgatcgggaactaacatgaaatgagtggagggtagatgctgatcagaccaaagatgtgtatttcccccctctttccttctgtctcgtgttgtttcatgtaaccatcacaatatatatagatgttgaataatcatgaccagtagtatagatcttagagcatccctaacttttgaataaaagactcttggagattggagctggactaactgattgcttcttgcaacatgtatatgaacatttcattaaaaaacgagcgatgagcaaaacaatataccctactaattaagatgttgcaaatgag

SEQ ID NO: 70905 - DNA, 3420 bp, Zea Mays
ctcccttctcctgcgtgccctactgcccttcacctctcgtaccccccctcccccgcctttcccgcaattccggctcacatgaccgtccgggccgcggccgtgctggtggccgccgccgtgctcgttctcctcctcccgggatgggcggcggcggagtggaatctcacgaagaaaggcagcgtcgtcacctacgatgggcgctctctcatgatcgacggcaagcgggacctcttcttctccggcgccatccactaccccaggagcccgcctgaggtgtggccgaagctgatcgagcgggctaaggagggcggcctcaacacgatcgagacgtacatattctggaacgcgcacgaacctgagcctggcaagtacaattttgaaggccggttcgacttgatcaagtacctcaagatgatccaggagcatgacatgtatgcaattgtgcgcatcgggcccttcatccaggcagaatggaaccatggtggtctgccttattggcttagagagatcgaccacataatattccgggcaaacaatgatccctacaagaaagaaatggagaaattcgtgagattcatagtgcagaagttgaaggatgctgagttatttgcatctcaaggaggacccatcattctaacacagatcgagaatgaatatgggaacataaaaaaagatcatgcaacagacggtgacaagtacctcgaatgggcagctcaaatggcgctcagcacacaaacaggagttccatggataatgtgcaagcagtcttcagctcctggtgaagtgatccctacttgcaatggaaggcattgtggagatacatggacactacgcgacaaaaataagcctatgctttggactgagaattggactcaacaattcagagcatatggcgatcaagtagctatgcgttcagctgaggacattgcatatgctgtgttacggttttttgcaaagggtgggtcattggttaactactacatgtatcacggaggaacaaattttggaaggactggggcttcttatgtgctgactgggtactatgatgaagctcccatggatgaatatggtatgtacaaggagcccaaatttgggcatctcagggacttgcacaatgtaataaggtcatatcagaaagcattcctcttggggaagcattcgtctgagatattgggtcatgggtatgaggttgggagcaacttcttcaatcattttggttcctggaaacttgtgttctctgacctacaaatcaatcttctttggtgttgtgattaattttctatgttgcaggcacacatctttgagttgcctgaagaaaatctttgcctctctttcctttccaacaataacacgggcgaagatggaacagtaatcttccgaggggagaagcactacgtgcctagccgttcagtctccattcttgcagggtgcaagaacgtggtttacaataccaagagggtgtttgtacaacacaatgaaaggtcataccatacctcagaggtaacaagcaagaataaccaatgggagatgtactcagaaaaaatcccgaagtaccgtgatactaaagtcaggatgaaggaacccctggagcaatttaaccaaaccaaggacgctagtgattacttatggtacaccacaagctttcgcttggagtcagacgatttgccttttagaaatgacatccggcctgtgcttcaggtcaaaagtagtgcacactcaatgatgggatttgccaatgatgctttcgtaggatgcgcacgcggaagcaagcaggtgaagggtttcatgtttgaaaaacccgttgatctgaaagtaggtgtgaaccatgttgtattgttgtcgtcaactatgggaatgaaggtaaaaattcgtcggaactgtggaatgtgtttggaatgtaagatgactgattatactgtcctagccgatatccaggcgaaaaaaatatggctgtattgacgcaagctacaaacactttattttggaaaggtggacatatataaatatcataaatagaagggtggcccatgcgctctgctaatgcaataatccttcccatcagctctaaatttgcatgtttcactatcttctgcaggacagtggtggtgaacttgctgaagtaaagagtggcattcaggagtgcctaatccagggtctgaacactgggacgttggatttacaagtcaatggctggggccataaggctgcactggaaggtgaggacaaggagatctactcagaaaaaggtgtgggcaaagttcagtggaaacctgccgagaacggccgggcagccacttggtataaggtaagttgaaccaggaatacgagcactataggttttggaaacatcaaacatccatttcaattttggttgcaaccctggcccttggtgtcactatgttcactgccatgctagagatacttcgatgagccagatggagatgatcccgttgtacttgacatgagctcaatggacaaaggaatgatttttgtgaatggtgaaggcgtgggtagatactgggtctcataccgaactcttgctggaactccttctcaagcactataccatattccgcgtcctttcttgaaatccaaggacaaccttttggttgtcttcgaggaggagatgggcaagccggatggcatcctcgtgcagacggtgacgagagacgacatatgtctgttcatctcggagcacaacccgggacagataaagacgtgggatacggatggtgacaaaatcaaactcattgcagaggatcacagcaggcggggcaccttgatgtgcccccctgagaagacaatccaagaagtcgtctttgccagcttcggcaacccagagggcatgtgcggcaacttcactgaatgcctcggcaagccatcctgcatgctgccggtggatcacacggtgtacggcgcggacatcaactgccaatcaacgactgctacactgggggtgcaggtgagatgcggaggcggcaagaagggtgcctgagaataacaagatggatgctgctaattaatggacgtttcagcttgtttgtttgttcatcccttcggtttggcactgatgcttacattgttctgacattgcaattgaaatgtgattggaacattcttgatcgggaactaacatgaaatgagtggagggtagatgctgatcagaccaaagatgtgtatttcccccctctttccttctgtctcgtgttgtttcatgtaaccatcacaatatatatagatgttgaataatcatgaccagtagtatagatcttagagcatccctaacttttgaataaaagactcttggagattggagctggactaactgattgcttcttgcaacatgtatatgaacatttcattaaaaaacgagcgatgagcaaaacaatataccctactaattaagatgttgcaaatgag

SEQ ID NO: 70906 - DNA, 3484 bp, Zea Mays
ccacctccactcgcagctcctccatttccgcgcgtccgctccaccacaacgccccgcgaacccgtccccttcaaagcggtcacctcttcctccgaccctcgctagcttcgcctcccttctcctgcgtgccctactgcccttcacctctcgtaccccccctcccccgcctttcccgcaattccggctcacatgaccgtccgggccgcggccgtgctggtggccgccgccgtgctcgttctcctcctcccgggatgggcggcggcggagtggaatctcacgaagaaaggcagcgtcgtcacctacgatgggcgctctctcatgatcgacggcaagcgggacctcttcttctccggcgccatccactaccccaggagcccgcctgaggtgtggccgaagctgatcgagcgggctaaggagggcggcctcaacacgatcgagacgtacatattctggaacgcgcacgaacctgagcctggcaagtacaattttgaaggccggttcgacttgatcaagtacctcaagatgatccaggagcatgacatgtatgcaattgtgcgcatcgggcccttcatccaggcagaatggaaccatggtggtctgccttattggcttagagagatcgaccacataatattccgggcaaacaatgatccctacaagaaagaaatggagaaattcgtgagattcatagtgcagaagttgaaggatgctgagttatttgcatctcaaggaggacccatcattctaacacagatcgagaatgaatatgggaacataaaaaaagatcatgcaacagacggtgacaagtacctcgaatgggcagctcaaatggcgctcagcacacaaacaggagttccatggataatgtgcaagcagtcttcagctcctggtgaagtgattcagagcatatggcgatcaagtagctatgcgttcagctgaggacattgcatatgctgtgttacggttttttgcaaagggtgggtcattggttaactactacatgtatcacggaggaacaaattttggaaggactggggcttcttatgtgctgactgggtactatgatgaagctcccatggatgaatatggtatgtacaaggagcccaaatttgggcatctcagggacttgcacaatgtaataaggtcatatcagaaagcattcctcttggggaagcattcgtctgagatattgggtcatgggtatgaggttgggagcaacttcttcaatcattttggttcctggaaacttgtgttctctgacctacaaatcaatcttctttggtgttgtgattaattttctatgttgcaggcacacatctttgagttgcctgaagaaaatctttgcctctctttcctttccaacaataacacgggcgaagatggaacagtaatcttccgaggggagaagcactacgtgcctagccgttcagtctccattcttgcagggtgcaagaacgtggtttacaataccaagagggtgtttgtacaacacaatgaaaggtcataccatacctcagaggtaacaagcaagaataaccaatgggagatgtactcagaaaaaatcccgaagtaccgtgatactaaagtcaggatgaaggaacccctggagcaatttaaccaaaccaaggacgctagtgattacttatggtacaccacaagctttcgcttggagtcagacgatttgccttttagaaatgacatccggcctgtgcttcaggtcaaaagtagtgcacactcaatgatgggatttgccaatgatgctttcgtaggatgcgcacgcggaagcaagcaggtgaagggtttcatgtttgaaaaacccgttgatctgaaagtaggtgtgaaccatgttgtattgttgtcgtcaactatgggaatgaaggtaaaaattcgtcggaactgtggaatgtgtttggaatgtaagatgactgattatactgtcctagccgatatccaggcgaaaaaaatatggctgtattgacgcaagctacaaacactttattttggaaaggtggacatatataaatatcataaatagaagggtggcccatgcgctctgctaatgcaataatccttcccatcagctctaaatttgcatgtttcactatcttctgcaggacagtggtggtgaacttgctgaagtaaagagtggcattcaggagtgcctaatccagggtctgaacactgggacgttggatttacaagtcaatggctggggccataaggctgcactggaaggtgaggacaaggagatctactcagaaaaaggtgtgggcaaagttcagtggaaacctgccgagaacggccgggcagccacttggtataaggtaagttgaaccaggaatacgagcactataggttttggaaacatcaaacatccatttcaattttggttgcaaccctggcccttggtgtcactatgttcactgccatgctagagatacttcgatgagccagatggagatgatcccgttgtacttgacatgagctcaatggacaaaggaatgatttttgtgaatggtgaaggcgtgggtagatactgggtctcataccgaactcttgctggaactccttctcaagcactataccatattccgcgtcctttcttgaaatccaaggacaaccttttggttgtcttcgaggaggagatgggcaagccggatggcatcctcgtgcagacggtgacgagagacgacatatgtctgttcatctcggagcacaacccgggacagataaagacgtgggatacggatggtgacaaaatcaaactcattgcagaggatcacagcaggcggggcaccttgatgtgcccccctgagaagacaatccaagaagtcgtctttgccagcttcggcaacccagagggcatgtgcggcaacttcactgtaggcacttgccacactcccaatgcaaagcagatcgttgagaaggaatgcctcggcaagccatcctgcatgctgccggtggatcacacggtgtacggcgcggacatcaactgccaatcaacgactgctacactgggggtgcaggtgagatgcggaggcggcaagaagggtgcctgagaataacaagatggatgctgctaattaatggacgtttcagcttgtttgtttgttcatcccttcggtttggcactgatgcttacattgttctgacattgcaattgaaatgtgattggaacattcttgatcgggaactaacatgaaatgagtggagggtagatgctgatcagaccaaagatgtgtatttcccccctctttccttctgtctcgtgttgtttcatgtaaccatcacaatatatatagatgttgaataatcatgaccagtagtatagatcttagagcatccctaacttttgaataaaagactcttggagattggagctggactaactgattgcttcttgcaacatgtatatgaacatttcattaaaaaacgagcgatgagcaaaacaatataccctactaattaagatgttgcaaatgag

SEQ ID NO: 70907 - DNA, 3235 bp, Zea Mays
gtccgctcgcaagcttttgccgcgatgcccgaccaagcagcgcaccccgctgtccacctccactcgcagctcctccatttccgcgcgtccgctccaccacaacgccccgcgaacccgtccccttcaaagcggtcacctcttcctccgaccctcgctagcttcgcctcccttctcctgcgtgccctactgcccttcacctctcgtaccccccctcccccgcctttcccgcaattccggctcacatgaccgtccgggccgcggccgtgctggtggccgccgccgtgctcgttctcctcctcccgggatgggcggcggcggagtggaatctcacgaagaaaggcagcgtcgtcacctacgatgggcgctctctcatgatcgacggcaagcgggacctcttcttctccggcgccatccactaccccaggagcccgcctgaggtgtggccgaagctgatcgagcgggctaaggagggcggcctcaacacgatcgagacgtacatattctggaacgcgcacgaacctgagcctggcaagtacaattttgaaggccggttcgacttgatcaagtacctcaagatgatccaggagcatgacatgtatgcaattgtgcgcatcgggcccttcatccaggcagaatggaaccatggtggtctgccttattggcttagagagatcgaccacataatattccgggcaaacaatgatccctacaagaaagaaatggagaaattcgtgagattcatagtgcagaagttgaaggatgctgagttatttgcatctcaaggaggacccatcattctaacacagatcgagaatgaatatgggaacataaaaaaagatcatgcaacagacggtgacaagtacctcgaatgggcagctcaaatggcgctcagcacacaaacaggagttccatggataatgtgcaagcagtcttcagctcctggtgaagtgatccctacttgcaatggaaggcattgtggagatacatggacactacgcgacaaaaataagcctatgctttggactgagaattggactcaacaattcagagcatatggcgatcaagtagctatgcgttcagctgaggacattgcatatgctgtgttacggttttttgcaaagggtgggtcattggttaactactacatgtatcacggaggaacaaattttggaaggactggggcttcttatgtgctgactgggtactatgatgaagctcccatggatgaatatggtatgtacaaggagcccaaatttgggcatctcagggacttgcacaatgtaataaggtcatatcagaaagcattcctcttggggaagcattcgtctgagatattgggtcatgggtatgaggcacacatctttgagttgcctgaagaaaatctttgcctctctttcctttccaacaataacacgggcgaagatggaacagtaatcttccgaggggagaagcactacgtgcctagccgttcagtctccattcttgcagggtgcaagaacgtggtttacaataccaagagggtgtttgtacaacacaatgaaaggtcataccatacctcagaggtaacaagcaagaataaccaatgggagatgtactcagaaaaaatcccgaagtaccgtgatactaaagtcaggatgaaggaacccctggagcaatttaaccaaaccaaggacgctagtgattacttatggtacaccacaagctttcgcttggagtcagacgatttgccttttagaaatgacatccggcctgtgcttcaggtcaaaagtagtgcacactcaatgatgggatttgccaatgatgctttcgtaggatgcgcacgcggaagcaagcaggtgaagggtttcatgtttgaaaaacccgttgatctgaaagtaggtgtgaaccatgttgtattgttgtcgtcaactatgggaatgaaggcgaaaaaaatatggctgtattgacgcaagctacaaacactttattttggaaaggacagtggtggtgaacttgctgaagtaaagagtggcattcaggagtgcctaatccagggtctgaacactgggacgttggatttacaagtcaatggctggggccataaggctgcactggaaggtgaggacaaggagatctactcagaaaaaggtgtgggcaaagttcagtggaaacctgccgagaacggccgggcagccacttggtataagagatacttcgatgagccagatggagatgatcccgttgtacttgacatgagctcaatggacaaaggaatgatttttgtgaatggtgaaggcgtgggtagatactgggtctcataccgaactcttgctggaactccttctcaagcactataccatattccgcgtcctttcttgaaatccaaggacaaccttttggttgtcttcgaggaggagatgggcaagccggatggcatcctcgtgcagacggtgacgagagacgacatatgtctgttcatctcggagcacaacccgggacagataaagacgtgggatacggatggtgacaaaatcaaactcattgcagaggatcacagcaggcggggcaccttgatgtgcccccctgagaagacaatccaagaagtcgtctttgccagcttcggcaacccagagggcatgtgcggcaacttcactgtaggcacttgccacactcccaatgcaaagcagatcgttgagaaggaatgcctcggcaagccatcctgcatgctgccggtggatcacacggtgtacggcgcggacatcaactgccaatcaacgactgctacactgggggtgcaggtgagatgcggaggcggcaagaagggtgcctgagaataacaagatggatgctgctaattaatggacgtttcagcttgtttgtttgttcatcccttcggtttggcactgatgcttacattgttctgacattgcaattgaaatgtgattggaacattcttgatcgggaactaacatgaaatgagtggagggtagatgctgatcagaccaaagatgtgtatttcccccctctttccttctgtctcgtgttgtttcatgtaaccatcacaatatatatagatgttgaataatcatgaccagtagtatagatcttagagcatccctaacttttgaataaaagactcttggagattggagctggactaactgattgcttcttgcaacatgtatatgaacatttcattaaaaaacgagcgatgagcaaaacaatataccctactaattaagatgttgcaaatgag

SEQ ID NO: 70908 - DNA, 762 bp, Zea Mays
attaaatcaaaagttgggtaggggtgccgaccggcgcatctgccatcccgacgcccgcggccatccgacgggcctcgcagctcggccggccgccgcccagtcctcggttctggcaagccacagtaccctgtcggcactgtgcacgccatcgatccgttggggtgctggctgctgctatataaatgggctgggcccgccacgccacgaagaacgccccgtcatttccgcgaccgccggcgccaccccaggctccgcgcgccaaggagccacagccacacaagatggccgtcgctcctgaaccatccaagaagagggtggcgccggggactggactggaggagtggacggagacggcggactcgctctactccgtgtccccaccgccgagcagcgtaccgatgcctacgtccctgttgctcacagtcacgccgccgaccgcctgcgccgtggatgtcggcgccaccgacgagctccgacggatcctcaagctttagctgcgacgatgcggctatggcatcgcaacaaagatgtgatctgcgtgactgtccgttctctttagcgagcaagcgagcttcatggtctcgtcccaaagttgtactattctagtaatcgaatgttccaatgcgttgtgttttccattccaaccaaaccacgcattcgagtatgagatgttgcttttttttctttttttttgtaatcgaatgtgtccgtattgtgttccgaaccactaattaattccagtatgagatgtctccgtttgaa

SEQ ID NO: 70909 - DNA, 3179 bp, Zea Mays
accgaagaaagtgacctgttgggcgcctgcgtgcgcgaggatagctgggcctggtttggcagcttgtaagcaagtagtacttatgcactacctgatggaagggtcaggattatcgaaaacatgaacaactattttctctctgcagaagatactccatccttcctgtgatcttccctaccttctcttgtatcttcctccactcctgctgtgtatcttcctccactcctgctgttcggttagggattagtgagtattgctaacaattggtatcagattcgttcgatcctcggagttttctacctcgatctgttttcctcgactgctgcatcgacatgtcgctcgatacgaagctcatcctcaacgccattagcgagctcttcgacaagttcgacgcgcgatggtccatgagggatgccgcgcgggaggcatccaggcgcgtccctgttccgacccagtgcacggttgtcggagccgacgtggtcgccgacaactggggcaacctcttcgacagtggcgtcgattccgacgagcagcgctacgaggaacccatcaacgccgacaattggggtggattcttcgatggagcagacgtgtctgccaacgccgagttcgccggccactgggacaacccttcctccaaccccgacgcgactgcctatgtcacaccagaggttgcggtggaatcggtgcacccggccgcacgcggacgcttcttcaacgacgattcgggtgccccgcttgactcggacgacgacagctccgtccacggcggccacggatccgtgatgtcccatctcctggagcgcgaggccgacaccgccttccttccccacttggatcagcgggatggagttgaggcgtggctcatcctgcgccggtgcactcccgcctccttcaacgtcgcctccaccgaccccaacaacgaggtctcgagcgccgttaccgcggacgcgctcgctaaggccgcgcccgcgctcttcgcttcgagggcgcccagaccatcgctcaagtacctggagctgcttctccaggcagaaatcgacttcgaccacattgacctaccgactgctgccgccgcagagcacatcgtcgcccaggtcaccggcaacaacgcggtgtccgtggtggaggaccaactcaggtgcaccctcttcctcacgcgtaacttcctgtcaagccaccaccaggccgtcagcaaggagtgggacatggtcgccgtcgtgcacccagtgtgcaacgtgggggaaaagaaggtggacgccatctgcactggccagatcgagcacctgctactgcatcacctcaagcgttcacctacctcgattggtgccaaggcggtgttcgatgaaatgcagcaaagcaccaattccgcgacaacgacacccgcatcctcagctctgacaacaacaactactacaaccatggctgcaccggccacctggctggacgcgcagcctgctgtgtcgacatgctcatcagcatcttctgctcaagaagatacaccaataccactcctcttccttcgcggtggactgagtatgatggataatgtcttacctgctaattctactttcctgtctaccaacatatcactcagcaacatggagtgtctgagagagtttatgcttcaccttaagctcggcaccgccagattcactatttgtgacgaaagtgtagtgaacctgtggtcgtcgccggtggagcgagttgttcagcaacaaacatggctacaacttgagttgacaaatagtggtcttgacctatggcctatctcatggcaatcgcaacaagtctattttggtactcaccatggattcgctgcatggcccaggagccatggcacaattcttgtcttcgattttagcaataccttgtcctggaacaactcaatgtcaattgttgcttcatgctcaaccaacacccttcttgccaaggatgatggagattctatgaaccggtgtttcagttggtgttggaagcctccatggttacatccaggagtctgccgttctctgcacatgattactaaattttctaagcaatactttgttggcctatttttgctaattacaagggaaaaatttatgtctgggagaataatgttggctcttcttccacttctgaagctatttacatcaggaggagcaaggattgtcaatgcttcctcacttgcgtcggagctgaagagaatgccaaatgagaagttgcgaaacgatttgagcaacattgacatctgggacgaggaccggatacaagcagtactcaacacattcttggaagacctgaggagcggtcggctggaagaggctgggtggcccgtgatgctaccagcctacagcctgtcgaaaatggtcatcaatctgtacaccaggatcatagcaaggaggtatccggagatgcgcatcaactgtgtgcgacctggatttgtcacgacggacatcagctggaatctgggggtcctgacgcctaaacaaggtgcgagagggccagtcatgctagctctcctcccagatgatggaccaacgggttggtacagagatgaaatgggcgataagatgggcagcctattatttttcaaaatggtcaagtattcatcactagtcgagggattttgtggtgtgcagttttcatttcctaatattctattgtgcaagtcttggtcacaggagttagccaccaacacagaaagccatttactaccagaaatgctagaagcggccaatggttatatttgtcatgagcttcatcttatgcttacctctattggagtgacacatatgatcgattgtgaagatactccatccttcctgtgatcttccctaccttctcttgtatcttcctccactcctgctgtgtatcttcctccactcctgctgttcggttagggattagtgagtattgctaacagacggggacagaggatgtttgaaaagcgcagcatactcccgttgggcttcttgactgatttctccattactgatgatgtgcaaggccttcatagctttcttggaagattttccaccccaatcctgcatagcaaattccacaccaattccagccacccgcctgctacgtcttggagcattcgccttatagggctttgaagtcttctgatttgatgcagaaagaggcgacgctgacgaggagaacaacggcgccatagctgctgtcgccggctt

SEQ ID NO: 70910 - DNA, 3527 bp, Zea Mays
accgaagaaagtgacctgttgggcgcctgcgtgcgcgaggatagctgggcctggtttggcagcttgtaagcaagtagtacttatgcactacctgatggaagggtcaggattatcgaaaacatgaacaactattttctctctgcagaagatactccatccttcctgtgatcttccctaccttctcttgtatcttcctccactcctgctgtgtatcttcctccactcctgctgttcggttagggattagtgagtattgctaacaattggtatcagattcgttcgatcctcggagttttctacctcgatctgttttcctcgactgctgcatcgacatgtcgctcgatacgaagctcatcctcaacgccattagcgagctcttcgacaagttcgacgcgcgatggtccatgagggatgccgcgcgggaggcatccaggcgcgtccctgttccgacccagtgcacggttgtcggagccgacgtggtcgccgacaactggggcaacctcttcgacagtggcgtcgattccgacgagcagcgctacgaggaacccatcaacgccgacaattggggtggattcttcgatggagcagacgtgtctgccaacgccgagttcgccggccactgggacaacccttcctccaaccccgacgcgactgcctatgtcacaccagaggttgcggtggaatcggtgcacccggccgcacgcggacgcttcttcaacgacgattcgggtgccccgcttgactcggacgacgacagctccgtccacggcggccacggatccgtgatgtcccatctcctggagcgcgaggccgacaccgccttccttccccacttggatcagcgggatggagttgaggcgtggctcatcctgcgccggtgcactcccgcctccttcaacgtcgcctccaccgaccccaacaacgaggtctcgagcgccgttaccgcggacgcgctcgctaaggccgcgcccgcgctcttcgcttcgagggcgcccagaccatcgctcaagtacctggagctgcttctccaggcagaaatcgacttcgaccacattgacctaccgactgctgccgccgcagagcacatcgtcgcccaggtcaccggcaacaacgcggtgtccgtggtggaggaccaactcaggtgcaccctcttcctcacgcgtaacttcctgtcaagccaccaccaggccgtcagcaaggagtgggacatggtcgccgtcgtgcacccagtgtgcaacgtgggggaaaagaaggtggacgccatctgcactggccagatcgagcacctgctactgcatcacctcaagcgttcacctacctcgattggtgccaaggcggtgttcgatgaaatgcagcaaagcaccaattccgcgacaacgacacccgcatcctcagctctgacaacaacaactactacaaccatggctgcaccggccacctggctggacgcgcagcctgctgtgtcgacatgctcatcagcatcttctgctcaagaagatacaccaataccactcctcttccttcgcggtggactgagtatgatggataatgtcttacctgctaattctactttcctgtctaccaacatatcactcagcaacatggagtgtctgagagagtttatgcttcaccttaagctcggcaccgccagattcactatttgtgacgaaagtgtagtgaacctgtggtcgtcgccggtggagcgagttgttcagcaacaaacatggctacaacttgagttgacaaatagtggtcttgacctatggcctatctcatggcaatcgcaacaagtctattttggtactcaccatggattcgctgcatggcccaggagccatggcacaattcttgtcttcgattttagcaataccttgtcctggaacaactcaatgtcaattgttgcttcatgctcaaccaacacccttcttgccaaggatgatggagattctatgaaccggtgtttcagttggtgttggaagcctccatggttacatccaggtcagtcgaaattcagagatttcctctggtggtctttttggtatttccaatttgtcaggtccaagtattatgggtgcagagcatcacaattactaactccttggacaccacctatgacattatgtttggttggtgatgaccttgttgtgatgctagttattccaagtatgctactgttatctcggtgctattttagtggagtagaatgtgtgctggcagctgcagatccgttattttctacatttcatgctgagagagagttgttctggaagccaccttggcaacatctagttcctaacaccagatctgagatacagttgttgatggagtttgtctatctcaatacaggagtctgccgttctctgcacatgattactaaattttctaagcaatactttgttggcctatttttgctaattacaagggaaaaatttatgtctgggagaataatgttggctcttcttccacttctgaagctatttacatcaggaggagcaaggattgtcaatgcttcctcacttgcgtcggagctgaagagaatgccaaatgagaagttgcgaaacgatttgagcaacattgacatctgggacgaggaccggatacaagcagtactcaacacattcttggaagacctgaggagcggtcggctggaagaggctgggtggcccgtgatgctaccagcctacagcctgtcgaaaatggtcatcaatctgtacaccaggatcatagcaaggaggtatccggagatgcgcatcaactgtgtgcgacctggatttgtcacgacggacatcagctggaatctgggggtcctgacgcctaaacaaggtgcgagagggccagtcatgctagctctcctcccagatgatggaccaacgggttggtacagagatgaaatgggcgataagatgggcagcctattatttttcaaaatggtcaagtattcatcactagtcgagggattttgtggtgtgcagttttcatttcctaatattctattgtgcaagtcttggtcacaggagttagccaccaacacagaaagccatttactaccagaaatgctagaagcggccaatggttatatttgtcatgagcttcatcttatgcttacctctattggagtgacacatatgatcgattgtgaagatactccatccttcctgtgatcttccctaccttctcttgtatcttcctccactcctgctgtgtatcttcctccactcctgctgttcggttagggattagtgagtattgctaacagacggggacagaggatgtttgaaaagcgcagcatactcccgttgggcttcttgactgatttctccattactgatgatgtgcaaggccttcatagctttcttggaagattttccaccccaatcctgcatagcaaattccacaccaattccagccacccgcctgctacgtcttggagcattcgccttatagggctttgaagtcttctgatttgatgcagaaagaggcgacgctgacgaggagaacaacggcgccatagctgctgtcgccggctt

SEQ ID NO: 70911 - DNA, 3871 bp, Zea Mays
accgaagaaagtgacctgttgggcgcctgcgtgcgcgaggatagctgggcctggtttggcagcttgtaagcaagtagtacttatgcactacctgatggaagggtcaggattatcgaaaacatgaacaactattttctctctgcagaagatactccatccttcctgtgatcttccctaccttctcttgtatcttcctccactcctgctgtgtatcttcctccactcctgctgttcggttagggattagtgagtattgctaacaattggtatcagattcgttcgatcctcggagttttctacctcgatctgttttcctcgactgctgcatcgacatgtcgctcgatacgaagctcatcctcaacgccattagcgagctcttcgacaagttcgacgcgcgatggtccatgagggatgccgcgcgggaggcatccaggcgcgtccctgttccgacccagtgcacggttgtcggagccgacgtggtcgccgacaactggggcaacctcttcgacagtggcgtcgattccgacgagcagcgctacgaggaacccatcaacgccgacaattggggtggattcttcgatggagcagacgtgtctgccaacgccgagttcgccggccactgggacaacccttcctccaaccccgacgcgactgcctatgtcacaccagaggttgcggtggaatcggtgcacccggccgcacgcggacgcttcttcaacgacgattcgggtgccccgcttgactcggacgacgacagctccgtccacggcggccacggatccgtgatgtcccatctcctggagcgcgaggccgacaccgccttccttccccacttggatcagcgggatggagttgaggcgtggctcatcctgcgccggtgcactcccgcctccttcaacgtcgcctccaccgaccccaacaacgaggtctcgagcgccgttaccgcggacgcgctcgctaaggccgcgcccgcgctcttcgcttcgagggcgcccagaccatcgctcaagtacctggagctgcttctccaggcagaaatcgacttcgaccacattgacctaccgactgctgccgccgcagagcacatcgtcgcccaggtcaccggcaacaacgcggtgtccgtggtggaggaccaactcaggtgcaccctcttcctcacgcgtaacttcctgtcaagccaccaccaggccgtcagcaaggagtgggacatggtcgccgtcgtgcacccagtgtgcaacgtgggggaaaagaaggtggacgccatctgcactggccagatcgagcacctgctactgcatcacctcaagcgttcacctacctcgattggtgccaaggcggtgttcgatgaaatgcagcaaagcaccaattccgcgacaacgacacccgcatcctcagctctgacaacaacaactactacaaccatggctgcaccggccacctggctggacgcgcagcctgctgtgtcgacatgctcatcagcatcttctgctcaagaagatacaccaataccactcctcttccttcgcggtggactgagtatgatggataatgtcttacctgctaattctactttcctgtctaccaacatatcactcagcaacatggagtgtctgagagagtttatgcttcaccttaagctcggcaccgccagattcactatttgtgacgaaagtgtagtgaacctgtggtcgtcgccggtggagcgagttgttcagcaacaaacatggctacaacttgagttgacaaatagtggtcttgacctatggcctatctcatggcaatcgcaacaagtctattttggtactcaccatggattcgctgcatggcccaggagccatggcacaattcttgtcttcgattttagcaataccttgtcctggaacaactcaatgtcaattgttgcttcatgctcaaccaacacccttcttgccaaggatgatggagattctatgaaccggtgtttcagttggtgttggaagcctccatggttacatccaggtcagtcgaaattcagagatttcctctggtggtctttttggtatttccaatttgtcaggtccaagtattatgggtgcagagcatcacaattactaactccttggacaccacctatgacattatgtttggttggtgatgaccttgttgtgatgctagttattccaagtatgctactgttatctcggtgctattttagtggagtagaatgtgtgctggcagctgcagatccgttattttctacatttcatgctgagagagagttgttctggaagccaccttggcaacatctagttcctaacaccagatctgagatacagttgttgatggagtttgtctatctcaatacaggagtctgccgttctctgcacatgattactaaattttctaagcaatactttgttggcctatttttgctaattacaagggaaaaatttatgtctgggagaataatgttggctcttcttccacttctgaagctatttacatcaggaggagcaaggattgtcaatgcttcctcacttgcgtcggagctgaagagaatgccaaatgagaagttgcgaaacgatttgagcaacattgacatctgggacgaggaccggatacaagcagtactcaacacattcttggaagacctgaggagcggtcggctggaagaggctgggtggcccgtgatgctaccagcctacagcctgtcgaaaatggtcatcaatctgtacaccaggatcatagcaaggaggtatccggagatgcgcatcaactgtgtgcgacctggatttgtcacgacggacatcagctggaatctgggggtcctgacgcctaaacaaggtgcgagagggccagtcatgctagctctcctcccagatgatggaccaacgggttggtacagagatgaaatgggcgataagatgggcagcctattatttttcaaaatggtcaagtattcatcactagtcgagggattttgtggtgtgcagttttcatttcctaatattctattgtgcaagtcttggtcacaggagttagccaccaacacagaaagccatttactaccagaaatgctagaagcggccaatggttatatttgtcatgagcttcatcttatgcttacctctattggagtgacacatatgatcgattgtgaagatactccatccttcctgtgatcttccctaccttctcttgtatcttcctccactcctgctgtgtatcttcctccactcctgctgttcggttagggattagtgagtattgctaacagacggggacagaggatgtttgaaaagcgcagcatactcccgttgggcttcttgactgatttctccattactgatgatgtgcaaggccttcatagctttcttggaagattttccaccccaatcctgcatagcaaattccacaccaattccagccacccgcctgctacgtcttggagcattcgccttatagggctttgaagtcttctgatttgatgcaggtaatggaagaagggtttgtcaatagtcaaagtaaagtaaaactaaaagcgaccaggtctagaatcggaaccgtcgcctggtttgaaagctatgaagtagagtatgttcctaaagttttattttccagttctatagttttactttgaggtcttttgatttgatgcaaattccacaccaatgccagaatgctcttgtatggtctgccattagtcaaagaataggttcagttccataaacatgcatacatagtgcttgtcggaaatttgagcaactaagaggagatctgaacaaagatgtccataaacaaagaaactatctacacgagctcaatctcaatcacagacatccgcaaactgaatataggaacatacgtgtgtactacattcaggcattctggc

SEQ ID NO: 70912 - DNA, 433 bp, Zea Mays
tagaaagtgtttcgcacacatcctttcgacttcctctccaactctcgtggaaatcactatgtacggaagtgataatgatagttctatgaatgaaagtgaggagttttggaacatagagcttgtttctcaagcatcaatctcaggcattcgattttggatgcctggtgctggattgggctgcctggccggtgcttctaggccagggtgccaaccaaacaagcttggtctttggtggtgtcaaggtagtagaaaaatatgttgagttatattttgaaaaaggtccgcaaaaaatagagatggattcagatgtctggagatctgaattattcatattcggataaagtgctaatatatatagatatccgtatctgtattcgattttaatatggatgttaaatatatatatccgaatttgtttttttctctatcggtt

SEQ ID NO: 70913 - DNA, 2334 bp, Zea Mays
ccatcgaagaaaaggggaaaaggggaaaatgatttcttaaaaaagaggagtgacccggtctaccggagcgtacggtgccgatcccgtcgccgccgctacccctcaatcgcgagcaacttcttccggattcgcaccaagctctccacaattctatcgctatgctgcggaaggccgtcgtcgccttcatcgcctgcaccgccttcttcctcgccttctctgcctactcccgtcgccagggcgttgcagaggttcaattaccagcagttactcacagggtctacctagatgtagaaattgatggccaacacataggtagaattgttattggtctctatggggaggtcgttccaaaaacagttggtattcttattatacttctctttttccagcatgttcttttattgattttgattttcgaagtttgtgtactcctttgcacgcctggtgcttcctgcgcttctgttctagactcttgacatgtggcatagtcatgaactcacacatttgtgagtttccccattgttttggttaaaagttaccctgtccctgttccaagtagaagtttagttgatacatattaatttctaacatctgtctgttcctatcagtgtgctgttttgtgtggttaacaaagatctagttgctagcactcttcctattttcatgattccacttatatatgcctatagaagggcagactggtacagtggtgagagctatctcattgattcaccaggtctagggtttgaagcagcctttccgcatttgcggagtaaggcttacctttgtttatcctttccctaaatccaactcatgtgggagccttcagcatggggcctgcccaattatacatgcgtatggctgagaccaacctcaccgcttcaaacttacaattatcatgtcaaagtttttttttgtaacatatatgaaataaaattggcttcacagattatagttcatctactaaatttttttgttctacactctgcagaaaactttagggctctttgtacaggtgaaaaaggtgtcgggtccaatggcaaacctcttcactataagggaacaccattccatcgtattatccctggcttcatgattcagggcggtgacatagttagaggcgacggtaaagggagtgagtctatatatggaggcatcttcccagatgagaatttcactgtaaaacatacacatccaggtgtgattgttcagccagtgaactttatcatccagtttgcattttgcctttgttgaagttcatgtgtactcagttacacatttattttcaaggaaaccaccactattttatttgacactaatgatgctatctattaaagaatatgcaacttttagttgatggcatcttttttagattacaacgcggtcttttttagattacaacgggtctggtttctgatttgattcactatgtagctacacctgatttcaagaaagctttgtaccgagacctactaagttgtttgtcagcaacaagtccaaatattctggtgtttttttccttttgttttactttgtttatatttctttcatcctgacttggttagcaaccggtcaatgtggccaaatcatgaatgggtgtttgatcttctgacaggtatctatctgaatttttttaaattaggatggtcatttccaactctacccctgctttgctgtcttgcaggggttgttgctatggcgaattctggacttgattctaatggatctcagttttacataactactatcaagacaagctggttggatggggagcatgttgtcttcggcagggtgatccaaggaatggataccgtgtacgccatagaagggggcgctgggacttacaatggcaagccaaggaagaaggcggtgatcaccgacgctggtgagatacccaaggagaaatggggtgatcaggaagcgtagggtgttttctacttcttgtcaccttcaaatcagatgtacggaagtgataatgatagttctatgaatgaaagtgaggagttttggaacatagagcttgtttctcaagcatcaatctcaggcattcgattttggatgcctggtgctggattgggctgcctggccggtgcttctaggccagggtgccaaccaaacaagcttggtctttggtggtgtcaaggtagtagaaaaatatgttgagttatattttgaaaaaggtccgcaaaaaatagagatggattcagatgtctggagatctgaattattcatattcggataaagtgctaatatatatagatatccgtatctgtattcgattttaatatggatgttaaatatatatatccgaatttgtttttttctctatcggtt

SEQ ID NO: 70914 - DNA, 1703 bp, Zea Mays
ccatcgaagaaaaggggaaaaggggaaaatgatttcttaaaaaagaggagtgacccggtctaccggagcgtacggtgccgatcccgtcgccgccgctacccctcaatcgcgagcaacttcttccggattcgcaccaagctctccacaattctatcgctatgctgcggaaggccgtcgtcgccttcatcgcctgcaccgccttcttcctcgccttctctgcctactcccgtcgccagggcgttgcagaggttcaattaccagcagttactcacagggtctacctagatgtagaaattgatggccaacacataggtagaattgttattggtctctatggggaggtcgttccaaaaacagttgaaaactttagggctctttgtacaggtgaaaaaggtgtcgggtccaatggcaaacctcttcactataagggaacaccattccatcgtattatccctggcttcatgattcagggcggtgacatagttagaggcgacggtaaagggagtgagtctatatatggaggcatcttcccagatgagaatttcactgtaaaacatacacatccaggtgtgattgttcagccagtgaactttatcatccagtttgcattttgcctttgttgaagttcatgtgtactcagttacacatttattttcaaggaaaccaccactattttatttgacactaatgatgctatctattaaagaatatgcaacttttagttgatggcatcttttttagattacaacgcggtcttttttagattacaacgggtctggtttctgatttgattcactatgtagctacacctgatttcaagaaagctttgtaccgagacctactaagttgtttgtcagcaacaagtccaaatattctggtgtttttttccttttgttttactttgtttatatttctttcatcctgacttggttagcaaccggtcaatgtggccaaatcatgaatgggtgtttgatcttctgacaggtatctatctgaatttttttaaattaggatggtcatttccaactctacccctgctttgctgtcttgcaggggttgttgctatggcgaattctggacttgattctaatggatctcagttttacataactactatcaagacaagctggttggatggggagcatgttgtcttcggcagggtgatccaaggaatggataccgtgtacgccatagaagggggcgctgggacttacaatggcaagccaaggaagaaggcggtgatcaccgacgctggtgagatacccaaggagaaatggggtgatcaggaagcgtagggtgttttctacttcttgtcaccttcaaatcagatgtacggaagtgataatgatagttctatgaatgaaagtgaggagttttggaacatagagcttgtttctcaagcatcaatctcaggcattcgattttggatgcctggtgctggattgggctgcctggccggtgcttctaggccagggtgccaaccaaacaagcttggtctttggtggtgtcaaggtagtagaaaaatatgttgagttatattttgaaaaaggtccgcaaaaaatagagatggattcagatgtctggagatctgaattattcatattcggataaagtgctaatatatatagatatccgtatctgtattcgattttaatatggatgttaaatatatatatccgaatttgtttttttctctatcggtt

SEQ ID NO: 70915 - DNA, 1010 bp, Zea Mays
ccatcgaagaaaaggggaaaaggggaaaatgatttcttaaaaaagaggagtgacccggtctaccggagcgtacggtgccgatcccgtcgccgccgctacccctcaatcgcgagcaacttcttccggattcgcaccaagctctccacaattctatcgctatgctgcggaaggccgtcgtcgccttcatcgcctgcaccgccttcttcctcgccttctctgcctactcccgtcgccagggcgttgcagaggttcaattaccagcagttactcacagggtctacctagatgtagaaattgatggccaacacataggtagaattgttattggtctctatggggaggtcgttccaaaaacagttggggttgttgctatggcgaattctggacttgattctaatggatctcagttttacataactactatcaagacaagctggttggatggggagcatgttgtcttcggcagggtgatccaaggaatggataccgtgtacgccatagaagggggcgctgggacttacaatggcaagccaaggaagaaggcggtgatcaccgacgctggtgagatacccaaggagaaatggggtgatcaggaagcgtagggtgttttctacttcttgtcaccttcaaatcagatgtacggaagtgataatgatagttctatgaatgaaagtgaggagttttggaacatagagcttgtttctcaagcatcaatctcaggcattcgattttggatgcctggtgctggattgggctgcctggccggtgcttctaggccagggtgccaaccaaacaagcttggtctttggtggtgtcaaggtagtagaaaaatatgttgagttatattttgaaaaaggtccgcaaaaaatagagatggattcagatgtctggagatctgaattattcatattcggataaagtgctaatatatatagatatccgtatctgtattcgattttaatatggatgttaaatatatatatccgaatttgtttttttctctatcggtt

SEQ ID NO: 70916 - DNA, 1287 bp, Zea Mays
ccatcgaagaaaaggggaaaaggggaaaatgatttcttaaaaaagaggagtgacccggtctaccggagcgtacggtgccgatcccgtcgccgccgctacccctcaatcgcgagcaacttcttccggattcgcaccaagctctccacaattctatcgctatgctgcggaaggccgtcgtcgccttcatcgcctgcaccgccttcttcctcgccttctctgcctactcccgtcgccagggcgttgcagaggttcaattaccagcagttactcacagggtctacctagatgtagaaattgatggccaacacataggtagaattgttattggtctctatggggaggtcgttccaaaaacagttgaaaactttagggctctttgtacaggtgaaaaaggtgtcgggtccaatggcaaacctcttcactataagggaacaccattccatcgtattatccctggcttcatgattcagggcggtgacatagttagaggcgacggtaaagggagtgagtctatatatggaggcatcttcccagatgagaatttcactgtaaaacatacacatccaggggttgttgctatggcgaattctggacttgattctaatggatctcagttttacataactactatcaagacaagctggttggatggggagcatgttgtcttcggcagggtgatccaaggaatggataccgtgtacgccatagaagggggcgctgggacttacaatggcaagccaaggaagaaggcggtgatcaccgacgctggtgagatacccaaggagaaatggggtgatcaggaagcgtagggtgttttctacttcttgtcaccttcaaatcagatcaaggaagagcggtgtcttcgaaccatcgtcggcattttgatgacctccatgggtgtcagcaaatcagatgtacggaagtgataatgatagttctatgaatgaaagtgaggagttttggaacatagagcttgtttctcaagcatcaatctcaggcattcgattttggatgcctggtgctggattgggctgcctggccggtgcttctaggccagggtgccaaccaaacaagcttggtctttggtggtgtcaaggtagtagaaaaatatgttgagttatattttgaaaaaggtccgcaaaaaatagagatggattcagatgtctggagatctgaattattcatattcggataaagtgctaatatatatagatatccgtatctgtattcgattttaatatggatgttaaatatatatatccgaatttgtttttttctctatcggtt

SEQ ID NO: 70917 - DNA, 1345 bp, Zea Mays
ccgcactgcaataaataagttttgggctgagtgttgtcttgagggctggaaaattcaggcccatgagtcactggatggcctgacgcgctaaactcaatcgaaccaaccaaaatccagggccgtcccgtccatcgaagaaaaggggaaaaggggaaaatgatttcttaaaaaagaggagtgacccggtctaccggagcgtacggtgccgatcccgtcgccgccgctacccctcaatcgcgagcaacttcttccggattcgcaccaagctctccacaattctatcgctatgctgcggaaggccgtcgtcgccttcatcgcctgcaccgccttcttcctcgccttctctgcctactcccgtcgccagggcgttgcagaggttcaattaccagcagttactcacagggtctacctagatgtagaaattgatggccaacacataggtagaattgttattggtctctatggggaggtcgttccaaaaacagttgaaaactttagggctctttgtacaggtgaaaaaggtgtcgggtccaatggcaaacctcttcactataagggaacaccattccatcgtattatccctggcttcatgattcagggcggtgacatagttagaggcgacggtaaagggagtgagtctatatatggaggcatcttcccagatgagaatttcactgtaaaacatacacatccaggggttgttgctatggcgaattctggacttgattctaatggatctcagttttacataactactatcaagacaagctggttggatggggagcatgttgtcttcggcagggtgatccaaggaatggataccgtgtacgccatagaagggggcgctgggacttacaatggcaagccaaggaagaaggcggtgatcaccgacgctggtgagatacccaaggagaaatggggtgatcaggaagcgtagggtgttttctacttcttgtcaccttcaaatcagatgtacggaagtgataatgatagttctatgaatgaaagtgaggagttttggaacatagagcttgtttctcaagcatcaatctcaggcattcgattttggatgcctggtgctggattgggctgcctggccggtgcttctaggccagggtgccaaccaaacaagcttggtctttggtggtgtcaaggtagtagaaaaatatgttgagttatattttgaaaaaggtccgcaaaaaatagagatggattcagatgtctggagatctgaattattcatattcggataaagtgctaatatatatagatatccgtatctgtattcgattttaatatggatgttaaatatatatatccgaatttgtttttttctctatcggtt

SEQ ID NO: 70918 - DNA, 1195 bp, Zea Mays
ccatcgaagaaaaggggaaaaggggaaaatgatttcttaaaaaagaggagtgacccggtctaccggagcgtacggtgccgatcccgtcgccgccgctacccctcaatcgcgagcaacttcttccggattcgcaccaagctctccacaattctatcgctatgctgcggaaggccgtcgtcgccttcatcgcctgcaccgccttcttcctcgccttctctgcctactcccgtcgccagggcgttgcagaggttcaattaccagcagttactcacagggtctacctagatgtagaaattgatggccaacacataggtagaattgttattggtctctatggggaggtcgttccaaaaacaaaaactttagggctctttgtacaggtgaaaaaggtgtcgggtccaatggcaaacctcttcactataagggaacaccattccatcgtattatccctggcttcatgattcagggcggtgacatagttagaggcgacggtaaagggagtgagtctatatatggaggcatcttcccagatgagaatttcactgtaaaacatacacatccaggggttgttgctatggcgaattctggacttgattctaatggatctcagttttacataactactatcaagacaagctggttggatggggagcatgttgtcttcggcagggtgatccaaggaatggataccgtgtacgccatagaagggggcgctgggacttacaatggcaagccaaggaagaaggcggtgatcaccgacgctggtgagatacccaaggagaaatggggtgatcaggaagcgtagggtgttttctacttcttgtcaccttcaaatcaggtagccatgtacttcttttttccttgacctccatggtgtgccacggttcagcaagacttccggaatgttgtatatcgtagctagcttatggccagtcgaattgactctgatcccttgagttgtgatgtggagacgcatacatctgaaaaatctttaggccatgttcggttagggtggagtgaaggggattaagtttccttccattcaaatttgaatttaaatttcaataggaggaggttgttcgcttcgaattaaagctaactgtttagactgttatagctgtaatctgtacagacaaaaacattgtataagcagaagctaatatggattaaagctaagcgaacaggctattaatct

SEQ ID NO: 70919 - DNA, 1228 bp, Zea Mays
ccatcgaagaaaaggggaaaaggggaaaatgatttcttaaaaaagaggagtgacccggtctaccggagcgtacggtgccgatcccgtcgccgccgctacccctcaatcgcgagcaacttcttccggattcgcaccaagctctccacaattctatcgctatgctgcggaaggccgtcgtcgccttcatcgcctgcaccgccttcttcctcgccttctctgcctactcccgtcgccagaggggaaccgcttcctggtggagctggtagaaggcccgacgattacgtgattggagtttgtttcggcgggggtggttgtgatctggtgatgtcatgcacgccagtttgttatggcatcggcaagatacagggccccatcggcagtggtgataaccggcgtgtgcacatgcatgatggagccgagaggctcatgtcggataggtgtgggctgctaccagactcaatttggctgtcagggcgttgcagaggttcaattaccagcagttactcacagggtctacctagatgtagaaattgatggccaacacataggtagaattgttattggtctctatggggaggtcgttccaaaaacagttggggttgttgctatggcgaattctggacttgattctaatggatctcagttttacataactactatcaagacaagctggttggatggggagcatgttgtcttcggcagggtgatccaaggaatggataccgtgtacgccatagaagggggcgctgggacttacaatggcaagccaaggaagaaggcggtgatcaccgacgctggtgagatacccaaggagaaatggggtgatcaggaagcgtagggtgttttctacttcttgtcaccttcaaatcaggtagccatgtacttcttttttccttgacctccatggtgtgccacggttcagcaagacttccggaatgttgtatatcgtagctagcttatggccagtcgaattgactctgatcccttgagttgtgatgtggagacgcatacatctgaaaaatctttaggccatgttcggttagggtggagtgaaggggattaagtttccttccattcaaatttgaatttaaatttcaataggaggaggttgttcgcttcgaattaaagctaactgtttagactgttatagctgtaatctgtacagacaaaaacattgtataagcagaagctaatatggattaaagctaagcgaacaggctattaatct

SEQ ID NO: 70920 - DNA, 1685 bp, Zea Mays
ccatcgaagaaaaggggaaaaggggaaaatgatttcttaaaaaagaggagtgacccggtctaccggagcgtacggtgccgatcccgtcgccgccgctacccctcaatcgcgagcaacttcttccggattcgcaccaagctctccacaattctatcgctatgctgcggaaggccgtcgtcgccttcatcgcctgcaccgccttcttcctcgccttctctgcctactcccgtcgccagggcgttgcagaggttcaattaccagcagttactcacagggtctacctagatgtagaaattgatggccaacacataggtagaattgttattggtctctatggggaggtcgttccaaaaacagttgaaaactttagggctctttgtacaggtgaaaaaggtgtcgggtccaatggcaaacctcttcactataagggaacaccattccatcgtattatccctggcttcatgattcagggcggtgacatagttagaggcgacggtaaagggagtgagtctatatatggaggcatcttcccagatgagaatttcactgtaaaacatacacatccaggtgtgattgttcagccagtgaactttatcatccagtttgcattttgcctttgttgaagttcatgtgtactcagttacacatttattttcaaggaaaccaccactattttatttgacactaatgatgctatctattaaagaatatgcaacttttagttgatggcatcttttttagattacaacgcggtcttttttagattacaacgggtctggtttctgatttgattcactatgtagctacacctgatttcaagaaagctttgtaccgagacctactaagttgtttgtcagcaacaagtccaaatattctggtgtttttttccttttgttttactttgtttatatttctttcatcctgacttggttagcaaccggtcaatgtggccaaatcatgaatgggtgtttgatcttctgacaggtatctatctgaatttttttaaattaggatggtcatttccaactctacccctgctttgctgtcttgcaggggttgttgctatggcgaattctggacttgattctaatggatctcagttttacataactactatcaagacaagctggttggatggggagcatgttgtcttcggcagggtgatccaaggaatggataccgtgtacgccatagaagggggcgctgggacttacaatggcaagccaaggaagaaggcggtgatcaccgacgctggtgagatacccaaggagaaatggggtgatcaggaagcgtagggtgttttctacttcttgtcaccttcaaatcaggtagccatgtacttcttttttccttgacctccatggtgtgccacggttcagcaagacttccggaatgttgtatatcgtagctagcttatggccagtcgaattgactctgatcccttgagttgtgatgtggagacgcatacatctgaaaaatctttaggccatgttcggttagggtggagtgaaggggattaagtttccttccattcaaatttgaatttaaatttcaataggaggaggttgttcgcttcgaattaaagctaactgtttagactgttatagctgtaatctgtacagacaaaaacattgtataagcagaagctaatatggattaaagctaagcgaacaggctattaatct

SEQ ID NO: 70921 - DNA, 1340 bp, Zea Mays
gttacgaatgcgtcgtattattgctcactatgaggaacgtcagaaggagctcgataacgtcatcgtgatcttgatctatataaatgcccagccaggtccgcgcaaaatgcaccagctagctaaccaacccccctcccgtgccgttcaccaccacttccttcttcctccccctaaccgccactgcactgcttacccccatatagctaaccgcaactgccatttcaacaacttctcggtcagccttgtcacatttttttgacacatacatacatacatacatacatacattcaattttaatttgttgggtaaattaaattgggttcgatcgagtccgacgatggcttctttgatgatcagtctgtcgtcattcgtgatcctatcattctttcaaggtgcggccggcgggatcacgttcacgttcacgaaccggtgcggcggcacggtgtggccggggttgctggccaactccgggagctcgccgctgcagacgacggggttcgagctggggcccggcgagacgcggtcgctgacggcgccgccggggtggtcggggcggttctgggcgcgcacggggtgcgcgttcgacgccgcgtcgggcaagggcgcgtgcgcgacgggggactgcgggtcgggcgaggtggagtgccgcggcaggggcgcgaccccgccggcgacgctggcggagttcacgctgggcggcgggggcaaggactactacgacgtgagcctggtggacggctacaacctgcccatggtggtggaggcggcggcgccgggctgccccgtcacgggctgcctggtggacctcaacgagcggtgcccagtggagctgcgcgccggcggccaggcctgccgcagcgcgtgcgaggcgttcggcacgcccgagtactgctgcagcggccagttcggcaacccggacacgtgccacccctcgccctactcgcagatgtttaaggcggcgtgcccgcgctcctacagctacgcctacgacgacgccacctccaccttcacttgcaccggcaccgactactccatcaccttctgcccgcctcgcgctggcacgtccagcagaaggcgaccaagggccccttgccgacgcccagggacgtgcagctcgagggcgactcgtggctggcgagcctggccaccggcgagacggacgccgcgacgtcgacggcggcggcgtcgctgctccaggccgcatcggcagcggccgcagtcgttgccttgcttttatgaccggatcgacgacggcggcggatggatgaggacggcgaagcatatattctttagccttttgtctttgtggatagtgaagttgtttgttggcaaggtggcg

SEQ ID NO: 70922 - DNA, 1466 bp, Zea Mays
aatgctgctgttccctcccccgtttcaatgccttggcttcaagtgaccgtggtaaaagaaaatttgacgccacaacacacgtcggttgcttgtttacttggtgtggctttaattcgactgcagctgctgcggcttttattttgtcattagagagcagccgagcgccaccgtccatcacgagcttccatgttcaagccctgctctctgctcttataataaataaaagtcggcacatgattgcatcgcccccccgcctacagactccaaacaaaatcaagactgagagcaaaaccgtctcatctgatctagcgagcactccagctttctgcaatggcgattcaccgtctgatgcttcccatttctatccttctgatgagctcactctccggggccgtgtcgacgacgttcacgctggccaactcctgcggctacacggtgtggcctgggctgctgtcgagcgcgggctcggcgccgctgcccaccacgggcttcgcgctggcaccgggggagtcgcgcgtcgtggacgcgcccgcggcgtggtccggccgcatatggggccgcacgcgctgcgccgcggacaaccaggcctccggccggttcgcctgcgccacgggcgagtgcggctcgggggcggtggagtgcgcgggcggcggggccgcgccgcccaccacgctcgcggagttcacgctggacggcgccggcgggaacgacttctacgacgtgagcctggtggacgggtcgaacctgccgatggccgtggtgccgcagggcggcgccgggaccagctgcggcgccacgggctgcctggcggacctgaacgggccgtgccccgccgacctcagggtggtgggctccgacggcgccggcatcgcctgcaagagcgcgtgcggggcgtacgggcggccccaggactgctgcagcggcgactacggcacccccgcgacgtgccagccgtccgccagctcgcagttcttcaagaacgcgtgcccgcgcgcctacagttacgcctacgatgacgccacctccaccttcacctgcacgtccggcaccgccagttacctcgtcacgttctgcccaagcatctccagcctcaagtcgtccgtgagcagaacgaacccgggcctgcctctggtcaacgacacggtctccttcgccggccggggagacgggtcctcgtacccgtacgcctacgcgtcggcgccgccccggtcgtcggctccatgccccctggcgctcgcggccaccgccttcacgtggctcttcgccgccccgtaccgccgccggctgcgattgtagagcgagcaaggccacgcgaggggccgcggacgtacggcagccctcgtgcaggtgcagtgcagtgcagcgtgggcgcccatcccggacgctttgacctgctcgggccgtattgctaattgtgtactagattattattagttttgtctcggatcgaggagcattattcgcca

SEQ ID NO: 70923 - DNA, 570 bp, Zea Mays
aaactctcttgcatataatatattccgggcttcctctcattggattacacctcttcccacaaaccaaatagtttcttaatgcctaaggccttgatgatcctgcaagtgatcttaccttcatgctcctctttttagccctcaaccttatctgtacacctctgaccctcctcacttttcagtcattgcctttaccttcttgaaaaaataagctttttatctgctttgccttatattgcatatgactgccattggtgctgaacttgttgcgctactgcttcgcccagggagttgcaacttgcagcagctggtcctttttactttggtgagttggaggaggcccttatccatggcacccgtacttctgtcgatcacgacatgatcggaagtgatgtggacacagagcgtaagagtaagattgcctttttttctctacacctctctcctttaatccaaaaccttaaccacccatggaatcagcttctttcttgcttgctttctttgctaccctctgtaacaccccgggatccacaaacaccccagaatgctactaaactacacatataacattat

SEQ ID NO: 70924 - DNA, 647 bp, Zea Mays
gctagctacctttacaatctaaacagttcatatataatataactatcgtgcattaattgatgtagatgtgcatgcatattcttgtcgtgttattatattacgcttttaccttccaagcaaccggtacgtgtcagtgtatacgtcaacgtcagtgccacatgcacgtccaatgtaatgcgtataggaacaagaaagacaaaatataatgcatgcacatatatatacgccaatatatatatagtaccagatcaaggtccttttgtctttggccatggcagctcaagccagagcatgttagacctgtccccaggcatgagactattatttgtagatgtaggcaaggtcaactagctgttgtgtagttgcatttctagtaggtgcactatcataaaaaaaatcttagtatacgaacacattactagtctaaaaactaaggttctagtgatttatttcttcctagcaaaaaaacaaaaccaaacatttgatatggtatgggaacttttttttgttaatttcctttgtcttatctggtaacgggaggggggtgaactaagattttttttttcctcctatgaagctatatgaagtagtcttacgaacactcaaatatctgtgaagtagcttggtcttactgacacatattcttt

SEQ ID NO: 70925 - DNA, 265 bp, Zea Mays
gcgcagcggagcggatgtggggaaaggtgggccgagactctggaatttggcccatgttaaggtctggtgctctttttttctttttctttttttgtctttccttttcttttctatttctattttcctttttaactttcaaattcaatttgagttcaatgtttaattcaaactttttgtggctctttcgtattcaaatttgtatgttctattcctctgaacatagtatgaataaattttatttatttacaaatttattctgttttgc

SEQ ID NO: 70926 - DNA, 125 bp, Zea Mays
ggaagattgaagtacacttcatatcttagctttcatgagtagtatgcatctattgggatttcatataaaatattagatgcttaggcatacaacactatatcacgtatagtgtaatgacaaatgag

SEQ ID NO: 70927 - DNA, 395 bp, Zea Mays
gacgagagggtcccgcccgccagcgagccggggtgtgcgatgggccagcgagcgcgagaacgtagttgggccgcgcgaagcgaggagttggctcgaaattgggccgaatagagtggaattggcccatgaagcctttttattcttttctttttatattttctgttttctgttttcttttctttttatttttttcaattcccaatttgaacttcaaaatatgagtatgaaactagtacccaatttgaagttcaagtatgactttgaatttgtactcaaattagatttttaatcataccagtatggttaagtttgtgtatttataaactttgttttatattttattttatccctttctttctttttttcctcaaatactcttctcattatcattttta

SEQ ID NO: 70928 - DNA, 395 bp, Zea Mays
ctgcgtcggcgtatgagtgagatagcagggaggagagaagaaagaactggcggctggcggcttgggggagaaggcagggtgcggcggctgcctagggtaggagggcgcgcggctgttgggccttttgggccaaacggcggctagggtttctttaggtttttttttctttttttttatttccctttttcaatttcgaaatacattttgaaataaccctaaaaatcataataatcaaactaaaattatttataaataagatattaattcttggactaatattattatatatattatttactaggatttttatttaaaacgaaatgctcttaaatgaccaaaatcaatcatgagcatccaaaaaaaatcattccaaaggcaaataaatgacacacgct

SEQ ID NO: 70929 - DNA, 142 bp, Zea Mays
ggaggtcatggggtgccgcaggcttcaaatgctgtcaatacgtcggttactaatggagagataataggaataagaaacggatgaaataaatcgccatgaagcaagaaacggacgacggttcgcggcgtttggtcgtcgggcg

SEQ ID NO: 70930 - DNA, 1491 bp, Zea Mays
ggagggtggcggctgggaaaaaaaactacagtgtctctggtaccaagttgaatgggaaaaaccctaaccctagaatagggttgggcagtgtattaatagaccaaataactgggccaggcccattacaagagacgggtatctaacagtgatgtatggacttcacccatcaatagtctgtctggtttttcatattacttggtctgtttggatgattacactccctattgttgggtttttctgctccgaaaaaaatctgatgtccaccaacacttagtcgagcttgctgcctctgcccaaacacaattcagcctccccgtcaaatgctttcaggctgataacggcactgaattcgtaaacactgccaccatcaaattcctcgctgctcaaggcactcaccttcgcctctcctgcccctacacatctccccaaaatggcaaggctgaacgtatcatccgcacactcaacaattccattcgcaccatgcttctacatgcctccctaccacccacatattgggccgagggactcctgacagcctgctacctccataataggcgcccatcctcctctattcagcatgaaattccctatactcgtctgcataatcaaccaccaacttatagccatctgcgtgtttttgggtctctctgttatcccaacatgcaagcaacctctaaacataagctcgcccctcgctccacggcatgcatcttcctaggatatcctagctcacacaaaggttaccgctgtctcgacctatcaacccgtcgcatcatcatctctcgccatgtcacattcgacgagaccacctttccctttgcagccaccttagacgtctcgtcctctgcttccctagaattcctcctcgacgacgatatggtttcggtgccctgtcctaccgttgttgcaggtgggactccatcctcgacgcccatggttgctccatcccactcagatgttgagcagccgcccccagacgttgcagcctcacacgactcgccttctgcgacaccgggcgggcgtggtcccgtgcccccgcctggacccggtgtggttcccttcccacaagtctacgtccgtcgttcccgtacgacgtccacgtccgagccggcagctgtcccagcagcccctatgacttcatcgcctccgccgccgccgcgcgtcactcgcaccatgacgggtgccattcctcgtgtctgctatgaggggctggcggccacgacgtcatcctcaccgtcgccgcttccgacgaactaccgtagcgcgttggccgacgccaactggcgtgctgcgatgatggatgaatatcaggccctcgtcgacaacaacacctggcagcttgttccgcggccccccggagccaacgtcgtaacggggaagtggatcttccggcacaagttccatgccgatgggtcccttgctcgccacaaggctcgctgggttgtccgtggcttctcccagcgcgagagcgtcgactacgacgagaccttt

SEQ ID NO: 70931 - DNA, 469 bp, Zea Mays
ccgcgggcatggtaccagcgctttgccaccttcgttcggcacctcggcttcgtcgcctccatctccgacacgtctcttttcgttctacgagaggggacaagtctcgcctacctactgttgtacgtcgacgacatcatcctcaccgcctcgtcatcggccctcctacaacgcattatgactcggttgagctccgagtttgccatgacggatcttggcaccctccatcacttcctcggcatcgctgtcacgcgctcctccgatggtctcttcctctcccagcgacagtacgcggtcgagcttcttcagcgcgcaggcatggctgagtgtcatccgacatcgacgcctgttgacactcacgccaagctatccgcgaccgaacggggatctactgtcagagaaggatgcatcagagtataggagcttagcgggggctctccagtacctgacgttgactcgtcctgatctggca

SEQ ID NO: 70932 - DNA, 732 bp, Zea Mays
atcgcttggctccggtgatgggcgccaccgtgcgaggggctacgccaccgccgtagaggtagctgagtcgggtgttggtcagggtcgttgatcgggaaaagaacggccaggattagaacttggcgtaccgcttgggttgaataggcgtaaccatctgattgtgatccggtgactgtgattcaatctcggaaaataagatcgggacctttgatatacccatcaacggtctgtttgtgtatgagaccatcggggtatccggaccgggggatcaaaatcatgcggtcagttttgcataccggttcgacgtaatatagatttaatctgcgcccttcaaatctgatcagtcggctctggattcaggttacccgttcgctctggcgcatttgcgtaagaccccctctgttattaagtattcgaccagccatccgcatggactatgcgctgcgtcttggacatcttaccctgaggcccctgggttctctgtaaatagtgtgcccagtccatagctctgtaaattcagttatttaattttagaaattactttttaatacaaaaatatatgctagaactttaataattcatagaaaattcatatgaactccaaattaatccattccactttctaaaattttgtaattttattctttaccacttagagtctctgttttgtcatgaaaacagtaagaaaaataatttctcacttaatcctattttaaacacattaaacctttg

SEQ ID NO: 70933 - DNA, 3419 bp, Zea Mays
tgaagttgaagatataacacacataatatatttgaacttgatagagactttcctacaatcatggttatcgaggcatacaagcgatgattcgtagaatgagcgcagtaattataatcacatctcgattaaccacacacagagtaatttgaactaaaacatagttcatcccacagaatattacagataatagtccacagacatatgacatagagttaatagatcaaaccaagttccaaatgcataagacataaactaaagcggcatgaaaaagtaaaatgcatatgcatgatcttaatgtccacatagaaccaccaactccccctgaaggagacgcctgacaacttctcatcacttcttctctccccctttggcatcaattgccacaaaggagaggccttactgatcactcggcggaggatgcatgttgtaataatgagtgctgaaggtatcaaacagggaggagaactggccaaagtcctgctggagctgctgctgcctctgacttatatcatgcaggttgtcagttgtagaaagattgtcaaactgactggagagagcacccatgttatcttgaaaactttgttgcatattattcagccttgacatgatgggatcagtgacattagtgtgaatttgatcacgaaagtcagaaaattcagagttgagcgcatcctagttgctgtcaaagcgagactgcatgtcatcaaggcggtgatccacatgtgacatcaggccatcaaagcgagcatcaatatgagtctccagcccttgctgcatattgtgaaaataaggatcaaagtatcctggagcaggctcccaatagtgctgaggctgaggaggaggtggaggaggaggcatctgctgttcctcaacattaggagctgctccacccgcatagccagggtcttcctcatcatcggggaatggagtgagtggcctggtgaggaaccctatctcatttttaaaaggcctgaatggagtgtgaacaatctcacatgggccctcaaatcttgtcttggattttatgagagccataatgtagggagcataagccaagttttgattcttgtccatctttaaatcattaagttgcctcatcatgaaaagaacaatgttcatgacttcaccattcatgatgtgctggattatgttccagaacttatctcgaattttgctcttatcaccactcttgggaagaatggtgactctggcaatcttgttgatgacagcaggatgatgtctgagtcctgctgtttctccaaacctcctgggtataccgagcctggctggctcataaaactgcacaaaatcctcaaaattatcttcagtataaagatccaccccagcagaaatggtgccatagttcagactgttggcagcggcaaagtcagcaaaagaagcagaataccgcttgaagccagtcatccatgtgatagattcttctgcaatatcaatctctgaggtagccaagaattgcttaactgccatttcattgaaatcagtgcgctgccccataaactgatataacccacatgtttcaaatttgggaatgagaccctccatgactgattgactgagcaagaaggaccaatcaatcacctgatgcttatgaaagttggtatccaccagggtgccccaaaagacatcaaactgcagctgagtgtggaaaaactgaatatttgtatctgatggcagagcatactggttcacagtctgtctagaacagtactcagccatagaaaatcgccgcttgggataagtccatccttggatatcaatgggataatctggatgaacatgaagaaaatcttcagcatccatggattcagtgcccccagctgaggattgggcctctgaatcagtggtcggtgtataatcatcatcattgccacgagggcgctttgatttaaagcgacctgcaagtttcttgcggagaccaccaaaaccactgcaacaaggtgacagacatctagagataaataattgataccaatcgccacttataaaaaggaatggaatggtaagactctgccagggtccggacggtccgcgctagggggccggacggtccgcgccagaggcccggacggtccgcgtccaccaggcggacggtccgcgaccgaccaggggcgactccaagaaccctagccgccacagttgtttaatttgatgtttttgcagataatacccagccaaataagttgaaaattttgcatagcattgatattgagaagaactaacaatcccaccaatcagattttgaaacccactgctcaatttcagatcagagaagaaacccaaataatctcaaagttgatgaaatttgattaaatccacaagatttgaagataccgtgatgaagacatgttgagggaatgttgctgcaagctgacggactgtccgcacgcaacttcacttcacggtccgcgcacactcgacacaagagagtatattgcgagtggagagcaaaagagaacaaccgaatgggcacaactggcaagtctgcgggctcggtccctttttctgtcctgtcgcggacggtccgcgcggtggcggcggacggtccgcgccctgatgatctcggacggtccgcggcctgatactcatttttccaatttctgtccactttctgattttgaattccgaatccgaattggtgctctgtaacactccaggttccacaaacaacccggtatgctactgtactacacttccgacgtccatacataaaaatttcggcagcatcccctttgcaagattgcataaaagagggagcaacagagtataaacatatattatgactaaaacatactaagtattattactcggctagcaaggaaagataaacatacgacctgaactgaattaaccagtgcgcacgaccatataaaaaaaaataaacaaacttcctttgacaataggtttctaattaaatcatggctgcgcctgggcagcgttattgtgagagtgaaagtggacgtgctgctactcccctcattcccaacatatatcaagtacctgcattgagtaatgcaagagtgagatgacacatctcagcaagtaaaataatatcaaacagtttaaccacataagaacattgttttaccaccacttaattccacaaccttcttattacgaaggtgcagcacgtatacaacgtacaacgcacctagttaccacacctcgcaggtagataccacaatagtaacatagtaatgtcacacttcatatattcctcatgaatgcaaatgtctgcaaatgcaaggatgacttctgccttcatacctctaaggatatgaagccgcatcgtacccctcctcgggcaacgtacgatgctaaaaaatgtaccggtacggtcggaccataagatcacgacataacttcaaaatgcaagatggaggatgcgatgtgcatgtcat

SEQ ID NO: 70934 - DNA, 385 bp, Zea Mays
gcacatgtccggtcgtccacctcatcaggcgtttgctgtctgtccaaatgtccatctatccatcacgcatgcatgatgcatccatcaccttgaatgacacaacacacttgcacgcacacactgcgtggtgcgtgcacgcctgcatatatgatcttaaactcgctcgcacacgtaaaccttacagtacatatatgatccgtcggtccgatagcttgctgttggcagcttgcacagctgcacggacaccgcgaccgacgagaccgtgcctcgggcgtcccgcgtgcgtgtgtgtgcgtgtcacactctgtctaccgcgtgccgccgccgtccagccgcgacgtcgctggggtgtgcttcttcttcgccgcattcgccgtcgacatcg

SEQ ID NO: 70935 - DNA, 394 bp, Zea Mays
gtcgaacggtccgcgatagatgcagacggtctggctttaaaagccggactgcccaccctaccagtagagagctatgcagctattgtcttgttctttgtctttgtagccgtttgatttgtttcgacggcctttggcttccatctcttttgcggtggtgggtactgcggatgtgtatcattaagtatttttttattttttcttttttcttgctatcagacgctgcaatttacgctattgagaccgtgacagtttcgatgagccccatcggggaatggagtaatttgggtcggctattttgctggctgctcccttgtcttcttcctcgcctatattgattgatttaccaaaaatcatcagcccttcattgtttcgctgcgtgacgacatctgttgtg

SEQ ID NO: 70936 - DNA, 211 bp, Zea Mays
ccccaaactaaaaattaaaaagaaagataggaaattagaaaaaataagcctccaacaggtctcctaaatctttcctaacttttgttagcctcagaaatttctcattccttagctataaacaggaaaagttttggttctccaaaacaactccggccgacacattcgtcgaggcgctttgcctccgctgctggctccgtccacggtaagccag

SEQ ID NO: 70937 - DNA, 297 bp, Zea Mays
ccgccgcccaaactgaggatattttggtggccggcagcccaagcgacggccgacgggactgacatagtatcgctacgtcagcgatctctcttttctatcaaatctccccgcagctcttaatctatcttacaggtttctttcttcgacagtgatatttgtagtaaattcggaataagtagaaagagaaatctcttcagatcatgttgacaaatgacacgcaagaagttccaagcgacccggacgggaccacgcactcgacaagtctggagcaagagaagaaagttagtactgagttca

SEQ ID NO: 70938 - DNA, 277 bp, Zea Mays
atttgatcttgctaataggtgttaatagatcatgacaagagaaaaagacatctattaatcaagactccaaacatatcatggctaattgttgctaactaattatttgccggctagttattagggactgtttggatccgtgtggcaaatagtttgccgtctatttttaacattttagtctccaacataaactggttaataaattggctaattgttagccgaagcaaattatttgcccattagtcatttacccttgctaataggtgttaatagatcgtat

SEQ ID NO: 70939 - DNA, 669 bp, Zea Mays
gcaaatctcacatgtggcattcttgtgtgcagagcttctgaaggtataaatgtatggaaacatccgtattaagcataagcctatttcatgctcaagcattcatattcatgtatatatgcggaaaattatgacctccaaaggttgtaatcaatcgaatgacattgaattcttgaacgacaatcctattccacacacttattgaaatagccaaaactccgtatatcttgagtccatcttgtgccttggacccttgtatgttgttgtatatcttcaataagtcttttaatgtcttacttgagatgtgataatttcaatcaccactttgccttcgtccaagtccacatacatcctttgaactatatccaaaacactagcaagtaatattagaacaaatggttatgttgatcatcaaacaccaaaactaactatcatatgagcctcgatccattttccttgcatgacgaaaacgaagttgatctcttactaacgatctcctccaaacaaatggttcaagggaatctttgtccatcaaagacatgccaaacctaagtgacttgaattcattatccaccaactccaactcaaaagccttagcatctaccaaatcttcctcggatctagtcgaagccacaaaaggaagctcctctgtaccagacaccttcacacaag

SEQ ID NO: 70940 - DNA, 221 bp, Zea Mays
atttttttcttttttttctttattttgtgcgcctctttttgtgcacttgccttttacattctcttttttcacaaaagtggcacaaaaacaagatacaactcaagagtatcaaaaaaatctcgcctgtctgctatagactttatgctctaacttcaatagactgcttgacaaatatagagatctcaaacgcaaaaactcacaacacgaaagttgtagatctc

SEQ ID NO: 70941 - DNA, 147 bp, Zea Mays
attgtagatgatttttctcgcttcacctgggctttatttttgagtgacgaaggtgaaacccaagaaaccttgaagaaattcatgagaagagctcaaaatgagtttgagcttaaaatcaacaaagtgagaagtgacaatgggacagag

SEQ ID NO: 70942 - DNA, 401 bp, Zea Mays
cccatttcgtgttatcttattctggccttagtctgcccgaggcaaggcttacccatgacgaggcatgtgaccagttaaagggtcctcgatcagcaggcctacatacgcatccaatccttaatcaacctgggtagaacatcacctgttcctaacccaagttccgatttaagtacttccatccttaggattgtttgtgttccttaggatgaaaagagcatcacagggaactttgcagtaagatcccaccatgctcccaatgaaaatatattcttgcaggtagaagccatccttcctcaggataacccctgagctaggcagtattgcaaaagacaacctctatccacaagatttaagcagggctaagcatttttgtaaatcatatttttgatacttcaccagaa

SEQ ID NO: 70943 - DNA, 520 bp, Zea Mays
cttcgcctcatacttatcatatcaatagggttacacttttttagaaaccacatcacttaatatacaaggtatatatgcgtgtaacatctgataggtttaataataaatctctttctctatccctaaatccgtttcggtggcttggacgctagagcgtgaggctttgaccgacacggtgaggcctagattcgcgtcgatgacgtagagtgccacaatcctctctttttcctcctctctacacacctcacgcgacacatccgacgacaacgggctaagctcaaaggtgagcgtatctcctcttctcgacctctttcgtgatagacccgatgcgctactagcaacgacgaatttggggcgatggtttgatggttgtcctcacaaaacacgtgaagaaaccacgctttccacccaacgcgtatctcgttgatttcttcattcattagaggatatgttgagacgattcctttacggagaagcaatctctctctctctctgtcttgaataacactcaccacatccg

SEQ ID NO: 70944 - DNA, 843 bp, Zea Mays
cttcaatgtatgcatatgaatgcaatgcatatgtcctctgccttcatacctctaagggtatgaagccgcatcgtaccgctcctcgggcaacgtacgatgctaagttgtaccggtacggtcggaccataggtcacgacaaaacttcagatgcaaatgagtcatgcaatgtatatggcatgctgcatttatcaatacatttcacttcctttagatacaatacaaacctcaaataatactttatctgccttcagatacaatgcaaacctcaaataagacttcatctgccttcaggggtgtgaattaatctcatgggtcatacttgaaccataatcatcatcaatatatgatagagcatcaatataataccatcaagtaaaacatcatcatagagttcaattatgaaagaatccaataattcttaatattagagtgtaggtgatagaaataacatgtcaaaatggtagcaaccaccgctacattcacttgccttcatcgaagaagaaaaatgtactaggcatgacctggagtgtagccacctgctagcgggcataaaacttagtacaaatattttacaaacatttgccaacaatcaacaaaacacttcctaaacttgaaaccaagacccagtggaaagactcccaccctgaaccagatgccatacagcagcagcgctgtttgttaattttgtatctttaaaattagaatagtagtgatatcaaacaaatactctaggagtatctacacaaaatactctacaacttcggtattcaagggataattaaattctgccatctataagttctaaaacatctgacaagataactgactgaatctgttttagac

SEQ ID NO: 70945 - DNA, 904 bp, Zea Mays
cgattacatgcctgcgaatgaaagaacttagtgttggcatcaccctcctttagatagtggatccgtgatctcaaccgagcaacagtcctttcaagagacgcaaggctaaggcaccgttgcttcaacaagtttagcaaccaaacttccccactagacaaaattctgatatcctgcgccatttccagcctatgcaacacttctctgacaagccccagctgcatcctcacattacccacttctttatgcccccaggactgcaatgcgcgagctaaccttttaagcttcaatgacacttgctccaacgggcaggagctcccaactggcatgctccaggacgcacccaccacctccagaaaaccaggaattttgggccaaaaactctcaaagtgaaaccgtcttttccccatgcagccatctctgaccttgagggtcaaaggacaatgatctgaagatgtggtagcattactatgaagagaagcgtccggaaatagatcttcccaacagctagtgcaaatgacatggtccagcttaacaagagttggagcatccctctggttggaccaagtatacctccttcccttcaaatgaatctctttcagatccagggatagccctgttaatattggaattgttcttgtcttcctccctgaaaatcagattaaaatctccccccaatgatccatggtcccatggtcccacacaggtatctctgatttctcttaattcatgaagaaaggaggatttaagattgttctggtgaggaccatacactccagtgaaccaccagcacgaaccatttttctcttgcaatttaactgaaaccgaaaattgcttgataactgaagccaaagatgaaaaagctccatcacgccaggataccaacaccctcctctggtaccaatcg

SEQ ID NO: 70946 - DNA, 458 bp, Zea Mays
aatcatcactatgaagtctagcaatgtgaagaaagatgccaaataaaataaggatgcacttggaaaatatggtcttactagaataattacccctttttcaagaaaaggacatgaagtccataatttcaaaagaaaaggggcatataggcctattgcatatgattactgcaaatggtcataagaacaactccccaacttcaaatttatggtatatgtacttaccacaataatgcctaatgatctattccacgacattagggggaggaaaataatacttgaaataagaatgccgagaaatcgctcgaaaagccaaaaagatccccgtgcaagacccacactaataagaaaactaggaaataaagaagtcaggaatccacatagtatattcccgtgcaataccaataagtaaattggaatgtcaataagacattgaaataaagtattgaactgccattttg

SEQ ID NO: 70947 - DNA, 333 bp, Zea Mays
cgaggaggggggaaggtttttcctttttctttttctttttctttttctaattcctttctttttcctttttctatttttgtttctttttcctttgaatcaaaaattctctaaatgatcttgagtgataaatatggtctatgtgaggtgctccaattatttcaagtgtatgcatatgatgaggtgatctaggggtagagttaagggagaaaataaattaaaaagggagtttgggaggttagggtttcaaaccttggttgggattttttggatgttacaaacctaccccacttaaaggaatctcgccctcaagatttagactggatttgagaaaag

SEQ ID NO: 70948 - DNA, 332 bp, Zea Mays
gggccggattcggcccagccgaggaggggggaaggtttttcctttttctttttctttttctaattcctttctttttcctttttctatttttgtttctttttgtttctttttcctttgaatcaaaaattctctaaatgatcttgagtgataaatctggtctatgtgaggtgctccaattatttcaagtgtatgcatatgatgaggtgatctaggggtagagttaagggagaaaataaattaaaaagggagtttgggaggttagggtttcaaaccttggttgggatttttgggatgttacaagatgcctattggttcccatgggtgtcttgatg

SEQ ID NO: 70949 - DNA, 340 bp, Zea Mays
gtgactcatgacctcactactaaatgtagtaatacaaacaaacatagtataggcaaaattaacatcacaccaaatataagcacaagatgcataataataatttctgcgtcgctacgagatcgtgggttcgagatccactacattcggagttacggttataaagttgtgatttttggaagacctacgtgattaagtatttaacactaggttttgtgttgattccataaagataatccaaagaaataactaattcaactttaatcttgcttataacttgactagcgatcaattcggactttaatcttattttaattagattgcaaatataggcaggttagct

SEQ ID NO: 70950 - DNA, 696 bp, Zea Mays
tggatttcagacccacggtcgaggtttgtcccagcgattgactaatctacaccgctcccattggatccgatggtcacaatttcctagcacgaaggggtaagtggtgatcaatcctagtcacacaaacgtctagatcttcatctcctacccccggtcggcactgggtggcggcgtaggcctagggccacggcggagccccactggtgtaagccccatcggcgattccaagttccaaacccgaaacggatataggataaacgattagtagaacccattgaatcctgcgtgggaggactcaccggtgattatgcatcaagggtcacgaccacaatgtgatgtggtgccacggcggtcgccattgccccggtgagaaattgagcggctcacggtccaattcccggggtgggaagaccacgggcatcatcagggcgctactgtgattccccaggccaaccgccaaggttggagctccacccaattcatgagtcaaccatggcggacccaatcaccctccccccgctcgtcgagcatggcggtgcgaatagcgcccatgcccccatggctcgcatcatcgaagctagccagttgtggatgagaggtgggcgatgaccgggcacttataggccgaaggccggggagtccgcgaagagttttgttagtgatgaagatcgcggcggaaatctcgtgaggtttgca

SEQ ID NO: 70951 - DNA, 1460 bp, Zea Mays
ctcatcttcattccttatcctgtacacgtcaagtctttggaaggaaatttctcagcgtgtagcttcatcttcccctccgtgctcggcgtctctggcatgctggtcgaccagcccgtgactccctgcctccctgggacgccgcacggctgcaggccgcggagcagtccacgccaggggcagccgaggaggcggctgggcgaggaggacacgcacgcgcagggcatgctcgtcaagttcggcgacgtgctcgacgtctttgctttcacttgcgtggccgtgctgaagctcctgcaccgcgtgggcatgcgcgcgctctcctctgtgcgggagagcaggctctcttcacgccacgcgcagggcaccgtccagcgtcgccagtcgacttccgccaccttgccggtctggccatggatttccccttctcccctgcgagctccaccagtccgacccaggcgaccacggtcaagtccccagctcctcgtctttgtgcatcgtcgatcgtcacaggccgtcgtgggcgctgccccgccgtcgcgcccggggttttagcacatctccctgctccgaccaatttcgcacctcgccgtccatggagccgatcgtcaccagctcacgcgcccagcttcatgttttccctcttcctcccgcgctcagacactagaaaagatatcaaagcttatgacactcataaattatcactggcagtttcaattacgccagtaaaaaaaatcaggtggcttgagaaccaccagtggaaacatatttccactggcggttggtgtaacagaaccgccagtgaaaatagaatatttccactggcggttggtgtaacagaaccgccagtgaaaattagatttccactgtcggttctgttacacctggcggttgtgttatgataaccgccagtagaaatatgtttccactggcggtttttcaagccaaccgccagtgaactatgtgttataaataccactctttctcccccgacaggagctatacgctcgcagccaacttccattggaggcgattttggaggtccagatttcacaaaatacaagggagaggttttggtcttcattttttggaagaaggtggataagaaaggttgatttatgtttttttgtcaatttttattcgttcttgctcaattttagccacattttggatctagggttttacatgtgagagagaagagtatagctaggttattttctctatttcctcaaatgagattgcttaagatggttagattttgtctattccctctcctttttcatgtttaattctcaaatcagtttatccatgacacatatttagttgcttaatgaatggtgaatgcatgtgttggagagggaggatgataggtttggtaattaagattgtttttattaattgttatgaaaggttggtttaattatgtttcaattgccaattattgttcatttttgctcaattttaac

SEQ ID NO: 70952 - DNA, 830 bp, Zea Mays
gttgtataaataccccttcatccttcccgacaaaaactgtgtagctcgcgcgcagcccaacttttattggaaggccagatttcacaaaatacaaggggaaggttttgatctttattttttggaagaagttcgctaagaaaggttgttcatgtttcttttgccaattttctttatccatgatatatttagttgttaggaaatattggtatatgtttctcttgccaatttgtgttcttgtgtgttttatgttactttttttacaggtgatgatggagaggatatcctggatgtataacttatcaaggctagatccatcatacatatctgaggtccataggtttattgttgtcactacgaaccatgcttggagaacaaagacaaagcacatatattgtccatgcatggactgcaaaaatgctgttgtatttgatgacacagaacaaattatatctcatctggtatgctgaggatttgtgaaggattacataatttggacaaagcatggagagggtagctcttcgccttatacagctgggaaccctgcgaacatcgacgacagcttccagttcgttcacgagacacaacaacctcttccacagagcgaacatgtagtgccaaatgttactgatcatggttacgctggaggaaatgaacgtgaaagaacccatgttctgccaaatgttatggacgaggaagatacagagttgttagaggcaatgttgtgtcgtcatacagatccatcgatgttcttcatgaaaggtatggagtccctgaagaaggcagcagaagagcctttgtacgacgagtctaagggctgtaccaaagagttc

SEQ ID NO: 70953 - DNA, 276 bp, Zea Mays
atgctgttgtggatagacaacggtatcggtataaatcacactgcacagaatgaggacgtttctaggagaacgtgcattcggtcacgttagcggaaaaatcctgagtagcagtagttgcctcccatatcggtgtcaacaccacgaatgtttcgtgcgacacagaaggtttgcggcttgctgtggcattaatccggctgcggcttgtacagtattttgtctctatggattgcagctgcagccgtccgaacagctgcaggtcctgtggttacagggcag

SEQ ID NO: 70954 - DNA, 415 bp, Zea Mays
ctcaaggtggtccagaggtccactcagacaaatgctagaggcctttggatgcgacatgcctcatcaggggaaagtggctccaaaagccgatgttgcctgctaggagcagggtgctcaagccaagaaatatcccagaaagggaaggaggtggcaccgaacgagggtggatcaagcgacgatcgcaagaggtcacccgattggggagactcctcgcaaatagtaacgataaggtcattaggaccttttgggggcacatggcacgatcatgatagttagacttccttgttagactttcttttttttgttccatccttacatctattttctcagccctatgccatcagccccttgtagcaccccgaaaatccaaacctagaaaatttctcaaactcgctctaaattcaaaatgaatttt

SEQ ID NO: 70955 - DNA, 176 bp, Zea Mays
cccatctccatttccctcaagttcttaaagccccacaacaaccctagccgccccccctcttcccctcccaaggtgcagccccttttcccgcgtggatccacgtagcgttggtgcaagtcttcaattggattttggtggaaggaagaaggagggagaaaatggggagaattcaaggt

SEQ ID NO: 70956 - DNA, 865 bp, Zea Mays
gatatctgcaccttatgataggcttccctagctagttctagcattcatcattctagccttttagggacttctaatatcgaataagcatatttaaagtggctactcgccaagcttctgatcatgaatacaactttgccacaggtatagatgcaagattgattattgatcaaattgaaaatggaatatacaccaggacacaatatttatgtagaccacatttcaataccaatactatccatatgaagacaggggcatgttagcagagaataacatcatccatccacactaggaaggtacaaaatattcagatcccatacgagtaaaatgtgattctgggaagtcaaggggggaaagagatgtgtacacaataggaaggtaggaaatattttcagatcctatacgagcaaaatttaattatgagtagtcaagagcgaaaagagatgggtaccatgttgcgtgtccgaatcaggagaagctaacgcagatgagccaaggttgtagccggagaggagagcaggaggtgaatctgggggaggccaagatcgggagagagatgattttggggaaggaggggcagagatcgtgtttgtcccctgtaggattgtcgctgctcgatccgcagctcgtcccgtcactattgtcgtcagtctcccggaggccggagccgccagccgcaccttatcccaactcccacccttccgcacagtttgtcgcctctcggatcccttgagctcagctctggaggcggcaatagcccaggttgagcacgtggaagagatcgaggaaggggggccgctgggcgggagccgagagatgacagaggtggcaggcgataggcggtaggcggcgtcggtcggaaaggaag

SEQ ID NO: 70957 - DNA, 418 bp, Zea Mays
cacctcgctgcgacttgctcgctgccgccgcgacttgctcgccccgtctccctctccctctggccccgcctcaccgtggccgtggttgccaaggaacccaagctcattggaaacactcttaaataaagcttccaatgaacaagacaggagttcgacttcgcctggctccgaacaagtggtcgacgaggcggaggtctcgcgtcctgcgtgcattgcgccgttgcctggctccgtcctcgtcgttcctccgtcacagccgttgtcctttcgccgggagtcgtcgaatgtaaatctgttttatgttcagagctcactgtccatatatctgtttaccaccgtcctgtttcctgttcggagttcgatttcccctagatctgtttgccaccatgcctgtccgtgtgctttgccctcatctcgt

SEQ ID NO: 70958 - DNA, 235 bp, Zea Mays
attacacatttatacctaaggattgactagcttttgttatccatgttcttgtttacctatttgggtcggattattactgtttagcttcatgctattgctcaactctaatcaatgaacatgatgagattatctatgatacgctgttttcccttctcttatcatgatgttatacttgtggtcttcaagggggctcaagcggtttctcgagtgcctctccgtaaggacctgttctatg

SEQ ID NO: 70959 - DNA, 337 bp, Zea Mays
ggctcctgaaaccaagcgcgcgcgcgcggggccggaaacttgtctttaagcaactactactactaactgagtaattaattaagcaaaggccaagcgcgcacgagaacaaaggcagctgtggcgactgtcgagcgagaccatcgagcagataagattctccgtaccaaggccggcgcgtgcggatttttattttctcaccaagtttcggcgaccccatcaaccctccgctttgcatcagctgccttcctgtctggccatcttcctttcctttttctttttgtactttgtctttggattggacaccggctttaatttgcaagagagagatcgaaaggcc

SEQ ID NO: 70960 - DNA, 224 bp, Zea Mays
tttacgcacatcatactgcgtgagaaggccgattaggttttcgtttctatagctactcgatcgtacgtactacgtacataacataactggttctggttgtccgcctcgcctcgcctcgcctcgctcgatcgaacggggaaatcagctccgatccggtggcgaaaacgacgtgcatggctgctttttctctctcgcaagtgacaggcgacattgctaaatatctc

SEQ ID NO: 70961 - DNA, 2970 bp, Zea Mays
gtaattccatactcagggttttattccctgttttttttcaggttatagttttgtgctgctgttgatggtgttaagtgtcggtgggctcgaccttcttatataagtataccccatctttatcttattgaggatggtcacttgagctagcatatatttcaaacttataaacaatttataacaattcaaacttatttctttgaatcacttttgtaaccactccgatcatgtacattgtaaaacttgatgtaacatgtaaaatttggtaataagatttccgctgtaaaatttttggtgtgtgatttgtgtttacttaatcccggttctggttgtaagtggtttatctgaggtccttgggacactcggacggatcctgttaagttatttggtgcacaagcatagccgtctgaggtctttgagacaaggacaggtgcatgtgggcccgataacttgggaggttctgccacagctggtatcggagcaggattaagtatatacggtcacatactattttcaaaacaaaagttttggtttcgaaaaacctattttcgactaaacagattgtttggctttgaaaaacagctttgaaaaaaaactataatgctagtgacatcctctattaagccctaaattaaggactattaggtgccttatttgaaaaccactaacccacaaccgggggtattgcatacatgtgtattgttatttttgaggccattcagtactgaatggatcgacgctcaaggtaaggtgagatgtgagagcatgaccgaacaaacgttggtctagggaagtgcttaattgtagcgcttgattatatacatgttccacatatgtatatatgaaggctgcgatgtggagtatttacttttctaggaattcagtaccccatggatgtgtatgggtatacagacatgggaatactgagaagtgtaatgtacttgcaacgacgcacctacgctcaggtaagaaggtgagttaccataatgagttgccctatggttaaagtgtggcaacggcgcctatgcgtggctcgacgcttaatgatgagctggcctccatatagaaatatatggagtataaattgtgataaactgtcatgtttgaattgcatcattgggaaaatgggctgtgatggaattttctgcaggtacactaacctcgaaaacgtatgtgtagttgacgactagaaaaacaccgtgagagtcgtaagtatgccaccgagatagaacactattgccacagtatgttggcaaaatcagtgaggacgtgtaggacgagcatgcatcctgattgtcacattatgtttgtcacttatacacccaaaatgcttctctcatctttattccagtaaccattgattgtaaataatatggtgttttaaagctacatgtttagatagctttcaggctgttttaatttgaccattagtgcaaatggtgtttgctcttgtgcttgatatactaatagaaagttagtgacttgtttgcctaaacccaaatctaggccatgttcttagttgatgaaccatgacccaaagttcatttttccgttacccctccttgacccaaacttatacaaacaatgcttagataatttcttcattggacaaaaaagggtacttaagcttaaaataagaatctcgactcatatttccatcttagaccatgcccttgacaattggtacaagctgatgtctcttatccagtttgcctgttcttaagaatggccatgttgcttcatcaacctaacctaggaaaggcatgtccgaccattttcttgactttgatgcctttggtttcctcatatctatctaaggcatatcaactcaatcttatgattgttttcctctgtatctaatcagatactaatccttgaccttgtaatctctgtgatgggcatagaaatatgcttgtggctgaagtatcggtctcccatcgtacttctctcatcaagtttaagttatggtcatgtcttgttcatttcatcgggccataatctatttggttctctacttgtaaccattcttacaggtggagtatctccttgtataatgtcacccttgcccaattcatttgtgtcgcgtgagatttcttattggttatgtctaataatggtgttgtgattaaaactgatggtgccgcgacaaaatcgagggcctcctgtggatgcatacacatggttgtgctgctcggcacgcgctggtatcatggttagtagttgtaatccattatgagactatatcaatgtgttatcctggcacaatctagttttaccatgtgagattcattattggtgccagttcggtgatggtgtcatgattaatgacttatggtgccgctgcggaactgagagccccttgtgaatgtacacgcaaggttatgctgcttggcgtgtgccggtaccgaagtctctagtcatgatccactatggaattacactgatgtgtaatctttcgtggactttcccttaaaaaaatttctatgttgtttgtcaagtgatcaagcaacatctatcatctctgttggatcaaaagggcatatccctttcatgtgtggtctcttttccttgactttgatggtgacttcacacatacacgttccctttgcatcctttgtgtaaaggtgaacccttggagctttttagtgttggaagacaggtaattagctctcaaaatggagattggttttccctgctgctgagatgcaggagtttgttcattcgctctcctatttaatccatgtattccctaaccaagtggatggttcatctcgcatgcaaaaacggatgaacaacatgaccaaatggattactacccatgtgcatgatcacctggtgatatgagtgaactctcaaacattggcttaccgatggtactgagaggacttgctcgatgtcaaaagtagttcaacaagttggtttttactaacttgtaactgcccaatgaacgaatgttgagtttagagatcgttt

SEQ ID NO: 70962 - DNA, 1224 bp, Zea Mays
tcctaagaaagttattacaaagattaagttaaaatcgactgataaccccctaatcatcgctctagtcatgccccgatcgcctcacgtgtgcttttccagcatgtgcgatcaggtcgagccatgcctagtgctcgataaaatggactggttgtaaagtccgtatctacagatccctccgctggtaattctctagaatctataccatatttcgtggacttgaattctcgggttagccacatgttaaccgcgaccgtattcgacatccacacacgtcccctgtgctatgaatttcctgtaaccacttgttggtaaacctctttctgtgtgttttacccaagaggttgcatctgattatttttgggtaaaatcgtgtatccaccgctcgcccaacagactcaaatagtacagtgttatcagaaaaagcaaactgcacatggaaccttatgtgttcctctggcagacatcgtctctattggtggacatttctaaattagcttaaggcaatgcatgttatgtccactagagaaaccatattctgagacacccgcctttgcttggagctgttttatggttaccgctgatatggacaggagttacattattctctgctcttaaaagtctttcgttctgaatctcgggacgagattcttttaaggggggagggttgtaacaccccaggtgtttatcgtctgctcgaccacgagtgcggaccttaacacgtgatagcgatgaataaaatggacactaaattttaattatctcgcaagggttcgagtttggtgccattttcatttcgataatctatgtaattaaaaggggttcacaggttttgtcgttatttaacaattaagcagaccgaggtaattagaaccgaaccgagtaaaatgcttaattcagttttgaatcagatttgaagtatgctgaaaataatatcaactagctgtttttgggtcctcataacttttgatctataaacagtttgaaggtggacattataacaaggttgtagagctatactagggatacaaatttgcttaggcaacctgcccctaaaaccatgtgcaactgggtgtaaatctggtccaaagagaggctgacaggtttggatttcagacttggtgtaattgtccaagtcagaatttcagtgtgtttggctcaactttggagctttgtggtgcctgatccatgtggttttgggctaagattgatgtatcaagtttgaag

SEQ ID NO: 70963 - DNA, 619 bp, Zea Mays
cttacttcctcctatgcttaggtaggcgacgggtccgaagaggtccatatgaagtaactccagaggaattgatgtggtaattacattcttgctgtgatgagcacttcccacctgtttacctacttgacaagctacacaaggtctatcttttttgaaagtcacatttgttggtcctaacacatgttctccctttagaagtttgtgaaggttcttcatccccacatgtgctagacggcgatgccacagccagcccatgctagtcttagcaattaaacatgcatctagaccggcctcctcctttgcaaaatcaactaaatagagtttgccgtctagtacacccttaaaagctaatgaaccatcactccgtctaaagacagacacatctacatttgtaaataagcaattataccccatattacaaaattgactaacggacaacaagttatatccgagcgattctactaaaaacacattagaaatggaatgctcggacgaaattgctatttttcctagtcctttaaccttgccttggttcccatcaccgaatatgattgaatcttgggaatccttgttcttgacgtaggaggtgaacatcttcttctcccccgtcatgtggttt

SEQ ID NO: 70964 - DNA, 1112 bp, Zea Mays
gtgacaatagccttaggaacccaaatgcaagttttatctcccttgcattttgcccctaatttcctagcaattactttcttatcctttctacaaattgcaaaggaagcattgcaagcatgataaattgtagaaggttcattacttgctttcctaggtatatgaacaacatttctcctaggcatatgatgaataacatttttcctaggcatatcatgcacaatagaagaactagaagcatgcatagcatatgaatcataagagtaattcctataagcatttctagagaattttctatcactataaatgaaagcatgattcttttgaacactattagccataggggccttccctttctccttggcggagatgggagccttatgacttgttaagttcttgacttccctcttaaagccaagcccatccttaattgaggggtgtctaccaacagtgtaggcatcccttgcaaattttagtttatcaaattcatttttgctagtcttaagttgggcattaagactagccacttcaccatttagttttgcaatagaagtaaggtgctcaacacatgcatcaacattaaagtccttacacctattgcatatcactacatgttctacacaagaattagatctatatttgctacttctagcttagcatttaaatcatcattaacactttttaaactagaaatagtctcatggcaagtagataattcacaagaaagcatttcattccttttaacttctaaagcaagagatttttggacatctacaaaattatcatgctcttcatacaaaagatcctcttgcttttctaacaatctattcttgtcattcaaagcatcaattaattcattgattttatcaattttagttctatctaaacctttgaataaacttgcatagtctatttcatcatcgctagattcatcatcacttgaagaagcatatgtagtattattcctagtgcataccttcttttcctttgccatgaggcaggtgtgatgctcattggggaagagggatgatttgttgaaggcagaggcagcaagtccttcgtcgtcggatgaagagcaatccgagtcccactctttgccaaggtgtgcctcgccc

SEQ ID NO: 70965 - DNA, 790 bp, Zea Mays
cttcatctctaaagggggagaaaaattctttctaaaggagaacactcatttaggggagtaataatttttactgcttcaatcgatatcattgataaatcttttatgagggcaagtattattttgcaacctacatgctcttaatgtcttccttttttggtggttgatgccaaagggggagaagtttatggaccaaaagcaataaaaagtgtatcaaacaccaaacaccaccaaattaaaaaaattatccttcaagtggttttggctctttggtctaaaataggaagtaagtgaattatggagttaggggaggcttaagtccataatctcacattgtggggacactcattcatcctagcaagtagattgcatattttcattgaaagatctgttacatttgcttgctttggttgtgttgtcatcaatcaccaaaagggggagattgtaaggaaaatggaccccaggccatttggctaaataagttttggtgtttgttgatcaacacaacatgtggactaatgtgtttgctagtgcttatgtttgtagttcacaggatgtgaagaggattggactaaggcaatgatgatgcaacacctcaaaagaagacataaaaagaagcatagaagtccaagactcaagaataaaagaagcccaaaagaatcagtgaagacatccaagaaaatggcaatcagccagcgcttggtggtgcacgggacagtgaacagtatatgtccgatgtgcaccggactgtccggtgggacacccggacagtctgcgcagaggggcctgcagg

SEQ ID NO: 70966 - DNA, 908 bp, Zea Mays
gttatgcttcagccaagggttgtagctgtagtactagaaacgaaggtactagtagactactagaaacgagaccctgttccttgaaccctgggcaacagacagcccgttccgtaccgctctgactcctccggagatgcagaaacgctagaggaacagcctacatcgctagccaatcaagagccagaccggagccgcggagggtcgggaggcggcgtgttcctcgggggattggtcaaggggaggagggacacgcaccgctgtcgccgatgagcaggagcttaatcaggtggtcgtagtcgccccgggacctcgacggcggcgccgccatgctcctcctctgcctcacacttggtggcggtctccgggttccctctctccctccccctctctctctctctctctctctctctctctctctctgtgaccgaggaggtggaggtggaggcgacgaggggacggaggcgaggcaggcaacaggccaacagccaacagcaacagcgagaagaaaggaagggaggaggcgtccagctgtacgcgacgagagagggaaggggggaaaacggaataacaacgaggacgggaacgaaaagctggaggtgtactgtaccaggacgggagtatttttgtactcttgccgccgcgcggtcgtggcatcgccatcgcatcggccagtggaacgctgcgttgtcaggttggttggttggattggacctggcggcggcggcgtacagcggaacggaatgggcgtcgccttcgacttactaacggaatgggcgtcgccttcgccttcgacttacagatggtcaaaactacttggaaaaaaaagaaaagagcttcccatagaatttactcatattttccctatttctttctaaatctcgagaacgagattcttattaaggggtagg

SEQ ID NO: 70967 - DNA, 252 bp, Zea Mays
aaacaaatgaggtaaatgaaatatataaataagaatatatttctttacactaacatttgaatttggtacattttgatcaatggtgaatctcataacaaaaatttaaattcaaatttgaattctaaaaacaaagaagaaaaagaaaccagaaaagaaaaaagaaaataaaaagaaaaatgtgcttgggcccattctttggctccccgcccatgaccactgcgtcggcccacctaatcactcacgcgtggcccg

SEQ ID NO: 70968 - DNA, 543 bp, Zea Mays
cgaatgggcaagtagagcgtgccaacggcatgattctacaggggatcaagcctcggatttacaacgacctcaacaagttcggcaagcgatggatgaaggaactcccctcggtggtctggagcctgaggacaacgctgagctgagccacgggtttcacgccgttcttcctggtctacggggccgaggccgtcttgcccactgacctggaatacggctccccgaggacaagggcctacgacaatcaaagcaaccaagctaggcgagaagactcgctggaccagctggaagaggctcgggacagggccttactacactcggcgcggtatcagcagtcccttagacgataccacgcccgaggggtccgaccccgagacctccaggtgggcgacctggtgcttcggctgtggcaagacgcccgagggaggcacaagctcacgcccccctgggaggggccattcgtcatcgccaaagttctgaagctcggaacgtacaagctggccaacagccaaggcgaggtctacggcaacgcttggaacatccaac

SEQ ID NO: 70969 - DNA, 207 bp, Zea Mays
tcaccttgggttcttcccttcctcctttcttcttcctccctccaaactccaattgagatcgcagccacacgacggagaacatgcgggagggctgcaccttggaggggggaaagacaaatgggggggcggctagggttttgggtggtgagggctgcaaaggtttgaggagaaagaagatggaagagggggggaggggtgatgtccaag

SEQ ID NO: 70970 - DNA, 290 bp, Zea Mays
ccaaaatcggcccaaccgagggggaaggttttttttctttttctgttttctatttcatttttccattttctatttttgtttctttttatttccttttcttttgaatcaacaatttgctaaataatcttaggggttgaaaataatctatgtgaggtgttcctaacaatccaagtgtatgcatatggtgagatgacctaagggtggagtttagggagaaaaaaatagaaataagaggggtttagaggattagggttccaaaccttgggttgagattttgggatgttacaaac

SEQ ID NO: 70971 - DNA, 367 bp, Zea Mays
gggaggagaggggggaagagcgggcgcggcgcggtttgggccaaattcggcccagccgagggggggagggttttttttcttttttgctttttctgttttctatttcatttttccattttctatttttgtttctttttatttccttttcttttgaatcaacaatttgctaaataatcttaggggttgaaaataatctatgtgaggtgttcctaacaatccaagtgtatgcatatggtgagatgacctaagggtggagtttagggagaaaaaatagaaataaggggggtttaggggattagggttccaaaccttgggttgagattttgggatgttacactaccgaacaagttctaacgctcgaaacgag

SEQ ID NO: 70972 - DNA, 297 bp, Zea Mays
aacgagcggacgacgatcaggcacccacctaaaccctaacctaacgcccgcttcctcccagccgagcgagccactgcgtagcgcgactgcgactgcctgcgccgccgccagcctcttgcgtcgtcgcccctgtccgcggccgccgaggcgccgactcgccggcgcggcgccgtcttccgccactgcgccccaccgcccaggacgaagctccagctccggcccaccgtctccctgccggcactgccgcgccgagggcccgagctcctcctcgccccatgccctcgcggccgccctgcc

SEQ ID NO: 70973 - DNA, 4704 bp, Zea Mays
gttctcttaagatttaggcaattttatcaacagaattaaactgtgggttggtaaaagaagttgtagataattttataagctttccagattgttaaagagtgcattcatatgatttgtgaaactccagttatgtttgttttactgtgactgttcctgtttacctgacaaaaatgagtgggtctgttcactggtgggtttcatctagtaaatggccgaattggctcttccaactatggagacttttgtagagggataaaagttcttacttccagcagaatttcataatttttggttcagcagttttggagatatcgaattttaaagttaaccatactgctgtctaaaacagattcagtcagttatcttgtcagatgttttagaacttgtagacggcagaatttaattatctattgaatactgaagttgtagagtattttgtgtagatactcctagagtatttgtttgatatcaccgctgttttaattttaaagatacaaaattaacaaacagcgttgctgctgtatgacatgtggttcagggtgggagtctttccactgggtcttggtttcaagtgtaggagtgttttgttgattgatggcaaatgtttgtgaaatatttgtactaagttttatgcccactagcaggtggctacactccagatcatgtctagtacatttcttcttcttcgatgaaggcaagtgaatgtagcggtggttgcttccgttctgacctgttatttctatcgcctacactctaatattcagaagtatcagattctttcataattggactctatggtgatgctttacttgcttgcattatactgatgctcaatcatatattgatgatgattatgatttgagtatgactcatgagattaattcacacccctgaaggtaaatgaagtattatttgaggttggtattgtatctgaaggtaaatgaagtattatttgaggtttgtgttgtatctgaaggaagtgaagtttattgataaatgtagcatgccatatacattgcatgactcatttgcatatgaagttttgtcgtgacctatggtccgaccgtaccggtacaacttagcatcgtacgttgcccgagaaggggtacgatgcggcttcatacccttagaggtatgaaggcagaggacatatgcattgcattcatatgcattcattgaagtgatatttgcagatgatgtggttttatacccccagaggtatgaagatagagtacctacacattgcattcctatgcatacattgaagtgatatttgcaggtattgttgacgcagggaagtgttatagaacctattgtggttgttcgaggaaatgagatggtattggttatagtgggactactgagttctatatctacaagcatttctgatttttaattgtgactcttttaaaatgttgatgaattcaatttgtggtttaaatatctcgtcagaacaattagcttgctgagatgtttcatctcactcttgcattactcaatgcaggtgcttgttgctcatcaaggggagtgggaagtagcagcacatccaccttcattctcataataatgctgcccagacgcagccatgatttaattagaaacttcttgtcaaaggatgtttgtttttaactagtcgtgcgcactgattaattcagttcatgttgttatggttgtcttcccattgctagcagattattaatgtcttatatgttttcttatcatgatatctatttatactttgttgcttcacccgtttatgcaattttcaaaggagatgttgtcgaaattttatatatgaatattagatgtgtagtttagtagcattctggggtgtttgtggatcccggggtgttacaagtacggatagtcccatgttcattaatgagcaaattcataagaatgcacaagctactactgttcttctagcttcattgtgcagggatgaataccacaaggtgagcggcttggataacgccaagcaaatttgggacaccctcaagatctctcatgaggggaatgacgtcacaatgctcaccaagatggagttggtggagggtgaactcgggagattcgctatgataaggggagaagagccaacccaaacgtacaaccggctcaagacccttgtcaacaagataagaagctatggaagcacgcgatggacggaccacgacgtcgtccgcctaatgctaaggtcttttactgtccttgatcctcatcttgtaaacaatattcgtgagaatcctaggtacaccaagatgacgcccgaagagatacttggaaagttcgtgagcgggcgaatgatgatcaaggaagcaagatacgtggacgacgcattgaatggtcaaatcaatgagcctcaacctcttgctctcaaggcaacaagaagcaaggatacactacctagcaaggtggcacaaattgaggcggccggacttaacgatgaagagatggctctcatcatcaagagattcaagtcggcgctaaaaggtcgcaaggggaagccaagcaagaccaagacaaaggggaagcgctcatgcttcaaatgtggtaagcttggtcattttattgctaactgttccgacaatgatagtgatcaggatcaaggaaacaagagggagaaaaagaagaactataagaaggcaaagggtgaggcgcatctaggcaaggagtgggactcggattgctcctcttccgactccgacaatgaaggactcgccgccaccgccttcaacaagtcatccctcttccccaacgagcgtcacacatgccttatggcaagggagaagaaggtatgtactcgaaactctacttatgcttcttcaagtgaggacgaatctagtgatgaggatgaaatagattattcatgtttatttaaaggcctagatagaaccaaggtagataaaattaatgaattgattgatgccttgaatgataagaataggcttttagaaaaacaagaggatttgttgtatgaagaacatgacaaatttgtagaagcacaaaatctcatgccctagaagttaaaagaaatgaaatgctttcttgtgaattatcttcttgccatgagacaatttctagcttaaggagcattaatgatgatttgaatgctaagttagaaatagctagtaaatcaacatcttgtgtagaaattgttgaaacttgcaataggtgtaaagactttgatattaatgcttgtagcaaacacctagcctcaatttctaaattaagtgatgaggtggctagtcttaatgcccaacttaagactagcaagagtaattttgataaactaaaatttgctagggatgcctacacggttggtagacacccctctattaaggatggacttggcttcaagagggaagccaagaacttaacaaaccataaggctcccatctccgccaaggagaaagggaaggctcctatggcaagtagtactaaaaagaaccatgcttttatgtacaatgatagaagacagtctcataggagttgtaatgtttttgatgcacatgcctatgattcttatgctatgtttgcttctagttcttcttatttgcatgatagagatatgtctaggagttatgttcatcatgtgcctagaaagaatattgttcatgttgctaggaaagttatggatggtccttctacaatttatcatgctttaaatgcttcctttgctatttgtagaaaagataggaagatagttgctagaaaattaggggcaaaatgcaagggagataaaacttgcatttgggtccctaagacaattgtgactaaccttgtaggacccaacaagagttgggtacctaagacccaagcctaaatttgccttgcaggtttatgcatccgggggttcaagctggattatcgacagcggatgcacaaaccacatgacgggggagaagatgtttacctcctacgtcaagaacaaggattcccaagattcaattatattcggtgatggaggcgacaaagattactttggacaacagggaagagctcgtggttgatttgtccactgaaatggtggaaaaggacttgcacgtggagcagctatccacggatatccaagagttggaggaattggtgggcaccagggagaacaccatcgaggttctcgaggatcagctcattaacactcagcaacagcttgctgaggctaatgagcacttggatatgcatcatcaggagatccaggacatggaggccaacgaggacgtcgacatcgagggaggagaggagcctgcctccagcgtggacactgctggctcagggagaccaccttcccccgagtcgagtgttgcctcgttcgctcactaggtatccgggatagagttagacgtcagtgatggtaggactcctcgcagctagcttagcttttgcacccttggggtactagactagatagagttgagtctttttgggaccaatgatgtaaccgtgataaactctattggaagcatgattgatggatgctactatcagttttaaatttggaaggaaaaatctatgtcttttgaaatcctttttgtttaaattggaatttaccattctgcttttgactcttttcgccgcgattaaaccttgaacttggagatatggtgttaagtatatatgtggtttttcagatggccgggaggcagcgtcgtggccagaatgagcgcgttcctccaccgccgccaccgcctcccgctctgcaggagc

SEQ ID NO: 70974 - DNA, 1430 bp, Zea Mays
tgaagttgtagagtattttgtgtagatactcctagagtatttgtttgatatcaccgctgttttaattttaaagatacaaaattaacaaacagcgttgctgctgtatggcatgtggttcagggtgggagtctttccactgggtcttggtttcaagtgtaggagtgttttattgattgatggcaaatgtttgtgaaatatttgtactaagttttatgcccactagcaggtggctacactccagatcatgtctagtacatttcttcttcttcgatgaaggcaagtgaatgtagcggtggttgcttccgttctgacctgttatttctattgcctacactctaatattcagaagtatcagattctttcataattggactctatggtgatgctttacttgcttgcattatactgatgctcaatcatatattgatgatgattatgatttgagtatgactcacgagattaattcacatatctgaaggtaaatgaagtattatttgaggttggtattgtatccgaagataaatgaagtattatttgaggtttgtgttgtatctgaaggaagtgaagtttattgataaatgtagcatgccatatacattgcatgactcatttgcatatgaagttttgttgtgacctatggtccgaccgtaccggtacaacttagcatcgtacgttgccgaagaaaggggtacgatgcggcttcatacccttagaggtatgaaggcagaggacatatgcattgcattcatatgcattcattgaagtgatatttgcagatgatgtggttttataccccccagaggtatgaagatagagtacctacgcattgcattcatatgcattcattgaagtgatatttgcagatgatgtggttttatacccccagaggtatgaagatagagtacctacacattgcattcctatgcatacattgaagtgatatttgcaggtattgttgacgcagggaagtgttatagaacctattgtggttgttcgaggaaatgagatggtattggttatagtgggactactgtgttctatatctacaagtatttctgatttttttattgtgtctcttttaaaatgttgatgaattcaatttgtggtttaaatatctcgtcagaacaattagcttgctgagatgtttcatctcactcttgcattactcaatgcaggtgcttgttgctcatcaaggggagtgggaagtagcagcacatccaccttcactctcataataatgctgcccagacacagccatgatttaattagaaacttcttgtcaaaggatgtttgtttttaactagtcgtgtgcactgattaattcagttcattgttgttatggttgtcttcccattgttagcagattattaatgtcttatatgttttcttatcatgatatctatttatactttgttgcttcccccgtttat

SEQ ID NO: 70975 - DNA, 994 bp, Zea Mays
tggcgtggtacaaggttgggggttttgcggaaccattgaggagcgatcccgacggctgacgtaaaaaggatgatgtggcgctttgtatgcgcggctagatacaggtagggtgacaatggactctaaattttatactataaaatgtaaggatcggatcgagttaggatcgggctatatttctattgatttttgaactaaaaataatttagggtcttagcaatttgtgaagaaacatttggatcgtgatccattaacacctctagatacatgacttttacatatgtaaataaattagagagaagctagctctagaaaccgagcaaagccaagagcccaaaaaagagacttcacagctctctctctcattctctcctccgctgtgaaaataggagttggagtaagagcactaaactactactagtagtatttagattacaaacaaaaaatcaaccaaagtacagccccaaataatccccggcgacagcggtagctagctccagcagctctcgtgtgacaggcacggaatcgcggtgtagctagctccggttccaaattgtgcagttcgtgatctcgactcccagccagcttgattgctgtccgtctctatccggccggtttacatcccagcttttgagaggggaggtggttttctacggaagcttcttctaaccgcgcctctctctcgctgtcaagagctctcgatccgccctggttcgcactccactctgattttttttactcgttttatttgtttatttatatatatgatatcgtgctttatttccttccacgtcatacctgtccgccatctactagtagcatacagatcccaccttagttcataccaacgacttgggtgcgtgtacgtgtgtattcaatctatcgcgcgtgtgaagtgcaagcgtctactctactcgcgattagctttccatgaatggtcttgcgactagctttatgagatagagagagaaaaaggaaacaacctgaaaggcag

SEQ ID NO: 70976 - DNA, 288 bp, Zea Mays
ctcattattgattttagatatggaatagcattttctcttaaataaaaatttacataactaatataataattattagtccaaaaataaatactttatttataaataattttggtttgattcttacaaattttatgattatttaaatatgtatttcgaaatttgcaaagaaaaaaaagagaaaaaaaaagaaaacctaatctaacctagctggccgaattggcccacttggcccaacaagcagccgcccctgcccccttgacctagccgccactttgatggagccggcca

SEQ ID NO: 70977 - DNA, 345 bp, Zea Mays
ctcattattgattttagatatggaatagcattttctcttaaataaaaatttacataactaatataataattattagtccaaaaataaatactttatttataaataattttggtttgattcttacaaattttatgattatttaaatatgtatttcgaaatttgcaaagaaaaaaaaagagaaaaaaaaagaaaacctaatctaacctagctggccgaattggcccacttggtccaacaagcagccgcccctgcccccttgacctagccgccactttgatggagccggccactccgctccctaatcctcccagccgccgccaccctgcatttcttcctctctccctc

SEQ ID NO: 70978 - DNA, 4754 bp, Zea Mays
gcagagcctcgtgtccaagcgtggcaagttcaagctcggattcttccgtccaggtaactctgtcgcccctaattaacttcatttcgtacgacagctgtgtctgagaaatgtgtcggtaggtgtgtagagccatacctaaattttttttcgtcctccgccactgatctcattggacactacagctgcagttagcaaccaaatttagctataaattttgtaagtagttgcttccttatccgaagaaaaaaaaagagcaaaacaacaactttttcttacgtcctatcatgttcccaaatgcttatatttgactcataacaactcttatacacgttcacgtacactttctttgcattaagacatgttaacaaactcagcacgcgcgcaaaggcgcgcaaaatacactagttcagactacaagtagaatgtagagtctactcagacagtggccataaaaagctattgcagcgatgaagctgggatgtgcatcagagaatggagaggatcggatcagaagaagtgttgaggaactgagaaacagggattgtcccaaagttctgcacggcggatgtatttttttaacagcataggagggacgagccctttctggcctttattaaaattgaaagagttcatgaactaattaaaacaccatcaaaccaagaagtttaaaaaattagcacgattacagataggtttgtaaccattattgactggcacaacaggaaacagaaccaaatccgacagcgaaatcatttctgacggctagcctcgaagccattggaaaaaatttacattcaatgatccgtcgtagccatcggattttaatttacttccgacggcctgccatgtcagccatccgaagtaacgtgatagccgtgagagaaggccgtccaatttaagccgtcggaaataaggcaaaataagatatttctaatggttaaggacttatttataatggctttagctgccagaaatcttagggtttacaattgtgcacttaggggtatataagctttttttgcttgaagaataacttgagtatttttttatttggttcgacatgctccggaggagctgatgaaccgaacgggccctaattaaagtttatataaattagagaagcaatccggttaggaatcgttccgacccaccaatccggcacaaatgaacaaggcctaaatggactaacacattgatagaataacttttactaagaaaggaaggtgcacctgattcccgaagtgagatagggcagcaaaatgatcatgcggtagagtgcgaaaaagaccaatactatcccatcaatatttggcactataggacaagtttaagtacgttgcattttgaaggtttaggaacataggtggcaccaaaagataagtttaaggatcaatgatgtccactatgccatctatatttctcattttagtgagatttttgttattatagaaagctgcagagagagggctcttacaaaatggaaattgtatcgcgtgttctattagaatggaaatgaaactctctcttcctttgctcgaatggcgatgtgtccctcattcaatcttcactgactaagatttttttttgaaacgagattttactctgcttttaagaaagcatataacattgttcaaacacggcaacgactgctatgcaagcagtccttctgtacaagcgtgcaagcaaatcatctgatccactaaatcgcgatccacccgtaagtcacatttaacacttaaacccttccaccatcagctcaataatctttataaaaaaacccctaacaaaccatgattgtatctgtagttggaacgtaatctaatgaattaaatggtttgcttgcacgcttgcacagaagcactgcttgcatagccgtcgttgccgttcaaacacgcactagagatgccagtttactgccatcagaaaaccaacccaccagacctcctaagagcatctccaacaacgtgacctataaaaatgccctataatttgaaaataagtatattttatagaatttagggcaccaacaaaacatctcgctccaacagtaaagccctaaatctagattatagggcagcccactacggtgtagtatatttgagtcacttgaaagggtgccctatagttttttgacaaaaaattatgaaatacggcactgttggagtagtttttcctgtgtggagccccatatttcaatttaaggcactagtttaaggcattgttggagatgctctgaaagaaacatacagactaagattaaccttcgtctgatgctcttcacggatgtcgcatcgtctatccagttggcctccgttccgcgagcttgccctgtcgaccccatccttcctctcttcgaccttggcctgggttgtcagttgtcacccattcaccgtgctagacgtccgctagggcatgatggtgagaagctgcagatgctcaagcgcggacatggagctaggcaacatgcggtgacggcacgccaacaaccaccttcgggatagatgacatttatttgtggtcatcatgtgtattggtgtgttcgcatcatgttcattctcacgaaggtcctgtttggtgttagagcatgcttcttttgctgcgctgcacatcaatgtaggtctaacattatctaacataaatgatttataatgttctactcatatgctatcttagttgaatgtgataaatatgctagtgtgtagcgtacacatttgctaagacattgtcatggagcctattgggtgttaaatttgaattatttcaatgcgggatgtactgttggcacgatgatcacacccacacccatgtggttggagtggttccattctagatttggagagcgacctgactccattctagatcctgagagcggtgtgaaatagttctattttttgtttgggcccaccgcaaagagagcgagagaagtggtacggtgggatgccaccgttttatttggaacgagctcgtccaaaatctggtggaaatattcccgatatacaaccgctccgctctaactgctccattcgctctccaaacaaacatagaatggagcagctccatcccaccttgcttccaatcaaacggacccagaagtgttgaaaacacattaaatgattaatagaaaggccaaaatgtcctttatcatcctccaccattaatgcaattgaaataaataatggacagaatatggaattaatataattaatatatttttagttgtccgtggagagactagggactaaatcattttagtccatgtgtttggtcgtgacaatttaaggactaaatgaggcgaaaataaaggaactaatctttagtcgacaagcatacagcagcatgaaccacatgtaatcgtgttgtactgctagatattaaacagccgagtaaataaaagagctctgtcgtcattacttctcatctcgagttctctgtcctggagttttaactcgcctgcgtggctcatggctaccagcatgggaactagcgagctctcgggatgggttggggaggactggagaagggtatggcactatggctaggcatgcctgtccctatcagcacaagtttggcggcacaactctcagttaccacttttaccagtgtcaagctcggcaatgcgacatggggacagaagcatactcctatatagagacgccaggatggcttaccacgtatgctactggatcacgtcttctgggactcatgatgagtttagggatcaaaagtaagtcccttgaaaattagagataggggtgaaaatggctttgctgtacccgtcgtctaccggatacgaatagtaaaattatccatttttcaatatgaatttagatacttttatactcaaaatagatacgagttactggctgaataatgcatcttcggatttcagttgaatacgaagcgagtactatctagtaaatgcttggatattcaggtcgaatacggtacctgagtttcgggtacccatttttctttttctgcataatattgttataaattcataactttcacagataaactcggatgaagataaagtttatataaaaatcgtagagctcaaagagatctacaactttgtagtacatcacattttttttgaacacatcttcacatcgaaatcattgaaatagtgtctaaatttatatcgaagtaacgaactatacatcacatgaactacaaggtattggcgcctcaaataaaattttctctctccttccttctacgattttcatataaactttatcttcgtccgagttcacgtgtaaaagataagaatttataataatattacgcagaaaaaataaaaacgggtacccaaaacctgactactcctatctaattaactcgaatatccgagtatttatgggatagtacttgctttgtattcgacccgaatctaaagatacaatatttgagtagtagtcgtatccatcccgagtatatatagaaatatacgaacctgtacccgaaaaattagtatttgtactatccatacatgatggtacccgaccgatacatcggagctgttttcacgtctatcttgaacttccaaagtacttaattttggtgcctaaactgatcatgagtcccaaaagacgtgatctagtagcatacgtggtaagccatcctggcatctatttatgcttcgttccccatgttgttatatataagtgtgtttgtgcacgcacgtgcacatgctaaataatggtaacacatataaactatcttgtattgtattagactattgcgtgatt

SEQ ID NO: 70979 - DNA, 786 bp, Zea Mays
cttcaatccacatgatccacaacctccaaaagcatataattatagggaggaacaaggatcctatccttacctagggtttccccaagaaaatctgcaagagatgggggtagaacatctccttgatcctctcttcctcttcaatccatcttgctcctcctcttcttgatccttgctgcgtgggggagatctagagggaggaggaagtagtggagggtggctgcaaggggaagggggaggggcggccaagggtggggaaaagggggggttggcggccaagaaaagggaaaaatagggggcgaccactagggttttgtgggagaaagaaacgacgcctcaaatgtctcttgactttgcatccaacggcccacaactctttccccacatccacgcaccgaagataaacctttggcaacatttttttgggatattacactctaccccccttaaaaagaattcgtcctcgaattcgaccactccaagcaaaacacccaaggtaccccatatagcaccaccattcgaaacatgggtccattattggtcttaattaacacaagaacttctaccttggactaattgtctaaggaaactacacaacctgacatcaagcatgaaccaacatgtaatgaagctcaaaccaagtcatagatgcaatcaacactacgatttcacaacatcgaatttggatgcagccatacatcagcatcaatgtcttaaaacgacactcttttatgaaggggtaatatgcactaagcacaacctttaccaacttcaacaattcattttaat

SEQ ID NO: 70980 - DNA, 269 bp, Zea Mays
ctcacatagactatgtttctcactcaagatcacttagaaaatatttttggtctccaaagaaaaagaaacaaaaagaaacaaaaataaaaaaaggagaagaaaggaattagaattagaaaaagaaaaagaaaaactcccccctccctcggttgggccgaattccgacccaacccgcgcgcgcccgcgcttcccctcctctctccctagcccaggcggcccaacccgtgcgcggctccctcccgctgacacccgggctccgcccgtcagcg

SEQ ID NO: 70981 - DNA, 382 bp, Zea Mays
gcacctggcgtgtcgttgggcggctccacgggcgcgaacgtagcgcgggcgtcgcgacagggagagaagcaaggggaaggagaggaatggaagggagagagagatgccggtgggagaagcacagggcgcggcggctggaagacagggagcacgcgcgttagggttaggggcggctgtggttgcttgttgggcctaatgggccacacggccggtaggattaggttttttttctttttttttatttcccttttccaatttcgaaatacattttgaaataaccctaaaaatcataataatcaaactaaaattatttataaataagatattaattcttggactaatattattatatatattatttactaggatttttatttaaaac

SEQ ID NO: 70982 - DNA, 356 bp, Zea Mays
gttacaaatatgtccataaaacttgtacatgtagtttacaaatgatgcaaggacagtatcgttattatgcctttactgctttgattacagagtcttgaaaacaccttctcccagccttgtttcacttctaccttcgttttcttgtgttgttatgacgaagccaacatcttcgtcttcctccctgtcctgctccaaaggtattcagcaccgaagcacctgcaacatttaaggatatgctaacaactaatagttaaatatgtttttgaggaccttcgaaagacgaaggaccccaacaaatactaccataaattattttttctagtgcaaaatagcccaaccaagcagcacctatgtgg

SEQ ID NO: 70983 - DNA, 190 bp, Zea Mays
ttggattcttcccttcctccttccttcttcctccctccaaactccaattgagatcgccacacgacgaagaaccacgcgggagggcttcaccttggagagagggggggggctagggtttagggtggtgtggctgcaatggtttgagggaggaggaaatgggaggggggctgcggccaagggtgtgggggga

SEQ ID NO: 70984 - DNA, 200 bp, Zea Mays
aggacacgtcattgcacaaaaaaatctgaaacttggtgtgttttcttcttatgtgctgctgcaaaagagaaaaatataaaaaaaatatttgaaaaaaatcgcaaacaaaaaaaaagaaaaaaaagaaaagagtagcacataaacagaaacgtcagtgttctgtgcacctctgtgattattttgccccaagcctgttttct

SEQ ID NO: 70985 - DNA, 491 bp, Zea Mays
gtcggtcctgccagtggacgacccggtcaggctccggccgaccaagtcttcttttcgagccaactctgcctctgttcgagctgacaccgctacccccggcttcggctcatcgaagagcggccgaggggttcctttaactaagcaagagaagcctcagacagcaaggccgaccgagccgagggactcctacgcctccgggatacggatacctcactcgtgacctttgcacggggcaactcacgcttggtgaagcggttctattagccgacaaacgagtcttagtgctcgaaatgaggaaaaaacactgctccgcgccaaaaatacacacatgttcaggccccgacagccacaatgaacaaaacaccggcattcaaggtgccatcacaaacggaactccggttccgtccccgcgggtatgaacaacctccacaccggggagcctgcggggcgacaagttccgggcgactcgccagcgacctctgcagcagcag

SEQ ID NO: 70986 - DNA, 611 bp, Zea Mays
gtttaattaaggaaaattagtttttcttctgtgctgaacctaagaaaatttgtagatgttcaaacctcacttaagcactatttaaaaatagtaggaaccccagcattgaagaatatgatgtagatattcatttaaagctattttgcccaaaacttaggaaaaaccagaaaggtattagaaattgatgaacagcgagtagaattatttttcctagtttgcttatgcaacagagaacctacgaaaaataaagagaccattagtccagatcagttttaaattaaaatgctttatttagccttatttgaactgaaaatcaattattagaattacaaaactatacccaaaatggataataaaaaatcagtagacttacaaccaccagagccccactacaataataaagaacacctcagcccaaccttttaagtaaggaaaataaatataaaatgctaataaggcattttacaaataaatcatgaacaacccctaataatgtgataatgggcaaccaaaaattagctaagtccataatgagataaaccatcagagaaaaatacaaacccatgaaaaagaagcaaactcatacctattgctaatgatttaagagaaag

SEQ ID NO: 70987 - DNA, 985 bp, Zea Mays
aaagaaggccccgtaacacctttgttatgaggtacttcaaggagttcaaatccccaagattcaagagttctaccctctttctttttaagtggggtagtgttccagcaaggttcctgctatggagaaaaagaagaaggcctgtaacaagtttgtggaggaccagatcatcgaagcttataagtttctggatgagaagtggtcacccaagttttgttgatgaagcaccaaaagaccaatcaagtaaggaatccatgtgggagtttgcaagagaaaggtttgcgtgttggcatcaatgcttcctcaataagctagcggccaagcgaaagccagtagcctgaagatgatctttgagtagccagaatcagcgtttgcaatcagcaaccagatgctcctgaaaggccagattttgttgaagttccatctcctcgaagagttgcaaagtgaagatatgtagctgaagtaaagctatacccataacccttctaagccaaatctcgaggacgagattccttttaagtggggtagatttgtagcatcccaaaaatttaaattctgaaattttctcaaactcgccctaaattcaaaatgaatttcaaatttcatttcaaaatgtttgtttgcgagttgatatcaacaaataaattatagtggtctatattctctccaaaatcctcctccaaatatcctacaaatatttccctactgaccccctcaaattctttccagaaacactgtccagatatttccccagtggtccccctcaaattctttccagaaatattgcccaaatattccaccaatatatctccaagtattttcttcctcagaaataccttccgaatcatttttgaagtctccacaagtattttcttcataactttcctcatgcccatacgtatacgtatgcctccaatgtcatacggtgagctctacaagctaacctcacttatacaagacaaatacatgctaatctcccactaatcct

SEQ ID NO: 70988 - DNA, 266 bp, Zea Mays
cgactgttcccaaccttgcctgtggctggtggaccgctgaattgcttcgctgcatatatcgggctgcttcaaccccactctgatgatatgtcccgagttgtggaccaactcttaaagttgatcgccacctttataggtttgtctcgtttaagcagatctggaatcatctgatgtataaatgtgtttactagcctcctgggactagtaattgtatcacatttgagtcccagaggattggggacgcttcaatggtcatggcacgtttc

SEQ ID NO: 70989 - DNA, 534 bp, Zea Mays
gtgaaaccaattttcctaggtttcttattttccctagaatttaataaaaatagttttgagatttttagaggaaataaggaattttaggtcatttaaaatagtttaagatagtagttctggatttttaaaagataaatggtaatcccaaaaatgttcaaaatttttatatgaacttaaaacattgtttagaagccttgggtagagtttgaattgatttgaaccatgtttgatagctagaacccaaaaccaccccccctgccctgtgaactcctttactgactccggaaaccctaagttctcggagttccgtaaaggaaagttatattcaagacttagataataaatctttattatcttcgcactctcatgcgtattacatggcattcatacttatatatgtatatatatggttatgatagaacgcgaagaagaagtggaagtcactgaagaaaggacaccaccaccctcggattctcaggcaggcagctgcttctactttgatatttgtggatccgagccagactcacctgttaa

SEQ ID NO: 70990 - DNA, 196 bp, Zea Mays
ttcagtatatcttattgtaacatgtttgttcgtagtaatgcacgagcgcttgtctagtcagctttgaaggcgctaaaagaatgagaccacggcaagccgacaaatttggaatttcagatgtatcggaaggggctgctacaacgggttcattgccaaaaaaaaataaaaaaaaataaatccgtgaacttcaatccag

SEQ ID NO: 70991 - DNA, 639 bp, Zea Mays
ggggcagccatgtgcgccgcgaacttccaataccctgttatcagtagccaggcagggtattcttagcatgtgcgccgcgaacttccaataccctgttatcagtagccaggcagggtattcttagcttgcttctagccatggagttgcgggaattgctcgccgaacagaaaacgccgtgatagctgctggcctgaaatcgcggactcggcagcgaacctaacagacaaagaaggagccgcccgtcgtgagggagataagcgaatcatcacggacggaatcatgcgttcgaagccgagatcttggcgtgcccgtagtgatgatgctgcaaccctcaaatcggagggagaagccatggagttgcgggaattgctcgccgtacttggaattgactgccgaaccgcagcgctgcgtggccgagctccttcacaaatcaacagctggtgagcgacctcctaaacacatcctcaatcccatcctctatgcctaggtccgttcggagtgctgaatggggtgcggttgcgcgcggtcatcgcgcaccggtgtggatgtcgccgtgaaaaccggcgccgccgctctgggttatcgggtggagaagaaaaaccgcgaccgttgatctggcctgggcggctacgatcaaaa

SEQ ID NO: 70992 - DNA, 2008 bp, Zea Mays
tgatcaagggcacaacttgcctgggacttgagattccagataccaggatgatcttcaggtgactcgtaacctcgctgctagtcgtagcaatacaaacaaacatggtatggacaaaattaacatcacaccaaacataagaataaaccgtgtaataataatctacgcgctgttacgagatcgtgggatcgagaacgactaaattcggagtcacggttaaggagttatggttttcagaagacccatgcaatttaagcagttaaaactagaccttatgttattaatagatcatgtgagaaaataatctaaataattaattcaactttaagttaaattataatataattagggatgatattttagccaaactatagttataaacaaattaactttgatttagagaggttaatctactaaacataggctaaacaaatatctaattataaaaattattttctatggtacaattaatgtttgcactgcatagacaatatttttatgaagctaacgcaatttgaatggatcaaattggagttacagttattgagttacgaatttctgaagttatttagcacctagaatagattaattcaaacgaaccattttaattcaagtttcatggctaaacaaaggtactaggtgatacacaatattaatacaaaattattgcaactggaatgactcaatttggagttaaaatgaattaactatgaatttgattatctttgtattaaaaatcaatttctgtaattaattatccattttcattgttctctagaccgagcactaattacagaggaccccgggggcagaaccagaagttttccccagactcagacaacctgctggtggacggcgggttgattgtataaaagtgtaggagctcttttgaaaaacaaacagggccgaaggggtatgcactattctggatcgtcccgaactcgatctagggctaggattaaatttccataatactgaatcggtatgtgctgtcgaccctctgattggaattcaacgcccatgattttaaatgccgcgatgcaattccaaccacccgatctcgatccaacggcatagccaacatctaacccaatcggtaccatcgttacaatccacacggttcaatctgccatcaacggccaaaggatccatcttctaccccgatgcagacccgagcggcgcgtcttcctcacaacacctcctcccctacccatcggccatcggtcaggcgcttaagtcccccatggcggcagccatggccggtgtttcggacccagcacaacgacgttccaaccggaccaagaacctaagctacgtgacgcggagaacccagcgaacaaacaagagaggacgcacctgcgaccggaacaatgaccgagtctgcccacatcacaagatcttcacgcaacggcacaccactgctggcaacgacatcaaacacccaccagtgacacaccatgacccgactatgcgcacggaacggcagcacaggcggaattccaaggcggtggtgctactttctttctctcgcttcgatttcttgttgtggccgagcgccgagctgatgggacgaccggacgagggcatgctgtgcttgtttatatatatccgagcgagaaaatccgttgccgagaagctcgggcagaggccgaattgaccgatgcgaccgagcgagtatcggcgggatttgtttgcaatcggtgacaggcgctgagttggatttggaagaagacgaccctgacgcggcgacacaaactcatctctctgctacctcccaactctgcacaccatgattaatggattgatacaggagctcgcagcgacctgcgctttatagcccagcatcgacgccgcatccatggcccaccgtgcgcaggtgctcgtcgaggccaagggtttgggcgcttctaggacttctagctggctcacggtagacggagtagacgcggcttgggtttatatacacccgagaggggcaaatcgtaacatccggccaaggcggtagtctgtt

SEQ ID NO: 70993 - DNA, 401 bp, Zea Mays
agaaacaaggatcccatccttacctagggttttccctaagaaaaatctgcaagcgatgggggtagcacatctccttgatcctctcttccacttcaatccatcttgttcctcctcttctcgatccttgttgcgtggggggggggagatctagggaggaagaagtattggagggctgctgcaatggggggagagggggcgaccagccaagggggaaaagtgaggcggccaagaaaggggagggggtggcggccaagaaggggaagagggtggccacctagggtttattttgtgggagaaaagaagtgacgcctcagatgacttctgatgcagcatccaacggcccacaaccctttttcccatatccactcaccgaagatcaacttttgggtcaacattttttt

SEQ ID NO: 70994 - DNA, 436 bp, Zea Mays
gatcggtgagtttatcgagcgttttttttcctacagtccacaaaaccacataaaaattcaggttagatcttatcccagcacccttttgagcctcgcactttctttcaataatctgcattgttgaatttgtgtgctttcgcgtcatttgttgctggttgcattgtgttcttccaccattcaaaccctagcgccgccaccatctcccgtttgatcacgccacaaaccgagtcaacatcgtttccttctttttctccttcggttacgtcaaaaaaaaaatagaaaaaacaaaccgagtcaacggccgtttccttgattttctccttcggttacgaaaaaaaaaacagaaaaaaaaacataccgagtcaacggccgcttccttgtttttctccttcggttacgtcaaaaaaaaacagaaaaaaaaagataacgaaggaga

SEQ ID NO: 70995 - DNA, 335 bp, Zea Mays
ttgattgcgcacgattggtttttgaatatttaataacattccttcttgaatgaaaattcacaaaaataatataattattagtcaagaataaatattctatttataaataattttggtttaatttgtataaatattaggagtatttaaatatgtatttcgaaattagaaaaaaaagaagaaaagaaaaaaaaacaaaacctaactaacctaaggcccaacaactaaccctagccaacatcacccctagccgccgcccttgtcccctgctctcctggaagccgccgtcaccctccctctctccccacctctccttccctatctctcctcactcgctt

SEQ ID NO: 70996 - DNA, 662 bp, Zea Mays
gtggatattcctcatatatattgcagtggtttgggtggtctgtcacacccggttttaaggaacaaagccgggtacatctcatacatgcgccaaagaagacaacatatataataacagagtgtatagagataaatgtcacaatataatcagagtattttattacatagcggaagtcttacaaaataagagataaatatcgcaggatctaaaatctatccttggcgccagaaagctgactgggagacgccacctagatcgaatcgaactcctcgatacttggctccacttgaaccacctattcttctcctgtggggggggggtgtgagacagcaagagtgagctcacacatgttcatcgctcaacaagttgtggggaataatgtggcataaactcaccaaaggtgggagttcatgaagtgtaaggctgatcaatgatataaggctgaagctgagcattgcttttaagttggtcaaaattttattaacaattactaagtgcaagtaaataccaaaccattataataataagtaaaattaataataaaataatcccaaatgcaatgaaatgacagattaagtttaagttccataaattaatcatgtgagtgtccgagccgctcatgaccgtgagcacggctagtataccagttttacactctgcag

SEQ ID NO: 70997 - DNA, 436 bp, Zea Mays
atttcttcatgtcatttgcattcataaacatgcatttagacatatatagaatcatcattataccgcacaaaaacacagatgcttcagcaatgaggaaaaactcgaaggaaaaaatttctttttatgcttcgttatgaatggaaagaagggaaggtgtttttcgcctccggctcaaaagagaagtttcgtccacaacaaagcggattgtgcacgtatagcagaaacaaaatatattacaaggtatgtacaaatttacatgagctgttccataactatactacaaaagtttcttcagaatttttgcaggaaattatattacagcaactgtcaagcttcaggctaggcttcgtcagacttcagcttcatcattcttcagctttgtcatcctacgaatatcaaagagcagaataagaaaagtacaaatttcaaggggaag

SEQ ID NO: 70998 - DNA, 511 bp, Zea Mays
attattttagtaaacaaatttatatgaacgtttgctaatatgatgagcaaattacaaccacaactcggtgcagtatatgttatgagtgaatgaagaaaacattagactaaatgcacacaaaagtataatggaaaataatatagtttataagctacaacaaaatattatctatacccctatataatcctacatttaaagcatcactaaatgcacacaacaaattacttctagctaaatcccacaatttaaaccaacacttttgattgcttcatttacctcctctctcataatcaatcgcatccaacgatcagtgttttttatcatccctcacccgcctctagtctccccagcccccgtgatcaacactgccaccacactagcctcacgtatgtgtccgcctagatgaacaccgacgtccccacccctgctctattccaccacgacaaccgcgaccatcttcttgccgctcgtggcctccgcctccctctgctgtgtggcagggtgcctgttt

SEQ ID NO: 70999 - DNA, 1608 bp, Zea Mays
ttgtaattgaactctaataaattatatgaaataatgcgagatatgaagcatcaaagacaaataaattacaatatcactttcatattatatcaacttaatgaactcaaatatttgatacatttatacctctgccttggcaaagaataattcctgagtgatatgattgcaactacaggaatgcgtgaacagtaaaggaatattgttcactatttataggcataagacacaacctatgaggaattacaatcatgcccctcataaaagtttgcaacaacgactcaaacacttatggactaaaaggtcattctacttttaagtcggtttgtaattccgaagcttcatgaacagcaaccttcggtcatcacgtgcagacagcttcagcctaagctgtttcttcctgcaggaccttcggcgacgaagcatggtcccaacaacatttgtatccaataggaaatatgcctcaaggggtgaatacttgtcttttataaggcgaggttatctctgcttcaatttctttcttccatttaccgtattttgagcgcattttactttttgccaatgcttgaggttttgggccattaaggatgtcaacaatctcctaagagaaataactgttagaaatgatagccttttggtcaaaggactttccacttcattgtctttgttccatttatggacaaagactcatttgtatccaacaggaaagatgcctcaagaagtggccattacttataagaatacttgcccttttataaagcgaggttatctccctgtgtgtcattaagtatgtcaactatcttcttagagaaataggtgttgacaacggtagcctttcggtcaaaggactttacagattcgatgtaatttatggcatgtctgttcacccttaaggattcattgacatctcccaagtcaataatcctcgagttttctaataccccaatttcagttatgcacgctcctgaatagggttgtggatcatgtccactctcatcaatggttgattgatgtgcattcatcgcctttctctgctttgaggcaaatgaatcctgcttggttgctatgttttttccctttgttgccaacttagggtttctggttttatttagtaccttcactctttcaagtacatcccttgtgggaatagaaaccttaataacacctttgtaattagtgaatgaatctagtagattatttgctagatcttgcaacacaataatcttctggatttggagtttagattcgctagtacgcagattagaggagataccactggcatccaaatcaatttcttgacattctttctagtatttagattctccctctaatgctgataaatgttccaaattgattatatagtcagcaaactgagccataaatagatccctagttaggtgttctaaatacttaatgaatgataaagattgatatcccacatagatccctagtttcctatgggtgtcgatacggttcgctggggtggtgaaataggtatgtagactgcacacacaaacttatgcaaatgggaaatacttgatggattcccacgtactgactacatggtggaagactcatgaatgcaattggttgtagttagattatgtccac

SEQ ID NO: 71000 - DNA, 653 bp, Zea Mays
aaactcattcgatcatatctaggcggcgtttgtttggtatgcacgaatagtaagaatccgacttctagaatcaggattccaaccaaacactgccgagtttttatctaggataccgcgctgctcagacactatctatcattatcaaggtccggctggattcctcgggttatgtgatggtcgagattctcaaaatatgttggtttccaaacgccgccggatactgcatgccaccatatatatctgattaacctgacctgtgcgctggccggacgaggttcctctacggttacgtctgtccgccgacacgtggggccagacacggccagtcccacacgtcagtgggtcatatatatgtagctacgcctaactgcagaggatcctgtcagtatcccttcatcagtcactggaggtctgtagacagagcatgttcgaggagatgcagcagacaatgaagctacaagagtcgcaagccaagcaccagggtttataggccaaaatgagctaaatagttgttaggccggcctgcgtgccgtgagtataatatataagccaaacttggcgtagagaagggacatgaatgaaccagactccaaacactactatccactatcgtctacatgttcttcgtctctattcctcttctctgtgttgtc

SEQ ID NO: 71001 - DNA, 493 bp, Zea Mays
cgacacgagcttcgtcgattatgggagccagcgggattgtgtggcacatggcaggctcaaggcgctaccccgccggcggtcagtgaccgacgtgtactgagttggcggcttctcccttcttcaacgccgtagaactggacgagctcctggatccgcaacgagtcccctcaacctccaacatccgaagcctgccgcgccgagctcctagacttgcagcgagtcgctttgagatccaacatccgaagcctgccgcacccaactcccggatctgcagcgactcgcctccaacattcgaagcctgccacgcccagctctcggatccgtcgcacccagtaaccggccattagctccaacacccgattggaacataaacacccaacaacaccaagtccaccaatgtaaatgtaggacctttccgttcgtagaaagacgataccagttcatccaacagtactgtacatttttttgttcaatccctgtgaccacatcagat

SEQ ID NO: 71002 - DNA, 281 bp, Zea Mays
gtttgagtcaaatatgagaaggagaataaaatagtaatctttaaaataatatggttgatattcacatttggatttcaaatgagacatttggaaaatccgaaaaaaataaaataggagtataaatgtgagtttgaataattgaacttcgaactagaaacaaatttgaagctaaatagaaaatggaaatgaaaaagaaaaaaaagaaaaaaaacaccagaactcgacttgggccggctctctcaatccacgaccacttgcttccttagcctccacggcctggc

SEQ ID NO: 71003 - DNA, 1276 bp, Zea Mays
gagtaacactaggttagtgttgttaggtgacgtccacttgacgatcatccttgtcctagcacttgattaggcgggttcgtccatcagtatcttcaggcggagtagtccggccgcacttggggtcgacttggatcgtcttccgtatcacgtgattaattaacgtacctcatgagatgcacgatacatatgtatgagcacaagtataacgaatagattatagataatctactctaaaaaggatgaaacacttaaaatcaagcattaagcaccatggatatcatagcaggacatcgactacatccattaaccaaagtgacatattaacactagaacatctatttttattcctagcttgttattaactctttaaactgtgtaacttaattacttgatttaccgatttatctaaatcgatcatcacaaaatatgtatgctaaattaataatatttatggagactaataattctatttactctatttatagacctagttaacgggaatacgaatcaacttaccctgactaattcgatgcgatagtcgcaaacacgactacaggttccggttgacgtcatttaggggccttcttttcttcgataatcaattgctgaagatcttttcctcgactgaataagtttggcgaatcgaacttgagtcgcacaagatgtccgagctttttgtcgcgcacttggtgaacaccatgttgctggctccatcttcactcgactcttgaaattttttggcgacacgtggaacgacgacgacacaggagggtgacgtatatagagctgcacacacgacgcgacaaactaagtcgcgacgagctagaaaaagattcggcacgcgagctcgacgcgcacggatttttgtttcgttgctcgacgcacgacatgattgggaattaaagccgagccgagtcgagagggctggagctaaagcgccgcgatgggcaaagtggagcacgaccagcgcacgtgacagagggactcggctgagctcgcgcttgagcaggcagggcgagcaccagaaggcagagcgctgcgcagaggcgagcagtcggcgtggggctaggagaattacggctgcgcgcagctggaggagcagagcgcgtaggggagctcgcaggcctgatgaaatccgagcagaggtgcgcgcgtatggactcgacggcgaacggcggccatgggcgagacgcgcggtcagagcagaggagcgcgcacggcagagaagaaattcgagctggggctggggcgagttcgccagggagtagaggaaatc

SEQ ID NO: 71004 - DNA, 472 bp, Zea Mays
acattgatacattcggtttggcagaaggtgaaaacgtgagagtgacgcgagagcgattacagttcagcgtgaatagtacggtgttactattcatctatttataggcgcgggacgcagcccggacaaaattacattcatgcccatgacgtttactattaatcataaggtagactatcaaggactaagtagtcttttctcctttaagtctgttccatctttcaccttcgccattatattaagccgaagctctttcagccacaacttcagcgtccattcatcctgctttcatatcataccttcatattacacataccttcgtctcaaagccgaagccccctgtaacattctatgttataatgaaaaacatgttagtcacgttttttaggaccttcgaaagaggaaggcccccaacagtagcccttcgtagtattaatttgtttctatattaacaaattcagaccgagacgtgaac

SEQ ID NO: 71005 - DNA, 307 bp, Zea Mays
cgtcaacctcctcatcattcaccatctacagaaatagcactaaatataagtacatattctaaaaaaacacaaaaacaaaaaaacaaaaaaacaaaaacaaaaacaacaattcgtacctgctccatcgctcggtcagacctttcccggacagtatcacgaccatgagggccccacatcctatcataaagcgccccagcagaccgctttagcaccgcgtcttcgacctggaaaatttcatggtcgaagtcttcatcggatttgtcaaagacttcgaagtgcctgcatccctcacgggacaaggcatttg

SEQ ID NO: 71006 - DNA, 658 bp, Zea Mays
catccttgcatttgcagatatttgcactcatgaggtatatatgaagtgtgacattactatgttactattgtggtttctacctgcgagatgtggtgactaggtgtgttgtacgttgtatacgtgctgcaccgtcgtaataagaaagttgtggaatcatgtggtggtaaaacaacattcttatgtggttaaacagtttattattattttacttgctgagatgtgtcatctcactcttgcattactcaatgcaggtacttgatacatgttgggaatgaggggagtagcagcacgtccactttcactctcacaataacgctacccaggcaaagccatgatttaattagaaacttattgtcaacggaagtttgtttttttaactagtcatgcgcactagttaattcagttcatgtcgtatgtttaacttctctttgctagccgattaataatacttagtatgtttttgtcatgatatatgtttatacactgttgcccccctcatttatgcaactttgcaaaggggatgctgccgaaattttatatatagatgtcagaagtgttgttcagtagcattccggggtgtttgtggaccccggggtgttacaataacaattatttaactccaaaataaatcctgatgggaggtggagttgcatcgtcc

SEQ ID NO: 71007 - DNA, 1171 bp, Zea Mays
ctaacattcatatataaaatttcgacagtgtctcctttgaaaattgcataaacggggaagcaacaaagtataaatagatatcatgataagaaaacataatagacattaataatctgctagcaatgggaagacgaccataacgacatgaactgaattaatcagtgcacacgactagttaaaaacaaacatcctttgacaagaagtttctaattaaatcatgactgcgcctgggcaacgttattatgagagtgaaggtgtatgtgctgctacttcccactccccttgatgagcaacaagcacctgcattgagtaatgcaagagtgagatgaaacatctcagcaagctaattgttttgacgagatatttaaaccacattgaattaatcaacattttaaaagaatcacaatcaagatcagaaatacttgtagatatagaactcagtagtcacaatataaccaataccatctcatttcctcgaacaaccacaataggttgtataacacttccctgtatcaacaatacctgcaaatatcacttcaatgtatgcataggaatgcaatgtgtaggtcatctatcttcatacctctgagggtataaaaccacatcatctgcaaatatcacttcaatgtatgcatatgaatgcaatgcatatgtcctctgccttcatacctctaagggtatgaagctgcatcgtactccttctcgggcaacgtacgatgctaagttgtaccggtacggtcggaccataggtcacgacaaaacttcagatgcaaatgagtcatgcaatgtatatggcatgctgcatttatcaataaatttcacttcctttagatacaatacaaacctcaaataatactttatctgtcttcagatacaatgcaatcctcaaataatacttcgtatgcctttagatacaatgcaaacctcaaataagacttcatctgccttcaggggtgtgaattaatctcatgggtcatacttgaactataataatcatcaatatatgatagagcatcaacataataaaatcaagtaaaacatcatcatagagttcaattatgaaagaatccaataattctgcatattagagtgtaggtgatagaaataacaggtcaaaacgatagcaaccaccgctacattcacttgccttcatcgaagaagaaaaatgtac

SEQ ID NO: 71008 - DNA, 1185 bp, Zea Mays
ttgcagcggaaatcttattaccaaatttaataggttacaaaatttttacattattttatcggagtgattacaaaagtataagtttgaaatatatgctagctcaagtgaccatcctcaataagaagtatagaagaagtacttagacttataagaaggccgagcccaccggcacttaacaccatcatcagcagcacaaaactataacctgaaaagcaacagggaataaaaccctgagtatgaaaatactcagcaagacttacccgactaaagaaaagactctcaagggtatgctggatttgggaatcaaggaaaagttttagcaagaatcaaattagatacttttgcagaaatagcttattaaagtgagtccttacttttaatattttaatgccagattaaatattaatagactctgtttgcatctggtctaatttcaccatctcatcaatacaacatcatttttattcatgaggttcacatcctgacttaggttgtagggcagtgaccaagtctccactttccagggatataacggcgatccgaatcgatttactcagctgaggatctctaaccacacgacatatgtagcacttaacccttgcatatgtcaactcgccactggggttcttaagaccagatcaggttcacgccaaccgagagcacagatccaccaccgtccagcatcttgccacggagggtacacgctactctcgccatctctccactcccattgcgtgttatcttattctggtattagtctgcccgaggcaaagcttaccctgtcccatatccagggcatgtggccagttaagatagtccttgatcagcaagcctacatacgcatccaatccttaatcaacctgggtagaacatcacctgttcttagcccaagtcccaatttaagtacttccacccttaggattgtttgtattccttaggatgaaaagagcattatagggaactttgcagtaagatcccaccattgctcccaatgaaaatattcttataggcagaagccatccttcctcaggataacccctgagctaggcattaacgcaaaggacaacctctatccacaagatctaaacagggataagcatttttgtaaatcatattttgatacttcatcagaagtatctataaaggtatggatatcaaggtaggcaatgcatcaatgggtttcca

SEQ ID NO: 71009 - DNA, 2016 bp, Zea Mays
ggaaagtaccctggtctcataggatgaacaggcgatgcttgtcgcgtcgccttttgggccgttttgttcggccgtttcgttttagcaggtgaccggggtttcttcgttgaccgatcacgtggaacagtctttttgttagcattttttgagagcaactgattaaaagtagagtcggctttgatcagccggctatatgtgctttgcccttgcgtctctttccttgcttcgcgtagaggcttacgccttcggtcatagatggactgtccggctgggttagccggaccgtttgtctgagcaccggattgtccacacgtaggtgccggaccatctatgatgctcgggctaggctgatgtgtttggttcattaactgtgcgtgcccctgacgtcttcagactttttagccttctcgtccgaagcctttcgagcaatctccttttgtgatatatctgtcatgcgaggatcgccaatgacgatgcccttgcctttgcctttatcggccatttctggccgaaccaagacctttttgcatgcgagttctattgtattaacaggaaatggttgtgtgtccacttgcatctcctgaaaagccaaccggccctcatttatggccgattgtacctgtcgacgaaaaacattacagtcattggtggcatgagaaaaagaattatgccacttacaataagcacgcctctttaattcatctataggagggatattatgagttaatttaatgttgccatttttaagtagctcatcaaatatcttatcgcatttggcaacattaaaggtaaatttaatctcttcttgccaattcttttgaaccggctgtaaggaagaacatgctgaagatttggcctttgttggccaaatgaactcagcggtatatacatctgtggatacatcatctgaactatcacgctctattagatgtatagtacgggcggccgattttgatgtctctttaaatcggctttcacaggctaaagcccgctgatgtagctgggctatcgaaaagaactgggttccatctaatttatctcttaagtaggatagcaacccattaaaagctagccctgctagctctttgtctgcaacatggatccgaaagcatcagttttagtgtcccggaacctccggatataatcattaaccgattcttcgtgtccttgtcggactgaagctaagtcagctaatcctaattcatattccccggcaaagaaatgttcatgaaatttattttctaactcattccaggaattaatggaattaggaggcagggcggcgtaccatgcaaaagcgataccagtaagggataaagaaaataaccgaacacgaaatgcttctccatcagccaattcgcctaggtgtgctaggaactggcttatgtgttcgtatgtgcttctcccattctcaccagaaaacttagaaaattccggtatccttgccccttgtggatatgggacagtgtcaaaccggtgattatatggcttttggtatgattgccctactctgactacattaactccgaacttatctcgaaatagttcagtcatctcttccctaattttttccattgcacccggtggtagaccaccggatcctgggctgtggggctcatttggtcgggtattagtataccgaccttcttgccgtgaccgatcgatattgttgaacggtctgtgattgtatggcgcattatggtttaaatatgtagagggtgaaatatactgctgttgtggtgtgtaataatttggtgcatggtgtgcaacagcaggttccgcatatgtgtatccggtttgtatggtggtacatccgaactggccggtcgtgttcgccattattggggcgccacgcggtagtcccggtacggccccggactgtccggcatagaaagtcggacggtccgcgtaagggtcagactgtccgggtagcagctcggacggtccgaccgcgtccagggtcgccgatctgccaaacagggacggcggcggtcctagggcggccccggactgtcc

SEQ ID NO: 71010 - DNA, 368 bp, Zea Mays
ccggtttgtcaggtgcggcgtgggcgcgcgcagctgggccgcttgggccggggaggatagggggggaagagcgggctcaacacggtttgggccggaattggcccagccgaggggggagggttttttttctttttctgttttctatttcccttttttcattttctatttttgtttctttttatttccttttcttttgactcaacaatttgctaaataatcttgtgtgttgaaaatagtctatgtgaggtgctcctaacatttcaagtgtatgcacatggtgaaatgacctaagggtggagtttagggagaaaataaaataaaaagggtggggggctttaggagattagggttgcaaaccttgggttgag

SEQ ID NO: 71011 - DNA, 282 bp, Zea Mays
atttttttacctttcaaaattattagggcctttcttttataatcaattaagaatattaaaatagtcatgtgaccaataaataaataaaatttaccttgcatctcatgccagagttttatttgcttgagcatttcaaattgtgtgtgtgcaaatttcaaaccaaaattcggaaattagatttaggagatggaaaaggaagaaaatagaaagctagaaaaaaaaaagaaaaaaatgctctactattaacattgggcccctttccctgtcctcggcccagccaaa

SEQ ID NO: 71012 - DNA, 167 bp, Zea Mays
gacaaggctatagatgctcggcaccaccaggagttgaaactgttagctacctgtccccttaatgggcctgacccagttatgtgttctattaatacactacccaaccctattctagggttagggttgccaatatggtatcggagccaatccctttcctgtcttttttc

SEQ ID NO: 71013 - DNA, 583 bp, Zea Mays
ctcacggagagatcgttcgttgtgacagttccggtccgctctactcgctacggtttccagcttccacctttcatgtcgctgtctctccatcattgtggcatcaacgtcttggacatcctggtcatgaagttatgtctaaactagcgcacacttcagggctcccttgtaataaaagtgttgctagcgatactctatgtcatgtctgtcagttgggtcgtcacacgcgtcttccttttagcatgtcgtcatcccgtgcaactaagaatttctagttaattcattgtgatctttggacttcacctgtcctcagtaattctggttttaaatattacctggttattcttgataatttctcacattacctttggacttttcccctccgcctcaagtctaacacttttaccacccttgctaatttcttcacctatgtgcatacccagtttggcatttccatccagggagttcagtgtgataacggccacgagtttgacaactccagctcccgcactttcttcctcaccaaagccgaacgtattattcgcaccatcaatgacaccgttcgttcgctcctttttcaggcaag

SEQ ID NO: 71014 - DNA, 394 bp, Zea Mays
ctcgaggtgctttttggagtaggacggtgttatcgactgtagctcgatggttcgtgccagatgcacgagagacagtggacaattttgtacaggttcgggccgctttgagacgtgtaataccctacgtcctggcgtggatactttgtgtggtgggttacaagggggttctctagtatcagggatgttagagaactaagtagatggctaagtagtgagatatgtttttgaggggatgccgcctaggccttatatactcgaccgtggggcgttacatgcggatatgataacagcgtctgcctaagtaatagtgaaccgactgagcttatctccctataattccgccgacctatctccgttcagttccgatgtgtgagggtaccgtatgggaaggtcg

SEQ ID NO: 71015 - DNA, 987 bp, Zea Mays
atcactttgtgcttcaatgcttctgttgattagacttgtacctcatcagctatttttggctttccccctcattatccataagccttctaaggctgatctaatactgtgatggataaggttgcaaataagctaccagggtggagggcccctctgctgagcaagactaggcggttggtaattgtcacattagtaatttcagcaatccctattcacttgatgattgccttggacctgcccaaatggtttttcaaggccattgacaatattaaggcccatattggcccatatacctatctatatatatgagagtcatcaggggaaaccccatctattctcaatctccagttacgtaacagacaaaaggaggagttttctttggaaaggtcaagaacaagacatcagatgtaattgtctagtgtcctgggcaaaaattaaaaggccttacatgtttggtggctttggtgttcatgacttggaaagaatggggtggggcctgcgcatccgctggtaccgtaaagactgatacttccaaaccttagcatgggctacaaattcatatctctagacaagcccaatccttctttgagatggcagccattataactattgggaatggagggtctgctaaattctgggcagataggtgactgcagggcagaagtgtggctgagttagcctcaaatttgttgcgtgcaatccccattagtgattaaaaggagtacagtgagccaggcacttttcaacagaagttgggtctctgatatcaaggcagccctaacagtacaggtgttgatggaatatctcctcatttgggaactggtggagagcatggtgctacagcctggtaccccagatcaatactcctagaagctctctttttctggacagtacaatagtaaattagcttacaatactatgtttattggcaccatcacattctctccttagaagcagatttggaagacttaggctcctgcaaactgcaag

SEQ ID NO: 71016 - DNA, 567 bp, Zea Mays
agcagaagtgttaggatagcaagcacagccgaatatgcggaggtggtcgtaggagggggttgtgtcgtacagggcgaagtggggagtgggatggctcaccgtcgtcgaaggaaggcggttgaggaggtgggtggcggtgtgcaaggcctctgcccagtagctggcagggagagacgcctgaaagagaaggcagcggatcatattagtggtggtgtgaatcatgcgctcggcccggtcgttatgagcaaaggtgtaggggcacgagaggcgtaactggacgccattgctaagaaggaccgggaggcgtggttgtcgaactcacggccgttgtcgcactgcagggcacaaactgggtggatacctaggcaaagaagtgtgtgagagtggtgaaagtgtcagacttcaatcgcaggggaaaagtccaaagaaaatgggaataatcgtccaaaatcaccaaataatatttgtatccaaaaagactgattacaggggaggtccaaagatcacaattaaccaggacaaaagcctgctcggcccaagaagacgaattgggaaacgggagacgag

SEQ ID NO: 71017 - DNA, 770 bp, Zea Mays
ctgggtgtatttatagctgggtgtatgtggtgtagcacaatgaagttcactgttggtgagaatagtgacgaatgaatcgtctgacttagtatgaataggagagttataggcagaatataggacaagagtattttgggagtttttctagaatatggaccaggcttaagggatgacatggttggatagggattagtttgataagaatttagaaacgagaattattggaatctgagtttgggagcccggttcaaaggaatctcaaagttaagcatactcaacttggagaaacctgggatgggtgaccagatgggaagttccctactggaaggaaaatcacagtcaccggagttcgtatgactggaatatgggtctggctggtcttaggtggactggacaacatgatgtatgagtagttgaattttggggtgatcggctaatcaatgaatagtaacgatgaatagtgacgacgaaaaagttactagatatcatcgatgagtagtaacgatgatgaatagtaatactgaatagtaacgatggtgaatagtatcagcgaatagtaatgatgaatagtaacggtgaatagtgatggtgaatagtcgtatgaacgaacgatgaacgatgaataggaactatgaacgaacgatgaacgataaataggaactatgaacgaacggacgaacgatcgaatgatcggacgaacgaacgatcggaatttcggcagcattgagagcacctagagggggggggtgaataggtgatcctgtaaaaac

SEQ ID NO: 71018 - DNA, 609 bp, Zea Mays
gactgtgaagcaccggacggtacgacgctgatcaccggacagtccggtgtgcaccgaacagtctggtgcacagtctgcggaactcttcgctctcgggtttttccctggctacgtcggctataaatcaccggacagtccgcgcaaggcgtcggatagttcggtgctccagccgtgcaacgactatctaccacgtcgacaagagccaacgataacatggtgcaccggacggtccggtgtctcactgaaaaggaaaccagccaatcaggggattctctaccgcgtcctatgctcgtactattcactgtccggttcgccaccagacagtacggtccaccgacgaacagaaggcaagaattgcctaccaaatggagttccaacggctcctagctgccttggggctataaaagggacccctaggcgcatggagcagaacaccaatcctccattgaacattctaagacgcctagactccgcaaacgcgcattcggatcattgtgttttttattttgagcacttcttgagtcgtgaactccctgtgttgtgtttgtgtgctcatctcttgacttgtgtgcgtgggattgctgttattctagttcttgtgtgtgtttc

SEQ ID NO: 71019 - DNA, 298 bp, Zea Mays
gaaaagtgtggagacctgcccgctcttagggatgaaaacggtaaaaaagtatttatttggtaatatgtttttggtctttttttattgcgaataaataggatatagaatctaccatataaatttgtattcctgttgttaacattgagcatttgaacttgtaaagattcataaaaagtaaacctcaaattcatcatatatttgttcaaataataaatataaatatttggtatggattcaaaaacaaattcggtattttttcacttttttattgtagggagaaaataacatataaaacaac

SEQ ID NO: 71020 - DNA, 163 bp, Zea Mays
gaccaggggcgaagccagaaaatggatccaccggggtcggctccatgaattactggggtcaaatacattgatgaacagtgttaaacagtattttacactggatttgacaaattccatcggggtctggcgacccctgtgccttaaggcagcttcgcccctgtta

SEQ ID NO: 71021 - DNA, 164 bp, Zea Mays
gcagcgttattatgacagtgaaggtggatgtgctgctactttccactccccttgatgagcaacaagtacctagggtttccccaagaaaatctgcaagagatgggggtagaacatctcctcgatcctctcttcctcttcaatccatcttgctcctcctcttctcg

SEQ ID NO: 71022 - DNA, 304 bp, Zea Mays
atctgaattccttaccttcccaagagcgtttcacccatcacgcagacattacaatacatcggagatacgaaagtgcggaagcagttacaataacttacttttattgaaaagtgagacagagttatatagttacagaccagaacataatatatgagtgctgagtattattattacaaaccatggttggcaaaaacccctcccgaataagtagtaaaatgtttttaacggagggccttccctcccgcagctttagtcttggttctcttctttgggtaccacctttgaacagaagcaacaaaagttt

SEQ ID NO: 71023 - DNA, 1044 bp, Zea Mays
gtttttcggcttcctgtagggagccgggagtccagccctagccgccacctcgttttcctcctctcacgatcgctgactactcgccgccgttcagccttcaaaccgcgcccaccgatcctccacacctacaatctccgatcggtgcaaggcagagaacagcagcataccaatatatatcgcgagttattctacaagttgattggttgtgtgctaaatattatacggtccagttgtgtagagctatacctaaaaaaaaatcgtcctccgccactccttgtaacttgttttatactcagacctaaaacgtgtactttcgtcaacgccaatgatatcatgatgtagttgggtattgtcatgtttgattcgaaagagcactgcagctgtttcaggttagttatatgtgtgcaattctctccttatttattgcattttcagttgcagacttaggccccattttaatctcacgggataaactttagctttttgctaaactttagtcatataaattgaagtgttaaagtttagctccttagggtgtttggactactctaataaagtttagcatattgaaataaaaagacatccatgcccctaatgcgaagagaatggagttagaaggtatgggtggaaaatgggatcctctagccaacgtttagctccttttagcaactcttgatcagcttatgagataataggtgctaaattttatcacaccactattagttttcatgtttagatcactaaatgactaaaaataactaaaaaaactgctaaaatttatttcttgagattgaaacagaagagccttacggtcaagggcgacaaagtcaaggatagtttcgattcgaacgaactatcattatcgtctcaatcttttggtcttcttcgacctcattttaaattgtcgtctttttgtgcaccgtgccttttgaagcagttgccaatgcaaactgactgttattcacatattcatttaagggcgccgtagtagctagctgcatacttcaccagaggtatgatcatttataataatcaaaaccaaat

SEQ ID NO: 71024 - DNA, 71 bp, Zea Mays
ccttgatacccttttatgaaaaagatttttgatgcttagccttgctttagaaaacaaaaaatgttttgttt

SEQ ID NO: 71025 - DNA, 447 bp, Zea Mays
ctgctgttcacccaccacctaaaattctggacagcccccctctaccccaatcgcaaacgcaacctctaatcaattaaattgcagcacaaatgaacaagggatgaacacaaaaatcaccttggattctccccctttccttcctcccttcttccctccaccaaaacgattgaagactcgcaccacgacgacgatgatccgaccggcaaggattggcaccttgggaggaggggattgagagggggggcagctagggtttggtggctgcaagaattgagagaggaggagatgggcagggggcggcggccaagggggaagagaagtgggggggctgcacatgggggagggggttaggagggaggcggctagggtttgggagggttaatgggccgaaactccaattgcagcccaactaacccacgcgacagctcccgaccgcaacgcaagcgt

SEQ ID NO: 71026 - DNA, 565 bp, Zea Mays
ctcaaaagataccaattgaagatcaatggcgagcttgagagacatgagagttcttggagatttcgcagtggaagattgttgtctttctccggggacttcattttccttacaatgagactatcacatgaaatagacttgaaaaggtgttagtctcaaagtgttagattatagagtaacctccccctaaaggtgtgcatataagttttgaatacttgtaggagacatgcactttgatttgatatcaagaggggcaaattatccataatccaaactttggcacatataagttaaatgatacactttgtagaaatcaaaactttcaattgatgcatcatttactatggagtgatataaaagctatgtgccgtgctttaactaaacattttaagccatgtaggtttgcttaagtatatgaatttaaaaactagaaatcctaccatatgatttacctagtatgcatgattttgaacaaaagtacataacaaatgtaatactaggcaagaaaggtaaactagataaaagataaatagatacgcatatctaaaaacgagaaatacaataaaac

SEQ ID NO: 71027 - DNA, 182 bp, Zea Mays
gaacatgtggtcgaagaggagccgcctaacaccgaggccttcgacttaatctaggtggcgtttctcagttgacattggcgccgacgatccttagttcattttatatttattcttttattttgtaataagtcttccgctatgtaataaatactctgatgttttatgacatttatctctataaa

SEQ ID NO: 71028 - DNA, 432 bp, Zea Mays
cccctctcttcccatttgcagctgccctccattgcttcctcctccctagatcttcccctacgcagcaaggatcgagaagaggaggagcacgttgaattgaagagaaagagaggatcaaggagatgttctaccccatctcttcttgcatattttcttggggaaaccctaggtaaggatgggatccttgtccctccctgtaattatgggcttttggaggttgtggatcatggggattaaaggattagaggttggattagatatggggttaggttttgatctcgaatttagtttatgcagaatggcagattcgacaatttctgttcatggcagttttccgtggtcttagtggcctcaaaaaaataaaaagtatgtctatgagttgtagccaatttacagatattgccgtggccatgaagaacacctcaatcggac

SEQ ID NO: 71029 - DNA, 466 bp, Zea Mays
attcttagctgaccaacactcaaacaagagcattcacttcgcctctcacaccccaaatcacatccccttcaatcatctggaggacccttggtgtgaggtgaagtttgttgaactcgttagtgatttcatctctattctccctcgttctctctctcttcatatcttgagctcattgcaaaattgaatattgtgcggctttgttactcttggaaccttgtgttccttgatggatagaggttgcttgggagtctccaaatttgtggatgaccccaagaagtttgtattacccgctcgttgagctaagttaagaagagattgccttgaccttggttgtcggcttgtggaggattagggttggaaaagacccagccctttgtgggctcctcaacgaggagtaggacacctttgtggtggtagccgaacctcgggttaaatcgtgtgttcttgtgttcttgttgtgttcttg

SEQ ID NO: 71030 - DNA, 379 bp, Zea Mays
gaccaacattggctgaccgtgagggcccacgcgtcggcgccgagttgtagtggtggaccgcgaggttcacacggaggagatgtatgtgccggtggggtgggtttcggcccaaatgcatttctcttttttgtttctttttctttttcttttctcctttcttttctttttatttttagatctcaaattagaattcaaattttgttgtgaatttcgctcctagattacatgcacaaatcaaaataccagcatgaagaagtttttcattattttacatatattctttctatttattaagggatttactaacttgtaggtgtgtatatatatgtatatgcatgtgtcacatagaagaaattttttccataatcatcaaatactc

SEQ ID NO: 71031 - DNA, 204 bp, Zea Mays
gtcaatccgccggggctacagttgccaggtggcctgcaccgcacttgctcaaatatttgaattaattatacattctcggagcagatagggtacttctgtgtgagtgtgtccattatgctatctccaacaaatttatcttagctcttattttgaactttactttataaacaatatattttatatgatcatatacatgatctattg

SEQ ID NO: 71032 - DNA, 222 bp, Zea Mays
caccaatgagaaacctatgtgggatctgcatatatgcacaaatgacaaggacgatctctgatgaaagtgaagctcagcaattaaaatgtaaatttcttgtcagtaaacgtttgtcttttgttgttaccatctcgatgtctcggttattttaattattgaacaggtcgttgatgagaagaaaaagtgtaataatataatggaaaatatataactatgtacggg

SEQ ID NO: 71033 - DNA, 2392 bp, Zea Mays
caaaaaaaatgttgccaaaggtttattttcggtgcgtggatgtggggaaagagttgtgggccgttggatgcaaagtcaagagacatctgatgcgtcgtttctttttcccacaaaaccctagtggtcgcccccctatttttcccttttcttggccgccaacccccccttttctccacccttggccgcccctcccccttctccttgcagccaccctccactacttcctcctccctctagatctccccccacgcagcagggatcgagaagaggaggagcaagatggattgaagaggaagagaggatcaaggagatgttctacccccatctcttgcagattttcttggggaaaccataggtaaggataggatccttgttcctccctataattatatgcttttggaggttgtggatcatgtggattgaaggattagaggttggattagatgtggggttaggttttgatctcgaatttaatttctgcagaatggcagattcgatagtttctgttcatgtcagttttccgtggtcttagtggcctcaaaaaaataaaaagtctatatatgagtcgtagataatttgtagatctttccgtggccgcgaagaacacctcaatcggacatcagaacagaaagttatgacagtttgattatagcagtttttcagtcttataattctgtgcagaatctgttctcttaagagttaggcaattttatcaacagaattaaactgtgggttggtaaaagaagttgtagataatttcataagctttccagattgttaaagagtgcattcatatgatttgtgaaactccagttatgtttgttttactgtggctgttcctgtttgcctgacaaaaatgagtgggtctgttcactggtgggtttcatctagtaaatggccaaattggctcttccaactatggagacttttgtatagggataaaagttcttacttccaacagaatttcataatttttggttcagtagtttgggagatatcgaattttaaagttaaccatactgctgtctaaaacagattcagtcagttatcttgtcagatgttttagaacttgtagatggcagaatttaattatccattgaatactgaagttgtagagtattttgtgtagatactcctagagtatttgtttgatatcaccgctgttttaattttaaagatacaaaattaacaaacagcgctgctgctgtatggcatgtggttcagggtgagagtctttccactgggtcttggtttcaagtgtaggagtgttttgttgattgatggcaaatgtttgtgaaatatttgtactaagttttatgcccgctagcacgtggctatactccagatcatgtctagtacatttcttcttcttcgatgaaggcaagtgaatgtagcggtggttgcttccgttctaacctgttatttctattgcctacactctaatattcagaagtattggattcttttataattggactctatggtgatgctttacttgcttgcattatactgatgctcaatcatatattgatgatgattgtgattcgagtatgattcatgagattaattcacacccctgaaggtaaatgaagtattatttgaggttggtattgtatctgaaggtaaatgaagtattatttgaggtttgtattgtatctgaaggaagtgaaggttattgataaatgcaacatgccatatacattgcatgactcatttgcatctgaagttttgtcgtgacctatggtctgaccgtaccggtacaatttagcatcgtacgttgcccgaggaggggtacgatgcggcttcatacccttagaggtatgaaggcagaggacatatgcattgcattcatatgcattcattgaagtgatatttgcagatgatgtggttttatactctcagaggtatgaagatagagcacctacacattgcattcctatgcatacattgaagtgatatttgcaggtattattgacgcacggaagtgttatagaacctattgtggttgttcgagaaaatgagatggtattggttatagtgggactactgagttccatatctacaagtatttctgattttaattgtgactcttttaaaatgttgatgaattcaatttgtggtttaaagatctcgtcaaaattattcgcttgttgagatgtttcatctcactcttgcattactcaatgcaggtgcttgttgctcatcaagggaagtgggaagtagcagcacatccaccttcactcttataataacactgattaggcgcagtcatgatttaattagaagcttcttgtcaaaggacgtttgtttctaactagttgtgcacactggataatttagctcatgccgttatggttgtcttcccattgctagcagactattaatgtgtatt

SEQ ID NO: 71034 - DNA, 186 bp, Zea Mays
cgcccccctgcccgtctcctcctctctccattcttgcagccaccaaaccctagcccccccccccaatcccctcctcccaaggtgccaatccttgccgctcggatcatcatcatcgtggtgcgagtcttcaatcattttggtggagggaagaagggaggaaggaaagggggagaatccaaggtgatt

SEQ ID NO: 71035 - DNA, 462 bp, Zea Mays
tgttttttttggacagccacatacccggattcaaacggtgataactttcaatttataactccaaattgagcgcataaatactcgttggaaaggtaaggtaaagttctacatgatccccaaactgatttcccttaattcctcacgaaaaaaacacagaaactgctagactactgctgttcacccaccacctaaaattctggacagccccctctacccaatcgcaaacgcaacctctaatcaattaaattgcagcgcaaatgaacaagggatgaacacaaaaatcaccttggattctccccctttccttcctcccttcttccctccaccaaaatgattgaagactcgcaccacgacgatgatgatccgagcggcaaggattggcaccttgggaggaggggattggggggggctagggtttggtggctgcaagaatggagagaggaggatatgggcaggggggcg

SEQ ID NO: 71036 - DNA, 295 bp, Zea Mays
acaatggcatctagatgtagctgtagccgctctagatagatctagtctctacagccacacaggctcgtcactgcatctctgtgccaagcccccaccacaacttcacaaggaccgtcccgccgacactttgccttctcgcacgccctcctacggaccctcaatcatcagagtgtgggctactataacacgctgctgttaatgccagtcagtcctctaatactatactactcagagtagacgtcagtgttgttttggaaggaagatggtgacattcaacctgcactatgaactaagc

SEQ ID NO: 71037 - DNA, 398 bp, Zea Mays
aaaccatcaagctaggataagcaaaaaaaaatcccaagctaagctagcaaatgattctaaaccgaagaggcaaaaaaattacaagccacagggcttagaaactactacctccattttcttttatttgacgtatgatagtttaattttacactagcaaacgtcaaataaaaaaagatcgaagagagtacgaaacaagatattccatacagccatctaataccataatcaccaaataaaagatcaaaaagttgcgaccaaataaacaagatcaagttcttgatatgatttccttcaaggttctggagcaagaagcactgatgttgatgttgatatgatacatttgaaaggagttacatcataacttgtatgtcatttttaacatttatgataacgttgat

SEQ ID NO: 71038 - DNA, 625 bp, Zea Mays
caatgacaaagatgaattacgaaacaacttatccaatatttggatagtctttatttctcaactcatctctctctagtcagctgcttgcgattcgattcgaacctttctgctcctctttgctttattgctgctccatctcggatctgatctgagctgctattcgcatctattctcgaggttctaaccatttcttgtgcatcattctttctggatttctgccaatctctttccttgtggatctcattcctgggttcggtaggttgatggctaagggaaggtctagtctagtacggataggaatttaagactggaggatgcaagagaagcagatcttcctcggcaaaaggaagagaagcagaagccaatacagcggtggaaaaggatggaatgttggactatggccttgctttatggcagttacaaaacacatgaagttgagaaggggtcccgtatcaaccaacaagctatccgttgacctatcttgcctagcaagaaaatggcttgcgcctcactcaagcaagtgcgaacggggcattttgaaagtgaaataacagattttatattgaattagggcgttttatatgccatcgatcttcaggtaactcattcactggatgagagaaag

SEQ ID NO: 71039 - DNA, 268 bp, Zea Mays
ctttgagcttcattgcatgttgtttcatgcttgatgtcaggtcgtgtagtttccttagacaattagtccaaggtagaagttcttctgttaattaagaccaataatggacccatgttttgaatggtggtgctatatggggtaccttgggtgttttgcttggagtggccgaattcgaggtcgaattctttttaaggggggtatgtaatatcccaaaaaaatgttgaccaaaagttaatctttggtgcgtggatgaggtaaagggttgtgg

SEQ ID NO: 71040 - DNA, 1035 bp, Zea Mays
ctttccgtggccgcgaagaacacctcaatcggacatcagaacagaaagttatgacagtttgattatagcagtttttcagtctcataattctgtgcagaatctgttctcttaagagttaggcaattttatcaacagaattaaactgtgtgttggtaaaagaagttgtagataatttcataagctttccagattgttaaagagtgcattcatatgatttgtgaaactccagttatgtttgttttactgtggctgttcctgtttgcctgacaaaaatgagtgggtctgttcactggtgggtttcatctagtaaattgtcgaattggctcttccaactatggagacttttgtagagggataaaagttcttacttccagcagaatttcataatttttggttcagtagtttgggagatatcgaattttgaagtgaaccatactgctgtctaaaacagattcagtcagttatcttgtgagatgttttagaacttgtagatggcagaatttaattatccattgaatactgaagttgtatagtattttgtgtagatactcctagagtatttgtttgatatcaccgctgttttaattttaaatatacaaaattaacaaacagtgctgctgctgtatggcatgtggttcaaggtgggagtctttccactgggtcttggtttcaagtgtaggagtgttttgttgattgatggcaaatgtttgtgaaatatttgtactaagttttatgcccgctagcaggtggctacactccagatcatgtctagtacatttcttcttcttcgatgaaggcaagtgaatgtagcggtggttgcttccgttctgacctgttatttctattgcctacactctaatattcagaagtattggattctttcataattggactctatggtgatgctttacttgcttgcattatactgatgctcaatcatatattgatgatgattatgattcgagtatgattcatgagattaattcacacccctgaaggcaaatgaagtattatttgaggttggtattgtatctg

SEQ ID NO: 71041 - DNA, 326 bp, Zea Mays
cggaatcgaaccgaagccaaggttgttaggaccttctccaaaagcgttggcctgccgaagatagaagcggacctctgcaggtaccagcgacagcatatcgccggtagcttgctatatgctaatttcaaggtaaaaaactctcaattttttattattaattttttatttttttaatttttttttgaattaagttgttttctgacgaaggttgttttggcagagtatacttctaagtaaaatgctgagaatgcaacaagatcttgaagatgagaaaaacgaagctaccatcaaagatttagaaaacaaagtcagaaattacgaagctg

SEQ ID NO: 71042 - DNA, 250 bp, Zea Mays
ctttatttcattgatcaaccttacacttcatgaactcccacctttggtgtgagttcatgccacattattccccacaacttgttgagcgatgaacatgtgtgagctcactcttgatgtctcacaccccccacaggagaagaacaggtggtagaagaggagccgcctaacaccgaggctttcgacttgatctaggtggcgtttcccattcagctttctggcgcaaggatatattttagttcctgctattttc

SEQ ID NO: 71043 - DNA, 737 bp, Zea Mays
cgacaacgcacggggcgcgcgctgccgcggccagtccgcgctcggccggtcaggcaagcgatcgaacacgtggctctttgcgtctacccgagttcaagcgctcatagattgaagatcttcgcgtatttgggcatgatcactgcacaagatttgctcccccgatagagctttttcgtttatgtgtggaagtcgagcggttgggggctgtgtatagagagttgtcgtgtcacaaaggtggcagtgtcacaaggtcgagtcccgaggtaaaaccatgttaagatcgtgtcaaatggtgaatagaggcctccaaactttgccacggtgtgttcaagggaatttggcgccactttgatatttcgacttgcttgatttgagttttgaaaaacagagaacgcggttgatattggaaaggggctgaaattcagatttctgaatttctgaatttcccccaagtgcattagtttaggagctgatttggggattttgaaaagttaaaatggcaaaacttccttactatacttgttggttaattagtgaactaaaattttgtaatttggtttttaccaaaatttgtatttttctcccaagtcttctcccaaatgccctttatatgcttaaatggtttacttaggattaattagggtttgagagttttcttaccttaagattcatgacatgattaaggagggtttcttaagatgaaaaagactcactttaaacctttgttcttaatcttt

SEQ ID NO: 71044 - DNA, 387 bp, Zea Mays
ctaaaatcggaattatggttaaggagttatgatttatggaagatctatgtgatttaattattaaactatgttataaattgattaatatgcaccatatgagagagtattctatgaataattaattcaactttaatctaaattataaattgaccatagatcatattttagtaaattataatgatgggcagtttaacaagactaacaaacataagttaaataaagatctaattataaaagaatgagacatggtacaataaatgttgttattgcatagtaaatatttatacgaatccaacacaactggaacgagtcaattcagagttagaacaaagaaattatgaatttcctaagttattaagtggttgatatggacgaagtcaatttaat

SEQ ID NO: 71045 - DNA, 197 bp, Zea Mays
caaaaacaaactaagtattattaatcggctagcaaagagaagttaaacatacgacatgatcagaattaactagtgcgcacgactagttaaaaaaacaaacttcctttgacaataagtttctaattaaatcttggctgcgcctgggcagcgttattgtgagagtgaaagtggacgtgctactactcccctcattccga

SEQ ID NO: 71046 - DNA, 217 bp, Zea Mays
aaatcaccttgggttcctcctttcctccttttcttccttcttcctccctccaaactcccatggaatactcgcacccacacgacggacaccaagcggggaggctccaccttggagaggaagaggtaggggggcggctagggttgaggggtggcactgcaatcttttggggaagaaggagagggattggggtagctgcaagagtggaagagaggaagag

SEQ ID NO: 71047 - DNA, 6943 bp, Zea Mays
agaccggtgtcccatctggctcgctccgccagataagcaatgatggcgccccgcatgctccctgacgacggcagctctccgcccccttacggaagcaagaggacgttagcaaggactcgacagccccgacagctgtccctccgctaggctccagcgctcctccgatggccacgacatcacatgaaccgggcgccaaaacctctccggccgccacgatggcgtgtactcagggcgctagctctcctccgctagacacgtagcactctgctacacctcccattgtacacctggatcctctccttacgcctataaaaggaaggaccagggccctcttagagggggttggccgcacggggacgaggacgagacaggcgctcgcttgaagccgctcgctccctctcccacgtggacgcttgtaatcccctactgcaagcgcacccgacctgggcgcgggacgaacacgaaggccgcgggatttccacctctctcacgcccgtctccggccacctttctccccccttcgcgctcggcctcgcgccgacccatctgggctggggcacgcggcgacatttcactcgtcggcctagggaccccccggtctcgaaacgccgacaagcatatatcatgaaatagcacatcaaacaaccagataatatcacacatagtccaaatccaagtatgtagcacaaataatacaaatcacagttcaaaacacaaaataatccaaatcattgtgcgtagtacatagtccaattcatagccatatcagaaatagtccataccatagcccaaataagaagacatgcaccacctcacttcctcctagtcttacccttgcccttggccctaagagagtcggtgcatgtagtgtaagatcacgtggtcgtcgtctgcgtggcattggctgtgatggctatgtgcctagagcatcctgtagctaggatggaccgatctcgtcatgatgcacctggacgtcatcctcgtcactatcatcctcattgtcctccttgtcgtactcatcatcaaatgtgtcccttgtcaaatgtgatgagctttgtgctattgtggaaagtattacactttgcagagtgtcgacctagagctacataggaagttggagctatacaggagcctacatgtcaactactgcgctagtcaagcaaccacaatgacaagtagcacgacgtagacaacacgatatcctctgccatggtcaaaagctagttcaccaccaagttttggacattaaaatgaatgattttggttttaactgttattacttactgagaaaattgcaaatgtcctactgtcagaagtagtctatgataaacgatcagtatcgatcatagagaggtcgaaagactttccctatatagaaggtaaaacatgaggatagaaccaaggaaaggtacgacaatgcatttgaaaaattcaaaagagtgaagatcttaatatgactctgtccaagatgggtgcgacctcgacttgcgtcccttgctaagtagctaggttgtacgcattgtcttcaccatccgatgactctagctcggcgtagttcgtagctatccactaccccttcaacttgcacctagtcgcaccaacataccaataggaagttattgtctgtgttcgacacgtcattatggtagacgagatcacttagttggtcccattcatcaatgtaggctcgttggtagctctcaaagtcaatgacctttttctgcttctggcggtcgcactagcctgcaaatgggaaacatctctttgaggtcgcactacacattttaattatgagttagacaacgaagtggacgaaggaacttacttgtggagttcaactgatgtggagaagggctccattggaaactccttagtccaaattgtcatgccactcttgggggtaagtggtactcaacggcttagaagcatatgagcggatacctcattaggtaaaggccatcgtcctccaaacatgatgagctcaactaaatatacgacagaggtggctcactatatggttgccagcaaacctaaaacagaataatatttgtggcacatattatatttattatgtcaatgacataataattaataaaagacatagtaaacacaaagaactcaccatcagtaacataagtacgttgagctcattcgagaactcgacgtaggcccactcatgatgtgcgaagggctgctggacctggtcccaacgataggccgtcgtaggccgtaatcggtgcccgacgacgacgaaccaatcacgaggaggaaactctatcgggcacccaaccggtatgctcgaccacatccaaagctggagtaggtacagacaactatctaagctcgtggtactcgccctccgacgacatgcctcgtagagctgtctgtagaggaaggctagaattgatgaaccctagctatagactccagcgttgtaccgtaagttaggcagggcaggaacatcgaagatgcgttgtcacccgtcgtgtctagaaaaaggacacaaccaaaaagatgcaggatccaagctcggcagtggtaggtaatagcctgatcatctgctctagctgaacaatgctcgaaagtctgcctgagccaggtgaggggcacgctagatgtgtggctgcctgttctatctttgggaaccactataccaagaaaagcctggactctctatctctagccaccgggtgcttcatgaccgatcactggacgactacgaatcttgagacaaaatagcttctagcagtcttgcagtgtcacggtcatctcgctgcacggaagatggaaagtgtgagtttctggccaccacctacgggaatacaaacaaataataacttaaaacctaaactataaataaagtgttttcaatggattgcaaaaaaatcttgatgaagttacttgtcaaccaaaggcatgagcgacatagggttgactgtggccaacccatagcgaacctggaatgatatgatgtccaagccaactctccgaaggagaggagtgtacatgccatcgtgcaccatctcctcgaactagtcatgggtcctagaccgaaaattggcagtacctgacaacaagatttatttgatcaaacaaacatcatttacatttactcattcacaaatttaatatatatatatataggcattacctccccctctatggtcagtcgtcccctgcggtgctcgtcgtagtgtgggtccaacaaagtaagtaaagcaggttagtaaagtaaataaatattacaacaatttggacgtactaaaaactattttctactattcatgtgaggtcaacattgtatcacacctgactaagtgcccaaaggcatgtatttgagttgtggccaagtctgtcgcatttgccgcattcgttctactctgggtcaatgagaaagggggtcactcgacctctcctagtgcgactgtaaatatgatccatgaccatgttgaacctgctcctcttcctagttccatgtttgtctcaacggtgcgctggatcagcaatgtatgtcggaacggtgtacgttgtaaatagggactccaggtgcgtactaggctctccacactaaactcgtacttgcctaactcatcgtcaaagcattgtacatcatgtctatttgaccttgcgtttgcattgccttcgtgtcacacctagatttaaagacaaacccaggtgtgtttcaaatgtcaactaggatcaagtctcacacatattgtgactcatggtatagaaattaatgtcacatctttagtatataatagaattccaaacaaaaatagctagtaaaatacatcatatgacagcaacgatcctctccggccatagttgactcgaagacgacggcctagacctctctgaactcatcatagcatccttcatgctcctcatcttacggtacctgttcttgaactggttgattatagaaagggtgatgtaacaccctgaattttagggtataaaaatttatttgctctatactcaaaatttaactattactctctattttccttgcttttctttcctatttactaaaataatggagagttttcggtaaattttcatattttggaatatttttctattttccaaaaaccaaaatctatttatttgaggtacttaaaacaatttaaaaaactctaaatatgttttttgagttcattggggtgccaaatcatgtataggaatttttctataattttttgagccttttgagatatttttcgaacgttaaatacgatttcagtattttctggaattattttaattctacaaattgattcctttcaaaaaataaaatatctttaaaccctggcaatagcaatatatatacggctcggaacatctcgccgaacccgttccaaatatcagatccgttttgcgagacaagattcgtagcgccatcagttcctcgtcgaagttcggggcagttctaacttcggcaagcaattactttcaagttgtgcgtcgttggcgaaatctgagagtgttgttgcgttcgtctcatcgaggacttcgtctttgtgctttcgattcgttgatccgacctctggttcaccgtcaatcgacggatttctcctggactccggcaagggccttcctcttcggtgagcaaccaccatgattttggtgccttgttcttcatttttcacggttttgtggtagcccctccccagtcgacccctcccttgtgccgcccgccccctttctctcctctctcccctctcactgcgctccttctctctccccctcccccctcccttgtgccatgtgtggaagagagatggagggaggtagaagaaggcatttttgctaaaaaaagagcatggggttacgtctaagtgcgcgtagatgtttgatttattagaatattcgatatcttttgcgttataaatccaattcactccgttcaagtcgctttagattcgtattaaagttgtatatatgttaaaaatactatttcaaaatgtcacatgttttaaataatttattaaatggttgtttggctaacgtttattaaattatcgttccattttatagttttcaacttgctcttttatagttttcaattagcgttccaattaaatcacctctttctaatttatagtttttaacttgtgcttttataaataaatctcatcatggttaatattaacttaaatacttttctattaataattgtttggtataaatgtgtcatctatttagtagttctcgcgtgtcatgtttgtctatgcgtcgttcgcgcatcgttcgcatgtcgcacacaacgttttcacgtcgcacgtttttcttgcgtcgtgaatccgcctcgcttagaatcactcatattaattaacttacttatttaactaggggctattagcgtagctgattaattaaaactacctaatagctctaatgtatatttgataaatgtcgattaatacaggtatgtcaaattaaatgttctagttcatattttataacgtaaacgcgataacttctcaatcaaatctttgatctcagcatttcttttttttctcgtgtgaccgtagaagcgagctctatttcatatcgcacgttttataatgtttttccttatatggtgtaacgttcctttttgtttcaagaatgttgaatgtatgttcgcactcgcctagataacgttccgttcgtggagtctgaggaagttgcaggagaagcccctgagcagcagctgtttggtgaaggcaagtgtcatctgacctattatgtcatatttactttataattcactttcccgcataccatgtgtaacctaaggattgactagctttctatttatcatgtccttgatcacctttttgggttgggctattataatcaattacatgctagtgctttactttaatcaacgaaacatgatgagaattactttatgatacgatgatttcacttctagttatgattatgaacttgtgacactttaggggccttgggctgtttcccgagtacctctccaaaaaggacttgttcattaagagaccacccaggaaaatagtgcaaaccatgaggttggaatggggacgcccttagctgattaattggaaaaatatgggtgtagtttgcttcgccgttgtgcagtaaatggggctaagggtgcggtgtcggggttcatccgatttggttttgttagtcaccctcttagggaggagtacagtgtttatacgattggcgaaacctaacgggcggctacacactaggagaatctttgtaaaggctacgtagagaaaccttgcctactcaccttgggagtgtttgagggtttgatcgacccgagtcgaaaagggatcatgacttgtgggtaaagtgtgcgacctctgcagagggttagaaactggtatatcagccatgctcacatttaagagaagccttgggatcctctttgattagagatactttagatacattaatgttgacggtttaatgatggtggctatacttatggtttctggtattttcctctctgaggaggtgcttttgggatatcaacttgggctttatggtaaaacttggcttctactaatgataaataactgaccaactaaaagaaactgctttgagcttaaaccccacatacggctagtctacctcagccaaataggacatttgttgagcatgttgatgtgtactcacccttccttcaacataaaacaccagtttctccacattgcaaccactactcgggagaagatgaaggctacgtgaaggagtttcaggagtttcaggacttcgaggagttctagactggattagcggcaaaccaccagtcggtagcctatgaaggccttatcttactgcgtttcgtttagcactttgatttctgtttaagttaatgactatgtgaatgtttcagacatcatgatgtaataaaagtaatacctatttacgctattatttaagcattgtgtgatgatgtcca

SEQ ID NO: 71048 - DNA, 764 bp, Zea Mays
ctcatgaggaatatatgaagtgtgacattactatgttactattgtggtttctacctgcgaggtgtggtaactaggtgcgttgtacgttgtatacgtgctgcaccttcgtaataagaaggttgtggaattaagtggtggtaaaacaatgttcttatgtggttaaactgtttgatattattttacttgctgagatgtgtcatctcactcttgcattactcaatgcaggtactcgatacatgttgggaatgaggggagtagcagcacgtccactttcactctcacaataacgctgcccaagcgcagccatgatttaattagaaacttattgtcaaaggaagtttgtttattttttttatatggtcgtgcgcactggctaattcagttcaggtcgtatgtttatctttccttgctagccgagtaataatacttagtatcttttagtcatgatatatgtttatactctgttgctccctcttttatgcaatcttgcaaaggggatgctgccgaaattttatatatggacgtcggaagtgtagtacagtagcataccgggttgtttgtggaacctggagtgttacataaagatatgacctaatgttatgactctttttgctttggattttttgtgggttataggacaaacaaaacaaatataaacgtgaatcttgataccacatgatagaaggcaaggtctgatcttccgtgaggtaggataacttgattgggtggagatctcgaaattgatgacccaaggctccaagtga

SEQ ID NO: 71049 - DNA, 176 bp, Zea Mays
ttgtatggtcattgctcttattcttgactcaatatcactgggctggtctccaagtggcacaagtacgtgttattctagggaggtcaaccaaggtgatgtctagtacatttggtgaaaagattttcaggtagaaattctttcttagagacccctttattatctctagcttctttgtc

SEQ ID NO: 71050 - DNA, 2107 bp, Zea Mays
cccatttgcagccactgccccctcctccccatcaaaccctagccgccgccccccaattcctcccctccaaggtgcaaccactcctttcctcttggatctcctttgggtttgtgcaagtctcaattggagtattggtgggaggaagaaaaaaggggtgaagaaggagtcaaggtgaccttgttttctattttgtaattgtgctgcaatttcaattggttatccgttctcctaggcgaattgggaaggatgctgtcctgatttttgttggcgggcggacagcagtagtgttggctgtttctagagtttttgcgaggtcgattagttgtcatcattgggaaattcaagtagagaattatcatatctttccatagagtacttatgcgttcaattcggtgtaataatctaggagatatcacattttgaactcagcaaggttgctgtccaaaaaacagaacgcagggagtactttgttggctatttggggccatcgagatgttgaaatttaattatattttgaatacaaaacttgtagagaattttatgtagatgtttctagagtttttgtttgatatcactgctgttttaattttgaagttatgaaattatcaaacagcgctgctgcagcttggtgggtgatggggagaggtgttgttcgcgatgggttggggttgtgcgtaggagcggcgttggttattagcgattgttatgtgaatatgtgcactaagtttcacaggtacttgaaccttgcttggggaaaggagggaagtagcagcacgttcacctacacttttaaataactttgccactgattagtaatgactttaattggggacttcgggtcaagaatgttggtctcttttaaatagtgtgtgcaagtggtttaatatgttctggtcattatggtggtcgttcttttgttggctggattaataatgttctcaatgtttattcctatcatgcattatgctatacacggtggtatcctcgtttatgcaactttaaagggagatgctgccaatttttttagcagtttgtgggaagggtaatgttggtgacacccgtagtgtttggggaccttggggtgttacaggataggaaaagctttttgggaaaacacctatgcgtggaccgtccgagccctggcggcagaccatccgcgacactagggtgagccttggacaagaacactgcaaaaacacaagttaacactacgaaccgtccaaaggagaagtgagcagcgtccgagaccaagcgtggaccgtccagcctcaggcgcggaccatccggtcgttgaaaaaccagaaaaacctaaaggtgacgggttcggtaaaatgcatttttagcgtcctcacggaccgtccggggtgcacggccggaccgtccgcgactactttatctgacatctgacaacgcatgcattaaatgcactaaagccgttgatattgccgttactgctgaccgttgcgatttcagccattgatgtgcacgggcgaaccgtccggatagagggcgcagaccgtccgcgaccgacagaaaagaagcaacgactagaaagtgattggaggctataaatacaaccccaacaacctacattcagaagatctaagcactctacccattaacattcaatacaagagctagcaatccattccaagacacattcaaagcttccaatctctccaagtcccacaattaagacaagtgatcattattgcttagtgacttgagagagtgtgtgttgggggccttcggcttccgaaggtcctctaaaacatgatttaacaatatttctggagtaaagtacattgacaggtatctttggactcggatcagagccacggtacgaagaagcacaaagaacacgaaggttggcgcagagccaaagctgtgtgtagaagagcttcggaatagcggcggaaaaggaaaccgacttaaagatgaaaaaccagattggacctcgaagaattatcatagagttattgataaatgtgaggggcattaatgtaattttacatgggctgcgtcccgtgcctataaatagatgaacagtgatcctgtactgttcacgctgagttgacattggcttttgcgtcacacttgtaatttt

SEQ ID NO: 71051 - DNA, 1292 bp, Zea Mays
gatttcctctccgacaatataatatgagatagatctagcatataatttattgaagttagagacttttgttgagttgaagtgaatgaataagcgaaaaggaaaagttataattactctaactaatatgaatgatgaaaaagagtcgtttgtgtatttttatatcttaaaaattaggcaatacatcactttattatgtttttgtggaaactataaaatatttatctttccgactatagtttatcgttttcgaataatcgacaattccgttcccatattatcgaccgttgattttcgttttcatttttgtcctgaccaaaaaaatatgaaaacaaaaacaatttaattgttcttttatcgttttcgactgttttcatccctaccgaccgccgatttccactggcggtggcagtggaaatcgatttttactagcggttctcagttaaccacctataataatgttgatttctagtgaccaggtctaaaaacgaaagtgaaaataagttcacaatacttagtgtaatattctatacaaatctaattaattaatcctatgaatgtttgaccgatataaacagcgctgtgacgtttttttaatagaggaattaagcatgagttttcttgccttggtaaccgtttcccttggcaagaaaagctcaatcttccgacctcctctagtctctacactagtcctactttcttacacagatccccgcctgtgatggagtagttagctatacatgatactttgcttgaagctagctgtcacgaagcaccatatactagattaccagtggtacactacacacaatcatctgcgctagtgacttgcgcgtgccgacgaatcaagatgggacggggcatgagtcctgattgcatgctaatgctgctggtagcgcagtcagcatccattccagctgatatgatctgctcctctactccacctgcgctgctaaggtaaggatggacttgccttttgccgcgcgcaaccacacagccgacgcaaaatggagcgccccccgacgccccccactactagtgtatagttagcgacggagacgaaaagggcggtaaaagttaaagatcgcttccaagctaggcaacgctaaaaccagcagcggggtggcgaagggaggatggatggctgtggagcactagtactagcgtgcacccacgcaccgaaaggcccggtggtggtcgtgcaggagaagtgaagtgatatatagagccggccgggccagacatgcatggctcatctccatgcatgtgtgcgctagctagctccgcgctgatgg

SEQ ID NO: 71052 - DNA, 682 bp, Zea Mays
caacgccccatacgcagagctcggccagtgggcacgaaaatagagacgccgagcatcgccaccatatttacccagctcgagcaccgtggcatgcaggaggcagccgtcggggatcagcgccaccaaaatcacggtatgaattctatagttgcttcgccttaattcatgcatagcgtagtgtaggtaggttgggagttttgcacgctttgctgctcgtcagcctgcaccgccatggctctgccgcgaagccacgagagcgtcggcgcctgctggtcgacatacggaggaagaagatgaaggcaggtccgttcgatccatcacgggcagataggattagatcaggggtgttatgttcatggagcagattgggaccatcgatgtgtagatgagcgagcgggactagatgatccataccctttaacgttttaaaacatgtgtcatagatctttaatctggcggccgcagctgtatgtccttttggcttctaatctcgaccatggatggtagatcgaacggccaccattcaacaataccccttcgtgtggcttatttcctaaagagaccctggattattttagaatcaacccgccatcctgttgactgtgccctgtgtcttagaaattttacccagagacccctggactttccagaaattgaggcccactccagaatagtattaaac

SEQ ID NO: 71053 - DNA, 870 bp, Zea Mays
tacaactggaacggatcaatttggagttagaatgaatttactatgaagtaaacaagtttatggatttaatttgatactaaaaacctatttctttattaatttctgaatatcccaagtgttctggaccgaggacactaatatcaaggagcccagggttaaatttgcaaaactctaccagactcagactactctcgtgaggatggcgggttgatttgtgaaaagggcaggggctcttttacaaagttacctggccgaagcggtataactagatctcggccgttagatcaacagcccacgacacagattacaccggactcatcaatgaaccggtacgatgcccaggaccctcaaatcctgaccctacggtcagggtttaacgaatcaccaatctaatccgagccgagggatcagagatccacagctctgatcagttactcgaagcggtacgcctactgtctcaatcgtgaccgttgggggtgcatccaatggctcccacacgtcttccccacaaccgagggaggcagctgagcgcgagggatgcggtgacgccatcgccgccaccaccgttgggcattgactgcaagcaccagtggaggagctcggtctggctaggagagggagcagtggcagctgccgtgctgaggagctcgacgaggtcctggcagacctaggaacgagcaggggcgcttggaggagttatccatggatcgggagagagggaagagctggagctcgcggtagccatggcgagaggcaggtggctagatggaagatggaggcaggatctgcccatggagatgcagaggcacggctccatggccaggagatggatttataccgcccagaccttgactccgagcggccagccgg

SEQ ID NO: 71054 - DNA, 200 bp, Zea Mays
gggagtttctctttttcttttctttttctgatttctaattcctttcttttcctttttctatttttgtttctttttgtttctttttcttttgaatcaaaaattctctaaatgatcttgagtgataaatatagtctatgtgaggtgctctaattatttcaagagtatgcacatgatgaggtgttctaagggtagagttaagg

SEQ ID NO: 71055 - DNA, 1146 bp, Zea Mays
gcgactctgagtatatatagaaggttgtgttgcatatatttttcgtgccatctagctttcgtgttgtgattgtcattttaactttcgtgttctgtgagcgcaattgtttttgagcttcgactttctgcagtgatcatcaccgaaatggtcgaggacaagaaaagcgtggatcccgcactcgctagtttctatgaatccatggaaaggaccaacatagagaaaatcgctaatgaaatgttagctgggctatctggtgattcaagcgatagcgagagcttcgatgttgagagtgaaaacgaagatgctgaagatcggtcgtggaggccaagtcatgttgttttcggaaaatcaactgtcaaacaagggcaatagaagcgatgaagggtagatatttccatgatatatctatagtgagggctggaggagaaagcactattcctcttcctgaagcagatgaggtagtagtatttaaaagttttatgaaggctaggcttcgtttccccttgcacaagatgttggtcgaagtgctaaagatatttgagatataccttcatcagcttactcctgaatccttaattaaagttggagtttttatatgcgctatgagaagccaagggttggagccaaatgccaagtgcttctgcaacattcatgaactatcgtaccagacgaaggcgattgggaagaagcagtatcataacaacttcggttgttacagcttcgtgcctcgttctgatgtgaggtatctggtgccaacattccgaaagaagtggtcgggctcttggatgaagcaatggttttatgtgaaaatgatctgattcagagggaggatgtgagaggtgtaatccaacgtcctatatggtcacgcttcggcattagaaggccatcaatcgcacttgggaatgaagtgcaagcctgccaaatggctttcaacaccatatgcacctacattggcacaagagatttagttcaagaacacatcgctttcagagtgtggcctctggcaaatgagtgggaaatgccaaggaagctgtcgctggctccagccaaggtggcttggtttatctcaagtacaccttccggtgcaggagccagttcgatgagccaaatgatgactggctacacgctatagaggccacgagtgat

SEQ ID NO: 71056 - DNA, 2774 bp, Zea Mays
tgctgattgaagctagtgcagacccggtcaaagagccggagccagagaaggcaacagagcagccaaaggtactagtgacggcattgccgaagctatcagctactgcaacaacaactccgaggaagaggaggatggctagcgttttggaatctgtaaaaactcctatttctaccgaagcttcaggcaggaaaattgaagatgcaagaaaagtggtcactggaagcgcttcttctgctcacactgaagtggaaccttcagaaactacgccagtaaagctgatggaagaaagtactctagaaaagcccacaacacctactcccgaagcaccttccttgggtgatttgaattatattgttcgagatgcttcgggaaaacagctatcaacagaacaacttgccgaaacacaacattatgctaaggagttgaaataccccgaggggtccttgatatacagaggagacaacgaagatgacttcctatactgtctaccagacagtaagtaggtcaatgtttgccgtgaaatgatggacaacatgggatatccaaagcttgaacttggcttgtctgcaatgacaaaggatcagcttgcagatagccttgcctacaacagcttgaaggtttttatactttggcttgctattttgtaattttagttacggtaaactatttttgtggtaattcttatcgttactatttgttcacactttgtttgccagggcttaattctaagcaaggccctgaaggcccaaaaggatgcagaggatgagagttgtcgaatagcacttggaaacctccgattggaggttataaccttgagaaacgatgctctcgcaaaagacaagattttgctaccattggtcctgaaactgaaatccagcgaagccaatctgtctgctcaagctgaagcccaggaaaccgacatgcaagagctaaagaagaaagttgtcgaagcaactgagaattttaacgttgaagtagtaaaacatgaaatatatgggatcgaaagatcaagggcacagaaaaatattgatgagcttcgtgctgctaaggaaaaatgctacgaaatggttatggattgtgctaaaattttgaagaacagtttttctaaagttggtgcattttcttccgagcagaaattcatccgcgacaatcctgaagttatccaatggattaacggcgaggtcgaagctttcaaggaaattcttagtgacagaggggacttctgtgcctttgtcggtgcttgtggggccgtgtctattttggagaaggctggttgtgatcatgccaaggttgtagctcaaccagattttaccttctcagccgacgatgttagaaacccttcagtcgaagctaatagcctaggtgggaagttttattccgaagtatggctgaagggtggccgagacatagcttatgaagccattagaaagaatgaaaaagagtctcatgatgccttagaagaggctaaaagagccaaagaagctgctgaatgggcttggcttatagttatatctttatagcttagcttcgtaagtttttcagcttcggtactaacatatatttatgtttcgatgcagctgagctttctccctctcccgagccatatgatcttgaaattgacccatctatcaaggaggcgctcgatataattaagattgctaatgatgctattgacgaagctgtcgacaagctgctgaacaaagctaccgacaaagtcctaaaggaagaatgaagctttgtatttttgatagtttagtgtcctggtacataactcttggttttgtaagaaacacttataaacaatttgcatgtatgttgatgtaatatatttctttgtgaagcgtggaaccttcgtacatactgtttttaagccggtggcaaaaaaatacattccctttttttcacgcttcagaaagaaatcgcccttttttgctaaagcaactgtatgattcttgccatagacattgctcgacggggacttggtcgatcgctccgccactcaggcttgctcggcggggacttggtcagtcgctctatcttgtaggtttgcgaggtggggaccctggtcgtccgctccacctcaaagggttgctcgatagagggctcatcgatcgctctgcctcgcaggtttgctcggatgagggttggtcggtcactctgcctcagtggtttgctcgatggtgggccgatcggcgagtgggccgttaagaggttttgtgcctactttgggcacccggttcctaggtacccgacacatagcttaattaaaattcctaaatagatggcactattgtttgtttctaaagttatatatttcaattagtgtcattttgaattatatgtgccaaaatccggattatagataatttgcccctcttgatctcaaaatcaaagtgcatgtcttctacaagtattcaaaacttgaatgccactttagggtgaggttactctataatctaagtctttgagactaacactgtttttcaagcctattatgtgtctagtagtctcattgaaggaaaatagagtccctggagaaagacagtgtgcttccactataagattgtcatcatccaaatcttttgattggtgtcatttacgcgtcttctccaatatttgaataagttatgtcattttcatcttatgccccccatgttgccatatatgcatatgttgttaaatggtttcttttgatatcgctagaataccttctatcatttacctatgaattgttttagatggagttagtctatttcaatcaagtcttgttttct

SEQ ID NO: 71057 - DNA, 1029 bp, Zea Mays
gttttctaaatgaagggtgtccgacagggggaatatgtctttttccttgaaagggggagaatacctttcccacagggggagaactttcttttagagggcaagtctttaactacttcctatgtgcttgtatatgtcttccttttcgttatttgattccaaatgggcgagggaattttatagaccaaagcaaaccatagttatcaaataccaaaaaccaccaagtttattttttttattctttcatgtggttatctatgttggtttcagtccaaaatatgaagtatgtggattatggagataggggggcttaagtccacaatcacacattaggggactaattgcatatgcaaaaatgtgcttgatttctaaatgaactcatagctgtcaatttggtacgtcatacatcttgcttatatgcatccatagcaagtagagtgcatatttcaatttggtattcaatattttgcttgctttggttgtgttgtcatcaatcaccaaaaaggaagatattgtaaggaaaatggaccccgacaaatttgactaagggattttggtggtttgattaacaacataattagtgaactaatgttttcccaagtatttgtgttttgaagttcataagatgcaaagtggattggacttaggctctgaggatgcaacacctcaaaaaagacctaaaagactccaagaagacctataaatacttagcacaagttcaagacacaagaccaaatgagcccaagaaaagaagatacaagatacaagaaatggttgtcggctgacgcaccggtggctcaccggaccgcgtgtgcaaaaagctctacaaacgactcttgggcagctgacggaccggatggtacggtggcgcatcggaccaaggtccaacggctagtcgccaacgatcgactggcatggctcagtcaccagacggtctggtggtacatcgtaccggctatagtgtcgatagcgtccaacagctagctgacgtggaggtcgcaccggtccgatgcgcccatagacagaaaacag

SEQ ID NO: 71058 - DNA, 378 bp, Zea Mays
ggcgctcggcttggcttcctggagctgcgcgcgggcggttgagagcagagggaaggagagagagagagaagagagagggagggcgtggagagaagagaggagtaggggagcggcggctaccagggggtggcggctgccaacaggaaagagaggggcacgctaggtcaggatattgggcccctagtgggctgattaggttagggttgggttttttttctttttcttttttttcgaatttctaatttaaaatacacttttaaataactctaaaatttatagtaattgaaccaaaagtatttataaataatatagttatctttggactgattatattatttatttactaggatttttatttaataagaaatgttattcaat

SEQ ID NO: 71059 - DNA, 525 bp, Zea Mays
tggaggagctcaatgagaactaagaacctacaaataaaccatgtatcacctttgttttcttgctagccttccctaatctcgaggacgagattctttttaagaggggtagatttgtgacactatgaaaaacattaaataaaaataatacatttagttaatacggtaattaattttctctcaagtgttcgttatttatttgcctttggaatgatttctgaatgctcattttgaatatttaatatcatttcttcttaaatgaaaattcagataaataatatcataaatattagtccaagaattaatattttatttataaataattttggtttgattattatgaattttatgattatataaatatgtattttgaatttaggaaaaaatagaaaaaaataaaaaaaataaaaaaacctaactaacggcccattaaggcccaacatccccaagcgccgccccctgacctaagccgcgcgcgcgcctcttccctgcacaggcggccgccgcttcctccactcaccgccttgc

SEQ ID NO: 71060 - DNA, 443 bp, Zea Mays
ctaatgcatcaaacaaggtgataaagattttaaaacataaggaaggggataatgcaccggggcttgcctggaataaacactatgttagtgtttgttagacgtcgatcacttgatgaccatcctttgtcttggcactcgtttagatttccattttcaggttcatccatcaacatcatcttgtggagaagcttacacgcagcgacatcttgtgttcgactcaactttggtcctccatatcacgtaatcaataagcgtacctacatgatttgcataatgcacatgaatgcatataaacaggaatatcacaaacctaaataatgctacacggtagcgaattaaacacctaccggcgaggcgttgtaccatttcatacagaaacactagttatcgacacacgactaagcgcaatgattacgcttctctagattaaccgaatctaacgc

SEQ ID NO: 71061 - DNA, 1064 bp, Zea Mays
atttattcttatattccataaacatgaataaacatcaacaatattcatattacattggtaccttcagcttgccaaagggtgagagaacgagggtgatgcgagagtgattacaatccagcgtgaacagtacggtgttactgttcatctatttataggcacggggacgcagcccggataaaagtatatttatgtccctggtaactatctataatattagaaagaattattaaggactgtatggtctttatccttcttcaatcgttatcatacttgagcttcgtcaacatgtccagccgaagtcctttggtttctagctctgtcgcccactctttacttccctttgttctgtcatgagagaagttttccattctaaagccaaagcttcctgtaactattcataattatgctgaaaacatatggttagtcatattttttaggacaattggttcgcgcccgggtccctaaaacccgagtgtgacagaagtggtatcagaggaatgttgactataggacaaaacctagatagaactacacaacccttacctacttacctttgctactctgattctttctaaacttttcttagtctattctcatctactgctgctttactctgattactcttaccttttcacttctaaagacaaaagtggatttcacacattgaaatcatgtgcctaaagtgacctttaggaataggcgacctactcttaggaacaaaaacaaaactattttttaggtatgtacgtacttgaatgggttgttcttatgatacttgtctgatttggatctttgattgagtgtgatgagttgtggagtaatgtccacaattgcatttgcatatacatctaggcataaaggagaatatttatagaataactagacaacatagatcatccccattaaaatatcacatatctatcttatcttgacaacttctatcttacctttagaaattcaccttataagcctagttatcccaatttagacataaaaacaacagatcaggcctcgccatgatccttcagtttatgaccagccactagcctatgtgtttgcctact

SEQ ID NO: 71062 - DNA, 636 bp, Zea Mays
atcccaacggcctggtgacgtggctggcgcaccggactgtccggtgcaccatacgacagtcagccaccacaaaacggctagttaggtggttggggctataaataccctcaaccaccccacattcaagtcatccaagttttcccacttcaactacttacaagagctctagcatttaattctagacacacccaagtgatcaaatcctctccaaactccacacaatgccctagtgattagagagagagatttgcttgtgttctttcgagctcttgcgcttggattgctttcttctttctttgattcttcattacgatcaaactcacttgtaattgaggcaagagacaccaatcttgtggtggtccttgtgggaactttgttttccaagtgattgagaagaaaagctcactcggtccgagggaccgtttgagagagggaaagggttgaaagagacccagtctttgtgaccacctcaacggggagtaggtttgcgagaaccgaacctcggtaaaacaaatccgcgtgtcacacctcttattcgcttgcgatttgttttgcaccctctcttgtggactcgattatatttctaacgctaacccgacttgtagttgtgattatttttgagaatttcagtttcgc

SEQ ID NO: 71063 - DNA, 816 bp, Zea Mays
cagttttgggccgaggcggtcaacaccgcgtgctacgccatcaaccggttatatctacaccgaatcctcaagaagacatcttatgaactcctaaccggtaaaaagcccaacatttcatattttagagtctttggtagcaaatgctttatacttattaaaagaggtagaaaatctaaatttgctcctaagactgtagaaggttttttactaggatatgattcaaacacaagggcatacagagtttttaacaagtcctctggacaagctgaagtttcttatgacgttgtgtttgatgaaactaacggctctcaagtagagcaagttgatcttgatgagataggtattgaagagactccgtgcatcgcgctaaggaacatgtccattggggatgtgtgtcctaaggaatccgaagagcctccaaatgcacaagatcaaccatcctcctccacgcaagcatccccaccaactcaaaatgaggatgaggctcaagttgatgaagaagaagatcaatcaaatgagccacctcaagatgacggcaatgatcaagggggagatgcaaatgatcaagacaaggaggatgaagaacaaaggctgccacacccaagagtccaccaagcaaaccaacgagatcaccccgtcaacaccatcctcgacgacattcataagggggtaaccactagatctcgtgttgcacatttttgtgaacattactcgtttgtttcctctattgagccacacaagatagaggaagcacttcaagattcggattgggtggtggcgatgcaagaggagctcaacaacttcactaggaatgag

SEQ ID NO: 71064 - DNA, 776 bp, Zea Mays
ctgcattgctcttcctagaaattgtagcgggctttctaaagctagtggaactttgtaaaggtctcatagtggatccctagccattcacctcggtagtgtataagggtctagctaaccctaacgacataggaatggtacaacctctgcagagtgtaaaactggtatactagccgtgctcacggtcatgagcaactcaggactctcgcatgattaaattatggaattaaatttaatttgtcatttgcatcacattgggatatattattaatttttatctactattactttggtttggtatctacttacatttagtaactgctaataaaatttgaccaacttattaaaagcaatgctcggctttaacccctatttattggtcagccttacacttcacatgaactcccacctttggcgagttcatgcacattattccccacaacttgttgagctatgatcttctgtgacttgctatatataaaccctccacaggagaagaacatgtggtccaagaggagccgtacaatgaggagtacgagttgatctaggtggcgtctctcagtcaactttatggcgccaatgatggacgtttagttcgctttatatttatcatttatttttgtaagacttccgctatgtaatgatgacatttatgatatttgtgacatttatctctatacactttgtcattatatgtgttgttcttctttgggcacatatgagacgcacccggctttatcccttaaatccgggtgtggcacagacgatggaaacctttc

SEQ ID NO: 71065 - DNA, 956 bp, Zea Mays
ctttttaacgcgcgcgtagtcttcttctccactgcgcccagcttcttcttcctgctcgtgccctgcggctctcctcaagccggcgcgctcatcttctggagcttcagtgcgccgtggagttccctgcgtctctcccatctcccacggtcggctccctccctgcttttctctccctctctctctccatggcgcgcagcttcgatttcaccgcgccctgcatccatggcggcccccagctccctctgacggccatcgtcgagctctctgcacacgcatctgtgccttccctgctcctgtcttctccctcggtgccggtctctgtagctcctacgcgctgccggctccctgcttggatcccgctcgcggagctccctcctcccagcgccgcgtgcccatgtgcctgcgcgcccctgccggttctctgatcggccgcctgccatgcagcgccgggccttcataattgaaggccctgtaccgattttttttctttttttctttgttaagaatagatgatacaaattaatctcatttattaacagtgattgaattattaatgtagaaaatggcttaataacggtaatgaatgatcttaacgtttggatattatgccagcatgtgctagctacacttcgtcatatagccaaaataagttttatgagagattgatactcgcttgttacgacaaacactatgttttatttttatcgagctgactttagctagactttctaatcattactaaaatttgtattgattaaattatcactaactattattttaggggcccttggagggagggggccctgttcttgtgcactggtggcacatgcctcccgcccgggcctactgccatgacactcgccctgctcggagatccctctactgagctctccatcgccgttctctgcgcccagccgtggagttctacgcgcgcagctccctctgccctctcccca

SEQ ID NO: 71066 - DNA, 598 bp, Zea Mays
catcttatgtgcctcatttgcatcataaaaagagcctatacaaaatttagagatttattcaaacaaatgaaaaaaagtgcatcatgttggagtttatatggttgtgcattaaataaaataataaggttaataataataatataataaattctagaagtagaattaaaccctaaacttgaaaatagggttttgaatatgagaaggagaaagtatataaaaaaaataataaaacaaatttcataaatgtcccaaattggtatttcctaagttcacaataaaattcgaggacaagttctgcacaaggcttgaatttaaagtttgaattcaaattgaagttgggatagaaacaaaaagaaaaaaaaagaaaaaggaagaaatcctaattgggccaaactccccaaaccggcccaattccactcctcccacgcgcagcccaaaacacaaaaccggcgccgacacctggagcccagccgcgacctccccactcctcgtgcctttcgcttcttcccatccgcaccgtaaggagccgccagagtcaaccaccgccgcggtttccgccgctaaccggtgcatgcaccgtagtataagtacgcgggcc

SEQ ID NO: 71067 - DNA, 163 bp, Zea Mays
tgtcttattattattattaatccttattattttatttaatgcacaaacatataaaactccaacaggatgcactttcttttattttagtgtcatttgttttaattaatcacccttaattttatgtatgctctttttatgatgcaaataaggcacataaaataag

SEQ ID NO: 71068 - DNA, 354 bp, Zea Mays
atgatttaccaatccaacacaaggtaaggcatttcttatagctcctaacataacagtacattacattattcacaagttcttattattggaataaaggtgagagaagcatgttggtgcacaagagacaatgatgcgacaatcatgatgcatgctcattctagtcgtcttctcagacctaactacttttcgggtgcttctacagcatccttcctaatagtagtagtagcctttatggcctatataaatagccacctagctacccatctatttcctaaggcttcacgtcctaggtctaacttatcgtcctgatatctatccaactttggtttctaagcaagttttactttagaaaag

SEQ ID NO: 71069 - DNA, 232 bp, Zea Mays
aattaacataatgatcttaacatgaaccataaataacaactgataacaaaagtataatcatgaatagtgtaatcttcatacccaaaaccacatatagcactagcaagtactacccagaaagttcagtggtgaacaaggtataaagataatcaaactaggtaacctattgggtcccatcaaaattaacctatgcagatcattatgattaattagaacatgagtaggtgaaaag

SEQ ID NO: 71070 - DNA, 593 bp, Zea Mays
tggacttctggatcgttcttagggattttgcccgaacttcggtagaggcaagtaaaacagtgatggttatttcgtcttttgattgaagaggctcatacttgattatgtttgtgctatttgtgttcgtatccatattcctaattgggtaccatcgtttgaaattattcatgctttattgattatacatgtggagggtgtggtttgatcatgttacccatgtggttattgatgtgaaatgggtggaagtatatgtctagcacattttatttgggaagaactcatgttgttgacatgcataatgcattcatcatccattgcattgaagttttcgtcgcgatcttatggtccgaccgtaccggtacaatgagcatcatatgtttcccgagaaggggtatgatgcagcttcatatccttagaggtatgaaggcagaagtcatgttgcatctgtagccatgtgcattcatgggtgaagtgtggaacctattttggtgatgtggatgttgggggccttcgtcctccgaaggtcctcaaaaacatgatttgacaatgttttccgagtggattatgtgaacaggtattttcggatccagaat

SEQ ID NO: 71071 - DNA, 233 bp, Zea Mays
attgatttcttttctactcagcccaatcaattaaaataatagacttttgactaaaatatttattctttaaaattaggtattttttaaatattaagtttgattttttgaaatatttgaatattatataaatatataaagaaagaaaaataaaaaactcacaactcacacgcacacatctaaattgacaaaaaaaagagaaataaaaaaagataaaacaaaatcaaaacaaaaac

SEQ ID NO: 71072 - DNA, 858 bp, Zea Mays
agaatttcataattttgggtttagtagtttgggaaatatcgaattttaaagtttactatgctgctgtctaaaatagattcagtcagttatcttgtcagatgttttagaacttatagatggcagaatttaattaaccattgaataccgaagttgtagagtattttgtgtagatactcctaggagtatttgtttgatatcactactgttctaattttaaagatacaaaattaacaaacagcgttgctgctgtatggcatgtggttcagggtgggagtctttccactgggtcttggtttcaagtgtaggaagtgttttgttgattgttggcaaatgtttgtaaaatatttgtactaagttttatgcccgctagcagatggctacactccagatcatgcctagtatatttttcttcttcgatgaaggcaagtgaatgtagcggtggttgctaccattttgacctgttatttctatcacctacactctaatattaagaattattggattctttcataattgaactctatgatgatgttttacttgatggtattatattgattctctatcatatattgatgatgattatggttcaagtatgacccatgagattaattcacacccctgaaggcagatgaagtcttatttgaggtttgcattgtatctgaaggcagataaagtattatttgaggtttgaattgtatctaaaggaagtgaaatgtattgataaatgcagcatgccatatacattgtatgactcatttgcatctgaagttttgtcgtgacctatggtccgaccgtaccggtacaacttagcatcgtacgttgcccgaggaggggtacgatgcgacttcatacccttag

SEQ ID NO: 71073 - DNA, 523 bp, Zea Mays
cttgcaatactttgagagtttcaatttaaataagcatactgcccaatactaaataaatagaggaaaaatagaaatacttttggactgagggtaaaaaaagtcagagacatacttagctactaactaccctgtttaaaaatgttaaactcctcagtatactaggttaaggagggattaaccattaaaacttgtattggcccaaaccttaagaaaatgaaaaaggaaatttaaaataagaaccagagggcaaccacattttttctagcttgcttaggtgatagagttcatatgaaaatttgattgaaccctctgttagtacaaaagaaatgcaccacattttattttataaaaacaataagaacttagaaaaatcctagaaaaataaccctaaggagaaaccaccccaatccttgggataaatactattatgctagtataaatctaggaaaaatacaagttctgttgtttgatatttttcaaaagacaagttagttataagtgcctttttgacattaaactttag

SEQ ID NO: 71074 - DNA, 477 bp, Zea Mays
gtaaaggttagcccactataatttttgcaatatttttggaaaattctaaatcactatggtagtacaagcctacattaaagacataagtagaaaatgaaaaggaggattagtggaaatgaagaatgttacccacatccctgcaaccaaaccttactaagtacctattaaaaccatgaaggatgtccaaacatcttgattccaaccaaaacctgctaggcaaatataaaacacttaaagcatcatatgataaagaaaccctactaccacagccttatattatctcaccctacatcatgcttactaaatttttgcatctcattaacatacatgtctcttattcattacattcgatagactgtaatctcgctgacggagagtacgtcctcattccggagcaaggagttgctcagttggtagtccaggagccagcaccagagcctgccatcgaggatctgtctgccccagcttttgaaggca

SEQ ID NO: 71075 - DNA, 855 bp, Zea Mays
ctccactctcattgcgtgttggcctttctggtattggtctgccctaggcaaagcttacccatgacgaggcatgtgaccagttaaagggttctcggtcagcaggcccacatcggtacggtccttaagcgactcagacaaagacactacaccgagactccattctcgtgcaagtcaaccacccggtctcaactttattatttaaacccaaagtttggtacctggcagaggtacatcttttcagatgttaaacccatcaaggccgtgatggatccatcatcacaagtttttctttgtaaaaattcccatccagtctgaagcatcacgttttgttttaaaacaaaacattttgtatttctagagcatggctaagcatcataaaatccttttcataaaagggtatcaaggaagggtaatcaattttccaaggaaggaaattcatcaattgtttagcacacaactcctatcacctaatgcatcaaacaaggtgataaagattttaaaaccgcaaggaggtggccaatgcaccggggcttgcctggataacactaggttagtgtttgttagacgacgtccacttgacgaccatcctttgtattagcactctttcagattatccatcttcaggttcgtccatcatcatcatcttgtggagaggctcacgcgtagcgacatcttgtggtcgactcagctttggtcctccacatcacgtgattaattaacgtacctgaataaaatgcattatgcacatgaatgcatatagacaagaatatcacaaacctaaatagtggtatgtgatagcgaattaaacacctatagcaagacatcgcaaatctagtacgaaaatactagatatcg

SEQ ID NO: 71076 - DNA, 396 bp, Zea Mays
gagattcttttaagtggggtaggtctgtaacatcccagttttttatcccaaggttagaaaccctaaactcctaacccccattatttctcttaagacctcatctcatgagcatttcattcatcatatgcatacaccatgattgctagtagcacttcacatagagtatttcattttggcacctaggaaacataaatgaatatttgtataaaggagaaaaggaattaaggaaaaagaaaaaagaaaacaaaaagaaaaaaaggaaaatcccccctctcggttgggccgattccggcccacgtgaccccccactctctctcgtgcccgtcctcggcccaccttctcctgcgcgccctcgctcgcaccatgcctccctctctcacggccgctcgaccccac

SEQ ID NO: 71077 - DNA, 461 bp, Zea Mays
aaacaacacttctgacatctatatataaaatttcgggagcatcccccttgcaaaattgcataaatgaggggacaacagtgtataaacatatatcatgacaaaaacatactaagtattattaatcggctaacaaagagaagttaaacatacgacatgaagtgaattaactagtgcacacgactagttaaaaaaacaaacttcctttgacaataagtttctaattaaatcatggctgcgcctgggcagcgttattgtgagagtgaaagtggacgtgctgctactcccctcattcccaacatgtatcaagtacctgaattgagtaatgcaagagtgagatgacacatctcagcaagtaaaataatatcaaactgtttaaccacataagaacattgttttaccaccacttgattccacaatcttcttattacgaaggtgcagcacgtatacaacataaaacacac

SEQ ID NO: 71078 - DNA, 291 bp, Zea Mays
aagcattatattcatcatatgcatacaccatggttgctagtggcacttcacatagaatatttcattttagcacccaagaaatttagatgaatatttgttcaaaggagaaaagggattaagaaaagagaaaagaaaaaagaaaaagaaaaaggaaaaaaagaaaaacccttccctcttggctaggccgaatccggcccaagctctcccccctctctcccgcgcgcccgcattcccctccctccgctcgcggcccacgcggcccattcgcccacgcgccatgctctcccctcc

SEQ ID NO: 71079 - DNA, 597 bp, Zea Mays
acggaaatgcactgtcccacactgacgggcttgcacgagagggctttccccgcattttgtgggaggtacttcagggggccggatacacgacacctcctcagtatgtggtgcagcagttcgagaagcaccgagtgccccactgtagagtgaggatgaccctggagcctcatcccctacagccaggctgacgttcactggactctgagtcctttggataccgggctgaggacacgatcgaggcaattgctctgcatgggttgaccactttctgcggattccatcccttggagctgtctacccaccccattggcttgttccccgcggaaagggaagacgacccaatgtggaaggatcgggtggagcatgccaaggatatctgggctatctacccatgtcagactgctcacttgaccgtacggtgcatgaatgccctgtaccgtttgcaagtgatgcgtggtgaggcaatgtctcatttgatggcactattggaggcaacaaagatcaccttggacaacagagaagagcttgtggttgacttgtccactgagatggcggaaaaggatttacaggtggagcagctgtcaaatgagatccaag

SEQ ID NO: 71080 - DNA, 3096 bp, Zea Mays
gggcgccccttttcccctcggcactcgactcccgtgtctcccttgtttcctagccatggtggtggacccctatgaccgggagggcgatctacggccgtcggcacgaccgcgcacggcgggcgtcttctcaaccacgttctaggcgcagtggaagccggtgggccctggatcctccgcgtgccacctctgctacacgccgactgcggtggtgcgctcgccatggcgcacctgcgcctccgtcccctcctgcttgcagtaaggccccgcgcacctccatgacgcaactcgtgtgcgcccgctcttgtcactcgcggtcgcgctgccgcggctcccagttgccgtgcggggcagggccaaactagacgacgccctcgccgtttgggggtctgcatggttactcgggggcttggtccacggcgggcataaccagttgccggagttgggcgtcgtcgccggtccgcatcgcgttgcgagcaccatcgccatcgctacggtgtcagaagaagagggctacatcgagcgtccgcgacgtgagattggggagagaagggttgccatcgccatggacaaagcactgggccgcagccgaagaacttcatctgcgctagggttgcgcagcaccgtgactcgcgcttcgtcgtcggccatcccctgcctccttcaacggtgagaattccccctcctccaagtcaacggggccgagtcacttgatgttggcgcagtcttgcgtattccaagagaaggtagaagacacatggggagcgatagattttgaaatcaagggtggggattggatccatggatgggtagcctcggccgtccgatgcggatcttgtgtgcgagaatcgatctaggaattttaaatctgggcggttgattctcgaaccaatggtgctggtgtagcgttcgttgtggactgtggatctgtgatccatgggtcgttgtcatagattgcgtcgttaaagtggagatctaatctgggccaccggatctagatcggacggctctgagtccccggtacctcttcgcgttgccgagttgctaaagagcccttgtacattgtacgaattaacccgcagactaggggtagtgttaaggtattaaacttaagtcctaatattttcagaatggcccctgtgctctcggatttttatgtccgcagtccataatcgttggaggagtacaagatttaaaatagaaaatgatttctagaatgaaaacaattacataaacttggttaattcataactaactcattttaactcatttttgacctattcaattgcattaattttataattatattttttatgacctagtaactttgttttaacatggaagccacattagaattgatcactcaattaattttgtaccaagcacataaagacttcagaaaatcataactaatacatgttaactctgtttcaatccattcaagttgcgttagtttcatataaatatttactactcagtaggagcattaattatacgatatcacatacttctataattaagtaactaattgattaatctatgtttattgggattagctttgttaatatggcattctggttttatggttatgatttgactaaaagatgatccttaatcaagtaatgacttagattaatgttgagttaattatttatagaacagtctctcatatgatgtatactaatcaacttataatatagtttaatagttaaatcacatagatctcccataaatcataactccataattgtaactccgattttagtgattcttgaacccacaacctcgtagcgacgcgtagattattattatgcagtttattcttatgtttggtgtgatgttgattttgtctataccatgtttgtttgtattgctacgactagcagcgaggttacgagtcacttgaagagcaagtggtaccaggaatctcaagtgccagacaagttgtgcccttgaccactttattacccaataatattatattctttattatcactattcaatgcataggtctagttttgatgggacccaataggtcaccctagtctgtttatcctttttaccttgtttacccctgaatcacttgggtagttttgctattgctttatatggttttgggattaatatttcattatatccatgttccaattattctgttatgttatttatgttcatgtcaagatcattaaattttaattggaacatggagcttaacttgagaaacacgtgccaccacaagggaggaatgggaccccttggctaactaattaggaaagctagtggaagactaccttacccgaaagggacaaaggctgtaggggagttgcatgcaaggaggttctcgggttgattttgctgcgatggcggtcagacgagagattcttgcaagtgctcttcccataaactgtagtaggttttcagaagctagtggaactttgtaaaggcctcattgtggatccctagccattcacctcggtagtgtctaagggctttgcaaaccctggcgacatgggatgcacgacttgtgggtacagggtacaaactctgcagagtgtaaaactggtatactagccgagctcatagtcatgagcaactcaggactctcgcatgattaaattatggaacttaaattcaatttgtcatttgcatttgcatgggtttattattaattttgttctattattatttattatggtttggtatctacttacatttagtaattgctaataaaatttgaccaacttattaaaagcaatgctcagctttaacctctattgttgatcagccttacacatcacattaactcccacctttggtgagttcatgccacattattccccacaacttgttgagcgatgaacatgtgtgagctcactcttgctatctcacacccccacaggagaagtacaggtggttcgagaggagccacacaacgaggagttcgattcgatctaggtggcgtctcccagttgactttctggcgccaaggatggattttagatcctgttatatttatcttttattttgtaagacttctgctatgtaatatgtactctgattatattgtgacatttatctctatacactctgttattatat

SEQ ID NO: 71081 - DNA, 800 bp, Zea Mays
cttgattctaggaatttcttttgctaaacttgcacacatagctcataaatatacctttgatcctatctcttttatatatgctatgactaatgtgtttccaagtgtatttcaaaccaagtcataggtatattgaaagggaattggagtcttcggcgaagacaaaggcttccactccactctactactcacccttcgtcgtcgctccgcatcactctccgtctttggtataatcttcactcatttattttatgaccaaaggaggagaaagtacttcgatgggctctaatgattccgtttttggcgattcatgccaaagggggagaaagtatgagcccaaagcaaaaggaccgcaccaccaccctaatttgtaaaattaatgattttcaattggtaaatttcaaattggtatctctttgtgttctaaagggggagcaagtagtattttcaaaacttgaaaatgcttagcaaaatcttatttatttatctttgactatcttgcaaaaggactttgaaaagaatttacaaaaggatttgcaaaaacaaaacttgtggtgcaaatgtggtccaatatattcataataaagaaataatccatgcatatctagtaagtaacatttattggctcaattctaagcaacctttgcacttacattatgcaaactagttcaattatgcacttctatatttgctttggtttgtgttagcatcaatcaccaaaaagggggagattgaaagggaattaggcttacacctagttcctaaataattttggtggttgaattgcccaacacaaataattg

SEQ ID NO: 71082 - DNA, 2102 bp, Zea Mays
ctctatgctaagttcagcaagtgtaagttttggattgacaaggtgcccattccttggtcatattatttctaatggaggaatagcagtggatcctgctaaagtgaaggagataatggagtggagagtgtccactacagttactgagattcggagtttcttgggacttgcaggatattatcggagatttattgaacgattctctaagattgccaagcctatgacctcgcttttggagaaaggaagagaattcaagtgggatgagaaatgccaagaaagctttgatgaattgaaggagagattgatgtcaccaccagtattggttatgccagacctacagaaaggatttgatatttattgtgatgcatgtggccaaggcttaggatgtgtgctcatgcaagaagggcatgtgatcgcctatgcgtctcgtcagttgtggaaacacgagttgaactaccccactcatgacttgtaactggcagccgttgtgcatgcacataagatttggaggcactacattatgggaactaagtgccaagtatacacggatcataagagttcgaagtacatattcactcagaaggatctcaaccttaggcaacgccgttggttggagctcattaaggattatgatttggagattcattaccaccaaggcaagacaaatttggttgcagatgccttgagtcggaaggagcatgttcactccgctttcgttgtccagctacccgatgagattgttgaggatttcaggagacttaacctggggatagttgctcacactaaaggagttattaatgatgtggaacttaccttggagcaagaaatccgcagaaggacagattggtgatgctagatacaagagattagggatctgattactaaaggtcgaggtccggaattcacggaagaggagcaaggcacaatatggttcaaggagcggatatgagtccccaagattgatagccttcgtgagactatattgaaggaagcccatgactcggattattctattcatcctggtagtaccaagatgtatcaggatttgaagcagaaatattggtgatatggattgaagagagatgtggttgcacatgtggctatgtgcgatgtgagtcaaagagttaaggctgaacacgagaggccagttggactattatacccattaaagatacccgagtggaagtggaaagagattggtatggacttcattactggtttgcctcacaccccgaaaggatatgattcgatatgggtgattgtggaaagactgaccaaagtggctcacttcattctggtcaagactacttataagggatgtcaattggtagagttatatatagctcggaatgtggcttaacacggtgtaccgaagaagatcattttggatagaggatcatagtttacctccatattttggaaaagttttcatgagaatatggatacgaagttgaattttagtttgggcctaccatcctcagactgatggacaaactaaaaggactaatctagtattggaagacatgttgagagcttgtgcccttcagcattgtagtagttgggacaagagtctaccatatgctgagttctcttataataatagctatcagcccagtttgaagatgtcaccgtttgaagctttgtatggcagaaagtgcaggactccattgtattgggatcaaactggtgaaaggcagttgtttggacctgagattatacaagaagcagaagaacaagtccagcaaataagggagaatttgagaactgcgcagtcaagaaagaaaagctatgctgatacccggagaagactgtttgagtttaaggagggagattatgtctatttgaaggtgtcaccactccggggtatgagaagatttaaagtcaaagggaagttgtcccctcgtttcattggacccttctttatcttaaagcgagtgggagaggttgcatatcaattggagctatcggatcatcttgcggatgttcatgatgtttttcatgtatctcagctgaagaaatgtctcagggtacctgaggagcaaattaccaatggaggaccttagtgttcaagatgacctaacttatgctgagtaccccatcaagat

SEQ ID NO: 71083 - DNA, 993 bp, Zea Mays
gtcagtgtagggaggtccttggttgattttgctgcgatggcggtcaggcaagaaccctgcactagagcttcctataaactgtagcgggatttctgaagctagtggaactttgtaaaggcctcgtagtgttaccctgcctcgcctcctcggtagaggtgtatgggattggccatctcttggcagatgggtaacatgacttgtgggtaaagatgcgcaacctctgcagagtgtaaaactggtatactagccgtgctcacggtcatgagcggctcggaccctcacatgattaatttatagaacttaaattcaatttgacatttgcatcgcatttgggattattttactattactttatttattattattaaggtttggtatttacttacacttagtaattgctaataaaattttgaccaacttataaaagcaatgctcagcttcagcctttattccattgatcagccttacacttcatgaactcccaccttcggtgagttcatgccacattattccccacgacttgttgagctatgaacatatgtgagctcactcttgctgtctcacacccccccacaggagaagaacaggtggttcaggaggagccacaaggcgaggagtttgatttgatctaggtggcgattctcagttgacatttgcgccgacgatccttagttcgttttatatttactcttttattttgtaataagtcttccgctatgtaataaatactctgatgttattgtgacatttatctctatacactctgttattatatatgttgtcttcttggcgcatgtatgagatgcacctagctttgttccttaaagccgggtgtgacactggcggcgtgccaggaaccctcgcgctgccgtctgaagccgcaccgctgcttggagttccttctctgtcttctccttgtagcggtggaacatcacaacgaactaatcccactgctctgcgaagtggccaaaactctctttgagccgagtgaat

SEQ ID NO: 71084 - DNA, 156 bp, Zea Mays
attccttggcaccatcatggtgactggtagacgccacctagacaatctcgtactcctcatagtagacctcctcctaggctacctgctcttcacctatggggggtttgtatatcacaagggtgggctcacaaaatatcatagctcaacaagttgtgg

SEQ ID NO: 71085 - DNA, 210 bp, Zea Mays
aaaaatattaatacaaaattaatgcaactagaatggattaaaaaggaattaaaatggatttactatgatttaaacaagattctagaattattttcatactaaaaactatttcctatatgaatttatcttgttttatctatttctggactacaggtgaaaattccaggatgttcggggttagaagtataatttttgggacctgtttgtgag

SEQ ID NO: 71086 - DNA, 436 bp, Zea Mays
atcatgacaaaaacatactaagtattattaatcggctagcaaggaaagataaacatacgacctgaactgaattaaccagtgcgcacgactatataaaaaaacaaacttcctttgacaataagtttctaattaaatcatggctgcgcctgggcagcgttattgtgagagtgaaagtggacgtgctgctactcccctcattcccaacatgtatcaagtacctgcattgagtaatgcaagagtgagatgacacatctcagcaagtaaaataatatcaaactgtttaaccacataagaacattgttttaccaccacttgattccacaaccttcttattacgaaggtgcagcacgtatacaacgtacaacacacctagttatcacacctcgcaggtagaaaccacaatagtaacatagtaatgtcacacttcatatattcc

SEQ ID NO: 71087 - DNA, 364 bp, Zea Mays
aaagagaagaaggaaacaatattatgtgagtgaaatgagtaataaaaaatatatacaataaaatatagatatgggaatgtgtacatttaattcaaagttgaaactcatattcaaattcgaatctggattcaaataattatgaataaagaaaaaaacagaaaacaaaagcaaaagaaaaaaaaaagaaaaaagaggaaaccccacctgggccgcgaaaaccctttttggcccacaacctttttctctcgcaggcatgtgcagctcagctaacgcgttgttgcgacgactagcgggccccacacatcagccactcaccctcgtcgtccgctgcgcagcgcgcggtgcgctcggtcactgatctcgg

SEQ ID NO: 71088 - DNA, 434 bp, Zea Mays
acacttccgacgtccatatataaaatttcggcagcatcccctttgcaagattgcataaaagagaggggcaacagagtataaacatatctcatgactaaaacatactaagtattattaatcggctagcaagggaagataaacatacgacctgaactgaattaaccagtacgcacgaccatataaagaaaacaaactccctttgacaataagtttctaattaaatcatggctgcgcctgggcagcgttattatgagagtaaaagtggacgtgctactactcccctctttcccaacatgtatcaagtacctgcattgagtaatgcaagagtgagatgacacatctcagcacgtaaaataatatcaaacagttaaaccacataagaacattgttttaccaccacttgattccacaaccttcttattacgaaggtgcag

SEQ ID NO: 71089 - DNA, 687 bp, Zea Mays
atccgtctgtaaaaatatatgggtgccgcaggctttgagcctttttgtactagtggtggttcgagatcctcagctgagaaaatcgattcgaatcgctgttatatcctcggacagtggagacttggtcactgccctacaacctaagttagaatttgaacctcatgaataaaaataatgttgtattgatgagatggagaaattagaccagattcaaacagagtctattaatatttagtctattaatatttaatctggcgtcaaaatattgaaagtaaggactcactttagtaagctatttctgcaaaagtatctaatttgattcttgctaaaacttttccttgattcctaaatccagcatacccttgagagttttttctttagtcgggtaagtcttgttgagtaatttcatactcagggttttattccctgttgtttttcaggttatagttttatgctgctgatgatggtgttaagtgccggtgggtcgaccttcttatataagtataccccatctttatcttcttattgaggatggtcacttaagctagcatatgtttcgaacttataaacaatttataacagttcaaagttattcctttgaatcacttttttgtaatcactctgattatgtacattataaaacttgatgtaacatgtaaaatttggtaataagattttcgctgcaaa

SEQ ID NO: 71090 - DNA, 198 bp, Zea Mays
cttctgtcgctcacgcccgcgcggagctcccttcctcaaccgcctattcccccacgccgccctcaaaatcgggaggatccatagcacgccgtagttcctctcaaacaggcccgatgccctcctccccactcctccctctcgcccaaccggagttcgcaacgtcgttcatgctggacctgccccttcgctcgttcatgg

SEQ ID NO: 71091 - DNA, 901 bp, Zea Mays
ctggagaaacctaacgggtggctagtacctctagggaatccttgtaaaggctacgtagtgataccctgtcggaccacctaggaagtgatcaatggggagtcatgatccccgggcaaaatgagaatcacggctcatgggtaaagtgtgcgacctctgcagagggtaatgaaactgatatatcagccgtgctcacggttaagagcagccttgggatcctctttgattagaaatactctggatacgcctcagatgatgactttagtgatgatggttaatgatagtgacttatgatggtgactttaattatgaattctagtatttcctctctgaggaggtactttttgggattataacttgggttttatgataaaatctggcttctactaacaataaatatctgaccaactaaaagcaactgcttgagcctaaccccacataaaaagctagtccacttcagccaaacagggcatttgctgagtacgttgatgtgtactcatccttgctttaccacaaaacaccaggttgtccacattgcaaccactgctcaggagaagatgaagccatggaaggagacttccaggagttccaagactacgacgagttctaggtgtgggttggcggcaacccccagtcagctgcctgtgaaggccctatctttactgcgtttcgcttagcactttgatttacccgttaagttaatgactatgtggatgtctctgactctgtgatgtaataagttaatactcttttatgttattattcgagcactaagtgatgatgttcatttatgtaatcgctgtgtacatgaattctgatcctggcacgtacatagttcgcattcggtttgccttctgaaaccgggtgtgacagatcgtaacctcgcgcatgatttctctcagac

SEQ ID NO: 71092 - DNA, 330 bp, Zea Mays
aaaaattcaggttagatcttatcccagcaccttttgagcctcgcactttctttcagtaatctgcattgttgaatttgtgtgctttcgcgtcatttgttgctggttgcattgtgttcttccaccattcaaaccctagcgccgccaccatctcccgtttgatcacgccacaaatcgagtcaacattgtttccttgtttttctccttcggttacgtcaaaaaaaaaacagaaaaaaacaaaccgagtcaacggccgtttccttgattttctccttccgttacaaaaaaaacagaaaaaaacaaaccgagtcaacgaccgcttccttgtttttc

SEQ ID NO: 71093 - DNA, 456 bp, Zea Mays
cgacctgtcaaactgtagtcgaaatatgtagagttgtaggtgggctgaagcaaggaatacactagtaccacgttagttacaaaagcaagctgaataatcgttcaacggtggtactgtgctggtcctaggctaaaccaggctagagacgtgagcctaggcacaaaggtagtcactgaaaaagaacaactagcacagcacaaagagaaacaacagatttagagattcagcccccttcttcttcttttccttttttttcttttctattctttttttttcttcttcttctgttttttttgcaggggcctaaaccttttttttcactatgacaacccaaacaataaagatattgctaacagcccctttaaatcagatttaacaaatcttgttaatatagaaagtccagaaatctctacgatgattgcggagcgctcagaacgaattttgagataaggtcag

SEQ ID NO: 71094 - DNA, 215 bp, Zea Mays
ctcacctttattccaataataagaaattgtgaataatgtgatgtactgctatgttaggagctgtaagaagtgccttgtcctgtgttgttatgatagtcttgattaggttgtgttatgtgttctccttgccatgctgtctaggaggtacggtaactatttaatacattttgcctctaaccaataaaaattgttgcctgttttgcccataaaaagac

SEQ ID NO: 71095 - DNA, 272 bp, Zea Mays
ggtgtgacttggcctccatccctgccaccgggatagacggtcaagtgggttattgcttccgcaggagaggaccaggaggagtagcgtggccaggcttcgccatgttactcggttttctccgttagttatttctgctgcattaaatttatggttattatttctgaaactccgataatgtaatcactaatgatacttattaaatttgtggtattatgttttattgtatttctctgtgcctcaccttcgagtgagctagtggtattcgatcctgg

SEQ ID NO: 71096 - DNA, 353 bp, Zea Mays
aaataatatcattacaagcaaaagatgtattagaattttgtttgacaagtgaaatctagaattcaaaacaaaagttcagatttaggtgagtatttcaaatttaaagagaaaaaaaagaaaaaaaatttaaaaaagaaacccaaaccgctgcttaggctaaataccccgctggtggcccacttctcccctcccgcacggcccagctgggaacgcgactcctgacgtgtggtcccaccctgtctgccactcggtgcgcgctcccgaactcactggcgctggcaagtaggccccgcatggcagtctctttgtgcagctctgttttcccttctccgcgcacatgacgcccgatctca

SEQ ID NO: 71097 - DNA, 303 bp, Zea Mays
cgtccaccccctttaaattctggacagcccttctaccaaatggcacacgcaacatctaaacaattggattgccgcataaaatgaacaagagataaacacaaaaatcaccttgggttctcccccttttcttcctcccttcctccctccaccgaaaaccgttgaagatttgcaccacgcgacggagatccgagcggcaacgaatggcaccatgggagaaggagatggggggcgactagggtttgatgtgtggctgcaagtgcttgagaaaggaggagatgggaggggggcggccaagagggtagg

SEQ ID NO: 71098 - DNA, 809 bp, Zea Mays
aaaccctagacgggtaatctaacactgtgtcctgtgcctataaatagtgaacagtattcctttactgttcacgcattcctgtaattgcaatcgcgtcactcggaaactattctttgtcaaggcagaggtataaaatgtatctgatattatattcgaatacattaagttcatataatatgtaaatgatgttgtttgcttataattcacttgtcttttatgctttttatttcgcattattttatataatcttacgggttcaatcacgaagactcaaccttcgtaattgtatcatgttaaccttcgtccgaagttcattaaaccctggagggaataatgcttcagcggatgaagggcattaacatttaacattttatgttgtcttgttcttaattcatagcatttgagaacaagtccccaacagagacattgtgaatcaatctatgactatagtctaactaaaatatgattctaatacagttataacatagattaaagtttaattaattatctaaatgtgatatagtctcacatgatttatattaatcaacctagaacataatcacctaaagctttcgaaaatcatatcttcacaactgtaactccgattctagtgcttctcgaacctacgatctcgtagcaacgcgtagaacattattacacagtttgttctcatctttggtgtgatgttaattttgtatatatatcatgtttgtttgtattgttgcgagtagacgagcaagtgacggaggaacccgaaactcaacaggtggaacattttgaacaggagctcgttaaaggcaagttgtgcc

SEQ ID NO: 71099 - DNA, 2122 bp, Zea Mays
gtggttttgggtgttaagaaacatattattcatgatcatgttatttattatctatgaattatttactgttcatgatacgattattatgttaattggaatatggagcgaccacccgggaaaacagtgctaccagaaaggtggaatgggacactcttggctaattaattaggaaagctagtgtgagttaaccctttcccgaaagggacaagcgggatggaagtgtgcaggtgtaggaaggtcctcgggtcagactgtctgttattttcggacgagagattcatataccgctttcgacctggaaactgtagcgggttctctcctctagtggaactttgtaaaggcctcgcagtgtaccctcgcctactcaccttgatagtgtttaagggtccgatcaatctgaggcgacaaagggaatacgtcttgtgggtaaagatgtgcaacctatgcagagtgtaaaactggtatatcagtcgtgctcacggtcatggctcggaccctcatatgagtaaattatagaattaaacttaatctgtcatatgcattgcattgtaggaattattataattgtgatctcttattttattgggatggtatttacttatacttagtaactgctaataaaaatttaactaacttattaaaagcaatgttgtgccttaaccattatttgttgatcaacctgacactacacatgagcccttcgtaaatgagctcatgcacattattctccacacttgttgagcgatgaacatctgtgagctcactcttgcaataaaatcccccccacaggtgaagagcaggtgctcccagaggaatattacgatgagtttgacgaggtctagatgtcgtctcctagtcagcttgatggcgccaagggacaataatgatattagttcgttctatttaatatcagttattttgtaagacattttcgttatgtaataaagattgtgacattcgtctctatacactgagtcattgtatgtgttgatcttgattggcgcacatatgatacgcacccgggtttgtccttaaattcgggtgtgacagaagtgatatccgattcttcctatgcttttcttgatcttatctcaccttttggttgttctactctaactacttttaacttttctactctagaaagacagaagggatttcacacattggaatactatatctaagaatccctaaagagataggagacttaagacaaaattttatttttatcgatatttaagtgtttgaatgtttattcttatggtaattgcttaattcgcttctttgattgagtgcaatagttgtagggctatatacaccataaaacttagtatagtagggcatcctagcatgtatccataggtgtagtgcagtagtgctaggtaggtgacactctaatctactgagctattgtgacccaaaagatcgtgacctaaaagtcgggtgtttcgtacttatttgtcttatatgcagatctatcttaacctgtgtttctaacccagatggtcaataacaggaagggaggcggtgtcgatctacctgcacgtattcgccgaaggagggcaatagctaatccagaccggagatgaatcctcctctgaatcccccgcctgttgggactgatgttttggttgccacccaaatgcaactgttgcaatagatgtccaacaccatggctgttatggtcgctacatcggtgagggattggagaggagtatcgatgggcaggaacactggccgggggcctctgcccacggccgaacaagagggtttctcccttctaattcttgcatgttttatttctcatccattgattacataaataggtcggctgaccgcccctatctagctagagatccttatctccttaaaactctcaacaaactattaattgataaccttactagataatctcaactaatctcctaaataatctcaactaatcttctaatcttatctctaaatatccttatctaatcacccttggagggcccatgattgctgctgtcgcagcccctccgtgggcctccttaggccctgacactatacccctcctggacaagcagctcatcctcgagctgcagcatgacaggtgctcaaagaccaagcctacttaacccaaaac

SEQ ID NO: 71100 - DNA, 148 bp, Zea Mays
ctgccgcagcccctccgtgagcctccttaggccctgacaatggcagagatgcaagctcaacttcgccaaaaccagcagcatccaccaccatcaccacccagggataagcatcgcgagttcatgagccacaagccacccactttcttca

SEQ ID NO: 71101 - DNA, 564 bp, Zea Mays
ctcgatgcactgacagggtgctcctatatgcatcgggtcgcattactggactcaccgctgactagtgggattcttactgtgttgcccacgccgctgctgacaccatcacctgggcagagttctcagctaatttcaggaattattgtattcgtgccaggttgatgaagatttaaaagaaggaattcctttccctcaagcagggaaatatgtcggtgagtgaatacagagataaattcatacaactgtccagatatgctcctgaagaggttgctgaagatgagaggaagcagaagcagttcttggagggactcatagggccactccagtaccagctgatgtttcattcctttccatcttttcagaggttctgtataaggctatagctcttgaacacaagcgtgttcagcttgtcgagatgaagaggaaggtcattattcagggccagggggcctgcagcagtcgtcctcgctatactcagcctcagggtacactagctcgtcctagaggagggcagcagtcttatcagcgccatgttcagcagacacctcaggccacacctcagac

SEQ ID NO: 71102 - DNA, 311 bp, Zea Mays
attgtactaggggaacagttgaactcactagttcggacggaaatagatttgaggtcacaatcaccttgtcaccatccactaagcctgttatatactagatggcaaatttgtaggtgatcatatccgggtggttagagatttcccggatgtctttccgaaggagttgcccgggattgtgacattcccccagagctcagtcttgcaataaaatccccccaataggtgaagagcaggtgcccccagaggaggactattaagacgagtttgacgaggtctacgtgtcgtctctcagtccagcttgtagaaacgag

SEQ ID NO: 71103 - DNA, 1524 bp, Zea Mays
cctttacctagagctccacatatgccatgtatcactccatgtaatatccatatatcgttaggttcatgaaacgtgtctactgcttcaaatggttcaaagaccgagaaagagtgcaatcagtagttcttttttttagtttgtacaatacgattatcaattcatgataaaataatataatatatcataaataaaactattgcaacatattacaattgtccataccatcatcaaagagaagggttaggggaggggtcaatattgttactaaccttaggattaacagtccattatcagtccctaaggactattatatatataggcagtgggcctgggcctaatggggccttaacacccctcctcaaacttaaggtggaaatggaggatctgaagctttgagtttgatcaagtgaaactaatgttgtgctcttgtttgtgctttggtgaagtaatctgccaattgagattctgagggcacatattgaagatcaatagtcttctgctgacaatgagatcgagtaaaagatgcatcgacaccaatgtgtttagtaagttcatgcttcactagaccatgagaaatctgtatagcactcatgttatcacataacagaggtgtagaagtgtcacaagagacaccaagatcatttaagagccagcacagccaaataatttcagcagttgtagtagcaagagcccgaagctcggcttcagcactagaacgagatatggccacttgctttttggatttctagacaataggtgaggatccaagaagaatacaataacctttagtagaagaacggtaaacaggatcacttgcccaagtggcatcggaatatgcatgaagctgaagtgggctatccgaggcatagagtaaacatctggatcttgtcccgcgtaagtatctaagcgcacgaagcaaatgaccataatgaactgaggtcggtgtggatacaaattggctcaaaatatgaacagcatgagcaatatcaggtttggtgatggtgagataaacaaggctacccacaatatggcgatattgagttgggtctgctagtggtgtcccatccttcggacgaagttgtaaatgaatatccattggtgtcgcaactgtgcgtgtattagtaagtccagagcgatcaaaaagatcttgtatatatttggactgagatagataaaagccttttggagtctgctgaacttcaatgcccaagaaaaagctaaggggacccaaatcagacatctgaaattccttactaagatgcttcttgacatgagaaatatgttctaaattgtcacctgtaaccagcatatcatccacatataatagaagtaaagtgcggccttttggagagacatgaacaaacaatgcagatcatgttcactcgaagaaaaaccagcagatgtgatgacagagatgaatctctcaaaccaagcacgacgagcttgtttcagaccatacaatacacgacgaaggcgacaaacgtgccctgaggtggtaacaggacataacatagagatccaaac

SEQ ID NO: 71104 - DNA, 106 bp, Zea Mays
ttcgcaccacgtgacgatgatccgagcggcaaggattggcaccttgggaggaggagattgggggggggcggctagggtatggtggtgtggctgcaaggattgagag

SEQ ID NO: 71105 - DNA, 467 bp, Zea Mays
atccgatccaggtgagcgcttctgttttctagacgcggtcgcgacgcggtagagaaggattccgatgagcgggccccacatggaagtgtcccaacagaaaaggcaaaggaagagtagcagaatgggctggcgcggtggggaaagtggtattgggccgtgagaaggggttttgggcccagcgcgcatcagatagacttctttcttttttttctttttttctttttcttttcctttattttattttgttttgttttcaagtttcaaattcaaattttgcattccagattatccttgagtggagatatagaatctaactagatgcacaatcaaagaaatatgatgcatattcctatttatatttattattagtaattgtttaaccctttttggttaattaaaacgctttgaaatatgcaatacaacaattttcacttttaaagaaatctgcttttaaacctataatcaaa

SEQ ID NO: 71106 - DNA, 244 bp, Zea Mays
acctgcatatagacttctttctaccctagttcaaacacttggcctatagtagccatatttttatcatcccttcatttcactggattgctacgtgttgggcagtgaccaagtcttcatgtccgagaagtaacggcaatccaaatcgattaatacccagctaggcatctccaatcacacgacatatgtagcacttaacccttgcatatgtcaacttgccaacaggtttcttaagacccgaccgggt

SEQ ID NO: 71107 - DNA, 422 bp, Zea Mays
ctcgatattcacgaaaacggcaacaatctctggtttgagccttttgtcgaacgcctagtgagcaacgcattggacttcgccttctccttcatctacagctccaccttcttccatacaaaaataatccgaactggacgacgacgtggactagggacataggaagttgcggccacgacatgggcaagctgacgatgaactccaggtcaaacaggtagcggagttggcaacgagcaccaatgagagaacatccacgttgctgcggaagttggatacgacagccgacaagcaacgtatgagcagcgacgacactttggcttggtgtgcacgacatcgtagatgagatgcggcccgatggagcagattcccatggacagaagaggggcggcaatgcacagttggatcgatctatttgagatcggagc

SEQ ID NO: 71108 - DNA, 585 bp, Zea Mays
ggggatgcgaaggtgcatagccacgacgcacggcggatctgaagtgatcgagctgcgccgacaagatattccttccccaccgcctgtcgatttagccatgtgaggccaaggtcgcatgcagaggactcccgcgagcacccggattccagcatggagtcccaggtagcggtgacacgaggatcagcgccggcagcttgtttctctccctcactctctctggttgccacccgccatagatacgccatggacgagcatcctggccatgcccgcgttagcgggtgacgaaggctagagcttccccgagcgtacctgccacccgctcgatcccgtcgatggagcccgatgcgaattccccaatggcggcggatctgctcaacaatggtggcggctctctgcgcaatctgaggaagcggctaggggataagaaggggagagggctttagctcgccatttattggccgagtgtgcgggagacaaatccgccaagcagttgcgccagctgaccgagaactccgtggtggcagcgatcgggcgtccgaaatcggcggggagaagacgatgtttgttacggggctcgagtgggag

SEQ ID NO: 71109 - DNA, 1009 bp, Zea Mays
tcacttcaatgtatgcataggaatgcaatgtgtaggtactctatcttcatacctctgggggtataaaaccacatcatctgcaaatatcacttcaatgaatgcatatgaatgcaatgcatatgtcctctgccttcatacctctaagggtatgaagccgcatcgtaccccttctcgggcaacgtacgatgctaagttgtaccggtacggtcggaccttaggtcacgacaaaacttcatatgcaaatgagtcatgcaatgtatatggcatgctacatttatcaataaacttcacttccttcagatacaacacaaacctcaaataatacttcatttaccttcaaatacaataccaacctcaaataatacttcatttaccttcaggggtgtgaattaatctcatgagtcatactcaaatcataatcatcatcaatatatgattgagcatcagtataatgcaagcaagtaaagcatcaccatagagtccaattatgaaagaatctgatacttctgaatattagagtgtaggcgatagaaataacaggtcagaacggaagcaaccaccgctacattcacttgccttcatcgaagaagaagaaatgtactagacatgatctggagtgtagccacctgctagtgggcataaaacttagtacaaatatttcacaaacatttgccatcaatcaacaaaacactcctacacttgaaaccaagacccagtggaaagactcccaccctgaaccacatgccatacaacagcaacgctgtttgttaattttgtatctttaaaattaaaacaacggtgatatcaaacaaatactctagtagtatctacacaaaatactttacaacttcagtattcaatagataattaaattctgccatctacaagttctaaaacatctgacaagataactgactgaatctgttttagacagcagtatggttaactttaaaattcgatatctccaaaactgctgaaccaaaaattatgaaattctgctggaagtaag

SEQ ID NO: 71110 - DNA, 462 bp, Zea Mays
cctgcgtgcctgctccagctcggccatggccgctgcgccgcacgcgtctctctctgcgcgcactgtttctcgcgcggagcttctcctcagctccttcagtgccgcgccggagctccctcctattctgctccttggccacgcgagctcaccggtgtgctcccgctccagcctcgacgcgcgaccctggtcccagcatcgagctcgtcgcgcgccatggaactccctgcatcgagctcagtccctgctccagcctcggcttggcgtttccccggctcggatctccctcgccagcgcatgtccctctctctgcttgccgcgtccggccgagcgttcctgcgcgctgcggtttcctcccctggatccttcccctaagctctgctcgtcgcgccctgccccggcgtcgatcccagctcggttatgtcctcatccgagcttcctgtacgcccagcgcgcgcccagccg

SEQ ID NO: 71111 - DNA, 478 bp, Zea Mays
ctggcgacttgtgccttctccagccaagccgcacctagcactgttcgtgtcgccgtcgctcaccgtggaaaccagcttgcccatgccgagctcatgagcgacccgaccgtcgtttctagtgttcgacctcccctgcaagctgctcgcgcctctattcctggccgtggtggtgttgtggcgtagcaacgtcgtgtgtgtcgcggcagccattctggcccgaagcagtccgcgccgtagagttcgcccgaccgcgacctcgctttactccttgcgtcgttgctcgtcgagtcctaggcatctgcgcgcacgtcttagttggcgccaaacatattcgtgctgcacacactcatctttgctagttggccgtgcgcctcactccgttgttccaagtccgcaagttgccattgctcatccgcgtcaagacatcactcgccgtggttcagctcgttagttcgtcgttgttccgtcgtcttatctc

SEQ ID NO: 71112 - DNA, 380 bp, Zea Mays
tatcgataaatcggttgatgctagttgtgttcagtgcgcgtaagatgaagtcgatgtcttgtgctagtagttagtatcatctatgtttgtgatcgataatgttggggtaggatatgatcgacgattttcttgtctagtgattggtgtgatggtatattgtataaaatatgcttggtaaaatatatgtagtaatatgattttgttaataaatcgtaaaagaaagtagaacgtgaatatatatatattattgttttgtaatatatgagatacctttgaataggctagaaaagcgtaatttttataattagccatatatcactagttagtatctgcttaatgctttgttagaagtgtttcgtcatcttcagtgtagattattt

SEQ ID NO: 71113 - DNA, 471 bp, Zea Mays
gaggaaatgagatggtattggttatattgggactattgagttctgtatctacaagtatttctgatctcaattgtgattcctttaaaatgttgtttaattcaatttgtggtttaaatatctcgtcaaaacaatttgcttgctgagatgtatcatctcactcttgcattactcaatgcaggtacttgattcatgttgggaatgagggaagtagcagcatgttcaccttcactattataataacgatgcccagttgcagccatgatttaattagaaactcgatgacaaatgatgtttgttttttcctagtcgtgtgcactggttaattcagctcatgtcgttatgtttaactttcctttgctagcagattaataatgcttagtatgtttttttcatgatatatgtttatacactgttgcccctcgtttatgcaatctttcaaaagagatgctgccaaaattttatatatggatg

SEQ ID NO: 71114 - DNA, 140 bp, Zea Mays
cggatctcgtcagccaccattctctaacccgtgtgtcggtcggcgtcgtggagttttggtttgatcggctcgtcgttgacctcgtcggtgtcgtcgaaccgtgttcttccctacttgatctcgtcgaaccctgaatcccg

SEQ ID NO: 71115 - DNA, 741 bp, Zea Mays
gttgattcgtattccagtcaactaagtctataaatagattaaatataattattggtctcaataaatattattaatttagcatgcgtatattgtgatgatcgatttagatgaataggtaaatcaagtaattaagatacacagtttaaatagttaataaaaagctaggaataaaaatagatgttttagtgtcattatgtcaatttggttaatggatgtagtcgatgccctgctgtgatatccatgatgcttaatgtttggttttaagtgtttcatcctttttagtgtaggttatctatattatactcgttatacatggactcatacatgtgcatcgtgcatctcatgaggtacaataaataatcgcgtgatgcggaaaacgacccaagtcgaccccaagcgcaggctactccgtatgatgatgctggtagacgaacctgcccgatcaagtgctaggacaaggatgatcgtcaagtggacgtcacctaacaacactaacctagtgttattcaggcaagccccggtgcatttgccacctccttgtgttttaaaatctttatcaccttgtttgatgcattaggtgatatgagttgtgtgctaaaccgttgatgcatttccttccttgaaaattgattaccttccttgatacccgttttgaaaagaattttatgatgcttagccttgctttagcaaacaaaaatgttttgtttttaaacaaaagtgatgcttcagtgggtgggaatg

SEQ ID NO: 71116 - DNA, 815 bp, Zea Mays
atttgtgaataaacaattatagcccatgttacataattgacttacagacaataagttgtacccgagcgattcaactaaaaacacattggagatagaatgctcggatgtaatggctatctttcccaatcctttaaccttgccttggttcccactccaaaataatcgtatcctgggaatccttgttcttgacataggaggtgaacgttttcttctcccctgtcatgtgatttgtgcatccgttgtcgataatccagcttgagcccccggatgcataaacctgcaaggcaacttacgcttgggttttaggtacccaactcttgttgggtcctacaaggttagtcacaatagttttcggaacccaaatacaagtcttgtctccctttgtaacaccccgggttccacaaacaacccagaatgctaatgaactacacttctgacgtccatatataaaatttcggcagcatccccttggcaagattgcataaataagggggcaacagggtataaacatatatcatgacaaaaacatactaagtattattaatcggctagcaagggaagataaacgtacgacctaaactgaattaaccagtgcgcacgactatataaaaaacaaacttcctatgacaataagtttctaattaaatcatggctgcgcctgggcagcgttattgtgagagtgtaagtggacgtgctgctactcccctcattcccaacatgtatcaagtacctgcattgagtaatgcaagagtgagatgacacatctcagtaagtaaaataatatcaaactattcaaccacataagaacattgttt

SEQ ID NO: 71117 - DNA, 461 bp, Zea Mays
gattttttgatatttttctcagcacaaggagcaacaaaataggagctacacgaagtttcacctaaaacagagttcagatgtggtctacagaaaatcaggaagttctctaaaaagagtgcgagaactttgacgaatttttttctttattttcctgaatttttttgacaattttatcgaaaccaaacaggccgtaaaaattttagattttttgaacaaccgagcgataagttatgcctggtttaaggaaggtatgtttaaaacgaccgagatgagacaaccgctttgtatcctttctccttcgttttctttttttttgtttctgttttttttatgtaaccgaaggagaaaaacaaggaagcggcgttgactcggtttgttttttttttctgtttttttacgtaaccgaaggagaaaaataaggaagcggcgttgactcggtttgtggcgtgatcaaatggaat

SEQ ID NO: 71118 - DNA, 380 bp, Zea Mays
acaaaagcaagctgaataatcgttcaatggtggtactgtgctggtcctaggctaaaccatgctagagacgtgagcctaggcacaaaggtagtcactgaaaaagaacaactagcacagcacaaagagaaacaacagatttagagattcagcccccttcttcttcttttccttttttttcttttctattctttttttttcttcttcttctattttttttgcagggacctaaaccctttttttcactatgacaacccaaacaataaagatattgctaacagcccctttaaatcagatttaacaaatcttgttaatatagaaagtccagaaatctctacgatgattgtggagcgctcagaatgaattttgagacaaggtcagat

SEQ ID NO: 71119 - DNA, 240 bp, Zea Mays
ccgatttttcacggacggcgtcagcatgttgtgtccgaagtctctcgacttcggcagacacagctgccgtgagggcccccgacgctgtacggttggcgaagtcagccacctgcagaacacacgtaaggccgcggcctcagcaagccgaggaaaaaaagaaaaaagaaaaaaaaagaaaaaaaaagagagtctagctcagcggacctgactcagcgcctccgtcacctccttcagccggcg

SEQ ID NO: 71120 - DNA, 939 bp, Zea Mays
ctcaatcaacttaagcatacaaccacgacactatatatgaaaaggcatctcaataaggaccttacacaatactagatccaccaattaggctaactaacaagaatagcgaaataacttctcttaactaaatttgatttaataatcataaaaatggcgatggttcacgattcgagcatttcatcaaacacctagagagtgttgccctgctttgcctctccactcaaccctccacgaatacagacacgcacaaacacataaatacacataatcaatcatgcaagtacaagcatcgaccatgaacaaacacaagacgaacagcgggtcctcaccaaggtggatgacgtggtagcgaggacgacatgtgcaagtggagccagctaggatggcaggagagtgcgcaagtgcgtggattctggcctacagcaaggaggagctcgcacggccctggacctagaccggcgtgcagggagagccagaggtgtggcgttggacggctgctgcgatgacttccctgacatgcgcgcaaaacaaagaagatatgggatcgggtcgtggctggaagcaggctgctgcaggggaggggctgtgccatgaaaatagggggatttctagagggggctcgacgacatcctgtgaagaagccagccatggtgagggagagagttgcgcccgctcgggggaagaaggccacatggtggagcagagcaccatggcaataacatggaggagctgggagcacgtcgtgcaatgggatgtgccctgctattcatccacggatagaggcaccaaaaaagggctcggctgtgaggaagaggagtgcctgcacctagggagacgagtgaagggggtggaggtgagggccaacgatggagggaggcagcctagaagggagcaggaaggggtgttgccctgctggcttgaggaagggaggtgttggag

SEQ ID NO: 71121 - DNA, 220 bp, Zea Mays
tggggactcggttaggtgggccgaaatccacccgtggtggcccggatgagtagttttactcttttctttttatttttttgttttgttttctttttattttgaaatccaaattttgaatttcaaattttgtgacgaaattgtactcaaatatttggaggtatgattcaaacatgccatggttagatgaatttatttctctaagaatttatttagtattggc

SEQ ID NO: 71122 - DNA, 67 bp, Zea Mays
gttggtcgccaagtggacgtcatctaacaacactaacctagtgttatccaggcaagccccggtgcat

SEQ ID NO: 71123 - DNA, 440 bp, Zea Mays
catgcaccaatccttgccttgatggccttagatggctatgcacgtgtaccaggtaacttaacaaggctatcacgagttcaacaacttgaactcatcatcccaaggatctcccacattcatgtatattacagtaatcacattcgatacacacacttcggagataagagcagaagactttacaaaatattcttttcatttctaaaactgaaggtcattacataggaagagttacatttattacaagtcctgatatactcaaagtgcataacttattacaatagcaggaaggtaggaaccctccaaagcttatacacaagcctaactaatcttcctccagaactggaaacgccctccagccacaggaacacctagagtactcctcatcacctacaacaacatgggttcgaaaaccctgagtacagagtgtactttcgcaagtc

SEQ ID NO: 71124 - DNA, 353 bp, Zea Mays
gaatttcctcattcttgcatcaagtatattaaataaggagaataatgcgtcatgtttgagtttaattatttgtgcatttaataataataataatattaataagaatacattaataatgagaattgaattaggattaaacctaatttaaagtctagaatttggaaaaagaaaataaaaaaagaaaaaaagacaaaaagaaaaaacaaaaaagaaaagatgaaggaattctgagctgagtctgggcccaaagttgatccggcccaactaactcaccacgcccgctcccatgtgctgatcgaccttgggcatatgcaggtgggaccccatgtcaggtacttctctcgagtgtcgcc

SEQ ID NO: 71125 - DNA, 266 bp, Zea Mays
gtttttttacgtaaccgaaggagaaaaacaaggaagcggtgttgactcggttttttttctgtttttttacgtaaccgaaggagaaaaataaggaagcggcgttgactcggtttttttgttttttttttgacgtaaccgaaggagaaaaataaggaagcggcgttgactcggtttgtggcgtgatcaaacggaatatggtggcggcacgctagggtttgaatggtggaataacacaatgcaaccagcaacaaatgacgtgaaagcac

SEQ ID NO: 71126 - DNA, 1947 bp, Zea Mays
cttttgtcttggcatttgttaaggcaggttcgtccattagcatcaccatgcggagtagcccgcgcttggggccgacttggctcgtctttcgcatcgcgcgatcaactatcatacctaattgaaatgcacgatgcgcatgaatgcatatagacaggaatattacaaacctaaatagtgctacgcgatagcgaattaaacacctagcggcgaggcgttgtacaagttcatacgaaaatactagttatcgatatacgactatgcacaataattacgcttctctagattaaccgaatctaacgcaaacatcacgaaacaacaacctatatacatttaatataattagcctaaacacaacttatcagctaattaattaaattctaaactcagtggtctaaagaatttaaatctagaacaagaataaaagcacatcactttttagaccacgcgactagattaaattacataccactctaagctatcatatatagcctaccattaattttatcaaacaattataattcttcacaagtaatactaataatattattgtttagacattttaaaatactaaatttaaacttcattcactaatttaccatacgtcacataattaacatctcaaacctacccaacgcgactactccaatatcatgaaaataatcacatcgcattcatcgaactaattcaataattaagctaacagaaatatgaattggcttaccatactaaatcaaacttgcaaccacgaaatcgacgacgcctttcagctcagcatttcaccgaaaatagggtgagtgatgcgtcgaatcgcgcttcgtcttcatccacatcgagaattctccgaccgcgtactgatttatttccttctgcgcccaatcttttcggatttttggcgtagacgaggataacgatctacgacttgttcgagctttttgtcgagcgcttggtaaatatcacgatgctagcttcgtcttcactcgactcttggaatttcttgatgacgcacggaacgacgacgagatcgagtctggagcgagctggcgaggacacgaatccagtgagggctctggcgacgacgaagtcacgagtaagggaggacgagttcaatagctcgacggaaacgcgagcacgcgcgaagcccgatggacgaagagcaagtgcgccgcagtgacaacgagcaagcgcgcgagcgctaacgtgagccatgggcaagcacgggtacatcagacgacacccggcgagcacgcagcgaggcacgtagcagcgaccacaatcgaatcggcaaccgaacgttggtgaactcgatgaacacgaccacggacgcgggctggcgtagataggacaacggcggctggcgagctcgcgcgcgcacaaggaaaaactcacgaccacaaaatgagctgggatattcagactcggcgagggaactcgatggcggcgaccaggacgagggcagcagggagccggccacggcgagcagcaaggagtgagggagctagacgctaggccatgggagacaggggagttcacggctgcgcgcacagggaggcgcgcgctggagcagagcgcagagaggtgcgaccggcgctgggagtcgagcgcaatccgagctgggcgagctgcaccggggagcagaagccgaccatgggaggtggcgactaagcaagctggggattgccgacggcgctggggctggacgcgctggataccgagcgcgagtaggaagaagcggaggccgagctgcacggccggcgagcgccatggcggggcggagcttggggcacgccatgggaaagcagctgaaggtagaggaaggagacggggaggagctcggctggagaggggcaagcaccagggagctcagcgcggcagggaggagggaggagcagggaggtaggcgtgagcagggagctccggggagagagatggaaggagctaggatgaccg

SEQ ID NO: 71127 - DNA, 244 bp, Zea Mays
gttcaaaccaaacatttaatatgaagatgaaattgccacaaactttgaatttaaagtggaattaaagtttgtaattggaagggcagaaaagaaaataaaaaataaaaaaaggagaaggaaaaaagaaaatgccgtctgggcccaattctgccgagccgatgcaccgacatgcgggccccttcggtcagtcacgagcccaactcctttagtcgctggtcccacggacccacatggccgattcgcg

SEQ ID NO: 71128 - DNA, 564 bp, Zea Mays
ctacacttctgacatccgtatataaaatttcgacagcatctcctttgcaaaatagcataaaggagggggcaacagtgtataaacatgtatcatgacaaaaaaaacatactaagtattattaaacggctagcaaaggaaagttaaacatacgacatgaactgaattaaccagtgcgcatgactagtaaaaaaacaaacatcctttgatatcaagtttctaattaaatcatggatgcgcttggggcagccttaatatgagagtgaaagtggacgtgctgctactcccctcattcccaacatatatcaagtacctgcattgagtaatgcaagagtgagatgacacatctcagcaagtaaaataataacaaactgtttaaccacataagaacattgttttaccaccatttgatttcgcaaccttcttattacgaaggtgcagcacgaatacaacgtacaacacacctagttaccacacctcgcaggtagaaaccacaatagtaacatagtaatgtcacacttcatatatacctcatgagtgcaaatgtctgcaaatgcaaagatgact

SEQ ID NO: 71129 - DNA, 487 bp, Zea Mays
caaccatcttccttgtttttctccttcggttacatcaaaccctagcgcgtcgcaaccatcttccttgtttctctccttcggttacatcaaaccgattcaacgccacaaaccgagtcaacgccgcttccttgtttttctccttcggttacgtaaaaaaaaacagaaacaaaaaaaaaagaaaaagaaagagaaaggatagaaccagagaacaaacaaaaaaatagggaaaggaaacaaagcggttgtctcatctcggtcggtttaaacataacttgaggtaccttccttaaaccgggcataacttttcgctcggttgtccaaaaaatctgaaatttttacaggagctagttgacaccattctgaggccggccaaacttgtcaaaaaaattcaggaaaataaagaaaaaaattcgtcaaagttctcgcacgcttttcagagaacttcctgattttctgtagaccacatctgaactctgttttaggtgaa

SEQ ID NO: 71130 - DNA, 1561 bp, Zea Mays
cttggttggccaccccctctcctcacatggcagccacccaccatttcttcctcctccctagatctcccccctcccccacgcagcaaggatcgagaagaggaggagcaagatggattgaagaggaagagaggatcaaggagatgttctacccccatctattgcagattttcttggggaaaccctaggtaaggatgggaaaccctaggtaaagatggattgaaggattagtggttggattagatgtggggttaggttttgatctcgaatttaatttctgcagaatggcagattcgacagtttctgttcatacctgttttccgtggtcttagtggcctcaaaaaaataaaaagtctatatatgagtcgtagataatttgtatgtctttctgtggccgagaagaacacctcaatcggacatcagatcagaaagttattgcagtttgattatagcagtttttcagtctcataattctatgcagaatctgttctcttaagagttaggcaattttatcaaaaaaattaaactatgggttagcaaaataagttgtagataatttcataaactttccagattgttaaagagtgcattcatatgatttgtgaaactccagttatgtttgtttttctgtggctgttcctgtttgcctgacaaaaatgagtgggtctgttcactggtaggtttcatcaggtaaatggccgaattggctcttccaactacggagacttttgtagagggataaaagttcttcctgccagtagagtttcatgatttttggttgagtagtttgtgagatatcgaattttgaagttaactacgctgctgtctgaaacagattcagttagttatcttgttagaggttttagaacttgtagatggcagaatttaattatccattgaataccgaagttgtagagtattttgtgtagatactcctagattatttgtttgatatcacaactgttataattttaaagatacaaaattaacaaacagcgatgttgttgtatgtcatgtggttcaggtgggagtctttccaccaggtcttggtttcaagtgtaggagcgatttgttgattgttggcaaatgtttgtgaaatatttgtactaagttttatgcccactagtaggtggctacactccagatcatgcctagtacatttcttcttcttcgatgaaggcaagtgaatgtagcagtggttgtttccgttctgacctgttatttctgttgcctacactctaatattcagaagtattgaattctttcataattggactctatggtgatgctttacttgcttgcattatgctgatgctcaatcatatattgatgatgatgatgattcgagtatgactcgtgagattaattcacacccctgaaggtaaatgaagtattatttgaggttggtattgtatctgaaggtaaatgaagtattatttgaggttggtagtgtatctgaaggtaaatgaagtattatttgaggttgtattgtatgtgaaggaagtgaagtatattgataaatgcagcatgccatatacattgcatgattcacttgcatctgaag

SEQ ID NO: 71131 - DNA, 1041 bp, Zea Mays
ccgccactcccttttccccctgccttcttctccctcacgcagcagctctgcgcgctgccctccatggcgagcagcaagccggcgcccttcttcctccctgctccacagcaacagccaccaacgcgcaggagtcccatggccgccggccttcccttgcggcgagctccttcctccaagctggacgccagccgagctccccttccggtcgccgtttctccctgcgagctctttgctcctcccatggcaaacgtcctctaggcaagcccctgctccatggccggcgcccagcagctcggctccatggctcaagcccgagctccctgcgtctccctcccttgagttctatcgcgcgcacggcagcaaccacaagcagattttcctccctacctcccatggccgacctccactttccctgtccgtagctgctgttccctgcgccctattttttctctcccatgcaaagcagcagcagcaatgtcgcccagctctaggcccctgctcctcctctcttccccacaaaacagcagccgcagcgagctcgccgtcgtccatggcgccccctgcaatcttcccccttggctgttcgatggaatgcccgtgggaaatttgtgttgtgcgcagcagccccgacatctccgcgctctgtcggctcgctgttttgtgaagcccagtggacagcacgcagccgacgctcaccgtggtttgctgtttttgcgcagcccctttgtcgtcgtcgttcacccccggtgagaccacaacgatttttatgttcgattccgcatcgggttattttcctatgattaattgtgtatgtgctgtttggtttttgttttgtggaggagaggaaccctgcgttttgcgagaagaaggccaatcattcaacgctcgtcgatgttcgtagcgatgcacaaaccggaatcaccgtcgttcttgcaaacgccgattgggtttgtttatggtgagccgatggatgtcgctctcgattgatttgattaataaattatatagatgtggttgaaatattttggcggtaggtcgtaa

SEQ ID NO: 71132 - DNA, 357 bp, Zea Mays
taggaccaagagatgacgatcgtgcaagtgatgtggtgccacccacaagatgcagtcggtggacgacccaaggaaggatggacataatcagtggatgctcgccaagcgattacctcccccagcaaacactatcttagtgttaaattgaaggcaagccccggttttatgcataaccgttatatatatgctattttactgcacttaatgtttgtaggcttgtaatgtgcactaagtgtaggagttgactgaaaccctagttgcatgatctcaggaatccttttgagatggatactagtatgctaggtcaaatagttgctttatttaattaggatctcggtagaagacgagtgatttttc

SEQ ID NO: 71133 - DNA, 71 bp, Zea Mays
tagcgcacaaaataacttgtataaaattagtaagtctacttgttggtcctaaattgattgttttaactcta

SEQ ID NO: 71134 - DNA, 433 bp, Zea Mays
caccagcgcagggagcagctagcagccatggcgcctccacctcccagcgcccagactttcctctccagcgcgccccctccaggcatagcggcagctcctcctccctctgcttcgtgcgcgcaggagcagaagctccatggccgccgagcccccttccatggtcgggcgtcccttccctccggcgcgctgaagcacctcctagcgacctcaccttctcagggcaggagcttggggcctcccatggcgccctcctccctggtctcccttgcgcagggcagccatggtcgggctcccctggagcaggcgctcccagcagccatggctccctccctcggttgctcctcgctgtttcttcccagggaactggcgcaggggacaactccatctctccccttggcgccaccttcaggcagggcagcagggagctcgacgc

SEQ ID NO: 71135 - DNA, 511 bp, Zea Mays
ccgccacaaccattcttcctccctgttcacagcagcagcacgccagcgcagggagcttcccttccttctcgccagcgcagggagcaactagtagccatggcgcctccacctcccagcgcccagactttcctctccagcgcgccccctccaggcatagcggcagctcctcctccctctgcttcgtgcgcgcaggagcagaagctccatggtcgccgagcccccttccatggccgggcgtcccttccctccggcgcgctgaagcacctcctggcgacctcaccttctcagcgcaggaccttggggcctcccatggcgccctcctccctggtctcccttgcgcagggcagccatggtcgggctcccctggagcaggcgctcccagcagccatggctccctccctcggttgctcctcgctgtttcttcccagggaactggcgcaggggacaactccatctctccccttggcgccaccttcaggcagggcagcagggagctcgacgcccctgtgca

SEQ ID NO: 71136 - DNA, 734 bp, Zea Mays
ctcctttgcaaaattgcataaatggggggggggcaacagtgtataaacatatatcatgacaaaaacgtactaagtattattaatcggctagcaaagagaagttaaacatacgacatgaactaaattaaccaatgcgcacgactagctaaaaaacaaacttcctttgacaacaagtttctaattaaatcatggctgcgcctaggcaacgttattatgagagtgaaagtggacgtgctgctactcccctcattcctaacatgtatcaagtacctgcattgagtaatgcaagagtgagatgacacatctcagcaagtaaaataatatcaaactgtttaaccacataagaacattgttttaccaccacttgatttcataaccttcttatcacgaaggtgcagcatgtatacaacgtacaagactcctagttaccacacctcgcaagtagaaaccacaatagtaacatagtaatgtcacttcatatatacctcatgagtgcaaatgtctgcaaatgcaaggatgacttatgccttcatacctctaaggatatgaagtcacatcgtactcctcctcgggcaacgtacgatgctaaaaatgtactggtacggtcggaccataagatcacgagataactttagaatgcaagatggatgatgcgatgtgcatgacatgcctacaacacttcatataacgtgattcaaaaagatacttcaacttcatccaagatgggaatcaac

SEQ ID NO: 71137 - DNA, 351 bp, Zea Mays
cccacgaaaaattcccagaaatcactagaactactgctgttcgcccacccactaaatttctggacagcacctctaccaattcgcatacgtaacatctattcaatggaattgcagcacaaataaacaagagataatcacaaaaatcaccttgaattctccccctttccttcctcccttcttccctccaccaaaaccaaatggggacttgcaccacgcgacgtagatccaagcggcaaggaatgacaccttggagaggaggagatggggggggcggctagggttaggtggtgtggctgcaaacacttgggaggagagggagagaggggggcggccaagcaaggaagagggaag

SEQ ID NO: 71138 - DNA, 994 bp, Zea Mays
ctactatacatgaaaaatgtgaaacaacagattttataatttttctatctttctctttgtgcaagagcaatcattctagaatttggcaactttttgataagggaatgagtggtagaaattcttggattatatggcctttttcatggggtagggggtaatgtgtgttaccttacatttttaattgatatttatatttttctctagtggtttacctcataagtaattgggtaaaaatttgttttgtccactattacacaattttaggcttttcatgatttaattaaaacatggacattgtggtgaataggaaatcgacgactggcacgaaaggcatgacgctgggcataatgaaacgatggcgtgcctagatctcgtgtcgcccgaccatgcccgcgaccaatacccaccacacttccgctgcgcacagtgatgcgacgactagggccatggcgagcaaggagctgggcgggttcaacggtcacagacgagcgccaaggagagcagtgatgcggcagtggcacagataagccggagcaggagtggggattcggatggtatggcatgctggggccatagccgagcagaggggctccactgcgtgcagaggagcgggtcggactcggcggaccgatggagtagcagcggtcagccatgaccggacccgaggcggccagcccccaagccgagcggcgcgtcgagggctaaacgacagcagggagatggatagtcggcgctggagcttgacggcggccatggagggactcggcagggtgaaacagagcagaggctaggggaggaccgcggcgctgggaagaaggctaagtcggagctccgcagcgctcagggagaacactgagctcgcacgtaggggaaggggccgagcagatccgagcgccatggagggacctcgggagagggagagggtcgcgagctggaggagctcagctggatgctgactccagggcgcgcggccgagcaggagccagggcacgcg

SEQ ID NO: 71139 - DNA, 243 bp, Zea Mays
attaaatttcgcatccaattctttccggctttgccggattcgctggttttaaaattcccaaattcggctttgaaataggacttctcattttccaaacatttattctaattttagggcaaacttgtagaaattctagaggacgcatcattgcacaaaaaaatctgaaacttggtgtgttttcttcttatgtgctgctgcaaaagaaaaaaatctaaaaaaaatatttgaaaaaaatcgcaaaaa

SEQ ID NO: 71140 - DNA, 208 bp, Zea Mays
cttgggttcctcctttcctccttcttttcttccttcttcctccctccaaactcccatggaagactcacacccacacgacggacaccaagcggggaggctccaccttggaggaagaggggggggctagggttgaggggtggcgctgcaatcacttggggaaggaggagagggattggggcggctacaagagtggaagagaggaagagag

SEQ ID NO: 71141 - DNA, 355 bp, Zea Mays
agtaggttagtgttgttagacgatgtccgcttgacgaccatcctttgttccgatacttgctccgtttatccatcttcaggttaatccatcaacattatcttgcggagaagctcacgcttaacatcatcttgtggtcgactcagctgtggttctccacatcacgtggttaattcacgtacctaaatgatttgcataatgcacatgaatgcatatcaagacgaatatcgcaagataatattacgattttacacagtaaagaattaaacacttaaggagaaggcatcacgaccttttgtaagcaaacgctagccatcgccatatgaccaaacgcaataatcacgcttctctagattaa

SEQ ID NO: 71142 - DNA, 1461 bp, Zea Mays
cttgatcctaaatattcgaagtagcaatcaacatccattaaccaaattgtcataataacactagaaaatctatcaactagccgatcgaaatactaagcctatcttttacgtcatcagctcgcccaaatatcacataattttaatctatctttcgcattactaactccatcgtacttcacatatatttaactctaccataacgcgcctgtgctaaacacaaagatcagcacaattaataaatctagccaatccaattatcatacccactatctaaagtaacgagttcgtttaccaatatcaagtcgttccactaccacggacacggcgacaaattctacttcagatttttcgtcgagcactaggtagatgtcacctaggggtcttcttttcttcagtaatcaaatgctgaagatcttcttctggcaagtactggagtggcatttgacaaagcgtgagtgcgagggcgaggatcgcaagtcgtcgacacggtgctgcgaccaagggtgatggcgaggcggagattgaggatgagcacatgaagggaaatgacgatgctgtcgcacacagcgtgaaggcgaatgacaatgacatggatagtgttggacgggaccaaatcagttcagagcttcaaatcgacgaccaacagatcgacatcgggactcaacggcagcacaacaccaccacgagacggaggcgaactggcaacgacggccttggactggtgcgggggctgacagtagggaactccgcgatgggcagcaaggctcgacggcgaatgacgtgatggcaggcagggagagagtgtggactggggaaagactcagtgagcagcaacgcgagaagcaaagcgaggttgcggccgggtggactcggacacaaacacacgcagcgacctcatcgcgtccatcacgtgtgcatcacagacaacagggaggagttcagtgcagtggccatgggcggacagaggagcaggcgattcgatggcgagctgcagcataaaccaaggcaagaccgcgaccgacgagttggagcataggcaagcagcaggcgcgggcgagcagagtagacaggacgccgggtgtcgcaggcaagctccatggatggacctagtcggagcaaggcgcgcatagggaggagtagaggccgagctcggcgaccatggctgggatgcgtagatagtagggggcgagcagaaaaaggactcggcgagggagctcgacgcgccgtggcgagcatagggtcacggccacgcgcgcagcagggagaagcttggaggcgacaaccatggtgagcactggggagaagcatctcctactgccggtgtccatgggaagggaggcagggacggcggcacaagagagaaggaacagggagccgagagggcggggatgctcgaccatggggagcaagcagcgggcgcgactgtgagagagatggagggagaggagggtgctggagact

SEQ ID NO: 71143 - DNA, 225 bp, Zea Mays
cacgaaggcaatcgacagctccccggagacgcggcgaggctcctcgcccaggcgcaatactcctggcgcgacttcaacgcggattaagcagcgacggtgaaatctcccccctcagctaattgcacgcgacggtggtgaattggttccggtgctcgagtccgtgcaagagggtagaagaggggaggaaaggtggtgcatgatagttatatggtccgtggaggatgg

SEQ ID NO: 71144 - DNA, 442 bp, Zea Mays
cacatatatcattaccaaattatgatcatccacaatattagacaattgagaattaatactttcaaacaaataaacttcatcatagaattcaatgattaacataattaaaacttatgcatactcaatgacagggaataggatgcaaaccaaacggtagcaaccaccactgtatttacttgcctttaccggaagtttgggcaaatccctaagtacgatccggaagtccaccaccttgagttccacctttttcctccttccttcctcccaccaattctccaattgaaacttgcacccacacgaagaagatccgacgaggaagaacgacacttggagaagaggagatgggggtggcggctagggttgagaagatggctgctgcaaaaaacttgagaatggagagggggcggctgcagcacttggggaagagagaagagggaagagg

SEQ ID NO: 71145 - DNA, 2859 bp, Zea Mays
aagaaagatattataaagtcaaggagtcaagtaagaattatcaaggagttaaacaagaccaaaacattattgttaatgaccaataatgaaataagataaccactaactggtgaagcgaggataaattatacaaccaaggatatgagaaagtttttttcttctttttttaaggatacaaaatacaagggcattatcaagtagagagacaaagggttcaatatctcgaggtagatattgtccaaggatgacaatacaatggcaagaaaacaaaagtataagaattaaatagggagaaagcattatcaaggagaaaagtagagaggcaaaagtttattatatcaaggtagatattgcctaaggatggcaatacaatggcaaggaaacaaaagtataagcagccaagggttatatagcaatattagagattagaaaaccactatgatataatatcgcccttaccgaactagtcgaaaatcttaatgctaaagaacaatcctatcaccttagccaagaagtcaaataatagatccaggggatccataacaaaacttcttgcggattggggataagacagagaatagggcatcgtcaatagcttcgaaagagtttcttctggcaatcttcgcttcaagttccacaatcctagcttgatcatcttgcaatgcttctcattagaaccttctaatagacgaagaatcggacaagaagggttgaagataaaagagatgagttttgatatgaagtaagtttttatggaggaaaatatatcaggctttgaaagactgactgggcttttcatttctaactaatttagcgacctacggtcacattgcctctgataccacttctgtcacacccgtttccaaagggcagagccgggtgcatagcatatgtgtgccaggatctattttcacatatatgttgacgtcacaagtgtaatatatcaaaagaacaatgcatattagcgtaaataacgattatattaaaatattacacttcgaacagacataatgtcttaacctttattcatcaaagtacagcgaaacaaggacatccatccacaggaagatgtccgggggtatcactagactagcatccatggagttcaacatcatatcttcatctgcaaacttctgatcaaaattaagcaagggtgagctcacttatggtcggggctcagcaagtgggggaaaaactaatgcaggtttaataaggtgaggctaaggttgagcagtaagcattttagttggtcaacattttattaacaatacctgtcttactaataagtgtgaatcccaagtattcccattaagcaaaggtacaagagtatttcaaaaacacttaagtgaaaaccacttaagcaaaccattggcagatcatcggatctcgatttatttccatcttcaagttcaattatcatgtgaggagtccaggctgctcataaccgtgagcacggctgatatatcaattttacactctgcagaggtggcacatctttacccatgagtcgcgattcccttctagcccaggttagctagacccgtattcacttccgaggtgaatggccagggtctcattacgaggcttctccctagagtcctcattacgcaaatgctagaaatggtcaaactgcataaggcacacctaacgtaaccaacttatagcccagactgcagggtaaagctttgggaactatgcccgtatccaatctgcctgagccggaactataagagcttgccaggtgcccccgttcctgtcgaccacgaccagcacccaacataagacttccctagttatttagccaagaccagagccatgatagttctcatggtagcactgttttcccgggtggtcactccatattccaattaatatgcaataatcttgtttaaccatcgggttaacaacaataatgtaaacttaccatttggaacattaatatcatcagcgggagtgactgcataaagttaaagttgtagcaatagcatagctacgaaggtaaagtataattcccaggtttgatcaaggaataaggttggaaaggttatctaaataggtaactcgtcaaattatgcacatatatccaaaagtataaactttattaaatgtattgtttgggatcaaacagagtatggagagggagaagtccacttgccttgcttattgaaaacttgagtttcttccacggatcggaatagatcttgattcttaactactagatcaaccactgaatatcacacaaacaaacaagaagaaacacgcaccactcaataacatacaacattcaccatacgcaaagctaaaagaaagcttaacgaaaagagcattcgcttttcaaaaacgtcgcaagtaatggttataatacgaggtattcttttcaaaaatttgtgatctgtactttataaaacaagacatgagcttaaaagatcttaattaaaatatacaaatattaggttcaccaaattattcttttaaaaatatcatatgtgatatgtctaagattaagggtttataagacaataaaacacgttataacgatattaaacatttttaaccttttagaatagatataagttatatatctagggttaatgggctactaattacgttattaattttagaagcattatggagcatataattcattgttaaacctatcacttatgataaattaagatataagtctaaataggttttatgtgaaaggtcattattattaaacacctacttatggaaagttatgatatatgccttaaatgaacttttgtgtaagagacaatgaacaaacaactgtatcttatttttattagaaaacacatagcctatattattatattcgaagtcaatatataaagtaac

SEQ ID NO: 71146 - DNA, 2952 bp, Zea Mays
atttttgagcacggacaacactatgaataactatgtcttatttgtggttaaaatatgaaatctttactttaatttcttatttagaaaaactacgcatagatcagttataacaatcactaatcaaatttaaattacaacacacacgtagattcttgcagatcgatttcatgttttagcacaatttatgaaacttaaaaaaacaatgtttatttgagtatcaaataaatattttaaaatagaaaaattgtcgcaaggtctataaacgattaaacatatacttaaattgatagcttatgattttctttttcaccttcttataggttcagctcgagcagagcagactggttgtaggcttcagtcaaaactctcgacaacggcgaggtcgctgcacgagagatgcacggcgaaattccggtgtggagctccacgaatggagaacggtgtggacgaactccggcaaggcacgacggcgagcggtggtgctgctgcgcgggctctagtacggtggtgttgacaatggcgaggttccggcgaggcggtccggcgtggtccaaagagcagggcgcgaatgtgaggggcgagggagaacttgggggaggaggctcggctggggagggagagcttcacggcgtgaccaggcttttatagagagcaggagggagagagagacgccgagaggagagagataagctgcgggcatgaattccattcatggcattcaaggagcttgaatggagggagaaatggacgcagtaaactccattaacgccgagaatcggtcgcgcgggatcgcttggatgttggagcgtcgtggctgctcatcttcggggttgggtgcggggctcggtgacctgggcgcgttggcggctcggcagcggggtctcggtcgacatcgggtcctgggctcggggctgggtagcgagcggtctcatggcacgggcaggggcgctggtgcgcagggcgcaggggaggaaaagcaagggacaaccattaatgagatagaactcggtggatgaaacggtcggtaccagtgggagagagagcaggtgaggcaattgcgtagtggggaggggaagagacagcggctgctccaccggtgggcgtcgtggggagccagggagccggtcggctacagcttggtggcgttctgcagtacagaatatccacgatcgctgctgaaaacctggaacgaagaagaccaaacagacaagtggggccgcccacaacgtagtgagagaaagaagagggagagcagatgatagggacctccactgctacggcgaataaggaaggggtgcgcttgggcctagtgccgagcgtgagtttttttaaaaaatatatattttctttttttagaatagacgtttataattatatagataaaatatatttaaatattataacaattatagtaaatttagaagataatattttataaaaaaatacctaattttaaagaatagatcaacttagtcaaaagtctattatttaaatagattgggctccacgaaaaggaaatcgataaaaaaacaatttctgcaaataccgaaaagaaattattaacctatcaaattgcatattttcccaaaattattagtttaacaattctttattatttcaacaacgaattattatttaattaaacaagatctttctcatatagttaaatccaaaaatttgatttgaagttcaaatcaaacaaaatgtatgcttcgacatgaatgcatcaaacatttgataaattttatctatttgagaaattgttcaatttagttataccatcacttccattatttgaaaacataaatattttcatttctactaaaaattaatattatatattagttacttttaggtgatggatttagggtgttacagcatctcataccttcatcaatagagcctttgttgtgaagtatcaactaccaatggaagaagggaaagatactttctgtatacaatcccatggaggacgcatctatactaaggaaaatggtggagaatggacccataaatctggagggtcacatttttccgaccaacttgcttgtccttcagaagcaggatatagatgcgatccttggcatgaactggttacaccaacatggagctattattgatacattgcaacagacagttcagtaggattcacccaatggtagttctatattgctaatccggttgtcgactcctaagagagcagttgagagagtatgtgctgtcaccattaaagaggtaaatgatataccgatagtcagagagttttcggatgtgttccccgaagatttgcctggtttacctctagaaagagatgtggaatttgtaatcgaattgcagccaggtaccacacccaaatctagaaggtcatacagaatgccacctaaggagttagtagagctaaagactcagtggcaagacttggttgataaaggattcattcggccaagttcatcaccttggggctgtgacaccccagtgtcacctagggtttctccttaggactgactcaaaacctttataacatgagaacccaaaactacggaaaggacgtcataaattaataacaaaggtttaagtaagtctttttcatcttaataaactctctttaatcatgacatgcacctcaaggaaagaagaactcacaaaccctaattaatcctaagtgagccacttaagcacataaaaggatattgggaaaagacttaggaaaaataaaatattttgatataaatcaaataacaaagttttaatgcactaaatgaccaacaaaacatagtaaggaggtttagccatttgagtttttcaaatttcccaaatcagccgttgatctaaggccctatgggcaaattcagaattcagaatttcagaacccttttacaagttcaaatgtgttccctattttacaaaactcgaaaccaaaatgtccaaatataaaagtggcgccaaatttcc

SEQ ID NO: 71147 - DNA, 974 bp, Zea Mays
attttgttaattgggcccgatggttttgaggtttggaaaaatgtgaacatgtttgatcttgaaagagggctggttttgaaattgagaaaaatctgatttttcttttatgcccttctctttggtgacctttttggggtttttctgaagcatttttggggtcattctcttactatattttgtagggtattaagtgtactacaacttttataattagcccaagtcatgataatgtggtttacatagcctttttgctatacccccctctaggggctccatttgcctaaagggatttgaattagggtttgagccattctctcctatttaggtgcatgataaggccaaagcatgacttctaagatgggttacacctacttatgatcttgacccccaagtttggtgtattttgctcaaactaaaccacatgtgatgatgggttcaatagtgtaggcttgagtgaaaaccctaagtaacacctggggtgttacagccctccccccttaaaggaatctcgtcctgagattttgggtaggggtcgtttagagggggtaccaagaaggtgtgctggggtgttgcattttcctttatccaagtttctctagttaactgctcttcgattgtcattctctttgcaacttcagaaggaagtccttttaaagtcattttcaaagcttacaatacctttaacatctaagtttttcttacatttagattcaaagggaaggtggggttttttggattacgtaccgactcctttgggcagaaagtcggggaagcgagaacgtagaaaatcctcagtctcccacgtagcctcttctactgaatggtgactccactgaactttaacatcctgatcgaccttgcccacgttgatttctccttttgatccaataccttgatggggtgctcttgatagtacaagtcaggttctatctccaattctgttttagatagcacttctgtgggtaagcggacga

SEQ ID NO: 71148 - DNA, 5803 bp, Zea Mays
ttcgtagctgagatacgtggaatacatcatgaactgctgacatatggggtggcaacttcaattgatatgctaccatcccacaagtttctttgatctcatagggtccaatgtagcgaggagctaacttgcccttgattccaaatctctgaacacctttggtgggtgacaccttaagataaacatgatctcccacttcaaactgtagaggcttcctcctcttgtcatgatagctcttttgcctggcttgagcagcttctaggttcttcttaacgactctgaccttctctgcttcaagtaccaagtcaggtccaaatatttccctctctccagcttgagaccaatttagcggtgtcctacaccttctcccatacaaggcctcgaaaggtgccatctttagactggactggtagctgttgttatatgaaaactccgccaaggaaaggcacttgtcccaatttttaccatagtgtagcacacaggctcgcaacatgtcttcgagaatttgattcactctttctgactgaccatctgtttgaggatggtatgctgagcttcttattacatgggtcccaagtgacttttggagctgctcccaaaagcgtgccacaaacaatgctcctctgtcagatacaatagtcttcggaattccatgcaaacacactatttgatcaatatagatttctgcatacttctctgtcttgtgggtggtatgcactggcaagaaatgagttatcttggtcaacctatccacgatgacccaaatagaatcatggtgtcgggaggtattgggcaatcccacgataaaatccatgcaaatacccattttcaagatggtatgggaaggggctgtaaggtgcctgctaccttcaaatgactggccttgactctctggcaagtgtcgcattcagatatatacttagcaatttcccttttcattttggtccaccagtacaaggatctgagatcatgatacatcttgttactgtcggggtgcatggaaaatttgaaaaggtgagcctcatccattattttctttctgagctcggggttcttgggaacaaccaatcggtctccaaaccatagaattcctttgctgtcttgacggaagcatttgtatttgtccaccttttgttcgatcatttccttaatgacttgaacacccttgtcaccgatctgtgccatgactatctgctcatgtaaagtgggctccactgaaatataacttaaggcaccggaggaaacaaattctattttcagcttgcacaactcatcacacagggtggtgatttttgcatccatattcacacagttgcactgggccttccgacttaaggcatctgccacaacattggctttgtcaggatggtaatgtacttccaaatcatagtctttgattaattctaaccatcttctctgcctcatattaagatctgcctgggtaaaaatatacttgagactcttgtgatcagtatagatattacaatgagttcccatcaagtaatgtctccgaatcttgagagcatgaactacagctgctaactccagatcatgtgtggggtagttctgctcaaggggtctgagtgctctggatgcataggcaatgactttgttgtcttgcatcaagacacatcccaatccagtaccggaagcattgcaataaacctcaaagggtttggtgctgtcaggctgagctagtacgggtgctgtcgtcaaatgttgccttagtgtatgaaaggcatcctcacatttctggctccattcatatttgactcctttcttcaacaattcagtcattggcttggcaatcctggagaaatccagaataaaccgtcgataataccctgccaaccccagaaaactacggatctgccgtacagtggtaggaggtttccaattcatcacttcttggactttcttaggatcaacagataccccatcctgagaaatggtgtggcccaagaacttgatttccctcagccagaattcacatttggacaatttagcatacaactgatggtcgcgcggtctctgaagtacggtatgcaaatgcttagtgtgcttggcttcattcctggaataaaccagaatgtcatcaatgaagactaccacaaacttgtccagctctggcataaagactaagttcatcaaatacatgaaataagccggggcattggtcagtccgaaagacatcaccaggtactcataaagcccatatctagtagagaaggccgtcttgggaatatcactggccctgatttttatctgatgatagccagagcgaagatctatctttgaaaatacctgggctcccaccaactgatcaaacaacacatcaatgcgggacaatggatacttgttcttgattgttatcgcattgagagggcggtagtcgacacacaacctcaaaatctcatctttcttctttacgaataaggcgggacatccccatggagaagtacttgagcgaatgaatcccttgtccaacaattcttgtaactgctttttcaactccgccaactctgctgggggcatcctataaggtctcttggatataggggcagttccgagttgtaattcaatcgcgaactctatgtctctgtcgggtggcatccctggtaattcatccggaaaaacatctgggtagtcacagaccactgggattctctcaaccggtgattctatcataacgaaggcacaggaacgggtacaaccctgatcgggcaaatataatgtggtttcaccacaagtaggcgagtgcacctcaatggcccttgttgcaatatcaattactgcctaatgtcttgttaaccagtcagttcccaatatgatatccacgctatccaatcccaaaatgaggagggtggttttaattatcagactaccaaactttataggcacatgcctattgatttgataggtggcaaccctgcctcctggtgttgaaattgtaatacctccattggtgtgatggaaaggtaactggcatttggcactaaattttgtactgataaaactgtgtgatgcaccagaatcaaaaataatgattgcaggataattcaaaacggaaaagataccagtcatgacgggtgctccctctggaatgtcagccatggtggtgaagttcagcttgccttgccttacttgcaccttctgcctcttgccttgattttggttggaattctgcccctgcctctgctgatttctggggcaattcttggcataatgtccggtgttaccacaagtgaaacacctgttgtcattggcctgacgatactgctgctgctgtggctgattgttgttcctctgaactgggagctgagagcggttgggtgcctgctgctgctgctgtggtcggatcccccaacgtccttactgctgctgaggtcccctgttctgagtgtcagatacaatcctgaagcgctgaggctaagctgatgatcctgtcacaggggtcttcctcttcttttctgccttatgggctgtgatgcagtcctcctgagaaatggccatgttgactaactcattatagctgttggcccttactgggttgagatggtcgcggagcttagtgctgaggcccctcctgaacctgtccctcttcttctcatcagtgtctgcgtgatatccaacatactgacacaggtcattgaaggcctgagcgtactgcaacacagtatgattcccctgagtgagtgccagaaactcattaagcttgtgatccataatgcctgctggtatatgatgccctctgaaggctgccttgaactctctccattccaccatgtggtcaactggctgcatagcgaggaaatgatcccaccatgttcgcgcggtgccgggaagctgctgggtggcgaacctgaccttagccacatctgagcaaacttcatttattagtggaaatttggattccactaccctaagccatacatcagcatcaagtgggtcctctacccgagtgaacaacggtggctaagtgctaaggaaatcctgataagtggacgctgctgggggacgctgatggtgatcactaccaccataatgctgaggtggcggctgacgctgagccaactatcgcagaatctcattctgctgagccatcaactcttgcatggtaggaggcagtggcggtggtggaggaatacgttcattctgtccgtgacgcgctcttcctgccatctgcaaaattaaggatgctctcagaaccatatttctaatgtcagggttcatacatggtgaaagagtcgaaagggtaaaaccaatattttcttgcataatttataaaagatattacatggcgtaaaacttttcttcttaattcaaaggtgacatcgttcaccctccatacttccaaaagagtttgttacgattacatcagtgactccaaaagactcaactctgtctagcctagtaccccacaggtgcaaaagctaagctagcttcgaggagttctaccgccacacacatctaactctatccctgcaacctagtgagcaaacgaggcaacactcgactcagaggaaggtggtctccctgagccagcagtgtccaagctagatgcaggctccgactcctctcctccctcgatatcgacatcctcattggcctccatgtcctagatctcctagtggtgcatatccaaatgttggttagcttccgcaagttgctgctgagtgttgattagctgatcctcgagaacctcaatggtgttctccctggttcctactagctcctcaagctcttggatctcgttggacatctgttccacctgcaggtccttttccaccatctcagtggataggtctaccacaagttcctctctgttatccaaggtgatcttggtatcctccacaaatgcaattagctgagacattgcctctcctcgcatcacttgcagacgatacagggcatccatgcaccgcaccgtcaagtgagcagtctgcccggggtaaagagcccatatatccttggcatgctccactcggtccttccacattgggtcgtcctccttctcagcgggaaacaagccaatgggatgagtagatagctccaaggggtgaaaaccacagaaggtcgtcagcccatggagagcaatggcctcgatagtatccttagcccggtatccaaaagactcggagtctaacgaacgccagcctggctgtaagggatgtggctccagggtcatcctcaccctacagcgaggcacccggtgcttctcgaacagctgcaccgtgtactggggaggcgtcgtgtaaccggctccctgaagtacctcccacaagatacggggaaaaccctctcgtgcaagtccgtctgtgtgggaatgtgcgttccctccatccgaggatccgtgagaagtcatctatgtacggttaagcgtaagcgaaaaagaaaaagaattataaaagtaaaaaggggatcatggcttggcctattgaaggtcacaataaggtcactgaatgtacttaatctttcattatcatgtatttaaagttcttacccaattaccaagtagtttaagtaaggatgcatgcatgctcgtcctaaatgacctcatttcaacttagagggaataggaaagaactcccatcccttatagtagcctgtagggcttactcaaatagccacctagctacccctctactatcctaaggcttcacgtcctaggtctatccttatcgtcctaacgatctatccaacatttgtttctaacaagttttacttttgaaaaggatggtatttacagtttattgattcctctgtggtggtacgagctccgataccagctgtggcggaaccgccc

SEQ ID NO: 71149 - DNA, 950 bp, Zea Mays
ggccgtgcatgagggcgggctttatagccactcgcgggcatgacacgggtgtgggcacgggggcggccgagggcacgtgggggcgcgcgtgctctgggcgcgttcccgagtgcctacccatgtcgaacacgtggtggtttggttctgccagtgttcaaaggcctgtttatcgccttagcgtgtagatctcagcaaaaatcctgtgtaaggtctcttctttgcaccatatcctatcttttccatgtgagttccaagcgaagatacggccggggttgagagatattgtggtgtgaagttggctctgtctgagttgtccaacccgagacaaaaaccatgtcaagtcgtgtcaaacgacttagggtggggttcaaatttttccaaggtgttctaggggtctttaggcgccattttgttaattgggccctatggttttgaggtttggaaaaatgtgaacatgtttgatctttgaaagagggctggttttgaaattgagaaaattttgatttttcttttatgcccttctctttggtgacctttttgggcttttctgaagcctttttggggtcactctcttactattttttgtagggtattcagtgtactataacttttataattagcccaagtcatgataatgtggtttacatagcctttttgctatactcccctctagggctccatttgcctaaagggatttgaattagggtttgagccattctctcctctttaggtgcatgataaggccaaagcatgacttctaagatgggttacacctacttaggatcttgacccccaagtttggtgtcttttgctcaaactaaaccacatgtgatgatgggttcaatagtgtaggcttgagtgaaaaccctaagtaacacctggggtgttacaactgcccgagcctcggacaccgcggccagctccctctagcaacttccaagctacgccag

SEQ ID NO: 71150 - DNA, 8472 bp, Zea Mays
aaacccatagtaaaataactactaagtattaatggctgaagatttgtacaaagtcatgttttaacatctaaatgccagcaaaaataagttttagagaataaactactgttaaaagaaagttgttgttcaaaacaccccctctgccctaattttttataattttgtacagagagaacccctcactttttaagccccacattttgcgatagagcattatacaccaataagaagacactgtaaattttgcagaatttttagaaatttattaagctatcttgtagttcaaacccaccttaaaagcacaagaaaagtatagaagaagagaggaactagaaagattaataagtattaccccaacatgacaactaagaatattgttaaaaatatccataagatataaagaagaaaatcagtagaacactaaaaatgggttaaccattcagtaatcaacttgaccctaagttgctaagtgtaccacaaagatctccagtagtaagaataagctctaccttattaaattgatcattccccatcaaatcttaattgctaaattacatatcatgccatgcatatatattacgcattacattcattagattgcaatctcgctgacagagagtacgtgcttatccctgagcaaggagctatccaccaggaagaccaggagcaagctcccgcaactgccatcgaggatctccccgcggccccagcaattgaaggcaagccccggtattatgcatagccatttatatatgctactttactacacttaatgtttgtaggtttgtaatgtgcacttaagtgttggagttgcttgaaacccctagttgcatgaacccaagattcctttttgagatggatactagtatactaggtcgagtagctactttgctaaatcaggatctcggtagaagtcgagtgatttttctagcactcgcgcgaggtcaggaattgattgtattcatcttgataacaggatctatgatggtctatggacttggatccagggaggatgccttttccatgagatgggaaaaggaattaatgattaatgtgtggatacctgagtcaagcgtttgaatttactaagcacatgtcgggaaatatggtaaccggtaaacctagtaccttagtgaagccagcgcggactttacccctcacgcgacctgagaatgggtctcccatgctagctatggtgggtacaagtacagtcattgcacggcggcagccggggtcagtggagcattgcatgccaaggcggtgaggcctggccgcgaacggggaatcgatggggacggttgatgtgtgtggggatagagtatccctacatatcgtgtgtttaggtttaccttgcaaggttttaaaactcgattcgaatcgtctgcttctcgcagctaatgagactgcttgaccccttgtcctacattgagtaagaagtgaaatgaggctttacatgagataacttgttgactgtattaaatgattgttaccatgtatgcttagaaagagcaaacttagctaaaataatgatattagaatttgaaaagctaaaaaaattggattttagactcagctagtgcttttggcaaactaaaccccttggccaaacagctgcatggtctagatgtagaggagtagattcctcacaccgggtaagtctagctgagtattcgtatactcagccttgcttgtggcataatttttgcaggtacgctccaggatatggttgatggtgtaacttggcctaccaccctgccaccgggttggacggacgagtgggatgctgctccggcaggagaggagcaggaggtgtagtgggctaagccttgccctattcctcgctttcgacgatatcgatgatccgctgcaatttatttggtgaacttaaatcagctacttgaaaaactccgatttatgtaataactcagtactttaattcgaggtctttatattttattgtatttcttttgtgactcaccttcgagtgagtttgtggtatttgattttgattaggtggctctatcagattagatctgagggaccgacgggttattccgatttaagtgtgttgcggcccttgaggcgtgacttaggcatttaagctggaataatttgggcggttctgccacagctggtatcggagcaaataccaccacagagaagagcaataaaccatgaatgccaactttcaaaaatcaaaaacttgtttagaaactagtgtgaatcgtcaggactagaacgctagacctaggacgaaaggccttaggaatagtgggagaaataggtggctaattaagtaggccctgtgggccagtatttagatttttataggatgccctaaaaagcaccctttgatttggagaggagacgttattttcagcatgcatgcattataaaactaaaaggattagaaattaaagaagtaaaaaattgagctaatttgcatccttttaaaccacccaggctcttttattttcttcttccaccataatctttacatctgatacccttccgcagatgacttcacctacccccgccagtggaggagacactcgtttcagctctgatttcctttctcatgatggctttcctttcatcttgtgggaagtgcttaactccgtcagttaccctacgccccctatgtacacggtgcagctatatgaggagcatcgggtaccacgttgccaagtctagatgactctggaggctcacccccttcagccgggttggcgttctcttgactccgagacgattggattcaggacggacgacaccactgaagaggcagctatgaagaccctgacgactttttgtggctaccatcccttggagatggtgatgcacccactgggactcttccctgctaaaaagaaggatgacaccatgtggtgcaaccgcgtgagtcacatgaaggacgtatgggcgatgtaccctaacttggttgggagggtctctgcttagtgcatgagtgcgctgtaccgccttcaggctctacagagcgacgctatggcgcatcttgcaaacctcgatcaaaccaccaagctcaccctcgatagcctagaggacttcgtggtcaacttgtcctccgagttggtggagaaggacctagaggtggaaaggctgagccagcgcatcaccaccttggagcagcaggtggagatccaagacaacaccattgatgtcttggagaaccagcatcatgatgtgcagcaggaacttgaagaagctaatgaccacctagacatgcatcacctggaaatggaggccaatgaggccggaagcgattgagaagaggctcctgaggagttaggactagcccctggtgccaatgtgactgcctccacgatgcccccttcacccgtgtccagtgtcgcttccactactcagggttgatgagtccttttgacattttaggaggatagaaacctacacgagcttagtaatgtcagattttggactaggcttacaggtacttcccctaattgatgtaacccttgagaacttttgagatatgtgggatgtttgtaaccatgttatcctcgttcaaacttaatattatgattatgacaatttccttccatatgagataatagcatgttgttcaaaattgtgaattgggataacaatggcgacaatctctattttcagatggcagccaggtagcgtcgcgggcaaaacgagcaagttcctccgccacctcctccagctccccagagtgcaggagctgatggctcaaacagaacgagattctgcgacagcttttgcagcgctagccccaccctcagcagtatggtggaggccagccgcagcgacctccggcagcggcgacctaccaggagttcctgagtacgcagctgcccttgttcaccaaggcagaggattcgttggatgctgacgtatggttacacgtcatggagtccaagtttcacctcctcacaggagactgccctgatgacaccaaggctggcttcgccgcgcagcagcttcgcggacttgcttagacttggtgggaccatttctgtgctatgctacctactgatcatgaagtttcttgggaggaattcaagactgctttcagagggcaccatatcccagctggaattcttgatcgtaagctgaatgagtttctggcactcaatcaaggaaccgacatggtattgcagtatgctcaggccttcaacgacatgtgccagtacgcaggttatcatgctgattccgatgagaagagagaccgcttccgcaggggtctcaacaccaagttgcgtgagcgtctcaacactgtccgggctgatagcttcaacgagttggtcaacttggccatctcccaggaggattgtattgtagttcaccgggcagagaagaagagaaaggcaccaatgacagcaccctccgctcagacccaaaggtttaggattgtttcccacaatcagagcataggatttcagcaggaggcgggcagatgggtgatcagccacctcaccgcagcagccagcacccaaccgttttccagctcccgctccaaggaacaattagcctccgcagcagcagttccgctagggaaatgggaacaagtgcttcacttgtggcattgtgggccagtatgccaagaattgcccaagaaatcagcagaggcagatgccagcaccaaatcaagacaagggaagaaagcagaaggtgcaagtcagacaatggaagctcaacttcactactctggagggagttacctaagggagcccccatcatgactggtatcttttcagtttataatcaacctacattaattctgtttgattctggtgcatctcatagtttcattagccaaaatttcagtgctaaatgtcaactgcctttctatcacacaaaagggtcattcatgatagccacacctggggataaaattgcaactaaccaattgaaccaaagtgtgcctattcaacttgggagccacattatcaaaaccaccctccttgttttgggtttggagaatgtggatattattctgggagctaattggatgaccagacaccaagtagtgcttgatgtagccagccgcatcgtcgaaatcaattccccaatctgtgggagtttcaccttgtttctgcccagtcaagattctactcagtcatgtgcttttgctatgatggagttacccttgaagaaggttctagtggtctgtgattatgcgaatgtttttccggatgaattaccaggaatgccaccagactgggatatcaaattcgccattgagttgcaaccgggaacgacacctatttccaagagaccttaccggatgccacccgctgagttggcagaattgaagaagcaattgcaagaattgctggacaaaggttttatccgcccaagtacttgtttgtgaagaagaaagatgaaagcttgaggctatgcatagattaccgcccacttaatgaagtgactatcaagaacaagtatcctttgcctcgtattgatgttcttttcgatcagttggtcggagccaaagtgttttccaagatagaccttcgctccggctatcatcagatctagatacgagcaagtgatattccgaagactgccttcttgaccagatatgggctgtatgaattcttggtgatgtcatttgggctgactaatgcaccagcatacttcatgtacctggtgaattctgttttcatgcctgaactggacaagttcgtagtggttttcatcgatgatatcttggtgtactcaaagaacgaagaagaacatgccggtcatttgcatgtagtgcttcaacgtatgcgagagcaccgtctttatgccaaattgtcaaaatgtgatttttggctaaaggaaatcaaattattgggtcacactatctctcaggtaggcatacttgttgatcctaataaggtgcaagaggtgatgaactggaagccgccaacgactgtccgttagattcgaagttttctgggattagttgattattattgaagattcattccggatttctctcgaattgcgaagcccataactgaattgttgaagaaagaagccaagtttgtttggggtcagaagtgcgaagatgccttccatgcattgaggcaacatctaaccacagcaccggtgttagcgcaacccgacaacagcaagccctttgatgtgtattgtgatgcctctggcactggactgggttgtgccttgatgcaagacaaccgaatcattgcttacacatcaagagcactcaggcctcatgagcaaaattatcccacacatgacttggagttagcggctgtggtccatgcattgaaaatgtggagacactatttgatgggtacccactgcaacatcttcacagatcataagagccttaagtatatctttactcaggctgatcttaacatgaggcaaagaagatggctagagctgatcaaggactatgacctggaggtacattatcacctagggaaggccaatgtggtggcagatgccttgagtcgaaaattgcaatgcaactgtgttatgatggatcctcgcatcaacaccctatgtgatgagttgagcaaaatgaagatccaagtgattccttctggtgctttgtctcacatttccgttgagccaactttgcaagaccagatcatcatggcccaactcagtgacaagagagtgcaaatcattaaggagaacctccatcagaagacagagaagtataaatgtttccgccaagatagaaagcgtatattgtggttcgaaagcagattggtggttcctaaaaataaggatctcaagaagaaaatcttgatgaggcccatctctccaaattctccatgcatccaggaagcaccaaaatgtaccatgatttgaagcccttgtattggtggaccagaatgaagagggagatagcccaatatatatcagaatgtgacacatgtcagaggataaaggcaagccacttgaaatcagttggagcttttgcaacctctatctatactttcctggaaatgggatgacatcagcatggatttcattatgggtctgcccaacacctctcgtcatcatgattcaatttgggttattgtggactggttgacgaaagtggcacattttcttctagtgcacaccactgataaggctcagaagtatgcagagttatacattgatcgcatcgtgtgtttgcacggatttaccccggaccattgtctctaatcgaggagcccaatttgttgccagattctgtgaacaactgcaagagtctttgggaaccaagctaatcagaagttcagcttaccacccgtagactgatggtcagaccgagagggtaaatcaaattcttgaagatatgctgtgggctcatgcgatcgattgtggcaagaactgggataagcacttctccttgacagagtttgcttataacaacagttatcaatccagcctaaagatggcacccttcgaagctctatatggaagaaggtgtcagacacccctcaattggtctcagcctggagaaagagaagttttcgaacctgacttagtgactgaagccgaaaggaaggtcgaactaatcaggaagaatctagaagctgctcaggccaggcaaaatagttaccatgataagagaaggaaacctcaccagttcgaggtgggagatttcgtatatttgaaggtatcacccaccaagggagtgcagagattcgggatcaaaggcaagttagctcctcgctacattggaccttatgagatcataaaagcatgtggacccgtggcataaaaaatgaagttgcctccaaaaatgtctgccatccacagtgtattccatgcatcccaactaaagatgtgtgttcgattgccgactgagatcatagaagatccagaattggagacagagccggatctatcataccaagagtacccttccaaggttctggattgcaaagaaagatcgactcgggccaaatcgatcaagatgtataagatccaatggagtaatcactcagaagaagaggctacatgggagactgaggaatttcttcgttccaacttccccgattgtctacctaaggaaattggtacgtaatcatgcccaacccctccccctgtcgtttgaatcaaaacataagaaaaatgatcttaatatagaaagagttagttgtaagactaaaatttaaaggacttccttctaaagttgcagagaggatgacattcaaagagcagtttgccttaataaataaagcacccacttcaagcaagccttaaccctcacttcaccccgggaggactccgacccgaatctcgggatgagattcctttaaggggggaaggctgtgacacccaagtgtcacctagggtttctccttaggactgactcaaaacctttataacatgagaacccaaaactaaggaaaggacctcataaattaataacaaaggtttaagtaagtctttttcatcttaagaaactctttttactcatgccatgcacctcaaggcaagaagaac

SEQ ID NO: 71151 - DNA, 563 bp, Zea Mays
gggagcaccagcttcgtagccgaagcagctttagcttggttgctgaacgaagccatcaactcagaaagtggaagtgagttcaccggaggtgggcgccaatgttgggaacttgttctcaaatgcttcgaattaagaacaaggcaacataaaatgttaaatgttaatgaccttcgtccattgaagcactatctccccagggacacaatgcactttggacgaaggtcatgagcaaaaattacgaaggtcatacctttgtaatcagaattgtgagataatgaaggttataatataaaatataagacatgaaggaataatatgtcaaaacacataaacttattcatatatttcattatataaattcaaatatcaaaacataacatttaatcacatttataccttcgtcttggtagaaggcaataatccaagtgtcgcgtgcaagcgattacaagattgcgtgaacagtacgggaatacggttcatctatttataggcacagggcacagcctgtgtgaaatttcttttatgccctttacaattgattacaatcatgacacaaactatca

SEQ ID NO: 71152 - DNA, 1573 bp, Zea Mays
tgtaatatcccaaaaaaaatgttgaccaaaagttaatctctggtgcgtggatgaggtaaagggttgtgggccattggatgcaaagatagaagtcatctgaggcgtcgtttctttctccaacaaaaaccctaggtggccacccctttttttcccttcaccccccccctcttggccgccaccccctttttctcccccttggctggacgccccctccccctatggtagccatcctccattgcttccttccccaagatctccccctacgcagcaaggatagagaaaaggaggggcacgttgaattgaagaggaagagaggatcaaggagacgttcttccccatctcctcttgaagatttcttggggaaaccctaggtatggatgagatccttgttcctccctgtaattataggcttttggaggttgtggatcatgggaattaaaggattagaggttggatttgatgtggggttaggttttgatctcgaatttagttttctgcagaatggcagattcgacagtttctgttaatgccagttttccgtggtcttagtggcctcaaaaaaataagaagtctatgtatgagtcgtagataatttgtagatctttccgtggccacgaagaacacctcaatcggacatccgaccagaaagttattgcagttttactatagcagtttttcagtctcataattctgtgcagaatctgttctcttaagatttaggcaattttatcaacagaattaaactgtgggttggtaaaagaagttgtagataattttataagctttccagattgttaaagagtgcattcatatgatttgtgaaactctagttatgtttgttttactgtggctgttcctgtttacctgacaaaaatgagtgggtctgttcactggtgggtttcatctagtaaatggccgaattggctcttccaactatggagacttttgtagagggataaaagttcttacttccagcagaatttcataatttttggtttagcagttttggagatatcgaattttaaagttaaccatactgctgtctaaaacagattcagtcagttatcttgtcagatgttttagaacttgtagatggcagaatttaattatctattgaatactgaagttgtagagtattttgtgtagatactcctagagtatttgtttgatatcaccgctgttctaattttaaagatacaaaattaacaaacagcgttgctgctgtatggcatgtggttcagggtgggagtctttccactgggtcttggtttcaagtgtaggagtgttttgttgattgatggcaaatgtttgtgaaatatttgtactaagttttatgcccactagcaggtggctacactccagatcatgtctagtacatttcttcttcttcgatgaaggcaagtgaatgtagcggtggttgcttccgttctgacctgttatttctatcgcctacactctaatattaagaagtatcagattctttcataattggactctatggtgatgctttacttgcttgcattatactgatgctcaatcatatattgatgatgataatgatttgagtatgact

SEQ ID NO: 71153 - DNA, 975 bp, Zea Mays
cgaattttaaagttaaccatactgctgtctaaaatagattcagtcagttatcttgtcagatgttttagaacttgtagatggcagaatttaattatctattgaatactgaagttgtagagtattttgtgtagatactcctagagtatttgtttgatatcaccgctgttctaattttaaagatacaaaattaacaaacagcgttgctgctgtatggcatgtggttcagggtgggagtctttccactgggtcttggtttcaagtgtaggagtgttttgttgattgatggcaaatgtttgtgaaatatttgtactaagttttatgcccactagcaggtggctacactctagatcatgtctagtacatttcttcttcttcgatgaaggcaagtgaatgtagcggtggttgcttccgttctgacctgttatttctatcgcctacactctaatattaagaagtatcagattctttcataattggactctatggtgatgctttacttgcttgcattatactaatgctcaatcatatattgatgatgattatgatttgagtatgactcatgagattaattcacacccctgaaggtaaatgaagtattatttgaggttggtattgtatctgaaggtaaatgaagtattatttgaggtttgtgttgtatctgaaggaagtgaagtttattgataaatgtagcatgccatatacattgcatgactcatttgcatatgaagttttgtcgtgacctatggtccgaccgtaccggtacaacttagcatcgtacgttgcccgagaaggggtacgatgcggcttcatacccttagaggtatgaaggcagaggacatatgcattgcattcatatgcattcattgaagtgatatttgcagatgatgtggttttatacccccagaggtatgaagatagagtacctacacattgcattcctatgcatacattgaagtgatatttgcaggtattgtt

SEQ ID NO: 71154 - DNA, 386 bp, Zea Mays
atacattgaagtgatatttgcaggtattgttgacgcagggaagtgttatagaacctattgtggttgttcgaggaaatgagatggtattggttatagtgggactactgagttctatatctacaagcatttctgatttttaattgtgactcttttaaaatgttgatgaattcaatttgtggttcaaatatctcgtcagaacaattagcttgctgagatgtttcatctcactcttgcattactcaatgcaggtgcttgttgctcatcaagggggagtgggaagtagcagcacatccaccttcattctcataataatgctgcccagacgcagccatgatttaattagaaacttcttgtcaaaggatgtttgtttttaactagtcgtgcgc

SEQ ID NO: 71155 - DNA, 129 bp, Zea Mays
atatatttcaaacttataaataatttataacatttcaaagtatatttctttgaatcacttttgtaatcactccgataaatataatgtaaatttgttgtaacttgtaactttttgtaataaagaaattcc

SEQ ID NO: 71156 - DNA, 65 bp, Zea Mays
gctgaaaaaggtctaactcaccaccaagcacgtgtcccgcaacatgcgagggtccggcttccgac

SEQ ID NO: 71157 - DNA, 443 bp, Zea Mays
ctcacttgcagaagcccaagccgaaaacgctagattaaacaaggaactgacttgcagaagcccaagccgaaaacgctagattaaacaaggaacttctccaaaaatcagagagcttcgaacaagagagaaaagatttacacacaaaatacgaagctgaagctgacaaaaatacaaaactgcatcaatctttgaaagagcttcggaacatgtgtttgggttttggcagccgttttgtacaacgattgaaaaaagttttcaactcggttgaagccagctctgaaaaatttaccccttcggctgaaaacatatcaagcaccttcgaacacattgaaggcgaagtcgaggcgcttgctgaagtgatagccgggcacggtgacttctgtgccctgctagcttctcgtggcacagctgcaacatttttgaaggctggatgtatgcacgcg

SEQ ID NO: 71158 - DNA, 325 bp, Zea Mays
gccgaagattaatagtccgaagcacattccgaaggctgctgaagctgtttttaggcctgcctgcatagatcttagaagcatttgtattatctttgtaaaaggcattataattgagaattgaacactactttgtatatttgtccataccttgtactatatttttacctttccatccatgtataagttgctttgatgtggacgaaacatatccttgcttattcgtgctcatcgaagcattgttatcaaagctgaaatatctgtttgtgcttcatgttatgatgatgatgatcctacgaatgtctacatgaatgtatatgaatgcaat

SEQ ID NO: 71159 - DNA, 1288 bp, Zea Mays
ggggcccacgcgagaagggggttgagggggggggggctgctgggccaaaagggagaaggggagggagagaaaaagaaaaggcttttctttttctaatttccatattttcttatatgcctaattcttatatgcctaattcttcaattcactcaaccacaaacaaaagagtgcataatccggtatgatgcaacaaccaaaaatagttctaggttttgcttacacaagatgtcgagctaattctcgctatatcttttggaaaagatcaaggcttagcgagaagaaaaggaaagggtaacgcctgaatttggtgagagaaaagaagaaaaaaatctacccccaaattcagggcgttacaaacagccacctcagagcgctcgggctccgcgcccactacgggtcagaggttcaaaggccggcccctcggaagggttcaacggccgccttaggccactcgggctccgcgcccactactgatcaggggttcgtaggctggccctcgaagggttcacagccgcctcagatgtagagcgagggatgaccctgggtacgttcaatacataaccaaggctcgggctacgctcccgaggtaccctaggacatatccgagaccaacgggaacgatttcgtaacagaatcccatcagagggaggcatcgaaccctcggaccccgtcaaaaggggaccgggtccggcaaatcacccgcaggtacttttggagcgcgccttcgggccactagccgacccctaacaaatggggcacgggcgtccactcggattacccgttagcagctcactggagacaccatgtttggcgccctccaagggcaacatggcgctttcccccctcctccttgcggaaaggcgacgcaggggcgtatgtaaaaaagtcgagtctgtccttgaccgtcctctcactctgtgcagaggctcgggggctgctctcgcaaacccggctccggccaaaccgttgacaatgtcaacataccagctcgagaacttgggacccgaccgtacacccgggctacggccagctcgcatgagggaacaaccagaccggccgaggcatcacgaaacgcattaagacctcggaggagtcaaaccattcctccgaggcctcgggggctacacccggcgggtgcgctcacgtgcacccaccggaacaaaacgcaaccgagaaaggccggtccccttgcaaaaaagtgcgacaaaagcctccaagcgagtattaacactcccttcgaggctcgggggctactgtcggggaccataattaggggtacccccaaggc

SEQ ID NO: 71160 - DNA, 618 bp, Zea Mays
tggctagcaaagagctcagggtatttggccatcagatcatcttcacgctctcaggttgcttcttcctctgaatggtgattccatctgaccttgcacattctgatggtcttccttcgggtgactctgtctgcaacctcaaggatttacactggcttcacaacgtaggtcaagtcctcctggacttcaagaccttccactggcaactgctcttctggcacacgcaagcacttcttcaactgagacacatgaaagacatcatgcaccgcagacaaattctctggtggactgagctgataggccacttctccacgccttgagagaatttggtacagaccaatgtagcggggtgctagcttgcctttgactccgaaccttctgactcctctgatcggtgacactttcagatagaaaagtctccgacttaaaaactcagctctcttcttattgtgtatgcataacttcgctgcctttattgcgctatcctcagattctctcgaaccatcctgacgttctcttcagcttcaagcaaaatgtctggcccaaacacctgcttttctccaggctgatcccattgcaacggagttctacaactcctcccatagagcgcctgaaatggtg

SEQ ID NO: 71161 - DNA, 1377 bp, Zea Mays
ctcgaattctaccaccggcagagtcaatttgaatgggggttgacatggtagtaattggaagattatgtgcttctacccatgatgcagtaatgaaagaatgtgttgctccagtatcaaataacacttctgcaatatgggagtcgactgggaacatacctaatatcatgtcgggggtctcctgaactgcttcagcttccaagtggttcagtctcccatggttatagcgcggctgagagcggttgcctgctccaggctgagacacgttctgctttgctggggcattggggcctgattgctgctgggctgccttcttcggacattgcatcacccagtggccttgctctccacagtggaaacatgctctgtttccaacctgagctggtgctgtctgactgttctgctggtttgctggggcaggaagacgaggtgtctgctgattctgcctctggaattgacctcctgactgattgctctgacggttctgatactggtgctgaggatactgcctttggaactgctgatgctgctgaggtggatgctggttctgcttgaactgctgaggttgattgcctgagaaacaaggatgattgctgcttccaggctggggtccactgatcttgcgcttacgatcctccatctccttacgcttcctctctgtcatgattgctctatcaatcaggtgctgaaatgtcgggaaggtgtgattcatcagttggtactgcagagggtcaaccaagcctctcaggaaacggtactgccgcttggcgtcagtgttgacatcttcaggagcatagcgagacaattgcagaaacttgtctcgttctcactgacagacaatggcccttgcttgagggccaggaactcctccttcttcactgtcatcagacctgcaagaacatggtactgacgaaagcttcctctgaactcttcccaggtgatggtgtcggggtgggcatgggtggcaaggtaagactcccaccatgactgagctgctcctctcaacatacggggaccatacaagactttctccctatcatcgcactgagcggtatgcaactcccgctccacagtgcgcagccagtcttcagcatccatggggtcagaagagtgagcaaacgttggtggatgacctctcatgaactcaacacgcttgtctctaggcatctgaggctgaggtggtgcctgctgctactgctgctgaatggcggccagagtctgaccgatggcttgaactgcctgagtctgcatcagaaacatctgctcgatcgacatcgggggcggggcggcaggtgctgttgctggggcacctcatcctgctgagcggctcgctcctgctgagcacgccttcctcctctgcgcctgttctctgacatctgc

SEQ ID NO: 71162 - DNA, 2686 bp, Zea Mays
cgacgtagcagggtgtcgagcgcgtcgtggaagtgacacctgcgagcaacgtcgcgagtgatgggtcgagcaacccatccttccggctcctggtcagcagaaaagtcggtgtcgtggctcaagctgtcgtcgccacctccgtcgtttgggtctcctccagcagctactctagaggctggggcgcctccaagggaagcacaggggagcagctcctcacagactctatctcctgttggagcgagaaagaagagccctactgctcctgctcctgtcgtcgacgctcctgctcctcatgcaggcggtggtgcagtctctccaagtggctggactgtccgaccacgggacggcgaagcggacgctcagcaaggcgggagggtaagaaggggatgacagactttcgtgcagtgtgtctaagacgagccatctacaaaagacaccgcaagcaaaagagtgagaacagaatcaatatgaccagcaagtaatgaatcataaataaatgaaggattagaataaaacatacttttcagcaaggtatattatatagtagaacataggtttggtcggtatgaccaacttttgaagggatatcaaagtcaaggcagggacaaaggtctatagtccttagaacgaccattctactctaggttagcggccctacagtcagcacggctttgataccacttatgtcacacccggttttagaaggcaaaccgaatgcgaaccatgtacgtgccaggatcagtaattcacgtacacagcagttacataacatggacatcatcacacagtgctcaaaatagtattaaaaagggaaataatagtcgattacatcatacgtctgagacgtccatatagtcttacaataaatcaaagtgcggaaaagaaacgtagataaacacggccttcacaggcagccgactgggggttgccgctaacccacgcctagaactcgtcgtagtcttggaactcctggaagtctccttccacagcttcatcttcgcctgagcagtggttgcaatgctgacaacctggggatgggggggttggtgtgtagagcaagggtgagtacacatcaacatactcagcaagtatcctgtttggctgtagtggactagctttatgtgggggataagtcaagcagttgcttttagttggtcagattattatttactaatagaaagccaggttttaacattaacccaagttattagcccgatgtaccctttccaaacggaaagaataccacttaccagcaccatagtcataaccaaaaccatcagtctcattgccacctgtaaaccaaaatgtctctgatcaagtaccactaatcactggagctcccttggccgctcataaccgcgagcatggctgatatatcagttttcaaacactctgcagaggttgtgcactttacccacaagctgtgattccctttctgcccggagagagctactccccattgaccactacctaggtggcctagcagggcatcactatgtagcctttacaaagattccccggggctgtagccacccgttaggtttcctaaatgtaccgcactcctccccaagggacaaatcaaccttggcagagcgagccgcatacaccgagccccattgacggcacgacggctaagcgaactacaccccagatcctctaattattcagctaagggcatcccattccaccctcatggttgcactgttttctctggcggtcatccatagaacaggtccttacggagaggcactcgagaaaccgctcgagcccccttaaagcccacaagtacaacatcataataagagaagggaaaacaacgtattatagataatctcatcatgttcattgattagagtttgagcaatagcataaagctaaacaataataatccaacccaaataggtaaacaaggacatggataacaaagctagtcaatccttaggcataaatgtgtaatgcgggaggtgaattaaagaatgagtaggacagaaataggtcaagggacatttgcctccaccaaccgactgctgctcaggggcttctcctgcgagttcctcgggctcttcaaccggatcgttctctatgcgattgcaagcatacatacatccatccattcaaattaggaaacaaacagtacaccatacaagagaacaaataaagtaaatatgcatagaatatcacatacgataatgaatttaccatggttagaaagaggcagggaaaggtctcgcgagggttaaagcttatgcccgagacgcactacgggtaaacgaataactaaacgttacgtgctctagttccaattggttctaacaaaagaattagctacatgcactaatgtaaacgtgaccacttgtagtagattaacattgaatgagatagatgattagctatacaaattaactaacataaccaatttccaaattgagactcctatcttattaatataaacacgtgattagcgtgcataggacacgggtgggagggggtagacggggcgtctgggggtagacgggggcacgacgggtcgtgctaaggcacgcgcgcgaggccgcacacacacaccacgaactagccgtgcgcacgtcggggccgtgcgctagccgagctcaaggccgcgcgccatgggcacgctaggccgagctcgaggccatgccgggaccgtcacgacgcgagcaaggcacgg

SEQ ID NO: 71163 - DNA, 153 bp, Zea Mays
aaaacatatttattaatggataatgtattctaaaaaataaaagaaaacaaatttcaaaattaggaaaaagaaaaaaaagaaaactcaacgaaatcacgcacgcattaaaaaaagaagaaacaaaatttgaaattaaaaaaacaaagattggac

SEQ ID NO: 71164 - DNA, 756 bp, Zea Mays
cgcgcgtacgcttttgccgagctcggccctgtccatttcgccgtgctcggtctctagctccctttgcgcgccgttgcgagctcgtcagccaccgttgccttgtcacagaacctccaacgccgtcatccgtggtcgcgacctcgccaaatgcgtccgtcgcttggccctgtgttgtttggctcgtcgactttgttcgctaccgcgtgcgcttgttcctaatgcgcatcttgcagtagttggatctcgcgcgcgtgattttgaagctttgcgcgttcgtcgtgccgtgtcgtgtgccgatattctctctcggcagacctcgccgtcgaccatgttcaagtgattgctcggctcctcacatcccgcctattcgataaaacacccaaatccatagactgccgatgccctgctaccatacgtggttgtctccgtcacttgcgttagctcgctaaacctgcagctctatatacgtcaccctcccgtatcttcgttgagtcgtcgaacccgtcatcccctgctcaacccccacatcaccagctcgctctagacacgatctcgtcgtcgcttcgtgcatcctcaagaaatacaaagcgtctggtgaagacgaagctagcagcgtggtgttcaccaagtgcacgacaaaaagctcaaacatcctgcacgactcaagttcgattcatcaaaattatttagtcgaggagaggatcttcagcaattgattaccgaagaaaagaaggcccctgaatggcgtcaaccgga

SEQ ID NO: 71165 - DNA, 838 bp, Zea Mays
aattaagatacacaactaaagagttaataaaaagctaggaataaaaatagatgttctagtgttattatgtcaatttggttaatggatgaagtcgatgccctgcttaattagtcagcttattctaggtttggtgtttaattcgctgtcgtataagtattatttaggtttgcgatattcctccttatatgcatacatgtgcattatgcatatcattcaggtacgttaattaatcgcgtggtgcggaagacgagtcaagtcgaccccaagcatgggctaatccgcaggatgatgctgatgaatgaaccagaagatggataatctgaacgagtgccaatacaaaggatactcgccaagtcgtcacctaacaaacactaacctagtgttattcaggcaagccccggtgcatttttcacctccttgttccttttaaaatctttctcacttgcttgatgcattaggtgataggagttatgtgctaaaccaattcttgcatttctttccttgaatttgattaccttcctttgaatccttgttttacaaaaggtttttcttatgcttagtcctgctctagaaaaaacaaaatgttttgttttcacaaaagatgatgtggtaaagtgggtgggatgttctcaaaaataaaactcgatggtggatccatcatggccatgttggcttcaacatcggaaaagatgtacctctgccaggtactagactttgggttaaaaataataaagctgagaccgggcggttgacttgcacgagaaaggagtctcggtgtagtgtctccgtctgagtcgattaaggatcgtgtcgatgtgggcctgctgaccgaggaccc

SEQ ID NO: 71166 - DNA, 1535 bp, Zea Mays
cacacatctaacattcatatataaaatttcgacagcatcccctttgaaaattacataaacggggaagcaacaaaatataaatagatatcatgatatgagaacataatagacattaataatctgctagcaatggaaagacaaccttaacggcatgaactaaatcaaccagtgcgcacaactagttagaaacaacatcctttgacaagaagtttctaattaaatcatgactgcgcctaagcagcgttattatgagagtgaaggtggatgtgctgctacttcccacttcccttgatgagcaacaagcacctgcattgagtaatgcaagagtgagatgaaacatctcagcaagcgaattgttttgacaagatatttaaaccacaaattgaattaatcaacattttaaaagaatcacaattaagatcagaaattcctgtagatatagaactcagtagtctcaatataaccaatatcatctcatttccttaaacaaccacaatagtttgtataacacttccctgcgtcaacaatacctgcaaatatcacttcaatgtatgcataggaacacaaagtgtaggtactctgtcttcatacctctgagggtataaaaccacatcatatgcaaatatcacttcaatgaatgcatatgaatgcaatgcatatgtcctctgccttcatacctctaagggtatgaagccgcatcgtacccctcctcgggcaacgtacgatgctaagttgtaccggtacggtcggaccataggtcacgacccaacttcagatgcaagtgaatcatgcaatgtatatggcatgctgcatttatcaatatacttcacttccttcacatacaatacaacctcaaataatacttcatttaccttcagatacaataccaacctcaaataatacttcatttaccttcaggggtgtgaattaatctcatgagtcatactcgaatcataatcatcatcaatatatgattgagcatcagtataatgcatgcaagtaaagcatcaccatagagtccaattatgaaagaatccaatacttctgaatattagagtgcaggcaatagaaataacaggtcagaacggaagcaaccaccgctacattcacttgccttcatcgaagaagaaaaatgtactaggcatgatctggagtgtagccacctgctagcgggcataaaacttagtacaaatatttcacaaacatttgccaacaatcaacaaatcgatcctacacctaaaaccaagacctggtggaaaacctcccactctgaaccacatgccatacaacagcaatgttgtttgttaattttgtatctttaaaattataacagtggtgatatcaaacaaatactccatgagtatccacacaaaatattctacaacttcggtattcgatggataattaaattctgacatctataagttctaaaacatctaacaagataactgactgaatctgttttagacagcagcatagtcaactttcaaaatttgatatctcacaaactactcaaccaaaaatcatgaaattct

SEQ ID NO: 71167 - DNA, 606 bp, Zea Mays
acccaaggtttaattctgttgataaaattgcctaaatcttaagagaacagattctgcacagaattaagagactgaaaaactgctataatcaaactgcaataactcactgatctgatgtctgattgaggtgttcttcgcggccacggaaagatatacaaattatctacgacttatatatagacgttttatttttttgaggcctctaagaccacggaaaactgggattaacagaaactgtcgaatctgccattctgcagaaaactaaattcgagatcaaaacataaccccacatctaatccaacctctaatcctttaaatcccatgatccacaacctccaaaagcacataattacagggaggaacaaggatctcatccatacctagggttttccctaagaaattctgcaagaagagatggggaagaacatctccttgatcctctcttccccttgaactcaatgtgctcctcctcttctcgatccttgctgcgcggggggagatctagagggaggaggaagccgtggagaggggctgccatgggaggagaggacagccagcccaagggaaaagaagagaggggcggccaagtgtgggagggggggggga

SEQ ID NO: 71168 - DNA, 368 bp, Zea Mays
ggcccacacgcgagtgagagagagagaggtagcagggggcggcggctgtgagcaggaagggggcagggggcggccggctagggtcaggtcagggggcgcggctaatgggccctagtgggccaaaaggctgctaggtttagtttagtttttttttcttttttttataatttcgaaatacctattcaaataatcataaaattcataataatcaaaccaaaattatttataaataaaatattaattcttgaactaatatttattatattatttatgtgagttttcatttaagaagaaatgatattcaatattcaaaattaatcatgagcattcaaaaatcattccaaaggcaaataaataacgaacactta

SEQ ID NO: 71169 - DNA, 273 bp, Zea Mays
ctcacggtggattatgccgtggaagtttctgcccacgcagcgcggcagtgaagcgtcaatggcgagcaattctccacactccggtcaccccagtgacacaattgggtagcgaagatctgcggcttggtcctccgcgcccggctgacaccccgcagaaccacaattttgactgatgcgcgctttgacagacgcgcccctctccctagctttatgttatggtgcgcctaatcctctggtcgcggggatggcaggtatggtgggggtttgtgtgtg

SEQ ID NO: 71170 - DNA, 404 bp, Zea Mays
ccaggagctagaagagaaaaactaccagccctacacctcaagaggaagaattggaccaggagatctgtcacacccggttttgaaggtaaaccgaatgcgaaccatgtatgtgccaggatcagtaattcacgtacacagcgattacataaatgacccattatagcacaatgctttgatttacaataaagagtgagtaataatattacagactagagccatttacataatataaatcaaagtacaaagaatcgaaacgtagccaacgtaaacaaacccaccacaggcagctgactggggaggtcgctagcctaatcctcgaactcgtcgaagtcctggaactcctggagatccgcctcgacaccttctactttacctgagcatagattgcaccaaaggtaacctgg

SEQ ID NO: 71171 - DNA, 369 bp, Zea Mays
ctgaggaggagcatgaggagtgatgggacaggcttccccatccctccagttatctatcgttagttttattccgctgcacttcgaacaatgatgactacttttgcaaaactccgatggtgatgtaataatttaatactccttaatgtatggttttatgctttattgtatttgctctgtgactcaccttcgagtgagattgtcgtacctgatcctgtcagtggcctcgtcatactagatccgagggattgacgggttattcccatttaagtgtagtctagcctctaaggcaggacttagccacttaagccggaataattcgggcagttccgccatagctggtatcggagcttgtaccaccacaaaggaatc

SEQ ID NO: 71172 - DNA, 242 bp, Zea Mays
ctcatcatagcacaatccttcgatttacaataaagagtgagtaataatattacagactagagccatttacataatataaatcaaagtacacagaatcgaaacgtagccaacataaacaaacccaccacaggcagctgactgtgggaggtcactagcctaatcctcgaactcgtcgaagtcctggaactcctggagatctgcctcgacaccttcttctttacctgagcatagattgcaccaaa

SEQ ID NO: 71173 - DNA, 915 bp, Zea Mays
aaaagtgaatgtccagtcaacgtgaacagtacggggatactgttcacctatatataggcacgggtcgcagcccatgcaaaattacattaataccctttacatttatcaataactctatgataattcttcgaggtctaatctggtttttcatctttaagtcggtttccttttgcgccgctatcccgaagctcttctacacacagcttcggctttgcgccaaccttcgtgttctttgtgcttcttcatatcgtggctccgatccgagtccgaagatacctgttaatgtactttactccagaaacattgttaaatcatgtttttgaggtccttcggaagccgaaggcccccaacagtagcccctcacaatattaatttgttagaatgataaattcagattgtgaaatggacgaatgctatgagccgatggtccgaaaaaacaccttcctcttgctagaatagcaacagtcattggcaaatgggaccctccagtctccgacataatgggtttataaatagaggctcgtcacaatttatttggcacgctctcttgccatctgttttacctgctcacatagctttgtgcctacaaatatttggttgcctccctagttttaagcttcggaagcgagaggcaagaattccgaaggaatgtctgagaagaagaaggttgctgccgaaatgaagctgagcctttctgaagagatgcatctgggttttcttgggtcaatggcaaagacgaatacggagaagattacaagggagattttagaaggtttatctgaagatactggtgatagtgacagttacgatgcagatagtgggggtgaagattccgaagatcggccatggtgaccaagccattcagtcttcggaaaatcagctattgggcaaagtcatcttgaaaacatgaagggg

SEQ ID NO: 71174 - DNA, 576 bp, Zea Mays
taaaattctgcttacattggtggacaaggtaaaaaaggacgaagctgcctcaaaggcccaggccgaagctcaaagacgtgaaattaaagattttcagaaacagctagctagagctaaagaagagcgtacacttgaagaaacaaaacgagagcttagtgatcaattggccaaccatttagagataagtgttaaagagcttcgcgcatcccagaggaaatgctatgttaaatccatagagtgcgtcaaaaagataaaatccagcttcgccagcgttggcgcattctctagtgaagagaatttttcaagaggcaatcctgaaggtccaatggaatggatcagtcacgaagtagaggccttcgaggaaatcctgaatagccgtggtgacatctgcgctttttcgggtgctagggggattgctgctgttttggagaggaaaggctgcgagcatgtaaaatccttagcgcagtccgaagctaccttgtcctctgaagacattaaaaacccctcacccgaagcaagcatggtcggtgggaaattcttcaccaatatctgggataacggcggccgagaattggc

SEQ ID NO: 71175 - DNA, 220 bp, Zea Mays
cgagttaagtacttccacccttaggattgttttgtgttcctaaggatgaaaagagcattatagggaactttgcagtaagatcccaccatactcccaatgaaaatattcttgcaggtagaagccatccttcctcaggataacccctgagctaggcattattgcaaaagacaacctctatccacaagatctaagcagggctaagcatttttgtaaacaatat

SEQ ID NO: 71176 - DNA, 1221 bp, Zea Mays
cggggcttgcctggaataacactaggttagtgtttgttagatgacgtccacttggcgatcagcttctggcctggcacttgttcaggtcatccatccttaagttcgtccatcatcatcaccttgcaaagaagcccacgcttaacagcatcttgtggtcgactcagctctggtcctccacatcacgtgatcacttaacgtacctaaatgatatatgtaatgcacatgaatgagaacaaggaagagtaacacaagatattatgatgcttcgcaatataaattaactacttaatgatgaggcactataacacttcatcagcaagcactagttatcgacatacgaccaagcgcagtaatcacgtttttttggctaaccgaatctaacgcaaacatcacaaaacaacaaactatacacaccaagcacaacactcatgttcctcctttctgattggatctaattccgaaatcaagcaagaataaattatttaacccgcactatcatccttagtaaaatatttcatcgggagtctaataaaacttggacttgtcattactgaacaccaacgacttagaataagtataggaacaatctaattaattatttaaactgtgtgtcttaattaacttgaattacgcacttaactaaatcaaacatcacaatatttactctaacccatacaacattaacagataacatagcgtttggtaaaaaaattctcgacgacttaaatatctagagtacttatgtacacagatgactaagtacaataatcatgcttctcaagattagtcgaatctagcataactaccctaacaaaacatgtcagctagctgatttaatactaaacctatttttaatgtcattgattcatcaacatcgtatacttgtctaccgaaacctccttcgcctaaaccgtattttaaacacgagctttacatgatgtgtctacaccacaattgtgatcacaagcacatcgtcactattaaatgaattaaattaccctagtcatttgtatccaccaccaaaacactccccgcctaaattacattgccgcctaaactttaccatatacatataaaaatgtctaattaataattattaccagaaattgcataaacattaataacctatttttaaataaaaatagtatataatgactatcattacgaccagtaatttaatctaacgcatccaatcattaaaacaaaataatagaaatagag

SEQ ID NO: 71177 - DNA, 603 bp, Zea Mays
tgtgcttctcctgtctgtaaaattactgtgtacatgctagtagcaaacttgttagaatctctatttgttttgtcatttaatcaccaaaaccctcaattagggttgattgcacttacaatctccccatttttggtgattgatgtcaaaacaaactagagtggagataaaaattaaaaattacgaatacttgcaagataaaagcatttgtgtatgtgtagctccccctaaatatgtgcatgagttttgtgatattaatattaacttgatatgtcaatttgcaacatatttagagagagtgaacaatcaacaccatacacaaaacaatgagggatttaacacaattatagagtgtgatgatagaaagagtaaaattacacatacaaactcattattgcaaagcataagatatgaaaagttactactgctattacaataatgatatcacagctcatcacatcattaaaaaagtttatgacttcagagccatgcatgcatcacaagatagactaataattattacaaaccgatgttcattacataaatagaaggtactgtcaagataagaaaccttctcccctttttggcaacaagaaccaaaagagc

SEQ ID NO: 71178 - DNA, 378 bp, Zea Mays
cttcagcgtggtgggttggatagttggatgggctcacgtggttaatttggatagttggattagatgggctcacgtgatagcctgctgggttggatagttggagaacaaatggacagatgacatttacgttatgtgggctgacggacttatggttacatgggctgttcggttttcttgtaattcggttcggtacagtgtgaaaaccgaatacaataccatataccgaacttcacagttttaaaaaccgaaaccgaaccgaattaccataaaaaccgacttttcggttcggttcggttcggtatggtttttggtatacggtaaaaaattgcccagccctaccagaatgtcaagagtgtactggcgctggtgaagtaggag

SEQ ID NO: 71179 - DNA, 221 bp, Zea Mays
aaaaagagatcctagtagttaatataataattaaataatataacgattattagtgtaaaaatgaatatgttatttataaatatttttggtgattttttatgactttttgagctctttaaataatcatctcggattagaaaaaaaaagaaaaaaaactaaatcctcaccagccggcccaccagggcccatgccccaaaccctaactctaccgctcgctgctg

SEQ ID NO: 71180 - DNA, 814 bp, Zea Mays
gtgtaggtgtgaggagtactcaaagtgattcggaggctggacggcatttccagtactgggggaggattagttaggcttgtgtataagctttggagggttcctaccttcctgctattgtaataagttatgcactttatatatatcaggacttgtaataaatgtaactcttcctatgtaataaccttcatttttagaaatgaaaacaatgttttgtaaagtctgccgctcttatctccgaagtgtgtgtatcgaatgtgattactgtaatatgcatgtatggtgggagatccttgggatgatgagttcaagttgttgaactcgtgatagccttgttaagttacctagtacacgtgcatagccatctgaggccatcaaggcaaggattggtgcacgtgggcctgataacttgggagggctgccagaactacaaaccaagtaacttttgtattggagaatttccaagttgtatgatggaatttggacttaattgcaaaagggtcacatgagtactatgtgactaagtctgaaattcagttgaatggggtcaactttggagctctatatctttaaatctacaaggattttgccctaggtcaacacatcaaacttgtagagctatgttaggagtgtaactttgcttaagtgattaagcattggtgttatgtaaaaatttgagataaactggctcaaagatgggctatcagtcataaggaaattctgaacctggtttaacagtgacactgatatgactttagaaatgaattaaggacgattcagtgggtctaagttcaaggtcactgtgaggaagttggag

SEQ ID NO: 71181 - DNA, 506 bp, Zea Mays
aaaagtctttcctgggttacaacaatttaggggattcacccttaagcctagtccagaatttggtaccaaaactaagctcacgtgggttcctatcaatcatgttcatccttaagcctaatatgtcaaattaacccgtcaaccctgagtggtagaggcaacgctggaagtaggtgaaggggcactctggagggagtcgctttggaccaggagttggctctaattcctcgagatcctcctcttcctcgcttcctgcctcgtttgcctccatgtcctgttggtgcatctctaggtggttgttggcttcctcaagctcctcctgcacatcatggagctggatctccaggatatcgatggtgttatcccagattttcacctgctactctagagttgcgatgcgctggctcagctgttccacttacaggcctttttccaccaattctgaagacaagttgaccacgaagtcctctcgtgtcacacccggatttaagggacaaagccgggtgcat

SEQ ID NO: 71182 - DNA, 126 bp, Zea Mays
tacatagtgtaagtcttacaaagtaagagataaatatagaacgaactaaggtccatccttggcgccataaagtcaactaggagatgccacttagatcaaatagaactcctcattgtgcggctcctc

SEQ ID NO: 71183 - DNA, 283 bp, Zea Mays
cgaggatccctgggtggaggcgaactcgaccacgtgcggatggagctttgctacaatgccagcgaggaattgacccccgatgtgcccgacttcgcgcccaacaccgttaaaaacttgttctgcgcgctgcagcgaactccgttgactgggcacgaggtcgcaatcacgacagcgatgacgtcaccagcgctctgattctctcagttccccgcgcggtgctaactagcgaaattaggagaagaggagaaagagggggaggtcgcccacttatcctacagcgatg

SEQ ID NO: 71184 - DNA, 682 bp, Zea Mays
cactgctgttcacccacctgaaaaatctgttttttttggacagcaacataaccggattcaaacaacgatatctcctgaattataactccgaatcgagcgcataagtacttgttggaaagataacataaagccatacatgattctcatactgattaacactaattactcccgaaaaatccccagaaactgctaatactgctgttgttcatccccctgaaaaatctgtttttttggacagccacatacccggattcaaacggtgataactttcaatttataactccaaattgagcgcataaatactcgttggaaaggtaaggtaaagttctacatgatccccaaactgatttcccttaattcctcacgaaaaaaacacagaaactgctagactactgctgttcacccaccacctaaaattctggacagcccccctctaccccaatcgcaaacgcaacctctaatcaattaaattgtagtgcaaatgaacaagggatgaacacaaaaatcaccttagattctccccctttccttcctcccttcttccctccaccaaaacgattgaagactcgcaccacgacgacgatgatccgagcggcaaggattggcaccttgggaggaggggattgagagggggggcggctagggcttggtggctgcaagaattgagagaggaggagatggg

SEQ ID NO: 71185 - DNA, 338 bp, Zea Mays
aatcaccttagattctccccctttccttcctcccttcttccctccaccaaaacgattgaagactcgcaccacgacaacgatgatccgagcggcaaggattggcaccttgggaggaggggattgagaggggggcggctagggcttggtggctgcaagaattgagagaggaggagatgggcaggggggcggcggccaagggggaagagaagggggggcggctgcacatggggggagggggttaggagagaggcggctagggtttgggagggttaatgggccgaaactccaattgcggcccaactaacccacgcgacagctcccgaccgcaacgcaagcgt

SEQ ID NO: 71186 - DNA, 452 bp, Zea Mays
atagaattggagaaggtgctatatgttgtgttgatggcctccatgtaacaccccgggttccacaaacaacctggaatgctactgaactacacttctgacgtccatatataaaatttcggcagcatcccctttgcaagtttgcataaatgagggggcaacagtgtataaacatatatcatgccaaaaacatactaagtattattaatcggctagcaaggaaagattaacatacgacctgaactgacttaaccagtgcgcatgactatataaaaaaaacaaacttcctttgacaataagtttctaattaactcctggctgcgcctgggcagcgttattgtgagagtgaaagtggacgtgctgctactcccctcattcccaacatgtatccagtacctgcattgagtaatgcaagagtgagatgacacatctcagcaagtaaaataatatcaaac

SEQ ID NO: 71187 - DNA, 435 bp, Zea Mays
ttaagtgcacggtacaagcctacaaacattaagtgtagtaaaatagcatatataaacggttatgcataaaaccggggcttgcctttaatttaacacttgggtagtgtttgctgggggaggtgctcgcttggcaagcatccactggttaagtccatcattcttcaggtcgtccaccaactgcatcttgttgttggcaccacatcacttgcacgatcatcatctctcggtcctaaatgagatgcaggatgcatatgtatgaatatgatgaaatagcacaagatactccaagtacatgatagagaactaatattaactagtaagacacataaacatccatacgttaacgctagctatctatacgtcattgggcgcatcaagtcaacattactggaaagacaatgaacatttcctatatttagccaacacaaacatgac

SEQ ID NO: 71188 - DNA, 221 bp, Zea Mays
tgaagcaccattacccttcgccttgggcccacacgtcagcctcacaaacaccttcttcaaccttcagccagccaacagcaaggaacagccacaaaacgcagggaagaaagaaagggagggaagatccctgtgcggccggaggggagggagaggaggaggccaaggatatccatttataggcgagggagcagcaagggggcggagtgcagccatggcagacg

SEQ ID NO: 71189 - DNA, 264 bp, Zea Mays
gatttttgggacatttaatatcatttcttcttaattgaaaatccaaataattaatataataattactagtccaaaaataaatattttatctataaatatctaaattattttagtttaattattatgaattttagggttatttaaaaatatgtttttgaaattagaaaagaaaatgaaaaaggaaaaaaaagaaaaagaaaaaaccctaaccctaaccgcccttggcccattaggcccatgtcacagccgcgccccctgcccctg

SEQ ID NO: 71190 - DNA, 178 bp, Zea Mays
ctcaagttaagctccatgttccaattaacatttatgatcttgacatgaacataaataaaataacagaataactggaacatggatttaatgaaatattatcccaaaaccatgtaaatcaatagcaaaactacccaagtgattcagggataacaaggtgaaatggataaacagactaggg

SEQ ID NO: 71191 - DNA, 340 bp, Zea Mays
ggagaacagggagggcggcggcggcttctgctggctgggagagctagagcgcgcgcacgacgtgggagctagggtttggtgatggtaaatgggcccctagtgggccggctggtgaagtttgttttttttttcttttttttttaaattctgaaatacctttttatatagctcaaaaattcataaaaaatgcaccaaaactatttataaataatatatttttttttagactaataattgttatattatttaattattatattatttactaggtttttctttaaaaaggaattgataataaacatccgataatcaatcaggcgcatgcaaagaaaacgatcaa

SEQ ID NO: 71192 - DNA, 244 bp, Zea Mays
caagtattagaaatggtaacatatcaataattgtgtttcttgtcaatataacgaatcttgctaagttaacgttgattgaagctaattcacttactagacttcaacaatttaattcactacttagggaggcgtgcactagttacttatatatatatcctcaattatattagttactatcattattacttcgttcaatcaagatcaaaacaagcaagcagtcgaatcaagacaacacaactagtag

SEQ ID NO: 71193 - DNA, 304 bp, Zea Mays
cgaaaatcctatctttataattgtagctccgattttagtggttctcgaacccacgctctcgtggcagcgcgtagaatattcttacattgtttgctctcatgtttggtgtaatgttattttatgtgctcgttgtctatttctatgttttactacgagtagcagtgaggtcacgagaatctgaagaccaacttggtacttggaatctcaagtctaaggtaagttgtgccattgatcacttttctctacctaataatgttcctattaatcactgtgaaatacttaggttaatttgatgggacctaat

SEQ ID NO: 71194 - DNA, 267 bp, Zea Mays
cacataattaacttatggaattaaattcaatttgtcatttgcattgcattgtgggtgttgttattaattttgatcccttacttaattgggttggtatctacttatacttagtaactgctaataaaattttgaccaactttaaaagcaatgctcagctttaactatcctctttggtaagcattacatttcacatgagctcccacctttggtgagttcatgcacattattccccacaacttgttgagcgatgaacatatgtgagctcac

SEQ ID NO: 71195 - DNA, 352 bp, Zea Mays
gtttcttttcggcactcgatggtgcgttctcagtttttacatttacatctttgggggatcttgctcttatagagctaaaaaaaggaaattacatgtgatggccccattaaaaacctttctcccccttcaaaaaggaaaagggtgccatgaaagaaaaataaaaaataaaaaataaaaaataaaaaatataaaatataaaaaattacatcgagttatacataatatcgccgaagctcatccgcattccaagatctaggaatgtcgttgtcgtccatatccttcaatctgtatgaaccgggtcttgacgaagatactaccaaaaaaggtccctcccatttcaactgcaacttgc

SEQ ID NO: 71196 - DNA, 1431 bp, Zea Mays
tttattgtaatttatgcttacctcttggaggaattcagctacattttttctgcttggagatctgaagccaatggtattgaagaaaccagtagcgttttgccgaggaccatgataaacaatttgaccctcagatagaaggattatgtcatcaaataattctaatgtctcctgagctggttgcagcaatgaaacaaccattgtaagatccatcagatgggccatctgttgaagaaatgtcataatttcaagtgtggtagaactgtcaaggcctgttgatacatcatccataaagaaacatcttgcacggccaactagcatctctcctgatttttacagccatggtggtaaaaagtaactgataagtgataagattacagtatgttaaaaataaaataatgaggctacatgaatgattaagagtctatttggattaacacctgggaaagctacctaggcaggtagtgctccgaggtgcctgattttggacgcctagggccaaagatgatttgcctagccaggcaatgcttgggaggtcacaacccaaatagatcccaagtgcatcacatattgcaaacatttgtaaagcatttgtagaaagatatgatatctggctttgattactcccacaacttgattctactatgctccaaaccaattgcccttaatctataacctggtgagtggtgactactctgctagccgagccagtagtagatgtggactcattgttgcaattgttaagtttataataatattatatatactaggtttaggtttgtacaatgtatcatgatttgacccttttgcttcccaatatgcagggatgggttccacttgctcagtagcaagctgcacacagcaccaaatgagttcgtttgctggtaagaatccagttaatcttctgtcatctttttgaggcgttcttcgctgttgggaatttacaccaaactaaaaatcggaagagcattttaagtgtaatgtcattgtcaaattggttgtatagaaacatagctaagatgttctaaatgacatttacgttaaaaggaacatgatgtttttggatgaaatcaaacaagttggtgaacattctgtactttcatatcctttccccctcaaagaaaccccttctgttaataaaaataaggacttcttgctcaaattttgtccgtacatataaggatttctaattatcaatcatgtggtggccagaggagttgcttcggccccttcaatgtgggacatgaaagacttttccatcctcttaatttgtcctaagattcacgagtctttcatatttgtggatgaagggactatattaatactaatctgctactagtactctctccatttcattatattaggcaatagtgttagaataggaacccataccctaatcaggggttgggagtggtattaaatagagagagtaac

SEQ ID NO: 71197 - DNA, 485 bp, Zea Mays
cggcttccgaaggtcctcaaaaacatgatttaacaatgtttctggagtataatacatgaacaggtatcttcggacttggatcagaactacaacatgaagaagcacaaagaacacgaaggttggcgcagagccgaagctatgtgcagaagagcttcggcatgaaagcagaaaagggaaccgacttaaaaaggaaaaggctattcagacctcgatgggttactatagggtcattagcaaatgtaaagggcatgggtgtaattttacatgggctgcgtcccgtgcctataaataggtgaacaatatccccgtactgttcacgctgacttggcattttgcttttgcgtcacgcttgtacttttgctttctttcaagccaaaggtacatttgtaacttaatgtcatttctatttttccatgttaataaaatagaaatgagctaataatgatatataaatgttcatgttatctttcgcatttcatgtgatt

SEQ ID NO: 71198 - DNA, 578 bp, Zea Mays
gatgacaacctttacaatgaaaactagactcaacatgtgtaggacctaaacatcctgactttattagagtagacagacgagacccacataagtgaccaagacgatgatgctactgggcaaacgacagtgcggaaccggaagcggcaagcacacgagctgtagaggcatgatgggaagggagacgcaatgtgtccaagatgtaaaggcgaggcgaagatttacggcgacggccagtcccaatcacatcccctgtgagtcgatcctgtacaaaacaagatgagtcatcaaatccaacaaagcaattgtgatcggtaatttgaccaactgataaaagatccatggataattcaggtacaaagaaaatatttgggacagtaaagtttgaattggaaagagaacccttgtgggtgacatgacataatgtaccatcagcggtctgaacagaagtaccctcggtgacaggtgcagtagaagccaggcgtgactgatcagatgtcacatgaaatgaagctccagagtccagaacccaagtagatgacagagcaccagcagatgaagtagcagcaacagcaactgag

SEQ ID NO: 71199 - DNA, 577 bp, Zea Mays
cacagctgtacaagcaggcaccatggaggtcaaagcactcataagacgatcaaaagctgaatagtaatcatcaatggacatatcttgttgctcaatgacatgagtttgctgcataagagtatgtaaaagagccccactgtcctgaacaaaccgatccttcagatgagaccagatagccctagcagtggtgaatttggacagactcataatcatagttggtttagtactattgaccattgcagccattactttgccatcattgatttgccaagtcttgattgcagctgcgttgcttctatcagctgctaaaactggtgaatcttcagttaaatggaatagtaaaccatgacctcttaatgcagtttgaacacagaaagcccactctgggtaattctgcccatcaagcacaatattgacaacaatagcattggacgtcatattgaagagcaggaaaaggacaaaagaataacggatctgagaaagactgtcttgatggtaccaaaaacccctgtttgcaggtgatgaacagtggatatgccgccgcaaccgagacgacgacgcgagcaggagatctggg

SEQ ID NO: 71200 - DNA, 482 bp, Zea Mays
tgacgaggcagaggacccctggcgacgactctggggagccaaaagacgacgcagcggatgcgcagacagctgcgcgcagacagccgcgacaccggcggcgtccctggcgaggcagaggatcctccctggcgagtctgacgcgcagacggcggcgaacgctgacggcgaggtggacgcggcggacggcggcgcgcagatccggcggacgaccgcggacggcgcgcagatccaacggatggccgcggacggcgcgcaggatgacgcgcagacggcggcggacgaggcggacggcggcgcgcagatccggcggacgacccagcggatggccgaggacggcgcgcaggacggcgcgcaaacggcggcggacgaggcggactgaggcggcggacgcgcagacggacggggaaggggagggccgcgacggcggatggcgtgcggacaggactggggagggccgcgacggcggccgggcagggaagccg

SEQ ID NO: 71201 - DNA, 1340 bp, Zea Mays
ctcaccgccttcgagggaagacggttgaggagatgtgtggcggtatgaagggcctctgcccagtaggtggcagggagagacgcctgaaagagaaggcagcggatcatgttggtggtggtgcgaatcatgcgctcggcccggccgttctgagcagaggtgtagggacacgagagacgcaactggatgccgtgagtgaggaagaaagagcgggatgcgttgttgtcgaactcgcgaccattgtcgcactgcagggcacgaaccgggcgccgaaactgggtggatacccaggcgaagaagtgagtgagggtggtaaacgtgtcggacttcagccgaagggggaaagtccaaaggaaatgggagtagtcatccagaatgaccaggtagtatttgtagccggagaggctaaggacaggagatgtccagagatcacagtggacaagatcaaaggcttgaacagccctggacgtggaagtggaaaagggaagacgggagtgacggccgagctgacaagcatgacagaggcgctcagaagagccccgagtgtatgatatgtcggagtggccggaaagctgggacatgacgtcaggtccagggtgcccgaggcgacggtgccaaatggcggaggaggtggtggtagtagtaagtacaggagatgaggctactctggtgtggggagtggagggcaagtgaagagaatagagggggccggagctgtcacaacgagcgagcacagcatgtgtgggaaggtgacgtatggtgaggccccaggggtcgaactccatagagcactggttgtcactagtgaagcgacgcaccgaaaggaggggatgagtcagtccgggagcaacaaggatgtcgttaaggcagaatggtcctggaagaaccgatgtacctactgaggtgaccgggagggtggaaccgttgccgacgacgatagaggtaggatgtgaggggtggggtggatgggagtggagtaacgaattagtggtgggggtagtgtggaaggaggccccggagtcaaccacccaatcggtggtggttcgggaaggtggaagtggcgaaggaaaggtgtgagcggagagggccaaagaaggtgccccgacagaggcactagaatgggagggagatgacacgggctcaaccgctagggaggcgatcgcagcacgtgggaagacaagcgggccaggcacgtgacgacccgcctgagggtggacctcgacgcagtcccgaagaatagggttccagactggatcgaaggacacgaacatgccccggatgagctgaccgtcgtggaggagaacacgcacagccacgagagcggcgggcgaggtaaagctcat

SEQ ID NO: 71202 - DNA, 241 bp, Zea Mays
tgtcaagcttgaaccttaatatgcgtatgtatgacacactgtaatacagaaggttacataatagcatgacagcaaccagcaagcccaaaagttgtattaaagacacgttggtttctaacccaatttggcaatgaccgcatctgtgacttcctgggtggtgctggtgctgcccaaatatttggttttgtacttgccttctgcaatgacacgcttaactgccgtctccagccggtcagcaact

SEQ ID NO: 71203 - DNA, 2610 bp, Zea Mays
aaagaagttaaacttatttttatcttttcttcgatgttctgtggcattggggtttagagttttaggaggcattcctcataaaacagtagatcttttggcattttttccgctggggttgggagctcaaaggggagagcgagtttgggccattgatctcgatccggtggatgggagcccccttctcctccccaaccctagccgcccccctctccttctccctaattgggttgcagccgccccctccctctcttgctctcctccccattggcagccgccccctaccctctccatggctccctcctccctctagattccccccccacgcagcaaggatcgagaagaggaggggcacgttgaattgaagaggaagagaggatcaaggagatgttcttccccatctcttcttgaagattttcttgggaaaaccctaggtatgttgaaatccttgttcctccctgtaattatgtgcttttggaggttgtggatcatggggattaaaggattagaggttggattagatgtggggttaggttttgatctcgaatttagttttctgcggaatggcagattcgaccgtttctgttcattcctgttttccgtagtcttagtggcctcaaaaaaatgaaaagtctatatatgagtcgtagataatttgtagatctttccgtggccgtgaagaacacctcaatcggacattagatcagaaagttattgcagttttattatagcagtttttctgtctcataattctgtgcagaatctgttctcttaagatttaggcaattttataaacagaattcaaccttgggtttgtaagaaaagttgtagataatttcataatctttccagattgttaaaaagtgcattcatatgaattatgaaactccagttatgtttgttttactgtggctgtttctgtttgcctgaccaaaatgagcgggtctgttcactggtaggtttcatcaggtaaatggccgaattggctcttccaactatggagacttctgtagagggataaaagttcttacttccagtagaatttcatgatttttggtttagtggtttgtgagatatcgaattttcaagttaactacgctgctgtctgaagcagattcagtcagttatcttgtcagatgttttagaaattatagatggcagaatttaattatccattgaataccaaagttgtagggtattttgtgtagatactcctagattatttgtttgatatcaccactgttataattttaaagatacaaaattaacaaacagcgctactgctgtatggcatgtggttcagggtgggaggcttaccaccaagtcttggtttcaagtgtaggagcgatttattgattgttggcaaatgtttgtgaaatatttgtactaagttttatgcccgctagcaggtggctacactccagatcatgcctagtacatttcttcttcttcgttgaaggcaagtgaatgtagcggtggttgcttccgttctgacctgttatttctattgtctacaatctaatattcagaagtattggattctttcataattggactctatggtgatgctttacttgcttgcattgtactgatgctcaatcatatattgctgatgattatgattcgagtatgactcatgagattaattcacacccctgaaggtaaatgaagtattatttgaggttggtattgtatctgaaggtaaatgaagtattatttgaggtttgtgttgtatctgaaggaagtgaagtttattgataaatgtagcatgccatatacattgcatgactcatttgcatctgaagttttgtcgtgacctatggtccgaccgtaccggtacaatttagcatcgtacgttgcccgaggaggggtacgatgcggcttcatacccttagaggtatgaaggcagaggacatatgcattgcattcatatgcattcattgaagtgatatttgcagatgatgtggttttataccctcagaggtataaagacagagtacctacacattgcattcctatgcatacagtgaagtgatatatgcaggtattgttgacgcagggaagtgttatagaacctattgtggttgttcgaggaaatgagatggtattggttatattgggactactaagttctatatctacaagtatttctgatcttaattgtgattcttttaaaatgttgattaattcaatttgtggtttaaatatcttgtcaaaacaattcgcttgctgagatgtttcatctcactcttgcattactcaatgcaggtgcttgttgctcgtcaagggaagtgggaagtagcagcacatccaccttcactctcataataacgctgcttaggcgcagtcatgatttaattagaagctttttgacaaaggatgtttgtttctaactagttgtgtgcactggttaatttagttcatgccgttatggttgtcttcccattgctagcagattattaatgtcgattatgttttcttatcatgatatctatttatactttgttgcttcccagtttatacaattttcaaaggagatgctgtcaaaattttatatacgaatgttagaggtgtagtttagtagcattctggggtgtttgtggatcccggggt

SEQ ID NO: 71204 - DNA, 925 bp, Zea Mays
caagatccatctttcttaggtactaaatgtaatatcccaaaaaaatgttgccaaaggtttatctcggtgtgtggatgtggggaaagagttgtgggccgttggatgcaaagtcaagagacatctgatgcgtcgtttctttttcccacaaaaccctagtggtcgccccccctatttttcccttttcttggccgccaccccccccccttttccccacccttggccgcccctcccccttccccttgcagccaccctccactacttcctcctccctctatatctccccccacgcagcaaggatcgagaagaggaggagcaagatggattgaagaggaagagaggatcaaggagatgttctacccccatctcttgcagattttcttggggaaaccctaggtaaggataggatccttgttcctccctataattatatgcttttggaggttgtggatcatgtggattgaaggattagaggttggattagatgtggggttaggttttgatctcgaatttaatttctgcagaatggcagattcgatagtttctgttcatgtcagttttccgtgatcttagtggcctcaaaaaaataaaaagtctatatatgagtcgtagataatttgtagatctttccgtggccgcgaagaacacctcaatcggacatcagaacagaaagttatgacagtttgattatagcagtttttcagtctcataattctgtgcagaatctgttctcttaagagttaggcaattttatcaacagaattaaactgtgggttggtaaaagaagttgtagataatttcataagctttccagattgttaaagagtgcattcatatgatttgtgaaactccagttatgtttgttttactgtggctgttcctgtttgcctgacaaaaatgagtgggtctgttcactggtgggtttcat

SEQ ID NO: 71205 - DNA, 659 bp, Zea Mays
attacttatcaggcagatcctagattttggttgaaacaaatatatcgatgttacttgatccgaaatattcgatgtagcaatcaacatccattgaaatcatgaaatcaaccagcacatatgcatgcctggtttagagagcacactaattgacttacaattttagcttcacgattctgggacatctaatgtttataaaattcatcgaagaacttttattaactttctaaactaattttccggctaacctatgtattacacatattaataaaacattatatttttgacacctacagtcccgcaagcactgggacctattgtgacctctttctccacacgacattaaccaaatcactgtagacgacttgggcatcctaataaatagtatacctaccccacgtcacacatatactaaaggcaataagactgatataattagtatacctacagttccttttatcgaactaataaccgaattagcaatccgactcactacagaatcatcacgattaatatacctagtcagactattcatcaatccactaacactaataacaaatttgcttaccatgactaattcgacgcgatagtcggaagcacgacgatggttttcggttgacgtctttaatcacacacgtctgacgagcgaagcacacagtttc

SEQ ID NO: 71206 - DNA, 344 bp, Zea Mays
cgtgaactggtgagactggaggcggaacccacgggtcagccgtggaattcgcgcaggagggaaggggatcacgggccgcgcgtgggtgattggtagatgggccgaatggcatgaagttggcccggctgtaggtttttttcttttttttattttatttccctttttcctattttgtcttccaaattcatgatttaaatttccattcaaattttgaatccaaacagtgttgtgaacctgtactctagttaaggtacaatatatttttacttacttatttttctcctcataatattcatttcttctcttttctaaattctagaatcccctttaaatcttaaattctc

SEQ ID NO: 71207 - DNA, 677 bp, Zea Mays
ctttattatataataggggttctgtgcaaaatagctaaataattacatcatatgacgacaacgatcctccgcaaccaaagttgactggagacgacgacctagatctctccgaacttatcgcatcatccttcacgctcctcatcttgcggtacctgttcttgacctgatgtcagtacaacaagggtgagctcacttacgatcatagctcaaaacgttgtggggaataatgtgcatgagctcacttacagtgggtgctcatgtgtagtgtaaggcttaccaaagaggaatgattaaggctgaacattgcttttagtgttggtcaaaattttattagcagttactaagtataagtagataccatcctaattaaataagagatcacaattaataataaatctcaaaatgcaatgcaaatgacatattaagtttaattccataaattactcgtgtaagggtttgagccgctcatgaccgtgagaatggctgatataccagttttacactctgcagaggttgtgcatctttacccataggacgtgtttcccgtttagccatggtttgcaagacccttatacactcccaaggtgaatggctcgagaaccactgtgaggcctttgcaaagttccactagatgagggaacccgctacagattctaggtcgaaggcgatataggaat

SEQ ID NO: 71208 - DNA, 922 bp, Zea Mays
caaaactagggtaacctattaggtcccatcaaattaacctgagcatgtcacaatgattatcaagaacattattgggtaaagaaaagtgatcaagggcacaacttgccttatacttgcgataaccttgtagttcagatgttgtcccaaaagttggcctccagattcctcgcgatattgcctctactcgtagcagtacatacaatcaagcaaataatggatatagtaacattataccaaagtgtgatagccctcccaagttattaggcccacatgccccaatccttgccattaacggcctcatatggctatgcacgtgtaccgtgtaacttaacaaggctatggagttcaacaacttgaactcattatcctagagatctcacacaaacatgtatattacagtaatcacattcgatacacacacacttcggagatagagcagaagactttacaaaacattctttattccaaaactcaagttttacatgctagaaagatttataattattacaagtcctgatatactcaaagtgcataacttacatacaaaagtaggaaggtagatcccttccaaagctcatacataaacctaactaatcctccttcaagactagaagcatcttccagccacagggacatctagaatactcctgattacctacaacaacatgggttcgaaaatcctaagtacagagtgtactttcacaagtcttacccgactaaggaaaaaaactctcaaggatatgctggatttgggaatcaaggaaaggcttttagcaagaatcaactttaatagtttgcagaaaagcttactaaaatgagtccttactttcaaaattttaatgctagattaagtattaatagaccttgtttgcatctagtttaatttcatcatcacattaatcaatacaacatgatttttgct

SEQ ID NO: 71209 - DNA, 764 bp, Zea Mays
gtacgcatttcccctcacctggaagtccctcgttccctaggagcaccgccccgtgcagctccatgttccagaacaggacgttgcttccctcctgctccctcacgcaaacctctgccacgctacagctcccagacatgttgctcgccctcgcaaagtgttggccttgtgtgctccaccgcatagcaccctgcgatcgctgagtcccgccatgttgtctccctgcttgtgttcacaagctttatcgccttgtcgtgcacacctcagggctcgcctccgtccgccatgagtcccaatcgcgggttcctggtgccttaacttcgccctagttatgctccctcaccagaagcactcgttgtgtccgcagatgcctggacgcgtgctcgtccatcgcgctcaagccactagacgctgctgtctccgccacctgcaacgagcttcgtaaccgcatcctgtcgtcggtgatcgtcgttgttcttgcggagtctaaatcaatttggacatggtaaactgatccatttattttccgttaatatgaggagtggttggattgaataaatgtaggggtcacgatgaatatcttgtttgtagcacagatacgttggttttattacatgtttgatgaaatgccttgttacatgtattgttgtagttgtgttcatgtttgagaaataatcgcgttgcgtgaggcttaggtttaagatgcttattatgctaggaatgtgttaataactgtataagtcaagtgtgattggatcggttttaat

SEQ ID NO: 71210 - DNA, 374 bp, Zea Mays
cagagtccttgattcttgataagcctcaccttgaatccttttaaaattcgcatacccttgagagtcttttatttagtcgggtaagtcttgctgagtacttgcgtacttagggttttatttccactgttgctgcaggttacgagtcactttgattgtgattggtgttaagcgccggtgggcacgaccttcttataagtctaagtaactcttatatacttcttattgaggatggtcacttaagctagcatatatttcaaaactataaataatttataacagttcaaagttatttctttgaatcacttttgtgatcactccgaccttgtacattgtaaacttgatgtaacttaaaaaatttggtaataagatttcca

SEQ ID NO: 71211 - DNA, 1730 bp, Zea Mays
gtctcgcaccctctatgtcgtgtctactcatccatgctgtcggcctgtacagacacacgggtcctgcttgagtcacgctgccgttgacgcaacgcggggttagctctctgctctgcccagctcgccgagtcacaggaatctgtgcgcacgtcgtagtcagtgcccaacatctttgtgtcgcccttcgtgtgctatgacacccccttgctcctcgtcgtcaatccacaccgcgtccgtgacatgctcgtcgaccccgataatctatccttcaattgcacgctacttgcattaggatccgaagctctctgtcgtgctcgaccttacaagtctccaactcgtcgacatttcttgtgtcgtcgaaaaatcccgagagtttgaataaagcaacaaatcccatgtggtgcaacatttgccaggagctcgaccgaatgtctaaacggggaaccgtcgtcgccctcgcggttatcgggtcgattcgatcagggtaagctgatctattattcctgctagttaaattattgaatgcgatgattttattgatttagcatatgtgtgttgaaatcaagattttagatgcgattcatatgaaggataagggtagacgtatctaaatcatgtgactgaattaataataaaaattataggactagtgtttcttaggtctggcagatagatattgattaaattgttttggatatatttcgtcgatgcttgaagtcgatctgaagtacaatccaagaatttcataatggctagtgtacataagtactcttgatatttatgttgttgagaatgtagttttatcaaatgctatgttatttgatggtgttttatccgttagagcgaataatgtaatattctatttaattagtatgtaattcaagttaatctagaaacccgatttaaaaggttagttaaattgttcctgcatgtactataactcaggtgtccaataataggagtttgaatattgttaccctttcggtgttatgcattagctaaggaaaatagaggactcatacaaggtttaaggtttcttgatgtatgagctatctccgaataggctagaaaagcgtaattattataaatagtcttatatcgctagctggtacttgcttgtgattgattctaatgctttgttataagtgtttcgtcatcttcaatgtagattatttgtattatgctattcctatgtatattcatacatgtgcattgtgcatcccatgaggtacattaattaatcgcgtgatgcggaagacgagccaagtcgaccccaagcgcgggctactccgcatggtgatgctgatggacgaacctgcctgatcaagtgctaggacaaggctgatcgccaagtggttgccacttaacaaacactaacgtagtgtttattccaggcaagccccggtgcatttgccacctccttctgttttaaaaagttttatcaccttgcatgatgcattaggtgataggagttgtgtgatcaaaaagttgatgcatttccttccttgattaaacaaacctaatacccgttttatgaaaatttagtgatgcttagccctgcttaataatttaggattgtttttaaaatatgatgtgtaacacgggatatgggaatttatgaaataaaagtacttgtgatgatgaacccattgtgtccatgatggcttcatcattcaagtagggtacctctctcaagtatcaagttttgggaaataatatgtaatgtagac

SEQ ID NO: 71212 - DNA, 266 bp, Zea Mays
gttttattcccatcgttgctgcaggttacgagtcactttgattgtgatgggtgttaagcgtcgatgggtacagccttcttataagtctaattatttcttctatacttctgattgaggattgtcactgagctagcatatatttcaaaactacaaataatttatgacagttcaaagttatttctttgaatcactttagtaatcactccgatcatgtacattgtaaaacttgatgtaacttataaaatttggtaataagatttccgttg

SEQ ID NO: 71213 - DNA, 594 bp, Zea Mays
agaccgccactcgacatcgtcggctcgtcgcccaccccgccaccggcacagcggtgacgagcaccggcactccacagtcctcatctcctccatcagtagtcactgcataggccgcagacccgacggctgccacctgacagggacactgcctcccgggtcctggccgcacaggcaccaaccaccatgcgtcgttcgccgcctcccaactgggagccgcatatggtacacaagaataataaggatccgaagcaaagcacattgcaagcaattcaaggacaaggcattaccgcttggtagtatgaccctgaaacaattaggcaagcttttgttgaaatggtcatagaagatgagattccttttgttcaaggtgagaagacatgattcaaaaaaattatgaagatagttgtcccacgttggaacccaccatctcgcaggacatgcacaagggacactgttaggatttattttcaagagagaaaagttgaagatgtttcttaaggaaaattgtgagagagtttccctaaccacagatggttggacttatcaatagcaagatagcttcatggcactgactgcacacttcattgataatag

SEQ ID NO: 71214 - DNA, 386 bp, Zea Mays
ttctttttaaggggggtagaatgtaacaccctaaaaaataaaccatttttataatccaaatatgatatgtcctatggatgatcggaggccgtagatgtattgatctcatcaagatgattccgatcaatcactagtttgccttgtttggagtccggatgagtctttttgagtgccggttgatctgagccattggatattaggattgtgcaagttttcttctatttatacctccctaaccctagaagccacgtcctcccacccctagcagccgtcacccttttgtgccttgccccaagagaagagaggaagaaaaaaagaagagaagagaggggagatgagggcataccgtcgcccatcatcgtcattcctctccaagaattggttgg

SEQ ID NO: 71215 - DNA, 1308 bp, Zea Mays
taacaaacagcgctgctgctgtttggcatgtggttcagggtgggagtctttccaccgggatttggtttcaagtgtatgagcgatttgttgattgttagcaaatgtttgtgaaatatttgtactaatttttatgcgcgctagcaggtggctacactctggatcatgcctagtacatctttcttcttcgatgaaggcaagtgaatgtagcagtggttgctaccgttttgacttgttgtttttttatcgcctacgctctaatattcagaattatggaattctttcataattgaactctatggtgatgctttacttgcttgtattatactgatgctcaatcatatattgatgatgattatggttcgagtatgacccatgagattaatttacacctctgaaggcagataaagtattatttgaggtttgtattgtatctgaaggcagatgaagtattatttgaggtttgttttgtatctgaaggaagtgaagcatattgataaatgcagcatgccatatgcattacattattcatttgcatctgaagtttggtcgtgacctatggtccgaccgtaccggtacaacttagcatcgtacgttgcccgaggaggggtacgatgcggcttcatacccttaaaggtacgaaggcagaggacatatgcattgcatttatatgcattcattgaagtgatattagcagatgatgtggttttatactctcagaggtatgagggcagatgacctacacattgcattcctatgcatacattgaagtgatatctgcaggtattgttgacgcagggaagggttatacaacctattgtggttgttcgaggaaatgagatggtattggttatattgggactattgagttctatatctacaagtatttctgatctcaattgggattcctttaaaatgttgtttaattcaatttgtggtttaaatatctcgtcaaaataatttgcttgctgagatgtatcatctcactcttgcattactcaatgcaggtattttattcatgttgggaatgagggaagtagcagcacgtccaccttcactattataataacgctgcccagttgcagccatgatttaattagaaactcgatgtcaaatgatgtttgttttttctagtcgtgtgcactggttaattcagttcatgttgttatgtttaactttcctttgctagcatattaataatgcttagtatgttttttgtcatgatatatgtttatacactgttgcccctcgtttatgcaatctttcaaaggagatgctgccgaaattttatatatggatgtcagatgtgta

SEQ ID NO: 71216 - DNA, 2361 bp, Zea Mays
ctctttcaaccctaatcctccctttgccgaccacaaaggtcaagcccacataataagctttgctcaaacgagcgggtaatacaaactttcttgtggtcttccacaagatttggagactcacaagagacacctagtcgtctaggagctagaagctccaagagtaatgaatccacaaagaactcgatgtagtaccaaagctcgaatgaagaagagcaagagagatttggagatgaagcacaaaaaccgcagctctcaaactcactcaaacatttctctccaaagatttgaaatggaagaggcaagagatgtgtgtgagagagcgggaggtgttcctcaagttagaaatggagtttgggtagtgctctagtgtggggagagaggtaggagagagtatatataggtggggcttcaaaactagccgttggactgattttggctgtggaggaccggttgaaccgcccctaggaccggttcaaccgcctggggcaggctgacagtcagtctgccagtcaggtcatactacaaaaacaggtcctgacaccggttgaaccgcccctagggccggttcaaccgcctgggggtcagtctggcagtcagtctgccagtcaggaggtcagaccggtcaggtgaccctgacaccggttgaacctcccctagggccggttcaaccggttttgaccagtgaggtccggggaaaaaaccccggctgaactttccctagaccccgattgaacctctctggaccccggttgaacttgccctcgaccccagttgaagttgaagttcaactggagttgagaaagctcaactcagctgaagttcagctcagcggaaaagctcagttgcagctgaagaagctcaactcagctgaagtttaattcagctgaaaagctcagcttcttttcaacaagaacactctaggtttctcaaacctaaccacggtcaaccatagaattttaaatagatttttgattttcaaaaaatagcttttgaatttagaggtttgagctttggcaaacaccaaccttctttttggatcccccttgatagtacgacgaatcctatactcaagttaagtaaaatataatagtaaactccttgagtaattggtgtctcatgtgtgatttctccatggcgttgcttcataaggatcacaaacacctttgtctcaccttttgaagcaaacacaattcaaaccctgtgacttgtaccatatcaccatatatgagttcaaatcatggcttcaagtcaccttactgatgcatcaacatgttataactcttcatagttgattagttcatcgacttagtgcaagtactctcttcttcaccttagccatggtacctcggtctacaagctgtcgcttggccttcaccttcgcttagttcctcgaagccctttccttgctatcttcaccctatcaagcctttcttgagtcacatcattttgagcatccattgagagaatcatttcttcaatattgtgaactttgcttgaatgtcttctagatataactgttaagattaatcaagctctagtttgattctcatataagtatatatgtactgatagtaatatggtcaagccaattcacgattcctcatatcttattcactttggcttgaccaatcctcttaatcacttcatcctctattctgatcatatgtatgtagtgatttctcaggtcttgtccatatattcaaaccaatatagagatcatattatatcaatttgcattgtctcactggttatttaacattgtgttgaacctttgttcactgtcattatacactatttaagtatgttcatcatactgaatttcctgttcaacacttagcaaacttgttagtcttttaaatgtgttgtcatccaaatcaccaaaactcacaaaagggattaatacactttcaatctccccctttttggtgattgatgacaacacatttaaagcttacataagatttgataaataagattttgaatccaatgatatagtttcctccccctaaatatgtgcatttcagaaaataacacttttgtacccaaatgccaaaagcacatatttgggtcaaagtatggagacaacttatatcatactattcatggggtgcagtgtgtcataaaataaacgtgatgctcatgacatagtatgcactcatcaattttctacatcttatgtttttcttatgattccccccttttgttaattatatctccccttcttaaaagtcttctaacacttagttacataagactgaaggtaagctttaatacaaaatttctccccctttgtcataaatctcccaaaagaataccaagaatataaagggaagaaattatgattaagcgatatttgaacac

SEQ ID NO: 71217 - DNA, 447 bp, Zea Mays
attttaccttttcagaccatgttcggttctaccccaatccataaggattgagggggattgagggggtttcaatccctaataagtcaaaatcccctccaatcagtatcaatcccctccaatccatatggattgaaaataaccgaacaagccctcaaggggttaccagacttgtgttggatttagaattcatttgcaagctcttgttggcataattgtgacataggtccaagataccaattgaaagataaatcttgatacctggagtctagttgtcacctagcattttcttatcataccaagaggcaacatgaaaattgtacaagtatggattatacaactagtgatcatgtacgaaaatgccaattgaaaaacaccaattgatacaatttgatagataaacagatcactaattgcatattacactaagttctcctcaagttttagtgc

SEQ ID NO: 71218 - DNA, 1636 bp, Zea Mays
aaacaattaatacaaccacaatgcacggttactaccgtcgagagaactgacacaactaatataactaattaatccaagccttgaactaataataaaaactagcaaatccagtgtactattactagtcgatacaaaattcatgagaacgacgatgattccggttcagactatccatcaaacattaagcacgcgatgaacaacgtccttctcgtcatcgcccaacaacaagaattccacttctatcatcgaccccataacatcacacaacctaacgacataataacggatctagtcataattaccaagtgcacacctcgcattactggtatttctaacttaatcgtatacgtatacgaagcgtcttattttacgatcataaaaccgatagtaaaaatagcaaatcagctcaccacatcacaactcgatttggtagttgcctgaacgacgatggccttcagctgaagtcctcgatcgaacatctggcaagcgtgaccgacgagctaaggctgaggcgaagcttgacgacgagatcgaataggggatgtgagcgtgagggtttcacagcgaggatgagcgacaccgtggattcttggtccgacatttaatcgaacacaacggaagcgagacacagcaggaatggtagtattaaccatgagcacgataaaggacgtgctcctgcacggcgtgaaggcgaacgacgacaaccggcgtgaaggcgaacgacgacaacctacgacagcaggaatggaagacttggtcgaggcagggtccgagcatccagagtttttgccgaggccggacagagaaggattacaaatcctaggcacgacggtggccatagccaagcagagggacgcgactacgggcagaggagaactcggcacgacgagagacgacgaaacgctacgcgcgtgatgaggaagcagaaaaccacgagcccacgacaagggagctcggtgcgcagcgagctagagctgagggaacgcgtggctggggagaagagcaggggctgcgtagcggccaagcgagctgcgagcaggcacgcgacgaccacagcaagggagctccgagctggaacgatgggaaaactccacggtgggagtcgcggtttggacagagcaaagggaaaagcggctgggcgccagaggactgagcaaataagcgcgactgcgcgcagggagcttcgcgagctggagcaggcgattccgcggcatgggcgcgagctgcgcgccatggaacgagcaagggccggggcgagttcgatgcggatctggccctcctcggccatgcgcgccatccatggcgagcagaggagtgcacagaagatagagagaggagggaggagagaggagcagggacacgcggcgaggggagcagggagacgaagacgagcgctgtgcggcggacgagagatatgcagggagattggacgaccgagctgggcactggagaagtggagaggctgggcacgcaggaagttgaagcttgcagggaatccggcgctgggagcttcgagcagaggatccacatccgaccaggcgccggggagaagaggagcagaggctgggcgaggcaccagggagaggcgaccgcgccatgggggctcgatagggagcagggcgcgcgcccgcgccgc

SEQ ID NO: 71219 - DNA, 338 bp, Zea Mays
cggcaccgtgaactagatttgggctgcacgcagtgagatggtgggccggctcagggagtttgagcccaaatgcagttttctttttttttgtttttattttctgttttcttttatttctaattcatttgaatttaaattttgaattcatcttaagtgcaaattcaagttcgtgtttaactgtgcaatttggtcacaccatcatgtgatgaagttattttatactgaataatattttcatggttttattttcaagttaggggttaaattccatggatccattgatttattgttaatgacacatttattttattatccacaaatgcacaatcaggtaaaac

SEQ ID NO: 71220 - DNA, 706 bp, Zea Mays
gcggcgttgaggtgctttttatagggtgaggtgagcaattaggagttgagaagggagtaatttgggagaggagaaactgtcaccattaacgacagcaaagaaacatccgtcgcacaatattgtcgggagcagggaaacgacgcggcgcttcgggggagaggaaggagaggggtcgggagcctgcagcgtgggagaagaagcgagacgtcggcttcggttttccatcgcagggagttgagcggacgatcggtttcgtgcgtgcgagcagcgtccgtgagaagaaatggggagagagccgtacggagaaaataaaatggagatgggcccacctgcatgtcggtgaatgcgagagaagagtgaaggagcatgtgtatcgtgggtttttttttctttttaatttcgattttcttttcttttttttaaataacagaatataaatatacatatatatcctaaaaattatactaggtccaaaaattatttacatgaatatattatccttttgaaaataatttattattttagtacaattccaacaattaaatagaataggcttccgcaaaaaaatcaaataaaatgaaagttttgcaattacttacaaacataaattattaacctatcaaaatgtgtatttcaaaaacacccattttaacaacattattattttataaaattattttctcaccaaattaaatccagaaattgg

SEQ ID NO: 71221 - DNA, 284 bp, Zea Mays
ctcccccttaactccacccttagatcatctcatcatgtgcatacacttgaaatgataggagcacctcacatagactatattcatcactcaagatcatttagaaaatttttgattcaaaggaaaaagaaataaaaagaaacaaaagtagaaaaggaaaagaaaagaaatagaaaccagaaaaagaaaaaaagaaaagaaactccccccctcggctgggccgaatctggcccaacccgcgccgcgcgctccttccccccctctccccagcccaggcggcccaactc

SEQ ID NO: 71222 - DNA, 1231 bp, Zea Mays
gcgcgcgagctcctctgctagacccgtcatcattctccagctccttaccgcgctcggctgttcgtcgtcgtcacccggtcgcgcgacgaattgacagccctatcactcgtcctttgtccgtgtcatttaggccatggtttccttgtccgagtttcaaatccatagtttgttgctcccgtcaactagctcgccaaaacgtttctcgccagggaagcatagtcgtcacgccctatgtccttgccgtgcccgtgaagacgttgtggaattgtcgtcattcgtctccacgccgtgggtacaacaatgttgtcgttcactccacggaactcgtcgtcgaccttatctcccggatcctggagttggatgaaaatgtgagagaagtccgtgcaacaattgccaggatctcgactggatgtctaaactgagagccgtcgtcgccctcgtgggtatcaaatcgattcgatcgtggtgagccaatttattatttcagttatttaaattggatagttatatagctacaatgatttttcttgtcgttagcataggcacattgtgtgacaatgttgccgtaccgatttagttggcttaaataaaataatgctttgctagtagacattttaattagctggcaagttatgcaaagtcgtccggtcaggtggtttagaaagttgatgtgctcatatgcttattcccaaaattaggtgtcttagactaatgatattaagtttgttagccttttagtattgaacgttagctaagggaggtagagtgtgggtatagtttatcgttttttgtgatgttgtaagttaaatctagtaaaactagaagatcgtgattgttgtgcttagtgagttataggtgtctagtgtttgcgaaaggttgtgtcgatgtcttgccgctaagtatttgattctcttttctgtatcatctggtttactttatgctcatacatgtgcatcgtgcatctcatgaggtacgataattaatcacgtgaggcgaaggaaaagagccaagttgacctcgagatggtgcaaggagtgatcttcttcgcacgacgatgtcatcagttggaccaacctgaagatggataaatcaagcaagtgctcgactacgagatgattgccaagtggtcgccagctaacaaacactaacctagtgttatccaggcaagccccagtgcatttgtcacctccttgctgttttaaaatctttatcaccttatatgatgcattag

SEQ ID NO: 71223 - DNA, 324 bp, Zea Mays
aaaaataccacacaatataaaggaaataaataaataaataaataaattctttttatcttaatatttgaacttgtgcatttaacctaggtatgaaattcctaacaaaaatttgaattcaaatttgaaatctaaaaataaaaagaaaacagaaaagtaaaagaaaaaagaaaaaaagaaaaagggaaaacgactgcatgggccgaatgtgcctggtctcggcccatctcgctcttctctctacgcgcgcgtccagcagcgtgatctggcactaacgtctgggtcccgcttgttagacgcagcggcacgccagtgctcccattttcc

SEQ ID NO: 71224 - DNA, 50 bp, Zea Mays
caggggttaaaaacatgagtccacctaggtagctgagcattaagggcaga

SEQ ID NO: 71225 - DNA, 427 bp, Zea Mays
cccggtccatgctctgcagtgtgacaatggtcgcgagttcgacaacaccgcctcccgttctttcttcctcactcatggcgtccagttgcgtctctcgtgcccctacacctctgcacagaacggccgagccgaacgcatgatccgcaccaccaccaatatgctctgctgccttctcttccaggcgtctctccctgccagctactgggcagaggccctgcacactgccacccatctcctcaactgccttccctcgaaggcggtgcgccaccctacccctcacttcgccctatacggcacagccccttcctatgaccaccttcgcgtgttcggctgtgcctgctaccctaacacttccgccaccgcccctcataagctttctcctcgctccacccgctgcctcttccttggctactctcctgaccacaag

SEQ ID NO: 71226 - DNA, 1651 bp, Zea Mays
attttgtacacttttggactaaagtgcaaaaacaaaaggtaatataacaccacaaactatgtgcttctcacatttaaggatttgcaagttaaaaagtggaatttggacttaattgcaaaaagtaccttttgaatccccatatgcttaagtcataattcagtgcaattggagcaactttggagctttatatcttttaatccatgattctattctggcttaatacatcaaggttatagagctgttataggagtacaactttacttaagtgattatgccttggtgttgtacaaaaataggagctaaatcggtttgaaatctggctgtcagaccaccctgtgactaattattaattgatagtgagttttggcgaactttggatttgattctagctcaagggaataagcaaatgagcaagatctttacagcagaattgtagctggtttatagagctacaactttgtcaaaggtggattaacaagttgttaaatggaattttgaagtttaggcgctgcaatctgctctatcaggtgttctgaataacatactgatggtacagtaactgacacagatcctaggtacagctcccctcgccgcaactgagccgtgcgcccggattcacgccagccgtcacgattcgtgcctcggatgtatggattacgctcaacggtaagaagatctcgtcacggatgagctcgggacattatggccgcgctgtcactcgtccacttacgccggcgacgtggtcaagcgaccgtcgtcgaggtatgcgtcgtccgccgtgatcgcgacacgctatgaccctttaaccatgtcgcagtacatcgccttagcatgtctattcatcgctggtggtcttgccacagtaacatccacgaattgcttgcgccagtaacttcttccctctccggccgccaccacgccatctccaattcacgggccaccgccctcgaatcatatcaattgagcgtgccatcggctcctctatgtagtcaagcacccaacacacccacccgtgcctctgattatccactagagagccccaattcgagacttcccccaaatcggtccagagcaccgtactgagtgagctcgccgtggccaacgctctacaggtccgttcatgccctttgtttcctcgtttcagtacccttatctgcctttgatgcttctcgatccggccgattaagctagaacccataagatcaccgggaacgcttcaagttatccgttgatcgcactgtcaccatgggcagagagattggggcctagaaccttgaaattggttgaggggaaatgattattaggggtcgaattaggtgacaacctcttctgagcaccggtcattgcgtatcttggccggtacaggctcgccggagccactgctccgtcgttcagcatcgtggacatggcgttgtgaaggaatagaaatgtgagggtctcggtgcaattgtcagtgactcaggaaatagtgcttcagaatgttttctagttgtttaaaacccagaggcctttgcgcaaagtcattagcgctggcgcgcacgggggcgttttgcctatcgtgggccgtcttgggccagattgagcccactactgttgatgctttccctttttctttttcttccagacttaggaaatccatagacaattctag

SEQ ID NO: 71227 - DNA, 313 bp, Zea Mays
aagctcccctagcgaggaatcgggctctgcttcaccggagaggccggcccaaggtcaccggacttcaaccgaccgccggcaaccgtggaccgaggtacaccgggcacctcttttcgattccttgcacggttagactccttagacctccacgaagctccctatgcccttggattgaaccatgccgccatggataggccggagcacacgccgccgacgagctcgcccgcctgctcacgtggaccgggcgattccggccatccccgacgacgagccgtacctcgacgtgatcgccagaccctccccgagccgaccc

SEQ ID NO: 71228 - DNA, 1592 bp, Zea Mays
ctcggcgcaaactgtatttccaggaaaacttaattaaaacctgatttaaattcaaacagaaactttaaaaacccataacttctgtttggtttatccaaatttggtcaaactaattttgccagactctaaataatgtaccctatttaggaaaaatataaaaccccttggtgctgtggaaaacttaaaagttctgatttaatgttaactttggccaaaagctaaataatagtaagaaaaatagttgggctatttgactagggttaggaaaatttggagaagtttatattcacctactaacctgtttaaaaatgttaaacccttctgtccattacattaagttagttttaaccccttattccataatatgcttaagtttaagaaaaataggaaaagtgacataaatattgaaccagaggggacctctatttttgttaggtcacttattcaatatagttcactagaaaaatacatcataccctgttttagtgtaaagtgatcaagatctcttttattttaataaaacaagggaaacttagaaaaattctacaaaaataaccccaaggtaaaaacacccccacccttgggataactattgttttattagagagaacttaggaaaaatatgaaatctgctgtttgacatttttcaaataataatgtagtagaaagagcctttttgaccctaaacttgagaaaatcataactaaataaccaccccttaattttctgtgatttttagcacagagacctattattaccatgagatgccagaaaaaaataacctttaggacagaacctacacataattaagaggtgtagtgcaaagaggcccattttgcataacttttgtcatctttgttaaagcctagtttttatactttaagcctcatattcccaaaacaagctagaatggcaaatgacaacccactgtaatttttacagaatttttagaaattattaaaatcttgttgtagttcaaacctaccttagaaaccctaaatggaaaatttaagaaaggaaaataaataatgtgaattaatgattccccaaaaccttgtaatctgtccactagagtgtatcaagaccctaccaattccactatgagtcctaaagccaaacttaagtctaaaaggtaaagagtctatctatatatatgtacaccactagaagccccacatgactaagaaaaccctaagttacttcttaacttagtttctttaacttaatgttcttaaatcttgcataatcatgacatacatgttcattgcattcgatagactgtaatcttgctgacggagagtacatcctcgtgccggagcaaggagctgcccaggaggttgcccccgacccagcaccagagcctgcacctgaggacctgcctgccactacttttgaaggcaagccccggttttatgcataacctgttatttatgctattttacttcacttaatgattgtaggattgattgtgcacttaggtgtaggaattgtttgaaaccctagttgcatgatctcaggaatccttttgaaatgaatactagtatgacaggtcgagtagttgctttatttaattaggatctcggtagaagacg

SEQ ID NO: 71229 - DNA, 774 bp, Zea Mays
cttctcgcagctaatgagactgcttgatccattgtactgcattgagtaataagtggaagtatgatgagttgagataagatgttgattgttaataatgcttgctaccatgtatgagtagatagtccacttttagccttaagagagtcacacttaactttgactaagttaaaatcttgatttagaaactcagctagtgcttttggcaaccaaaccccacagccaaacagctgcatgtctagaggtagaggagtagactcctcacaccgggtaagtctagctgagtattagtatactcagccttgcttgtggcaaaatttttacaggatctctggaggacatggttgctggagtgacttggccgtccaccttaccaccgggttggactgttgagtgggaccctgcctcggctgaggaggagcatgaggagtgatgggacaagctcccccatctctctgtttaattatcgttagttttattccgctgcacttcgaacaatgatgggtacttttgcaaaaactccgatgatgaagatggtgatgtaataatttaacattgtggcatgtatggttttatgctttattgtatttgctctgtgactcaccatcgagtgagattgtggtacttgatcctgtcagtggccgtgtcggactagatccgagggattgacgggttattcccatttaagtgtggtctagcctctaaggcagggcttaggcacttaagtcggaataattcgggcagttctgccacaatgatgatgagtttagtgagcat

SEQ ID NO: 71230 - DNA, 461 bp, Zea Mays
ggtcgggagctgtcgcgtgggttagttgggccgcaattggagtttcggcccattaaccctcccaaaccctagccgcctccctcctaacccccttcccccatgtgcagccgcccccccacttctcttcccccttggctgccgcccccctgcccatctcctcctctctcaattcttgcagccaccaaaccctagccccccctctcaatcccctcctcccaaggtgtcaatccttgccgctcggatcatcgtcgtcgtggtgcgagtcttcaatcgttttggtggagggaagaagggaggaaggaaagggggagaatccaaggtgatttttgtgttcatcccttgttcatttgcgctgcaatttaattgattagaggttgcgtttgcgattggggtagaggggggctgtccagaattttaggtggtgggtgaacagcagtagtctagcagtttatgtgtttttt

SEQ ID NO: 71231 - DNA, 855 bp, Zea Mays
gggtgatcataatttggtaatgatatatgtggtcgattcccatctggatgaagttgaagtgtctttttgaatcatgttatatgaagtgttgtaggcatgacatgcacatcgcatcatccatcttgcattttgaagttatgtcgtgatcttatggtccgaccgtaccggtacatttttagcatcgtatgttgcccgaggaggggtacgatgcggcttcatatccttagaggtatgaaggcagaagtcatccttgcatttgcagacatttgcactcatgaggaatatatgaagtgtgacattactatgttactattgtggtttctacctgcgaggtgtggtaactaggtgcgttgtacgttgtatacgtgctgcaccttcgtaataagaaggttgtggaattaagtggtggtaaaacaatgttcttatgtggttaaactgtttgatattattttacttgctgagatgtgtcatctcactcttgcattactcaatgcaggtccttgatacatgttgggaatgaggggagtagcagcacgtccactttcactctcacaataacgctgcccaggcgcagccatgatttaattagaaacttattgtcagaggaagtttgtttatttttttatatggtcgtgcgcactggttaattcagttcaggtcgtatgtttatctttccttgctagccgagtaataatacttagtatgttttagtcatgatatatgtttatactctgttgctccctcttttatgcaatcttgcaaaggggatgctgccgaaattttatatatggacgtcggaagtgtagtacagtagcataccgggttgtttgtggaacctggagtgttacaccacat

SEQ ID NO: 71232 - DNA, 428 bp, Zea Mays
aagcaacgaaggcagctgaaaaagctgcggaactcgaaaggcggataggttttgcttaatagcttttaactttattgtttatttttatgacttcgaactgatttacattttctaccacagctgaactatcgcctcccccagagcccttcgagtcattggtcgacccagaggcaaagggatcagcagaaattattagcatggctgaaaccattatggacgaagtcgttactcaactgctgaccgaagctgcagacaaagttttgaaagaagaagaatatatattgtaaaaatattgccaaaatattaatgtaacatttgctagactatgcttgtaatatttggtgctcatgggtttttaatgtaatgtataaatgactttgtaattcatttctttgtgatgcatgaaacttttatgtacataccgtttt

SEQ ID NO: 71233 - DNA, 353 bp, Zea Mays
ccctcccacacttggccgcccctccctcctttccccttgggctggccgtcctctcctcccatggcagcccctctccacggcttcctcctccctctagatctccccccgcgcagcaaggatcgagaagaggaggagcacgttgaattgaaggggaagagaggatcaaggagatgttcttccccatctcttctacaagaatttcttggggaaactctaggtatggatgagatccttgttcctccctgtaattatattcttttggaggttttggatcatgggaattaaaggattagaggttggatttgatgtggggttaggttttgatctcgaatttagttttctgcagaatggca

SEQ ID NO: 71234 - DNA, 3509 bp, Zea Mays
atggttcccttttcgatgcatgcttgtggagccatttttttagaccacctatctattggtttgaaggaagtcattgcctagcctagagttggttgggtgtggctagtcacctactcctagatgatgtggtttttacatcagcttaatatgtttgtcaaatgtgtgaaggattaggggttattattgactttgtatgtctggtactttgagtgcatcgtatgatagaatgaaatgtaagtttctgaactacagtagatgaagacttatgttatgtgtaggttaaccttactagtttagatatttttttcctagttgagttgttggatggagtatagtgacattggttaaccaagtattgtgttgttgtgctgtcagtgctctttgtggagcttttggcatttcttcgatgaaatgtgccgcgcagaatgttattggcttcttgttgactttattgctccattagttctatagattttctcccttttgtggggtgcaaagaatgttagattacatgattatcttttcattatggcaagaacaaggtttaggaagattaggagtattgtttcaatagaactacttgtttcgtggtgctgtgaggtgaggtgtttgatcttcttatacattcatctggtgtggatgtttcaccattaaattaaaatgaattgttgaagttggtaaaggttgtgcttagtgcatattaccccttcataaaagagtgtcgttttaagacattgatgcggatgtatggctgcatccaaattcgatgttgtgaaatcgtagtgttgattgcatctatgacttggtttgagcttcattacatgttggttcatgcttgatgtcaggtggtgtagtttccatagacatttagtccgaggtagaagttattgtgttaattaagaccaataatgacccatgttttggaatggtggtgctatatggggtaccttggatgttttgtttggagtggacgaattcgaggatgaattctttttaaggggggtagagtgtaatatcccaaaaaaaagttgccaaaggttgatcttcggtgtgtggatgtgggaaaagggttgtgggccgttggatgctaagtcggagtcatatgtggtgtcgcttcttttctcccgaaaagaaaaccctagtggtggcttttttccccttttgcccctacttcgccgtcaccccttccccccccccccccctcccacacttggccgcccctccctcctttccccttgggctggccgtcctctcctcccttggcagcccctctccacggcttcctcctccctctagatctcccccccccccccccccgcgcagcaaggatcgagaagaggaggagcacgttgaattgaaggggaagagaggatcaaggagatgttcttccccatctcttcttgaagaatttcttggggaaactctaggtatggatgagatccttgttcctccctgtaattatatgcttttggaggttttggatcatgggaattaaaggattagaggttggatttgatgtggggttaggttttgatctcgaatttagttttctgcagaatggcagattcgacagtttctgttcatgccagttttccgtggtcttagtggcctcaaaaaaataaaaagtctatatatgagtcgtagatcatttgtagatctttccgtggccgcgaagaacacctaaatcggacatcagaacagaaagttatggcagtttgattatagcagtttttcagtctcataattctgtgcagaatttgttctcttaagagttaggcaattttatcaaccgaattaaactgtgagttggtaaaagaagttgtagataattttataagatttccagattgttaaagagtgcattcatatgatttgtgaaactccagttatgtttgttttactgtggctgttcttgtttacctgacaaaaatgagtgggtctgttcactggtgggtttcatctagtaaatggccgaattggctcttccaactatggagaattttgtagagggataaaagttcttacttccagcagaatttcataatttttggttcagtagtttgggagatatcgaattttaaagttaaccatactgctgtctaaaacagattcagtcagttatcttgtcagatgttttagaacttgtagatggcagaatttaattatctattgaatactgaagttgtagagtattttgtgtagatactcctagagtatttgtttgatatcaccgctgttttaattttaaagatacaaaattaacaaacagcgttgctgctgtatggcatgtggttcagggtgggagtctttccactgggtcttggtttcaagtgtaggagtgttttgttgattgatgacaaatgtttgtgaaatatttgtactaagttttatgcccgctagcaggtggctacactccagatcatgtctagtacatttcttcttcttcgatgaaggcaagtgaatgtagcagtggttgcttccgttctgacctgttatttctattgcctacactctaatatttagaagtattggattctttcataattggacactatggtgatgctttacttgcttgcattatactgatgctcaatcatatattcacacccctgaaggtaaatgaagtattatttgaggttggtattttatctgaaggtaaataaagtattatttgaggtttgtattgtatctgaaggaagtgaagtttattgataaatgcagcatgccatatacattgcatgactcatttgcatctgaagttttgtcgtgacctatggtccgaccgtaccggtacaatttagcatcgtatgttgcccgaggaggggtacgatgcggcttcatacccttagaggtatgaaggcagaggacatatgcattgcattcatatgcattcgttgaagtgatatttgtagatgatgtggttttatacccctagaggtatgaagatagagtatctacacattgcattcctatgcatacattgaagtgatatttgcaggtattgttgacgcagggaagtgttatagaacctattgtggttgttcgaggaaatgagatggtattggttatagtgggactactgagttctatatctacaagtatttctgattttaattgttactcttttaaaatgttgatgaattcaatttgtggtttaaatatctcgtcaaaataattcgcttgctgagatgtttcatctcactcttgcattactcaatgcaggtgcttgttgctcatcaagggaagtgggaagtagcagcacatccaccttcactcttataataagctgcttaggcgcagtcatgatttaattagaagcttcttgtcaaaggatgtttgtttctaactagttgtgcgcactggttaatttagctcatgtcgttatggttgtcttcccattgctagcagactattaatgtctattatgttttcttatcatgatatctatttatactttgttgcttccccgtttatgcagttttcaaagaagatgctgtcgaaattttata

SEQ ID NO: 71235 - DNA, 563 bp, Zea Mays
aatcagcatcatcaaacaaccctcatggatcgcccagcctatcgtcgaactagtccagatgtccaccttgctgaaatactttgtgcacatgatcttatgtttgttggtgtaggtaatactttgtgaaataacttggtctgaactttttaatattggtaatactttgtgagatacttgagacttacgtttgtgagtgttggagacttatgtttgtgaaacttgtttgatgtggtgatatttgtgagatatatggtattggtgatatatgttttgattttgtgatatatgtgatggcaatgatatatatcttttgtttatttgaatgtaataataaaaataaataaaaatggggttttctagtcactttgcccagtgtaacactcgacaaagaggtactttaccaagtgttaggcacacctgggaactgctaaagcttctttgttaagtgttgtagcctcgacactcgagaaaaaaacaccctttgcgagtgcctcccagtgcactcgacaaagggaccaacaaagggggccattggtgctcccttttgcggagatctagtccat

SEQ ID NO: 71236 - DNA, 676 bp, Zea Mays
ctctgtgaccatcgagctcttctctagcggccatccttctttgttagccgtagccgagtagcgcgcccatctccctgctcacatcaacaaccttggaccgcgcgctccggcgtccgctcgccatggagcttcttccctgcgcgcgcccggccctagctcggccttctccccggagcccggccggagctccctccagctcgtccatggcagtcgcgccctgtcgaggttgctcccatggtcaccaatgctccctttgctcgtctccatggctgtcgcatcctttggtggttgagctcactgttgggatctgcttcgtcgccgaaggtcttaaaagaagaaacaccttcataagatcagtacagaaataacactgaagctaccttctaggaaacttcggcataacaacatgtctcgagatgaagggttgcatcgacttaaagatgaaaagacagatcgatccatgattatttgtgtcttgattgtaatcggatgtaaagagtataaatgtaatttcacacaggctatgctctgtgcctataaatagatgaacaataccactgtactgttcacgctgacttgtactcgctcgtgcgacacgcttgtactttctccttctgtcaagccgaaggtacaaatgtaatattattttatttatgtttatccatgaaaatatgaa

SEQ ID NO: 71237 - DNA, 632 bp, Zea Mays
aagttgtaccggtacggtcggaccataggtcacgacaaaacttcatatgcaaatgagtcatgcaatgtatatggcatgctacatttatcaataaacttcacttccttcagatacaacacaaacctcaaataatacttcatttaccttcagatacaataccaacctcaaataatacttcatttaccttcaggggtgtgaattaatctcatgagtcatactcaaatcataatcatcatcaatatatgattgagcatcagtataatgcaagaaagtaaagcatcaccatagagtccaattatgaaagaatctgatacttctgaatattagagtgtaggcgatagaaataacaggtcagaacggaagcaaccaccgctacattcacttgccttcatcgaagaagaagaaatgtactagacatgatctggagtgtagccacctgctagtgggcataaaacttagtacaaatatttcacaaacatttgccatcaatcaacaaaacactcctacacttgaaaccaagacccagtggaaagactcccaccctgaaccacatgccatacagcagcaacgctgtttgttaattttgtatctttaaaattaaaacagcggtgatatcaaacaaatactctagg

SEQ ID NO: 71238 - DNA, 681 bp, Zea Mays
aggcatgttattacccatagatgttaacaaaaataacttttagtatagaacccccacctaaatcagagttgtagtacaaagtgaccacctaccctcacttttgttatttttgcctagagtatatcctaattattcttaaccccaaatatgtagcataaactacagtgaccaatgttaacccactgtaatttttgcaacatttttggaaatttctaaatcattatggtagttcaaacccgccttaaaatcataaatagaaaataaaaagggaaattgtggaaggaattaatgttacacaccccctacaaccagacctccctaagtggccactaaaactttaatgaatgattaaattctttattccactcaaaaccctaaactaggtaagtataaagcactaataacttcatacgataaagaaaccctagtttacccactgccgtaatattgcttcaccatacatcgtgtttactagatttgcatatcattaacacacatgtatcttattcattgcattcgaatagattgtaacctcgctgacagagagtacgtcctcattccggagcaaggagttgctcaggaaggagtccaggagccagcaccagagcctgctatcgaggatctctctgccccagcttttgaaggcaagccccggttttatgcataaccgttatatatgct

SEQ ID NO: 71239 - DNA, 293 bp, Zea Mays
ttacaggttctctagaggatatggttgctggagtgacttggccgtccaccttgccaccgggttgggcagtcgagtgggaccctacctcagcagaagaggagcatgaggagtgatgggccaggtttccccgtcctccctttgtttaccgttagttaatttccgcttcatcaagaaccatggttactacttttgcaaaactccgatgatgatgtaataacattatgtacttctttaatttatgtttttatgctttattgtattttctctatgcctcgccttcgagtgagtatgtg

SEQ ID NO: 71240 - DNA, 341 bp, Zea Mays
gtggtgaggacaagggccatactacaaggatgtgccatgtcaccattcaaaaacaaaaagaaatagcagaagctgcagctcagcagaaccagtcgaagcaggtcttgcatactacttcgtatcactcaccctacataccagagtatgtgggtaaccatcctgcagcctctgttgctttgtctagtcagccgcaggcatcctggccacagcctccacctccgccaccactacaacctgcatattcatgaggccagcagccagaagggagccaacagacccatcagcaacgagacttcagggaggagtccaaagctcgcacagtcaacagtactgtgtcagaa

SEQ ID NO: 71241 - DNA, 336 bp, Zea Mays
ggatatttcagcttctgggtatagtgttgagcttctcgtttttcttctttagagagattttttctcgaagcatgacgaataatatattcagtattctctttcaaagcttcagcagtaggagcggcagattttttcaagcaaaatttgttctatagcttcttcttccactgccttttctccaatttccgaggatttatctttggtgggctctgaaggcccagtttcaacgtcggcccggctcattgtagcttcggcttcagtcagctttgtttcggtttcaacatgtgttttcgaagccttggcaatttttcctggagtagagcttgaagtttttat

SEQ ID NO: 71242 - DNA, 576 bp, Zea Mays
atctcatatatctttaaaacttcaaccacaaatctgcttaaggggaaccaaagcccagccttgaagaagcttcggtagattacgacttcattttcttcaggaacaggaacagtcctatctccgttgtcagctctcacaatagatatatctcgaaaataccttcctgtcatgttatcaagatgactctgtctgatagtcgatttcccgaagactgcgtgacttggacgccagggccgatcttcggagtcttcgtccccactttccgcgtaataactatcgctgtcatcggtatcttctgataagtcttctagaatttcttttgtaatcttttctgtatttgtctttgcaattgactcaatgaatccagcagtcttttcctcaagaagcttctcctcttcggttagcttcgttttagcaactgtcttcttgtcttgagacatcttctcttcggaaatggtgaaaatgtgttcttaaagctgaagcttagaaaatctaaaaaaccaagcaagcgttggtaggcaagagctaagaaattgagcaaacaaaacaggcggcaagtagcgtagcaaatgtgct

SEQ ID NO: 71243 - DNA, 228 bp, Zea Mays
ttatgatgccccaaacacagcaaaagatcactgaaacctccaattttcagttactgaacagcacagcctcaacttgacagggaactttctgacacaacttactcccggttttgtaccgcaccaagtcccaccttcctaagagaatttgttcactactctatggactttcattttgttatagggactttagcttaaaactccttagattaagtacaaaagatccccaat

SEQ ID NO: 71244 - DNA, 132 bp, Zea Mays
ttaccacaaggccccaaagttgggtaaaaacacacatattcagactttggttttatactgtctgaatcccaacacctgatagacaactttgagcacactttactccactttttatgtgaaaccaagttcatc

SEQ ID NO: 71245 - DNA, 261 bp, Zea Mays
cccccccccatttctccccctcctccaaggtgcagccctcccgtgtgattctccgtcgtgtggctgcgatctcaattggagtttggagggaggaagaaggaaggaggaagggaagaacctaaggtgaatttgtgattaacttttgttgtttttgtgctgcaatcaattggattatgtgtttatctttgcgaatcggtagaggtgctgtccaggaattttgtgagtgggtgaacagcagtagttctagggatttctgggaat

SEQ ID NO: 71246 - DNA, 346 bp, Zea Mays
cagcattcattgctattgcactgttttgctgccaaaattttaaccatagccgaagcttgactctcgcaatcaaacgaagctccagtttaaagcctacttcgtcagaagaaaaagcttcggaagaaaaagtttttagttcccaaaaaattcataattaaatggccagagtgcgctctaccgctagggttgagcgtgagggaggcgaggctgaaggatcggagactgttcctatctccgaagcgatgcaacgatctggactggtgacctcggaagcaatccgtactgccgagacagagcagactgttgctgagacagaagaagttgttgccgaagcggaagaaggaaa

SEQ ID NO: 71247 - DNA, 2798 bp, Zea Mays
gttcgactgccctaccattacaaattcaagaaatactttaaagtaccctgccaagaatggcttgatacaattgaaataatgagcaatgaaattcttgggaattactctaagaaagaggaccaactgatgacagcggccttcggcactcggccgaaacgaaggctgaacagggtacttgatgccataggatttgaatatgctgactacggtcgactgggcggagatgctgggggcccgaagcgaaaaaggattgctagcactactgacgaagaagtcatcaaggcagcaaaaaagaaaaagaaagattctgacaacattagtgctgaagagttaaatactgagccgaaggtggctacaacaaaaaagagaaaaagtgcatcgccagagccggaaacgccggtccaagaagaagaaactcctgcttctccttctgctgttgaagtagaagaaattatgaaggtaatgactgaacctttgcctttcaggctaagtccgctggcactggaactgacgaagttttttcagaaggacaaagcagcttcggcaatagaaagtcctgcgaagccaaaaaagcggagaattattcaagtaacagatgtgatccatcagacgccgccaccggcaacggtgtcaaaaactgtttttgctgaaactgccgaagccgaagctactgaaatgaaaactgctgaagctgaatccggcgaagccgaaactaccggggccgaagccagggccaccgaagagtcgaacctgaaaaccacacttgaggttattgacaacatactgctgaaaatggctgaagaggaagctaccgtggctacaatgaatacggcaactgagaaggggaatgagcaaattgatgaaatttcagaagaagaagattttaactttcaagatttgctcggacaagaattaacggacgccgaaaaagaggagttgagaaaatatgccatatcttgcggatacaaatcgggggctatgctttttggtggggttaacgaagggaaattaagatgccttcggaaccgcaccgaagccaaaattgttagaaccctttccaaaagcattggcttgccgaagctggaagcggacttgtgtcgttatcaacgacaccacattgccggaagcttgctttatgctaacttcaaggtaacaaatatttttgttattttattattattattgttaacttctgtgttgtgttctgacgaagatcacttcgacagagcatattgttaagcaaggttctaaagatgcaacaagatctggaggaagagaaaaacaaaaccgtcattcaagatttggctgaaaaagttgaaaaccatgaaggcaatctgaaaaagaaagacttcgcaattcaagatcttgaaatcatggttaaagagcacgaaggtgcactagagaagaaggattttattattcagaccatggagggctctttggctgaagtccaaactgaaaatgacaaattaaaaaatgaattgctccgtcaatcagaaaaattcgagcaagaaaagaaatattttaaggcaagcctgaagactgaagtggataagtactcaaatctgcagaaatcctttacagaacttcaggaaaaatgcttaagcttcggcatccgatgtgtgcagcggctgaaggacgtatttcactctgtcggagctagctcttcgaaatttacaccttcagctgaaaacttgccaagaacattagaacacattgaaggcgaagttgatgcccttgatgaagttattggtgggcacgctgacttctgcgccctggtagcttctcggggcacagctgctgcttttttgaaggctggctgcacacatggaaatactgtgaacagatcaaacttcagcctgtcagcttcagatttgttagatatcccaagcttagccagaagcatcggaaatagattcatgacccagatctgggtaagtggtgggcggaaaatggcaggcgacgaagctcgaatccatcttaagccggtaaaaaacttatgcttgttacttttaccttctcctttgaaataggtgtgtgtttgatggctgtagcccgagtgttgtgatcgccctctcggctgcaagggaagagatgttgtgctggcgtttggctggcgctaaagctctctcttctttccatctagaggagttgttttaagagtggtgtatttggtggtgtgtgtctgtaagtctgttgttcatgttttttggggtttcaccccttttctcttcttaatacaaaaatacgcagatctcctgcgtattcaagaaaaaacgaagctgaagattgacagtgctgaagtttgacaaaactgaagacgaagctttagctgaagcttaaaattgcttataatgtgctttcctgcaaaaattcttggagaaacttttgtaatatagatatggagttacttatgtaaatttgtacataccttgtaatatattttgtctcctttaaccgcatccagtctgctttgctgtggacgaaacttctcttttgagccgaaggcgaaaaacaccttcccttcttttcgtacacaacgaagcatagaaaattttccttcggatctttttccctacttttctttctgaagcacctatcttttttgtgtagcatgatgatgattctatatatgtctaaatggatgttcatgaatacaaatgacatgatgatatgttatgtgcaaatgaatattaggacacatgctcaaaaaaccataagcacgggcccttcgtcccctcaagaatgataaaaatctttttgccgtttacttttcgctgtatcagcgttgacttttc

SEQ ID NO: 71248 - DNA, 766 bp, Zea Mays
caaagataagctggatgcagaattgcttcgaaggcattaaaagtaccacgaccaatgattgcattgtaagggtactccatgtcaacaatatcaaacataacttgctcagtccttgtgttgttgatgaatccgaaggccactgacattgagattttgccaagtgctacaatctaccttcctccgaagccgcagaggggatgtgtggcatcaagaattttatcttcgggctcttgcatctgtctgaaggccttagcaaatatgatatcagctgcactgcctgtatcaaccaaaacattgtggaccagaaatcctttgataacacaagagataaccatagcatccttgtgtgggtaatccttgagttgaaggtcctcttgggaaaaggtaataggaatgtgagaccatcttgacttgacgaagggtccttgcaccccgacatgttgtacccttctctgtgcttccttcttttgtttcttgttggctggttctgaacatgaaccgcccgttatcgggagaaccagcttcggaaccgaagcagctccagcttgaatattgaacgaagccattagctcagaaaagtggaagtgagttcaccggaggtgggcgccaatgttggggactcgttctcaaatgctatgaattaagaacaaggcaacataaaatgttaaatgttaatacccttcgtccaataaagcattatccctttaaggataatgaacttcagacgaaggttagagacgatacaattacgaaggttgaatcttcg

SEQ ID NO: 71249 - DNA, 591 bp, Zea Mays
agcggaaaggtactttattacatcaagatgtccaagacatctatagagtctactacataaccattgttcaacataattatcaaagtgtagaaatgcgaaacgtagatgctaagcctacacaggcagctgactggggtttgccactaagaaagaactagaactcgtcgtaatcctcaaactcctcaaaatcttccatgttttcagcatcacctcctgagcattgggtacactggggacaacctggggtgaggtggggagtaaagcaagggtgagtacacatcaacgtactcagcaaatgtcccgtttggctaaggtggactagctgtatatggagttgaggtcaagcagttgcttttaggttagtcaagtatttattatcattagtagagccaacttttagtaataaacccagttattacccagaagtacctcctcaaaagaggaaataccagagatcagattttataacatcattattaaccatcatcataaaagtatccaaagttcttctaatcaaagaggatcccaaggctgctcttaaccgtgagcttggctgatataccagtttttaacactctgcagaggttgtac

SEQ ID NO: 71250 - DNA, 381 bp, Zea Mays
accagtgaccctgcccgcgtaatggtgtggcccacgacgaatcttcaattacggcaatgagttccgcccgcctcgattggtttctccgctcgcccacggttcccacaccttcgataagactgggtaacctccgcccaggccccagacggcgctggcaacgagtaggaggcgcggcggcgcacccgtatgctctctctctctctctctctctctattctatctgtgcggcgcaagctcacgcgatgaaggcgtcggtggtggagaggatatatctaggcgcaggtatgacttcttatactcgtggcgaagctggcggcccaaataaccatagtcggaggccgcggatctcggcgcgcctccgccatgcgtggcgagtccgtt

SEQ ID NO: 71251 - DNA, 832 bp, Zea Mays
atataataataaagtgcatagagataaatgtcataaatatcataaatgtacttattacatagcaaaagtcttacaatgataaactaagcgaactaaatattattccctggcgccacaaagctgactgagagacgccacctagatcaagtcgaaagcctcagtgctagacggctcctcttcgaccacctgttcttctcctatgggggtgtgagacagcaagagtgagctcacacatgttcatcgctcaacaaggtttagggaatattgtgcatgaatgtaacactccaggttccacaaacaacccggtatgctactgtactacacttccgacgtccatatataaaatttcggcagcatcccctttgcaagattgcataaaagagggagcaacggagtataaacatatatcatgactaaaacatactaagtattattactcggctagcaaggaaagataaacatacgacctgaactgaattaaccagtgcgcacgaccatataaaaaaataaacaaacttcctttgacaataagtttctaattaaatcatggctgcgcctgggcagcgttattgtgagagtgaaagtggacgtgctgctactcctctcattcccaacatgtatcaagtacctgcattgagtaatgcaagagtgagatgacacatctcagcaagtaaaataatatcaaacagtttaaccacataagaacattgttttaccaccacttaattccacaaccttcttattacgaaggtgcagcacgtatacaacgtacaacgcacctagttaccacacctcgcaggtagaaaccacaatagtaacatagtaatgtcac

SEQ ID NO: 71252 - DNA, 560 bp, Zea Mays
ctgaattataactccgaatcgagcacataagtacttgttggaaagataacataaagccctacatgattctcatactgattaacactaattactcccgaaaaatccccagaaactgctaatactgctgctgttcatccccctgaaaaatctgttttttttggacagccacacccggattcaaacggtgataactttcaatttataactccaaattgagcgcataaatactcgttggaaaggtaaggtaaagttctacatgatccccaaactgatttcccttaattcctcacgaaaaaaacacagaaactgctagactactgctgttcacccaccacctaaaattctggacagcccccctctatcccaatcgcaaacgcaacctctaatcaattaaattgcagcgcaaatgaacaagggatgaacacaaaaaccaccttggattctccccctttccttcctcccttcttgcctccaccaaaacgattgaagactcgcaccacaacgacgatgatccgagcggcaaggattagcaccttgggaggaggggattgagagggggg

SEQ ID NO: 71253 - DNA, 371 bp, Zea Mays
aaagttctacatgatccccaaactgatttcccttaattcctcacgaaaaaaacacagaaactgctagactactgctgttcacccaccacctaaaattctggacagccccctctatcccaatcgcaaacgcaacctctaatcaattaaattgcagcacaaatgaacaagggatgaacacaaaaaccaccttggattctccccctttccttcttcccttcttgcctccaccaaaacgattgaagactcgcaccacaacgacgatgatccgagcggcaaggattagcaccttgggaggaggggattgagaggggggggggggcggctagggtttggtggctgcaagaattgagagaggaggagatgggcagggg

SEQ ID NO: 71254 - DNA, 1785 bp, Zea Mays
gtggtcgctccatgttcccattaacataatgatcttatcatgaacataaataacataacagaataataggaacatggatataatgaaatattaacctgaaaccacataatgcaatagcataactaaccaagtgaatcagaggtaaacaaggtaaacaggataaacagactagggtgacctattgggtcccatcaaaattaaacctatgcattgaatagtggtaataaagaatattattgggtaatgttggaacttgctctcctgggcaagttgatccaacgggggagtggaaagagtgcaagcaaggtttagctcgagatggcaattgctctgttaatccggcctatcaagggcactgtacaggggtatttataggtgcccgagtgtccaacgtcccaatgtaaggacgtttatgccctcgggcacctggactatccccagaatattcccataaggggggtgggttacagaccataattatagaaaagctattacaaatcaggcccgtaacacgcttctccgtgcggggcctgttacagtgggccgaatcccacgtgggcctccaggtcgggtgaggacgtgggatggagagacttcgtcgtaggccttcgtcttacaatgaggaggacgaagggtgggccacgtcggcctgagcgaagggtagcatcttcgccttcgccccaacatttgccctctgagggaccagttcgactgagtcatctggtgccgaagacgtcgctagatggtggagacgctaccctcgctcgaagtggttccgtggggttttttgatgtgaccgttgatggacctggtactgttggactgtgggcttcctgaagcgtcgcgtcctgtgtataaaaaggggggcggcgtggctcaggctctcttacctttctgtgcgctgcaaaaccctagcattttgaaaccgttcgcccgctcgcctgccctcctagttcctcttcatcggagatctagcctgcgtcaagcagactgcgcgccgccgccgacggtacgttgcaatgtcatcttcttcttcattcgctgcgaatacaccgttgggcgaatcgttgtccgaggataccttcagcgatttggcggtgatggagttacacccgggccacacggtggagtttggcgtttcaaggatctcctcggttcgcgtgcaagacatgcagcagttggggtattttgggaatggagttggacgagttccgggggcagaagagattcctgagccagagggtgagatagttgtgttcgaggcattctttaccgccggccttcgcctacctgcgcatcattttgtggccgaggtcttgcagaggtatgacgtgcagatccatcaattgacacctaatgtcgtggtggccctggcgaagtatgtctgggcagtgacttcgtatggcggtcagcccaccatagaggtcttcgccaagaattattgtctgcactggcagaagagaaaaattggaagcaagatagcacagtttggatcatgcacctttacactgaggactgggaagacttcgacggaagttgtgtaactagttccctgcgcccgcaacaagtggggcaactggtatgattattggttttatgtgtcgggaggcgaagtcgaagacctcccaggactcccggagtccgtgatgtgctcccactgttatgtggcgttcccgccgtttgaggtggcagaggatgatagggtagaaggggcccttcggtgcgctgcccgcatgagtagcgggcgcgatttggttgaggaatttataggttatggggtgtggc

SEQ ID NO: 71255 - DNA, 250 bp, Zea Mays
ctcactaggcttttggtgcttgcaatgctctaccaatgtgctggaataaatgtggagtgcaagacattgaatatggtgggtggagagggtataaatagccctcacccaccaactagccgttacaggcaatttactgcgtgatggcgcaccggacagtccggtgcgccaccggtgcgccaatggtcacttccaacggctagttctgacagagagccgttggactcatggcgcaccggacagtgaacagtcc

SEQ ID NO: 71256 - DNA, 3042 bp, Zea Mays
agggtaccaacagggggtccagacaaaatcgaaggcaccactggagcgtgaagcggagggggcggagcagactgaaccggaggtgctgaaataccagaatgatgaagcatgagagccatgaatgccctattctctgccctatcctgaatgagctgctgctgaagtgcatcctgcctgtcctgcatgctctgaaacatcgagagcatcgtctcggataaccgggcctgctcagctgccaggttggccagaatcgccgcaagagcagggtccaaagctggaggaggagcaggggcagcacgagaactcccagcctcatgatcatgggagcatggaggcataggaggcggaggcggaggaggaaccccaaaatcatcatcatcatcatcatcatcagcggctgtaccctgagtgtcaaactgtcgaagagctgcatcctcggcctgagtgtcaaacacagaagcagaagctggcactggaatctcaggagcagggcggtaaaatccaaatacaaggcgtgaggcctcaagagtgctctgaaatcgaggtggctgaatcagctgcgcaaagatgtggcacaagtagtgagcataaggtagctgccgacgagcacgaatcccatccagaacgatgtcctcgatctcacagatcagaaagtccacaacatcaaactcagagtgggataccagggcaccaaggagccaaagctgaatatgagtggtagcctccctgtatcccatcctcggcaggagtgtccgtctgatgagctcatataggtacttcgctgctgtagtaaagtctgctggagaacgtcgcgacccatctgtgaaaggcgggcggaacagagccgcgacgtgagctgtccctggagccacaccgccgtgagggcgacgaggaggatcagaagtaccgtagcagaggctgtgaaggcgagtcgtcgactctgggaatccaaagagctgttggatctgactggcagtgatcgtgacatcctctcgctcaaagcggaacctcatccagtgatgatccgggtcaatccaaacagaggcgtagaagacgcggacccactcctcaacatatctgccgctgatagtcagaagggtcaggaggccaggcagataggtgagatgcgcctcagactcagcaccggctgctagcaaaaaagctggaagatccaataggcggtgcactcgcagcgctatctgagcagacatctgagctctgaagaatgactcgtgaatccgtgtgctgaaaagaacacctgctgctgggtctctctgagcaggtagccaagactccacgggtacgtacctgaaccgacgtacccgtgctgcagtagcacgctgaagatcaaacagacgaggacccgaaaccagaggacggacctcagtctcatcacgctcccggaatcgaggtggaggaacaggaggagctgaagcgggagcgggagcaggggtagcagtggaagctggcgtagtgctggtagtgggtatggctgtggaggtggatggagcaataggagtgacgggagcaggcagggtgggtggcggagtggaagcggaggtgtgagtggaggagcgagaccgggaggcgagacgacgagcacggaatgcaatctgatcggatggaacatgcggctgatctccaagtgcggcctgcgcagcggctgcggcagctgctgccgctgcacgggcctctctgtccgtacgccgcttcttgtggccttcctgctgctccaaatagacagtcttgcccttcacctgcctgaatgggcgacgagggtcctcgtcatcgccaccccctgacgccgacgcattcttcgtgcgcggcatcctgaactaatgtctgcaaatgagatagagagactaagcacagagcaaaagtgaccgacagatttagcaaagagtgagatgtctacctggaaagctcacacgagaggtgacgatccaggcaggacgggagatggcacacggtcaaacaaggtcactgaaatgacagaagaggtgagcacgtattagtcacatagtcataagcatatgaaatgtgaataaatacatacacagaaagatatggcatgagacgggacgtgcaagaagtcaaaagacgtgaaaacgacgtttgacgggcaaatagtgtcgtaggatgtttggaattcgaattgaggcacgaaatgatatggaattgagccgatacttcatgaataggttcatataggtgaatatgagtgaagtgtgtgcttggtttgaatttaggcgaagaaaaaggaatttgggcactcggcttggaaacgatcgctcaaaacgggaaatttggtgaaatttaagcctgggatctcggattggcgtgaaatttggcaagtaggttactggaagtgttgtgaaggtgcctgaaaaatttgggttcaattggagcaagtttggctggtttgggcatttcaccgagcatgtggcgtgcggggagctagggttttggtgaaacggccatttgaggtgggaatgccctcccgaaggagctaaaaacttgcagggatacacaatagagacattagaactcaaaccaccaattggattcacaggaattcaccagatttcaagaaatttgaagagttgcacaaaagggagaagagagggactgctgctcacaggaagagagggagaggagaacagagggaagatatgctcaccgaggagggggatgaggtcgccggaggtcggtggccgccggtggcgggagttcgccggaatatcgccaggagcagagggggtcgccgtgagacagagagctcgcgggctggaggaaatgaaagaggcctctggctcggtcgggctgggggccgttttttaaaacgcgagatgggcacaccggacagtctacagtgcctgtccggtgcacaccggacagcgcacagtagctgtccggtgaaccaccggacagcgcacaggaaaattggattttagcgcgcggctgccggtgcaccggacattgcacagtgcagtgtccggtgcacaccggactgtccggtgagcccagacagaggggagtttg

SEQ ID NO: 71257 - DNA, 593 bp, Zea Mays
gagaagtggatgatggcgatggtggtggtgaagagaagtctccggcgatggccgcaactttttcatcattctcttcttcacttgaagaagacccacttgatgattcgatgttggtgagccagtcgccaacaatatatgcctttccattcttcttcttgtgaaacctcttttgctttccatccttcctcttgaagaatttcttttccttcttttcatcatcgctgtcatcttccttcttgcccttgaacttgttcttcttgggcttgttgcattgatgggcaagatgaccaagctcaccacagttgtagcagtccatctcagaaatgggctttcttttgttggaaaagaacttcttctttcttgaatcaaatttgatgccttctctatttagcttcttcaacatcttggtggtcttccttaccatcaaggcaatgtttgcatcaaggtcatcatcacttgaggactcttcctcaacttgtatttttgctttttcttttctttcatgatttgctttgagagccaaatcctttcttttggaagatgattcttctttgttgatgtgcatgtacatttcatgggcattgatctttccc

SEQ ID NO: 71258 - DNA, 580 bp, Zea Mays
tcgtacccctcctcgggcaacgtacgatgctaaaaatgtaccggtacggtcggaccataagatcacgacataacttcaaaatgcaagatggatgatgcgatgtgcatgtcatgcctacaacacttcatataacatgattcaaaaagacacttcaacttcatccagatgggaatcaaccacatatatcattaccaaattatgatcatccacaatattagacaattgagaattaatacttccaaacaaataaacttcatcatagaattcaatgattaacataattaaaacttatgcatactcaatgacagggaataggatgcaaaccaaacggtagcaaccaccactgtatttacttgcctttaccggaagttcgggcaaatccctaagtacgatccggaagtccaccaccttggattctccccctttccttcctcccttcttccctccaccaaaacgattgaagactcgcaccacgacgacgatgatccgagcggcaaggattggcaccttgggaggaggggattgagaggggggcggctagggtttggtggctgcaagaattgagagaggaggagatggg

SEQ ID NO: 71259 - DNA, 998 bp, Zea Mays
ttagacgatgtccacttgacgagcatcctttggcttggtactcgttcagattatccatcttccggttcgtccatcagcatcatcctgcggattagtccgcgcttggggtcgacttggcttgtcttccgctttacgtgattatttatcgtacctcatgagatgcacaatgcacatgtatgagcacaagtataacgagtataatatagataatctactaaaaaggataaaacacttaaaaccaagcattaagcactatggatatcacagcagggcatcgactacatccattaatcaaattgatatgataacactggaatatctatttttattcctagctttttattaactctttaaactatgtatcttaattacttgatttaccgatttatctaaatcgatcatcacaatatacgcatgctaaattaataacatttattgtgatcaacaattctatttaatgtatttatagacctagttgactggaatacgaattaacttacccttatgacatccgacttgaaaccacgaaatcgacgacgcctttcagctcagcatttcactgaaaatagggtgagtattgcgtcgaatcgcgcttattctttatccacgtcgagaattctctggccgcgtactgatttatttccttctgcgcctaatcttctcagatcttggcgtagacgagggtgacgatcgacgacttgtttgagcttttgtcgagcacttagtgaatatcaccctgctagcttcgtcttcacctcattcttgggatttcttgatgatgcacggaacgactacgaccttcaattgaagtcgggagcgagctggtgaggtggggtttagcaggagatgacgggtttgacgacttgactgtgaacgacgcaacgacgagctggggcaggatccaagctaataggcatagtatgggacagcgaccagcacgacggatgaaccaagtcgcggcgaggtcgacgaagcgatagggattaaggccgagcaag

SEQ ID NO: 71260 - DNA, 784 bp, Zea Mays
agttgagtaccgcccaacagggagatgcagagaggagagagggagctgggcagggtcgagatccgagcagagagaagggatccgagcaagacgcgaccatggacgagctcgaggaggtgctgagcagggggaactcgcggctggggaagcagtggccaaggaagagcgccatgggatggaactgggggtcgcggctggagatggagctcggtcggatggctgccatgggcagggaacacggcagggcgcgtcccgagcagagggatgagagcacaggagcttcggctgccagcaggggagggcgcggcggccagggaagagcagccggcgcgcgcaggggaggaactcaaggagagagaagcagggtgcggtagagaaaagcgccgatgcccgtagaagataaaaacgacggtgagaaaaatcttgagcagaggggcggcggggataagggaggaagacggctggaaggatagagccgcgagattttttttgtttttcagattttttttttcattttccctttttttataacgaatatcacaaatatttcggattcggataatttcatctgttttcatcccgaatatttgatgtgatgaatattttgtagttagatgaacttttgtcaggtatttatatccgaaaatttaaagctggtaagaaacatacagactgagttaaacggatttcggcttctgtattttaatctgcacttgattcagttgacttcagacgaattctgttcgctactcgaacactcgactagatacaggttacttaaaat

SEQ ID NO: 71261 - DNA, 207 bp, Zea Mays
ataatatatataataatattagtacaaaaataaatattttatttaaaaataattttggtttaattattataaattttagggttatttaaatatgtattttaaatttagaaaaggaaaaaaagaaaaaaaaaaccctactgacctaaagcccattaggcccaactccctaccctagacgtgccgccttcctcctcatgcacagcgccg

SEQ ID NO: 71262 - DNA, 1029 bp, Zea Mays
tgatgagtttgaagtagccataaagaataaattgagcataaaaagtaaactaaaaacccatataataataatatagtatctgaaatgacctcttcttcactttgcttgatagctttgtcagctatctctcttccaccattaagccaaatttcggagtaaaattttcctcccagggcaatggcttcggcagagggctcctttacatcatcagctgaaaatgcaaagtctggttgaattacaacctttgagtgatcgcagtcagccaatgatattgcctctcgggcccatacgcaggcacaaaagtctcctcgacccgtaaggacttcgtcgaaagcttcgacttcaccttcaatccacttgacagccccttcggcatcaccacgtacaaacttttcatcgttcgagaaagctccgatgttagaaaacattttcttcagttttccacagcaaagagcggcaacagaaaagcattgttccttggattcccgaagctcttctaaattccttcgaactctatcatgttcgacttcagctatctcacgctttgctttatcacattcaaaattttcgctcacttcatcaagtttttttctaatcttagtacttcggacttatgtaattctacatgggccgatagtgcagattctaaatcagcaatacgcttcaaatcagctttcttttcttctagttttgaaattattgagctctctttggaaaaaatttccaattcagcctggctttccttcaacttgttgactaaggaaatcaatatatcatcctttgctaaagcttggttccgtagatctataacctctaatcgcagattgctgaaggctatctgagtgctttcatcttcggcatctttttgggcttttaaagctttacttaatatgagtccctgacagtaaaaaagcaaaaggagtaaaaaaacataaaaaaaacattcaggtaatcggtgaactaaaacaaaaggtttcaatagacctttaaattattatatgttaagcagtctgcgagatgatccttcgg

SEQ ID NO: 71263 - DNA, 221 bp, Zea Mays
ggccacgtcagtccgtcacctcgacgctaaaatttgtgtcgtcgagccgtattatcttaacacgacgtgacgttgagctaaccgtccaaaaataagattaagtcatctagaggtctcaattgaaaaaaattaaaaaaaaactaaaataaaaaaaaatcggatgtagccagagaagctacatgctactcgcccgcaaggttcgggacattgctgtgatggct

SEQ ID NO: 71264 - DNA, 640 bp, Zea Mays
agatgattccatattggtgtgccgcacatcctctgtgctgggagcagatggtggataggtggtgcttgcctgagtgggacgaggcgcacaacgcttgtcgagaacgatgtttgatgatgcaaggcccctcccaccaccaagacagccgcagcctaggccaatatgcagaagcatgggtacgccctcttttttatttaggtatatagcactggattagatattatttataactacctcgttggttttcttgcaatcggcgtcacatggtggccggccttgctccatcttctcggcctatgctatggcccataagggcaaggcgacgtccgacgtcacctacaacccggatgacgggcccgaggcgtacacaaccccgccgtctacaaccgccttcatgactacaccgccatggcgcaggaggtcattggcccagaatacgatccgagcaccgagcagatcgaccccgatgtcctctgagggtcggaggaggcaagagacatgggcagtactggattgccgacggggcaatcgacttgtcgtccactcccactctctcaggtgcgagcaaggagcatgggctcaagtctagccatacgactttggcacgacagctcatagcatcgcatacatcaactcgagg

SEQ ID NO: 71265 - DNA, 309 bp, Zea Mays
gagaacattacattagcacgcatctctcttggattggagtttcttccgtcttgtctagccagggttgctgttgcttagctttgacctgctgccaagagacgacaaaagattattacgtaccgtcctctttgcttgcactgatgaactacgccaaccgtcgcgccacgcaagcatttcggtgacgccggccggcattattttagcagaggaaaaggtggcacgggatcctgcacccacgctctctgaattaatgatcgattctgcatctatctaatcccctgctgcctgtaaaggccggaacaaggtcat

SEQ ID NO: 71266 - DNA, 154 bp, Zea Mays
cttctttccccttggccgccgcccccctgcccatctcctcctctctccattgttgcagccaccaaaccctagcccccccctcaatcccctcctcccaaggtgccaatccttgccgctcggatcatcgtcacgtggtgcgagttttcaatcgttt

SEQ ID NO: 71267 - DNA, 461 bp, Zea Mays
catctccccctctctctattgttgcagccaccaaaccctagccgcccccccccctcaatcccctcctcccaaggtgccaatccttgccgctcggatcatcgtcacgtggtgcgagttttcaatcgttttggtggagggaagaagggaggaaggaaagggggagaatctaaggtgatttttgtgttcatcccttgttcatttgcgctgcaatttaattgattagaggttgcgtttgcgattgggtagagggggctgcccagaattttaggtggtggatgaacggcagtagttctagcagttctgtgtcttttcgtgagaaattaagggaaatcagtttggggatcatgtagaactttgtcttacctttccaacaagtatttatgcgctcaatttggagttataaattgaaagttatcaccgtttgaatccgggtatgtggctgtccaaaaaaacagattttc

SEQ ID NO: 71268 - DNA, 960 bp, Zea Mays
cccctccttgttatgcttgttttcaaaggaggtgctgccggattttgctatatattctttctttattacttctcttgtgttgagtaagtttggtgggtagtgttacatgtgtttctatatgtgactacatggtgccttttaatttgttcatcagtttagctaatgaaacataacattcctttatgaatttggatcctatatggccaaaggctggttcgttgttctgatataactcctgaaatcaattaatcctttatcagattgttatcttgtggatttacatgaacgtatacccctaaggtcaatgagaagagcatgtctacacctttggtgtcgtgcttcttgagctggtcaccgaaagaagccagtaggtgagttttgggacgacatcaacattgtccatcgggtcaagttgatgacaaacacaaacaatgagcagataatcaagattattggccctaggctgtcggccatgcacacaagatcattcatgtattttgtgtcgcacttctctacatcaaggagcagagcatgcaatggcctacgatgcggcgtggaaggtggtgaaatgcccagcaaacttgccaatccagctgccggcaaggagatgaggttcccggtggcgacaattttccactacacaaccgaattcttcagcagcagatggatctattgaagcgccgtgtgacaaagccaccaaagagcagcaacaaacaagctcaaagtctttgctaaccactaatctcataaagcttgaattttctcattgctatgtttccttctcctagcaaagttaagatgtttgcacatttctagcttattagcttattagggctttgtgtggaatgtgtttgaacaatgatcttatttaaacaatatcaacatgtgtgatatatcaaaaccgtatcaatgcacgggcacataactagtagtctattaataagctatgaaatattggag

SEQ ID NO: 71269 - DNA, 204 bp, Zea Mays
gagctaaaaatctattttctggtttatttttcactgttttactgattcctggtatgcgcgcattaatacataaaagtctacgggctagacggcgggtttattttataaaaacagaggggctcttaagtaagtttggcactgcgaaggggtatcggacgttttaagccgtctgatcaagtgagggtggtccagattagaacgccg

SEQ ID NO: 71270 - DNA, 336 bp, Zea Mays
caaatttcctagaaattacccattattgccattataatccactgaatcgtttttgcgcctatccgacatccagcgaccagcaaatccagcatagttcctccttgactcctcctaaccctagccgccaggctccaggtgcccttgtctggttctagtgcgagtccgtgaccgtgacccaccgtccgacggccattgccgttgctatctgcgcctccgcggtccgcccaggaagttgctggcttgctgtcgtccgccaggcacactacttcttcggccagcggtccagtccacggactctaggccatttctgttgccgcgtggacgcgtggagttagc

SEQ ID NO: 71271 - DNA, 258 bp, Zea Mays
ctattcacttataattcactttcccgcagtatttaattgaaatctaaggattgactagctttgtactttaccttatccttgatgacctttttgggtgattatggttagcgttttgctattgccttaacttaatcaatgaacatgatgtgactatttatgatacgatactgttatcctgattatattgttgatcttgtgatactctagggggctcaggctgtttcctgagtacctctccgtaaggacctgttcgttgag

SEQ ID NO: 71272 - DNA, 247 bp, Zea Mays
gtatgttgttttttttgtggtcgtgtacccatttaaactcataaagtatatttggatcttggattcaaaagatatatctaaattcgaatagaatagattaaaggaaagggagaaatagaaagccgccccctcttcttgggctgcccgcgtggtcggcccaacgcgcgtgggcatggcaaaccgcacgtcgtgccttgtggctgcgcctagaaaccactatcattctctctccctttcccatcttctc

SEQ ID NO: 71273 - DNA, 312 bp, Zea Mays
aaaaaagttcgcatcatgtcttcgtcgtatgatgagtcctgccagagggaaacccggatgcggaagacgtaccctgataaggaggaggaggaggatggtggttgtaactggagccagaaggcctcgggtcaccaggaatgggtccctgacctgggtagagaggagggagaatgtgaccggagccggatggtctggggtcaccgagaatgggtccctgacccgaatagggaggaggaggagtcgaggtatagtaggagtcatcaaactcctcggcatcatcctcaggagtaatgaatggcacaccaaattcat

SEQ ID NO: 71274 - DNA, 1636 bp, Zea Mays
cgaaagtcctcatgcagtgcctcgttctggagcctgtgcatggactcctcgattgcccggtcgcggcacatggcaaaggcgccaaaaatgcccttggccagacgaataaacagtccccgaccttgaccccgtccctagccctgacctctacctctcccgctgcggtccatcggacgtgaggcagcgacgacgcgagaggactcatgctgaggaggtggctcatcagaagaagcagggcctctagaccctgtgggagcccgctttgtacgagcagctgggttgctggaatcaacctagtatggtacatagcgggagtgtttgacaggcttctcgaagcgagtctggttgaccacttcgatcatattcataataaagggtgcatgacaacccttgagtggagaccaggaagcacaaaggatgtcttcccaaatcatatcaaacacatttatgcaagcaagactgttaggatcaaggagaagaaggagaatccgactctccccaaggacattgatctgatttccacccttcgggagaacggtcatcctagacaaggagttaaggtaactatagtacctatgcatgttggcaattatccaaaactcccgctccttagaaatatgaataaattcagtttcttcccgcatgggtagcctaatgtcatggactttaaggttgctggcctaaatatcttcatcagagaagcccaagatatgggcaaaatgacggtagctaactttatgccagacaccctggataaagaagtacataactaggtagtcatacccagagagtggcatagaactaagcaattacttcgttgttccaggggtattccatagtcattatatattttttaaaccctttctctctaagttatggagagctaacgtcatgtcagcatcccccatactctcacacccctcccagtcaatgaaacgatgtcgaacgactgggtgcttcttggacatgatgacagaattataaaagttagcctaaaaaaggttctagaaccaagggtcctggacaccaggatgtctgggtgtgagggtgggattcgtgaaccttaagcatggaagggagtccacccccttcgaagagaagtcgacgggaggttcacgaggtccccgggacacggtcactggatgcatgtggagaccggtgatgaggagagcgtcggacgatggaggttcgacctcgtcgtcgaaagctccatcctcctcctagcaaggagcgtatcctgcagaggaggtgcttcggcgggggcgggaggtgtcaacctttcgatgcccgccgcgcgcaggttgtgagggcatcaagggtccctccccttccatccaaccagaacctcgtcctctcttggagagagagcgacgaggcggaagagaaggaatggaagattcctcctggatttcatcagagtcactgctgaactcgaccacggagggattgcgacgacgcaccatcttgatgagtatctccgagaagatgagttccaagaggaaatgggtgaaatgcgagaggttttagagaattcaagtggctggaaaaactgaaggcttgaatgtgtgagattttgtgaggtgaggattggcctttaaataggcagttgacccagtcagcccaaaaccggttcaac

SEQ ID NO: 71275 - DNA, 608 bp, Zea Mays
ctgaaaaatctgtttttttggacagccacatacccggattcaaacggtgataactttcaatttataactccaaattgagcgcataaatactcgttggaaaggtaaggtaaagttctacatgatccccaaactgatttcccttaattcctcacgaaaaaaacacagaaactactagactactgctgttcacccaccacctaaaattctggacagccccctctacccaatcgcaaacgcaacctctaatcaattaaattgcagcgcaaatgaacaagggatgaacacaaaaatcaccttggattctccccctttccttcctcccttcttccctccaccaaaatgattgaagactcgcaccacgacgacgatgatccgagcggcaaggattggcaccttgggaggaggggattgatgggggggggctagggtttggtggctgcaagaatggagagaggaggagatgggcaggggggcggcggccaagggggagataagttgggggggggggctgcacatggggggagggggttaggagggaggcggctagggtttgggagggttaatgggccgaaactccaattgcggcccaactaacccacgcgacagct

SEQ ID NO: 71276 - DNA, 281 bp, Zea Mays
cctctacccaatcgcaaacgcaacctctaatcaattaaattgcagcgcaaatgaacaagggatgaacacaaaaatcaccttggattctccccctttccttcctcccttcttccctccaccaaaatgattgaagactcgcaccacgacgacgatgatccgagcggcaacgattggcaccttgggaggaggggattgagggggggtgcggctagggtttggtggctgcaagaatggagagaggaggagatgggcaggggggcggcggccaagggggagagaag

SEQ ID NO: 71277 - DNA, 123 bp, Zea Mays
tcgacgccttcttatttacctgagcatagattgcaccaaaggcaaccttcaccaaacagatgctcagggtcttcgatctcgtagaactcgaagagttcgatcacttggtcgccatgcttgatc

SEQ ID NO: 71278 - DNA, 289 bp, Zea Mays
tttttttcgccgaaggctcaaaaacggtatgtgcgtaaatttcatgcatcgtaaagaaatatattacagtaatttacatgtcccattaattgttccatacatcaaacattacaaaagtataattacaataaagtctattcttcactaagaatttttcctgtggcttcgttcaatagtttatcgatgacttcgtcgataatggagttagcaatgcctattatatccagcgcttctttcatctccggatcagccagggggttgtacggctccgatagtggcgacagttcag

SEQ ID NO: 71279 - DNA, 293 bp, Zea Mays
gtggcaggcttcgtctcaatgggcactgaaggcccagcttcggctttggcctgggctgtgtcagcttcagcaactttctttgtaggagcaggggtcaaggcttttgtggtctccatgatagcgtctagcatgctggccatcctccttctcttgggagttgtgacaggagcctttatcaccttcggcaattctacctctgccggtgggctcagaatttttggcatcatcactgtttttccaattctggctctctggtcgtatcatctttggcttcggctggcccgactgtaggc

SEQ ID NO: 71280 - DNA, 335 bp, Zea Mays
tctggattaaaacataaatttgaatttggaattgaaaaatggaaaaggagaaagaaatattataaaatacaaaataaatctcatatcggtatgttcaaattgaatatataacctgtgaataaacttgccacaaaatttggaaatttaaacttggaattgatttgaaatttgaatttggaacagaaagaaaacaaaaaggaaaagaaaaagaaaacagaaaagaaaagaaaaataaaagaaaaggagacctaacctagctaggccggatacctcgcttttggcccaggaacccgttaccccgtgcgctcgacccaactcaggggggcacggtgccg

SEQ ID NO: 71281 - DNA, 1117 bp, Zea Mays
acccaataatgttctttaatgtcatttattcatgcataggttaatttttatgggacccaataggtcaccctagattgttcattcctttttaccttgttatcccttaatcacatgggtagttttgctattgctttacatagttttgggataatctttcattatatccatgttccaattcttttgttattctatttatgttcatgtcaagatcattaatgttaattggaacatggagcttaacttgagaaacacatgccaccacaagggtttaatgggtcgcccttagccaactaactaggaaacatagtggaagactaccttacccgaaaggggcaagggcagtaggggattgcatgcaaggaggttctcgggttgattttgctgcgatggcggtcagacgggggattcttgcaagttctcttcccataaactgtagcgggttttcggaagctagtggaactttgtaaaggccttgtagtggatccctagccattcacctcggcagtgtctaagggtctagctaaccctggcgacatgggatacacgacttgtgggtacagggtacaacctctgcagagtgtaaaactggtatactagccgtgctcgcggtcatgagcagcccaggactctctgatgattgaattatggaacttaaattcaatttgtcatatgcattgcttgggatttgttattaattttgttctattattattattatggtttggtatttacttacacttagtaactactaataaaattttgaccaacttattaaaagcaatgctcagctttaacccctgtcattgatcagccttacacatcacatgaactctcacctttggtgagttcatgtccactggttccccacaacttgttgagctatgatcatgtgtgagctcacccttgctgtctcacacccccccacaggagaagaacaggtggttcaagaggagccacagggcgaggagtttgatctaatctaggtggtgttttccccaattgacttctgcgccaaggacgacccttagttcgttttatatttactattttattttgtaataagacttccactatgtaataaatgctctgattattgtgacatttatctctatacact

SEQ ID NO: 71282 - DNA, 814 bp, Zea Mays
tggcggtggtgcccggcccgcgccgcgcgtggcctactactacaaagacacgcaggttcgcagttagcctcagtcagtcacacacagcccggctcgtgtgtttgagaagcagcagggtagaacgatgcaggcagagcagagagcgcacggttcggcaaggctgcccggcgcgggcgtctccatggctacacccacacgcgcggccacgacggcgggcgctgctgctgctcctgctcctcgtggcacataggacgacggccgcctccgacaccgggcggaggaggatcgagctggagctggatgagggggtaactacacggaaccttcaccaacccgttcgactgccccagcgataggctacagtccggctgcagcggctgtccgtgaagccataggccatagcatgcactgattattgtactactactagtactagtagtagtaatatgtatttgctatatctgggttattgacccgactgtctatttgtgacgtgcacgatgctggtagtgccccacattggactgccacagccagccactgctgactgtgctttgcttcgcgcaagttgcgacgctctggtgctaggccgatagacaacggtgcttcaaaaacacataaatggttactcgttcgtttcacgtgatttagggatgtttaaatatagtagagctaataattagttgttacaattaactgaagacatctaaacagtctcactaataattcaagtatttactattttagcaaaataactaatagataagtaactatttgttagctagctaatttcactagtaatttttagtcattt

SEQ ID NO: 71283 - DNA, 1694 bp, Zea Mays
gtcacacccggctttaaggaacaaaggcaggtgcatctcatacatgcgccaagaagacaacatatataataacagagtgtatagagataaatgtcataaaacatcagagtattactacatagcggaagtcttattacaaaataaaagaataaatataaaacgaactaaggatcatcggcgccaatgtcaactgagaaacgccacctagatcagatcgaactcctcgccttgtggctccttctgaaccacctgttcttctcctgtgggggggggggtgagacagcaagggtgagctcacacatgatcatagctcaacaagttgtggggaaccagtggacatgaactcacaaaggtgggagttcatgtgatgtgtaaggctaatcaatgacaggggttaaagctgagcattgcttttaagtagttggtcacaattttattagcagttactaaatgtaagtaaataccaaaccttaaataaagtaatagaacaaaattaataataatcccatgcatatgcgaatgacaaattgaatttaagttccataatttaatcatcagagagtcctgagctgctcctgaccgtgagctcggctagtataccagttttacactctgcagaggttgtaccctttacccacaagtcatgttatccatctgccaaggggtcgcgactcccatacacctctacctaggaagcgcggcagggcaacactacgaggcatttacaaagttccactagcttccgaaaacccgctacagtttatgggaagagcacttgcaagaatcccccgtctgatcgccatcgcagctaaatcaacccgagaacctccttgcatgcaactcccctactacccttgcccctttcgggtaaggtagtcttccattagctttcctaattagtcagccaagggagtcccattaatcccttgtggtggcacatgttactcaagttaagctctatgttccaattaacattaatgatcttgacatgaacataaatagaataacaaaagaattggaacatagatataataagcgattatcccaaaaccatgtaaagcaatagcacaaactacccaagtgattcaggggtaaacaaggtaatgagataaacaatctagggtgacctattgggtcccatcaaaattaacctatgcatgaataagtgacattaaagaacattattgggtaaaaagtggtcaagggcacaacttgccttcaatgagctcctgctcagctacttctatctgctggtcaccaggatccttagtcacgggttcttctactcgccacaatacaaacaagcatagtatatagagaaaattaacatcacaccaaacatgtaaccaaaatacataataataaactacacattaaaatacaatcttaggaacatgaatcataatttttggagttatagattttaagatatgaatttctaaaggttttatgtggttgaaataggattaagtgggaaattaaatttcttattgttttcatgaccaaacagaggctataagtggtaaataataatattacaaaaatttataaagtggaatggattaatttggagctagtatgaattttctatgaatttatcaagccctagtaattattttcatgttaaaaatccattttctattcatttattcgatttaaacgatctctggactgggcgcactatttttagagag

SEQ ID NO: 71284 - DNA, 773 bp, Zea Mays
gacacctaggtgcagccgaccgcgcgccatggccgacgctctatcgctcgcagagaaagggaataaaagaaagaaagaaaaatagagctcaccggaggctagtgcgtttaggaggaattgcccgccaccgttggccagcggcccggcaccaggatgcacctgcgacaaccctcgcgcatgttctggatgaagccggacctggacagcggcaccgcggttccgccggcggcgcttctgcccgaggtggtgtgcgtccaggcagtgctcgaccagcgccacaaggagtgcgtgcgcggacagcgccatggcggtcacggcatcccgccatctaatctccccagtgaattctcctggcggcggtgctgccccattctctctctcgtctcatctccatggcgaggctctcggcgtggcacaggggcgtcgatgcaaggaggtcaagaggttagcagcaccgcaacagttataacccaaagcggttcgaccgtctggctccctgctgaccgaatcctaggtagttaggcatatcttctcctaataacaaacttctgttgtgcctaccccgagattcgtggcgagaagatgcacaggaacacgaagctgtcatcagggtccctcatgctatcgaccccacgtggacgcagcacgcaccgagcgaggaacacccaacgcgcatggccaaaggaaaacggatgcagattcccacgtggagcccacacgtcattgagatattgatgttttcatgaatgagcttgcgatgatgtcattcctgg

SEQ ID NO: 71285 - DNA, 470 bp, Zea Mays
ttacaaggtctgaaatccatcttgtcttagaatagagaagataagaatgatcagagtagaacagtagaaggtgagacaggatcaagataagtatagaaagaatcagagtaaggtaagcatagaagaaatcagaataaggtaagtaggtaagggttttgtccatttctatctaggtttcgtcctacagtcaacatttcctctgataccacttctgtcacacccggctttaaggaacaaagccaggtgcatctcatacatgcgccaagaagacaacataaataataacagagtgtatagagataaatgtcataaaaatcagagtattactacatagcggaagtcttattacaaaataaaagaataaatataaaacgaactaagggtcgtcggcgccaatgtcaactgagaaacgccacctagatcagatcgaactcctcgccttgtggctccttctgaaccacctgttcttc

SEQ ID NO: 71286 - DNA, 496 bp, Zea Mays
tatcgctcacagagaaaggaaataaaagaaagaaagaaaaatagagctcaccggaggctagtgcgtttaggaggaattgcccgccaccgttggccagcggcccggcaccaggatgcacctgcgacaacccccgtgcatgttctggatgaagccggacctggacagcggcaccgcggttccgccggcggcgcttctgcccgaggtggtgtgcgtccaggcagtgctcgaccagcgccacaaggagtgcgtgcgcggacagcgccatggcggccacggcatcccgccatctaatctccccggtgaattctcctggcggcggtgctgccccattctctctctctctcgtctcatctccatggcgaggctctcggcgtggcacaggggcgtcgatgcaaggaggtcaagaggttagcagcaccgcaacagttataacccgaagcggttcgatcggctggctccctgctgtccgaatcccaggtagttaggcatatcttct

SEQ ID NO: 71287 - DNA, 547 bp, Zea Mays
tttatgctacctaagtcgtgtatgttgatattacttaggttcaccaaagaggaaggataaaacatatcaagggctaatcagcaagaagagccatgtctgagtcagtccagcgcaacagaaccgtccagaagaaacagtcatatcttttgatgcccaaaagctatgaaggcccacaagtactttttggaaagctattgaagtctaatttccaattcttttaaggccgacttaatcaaatctaccagaaaggcagccgacctactttagtgctgactggtcagaaggtcaacaacctgtttgaggaccaagttttcatattaaactgcatcattctacaaagtttcattaagcatgatatacatggtgagaaagcttatcaagtcagctttccaacgcatccagctccacctcatttggagattcctagaagaagttattatcaaaatactaaaggctacgcagaagtcaaacagccatacggaaatcagctctgcacaactctcgaagaggctccttcacattagcacgtgaaaatacttttgtttcg

SEQ ID NO: 71288 - DNA, 1110 bp, Zea Mays
cattgtcaatgctgctgcgaacaatggtaaagaagaacttgaaggattgagaggaatgtttgccacacgtggagtttgcttataacagggcagtacattctacaactaatttatgccccttcgaaattgtatgtgggttcaaacctattgctcctatagatttgttgtcccttctattgcaggaaagaaccaatatggaagcttccaagcgtgctatatacataaaaaagatacatgagaagaccaaggaagcaattgagctcaaagcagtgcgcaaggctgcaagcatgaacaagcataggaagaaagtgttatttgaaccgggggacttggtttggattcacttgcgcaaggagcggtttcctgagcagcgcaaatccaaattgatgctacgaggggattgtccattttatattcttgccaagatcaatgataatgcatacaagatagatcttccaccaagctatggcgtgagcaacacgtttaatgttgctgacctcttaccatatacgagtaaagacacttcagagtcgaggacgggggaggaggatgatatgaccacgccaagcaacatgttacaacccccaagtcatactacatcaactcaagtacaaccaacatcatcaccaacccaagtctttgatggaccaattacacatagccgagctaagaagctacagcaagaggtgcacgcgctactttatgaatttcaattaaacactaatgagaactttatgctacctaagtcgtgtatgttgatattacttaggttcaccaaagaggaaggacaaaacatatcaagggctaatcagcaagaagagccatgtccgagtcagtccagctcaacagaaccgtccagaagaaacagtcatatcttttgattcccaaaagctatgaaggcccacaagtactttttgtaaagctcttgaagtctagtttccaatgcttctaaggcctacttaatcaaatctaccagaaaggcagccgacctactttagtgctgactggtcagaaggtcaacaacctgttttatgaccaagttttcgtattaaactgcatcattctacaaagtttcattaagcatgctatacatggtgaaaaagcttatca

SEQ ID NO: 71289 - DNA, 2193 bp, Zea Mays
atcatttctacttggcggtttcttctggcgccacttcaaccctctccgtctccctcctcctgacgtcgttatccggacgagcagcgaggaggagaaagatccccctcccccactccctccttttcctcccctcccctgcgtccccgtccccgtccccgtcccgtctcctcccccgccgcggtgcggaatacgggctagattaatcagtcagcgctcatgatccggaggagcgaaggccgcaaccagcgccgcggggacaaagcctcacgtgctcgggtgtcacgacccttggccagcggtagagaccaccgcgacgtgagacgcaagacaagcagagaagaacagagataagtggttgggtggtttcaacagattcgattcctttctgattttgcctgtctggctcaaagcaccgagtacaatatttatacgcacaccaacaactccctggtctattatttacggcccaagatggcactaatacggcttaacagcccacaactccattacagactccattaacaacgaaatagaaatgcctggccgactgacctcggtccaccagtcttcgcgccactccatctcccgcagatccacttcagtccgcgtcttcagtcatgacatctccccgggcctcagataacgcttgtccccaagcgtttgcctctggaaaccgtgccctggccactgcataatcctcccatgttgcagcttccttaggtaccccactccatttcaccagcacttgaacaatagctcgattgccctttctcaccatccttcgatcaaggacctgctctggctccatacccccttgagacaaatccaccgcaggaggtagctctgagaaaactggagaataacagggcaggaatggcttcagttgtgacacatgaaaaaccggatgtacttgtgcatccccaggtaattcgagcttgtatgccacctccccaatccttgatatcaccttgaaaggaccaaagtacttaaatgccaatttaggacaggatcggttcaccacagtcttttgtgcataaggttgtaacttcagcaaaaccagatcgcccacttgaaattccctgggagttctgcccttgtcagcatactgcttcatgcgaagctgagctcgtgctaactgctcctttagcatgactgaaaatgcattcctttcagcaaaccagtcagctatctccctatcttccatgcccagcgtttttggtgcaacaagcaatggtgcttcatagccatacaacaccttgaagggcgtacatcccagcaccgaatgatatgtagtattataccagtactcagctaaagcgagccagctcttccacttgttaggttggtcatgtacagcacacctgagatacatttccaagcactgattcactcgctcactctgaccatccgtttgagggtgatatgcagtggacatcagcaacttcactcccataagttggaatagatttttccaaaaggcactggtgaaaaccttgtctctgtcagacactatagatctgggaaccccatgcaacttcaccacattctcgagaaatacttgggcaactcctttagcagtaaaggggtgctttagaggaaggaaatgactgtatttcgagaatctatccaccactaccagaatggtatcaaacccctcagactttggtaacccttctatgaaatccatagtcacatcttcccaaataccttgcggaactggtaaaggctgtagcagccctgcggggtgcaccctctcagccttggccttttgacagattgcacattgctgcacatactgtgtcacatcattttttaaacccttccaccagaacaccttctttaccctctgatatgttgcttgaattccagagtgccctccaactgcactatcatgcagtgctgcaattagtttagtgcgcagagctgagttgcacccaatccagatccggtttgcttttctgataataccttgctgcaaagaaaacccctgttcatccgggctctgaattaacagttgagtgatcaattgctgtgcatcctcatctgtggcatacgagttcactacttcttgaatccatataggctgaatttcagagagaacagacaaccccatcatatgctccacccttgataatgcatccgccactacattctctgtgccctttttatacaccacctgaaactgcaagccca

SEQ ID NO: 71290 - DNA, 534 bp, Zea Mays
caccatatataagtttaacaggtccccgcaggaaacggggatggaaaatgtttccctatccggtccccgtttacccatcgagaaaggttttttctccgtttacgtccccgcgggagggaaccttccctatccccattccctaatggaggaattctggggattcgaggatcggggcccattgccatctctaagctagccatggccgtccgacgcgaagcggtcccacgacgatgagctcataggcgcccatggcacagcgatccggcgcccaacatcaacagcaactacacgttttatggacgaattcgaagcggccaaggggaaaggttgtgcatcaggagagggtcgaccgatccggtcaaaagcatgagacgaacggcggtgaccccaggcttcagcgacaatcattctccccccgccggagatctgatggatggagcgcttgttcccatcagcaccgcttgagctgcagggatcggcggagccctcgaacccgccgcgacaaaccacgagctccagcacgaagccggccac

SEQ ID NO: 71291 - DNA, 282 bp, Zea Mays
cacaaaccacattcacaagcaataccatatatatagtccatagtccatacatagtccatagtccatacatagttttaataccataatcacatccataataaagtctatacatagtccatacatagtccataaacaaactcactactcactcctgcgggctgtgggagttttggccacaccctcctccgccaccaggaaggtggccactccctccagaaccatggacgaggaagtcttggacgttgacagcaccctccgatccctgagcatgtgacactgaac

SEQ ID NO: 71292 - DNA, 741 bp, Zea Mays
atacattgctatgtttggtcactatttgcataaaactaaacatggtacgtcacctatgatccatggtgatgaggaggctgtgcatgcatccacgggtagtgttgtgctggccacccctgaggtggtggcacccaccccgtcggtgacggtgccatccacgcttgaaatggctgagagcccgccagtggctgggagaccgatggcacccatcccgggactggctgcgatccttggggtggtggagctgtccaagtgcctggaggtgcctacgtccacccaacaccggtccacagtggctgcgacgctggagcttgtcctggccactgtccccatccttgtgccagcgagccatttttgataataaaaaaagagttgctatggaattgaagtgttcagatagtgttacctggggagggcgaaaaacgggcaagttcatatcagggccgagtcgagtagtcatttcctgcaaatggatgaaacgttagaatcacaacattatactttgaattcaatgacacgtgatgagatagacgaattacctgaaaataagaagccatatactgcgtcagctgtccgacctgctcctgcgctgctcgagcctgctcctgtggtgcccgagtctcctcctccagctgagcctctcgagcagacctggaggagcgagaactccctgccgaagacgatgccttcccttgacctattgtcctgttatactccacaacgccggtgccaaaggcaaac

SEQ ID NO: 71293 - DNA, 336 bp, Zea Mays
gtcgtacctgtgcctcagaccttcagtgccacggttggcacggtgcttctgggactctgcaatccactcaggcgacgcccatctcttagccaaccacctctaggcttccatgtccttcgcaagccaatccacaatgctctccaggtactgctcctctgtgaggtagatctctttggccccttttgatttgctcatgttctgcccctttatcttcttgtagtagtagttgtcggccgcgatgcgagcattatacatggcatccttgatgaccttatcagcgcacttccgaaagtgcctcttcacacgtgcccactgagcctgatcctcctcgatctc

SEQ ID NO: 71294 - DNA, 250 bp, Zea Mays
gtcacccacgccacctgcccccatagggtcaacctcctcatcctgcacatgagcctcctgctcaccctcctcaccctgcacatgagcatcctgctgaggagcctcctgctcaccctcctcaccctgcacttcgtctagacagtcgagaagctactgctgcctctgtcggctctgtgaggtgccctgaaaaagcccactgcccgagctgtcctcgctgcccccactcctcctcgatctcctatgcttgaac

SEQ ID NO: 71295 - DNA, 363 bp, Zea Mays
ccgatatataccggaagaatgcatataaactttataccccaataaaaccccccaatacacacaagctcgacattgtattacttaacatatgtcatatataaaagttatattaggggaagcattgaaaagaagtcagttcattttatgtttgagcgacaaattcactaacatatcgcaggctattaaagaacagttgcagcgacaaattcgcttgaaagcttaccttggcctaagaagctgcggaagccgtcgctgcattgcagcgaaacctcggtggtgtcttgacattcggtccgggtcaaccaagcgcctctcccttccttcttccgcaccccctcgctagccgaaacaacaggctactaa

SEQ ID NO: 71296 - DNA, 1462 bp, Zea Mays
ttactatagcagtttttcagtctcataattctgtgcagaatctgttctcttaagatttaggaaattttatcaacagaattaaactgtgggttggtaaaagaagttgtagataatttcataagctttccagattgttaaagagtgcattcatatgatttgtgaaactccagttatgtttgttttactgtggctgtttctgtttacctgacaaaaatgagtgggtctgttcactggtgggtttcatctagtaaatggccgaattggctcttccaactatggagacttttgtagagggataaaagttcttacttccagcagaatttcataatttttggttcagtagtttgggagatatcgaattttaacgttaaccatactgctgtctaaaacagattcagtcagttatcttgtcagatgtttcagaacttgtagatggcagaatttaattatctattgaatactgaagttgtagagtattttgtgtagatactcctagagtatttgtttgatatcaccgctgttttaattttaaagatacaaaattaacaaacagcattgctgctgtatggcatgtggttcagggtgggagtctttccactgggtcttggtttcaagtgtaggagtgttttgttgattgatggcaaatgtttgtgaaatatttgtactaagttttatgcccactagcaggtggctacactccagatcatgtctagtacatttcttcttcttcgatgaaggcaagtgaatgtagcggtggttgcttccgttctgacctgttatttctattgcctacactctaatattcagaagtatcagattctttcataattggactctatggtgatgctttacttgcttgcattatactgatgctcaatcatatattgatgatgattatgatttgagtatgactcacgagattaattcatatatctgaaggtaaatgaagtattatttgaggttggtattgtatctgaagataaatgaagtattatttgaggtttgtgttgtatctgaaggaagtgaagtttattgataaatgtagcatgccatatacattgcatgactcatttgcatatgaagttttgtcgtgacctatggtccgaccgtaccggtacaacttagcatcgtatgttgcccgagaaggggtacgatgtggcttcatacccttagaggtatgaaggcagaggacatatgcattgcattcatatgcattcattgaagtgatatttgcagatgatgtggttttatacccccagaggtatgaagatagagtacctacgcattgcattcatatgcattcattgaagtgatatttgcagatgatgtggttttatacccccagaggtatgaagatagagtacctacacattgcattcctatgcatacattgaagtgatatttgcaggtattgttgacgcagggaagtgttatagaacctattgtggttgttcgaggaaat

SEQ ID NO: 71297 - DNA, 743 bp, Zea Mays
gtttttaatgtttttcacttaagtttatataggctaaatgagacggattaacaactgaatgaaagcagagtacatgctacttcagtacttcttcttaaaaaactacacagaatcaaagagcaataaatcaacaggtgaaaagaaactttgcaaaaacggacttgtagattttggaaagttgaacaactttcatgtatggagaattccaagttttagaggaaaagttggagtaaaaagcttaattcagttttgaatcagacttgaagtttgctgaaaataatatcaactagctgtttttgggccttcataacttttgatttataaacagtttgaagatggtcattataacaaagttatagggccacatgaggagtacaagttttgttaagtcacctagctctaaagttatatggaacttggagtaaaattagtccaaagtagagctaacagagtttctggatttcagacttagtagatttcagaggctgaatttcagtatctggatccaactttgggccttgatattttggaatccagggggttgtggttaatgaacactatacaaaactcgtagagagatgatagaagaacaattcttattaagtgatatagccccaaagctatatgctactggtagaaaagatagtccaaagattgattggcagatttctgagttttcagacttacaacagtaactgaacctgaagttagtgtttgatagcagttttgggcgcttgtttgtg

SEQ ID NO: 71298 - DNA, 296 bp, Zea Mays
atcaacccttgtcaattctctcccaagggacacaccctttgggagacattgttttgtacttatatataaacagtgtactctctgcaataaagacaacaataacttcattctgtcattctctctggtctttttcgttattctctaacaaaaagaacagccggaatctcatcgaagggagattccagaagtaggattccagcctgaacttttctcgagccaatgtttgcctagcagcacagatacgttgtttcgcatcatcagtgtctagtcgacgaaggccccggggacgaactggc

SEQ ID NO: 71299 - DNA, 379 bp, Zea Mays
gcaaattgaagtttagaatagaggaagaaaaaggttatacaaaagataaatatataaacatataaacatataaaaatatatatataatatagttaaaccatccatattattgggttcagtttgtacattcaaaatgaatatgagttcacattgaaagtttgattcaaatttgaatttgaaataaaaaaaaagaaaggaaatcataaatggtaaaaagaaaaaaaaagagaaagccatgcgcctgggctgccactgctcattttcggcccactctaacttcccatctgcgcggcccaggtcaccacttccgttgcctcgcgccaccacatgacccagtctcaccgcgcattgggacccaccagtcagctgtggccctccc

SEQ ID NO: 71300 - DNA, 372 bp, Zea Mays
aaaaataacaagaaaatccaaatttggagatttgaccctaatttgcaaattgaagtttagaatagaggaagaaaaaggttatacaaaagataaatatataaacatataaaaatatatatataatatagttaaaccatccatattattgggttcagtttgtacattcaaaatgaatatgagttcacattgaaagtttgattcaaatttgaatttgaaataaaaaaaaagaaaggaaatcataaatggtaaaaaagaaaaaaaagagaaagccatgcgcctgggctgccactgctcattttcggcccactctaacttcccatctgcgcggcccaggtcaccactttcgttgcctcgcgccaccacatgacccag

SEQ ID NO: 71301 - DNA, 253 bp, Zea Mays
cttcattaaagatctatctcatctcaatagatccatcttatcttaaaagataccctctcaccttaatagattcatcttatcttgaaaagatgttatcttatcctaatagatctaactgacctcatatcttaaccgatctaatctagatcccatctaatctaatattatccaatctaaagtgagttattaacatgttagttaatctagtgatatgggttagacactgcttccacaaacataacttaacctaaat

SEQ ID NO: 71302 - DNA, 73 bp, Zea Mays
aggcacccacatattttacaaccagttttcctgaatcccatgtcaacatataatcacaaagataagaatgaga

SEQ ID NO: 71303 - DNA, 685 bp, Zea Mays
gttagtgttcgtcgcaattatggatgtggactccgttttgtggaatggtagtggttgtttggtctctggtgaccatcatgtagtccagtcctcccacaaggctgcaaagcacacgacaacattctctccttgtgcttctagttcgctacatccatgatgcctttatagatggccatatgacactaacacggtgggtcggcctgtcagtgtcaggtccggcccgtacacagtgtcgtgcctaggccaccagctcggtcaatagcgtgttgacacaggcccgacacggtaaactgggctggcacgatggtggcacggccccggcaccaggcccagtcagccaagcgcccaaaggcgcgaaccaaccagcccagccggccagccccccatatgacaaaggcaaagccgcgcccgcgctaaccctaatcgccccgtctgtgcctccgtgtccgtggacaactacccctctcggatctcgcagcctcgcacaaccgcgaactcattctccctcggtccctctgcctccactgcgatctgtcctctctccggtctccgtctctccgcctccgctcagatctgtcatcggagatcctcccctgctccatcctcaaccgatttgcgtgtttttggaaccgggtaactcctatatgtaaccctaactcggtaattcctatcttcttctccccct

SEQ ID NO: 71304 - DNA, 347 bp, Zea Mays
aatgatgtttataataagtttgaatagaaatatggatctgttaggttgagaagggctatccctcctaacttatatggtaagaaaagatctgcttgggatgaaatatatgatgatgctgatgatgtgggtgattttgttgtatgcattcttttgcttctactataaacattgctagagatacctctgcaactgctctgttgcatgctgcaaactcttcagcttctaatgcttccgaactcatttcttacttagattgtgacactgtaaaccagttaactgatgatttcaacatcttgcatgggtggcatcaacacaaactcacttatccagtactgtcaattgtggct

SEQ ID NO: 71305 - DNA, 680 bp, Zea Mays
gttttgaaatactatatatatttaaaatcgtgttttacatgtacgaattaaacacctttaactgctaataccacaatattatcaaatatcatagtattatctcaaaactgtaaaaatatcaagtttggcatggaaacacgtaggactgacctgttctttttttcactcactataaaaatatagtggtaagttggtttctctgttcctgtaatggttgttcttaggatctgtttaatttctttagtttagggactaaattttagtagtcttcactgtatttggttacatggactaaaagtattcggaacacattaaatgattcatacgaaaactaaaatgaccattaacattttcccatcattactgcaattgaaataaatgagagataaaagatggaattaatatgatttagtcccttgtagtcaccccttgagggactagggactaaaatagtctggtccctgttttagttctatagtttggctatttagggtgagactaaaatggagggattaatctttagtcactcaaaccaaacagggacttaagagcaacttcagtagttttataaaagactccctaaatcaataatttaggtagctaaactaaaaacccctctccaacagctctctaaatgaacttcctaaatttagcttcttctcatctaacctcattttctt

SEQ ID NO: 71306 - DNA, 457 bp, Zea Mays
tgacactataaaaatcatcaaataaaataatacatttagtttgttagtggtatttattttaataaatttttcattgaagtgtttgttatttattttattcggaatgatttttgattgctcataagtaattttgaatattgaatatcatttcttcttaaattaaaattcacataaataatacaataaatattagtctaagaattaatattttatttataaataattttggtttgattattatgaatttttatgattatttgaataggtatttcgaaatttgaaaaaaaaagaaaaaaacaaaacctaaccctaatctaccctggccaaatcggcccactaagggcccaactagaaggagccgccgcccctgacctagccgcccctgtttctttgcacagcagccgccgcctctgtcttcttcctccaagccgagcgccgccccctgctccctgtgctt

SEQ ID NO: 71307 - DNA, 1551 bp, Zea Mays
aaagaatctcgtcccgagatttaaggtcctagggtaagtagtggaaaaggaaacacgtcacatctttatttccttatttatcttacagagcagggggtggtatggggtttgttccaactttacaatcagatatacacatcttacaagttatatgaagctaaaaacctaggaaaaattttctccaagaagtcttgagtctcccaggtagcttcatcttcagtatgctggttccattgtaccttatagaatttgacggttctttttcgagtgatcatgtccttctgatccaaaactcgaatgggatgttctgaataagtcaaatctggttccaaagcaacatccaccacatcgatggttcgatcaggaatccgaacgcacttcttcaattgggatacatggaacagattatgtacttgtcacacccgggtttcgaggcaccaagacccgggcgcgaacataatcaccaggtgtgctaggaccaagtctcacatatatgatgaatcatggcacatgatcgaatgtcacatatttactatataataggagttctgtacaaaaataaataaataattatattataaggagacaacggtccagcaacccaaaagttgactgggagacgatggcctagacctctcacgaactcgtcacagcatcctccaagcgccccatcctacggtacctattcttgacctgtgggggtgtgagacagcaagagtgagctcacatacgttcatagctcaacaagttgtggggaataatgtgtatgaactcaccaaagatgggagctaatgtgaagtgtaaggcttaccaaagagaatggttgaagctgagcattgcttttaaagttggtcaaaattttattagcaattactaagtataagtaaatactaacccaattaagtagtagaacaaaagtaataacaacacctgcgatgcaaggcatatgacaaattgaatttagttccataaattaatcatgtgagtgtccgagcttctcatgaccgtgagaacggctagtataccagttttacactctgcagaggttgcacaactttacccataagtcatattaccaatctaccaagagacggccaatcccatacacctctaccgaggaggcgaggcagggtaacactacgaggcctttacaaagttccactagcttcagaaaacccactacagtttctaggaagctccaatgcaaggatccctcgcgtgaccgccatcgcagcaaaatcaacccaaggacctccctacactgaccactcccctattgctcttgcccctttcgggttaggtagtcatccactagctttcctaactaatcagccaagggcgtcccataccacccttgtggtagcactgttttcctgggtggttctccatgttccaatgaacataatgatcttaacatgaacagtaaataacaactgataataaaatataatatgaataaaatgtatctttatacccaaaacaacataaagcaatagcaagtactacccaaaaattcagtggtaaacaaggtacaaagatagtcaaactagg

SEQ ID NO: 71308 - DNA, 235 bp, Zea Mays
aactcgattcgaatcgtctgcttctcgtagctaatgagactgcttgatccattgtactgcattgagtaataagtagaaatgaggtgaatggcaaaatgatgttgattgataaaatgtttgataccatgtatgactagctaggtacacatctagttttaacaggatcatactaaaacttgaaaaagctaaaacttgattttagactcagctagtgcttttggcaaaccaaaccccc

SEQ ID NO: 71309 - DNA, 455 bp, Zea Mays
ccggggtgtcagtgggggagggagtagcgcgggcgcgcgagagatgggccgtgtgggccgcgagggaggagaggagcgcgagcgcgtggggagaagaggtgggctggatccggcccagccgaggggggagatttcctttttttctttttctatttctatttttatttctttttctctttttatttaatctcctttttcttttgaacaaatatttatctatgtttcttgggtgtcaaaaatattctatgtgaggtgctactaacaaccatggtgtatgcatatgatgaatgagatgtcttatgaggtgggggccttaagagataattaaaaggggggttgggagttttagggtttctaaccttggggtaaaaactgggatgttacaaacctaccccacttataggaatctcgccctcgagatttagactgggtttgagaaaaggtaagggtattcc

SEQ ID NO: 71310 - DNA, 944 bp, Zea Mays
aagccccgctccaagaaagtgtgctacaaatgtggtaagcccagtcattttattgcaaaatgtccattatctagtgacagtgacaggagcgacgacaagaaggggagaagaaaggagaagaagaggtactacaggaagaagggcggcgatgcccatgtttgacgggagtgggactccgatgagagctccaccgactcctcctccgacgaggacgccgcaaacatcgccgtcaccaagggtcttctcttccccaacgtcggccacaagtgcctcatggcaaaggacggcaaaaggaagaatgtaaaatcaagatcctccactaaatatgaaacctccaatgatgaggataatgctagtaatgaggaggataacttgcgcattctttttgccaacctaaacatgcaacaaaaagaaaaattaaatgaattgattagtgatattcatgagaaggatgatctcttggacacccaagaggacttccttattaaataaaataagaagcatgttaaggttaaaaatccttacgctctagaagtagaaaaatgtgaaaaactatctagtgagctaagcacttgccatgagaccattaacaaccttagaaatgagaatgctagtttaattgctaaggttgattctaatgcttgtgatgtttcaattcccaatcttagaaatgataatgttgatttacttgctaagattgaagaattgaacatttctcttgctagccttaggaatgaaaatgaaaaattgcttgctaaggctaaagaattagatgtttgcaatgcttccatttccgaccttagaagtaaaaaatgatatattgcatgctaaggttgtagaattaaaatcttgcaaaccctctacatctatcgttgaacatacttccatttgtactagatgtagagacattaatgttgatgctatccatgatcacctagctttaa

SEQ ID NO: 71311 - DNA, 913 bp, Zea Mays
tctaagggtatgaagccgcatcgtacccctcctcgggcaacgtacgatgctaagttgtaccggtacggtcggaccataggtcacgaccaaacttcagatgcaaatgaatcatgtaatgcatatggcatgctgcatttatcaatacacttcacttccttcagatacaaaacaaacctcaaataatacttcatctgccttcagatacgatacaaacctcaaataatactttatctgccttcacgggtgtaaattaatctcatgggtcatactcgaaccataatcatcatcaatatatgattgagcatcagtataatacaatcaagtaaagcatcaccatagagttcaattatgaaagaattccataattctgaatattagagtgtaggcgataaaaaaacaacaagtcaaaacggtagaaaccactgctacattcacttgccttcatcgaggaagaaagatgtactaggcatgatccggagtgtagccacctgctagcgggcataaaacttagtacaaatatttcacaaacatttgccaacaatcaacaaatcactcctacacttgaaaccaagacccggtggaaagactcccaccctgaaccacatgccaaacaacaacagcactgtttgttaattttgtatctttaaaattataacagtgatgatattaaacaaatactctatgagtgtatacacaaaatactctacaacttcagtattcaatggataattaaattctgccatctataagttctaaaacatctgataagataaatgtctgaatctgtttcagacagcaacatagttaacttcaaaattcaatatctaccaaactactcaaccaaaaattatgaaattctgctggcagtaagaacttttatccctctacaaatgtctccatagttggaacagcc

SEQ ID NO: 71312 - DNA, 701 bp, Zea Mays
ggacgacacacatcgattgagatgcaacttttgtctcagagattgcttgttgttcgtcacacatgcatgtgaggcgtgaggtagctagaggagaggtggagcaagcaacagctactcatgcagtcatggctttgttcgaagcctttctctcttttctttgctggtcttcccaatgatgcgtttcgtgcttgctggtaagcacacactctcggctctcccgcatgctttccaacccttgtgtgtctgcggcttgctccccatgattgcccacatgagaggggggcaatccttggctccgtcctgggacaactgcacttaggcaggcaggatctatgtcggctaatgagacaaggcccaaccacaaaccacacaagactgatgctgtgtggcaatccaccactaaggctagctgcttccttgcaccttgccgccttgcgggatctatttgttttctctcttcttgtcacaagacaagcatgcaagtacacgggaacaaacagatgagaagctttagtgcctaactaaattggattttgtgtacgtatgtgtctacctatggcgccatatgcacaagtaggccaggtgtgcaacaaacttctagttaacaatctgattaaaatacttaactactggtcctgctagttggaaattgtcaaggtgagacgcatgaaagatctcccttggcctgcattgcgtgctga

SEQ ID NO: 71313 - DNA, 4559 bp, Zea Mays
cctagacctacaataagaaacaataaataataaaaatgtctgtgaattgttgaacaattgcaacttgaacagttgaactgtaaatatgagacaagaagatcagcaccttaacagtacaatcactagaagctgtaatgacatgacaaaaaggaggaaggaaaagtaagcctttaattcttttcaggatataaaactgcctggaacatgaatgaatgcatgaaaactgaaattctgaacctaatccaaaagaaataagaagagatcgaaaaattcagccagcagtgcgttggagaaacagacacaattcagtgcagataaaatctcatagttcaaatttgtgaaaaatcagatggttgtttgatcactcttagtaagaggccctgggcagattttgggatctcgattaagggttgtacttaggccttgtttgattatgcagttgagagcacctagaggggggggggggtgaataggtgatcctgtaaaaacttgaaacttaaagccacaaacttgattaagtgttagcacaatgaaatcaagtggctaaggagagctcttgtgaaccacaattgacacagtgagaccaagcacaagagacacagagatttattccgtggttcggccaagtacaacacttgcctagtccacgttgtggcgtcccaatggacgagagttgcactcaactcctttcaagtgatccaatgatcaacttgaataccacggtgttctttttcctttactctttcccgtttgcgaggaatctccacaacttggagcctctcgcccttacaatgagatgatcacaaggaagcacagatgtaagagtgggaagagcaacacacacaagcctcaaagcatgagcacaaacacgcacacaagtcacaacttgagctctaagatcacacacggagttctcaactcaagaggagctcaaattgcgatcagaacgaatcaaatacgctagagagatgtcttggtgctaagagatgatcaaagaaatcttggtatactcgttcatgcgcctagaggtcccttttatagccccaaggcagctaggagctgttgagagcaatccaggaaggcaattcttgccttctgtcgactgatgcaccggacagtccggtgcaccaccggacactgttcagtgcagatttctttcctgttctagcgcagccgaccattgacgatttggagccgttggcgcaccggacactgtccggtgcacaccagacagtccggtgcccccatcagaccgttggcccggccacgcgtcatgcgcggattgcgcggccgaccgttggctcggccgaccgttggctcaccggacagtccggtgatttttagccatacgccgccgacgaattcccgagagccaagtctttttcatttgtcttttctctgattctagcacttagacaaatatgttagtacacaaaaaccaatgtactaagtctagaatcatacctttgtattgatttgcactttgtccaccatttggcatagtttaacacataaccatttgtgttggacacttaatcaccaaaatacttagaaatggcccaatggcacatttccctttcaatctccccctttttggtgatttatgccaacacaacaaaaagcaacatatagaagtgcaacatcaatgcaaatgagaaccagaatttgttttgattcaaatttggcatatttggatcattctttgccaccacttggtttgtttttgtaaatcaaactcaatttcctatctctaagtcaaattcacttgttgaggcatagagaaaggtatgccaagagaaattgatcaaagattcaaaaactccccctttttcccataatcaaacattttccccacaagagaccaacttttgacaaaaagagacacttagagtattttgacgaaacaaaagttctaactctactattttcaaaattctcaagtggtagctgatccatttgctttagccttaatttctccccctttggcatcaagcaccaaaacgggatcatttttccccgtaaactccattacctctgtaacaccccgggatccacaaacaccccgaaatgctactaaactacacaactaacattcatatataaaatttcaatagcatctcctttgaaaatttgcataaacgtggaagcaacaaagtataaacatatatcataataagaaaacatactagacattaataatctgttagcaatgggaagataaccataacgtcatgaactgaattaactagtgtgcatgactagttaaaaacaaacatcctttgacaagaagtttttaattaaatcatggttgtgcctgggcagcgttattataagagtgaaggtggacgtgctgctactcccctcatccccaacatgaatcaagtacctgcattgagtaatgcaagagtgagatgaaacatctcagcaagtgaattgtttcgacgagatatttaaaccaaaaaaattgaactaatcaacattttaaagggatcacaattgagatcagaaatacttgtagatatagaactcaatagtcccaaaataaccaatgccatctaatttcctcgaacaaccacaataggttgtataacactttcctgcgtcaacaatacctgcaaatatcacttcgatgtatgcatagtaatgcaatgtgtaagtcctctgccttcatacctcttagagtataaaaccacaccatctacaaataccacttcaatgaatgcatatgaatgcaatgcatatgtcctctgccttcatacctctaagggtatgaagccgcatcgtaccccttctcgggcaacgtacgatgctaagttgtaccggtacggtcggaccataggtcacgacaaaacttcagatgcaagtgaatcatgcaatgtatatggcatgctgcatttatcaatatacttcacttccttcacatacaatacaacctcaaataatacttcatttacctttagatacaataccaaccttaaataatacttcatttaccttcaggggtgtgaattaatctcacgagtcatactcgaatcattatcatcatcaatatatgattgagcatcagcataatgcaagcaagtaaagcatcaccatagagtccaattatgaaagaatccaatacttctgaatattagagtgtaggcaatagaaataacaggtcagaacggaagcaaccactgctacattcacttgccttcatcgaagaagaagaaatgtactatgcatgatctggagtgtagccacctgctagcgggcataaaacttagtacaaatatttcacaaacatttgacaacaatcaacaaatcgctcctacacttgaaaccaagacctggtggaaagactcccaccctgaaccacatgacatacagcagcagcgctgtttgttaattttgtatctttaaaattataacagttgtgatagcaaacaaataatctaggagtatctacacaaaatactctacaacttcgatattcaatggataattaaattctgccatctacaagttctaaaacctctaacaagataactgactgaatctgtttcagacagcagcgtagttaacttcaaaattcgatatctcacaaactactcaaccaaaaatcatggaattctactggcagtaagaacttttatccctctacataagtctccatagttggaagagccaattcggccatttacctgatgaaacctaccagtgaacagacccgctcatttttgtcaggcaaacagaaacagccacagtaaaacaaacataactggagtttcacaaatcatatgaatgcactctttaacaatctggaaagattatgaaattatctacaacttattttaccaacccatagtttaattctgttgataaaattgcctaactattaagagaacagattctgcacagaattatgagactgaaaaactgctataatcaaactgcaataactttctgatctgatgtccgattgaggtgttcttcgcggacacggaaagatatacaaattatctacgactcatatataaactttttatttttttggggccactaagaccacggaaaactggtaagaacagaaactgtcgaatctgccattctgcagaaattaaattcgagatcaaaacctaaccccacatctaatccaacctctaattcttcaatccacatgatccacaacctccaaaagcacataattatatggaggaacaaggatcccatccttacctagggtttccccaagaaaatctgcaatagatgggggggggggggtagaacatctccttgatcctctcttcctcttcaatccatcttgctcctcctcttctcgatccttgctgcgtgggggagggggagatctagggaggaggaagaaatggtgggcggctgccatgagaggagagggggtggccaaccaagggaaaaaggggggagggtggcggccaagagagggggtggagggaaaagggggtggccacctagggttttgtgggagaaaagaaccgacgccccagatgacttctgcctttgcatccaacggcccacaaccctttcccacatccacg

SEQ ID NO: 71314 - DNA, 124 bp, Zea Mays
cgattagatcgcgattcgtttctgagctacggggaatcgacggtcaagcttcggcgaccaaatgatccagttcttcgagttctacgagatcgaagaccctgagcatctgtttggtgaaggcaag

SEQ ID NO: 71315 - DNA, 1380 bp, Zea Mays
tggggattagctctccccgggcagaaagggaatcatgactcatgggtaaagtgtgcgacctctgcagagggtagtgaaactgatatatcagccgtgctcacggttatgagcggccttgggatcctctttgattagagatacagatggttcgagatacaatgattctttttattatttcggttcgatcatgataatgaggtttcctcgatgaggaaatggttcacgggttggttatatgataaaacttggcttccactaataataaatacctgaccaactaaaagcaatctgctttgaccttcaccccacataaagctagtccacttcagccaaacaggacatttgctgagtacgttgatgtgtactcacccttgctttcacaaaacaccaggttgcctttggtgcaatctatgctcaagtaaagaagaaggcgtcgaggcggatctccaggagttccaggacttcgacgagtttgaggattaggctagcgatcacccctagtcagccgcctgtggtgggtttatttacgttggctacgtttctattctgtgtactttgattatattatgtaaatgactctagtctttatattattacttactctttattgttattcgaagcattgtgctatgatgagtcatgttgggactatgcttcgtcgccgaaggtcttgtaggaagaagcagctttcggctgaagctgttcgtatgagatggccgaaggttcctcttcatgaagcttcggtattacaaaccgacttaaaagtagaatgaccctctagtccataagtgcctaggtcgctgttgtaatcctttgtgaggggcataattgtaatttctcataggctgtgtcctgtgcctataaatagtgaacagtattcccttactgttcacagattctggtttttgcaatcgcatcattcgggaaccaatctttgccaaggcagaggtataattgtattcaataattcaatatactaagaaaaatataatatggttcgtttatgattcatttacctttgatactctttattttatgttatcttatacaatctattaaaattcaattatgaagacttgaccttcgtaatcgtattgtaatcaaccttcgtccaaggttcattatcctcaagggaataatgcttcatggacgaaggacgttaacatttaaaattttatgttgccttgttcttaattcatagcatttgagaacaagtccccaacattggcgcccacctccggtgaactcacttccacttttttgagctgatggcttcgttcaacgattgagctggagctgcttcggacccgaagctggtgctcccgataacaggtggatcgtgctcagaaccagccaacaaaaagcagaagaaagaggcgc

SEQ ID NO: 71316 - DNA, 230 bp, Zea Mays
ccaagtgctccctgcgcatgcgtccgtcaaaaacagcagagaggaaatcgcctagcccccacttgcatgccgtttttccatgattcttgtgattgaagaaaccgcatgagagccccactcacatacacatgcacgcatgtcaccagccaccacactagagaaataaaaaccgtcttatcctccctcgcagaaatctcgtggccgcatgcaagcataaaaggagaagattt

SEQ ID NO: 71317 - DNA, 221 bp, Zea Mays
aagaaatggcacctcgccaatccaaaactcgcacttgctaaacttggcgtagagttgattatttcgtagcttctgtagcaccaatctcagatgttcctcgtgatcactatcactcttgaaataaataaaaatatcgtcgatgaaaaccacgacgaatctgtccaaatcatgaacacattatcctttagatccataaagtaggctggtgcattagttagtcc

SEQ ID NO: 71318 - DNA, 379 bp, Zea Mays
caaaggcttccactccataactcatccttcgccgtcactccgtgcaactctccatttttggggagaaagcatgagcaccaagcaaaaggactccatctttggtataatcttcactcatttatttatgaccaaaagagaagaaagtaatgcaagggctctaatggttccgtttttggcgattcatgccaaagggggagagaatatgagcccaaagcaaaaggaccgcacccaccaccaccaatttcaaaaacttagtgtttcaaagagtatttttcaattggtatctcattgtgttcaaaagggggagaaagcagtatttcaaaaattgtatatcaaaaaccctcttgaacactaagaggagaatctcatttagggggag

SEQ ID NO: 71319 - DNA, 256 bp, Zea Mays
catgtgtgagctcacccttgctgtctcacaccccccccacaggagatgatcaggtggttcaggaggagccgcctaacactgaggagttcgatctgatctaggtggcgtttcccagtcgacattggcgccgacgatccttagttcgttttatctttattatgttattttgtaataagtcttccgctatgtaataagtactctgattattgtgacatttatctctatacactctgttattatatatgttgtcttcttg

SEQ ID NO: 71320 - DNA, 127 bp, Zea Mays
gcgagggtgaggtccacggttcgaatactaacaaccgcgtagcgcgtgaattttacgcgaaaaatgccgcgacttgctactttgacggggtgggtgggctgaggcccccctaataaaaataaatttt

SEQ ID NO: 71321 - DNA, 1157 bp, Zea Mays
caaaagtatccatagttggaagagccaattcggccatttactagatgaaacccaccagtgaacagacccactcatttttgtcaggtaaacagaaacagccacagtaaaacaaacataactggagtttcacaaatcatatgaatgcactctttaacaatctggaaagcttatgaaattatctacaacttcttttaccaacccacagtttaattctgttgataaaatttcctaaatcttaagagaacagattctgcacagaattatgagactgaaaaactgctatagtaaaactgcaataactttctggtcggatgtccgattgaggtgttcttcgcggccacggaaagatctacaaatcatctacgactcatacatagacttttcatttttttgaggccactaagaccacggaaaactggcatgaacagaaactgtcgaatctgccattctgcagaaaactaaattcgggatcaaaacctaaccccacatcaaatccaacctctaatcctttaattcccatgatccacaacctccaaaagcctataattacagggaggaacaaggatctcatccatacctagggtttccccaagaaatcatcaagaagagatagggaagaacatctccttgatcctctcttcctcttcaattcaacgtgcccctccttttctcgatccttgctgcgtagggggagatcttgggggatgaagcaatggatgatggctgccataggaggagggggcgtccagccaagggggagaaaagggggtggcggccaagagggggggtgaagggaaaaaaaaggggtggccacctagggtttttgtgggagaaagaaacgacgcctcagatgacttctatctttgcatccaatggcccacaaccctttacctcatccacgcaccagagattaacttttggtcaacattttttttgggatattacactctaccccccttaaaaagaattcgacctcgaattcggccactccaagcaaaacacccaaggtaccccatatagcaccacaattcaaaacatggatccattattagtcttaattaacacaagaacttctaccttggactaattgtctaaggaaactacacgacctgacatcaagcatgaaacaacatgtaatgaagctcaaagcatgtcat

SEQ ID NO: 71322 - DNA, 415 bp, Zea Mays
tgacaacccggcccatgtgacagagacagcgagcggcaagccagcacacacgcaggggaaaacgggaggctgacgtgtgggggccacatgtcggtggcaagtcccaggcttggtcgagttactgggccagcagtgggaattcggtccaagtgacgtggtgaagcgtttttgttttattttttgtaatttcttttttatttatttttcttttctttttcttttctttttctttcctatttcaaatttcaagcattcaactcaaattcaaattcatgttttgaacttccactttccaagtgtcaaaattaatcctaatgtgaatctaaactctactgtttacaatattattatttattcttttccttatcatttatttatggaaggaataaatggtttcattaaaattccctttctt

SEQ ID NO: 71323 - DNA, 341 bp, Zea Mays
cttggcccgcactcttttcctcccggggggtgagctttttaacgaggtggagtgtaacatcccaaaatcccacccaaggtttgaaaccctaacctcctattcccccccccttatttttacctttgcccttaaccctacccttagaaccccctctcatgtgcatacacttgaaataattagagcacctcacatagactatgtttctcagtcaagatcacttagaaaatacttttggtctccaaagaaaaagaatcaaaaagaaacaaaaataaaaaaaggagaagaaagagattagaattagaaaaagaaaaagaaaaagaaaaacttctccccctccctcg

SEQ ID NO: 71324 - DNA, 334 bp, Zea Mays
gaaaagcagaggagagagaatagggggagagggagagagagttagggaagagaaggctggtggctgagaattggacaggggcgcgacgactgagagccagccaacggcgcgctacggtttggggtctgggcccctagtgggccggttgggagattttgtttttttttctttttttttctaattccgaaatgtatttttaaagagctcgaaaattcctaaaaattcatcaaaactatttgtatataaaatacttgtttttagactaataactattatattatttaattattatattaattactaggtttttctttaaaaagaattgataaaaaac

SEQ ID NO: 71325 - DNA, 291 bp, Zea Mays
cttagtcgggtaagacttgctgagtaattccatactcagggttttattccctgttgtttttcaggttttaactttgtgctgttgttgatggtgttaagtgccggtgggctcggccttcttataagtctaagtacttcttctatacttcttattgaggatggtcacttgagctagcatatatttcaaacttatacttttgtaaccactccgataaaataatataaatttttgtaacctgtaaaatttggtaataagatttccgctgcaaaaatgttgtgtgtgtgatttgtg

SEQ ID NO: 71326 - DNA, 880 bp, Zea Mays
atttaagatatgttgtagtggcagtggaatatttttctaagtggattgaggcaaagcctttagccacaataacttcggttactgtccaaaagtttttctggcaaaacattgtttgtcgcttcggagtgccgaaggctatcactgtggacaatggaacacagtttgactccgaagcttttaaagaattttgtgaccaaattggcacaaagatccattttgcgtcagttcgacatcccgagtcaaatggactagttgaaagggctaatggcatcataatgacaggaataatgaagttaatattcaatcaaccaaggggaaagtggccagaagaattaattaaagtggtgtggagccacaacacaacagtatcaaggtcaacaggttttacaccattcaaattgttgtttggtgatgaagcaataaccccagaggaggctaaggcaggatcaataagaacagtggcttcggcgatagacgaaaatgattgttctgtggataaagatgctatagaggggatcaggcttcaggctatggaaaatatcaataaataccaagccgaaacaataaaatggcgtgatagaaaggtttggttgaagaacattaagccaggacatttggtgcttcgaagagtggccaacccagacacagtgggcaaactacaactaaaatgggaaggcccctttttggtagtatcttcgtcaagacccggttcctacagattaaaggatatggacggcaacgacattcctagatcgtggaatgcggatgagcttcggcggtattatgtgtaatttgatgtaatcttttctattttttattgttgttttagtttttccttatggcacccttttcctttccaaagggggggaaaggtttttaa

SEQ ID NO: 71327 - DNA, 230 bp, Zea Mays
ccagagttgaagccatacaagtttgagcaaatttgcacaccggacagtccggtgtgaaacggacatcccatatgctactgcattttttaagcaattccgacttcatattatgggcataacttttagctctgaactccaattttgatgatctttgactttttggaaagcttataaaattatctacatctcagagttgaagccatgtcactttgagtagatttgattttgtg

SEQ ID NO: 71328 - DNA, 291 bp, Zea Mays
cggattcggcccagccgaggagggggaaaggtttctctttttcttttctttttctaattctaattcctttctttttttcctttttctatttttgtttctttttgtttctttttcctttgaatcacaaaaaattctctaaatgatcttgagtgataaatgtagtctatgtgaggtgctctaattatttcaagtgtatgcacatgaggaggggttctaagggtagagttaagggagaaaataaaataagggggggttaggaggttagggtttcaaaccttggttgggattttg

SEQ ID NO: 71329 - DNA, 258 bp, Zea Mays
atttaatagcatttcgttttaaataaaaatcctagtaaataatatatataataatattagtccaagaattaatatcttatttataaataattttagtttgattattatgatttttagggttatttcaaaatgtatttcgaaattagaaaaaaaagaaaaaaaacaaaacctaatcctaatctacccagccgaagcggcccattaggcccatgaagccggccgcgcctaaccctaagccgcgcccaccctgctctatct

SEQ ID NO: 71330 - DNA, 220 bp, Zea Mays
atacgtcccaaatcaaatgtggggcatgccaccatacccatttgggatgccacagtaccccgcttggggggcaccccaaacatctgtattcaataggttgacacctccagtacaagaccgattgagagcccctcaatctggtccacgagcgcaggcccaacgagattgccgaacaattcggccccaaaggctgactaatccggtaggggggcatacagct

SEQ ID NO: 71331 - DNA, 1394 bp, Zea Mays
ccgtacccgggctcagacctagctcgacgccctccctgctcgtcccagttcctctctgctcggccctggtcaccgcgctgagtgcctgctcacgtcgtgcctgctcgcgtcgtggtctcccagctcgtcagcacttgttcaagtcgtctcgacttgcttggccgttgtctcgtcccagctttcagctgcgctcgtccgccgctgtcgagttccatcgtcgagtctagcccctattgctgcgcgtgcgtcctcgccgcgccgagcgccatggagccagcgcgctcggttctgcccagtttgcgtcctgctggcgcgcgtagcgttccgttgttcctgcgcgtgctgccgcaaaggtccctgttcagttcttctccgtcgcgttgtcgtgcgcgcgaaactgctcgcagtcgatatcgagtccgtgacgcgcgaaactgctcatagtcgacatcgagtccgtgacgcgcgcgctggacacggtaaaacattgcgtgtgtttgtgtccgagcccgcccgaccgtgacctcgctttgcttctcgcgtcgctacttgccaagtctttccctagtccgcgccataaaattcgctcggccacagcctcgacgaactgcgaaactccctcgccgtgcgctctggcatcggctaccgccgattccaccattgagttcacaagcactccttgttctgttcgtctcaccgtgggcgatttctctacgcttcaaatccgtgctgctcgccccgcatgcgctcactcctcatccatcgggttttggcgtgttcgtgtttagcgtcgagtcgtcaaacccgtcatcccctgctcgacccccacctcaccagctcgttccaaacacaatcttgtcatcgtttcatgcgtcagcaagaaatcccaagcgtcaggtgaagacggagccagcagcatggtgttcatcgagtgcgtgacaaaaagctcgaacaagtcgtcgagcgtcatactcgtccaccccaagccccccaagccatgaagacactctggtgttggccatgtgtcactagctcgacaaaaaggaattccatgagtatctggtcaagagtagaaattgtgtgcatcgctcgccagacgtgtgtgatcgaagacatcaactgaaaaccggcatcgtgcttgcgactatcgcgtcgaattagtcagggtaagtaaatttgttattcgtgttagtgggttggtggatggtctgacttggtttaatatttattagattgcctgagtcgttttagtaatttggtcgatgtcgtaggatgaaaaagatctccataggtctcagtgtttgcgggattgtacgtgttaaaaatgggaagttatattaatatatatatgatgcacaggttaatcggtaaatcatgtaattaagatacacagt

SEQ ID NO: 71332 - DNA, 292 bp, Zea Mays
cagagatggggcaaccatggccacgcaggaggcggcatcttgtcggctgtcgcaccagagcgagtcgacgacgccggcactcccccgcgggacatgtcggacattgccctcgcacctgaggcgacgacgggtgtcacttccccgcgacgtgtcagccccaagcggactgatgacgccagcaccctcgcaaaggacctgctgggcgttaccctcgtacctgagatgacggtgtgctccgcccccgacgcgacttcaccaccgtccaacgactaagaggtaccgtccgttttcc

SEQ ID NO: 71333 - DNA, 585 bp, Zea Mays
gagaagtccccgcctcgaccgaccctaggctcggaccgatcgcgctaacaggggaaacatcatttccctattcctagcctgctcaggctacaaagaacaagaccggcgtcccatctggcttaccccggcgacgggtaatgatggtgccccacgtgcgccatgacgccggtggctctcagccccttacgacagcaaggagacgtcagcagggtcctcgccgcgctgcaaggtgtgctcctacaggactcaggcgctcctccggcggccacgccatcacatgtacagggcccaagctctcccccaacagccacgttggcatgtacacatggcttaggcactccactgccggacacgttagcacatagctacgccccccgttgtacgactggactctctccttgcctctataaaagggaggtccagggccaccctaatggaggttcgcgcgagggaagcagcggacgagctctgtgtccccctctctctctccctcacgcgacacgcttgtaacccctactgcgagcggcacccctggtgcaggataatacaaggcttgtcccacatcttgtgttccatcccgcgcca

SEQ ID NO: 71334 - DNA, 229 bp, Zea Mays
taatagtaggtgacaaggttgtttggacggcgacgttcacatgctggcccccgctgggattgtggttgtcagttgtttctcttgcttaaatggctcgggctggtggttaagacctaaacaacaacgattcggtggggggtgttatcgatgcgagcctttggtagaggctgatgtgattctgatttctaaaatgtgctcatagtggaggaggttggggtattagtgtcaa

SEQ ID NO: 71335 - DNA, 1126 bp, Zea Mays
tatgaatttagggctaaatctatgattaaataaaaatatagggggatatccaaaagaaaccaggggcctgcgcgctaaaacagaggacagcgggttgatttcctaaaactagggggctcttaagcaaaactcacacgcgaaggggtacagggtaacctcggccatcagatcagagatcagcggcccagattagatcgtgcaggcgcgcgcggacgcggctgacaagcggggctagggcatcagtgggtcagggcgggctgaccaacttggcccagaggtagagatgcgggggagggggaagagagagaggcggttggatctagatcggagggctgggattagatctgctctggttatatctaaaccgcccgatctcggacggacgcccgagatctaacggccgggggcgaacatgggcgcggttgcgccgctcggtcccacggcgagggctcgccggagacgaggaggctggctacggtggggctcctggggcttggggactagcctgggcacgatcagggcgatctggcgggtttagccatggccttcacgctggtgcaggggcaccagagagcgcagaccacggcggggcaggctaacggcggcgcgggattgctccggcgagcaatcgcgggagaaacagagcggggatgaccaaattaaaggtacgggcgggttgctcaccttgaggggaagcactggagtcacaaagcaacgatggaggcgcaaggaagcgacgaggcgacggtggcggggctctggctgcgcgaagattgctccggtgagcgcagactggacaaaacagagaaagagagggcacaccgaagggtgtctcgagcagctgacagtaaggcggagctcaccgtggcacgggacagggcgcggacgcgacggtggccgcagaacaggcagcggtcgacggcagcgggtggcggagctcttgtcgcgcgcacagagcgagagagagggcgagaggatttggcagagggcgcaaatgagcgaggagaggtgggtgagtagggcgcgaggctcaaaaggggagcgagtgtgcggacgtggccggagaacgcgcggacgtgggagcgtccacgacggggagatcgtgggtgagaggttagggacgact

SEQ ID NO: 71336 - DNA, 574 bp, Zea Mays
ctgaaataggttttcctttatccagggattttctaatttcttttctatttattttctctagggttttcaattcaaattcaactcaagtttcaaattcaaaccaaatcaaatatatgcaacaattcaaagaatatttaggctcaatatgatgcaacattccatgactcatgttttgggcaaaataaaataaataatcctccactaattcaactaaccctaattaaaagaaaaagagagggagaaaactagagagagagagaaactaaagtgagatagagaagagtaactcctgaatttggatgatcataagaaagaaattttatacccccaaattcaaggtgttacaacatatatatatatatattactatttgtaagatctaaatgttactttagttagtaaatggtatgatactattttaggaggaataataaggtcttattgaccccgtgtgttgctaataaattatgcatcatgctgagatttttgtttgtgcatatgtgttgagacaatatgagtatacacccttttcttacaaatctcgaggacgagatttctgttaagggggtaggat

SEQ ID NO: 71337 - DNA, 3151 bp, Zea Mays
acaccaagcattctctgagcattcctaagcaccaagacttcaattccgcgcattcgattctttgtgatagcaattagagctccatttgagtagagaactctttgagttgtgttgagagctcttgttgtgacttgtgtgcgtgttgttgctctgattgtgtcttgtgtgcgttgctcatcccatccttacttctgtgcttctttgtgataatcaaagtgtaagggcgagaggctccaagttgtggagattcctcgcaagcgggatatagtaaagtgaaagcaaaacaccatggtattcaagtgggtctttggaccgcttgaaaggggttgagtgcaaccctcgtccgttgggacgccacaacgtggagtaggcaagtgttggacttggccgaaccatgggataaaccactgtaccatctctgtgttgatctctttgtggttattgtgttttccaagaactcctctctagccacttggctttattgtgctaacgcctaatcaagttttgtgggattaagtttcaagtttttacaggatcacctattcacccccctctaggtgctctcaattggtatccgagccgttctcttcacgaagggactaattgcccgaagagatagatcctaagggcaaggggattgtgatcaatgataaggagaaggagtcctttgtcaacgagccgaaagatgacaagcctactgactcgggctcgggccataaaagaaaagacgggaagaagaagaaaacaaggcgcatcaaggagatagtctactacgacagcgacgaatcttcctcttcccaaaaggacgacgacaacgactatgagaaaaagaagacggttaattcaaacttctctttcgattattctcgtattccgcatagttcaaatgcacatttgctttccattcctcttggcaaacctccacactttgatggggaggactacggattttggagtcacaaaatgcgtagacacttgttctctctccatccgagtatataggagatagtagaaaatggaatgcaatttgatagcacggatagtcctttgtttatcaacgaacaaatccataaaaatgcacaagctactactgtccttttagcatctctgtgcagggaagaatacaataaggtgagcggcttggacaatgccaagcagatatgggacaccctcaagatatcacatgagggaaatgacgtcaccatgctcaccaagatggagttggtggagggcgaacttgggagattcgcaatgatcaggggagaggagccaacccaaacgtacaaccggctcaagaccctcatcaacaaaataaggagctatgagagcacacgatggacggaccacgacgtcatccgcctaatgctaaggtcttttactgtgcttgatccacatcttgtaaacaatattcgtgagaatcccaggtacacaaagatgtcgcctgaagaagtgcttgggaagtttgtaagcgggcggatgatgatcaaggaggcaagatacgtcgacgatgcattgaatggcccaatccatgagcctcaagtcattgctctcaaggcatcgagtagcaaggaggcgctacctagcaaggtggcgcaagttgaagcggcggggctaaatgaggaagagatgaccctcatcatcaagtgcttcaagacggcgctaaagggacgcaaggagcatcccaaaaagaacaagacgaagggaaagcgctcctgcttcaagtgcggtaagattggtcattttattgctaattgtcccgataatgatagtgaccaggaacaagataagaagagggaaaagaagaaggcttacaagaaggctaagggcgaggcacaccttggcaaggagtgagactcggattgctcgttgtccgactccgacaacgaaggactcaccgcatcagccttcaacaaatcatccctcttccccaacgagcgtcacacatgcctcatggcgaaggagaagaaggtatgcactcgaaagtctacttatgcttcttctagcgatgatgaatctagcgatgatgaaatagattactctagtttgttcaagggcttagatagaactaaaattgataaaattaatgaattgattgatgctttgaatgataagaatagattgttagaaagcaagaggatcttttgtatgaagaacatgataaatttgtagaggcacaaaaatctcttgctttagaagttaaaaggaatgaaatgctttcttgtgaactatctacttgccatgagacaatttctagtttaaaaagtgttaatgatgatttaaatgctaaactagaagtagcaaatagatctaactcttgtgtagaacatgttatgatttgcaatagatgtaaagattttaatgttgatgcttgtagtgaacacctagtttctattacaaagttaaatgatgaagtggctagtcttaatgcccaacttaagactagcaagggtgaatttgataaactaaaatttgcaagggatgcctacacaattggtagacacccctcaattaaggatgggcttggcttcaagagggaagccaagaacttaactagtcataaggctcccattcccgccaaggagaaagggaaggcccctatgactaatagttgtcaaaagaaccatgctttcatgtaccatgataggaagtttactagaaatgttcattatgataggagttgtaatgcttacaattcaaatgcaatgattgcctcaagttcttctattatgcataatagaaatttgactaggaaaaatgtcattcatcatatgcctaggagaaatgttgctcatgttcctaggaaagtaaacaatgaaccttctacaattaatcatgcttgcaatgcttcatttgcaatttgtagaaagggtagaaaggtgattgctaggaaattaggggcagaatgcaagggagataaaacttgcatttgggtccctaaggatattgtcactaaccttgtaggacccaacaagagttgggtacctaagacccaagcctaaatttgccttgcaggtttatgcatccgggggatcaagctggattatcgacaacgtatgcacaaaccacatgacggggaagaagaagatgttcacctcctacatcaaaaacaaagattcccaagactcaatcatattcggtgacgggaatcaag

SEQ ID NO: 71338 - DNA, 330 bp, Zea Mays
gtccgagttcaggaaccttcaagtggaggagtaccttgaggaggaagggatcaagcacgagttctccgctccctacacaccatagcaaaacagtgtggtagagaggaagaacaggacgctcattgacatgatgaggacaatgcttggagaattcaagacgcccgagcgattttggtcggaagccgtgaacacggcttgtcacaccataaaccgggtgtaccttcatcgcctcctcaataagacttcgtatgagcttttaaccggtaacaaacccaatgtgtcttactttcgtgtatttgggagcaaatgttatattctagtaaagaaagg

SEQ ID NO: 71339 - DNA, 613 bp, Zea Mays
ctctctcacattatctcatgtacgtccttatcctggctccacataatactctatcgtgtccattttcctaaagtcattgttctctggtccatgcgcgcctggtcgccgtgtgattcctgctcatcttcaacgccggccaacctcactccatggccgtcgcttggctcacttgagctccatcccgcccccagctcgatctccagctacctcttgtgcggctcctgggagctaggctcctcaccggcagcagccccaacacagcagtaccaacattcaagacctccacgtcggccaccatctcggactccgccggtcgtcgagtcctgcaggttctctttacctcagcgcgctgcgactccttcaccggtgtgcgtcctgtctccagcgttccttgaccaaagctagtcaacgatcgatgtgatagaactccgatcgatgcgagccaaaaccacatgaacacacacagtggacacagtagaatttgttgctgccgaagggctgcttttctctgttgactgtgttctctatttaaaggaaagacaagtgtctgtacatgggaatatgagactgaggcaatcacgacacaatcatgattgatagttgccatcccaac

SEQ ID NO: 71340 - DNA, 139 bp, Zea Mays
gtttcttgcaccggtccatggcatttcctatctttacaagacgcccagggctcctgccatttaaattgacactaagaccccaacctcctccactatgagcacattttagaaatcagaatcacatcagcctctaccaaag

SEQ ID NO: 71341 - DNA, 246 bp, Zea Mays
ggggactggagcgagagcagcatcaatggtggcgagaagcggaggaagagggggcaggcgagcaggctggccaaggcgagttcctcctcgtcggcgtcagtggcgtcctcctccacgtcatgggcgagtggctccactgtcatggaatgggacatcgacgaggttgcccagctgcagagcagcgacggcttctccctcctcgtctgttagaacccaaagctggtggcggatgatcaacgatggcga

SEQ ID NO: 71342 - DNA, 337 bp, Zea Mays
cgtacctgttggggagcaaaaatccaacgggtttcgggtagcgagtacctattgccatctctagtcaaaatggttttcggtctctacaattatatagtcatcattttcatttttttttctttttttaacagctgtttccgcagaaaattcgtacgcaatttgtgagcacaaccatgagaggtgagacttggttgtcgacgacgaccatgtgctgccccgtgtgcatttcagaaaagccaagcatgatgggtcgatgacagtgacacaatatcctagtggagtaaaatagagacggccaggacttgagattaggctggtcaagtgctcaagtccactg

SEQ ID NO: 71343 - DNA, 911 bp, Zea Mays
ccaacagatgcttcttccccgcggactcgtcgtgatgaaccggctgccacgttgagcgcctggaatccacggttcgctgttgcgatccggagtctcagggtataaatctcaggtggaaaggaagcgctcggaggtgtacgcgggatcctataggtgcgcgggtggttgaatcggcgacaattcctcgacgaagctgaggctctgtcgcaggtccgccctactgcgacgccgtggcaacctgcactcggtgagaatccctacacatctttgcttcgtcttcctatacgagttgcatctcgccggggaccgtttggtgcaccagagcgccaccaaccactcaccggccctgggtactcgccgccgtgccgcaacatcatgtggccagcgtcacccggacagcaattgtaggtagtattgaagcggtttagagggattagagagtgtataaatctataatagataaaaactctcaaaatacatctcaatccactctaattattttcattactagagtacccaaactagctctaaggaggccgcctttaagatcgccacttctcttcacaaatctcaggattagtggcaggataggacatcgggcactggatcaccgatctccagtgaaccgcgccaccgcgggggccttgctccgccatgctggtgagccgggtagcgtggggatcgttaaggaccgttggatcttagaattacggctctgatcggatctgggcgttggttgacggggagccgtagatcggcttgtggacgcctctgattagcagaagtgtgccgattctattgagaaaatatggggcatgttttattcagcttttttctgaccagcttttctgaaaatctggctgtacggagaatctggctgtggggagaatttgagtatcattacgattacg

SEQ ID NO: 71344 - DNA, 898 bp, Zea Mays
ttagtccaaagccgatctggtttgttaatccaaaaataaagttttaggaaccaataacaaaacatatggcacacaaacatcagttaagaatataagaaacgaaacttgagcatagagcaggggacatggacaggtaactccttcgagaaaaaaaacaatttagaacataaatttgtgcatctaaaagaatttcacaacaactttggcttgcaaataaagaatattaaaaatatatgaatttcgtatcaatttcacaaattttagacatgtgtccatcaagcatggatttcatcaatgaaaaatctatagtagttcaaggaaacatgcggtggcatcctagcatatctaattatattgatttctataacattttggatatattgatttctataacattttggtatatccatggccatggtgagaggctacgtgcatgcaaaatattgacaacaattgtgcttgctaacaaaaaaataggaaacaaatgtaaatttccatcacaatctaattaaaaaaacaacgtctaagaaagattaggtggtcaagaagtattacgtggaagtaatcggtgtcttaccattctttcatgagtacataaattattttgaacctgtaaaagcaataaaaatgtatttgctaccgtttttatataccatatgagtacattatgcaactaagattcaaaccttgacttatgcataatattactttatttttgcataaagtggggaaagtgacgtaaaacaaccgtgggctttggaaataaaattaataagacctcactcagtggatttagagtacatttggtagatatctagaattttacagagacatttttagatccggattctcttgatgaacgtttcttatattgaatcagaatcattttataagtctg

SEQ ID NO: 71345 - DNA, 326 bp, Zea Mays
cgcgcgcttggctagcggtagttagttgggctcgtcaggtaatttcagcccgggggcatgtgaaggcttctccttttctttttctttttctttttctttttctttttctttttatttttatttatatttctaatttgtattttctatttcattttggttcaaatatccataatcaaaatctggttttgatcacaagttcatatgcaacattcaaagaactcaacatgagatgcaagtcatatttatttcatatgttaattatttatttaggcaaaatgcttcaaatatggagcacccattttaaactttttagaaagatattattt

SEQ ID NO: 71346 - DNA, 1892 bp, Zea Mays
agcagtttttcagtctcataattctgtgcagaatctgttctcttaagagttaggcaattttatcaacagaattaaactgtgggttggtaaaagaagttgtagataatttcataagctttctagattgttaaagagtgcattcatatgatttgtgaaactccagttatgtttgttttactgtggctgttcctgtttgcctgacaaaaatgagtgggtctgttcactggtgggtttcatctagtaaatggccaaattggctcttccaactatggagacttttgtagagggataaaagttcttacttccaacagaatttcataatttttggttcagtagtttgggagatatcgaattttaaagttaaccatactgctgtctaaaacagattcagtcagttatcttgtcagatgttttagaacttgtagatggcagaatttaattatccattgaatactgaagttgtagagtattttgtgtagatactcctagagtatttgtttgatatcactgctgttttaattttaaagataaaaaattaacaaacagcgctgctgatgtatggcatgtggttcagggtgggagtctttccactgggtcttggtttcaagtgtaggagtgttttgttgattgatggcaaatgtttgtgaaatatttgtactaagttttatgcccgctagcaggtggctatacttcagatcatgtctagtacatttcttcttcttcgatgaaggcaagtgaatgtagcggtggttgcttccgttctaaccttttatttctattgcctacactctaatattcagaagtattggattctttcataattggactctatggtgatgctttacttgcttgcattatactgatgctcaatcatatattgatgatgattatgattcgagtatgattcatgagattaattcacacccctgaaggtaaatgaagtattatttgaggttggtattgtatctgaaggtaaatgaagtattatttgaggttggtattgtatctgaaggtaaataaagtattatttgaggtttgtattgtatctgaaggaagtgaaggttattgataaatgcagcatgccatatacattgcatgactcatttgcatctgaagttttgtcgtgacctatggtccgactgtaccggtacaatttagcatcgtacgttgcccgaggaggggtacaatgcggcttcatacccttagaggtatgaaggcagaggacatatgcattgcattcatatgcattcattgaagtgatatttgcagatgatgtggttttatactctcagaggtatgaagatagagtacctacacattgcattcctatgcatacattgaagtgatatttgcaggtattattgacgcacggaagtgttatagaacctattgtggttgttcaaggaaatgagatggtattggttatagtgggactactgagttccatatctacaagtatttttgattttaattgtgactcttttaaaatgttgatgaattcaatttgtggtttaaagatcttgtcaaaattattcacttgctgagatgtttcatctcactcttgcattactcaatgcaggtgcttgttgctcatcaagggaagtgggaagtagcagcacatccaccttcactcttataataacactgcttaggcgcagtcatgatttaattagaagcttcttgtcaaaggacgtttgtttctaactagttgtgcgcactggataatttagctcatgctgttatggttgtcttcccattgctagcagactgttaatgtctattatgttttcttatcatgatatctatttatactttgttgcttccccgtttatgccattttcaaaggagatgctgtcgaaattttatatacgaatgttagatgtgtagtttag

SEQ ID NO: 71347 - DNA, 1009 bp, Zea Mays
gttttttgtgggagaaagaaacgacgcctcagatgacttctatctttgcatccaatggcccacaaccctttacctcatccacgcaccagagattaacttttggtcaacattttttttgggatattacactctaccccccttaaaaagaattcgacctcgaattcggccactccaagcaaaacacccaaggtaccccatataacaccacaattcaaaacatgggtccattattggtcttaattaacacaagaacttctaccttggactaattgtctaaggaaactacacgacctgacatcaagcataaaacaacatgtaatgaagctcaaagcatgtcatagttgcaatcaacactccaatttcacaccatcaaatttggatgcagctatacatcaacatcaatgtcttaagacaacactcttttatgaaggggtaatatgcaccaagcacaacccttaccaacttcaaccattaattttaattaaatggtgaaacatctacacccgacgaatgtataagaagatcaaacacctcaccttaaagcactatgaaacaagtagttctattggaacaaaactcctaatcttcctaaaccttattcttgccatcatgaaaagataatcatgtaatctaacattccttgcaccccaccaaaatggagaaaatctatagaactaatggagcaataaagccaaaagaagccaataacatcttgtgcggcatagttcatcgaagaaatgccaaaaactctacatagagcactgatagcccaacaacaacacaatacttgcttaacccatgtcactatacttcattcaacatctcaactaagaaaaatatccaactagtaaggataacctacacataatataagtcttcatctactgtagttcagaaacttacatttcattctatcatacgatgcactcaaagtaccagacatacaaagtcaataataataacccctaatccttcacacatttgacaaacatattaagctgatgtaaac

SEQ ID NO: 71348 - DNA, 273 bp, Zea Mays
cgcgcgcagtggatgggccccacagggccgcgagcgagggagtagtgcgggcgcgttggagagaggggggaaaggagcttgggccagatttggccaagccgagagggaaaggtctcctttttttctttttttttcttttttcttttcccttttcttttccttaaactctttttccttttaaaaaaatcttataaatttcctaggtgtccaaaatgaaatattctatgtgaagtgctattagcaatcatggtgtatgcatatgatgagtataat

SEQ ID NO: 71349 - DNA, 196 bp, Zea Mays
caaaaataaactttttatttataaataatttaggtttaattattataatttttagagttatttaaaaatgtatttcgaatttagaaaaggggacaaaaaaagaaaaaaagaaaaaagaagaagaaaacgcaaaacctaacctagccggcccaccaggcccaacatccccagctcgcccctccctctggctgccgct

SEQ ID NO: 71350 - DNA, 352 bp, Zea Mays
tagaaaggaagaatcaaacactaattgttgcggcaaggccatacttgataagtacaagacttcagatcgatttggggtggaagcagtcaacactacttgtcgtgccataaatcggctctaccttcatcgacttctcaagaagactccatatgagctcctaaccggtaacagttcaaatatttcatagtttagagtctttggaagcaaatgcttttctcggtgtttagcaccagcaacacactatgagatatactacataatgattttgcggtcgacgaagtcgacgatagctcgatggttcgtgcgtagcatgttgggagtcaatgatatatacaggtttgggctactgaga

SEQ ID NO: 71351 - DNA, 530 bp, Zea Mays
gaaaaaaaaagaatcagagcttggttgtcatgctcgtaaagctctgctatcatttaatattgcgatctatccgacgattggaagaacatcaaaacagattaaagaaaaaaaaaaaggagcaatagataaatatcagcacagaacatcaaaaaagaggagcaattggtacctgatagaggctgttgctacctctgagcataaggatgaggctgttgatggggaaggaagagcaaacagtggagagagaaaaatacgaacctatgagcataaggaggtggaggagaagggtccggggggtcacggatgaggccgccttatcaccccagaggtgtaggcatgtgaatccatctcatttcttttcctcctgcgtgtcgtagcgctttcttctcttgcgcgcccctattcctcttgcacatgttcccttttcaggctgtgcggcatccgtccgacaccttggcaacgccttggcccttggcttaagacttgtgaggcgacgccggccatacaccggaaaccatggcgaggccgat

SEQ ID NO: 71352 - DNA, 380 bp, Zea Mays
cacagccaaatttcagtttggagataatcttttcaattcggcgcgcgcccccggcccatctcaatttgcattccatgatcgtccattcgagcttcattcatcgatcgcgcgccgcagggagcagcaggccatgatatgtaatgtaaactactatatactcacttcgttccatgcggatctccattatttctgggttctcgcctagtgtcttcttcactagtagactgatcggatccatgcatgtcacgtattaaaacatcctgtcggtcgctcggtctgaagtcagaacaacccggggcctgcagatggaatatattggtgtgaaccaaacgacgattgtaataattaagtgctatatatagcagttcgttatatataaa

SEQ ID NO: 71353 - DNA, 1802 bp, Zea Mays
cgattatccaatccggatcacccagcgcttcttcaaccttaagtggctcaagagaggaaacaaacgagtaaaattcacaaaaatttgctaaacgagatctaattgttacccctcttttgatactcccaagaatgttgtccactggatgatctctttggatggtatggtggactcgaggatggggcactgatggttgtctttaaatttgttcttcatcattatccacttgatcaagaggcacttcatcaacaacaacttcaggttcatcttccaccatggttggcatcttttggggttgatgaacttcttcaagaattggatgacttgaggttgatgggtttgcttgagtggaggatttatcacccaccacctttgcgcccacatcaaagacctcatttgtcatccacaaggttccttcttcatcatccttttcttgtggtctcacttcacctattgcaagcttctttatggcctcacaaggtggttcttcatttcctgcaatatcattggaaacatgcccttgcgagccattagattcatcaaatgtcatgtctatcgctatttcaacaagaccggtggtattgttgaaaacacgatatacatgtgcattttatgcataaccaagcaagaaaccctcgtccactctaggagcaaactttgagctcttgactttcttgttaagaataaagcatttacaaccaaaaactctaaagtaatccactttaggtttgttaccagtgagaagctcataagcagtcttcttatagaccttataaagatatagccggttgattgcatgacaggcggtgttgaccgcctcagcctagaagttgtcaggtgtcttgtattcatctaacatggttcttgcggcttcaattagtgttctatttttcctctccactacaccattttgttgtggagtgtaggggaccgagaactcatgtttgattctttcttcgcttaagaattcttcaacacctgtattcttgaactatgtcccattgtcacttctcactttcttgattttaagctcaaactcattttgagctcttctcatgaatttcttcaaagtctcttgggtttcacctttgtcactcaaaaagaaaacccaggtgaagcgagaaaaatcatcaacaataactaaaccatacttacttccaccaatactaatgtaggccacaagtccgaagaggtccatgtgaagaagctccaaaggcctcttggttgtgaccacattctttgattgatgtggaacgccatgtttcttccctgcttgacatgcgctacataccctacgcaacatttgttagtccaatgatgtgactatctttttgaagtttggccaaattcctcatgccgacatgagctagccggcgatgccataaccaacccttgtcggattttgccactaaacaagtctcaggcgtcaccttacttgttgtcaaatcaacaagataaagtttgcccttcaagcgacccgtaaaagcaactgaggaatcctcccttctaaggatcttcacatccacaacagaaaatagacagttatatcccattccacaaagttgtgaaacagacgtcaaattgtagcttagagaatctactagcaaaacatttgaaagtgattgttggtcagagataagaattttaccaataccaatcactttactcttgccactatctccaaacacaatttcttgtgcttcttgagttagttgcaaggagtgaaacatgtctttctccccggtcatgtgatttgtacatccactgtcatgcacccagcttgacccaccagaggagtagac

SEQ ID NO: 71354 - DNA, 1284 bp, Zea Mays
taaccccagtgcctcaccaaaaatgtcaattaagagcaaaaaggcaatgagagcataagtatgaacttggaattaaatacactaataccggagtgcagtggaagtctttgcgtcgtccaagttcagtttccctttcaatgtacctttgagactacatcaggtgtacttaaacaaacatgttaatctcaaagggtcaagttgtagcacatctccccctaaatatgtgcaccatttgcatatggacttgtgaggtccggggaggacttgtacaacttgagcaccataagtatacaacgaataatgtaaatgctcaaagtaacatgatcaaaggcatagaacacatgtatgctatagattaatccaagttacgcgaatctaagacatttagctcactacacaacctgcaaaatgttttctcatgcaacggcttggtgaagatatcagctagctggttctcggtgctaatatgatagatatcaatctcccttttgttggtggtccctcaggaagtgatgccggatgtctatgtgcttagtgcggctgtgttcaacaggattatccgccaagcggattacactctcattgtcacataggagtgggactttgctcagattgtagccaaagtcccggagggtttgcctcatccaaagtagttgcgcgcaacattgtcctgcggcaacatactcggcctcagcggtggattgggcaacggatgtctgtttcttggaactccaggacactagggacattcctagaaattggcatgtccctgatgtactcttcctatcaaccttgcacccgacataatcggagtctgcgtatccaattaagtcaaatgtagacccctttggataccaattcccgaagcacggtgtagcaactaaatatcaaagaattcgcttaacggccacaaggtaacattccctagggtcggattgatatctagcacacatgcatacactaagcataatgtccggtctactagcataaagataaagtaatgaacctatcatggaccggtatgccttttgatcaacggacttacctcctttgttgaggtcgacatgcccgttggttcccatcggtgtcttcgcgggcttgacgtccttcatcccaaacctcttgagaagatcctgagtgtacttcgttcgggagatgaaagtgccgtccttgagttgcttcacttggaatccaagaaagtatgtcaactcgcccatcatcgacctttcgaatttttgcatcatcaccctgctaaactcctcacatgacttttgattagtagaa

SEQ ID NO: 71355 - DNA, 137 bp, Zea Mays
ccctggggtggagttaaccaccacgttcccttctttgcgctgaggtggaggaccttttcccttcctaagtttgcacctccgagctgtatgcccggagacaccacaaacgcagcagataaagtcctcctttttcttct

SEQ ID NO: 71356 - DNA, 171 bp, Zea Mays
caggaggagtcgccatatgttgatgaacttcatgaggagaggaagtgtacaacagtttgtaaagagctcccctctgtttccctggcaacaataaagatgaacgggaagccaacatgtacagatatcatggactatgttctccagaaggtgagaggcttgttcattgttgaa

SEQ ID NO: 71357 - DNA, 323 bp, Zea Mays
agtgagtatgcatcaagtatgacatttgacattgcatttgttatggttagaaagaaacgggaaagggtctcgcagggggttaaatcttatgcactaacgatcaattacaattggttcttaacaaaagaattccgttatatgcactagtgggaacctaatcattttaagttgttcaacatcgcacgagataaacaattaactacataaatcaattagcataacggaattttaaattaagcttcatatttcaataacattaacaatgattagtctacctaaaataaaatagctatgatcacagaaagtaaataaaataaaataat

SEQ ID NO: 71358 - DNA, 1514 bp, Zea Mays
ctcctcgcgaattgttcagaaatccgagactcaacctgtcgaactccttggccaactcataaggcatcggtcgagcgaccatcagattgacttgactctttctgctcaaagcatctgccactatgtttgatttgcctggatggtaatgaatctccaactcatagtctttgattagctctaaccatcttcgttgcctcatgttcaactctgactgagtgaatatgtacttcagactcttgtggtctgtgtaaacatcacatttctgtccatacagatagtggctccatgtcttcagtgcgtgaaccactgctgccaactctagatcatggattgggtaattcttctcatgaaccttcagctgtcgggacgagtaagccacaactcttccctcttgcatcaacacacatcccaaacctgtgtagcaagcatcgcaatacaccgaaaagggcttgtgcacatcaggcaagactaggataggcgctgtagtcaacttctctttcagcgcttcaaaggcctcttggcatttctgggtccacttgaactcaaccttgttgcctagcaacactgtcattggtttcgcaatcttcgaaaacccttcaatgaatcgccgataatatccggccattccaatgaaactcttgattcctctagcatctgttggcgctttccagttcagaatgtctgccactttcttcggatccacagccaatccttccttgttgattatgtgacccaagaacaagacttcactgatccagaactcacactttctcaactttgcatacaactggtgctctcgcaatctctgcaacaccatcctcaaatgatctgcatgctcttcttcgctatgagagtaaactagaatatcatcaatgaataccaccacaaacttatcaaggtaatccatgaatacactattcatcaagttcataaagaatgcgggcgcattggtcaaaccaaaagacatcactgtgaactcgtacaacccatacttggaaatgaatgccgtcttcggaatgtccgaaggtcggatcctgagctgatgataacctgacctcagatcaatcttggagaacacactggctcctctcaactggtcgaacagatcttcaatcctgggcaaaggatacttgttcttgatcgtgacctcattcaaagctcggtaatcgatacacatcctcttggtgccatctttcttctccacaaataagacaggggcggcccaaggcgaggtgcttggccgaatgtaacctttctctgacaactcatcaatctgcttcttaagctcaaccaactctggtccagatattctgtaagctctcttaaagataggggcgattccaggaagaagctctatggcaaactcaactttccgctctggtggcatacccggtaagtctttcggaaacacatctgggaactcggacacaaccttgatactctcgatcgggtctacttcactgctatcaacagccatctgataacaacttcctttctttggctcaggcgggact

SEQ ID NO: 71359 - DNA, 843 bp, Zea Mays
taaatagtcacatcatgttcattgattaagttaaggcaatagaagagtgctaaccataacagcccataaggtcatcaaggataaagtaaagtgtaaagctagtcaatcctttggtttcaagtaagtaatgtggggtagtaagttataaatgaataggacataatgggacagaggacacttgccttcaccaaactgctgatcagggacttcctctgcaacctcctcggaaaacacagactgctcgttgtctacgtaaagtaatcattcacactatgcacttgggaaaataacaaacagaaagcaacataccaaacatatgcagcagagagagatcacaagttcatagtagaaaagagataggcactctagtgttccctaggtctggggtagaggactatacaaagtgattcattatccactaatcaggtttaagtcagtggtgggattaaatcattacatggttttaagttcctaaacctaggtgtttaagtccctaaacttaagtactccaacttttattaaggtccaccaacttctgattatctcaaatagggttccaataaccttaatcctatcctagtgattaaccattaattggtacatggaaacagcagggaaacattgtttaaatagatagacaaaaacatcatgagcattttgcaatttgaagcacctaatttggagttcatatgacaaagttatgaattttacaagtttggggattaaaaatataccctaaatacctattttgaattaaataaaaggcccaggggcctaactgagagaaaccagggacggcgggttcaaattccagaaaaccgggggtctctttaagaaaacgcg

SEQ ID NO: 71360 - DNA, 777 bp, Zea Mays
cactggaggggcgaaccggccgagtccgcttcctgggaagacctcgacgaattccgcagcaagtacccagactttcagctcgaggacgagctgggtctcgagggggggggggagagatgtcatgtgcgggcgcacatataggcgccgccgtgacgcacgccgcgctgcagagcgcgctgaacgcgcacaggagaaggccacaaccagtggatagatttagaaataaagataaggctagagaataagattgagacgagagaattgtggagagttagttggcagcagataagtccaagaaaataagagttagttgagagtttataggagaagttggttagccatagggctatttataagccacatggcagcagggaataaagcaagcaagattattatttcctaatctctctctaaaacaagccgacggttgaggggaaaaacctcaccggcgacgacggaccgtggctacgaactccgtagtcaggggccagctaccctaggtcgggaggtccttgacagctgtgttcctcactgtttgtatttcagcagtagttcgacgttgaacccgtgatgctgtttctctgttctgaactcggccctgcagattgagaggagctacagaatacagatcaattgttgttcagctgcattgagtttcaccttcagttcagttcataaaacagcagcatatcagcttgctttctgttttcgttttgcagcagttgttgctacatctgttccctgcagcaggatattttttttcagcaactcgtttca

SEQ ID NO: 71361 - DNA, 452 bp, Zea Mays
aagtcttattgctcgaaatcttttctgccgaaacgattttcgtgccttctcgactatatcgataacagaatccaacggacgagtaagagcacacgtaagcggcaaggccgaccgagccgagggactcctacgcctccgggatacggatacctcactcatcaccttccgcgaaaagtaactctcgctcgggcaaacagttctgttaccgacaaataagtccagatactcgaaacaaggggaaaagaaacacagctttataacgcgacgatgatatgtttgggcctcggcggtcgcaaaaaacatacgcacactacaagataaactgttcctgcagggtcagacatcagtgggggagcagcagcaccctcggcgtcgactccaccttcggcggaatccgacccggcctcggacggcaacacggttggaggatctccaccttgaaggaacctgtt

SEQ ID NO: 71362 - DNA, 2180 bp, Zea Mays
cattaccaaaccaaggccagaagagatgggttacatgaaaacttcggctgctacaattttgcctaccgcaagactacaaaatttcccttgatcagttaccaaagcaagtggccgactggttggaaatcggaatggttctacgtcaaagttgacgatgataaggagaagctggtccagagtccgttagagctgatcttcgtagagaccagaccccctgcaatatgacaccagagggtccaacccaaattgcactggctgaatttagggttatcgcggagcacatcggcactagggacttagtgcaggaatttttggctttcaaaatgtttccaactatgaaagagtgggccatgccgaagcttgaaggaaaaaagaaggagggagaacttgtccggctgccctaccattacaaattcaagagacatttcaaagtgccctgccaagaatggttggatacaatcgaagtaatgtgcaacgaaatacttggaaattattctaaaaaagaagatcaattgatgactgcggcctttggcacccgtccgaaacgaaggctaaaccgagtgatggatgctataggttttgaatatcctgactacgagcggctggacaagggtgccgaaggccaaaaaaggaaaagagtagctagtgctctgaataaggacgatgaagatcaaccaaagaagaaaaaacaacagtccgaggcgaaaacagttgctccgaagaaaagaaaggcttcgattccgaagcaaaaatcaattgatgaaaaagaaaggacttctgtgacatcctctgctactgaaatagaggaaattttaaagataatgactgaaactttgcctgtcaaactaagtccactggggctacatctgacgaagctttttcagaaggaaaataagcccataaaaacgaaggcacctaggccaaagaggcaaagaatcgttactgtgacagaagtcattgaagcaacaccaccaggagcttcagctccgaaggtgccggctattgaaagcatgacagctactgaagctgtacctttggaggctgccgcagaagaggccaaagccgaagataccaaatccgaagatattaattagaaagcatggctactgatatagacaaaatgctactaaacatggccgcggaaaaagttgtcgcaaccaccgaagagacaacggccgcaaaacccgagaaggaagaaatgaccgaagatacttcggaagatgaagcttttgactttcaaaacttagttggccaagagctgacaaaagctgaaaaagaagaactaaaagaatatgctatatcttgcgggtatcggccgggagcgcttctcttcggtggcattgatgacgaaaggttaggctgcatacgagatcagaccggcgcgaaagttatcggtactctatcaaagagtatcggtttcccgaagctcgaagcagatatcagccgctaccgacgacaacacattgtcggtagtttgttttattccaattttaaggtaaacaacttttgtctaacctttattatttgtaataacataaatgttttctaacgaaggttatttgttcgcagagtatgctgttgagcaaggctttaaaaatgcagcaggacttagaggataaaaagcacgaagttataattgagaacttagagaacaagataaaagagcaatcagttgccatcgaaaagaaagacttcgagcttcaaacaaccgaaagcttattagcggatgctgaagccaaaataacagaattaaatttgaagcttctttctcaatcagaaaatttcgaacaagaaaagctgaagcttgatgcaaaacttgaggccgaagtccaaaaaagttcggagctgaaagaatctttgacaagccttcagaataaatgcctgagtttagcaatcgatgcgttcaacagctgaagcaggtgttctattttgttggagccagcagcgagaagttcactccttcgactgaagacctgcctggtgccttcgagcatattgaaggtgaaattaatgatcttgacgaagttatagctgggcatggtgacttctgtgccctagtagcttctcgggacacagctgttgcctttctgaagtctggctgtgaacacggaaaagttgtcaatagacccaacttcagcttgtcaccagcagacttagataacattcccaacctggcctga

SEQ ID NO: 71363 - DNA, 158 bp, Zea Mays
ctcaatccttgcagccacaccaccataccctagcccccccccccccaatctcctcctcccaaggtgccaatccttgccgctcggatcgtcgtcacgtggtgcgaatcttcaatcgttttggtggaggaaagaagggaggaaggaaagggggagaatcc

SEQ ID NO: 71364 - DNA, 1134 bp, Zea Mays
gttcgatcccgcgtgagttaaatctggaccgctggtcgctaatccgttggtagaaatcacacaccggttgggttaaagtgtagatctaatccgcgccactgattttggatcgggtggctggggtaagctggtacccgttcaccgagtacattttgcattgggaaccccctggtttctagtattcaacccatcgtcctacttttacagtagcaccctcggaattaaaatttggaattgcaaataggtcctttgatttttcaaaaaggttcctggtgattgatttagatatgtagatcacactaaaaacaccctaaaacttctttagttcgtaactttctcattttaactccgatttgatacattcgaattgcgttaggttcgtaataaaattatctacattttagtaaccttattaatgtaacatgttttaaacgattaatttgttaaccctatgttcattagattaacttttctaattaaagttaaggtaatgtcttcagtccctagttataaagtgacaaaaatatgttttctaatcaagttataacttagattaaaattaaattaatcttttcttgagaatacattttctcacatgattcattaatcaacatagacacagttttcatatttgatcacataaaacttatgaaaactgtaacttcttaaccataactccggtcttagcagctctcgtagcagcgcgtagaatatttttacgttgtttgttcttattattggtgtgatgttaattttgcctatgccatgtttgtttgtattgctacgagtagcagcgaggttacgagtcacttgaagaccaagttggtgaagtacctgggaatcttgagtctaagtcaagttgtagctttgatcactcctttttacctaataatgtttgttgttaatcactgtgacaggctcaggttaatttgacgggacttaataggtttctctagcattgtttatcccccacctcacaaacaactgaattattgggtagatttgctattgctctacatggttttgggaatctaatgttttattatgatcatgttctaattatgttgttgtttaattattgttcatgataagatcatattgttaattggaacatggagaaccactcgagaaaac

SEQ ID NO: 71365 - DNA, 1269 bp, Zea Mays
ctcaaagcaaatcaagaaagcaaatggaaaagtcaaagttactttcctaggtccaccaagcaagagtagacctagacaaatttgggttgcaaagtccttgattgagaaagtcactggtcctatgcaatatggggccctcaaaactcaagcttgatttgtctatgaatgtaggtgaactacaagactggtgggagccattgggttattgacagtggatgcacacaacatatgataggcaacccacggatgttcacctcacttgatgagaatgttgatttacatgacaaaatcacatttggggacaattcaaagggaaaagttcaaggacttgggaaggtggcaatttcaaatgatctatcaatttcaaatgttctcttggttgcacctttgagcttcaacttattatcagtgggtcaactctgtgatcttggacttcaatgcttattcactccaacagaggttattgtatcaaaaatggatgatgaatcaatggtattcaaaggatttagatacaacaatctctacttagtggatttcacctttgaagatgcagacttaagaacttgcctctttatcaaagcatcacttggatggctatgacatagaagacttgcacatgttggaatgagcacactcaagaaagtattaaagaaggacatggttagaggactaaaagatgttgtatttgaaaaggacaagccgtgtagtgcatgtcaagctggaaagcaagttgctaacacacatcctacaaaagctttcatgtcaacatcaaggccactggaactacttcacatggacttatttggaccaacaacttatgcaagtgttggtggcaacctctactgtctggtgatagttgatgatttctcaagatacacttgggtgttctttctcaatgataaatctgattagaggactaaaagatgttgtatttgaaaaggacaagccgtgtagtgcatgtcaagctagaaagcaagttgctaacacacatcctacaaaagctttcatgtcaacatcaaggccactagaactacttcacatggacttatttggaccaacaacttatgcaagtgttggtggcaacctctactgtctggtgatagttgatgatttctcaagatacacttgggtgttcttttgtaacacccggattttaggggtccaaaacccgggcgctaacataaacaccaggtgtgctgggaccaagtctcacacatatgatgtatagtggcacaggatcgaatgtcacatctttatatataacaggag

SEQ ID NO: 71366 - DNA, 348 bp, Zea Mays
atttttctccttccttctctttctcaaattctcaaattccagtttaagtctaacttctattttgaacattaatgtctttctttaaaattttattacttcatatatttatttttttattactttttttttcttatacaaattttgggctttacactttgggcaccagactatccggtgcgcaccggactgtccagtgcaccctctaccaatggggccagcctggcccagggaagagggttccctgcgcagaaatctgagagcgtgcagtttgggagttgaattttagtggcacaccggacagcgtaccggactgtccggtgcgcaccggacagtgactgttcactgttc

SEQ ID NO: 71367 - DNA, 352 bp, Zea Mays
gagagggcaatagaaggcggcgcggctggctggctggaaagccagagcgtgcgacgtgtctagggttgaggtcttggggattgggcccctagtgggccggctagttaggatttagttttttttttcttttttttctaattccgagatacctttctatataactcaaaaattcataaaacttcaccaaaattatttataaataacatatttatttttacactaataatcattatattatttaattattatattaactactaggatctctttttacgaatacatgataataaacatccgataattaatcaagagcacacaacgaaatctgatccaagaatgcaaataaacaatt

SEQ ID NO: 71368 - DNA, 423 bp, Zea Mays
ttttccccacccttgggcgccctcccccttccccttgcagccgccttccactacttcctcctccctctagatctccccccacgcagcaaggatcgagaagaggaggagcaagatggattgaagaggaagagaggatcaaggagatgttctacaccaatctcttgcagattttcttggggaaaccctaggtaaggatgggatccttgttcctccctataattatgtgcttttggaggttgtggatcatgatgattgaaggattagaagttggattagatgtggggttaggttttgatctcgaatttaatttctgcagaatggcagattcgacagtttctgtttatgccagctttccgtggccttagtggcctcaaaaaaaataaaaagtctatatatgagtcgtagataatttgtagatctttc

SEQ ID NO: 71369 - DNA, 335 bp, Zea Mays
atttttgaagatgagaacatataaaaagtgctataaagatacattgttttaattatacatatcaaatagtataaaagtgctatgtatctaggaaaaaggcaaaaccgaactgagagagtaattaatagcatcacagtgtaatatacgagtataaatgaaaactgcgcgtgggcagatctaatcatctaatacgcttaggcagaaggtggttaaacagaagcatgatgtgcatgttaccgaccctgctgcgcagaatgggccttcgagatttaaggaaatcccccatgtaatcaatccatcatcaaactgaggattttggagccttgtgaaaccag

SEQ ID NO: 71370 - DNA, 732 bp, Zea Mays
gtgacagccctcccaagttatcaggcccacatgcaccaatccttgccttactggcctcagatggctgtgcacgtgtaccgggtaacttaacaaggctatcgagttcgccaactggaactcatcatcccaaggatctcccacataacaggtatattacagtaatcacatttgatacacacacattggagatagagcggaagacttttacaaagtacactttacattccagaactcaagttttacatggtagaaagagatgtatttattacaagtcctgatagtactcgaagggcataacttaactacaataattggaagggtgaagcctttccataagagatatataaaaaccttctaagcttcaagtcctccacatgaagtaattaacccaaagataagggaacaaaacttctcctacaaaaacaacaagggataaaaccctgagtacgcaattactcagcaagacttacccgactaaagaaaagactctcaagggtatgctggcttttgggaatcaaggtaaagctcatcaaagttcaaggactcattttgcagaaaagcttactagaagtgggtccttaaggccaagttttatttcacaagttagtttattacctgaatcttctagcctgaatctagcagtttcctaatctagatcattcacttgacctgcactaggttgcttttaaaatccaaattttgttttgcttgttatctacgatgaagggcagc

SEQ ID NO: 71371 - DNA, 1003 bp, Zea Mays
ggcacatttccctttcaggctcggacactcacatgattaatttatggaacttaaacttaatttgtcatctcattgcatttgggattattttactattacttttacttattattattgtggtttggtattcacttacacttagtaattgctaataaaattttgaccaacttctaaaagcaatgctcagcttcagcctttatttcattgatcagccttacacttcatgaactcccacctttggtgagttcatgccacattattccccaagacttattgagctatgaacgtatgtgagctcactcttgctgtctcacacccccccacaggagaagagcaggtggttcaggaggagccacaaggcgaggagtatgatctaatctaggtggcgtttctcagttgacatttgcgccgacgatccgtagttcgttttatgtttattcttttattttgtattaagtcttccgctatgtaataaatactctgatgttttacgacatttatctctatacactctgttattgtatatgttgtcttcttggcgcatgtatgagatgcacccggctttgttccttgaaaccgggtgttacagaagtggtattagaggaaatgttgactgtaggacgaaacctagatagaaatggacaaaacacttacctacttatctcactctgattctttctatacttatgttgatcatgtctcaccttctactgttctactctgattattcttaccttctctactctgagacaagatggatttcacaccttagaatcctacaattatgaacttttaagagataggaggcctaagacaaaattaaaactattttctctattttaaaaaaaatgttggttgattgttctgatgatcaatgcctgatttgctttttttattgattgaaatagtatagacgggcatcttagcatgtaccaccataaggtaatgaattagctttagtaggcaacacttagctaatgaatcccccaaagtaacatttctc

SEQ ID NO: 71372 - DNA, 660 bp, Zea Mays
aaaagaaagaaaatggcaaaatctgcgctgggcccagttccttatctcagcccatttgcccctccaagccgcatgccacttcctcacccgcggccctgttcacgtgcgaagcgcgcctggtgagactggcctgcgggcccatgtggtcggcgtaccacgaagcggagacaaccagttggttctcgcggcgcatgcgggcactcgggtagtaccaatgacaagcgggcccgtgtgtcgggtcttctccctcctcgcgatcaccccgctggaatcgcgcgcagctaaaaatccttcgctcgaatcacggagtccgttgtagctaaccggcaaaatccaggcgggctggggatccttggctcacggtttgttaggctcgggcaattaggggataaataccgggggggtgacctcgtcaccgcagttaccttgtcgtggccacttctccccttcgcccagccgccatagtgcatccatttgttctggtgttctccggtgaggacatactcaaggatccggccacgtacccacccctttccctctatcgacttggccgatgatgcactgacgtcctcctgggcctcgccctctctgtactctctccgtgtctcttgccgctccaccgctctaccgtcatcagggggctacgtgacttcattgccg

SEQ ID NO: 71373 - DNA, 590 bp, Zea Mays
ctggtatactagccgtgctcacggtcatgagcggctcggacactcacatgattaatttatggaacttaaacttaatttgtcatctcattgcatttgggattattttactattacttttacttattattattgtggtttggtattcacttacacttagtaattgctaataaaattttgaccaacttctaaaagcaatgctcagcttcagcctttatttcattgatcaaccttacacttcatgaactcccacctttggtgagttcatgccacattattccccacgacttgttgagctatgaacgtatgtgagctcactcttgctgtctcacacccccccacaggagaagagcaggtggttcaggaggagccacaaggcgaggagtatgatctaatctaggtggcgtttctcagttgacatttgcaccgatgatccgtagttcgttttatgtttattcttttattttgtattaagtcttccgctatgtaataaatactctgatgttttacgacatttatctctatacactctgttattgtatatgttgtcttcttggcgcatgtatgagatgcacccggctttgttccttaaa

SEQ ID NO: 71374 - DNA, 318 bp, Zea Mays
cgggtgtcagcgggagggagccgtgcgcgggttgggccgcctgggccggggagagagggggggaaatgcgggcgcgcgcgggttgggctggaaatcggcccagccgagggagggggagaagtttttctttttctttttctttttctaattataatccctttcttctccttttttttctattttgtttctttttgattctttttctttggagaccaaaaatattttctaagtgatcttgagtgagaaacatagtctatgtgaggtgctctaattatttcaagtgtatgcacatgagaaggggttctaagtgtagggtta

SEQ ID NO: 71375 - DNA, 273 bp, Zea Mays
agaattccccccctagcaccctcggacggcagcattatatactgatcaaaatctgttcccaaaatagccagcacctttcctctgttaatttcctgcattttagtttcctgaagacagataacgtctgcgccacaagcatcaatgcaagttctaacagaacattgcctagatgtagaattgagaccccttacattccagctcaagattttttttggatccattacaaaactcttacatcagcgacctctacatgacaactcaacaggcactaat

SEQ ID NO: 71376 - DNA, 613 bp, Zea Mays
gaaaagccgagccaatcattgccctaaatgcgcgccggcccccagttcagatccgtcacagcagtagtccgcagctgcgtcggtccgccggcctccctcccgctcggcagaggagcgtgcacgcacgcatgtgagccgcataattccctgcgccggcagctagcatccccttgggccgtggcaatgggcgcggggacgaagggtcctgcgcccgcggcccccgtgatgttggctgcagcggtgctcagcggttcttcagcctcgacgtcggcggcctacgcatctgatcccatttcggagggaggaagcggagtgcgggcagcagactcgtcggctcggctcctcgcccgcgttccttagggtatgtacaatggtgtttaatatgtttaaggggttatttgcaaaaaaactttagagccgtctctctattaagagacgtctctgactcgtaaaccaagtagcaacagacgcttcacttcacactatacgaatttgtcgtctgttctatcgatctgatgctatataaatacatttaattctgtatttattaatagactacgtttataaacactccattatacaatagagtcttttaattgtctcatgtgcttga

SEQ ID NO: 71377 - DNA, 142 bp, Zea Mays
tcctagctaggggctagggccagtcatggcctgctagtgcgaggtcccgctcgccgccaccgtctgctgctcttcctccccaagcaggcgcaggtccatctccattccatccacgccgtagttccgcagctatactagcgct

SEQ ID NO: 71378 - DNA, 1406 bp, Zea Mays
cttggtttcaagtgtaggagtgttttgttgattgatggcaaatgtttgtgaaatatttgtactaagttttatgcccgctagcaggtggctacactccagatcatgtctagtacatttcttcttcttcgatgaaggcaagtgaatgtagcggtggttgctttcgttatgacctgttatttctattgcctacactctaatattcagaagtattggattctttcataattggactctatggtgatgctttacttgcttgcattatactgatgctcaatcatatattgatgatgattatgattcgagtatgattcatgagattaattcacacccctgaaggtaaatgaagtattatttgaggttggtattgtatctgaaggtaaataaagtattatttgaggtttgtattgtatctgaaggaagtgaagtttattgataaatgcagcatccatatacattgcatgactcatttgcatctgaagttttgtcgtgacctatggtccgaccgtaccggtacaatttagcatcgtacgttgcccgaggaggggtacgatgcggcttcatacccttagaggtatgaaggcagaggacatatgcattgcattcatatgcattcattgaagtgatatttgcagatgatgtggttttataccctcagaggtatgaagatagagtacctacacattgcattcctatgcatacattgaagtgatatttgcaggtattgttgacgcagggaagtgctatagaacctattgtggttgttcgaggaaatgagatggtattggttatagtgggactactgagttctatatctacaagtatttctgattttaattgtgactcttttaaaatgttgatgaattcaatttgtggtttaaatatctcgtcaaaataattcgcttcctgagatgtttcatctcactcttgcattactcaatgcaggtgcttgttgctcatcaagggaagtgggaagtagcaacacatccaccttcactcttataataacactgcttaggcgcagtcatgatttaattagaagcttcttgtcaaaggatgtttgtttctaactagttgtgcgcactagttaatttagctcatgccgttatggttgtcttcccattgctagcggactattaatgtctattatgttttcttatcatgatatctatttgtactttgttgcttcctcgtttatccaattttcaaaggagatgctgtcgaaattttatatacgaatgttagatgtgtagtttagtagcattctggggtgtttgtggatcccggggtgttacagttggtatcaaagcataggctttagattcttggcaatttgaagataaatttgacacacttgcacatataggaagggtatgggtacaaatatctttgatatatattaatgtctt

SEQ ID NO: 71379 - DNA, 677 bp, Zea Mays
tttttagttagtgtttccaactgttcataatttaagtatgatttgtgacggttataattaatttatgcgtagttttctaattatgaaattaaaaagaattataaatcatattttctaatcaagcatactaaataaacaactatataattactttttatgatttagatttatattcaagtattttatatttaaatacgtatatgctaaattggggtttccaataatattaatatagcttaatgcacccacataactaaaatgatagaattggtgttcatatctttaaaatgatgacctatcgggttgaatgtagttttatcaacaaatatagatttagtgtttttctaatagaatgataaccatttattatccgttcatataaaactcatttagtctcatatttaagtatccataattgtatgctttacaatagtaatatgtcatataacttttctaatagtgatataatggcttaattaagtgctcacaccgacataactaaaatgatagttaataatataccaataaatatagtattcattttaattatctagatcatttgttcctacaatagaattaaagataattaatagattaattatcctttatcataatttattaatcaaacctatagtcaatttgttcttaactaggtttatggcatgattaacgatttt

SEQ ID NO: 71380 - DNA, 420 bp, Zea Mays
gcctgtggcgttgccgcttcgggttggctcgtgctccgtgcttgcaattccagtgccgtactgccgtccatggatggacggacgtcggcagaaaaaggcgaagatggaccagagcggaaaaggagccgagctccagcagcgagcagcgtcgtccgtcccccacaggccacgccaaaggcaaccctgctggctcgcatcgctttcctagccgccctaggcgggggggtcgcctgtgtctttcgggcaggtgctgtgccttggcttgtcgccccattccctcaccgccagcgcccagcagccagcacctcgtttgggttttggatgcagcactgcacgattccctgacagctcggaaagggtacagagcctgcggttggggataagaacagtggtgagccaaaaaggttgggtagctcgttc

SEQ ID NO: 71381 - DNA, 637 bp, Zea Mays
ctagattcgagcctgtgcgtggcccgaggctaacgaatagtttttttaataaaaaaacttgtttatttgccgcaaagaaagatttgagattagggggggaatctgatgaacccagaagccgcatctctttcatcagctgccccaagcttgcttgcccttaaccggaagctagcccaacgatctaaagaccctgcctttgatttttttctctctctctcttcttctctctcaaacccaccctcccctgtttctgcctctaagctgaagtaactgatttcatggccagttaccagattggcctaatagaagactgaccggaggatgcacgagatgtgaaagaaagaaagaaagtaggcttgctttgccgtgggggtaagtaagggaggcaatgcctcgatcggcacccccacccctgctaatgttgaccaccatttttcttcttcaacaaaactaatcatgccgatcatgaagggcgtgtaaataattggccgtgccgactataaattaaataaaaccccggcagtcaaataatgattcggggcaggggaggctgaggcgaggggcataatttacagccaggcgcctcgaggaaagcgagcgagaggttgcgcttgcgcccaccataaacaaatgcccg

SEQ ID NO: 71382 - DNA, 503 bp, Zea Mays
gattgacatatatgaggtccaacaccctgctaaggtcacatagaatatatccaaacatagtaacaacccaaactaaaaatcaaagtgaacttagctcttttgggctacttccagttctggtttagacactgctcctccttctagtgaccttgttcagttcttgagcttgatcttgagccttatgacttacaccacatatctgtagatgtcacctcactggttgtaagtcatgtccttatgtagtgatccttgatgtgtcataactcttcttacctcgatcaaccttgactttgcaagtcttcttcttcacccctggctttgggttcctcagcctctgactttctcccatgcactcggtacctcgaagcttttcttgcctccatccttggcttgatcagttgtctctgagttatgcacaccgagtctcacttatgcaatgtccatcttacttgtgatgtccattatctatagatattccagtctttggaccatcacacttgttc

SEQ ID NO: 71383 - DNA, 536 bp, Zea Mays
ctccgatataggtcaggtcctcaatcgtctacattatccttgctactaaaggagtcactcgtgtctgagtcctcaccttgtggcacatcgaggccgggccgctgccgcctgccagtccgccaacaccacagctggtttcgccgggcacacaagccatctagctgcatcggattcgatcggagctttttgtgctttagcgcggctgcagctcaacttaccctcgcctgcggtcgccggggatccagcggaaagcgacgccggcacgtgcactttgcaccgcccagcccaggggccattctgcttcagcagccgtcgtcgatgcacccggcacacggccgttgatggccgtcgagaaagccacggaccggatctagagacagagatggccttttgaccctggaaaacgcagcgcaaatccgccacctttaaactaaaaaaaacaaaagaagcttcttcacaggcacagtcctacgcagccgttggaagctaagatctggaggaggaggaggaggaggatggtctagctagcaactgtt

SEQ ID NO: 71384 - DNA, 339 bp, Zea Mays
cccatcaggcctctgcagctttatgctgatgggggttaccagctgagaattaggcgtcttgagggtacccctaattatggtacccgacaggccccgacccaccctctgattttcatctgctacagtatatagatggttctgatatatttttcctattgattctcatatgttgtatgatttaaaatgcaaactcatttatttattttgatttttataagattagatcaccctaactttaaatccttgattcgtcactagaaggaataagacatctctcttaggttaagccgtttgcaaagagacctaccaaaaaaaggaccacgtagcacaccaaacttg

SEQ ID NO: 71385 - DNA, 386 bp, Zea Mays
atttaagctcttccagaatttgtgctacgagggattagcctaaactaaactaaagcaaacttcatgcaaaaaaaaatgcctatagacttcacttcacagctctatgctgattccgcatggaccggacccggcgcaacgcatgagaggctgctgttcccggcacgcgtcaggagctcgatcgctcggtttggctttggtgcagcaaacgcacgggcacgcatggaattgggaacgaacctgagtggatgactggattctttcttcaaaggaagggagaaaaaagtggggcttggaatgggcggtggaggcgccctcatgtcgcaggtactaactagtacgtgcgtgtaaagccactagtccgacgcccctacagctgcaaaaggcgt

SEQ ID NO: 71386 - DNA, 346 bp, Zea Mays
cactctccaactcttattaacactcacatcaaactctcttacaccgacagtgtgtctattgctgatccgaccaagtatgggagcctcgccagcgcgttgcagtatcttacactcgctcatcccgacttgatgtatgctatccaacatgcgtctctttatgcatgatccccatgactccatgaacctcatctcgtgttgatcaagcgtatcagttgtgttaagagtaccgtttagggtttggggtttactctgtgtatttaccttctcacccctgtgtaatgggccaggcccaactaactcagtctattaatacatcactcaaccccttgttagggttaggttttcc

SEQ ID NO: 71387 - DNA, 187 bp, Zea Mays
gactctagcgcctccttccacactactactgttagctcgttatctcactcccatcatccacatccctcacatcctcactatcgtcgtgggcaacagttccactctcccggtcaccttagtaccaggtgcgatgcctaccagttgcgttgcgccctcaggtccgtcttcatcgccagctacatggctg

SEQ ID NO: 71388 - DNA, 441 bp, Zea Mays
cagaaatgagaggtgaactgtgttcctctgtctaacattatattctttggcaaatcatgaagacaaacgatctcgaacatgtatgtaacatcccagtttttgatcccagggttagaaaccctaaactcctaaccccccattatttctcttaagacctcatctcatgaacattacattcatcatatgcatacaccatgattgctagtagcacttcacatagattatttcattttggcacctaggaacacataaatgaatatttgtatagaggagaaaaggaattaaggaaaaagaaaagaaaaaagaaaaagaaaaaaggaaaatccccctctcgactgagctgattccagcccacgcgaccccctctctctcgcgcccgccctcggcccaccctctcccgcgcgcccgcgccatgcccccccactctcactgtcgctcagc

SEQ ID NO: 71389 - DNA, 324 bp, Zea Mays
attcactcttaaaactttttagcctactcttaataatcagtttttgggtaaaatttttaaaatccttttggagttgctctaagtattactttttctctttttgcatatccaaatattaggctcaatttaaacaattgacaattatataaataaaataaaaatacatcccatgctgggtcttgtgttgttgcaattatatttaaatttgtaatacaaggtgagtttgaaattttgaaataggaataaaacacaaaaacaaagaaaaaaacaaaagaaaagaaaaaggaaaaaaaggaaaggactgctctgtgcctaggccaaaaa

SEQ ID NO: 71390 - DNA, 489 bp, Zea Mays
aaaaacttaacatgtttcacagacagaacaatagttcaaaggtttcagatttcacataggtctcacatattcacgcccaagttcacaggtacacagattcatagaatttacacataagttcataggtttctgtgatgttcactggtacacacacaaaagttaacaggtttcacagactcaaaattggtttagttcacacacaagttcataaaagaagcttcagttcacacaagttcataggtttccgtgatgctcacatgagcagcccctcaccaatacaggtttcacagatttaacactggttcagttcacacacaagttcacaaaacaagctttagttcacacaagttcataggtttccctgatggtcacagtgagcagcccctcaccaatacaggtttcacagactgaacactggttcagatcatacacaagttcacaaaacaagctttagttcagtagttcagacaactattttgaagagcggct

SEQ ID NO: 71391 - DNA, 476 bp, Zea Mays
agacaatcgagaaatcaaaaggctggcacatatctcagaaattgatatgcttccatgccagtgatattatgtgcataaatgctatgctctgtgaagtagaaatcaaatgtaagtgatataaatgtaatcataatttatatggttgcataaacaaatctcacacgagatcaaagggactgaggttagataatcattgcatgatccaagaacagacaactacaaagaatctcaatgtgcatgagaacagatatgtccatgtagagaataaaacccttgttttgttttatcattaacacacgagatcacaattagataatcattaacacacgagataacaaatctcacacgagatcaaagggactgaagccattaattgaacttgttcacaattagcacgcaagactctaatgcagtagaagcagaagcaaacataagaccaccaaaaaatcaaagggagtagacagaaaacaaagtgt

SEQ ID NO: 71392 - DNA, 392 bp, Zea Mays
ctcaaatacatcttcactcaggcagatctgaacatgaggcagaggagatggttggaattaatcaaggattatgatttggaagtacattaccatcctggtaaagctaatgttgtggcagatgccttgagcagaaaggcccagtgcaattgtatgaacatggatgcaagagtcaccactctgtgcgatgagttgtgtaagttgaacctggaagttgttccttccggtgaattaagttatatctcagtggagcccacattgcaagagcaaatagttcaggcacagattggggataagggtgtacaggttatcaaagacatgctcaagcagaaagcggaaaagtaccagtgtttccgtcaggacagcaagggaattttatggtttggagatcgatt

SEQ ID NO: 71393 - DNA, 615 bp, Zea Mays
aaagtaaatgggtatttgagttatacggaatacaggaataatcaaaggagtagttttgattaagcgtctttttcttggacgaggagtcgtcgtcgtcccttggtgaagaagatgaggcatcgcagtcatagtagatgatcttcttgatgcgtctcttcttcttctcgtccctcttcttgtgacttgagcctgagtcaatgggcttgtcatatcttggctcgttgaagaggaactccttctccttgtcgttgaccaccatccccttacccttaggatccatctcttcgggaggttagtcccttaaatgaagagtacgctccgataccaattgagagcacctagagggggtgaataggtgatcctgcaatatcaaacactaaatagccacaaacttgattatataaaagttagtgcaagttaatcaagttgctatgaagcgatctcttgcgaacaaaacaatcacaaaagagcaacacaagagacacgcgatttttatctcgtggttcggcctacttccacgttgtggcgtcccaattggacgagggttgcactcaacccctttcatgtagtccaatgatcaacatgaataccacggtcttttctcttttgagtatt

SEQ ID NO: 71394 - DNA, 194 bp, Zea Mays
gatgacgcatgaaacgatgacgagatcgtgtttggagcgagctggtgaggtggggggtcgaacaaaggatgatgggttcgacgacttgacggtaaacgcgagcacgcacgaaacccgatggacgacgaacacgcagagaaggacgtcgaccagcgcagtttcgcgcgcacggctgccagaaaaacatggagcgg

SEQ ID NO: 71395 - DNA, 559 bp, Zea Mays
agcattcgatcggtgtatagatgagatctctgtttcttgtttcgcctcagaaccagattcaacataacacatgtactagtaccattcaacgttcatgcccatggatcgaattgatcctgcaatccccaggacgccgtgctgttgtagtagagatctcttggtccagatgcttcagatgtccaacccatcagaagaatatcctggcgtcgctgcccggagattgcgtgatggtacacgcgtatcatctgagtctcgtgcaggccgacagccaggcagtgcatgagatgatccatggaatccaagctccactgcgttcaacgcatcggtacgtccaatttcagactgcggtttgtgatgtcaggagcagagaaagataagcgcgacgagaccatccgcctgtccacctgaacacttcaacgttaggccgggatgttgactcggcggaaccgggacggctttttgtcaagtcgccgtagtgttgggccgagcgatcaaaaacgaacagtgccggcgaccatgatgccttgaggcgctggcacgcggacagaacgacgcgcag

SEQ ID NO: 71396 - DNA, 298 bp, Zea Mays
aaactttaaagggccaaaatagaaagaagaaaagacggggaagaaacactcgcttctgagtttggtcgcggttttgcccctcccttcttgaactcctccgctcgatcgaactcagttccgattcggcaggtacgtgcgaatttctcgtccctctaccgcgtggattgattaccaacgttgatttggcgaggcaatcgcgggggatggaggggttcgatcgctgcgccgccgattctcccggtccttaggtcgaattttctcatttcttgcaacacttccccaccatggatctttgttg

SEQ ID NO: 71397 - DNA, 1418 bp, Zea Mays
agaagttttaggtaattaaatactaaattatattttagattgattgatgtaaatcatgtgagaatatatcacctatgattaattgaactttagtctatgttataactgtattagattcatatttttgttaggctgtagtcatagattaatttataatgtcacattaaccttgattagaaaagtcaatgtaataaaaaagtatttaattatttctgaaaacattaaaataaatgttgtgatcatgtagacaatactaatatgaagctaacgcaatttgaatggattaaattggagttgcaatgccaaagttatggactaaataagttttatgagttaattgatgtaaattttatatctggaattgcttccagaggattttctgcaaacgccaggggcctctatgcaattccctactactgtcgggacgacgggttcaattgtagaaaagggtaggggctaaactgcatactatccgggttgaaggggtatccatgtacgagggccgatgataaatctgtggtcagaattagattctcattgtaacgaaccataacgctataacgaccgtcagatcaaggtcagactatccggatcacaggcgcggagggactcgaccagagttgcacatcaaccaatctacgaccctgatcgggtcggatcaacgcggcaatccggttctaatccacaccgtctatcaccggatcaatgacttgacactaatcccccaacatccgcctagatacctaatcttaaccgtctctccacgaatcaacgatcgtgaatccgcgacccccatcctgcacgactctggcagcgctgtcaagtctgcagcggcggagccttcactggcgacatcgggttctaagtgccagggctctataccccaaattaatccgcccaacgcaacaccccctaaccctagatctggtacgccccgcatatggtatcagatagtgctccacggacctcggtcacggcgagtagctgcgccacggcgcaatccagcgctggtgagcaattcacagctgataaggcgcttatacgctataacacttgatggtacatcgcatggagaagcaggaaggggcagtgggagatcttcatcggtggtgacgccgcgaattgatcgacccgcggtgtggggcggaaacacgatagagactcccgccaatgtgtaattcgccgtgagcagggcatctccgatccctggcgacctccgctctagctactgcggcttcctggtgacctccccagcgtgtaaccggatcaaatcggtggcgagccgtgggctgcgtgtgatggctctcaattcgcagcgcgcaatggtgaccttcacccaattacagcggcgtatgacaatggctaggggcagtatataaatggacaacgcccgaacgagttgcacacggacggtattc

SEQ ID NO: 71398 - DNA, 2213 bp, Zea Mays
tattattattattttgtttatattttttactatgcattttagaagaagaatatgcctcaaaataacactcagattcaagtagacttttactattgtacttaactacttatacagtaataaagaactagctaaaactcattaaggcattattcggggtttacagaaagccttctccaagtcaatgaaaaccatatgtaattccttctgctctctataccgctccatcacctgtcttattgagaaagcttccatggttgaccttatgggcatgaaaccaaattggtttatacttcatagagattctcgttattcctctcggacgatgctcgattatctcccatagcttcatagtgaaaggatcaagttgcccaagaggagggtgaattgggccaatctaaaatttcttgtgacaattaaatcctattggatggtccaccctgccccttgtgcctaagagtgttgtctattttacacaagttttacaccctaggtttcaatcctattgtagcatgacattctagtaatgtaaaggcaagtgttgaattgaccaaatgtaaatgcccaaagtaaaataagggttagaaatatggagatgttttgttgaggtatcgaagagttggcattctccgctagttctcgttggagcacccgcataagggtgctgctctccttgatccacataaggacaaaatgttgtctacggtttgattctttatcactctggcacggtgaatcacccataaccatttacatattgagttgatccatccacaatctccatcaggcgatcaccaaactcctgattatcagtaagttgtctatatgatgctgatcaccaagattaataagcacaaactctcacttgacctaaccaaggctaatgagaacggtggatgcacatttgcttctctcaactcgatacactaataaagcactaatctcatgagtcgtgattatcaaatctcaataacctcacatggaaaaggctcttcctttctctccaaatggatttttcagtggaacaaataggcaagagacctcaaatgaatgagattgaggggtatatagcctcaagcaaaggaaatggtcgttgcctctccaccgaacacgtctggtgcagttctaacagctagtttttgatgtattagtatctgctgcctcacttcacatgtttgctaagtgtaatgttcgaggtgcacagttgcaaatttatccgagtatcatgtttggtgtcacaccggacacgtctcgtgagtactcggccacatctcatttgtatcctctctagatgccctatccagtggtagtgatacattggacacgtccagtgagtgtatggcctctcacactcgtctacacagctctctgggcaggtgcacattggacacaccggtgttattctcctgcgtgatggcacatatccggtgcacatcggacgcgtctggtgcctctgttgcaccatcaactcatttgtttgaaacactttgagttggttttgattttaaacttcacttgggtttttaaggttatttaacactagatatcacaagtgtgcatcaccactcataactatacttacctaggtcaaaatattcaaccatgccccctttatagtatcaccaaagaaaaaaaataaaggtcttatcggtaaaatatgtgtccatcaactccattaacacttagaactagctgaccttaacctacttgctcatcctttgaaaaccgataattaactttccaccaataggagcacaaaaaccatataaccctaatcgatcaccattactgtgacctaactcaatttgcctctgcaaaacatacgttagtcacaataacctagtgttgtcattaatcatcgaaacctaactagggtcctaggttctttcatatagtatgactcgtcaacttaatttttggtaattagtacaactttgaatatctccctttagcttggtaccaatatacttctctgcacatcagacatcttgtttgatcaagagatatggttggacaatgtcacacccggtttttagaaggtaaaccgaatgcgaaccatgtacgtgccaggatcagttattcacgtacacagcagttacataacatggacatcatcacacagtgctcaaatagtattaaaaggggaaataatagtcgattacatcatacgtctgagacgtccatatagttcttacaataaatcaaagtgcgaaaac

SEQ ID NO: 71399 - DNA, 1631 bp, Zea Mays
gaaagaagactcttgtcacacccggttttagaaggcaaaccgaatgcgaaccatgtacgtgccaggatcagcaattcacgtacacagcagttacataaccggacatcatcacacattgctcaaataacaacataacaggggaataatagtcgattacatcatatgtctgagacatccacatagtatttacaataatcaaagtgcgaaaacaaaacgtagatacatgcggccttcacaggcagccgactgggggttgccgctaacccacgcctagaactcgtcgtaatcttggaactcctgaaagtctccttccacgacttcatcttctcctgagcagtggttgcaatgctgacaacctggggatgggggggtttggtgtgtagagcaagggtgagtacacatcaacatactcaacaagtatcctgttttggctgtagtggactagctttatgtggggggtaagtcaagcagttgcttttagttggtcagattattattactagtagagaaagccaagttttagatttaacccacgttattaacccaaacgtactcctttccaaacggaaagagtaccacttaccattactagagtcaataccaagaaccatcaatctcattgccacgtgcaatccgaacatctctgatcaagtaccactaatcaatggagctcccttggccgctcataaccacgagcacggctgatatatcagtttcataacactctgcagaggttgcgcactttacccacaagccgtgattccctctctagcccgggccgatcaaacccttaaacactaccaaggtgaataggcagggtctcactacgtagcctttacaaagattcactggggttgtagccgcccgttaggtttcctaaatgcaccgaactcctccccaaggggcgaaccaaccttggcagagcgagccgcatacaccgagccccattaacggcacgacggcgaagcgaactacaccccagttcctctaattactcagctaagggcgtcccactccaccctcatggttgcactgttttcccgagcggtcatccaacgaacaggtccttacggagaggcactcgagaaaccgctcgagtcccctaaagtatcaccagtccgacatcataatcataataacaacatcgtatcataagtgttcacatcatgttcatttattagagtaaagcaatagcatgaatctaaccatagtaacccaaaaggtaatcaaggacatggtaaatagaaagctagtcaatccttatgttgttcatagtatgcgggacagtgaattataaagtaaatgggacataatgggtcagatgacacttgccttcaccaatcagatgctcagggtcttcagccttgtagaactcgaagagttcgatctcttggtcgccgaagcttgactgtcgattcctcgaagcgcggaaacaaatcgcgatctaatcgcaaaccgaagcgaagacgaaccagtacaagcaaagaaacatatatatgcataagaacattacaccatacaaggtaaaacattataaaaaaatatgcagaataaaatagagctcgcttctatggccacacgagggaaagaaacgcgtcagtcgaagatacgatcgacaagttatcgcgttt

SEQ ID NO: 71400 - DNA, 50 bp, Zea Mays
gaataatagtctattacatcatatgtctgagacatccacatagtatttac

SEQ ID NO: 71401 - DNA, 771 bp, Zea Mays
taattaactaaaacatctgacatgataaaatgatcttttaacgtgtatacaccattattatgaagttaacgacatgcaaataggttgaaacggatgtaaaatgcgaaagctaatgttcagttaataatttcagatttaacgcgacatggcacgacggtttacgacacaaattatattgaataaatagcatctctcgtatttaaactacatggcgcgattctatcggtcggaaccgtgcaacacaaagggtcgcatggatcacaaccacaactggtcaaagtgagtgggatcaaatgtggctagcatctccttcctctgttctctccttccctcacgcatgtacacactacagaggaggtccagccattatcgattggctgcacgggagaggagggctcgaccagctagggacggggctcgtgcgagcagggcaagggcacgcggggcctacacgccggggccacgcccgtggcctgggcgccgggcacaggcagctcactggggagccgaccgagaggcttggcgccgcgagggattgctggccgcgctggccgcgagccgctggccgccgtgccaaggagctcggtcgcggactttcctgcgcaggcgctggccaccagtgggactcggccggagacaggactagggatgcgcgggagaggcccagccaccgtgccagccatgggcaacaccggccaatggaaacgcaggggcaagcgcacgagctgctgctgccgcgagcgcgcagggggtctgcgaggggcacgcgac

SEQ ID NO: 71402 - DNA, 1100 bp, Zea Mays
aagacactcaatatggtatgtggagggggtataaatagccccacccatcaaactagccgttaccaggctgttctgcgcatgggcgcaccggtcaatccggtgcgccactggtgcgccaacggtcgactctaatggctagttctgacagctagccgttaggctgatggcacaccagacagtccggtgtggcggctaaaaatctttttctcaactcgttgctctcgggttttctcggggacagaggcgctgcccccggggctggctggccccaccgtcgaagggtgcaccggacagtccggtgccccgaagacagaaaccctaacttctttttccttttgtttttcgaaacaattttcgttctaactcgtgagtgtgttatagagtgacacctagtactagagtgtgaatatgcaccaacactacactagaattctcttggtcaaaattactcatccacaacccctctttatagtatggctaaaataaaatagaagacataattctataccaagtgtccgcaactcctgacacttggaatatgaagaccttcatcttttgattcgtcgtttcagccgtcgcttcaagttctcatctcagtgattgttttcaccgttgtagtacaacttcctgtaatacaatctaacttaccatttgctctgcaaaacacacgttagtcacatataatattacgttgtcattaattactaaaaccaaccaggggcctagatgctttcaatctccccctttttggtggttgatgacaaccctacaagagtgtgagaatagtttgtttgtttttctgtcaaaagagaagatggttagttatgctcaataattttgacagaaaggggtgtgtaaaagaatagtaagtataggcgcataaacaacgtaagtttcttgttcatataagaatgaaatgaaatccatgaacaagaactgaacgactggtgataacatcttaggtgaaaacataatacacacacagtcaataacaagcatcgagagcatatcatagagtttatgagttaagtgtcatataaaagtggagctagtacagagagtatcaagcaaatatattacatcaaaatatcaaaaggcac

SEQ ID NO: 71403 - DNA, 357 bp, Zea Mays
cgacattttggcacttggctcagaaacaattgctataaatgagaaacagtggtgtatttagtgtctgggatatcggataggcgtggattttggcgagggagttactggaggtgtcatgtgggtgctgaaaaaactgggatcgatttgagcaattttgagtggtttgggcatttcaccgaacacgtgacgtgcgaggttttgggttttgagtgaaatggctatttgggggtttaaaacctcccaaaaaggagatggacacctgcaggaggattcaagagaggacaagacaagcacccatgcaattgattcacagggaattgcacaaaatctggatttggcacaaaaggtggaaagcac

SEQ ID NO: 71404 - DNA, 2722 bp, Zea Mays
caaaggccaacacatgaggtgtgcttaaaatacataagaattcttttaacagcgtgaagatgagctttcttaggatttgcttgaaatcgagcacacatacaaacactaaacattatttcgggcctagatgcggtaagatacaataaactaccaatcatggaacggtagagagtttgatcaactgggttacctccctcatctaggtcgatatgtccattagtaggcatgggtgtcttgattggtttgcacttcttcattttgaatcttttcaacaagtctttggtgtacttctcttgtgagaggaagttcccatctttcatttgcttgacttgaaagccgaggaagtaggttagctcaccaatcattgacatctcaaactccttcgacatcaactcaccaaattccttacaatgataaccatttgtcgagccaaagattatatcatcaacataaacttgacaaatgaaaatatcaccgttatgtttctttgtgagtagagttgtgtcgacggtcccgatgttgaagcccttctcgatgaggaagtcgtgaagacgctcataccaagcccttagagcttgctttagctcatatagcgccttggacaacctgtaagaatgattaggatatctagggtcttcaaacccgggtggttgctcgacatatacaagttcatttatgaagccatttaaaaatgcaccttttacatccatttgataaagctttatgtcatagcaagatgcaaatgcaagtaggatacagatggcttcaagtcgagcaatcggtgcaaaggtctctccaaaatctaagccttcaacttgagagaagccctttgcaacgagtcttgtcttgttccgtacaatcacaccttgatcatcttgtttgtttcgaaactcccattttgttccaatgacccttgcatattgtggaggcttttctagggtctaaatttggttgcgggtgaagttgtttaattcttcatgcatgacattcacccagtccgaatcttctagcgcctcatctatacatgtaggctcaacacaagaaacaaaagagtgatgtttaataaatgaagcctgtttatgagaacgagtgataaccctttgtgaaggactcccaatgattagatcttgtgggtgtgcttgaagtagtgatgagttcctcttgtcaaccacttgggaagaagatcttggagcatcaacatcttcaactagtacccttgcttgttcttgagatacaaatgtatcttcatttgcatgcctctcatctttttcatcatcatgtggtacatttgatgaagaaggcctgtcaatattttgcacctcttcttcatcttcttttggtttgatggctccaattggcaagttcttcgtagcttccctaagtggctcatcacctacattatcaagattttcaagtgctccttgagagccattagtctcatcaaactccacatcatatgtttcttctaccacaccagtagcatgattgactactcgatatgctttggattttgatgaaaaaccaagtaagaaaccaatatcacaacgtctttgaaacttacctaggtgatggtgtttcttgtagatgtaacatttgcatccaaacacccgaaagaaggagacgtctggctttttcccatttagcagttcatagggagtcttctcaagtagccgatgaggaaatagcctgtttgatgcgtagcatgcagtgttgacagcttcagcccaaaacctctccggtgtgttatactcatcaataattgttcttgcaagagtgatcaaggtcctattctttctttcaacaactccattatgttgaggtgtgtatgttgcagaaacttcatgcttgatctcaatttcatcacaatactcatgaatgttggtgttgtcaaattattttccattgtcactcattatcttcttgattttgcaatcaaattcattttgagccttcttggtaaacttcttgaatatagatgcaaccttagacttatcatgaagaaagaacactcaagtgtatcttgaaaagtcatcaacaataaccagacaatagaggttggcaccagcactagcataagttgttggtccaaatagatccatatgaagcaactctagtggccttgatgttgacataaaatattttttgtaggatgtgtgttagcaacttgctttccagcttgacatgcactacaaggcttgtccttttcaaatacaacatcctttagtcctctaaccatgtctttctttagtacttttttgagtgtgctcattccaacatgtgcaagctttctatgccatatccatccaagtgatgctttgataaagaggcaagtccttaagtttgcattttcagaagtgaaatccactaagtatagattgttgtatctaaatcctttgaacaccattgactcatcatccatttttgacacaacaacctctgtaggagtgaataagcattgaaggccaagatcacaaatttgacccactgatagcaagttgaagcttaatggtgcaaccaagagaacatttgaaattgaaacatcatttgagatagccaccttgccaaccttgaacctttccctttgaattatccccaaaagtgattttgtcttgttcatcaacatttttatcaagtgaggtgaacatccgtgggttgccagtcatatgttgagtgcatccactgtcaataacccaatggctcccaccggtcttgtagttcacct

SEQ ID NO: 71405 - DNA, 2797 bp, Zea Mays
cccatttgcaacaagaagattatcatagtcaattttaatttttgtataatcttccttaattttgacaagtctatctttcaactctctatttgcttcatttaatttttcacacttatctttggtatcttttagggaggatttgagctcatttggagtggatgacatagttttgttttcttctttcatttcttcactagcttttgcaactatgtcatacttggcagttaaaaattcattttcattctttaacttatcacatttagcttttgacttcctaatgatttgagtgtattctttaagtaagtcagctaattcatcataggaaggagaagcatactcatcatcactatcactattactatcattaataatatcattctcaatttgtaccttccgttcacctttagccatgaggcataggtgagaagtggatgagggtgatggtggtggtgaagagaaatccccagcgatagcggaaactttttcatcattctcttcttcacttgaagaagacccgtttgaggactcaatgtcagtgagccagtcaccaacaatttatgcctttccatttttcttcttatggaatcttttgtgcttcccatcctttctcttgaagaatttcttttcctttttctcatcatcgctgtcatcatctttcttgcccttgaacttgttcttcttgggcttgttgcattgatgagcaagatgaccgagttctccacaattataacagtccatctcagagatagactttctttgtaacaccccgagatccacaaacaccctagaatgctactaaactacacatctaacattcatatataaaatttcgacagtgtctcctttgaaaattgcataaacggggaagcaacaaagtataaatagatatcatgataagaaaacataatagacattaataatctgctagcaatgggaagacgaccataacgacatgaactgaattaaccagtgcgcacgactagttaaaacaaacatcctttgacaagaagtttctaattaaatcatgactgcgcctgggcagcgttattatgagagtgaaggtgtatgtgctgctacttcccactccccttgatgagcaacaagcacctgcattgagtaatgcaagagtgagatgaaacatcttagcaagctaattgttttgacgagatatttaaaccacattgaattaatcaacattttaaaagaatcacaatcaagatcagaaatacttgtagatatagaactcagtagtcacaatataaccaataccatctcatttcctcgaacaaccacaataggttgtataacacttccctgcatcaacaatacctgcaaatatcacttcgatgtatgcataggaatgcaatgtgtaggtcctctatcttcatacctctgagggtataaaaccacatcatctgcaaatatcacttcaatgtatgcatatgaatgcaatgcatatgtcctctgccttcatacctctaagggtatgaagccgcatcgtacccctcctcgggcaacgtacgatgctaagttgtaccggtacggtcggaccataggtcacgacaaaacttcagatgcaaatgagtcatgcaatgtatatggcatgctgcatttatcaataaatttcacttcctttagatacaatacaaacctcaaataatactttatctgccttcagatacaatgcaatcctcaaataatacttcgtatgcctttagatacaatgcaaacctcaaataagacttcatctgccttcaggggtgtgaattaatctcatgggtcatacttgaaccataataatcatcaatatatgatagagcataaacataatacaatcaagtaaaacatcatcatagagttcaattatgaaagaatccaataattctgcatattagagtgtaggtgatagaaataacaggtcaaaacgatagcaaccaccactacattcacttgccttcatcgaagaagaaaaatgtactaggcatgatctggagtgtagccacctgctagcgggcataaaacttagtacaaatatttcacaaacatttgccaacaatcaacaaaacactcctacacttgaaaccaagacctagtggaaagactcccaccctgaaccacatgctatacagcagcagcgctgtttgttaattttgtatctttaaaattaaaacattggtgatatcaaacaaatactctaagagtatctacacaaaacaatctacaacttcggtattcaatggataattaaattctgccaacaataaattctaaaacatctgacaagataactgactgaatctgttttagacagcagcctagttaacttcaaaattcgatatctctcaaactactaaaccaaaaattatgaaattttgctggcagtaataacttttatccctatacaaaagtctccatagttggaagagccaattcggccatttactagatgaaacccaccggtaaacagacccactcatttttgtcacgcaaacagaaacagccacagtaaaacaaacataactggagttttacaaatcatatgaatgcactctttaacaatctggaaagcttatgaaattatctacaacttcttttaccaacccacaatttaattctgttgataaaattgcctaactcttaagagaacagattctgcacagaattatgagactgaaaaactgctataatcaaactgtcataactttctgttctgatgtccgattgaggtgttcttcgcggccacggaaagatctacaaattatctacgactcatatatagactttttatttttttgag

SEQ ID NO: 71406 - DNA, 344 bp, Zea Mays
ctcgtggttcgaccaagtaacacttgcctacttccacgttgtggcatcccaatggacaagggttgcactcaacccctttcaagtgatccaatgatcaacttgaataccacggtcttttactttcaagttcttttcccgtttgcgaggaatcttcacaaattggagcctcgcgcccttacaatgttgattacacaaaaagcacagaagtaagggagggaaagcaacacacacaagactcaaatcgcagtaactacgcacacaaaccaagaagtgagcacaagatacagcgtaaggagtttacaactcagacgggtgctcaaatctctaacacagtgaatcgattg

SEQ ID NO: 71407 - DNA, 1993 bp, Zea Mays
ccactttaaaccacatctaggctttgtggcaactaaaacacacaataggagagagacatgtaagccattctggctatgaaaagacttcccccaaaaatccatataaagtaccaatattcatttctttcagaactggtttctcaacataaacaatcattctttgcaatgatagttggagctatccaccaaccgctcaacaacttaaattcaaattgatgattaccttgtaccccaaaacacgcaattcacacccctcttagaaacatccacaatcaagcatatataacaatattattgtaataaaactcaaccatgaaaaaacatggtgaaaacaacataggcatacttgtatatcacaagcataataacaacttcattctcacaaatgaccagcgatatctaccgcattaataaaacaatatcaaaatttcagaaataaattatatcaagcattaagccataaacaacttaccacatcaccgtaaaggaatagggaggggtgaggttattgtcatctgcacttcaaagacactaacatatatcaaagatatttaaacccatacccttcctatatgtgcgagtgtgtcaaatttatcttcaaattgccaagaatctaaagcctatgctttgataccaactgtaacaccccggggtccacaaacaccccaaaatgctactaaactacacatctaacattcgtatataaaatttcgacagcatctcctttgaaaattgcataaacggagaagcaacaaagtataaatagatatcatgataagaaaacttaatagacattaatagtctgctagcaatgggaagacaaccataacggcatgagctaaattaaccagtgcgcacaactagttagaaacaaacatcctttgacaagaagcttctaattaaatcatgactgtgcctaagcagtgttattataagagtgaaggtggatgtgctgctacttcccacttcccttgatgagcaacaagcacctgcattgagtaatgcaagagtgagatgaaacatctcagcaagcgaattattttgacgagatatttaaaccacaaattgaattcatcaacattttaaaagagtcacaattaaaatcagaaatacttgtagatatagaactcagtagtcccactataaccaataccatctcatttcctcgaacaaccacaataggttctataacacttccctgcgtcaacaatacctgcaaatatcacttcaatgtatgcataggaatgcaatgtgtaggtactctatcttcataccttgggggtacaaaaccacatcatctgcaaatatcacttcaatgaatgcatatgaatgcaatgcatatgttctctgccttcatacctctaagggtatgaagccgcatcgtacctctcctcgggcaacgtacgatgctaaattgtaccggtacggtcggaccataggtcacgacaaaacttcagatgcaaatgagtcatgcaatgtatatggcatgctacatttatcaataaacttcacttccttcagatacaacacaaacctcaaataatacttcatttaccttcagatacaataccaacctcaaataatacttcatttaccttcaggggtgtgaattaatctcatgagacatactcgaatcataatcatcatcaatatatgattgagcaagtataatgcaagcaagtaaagcatcaccatagagtccaattatgaaagaatccaatacttctgaatattagagtgtaggcaatagaaataacaggtcagaacggaagcaaccaccgctacattcacttgccttcatcgaagaagaagaaatgtactggacatgatctggagtgtagccacctgctagcgggcataaaacttagtacaaatatttcacaaacatttgccatcaatcaacaaaacactcctacacttgaaaccaagacccagtggaaagactcccaccctgaaccacatgccatacagcagcaacgttgtttgttaattt

SEQ ID NO: 71408 - DNA, 637 bp, Zea Mays
aggaacagccacagtaaaacaaacataactggagtttcacaaatcgtatgaatgcactctttaacaatctggaaagattatgaaattatctacaacttcttttaccaactcacagtttaattctgttgataaaattgcctaacgcttaagagaacagaattatgagactgaaaaactgctataatcaaacttccataactttctattctgatgtccgattgaggtgttcttcgcggccacggaaagatctacaaattatctacgactcatatatagactttttagttttttgaggccactaaggccatgaaaaactggcatgaacagaaactgtcgaatctgccattctgcagaaaactaaattcgagatcaaaacctaaccccacatcaaatccaacctctaatcctttaattcccatgatccacaaccttcaaaagcatataattacagggaggaacaaggatctcatccataccctagggtttcaccaagaaattctgcaagaagagatggggaagaacatctcgttgatcctctcttccccttcaattcaacgtgctcctcctcttctcgatccttgctgcgcgggggaagatctagagggaggaggaagccgtggagaggggctgccatggg

SEQ ID NO: 71409 - DNA, 645 bp, Zea Mays
gaccacttgtgttattgttctcatttttgcatatttcaaataatggaattatccccgactaccaataaatatactcaataaaagaatgtgcatcatgctggagtttagttgcttgtgcatttaataaaataataatatgaataaaaaaactaataatgagaatttgggatttagcctaaatttaaattctagaaattagaaaggagaaataaagtattttgtgggtgagattaaatatataaaaacaaataatattcttacactagagaaatgaagttgaacatttggccaagggttaaattcagaacaagatccacattcaaatttgaaatttgaaaatgaaaagaagaaaaaaaataaatcagaaaagaataaaaagaaaaaaaagagagagccagaccccattctcggcccatctaggaattgaccccgcgcggcccagacaccagcccctttccttctcacgctcgcttcactggcaggcgggcccacctcgtcagtctcccttacacctgaacgcggtctcaccttcgcgcgttacccacctccccgcgcatgtcgccgctccgccgggggcttcggagtccgttgcatccgctctgtacctctccgcgtttacaaataggagatccaacgacctcgctg

SEQ ID NO: 71410 - DNA, 354 bp, Zea Mays
tggtatttagcctaaatttaaattctagaaattagaaaggagaaataaagtattttgtgggtgagattaaatatataaaaacaaataatattcttacactagagaaatgaagttgaacatttggccaagggttaaattcagaacaagatccacattcaaatttgaaatttgaaaatgaaaagaagaaaaaaataataaaacagaaaagaataaaaagaaaaaagagagagccagaccccattctcggcccatctaggaattgaccccgcgcggcccagacaccagaccctttccttctcacgctcgcttcactggcaggcgggcccacctcgtcagtctcccttacacctgaac

SEQ ID NO: 71411 - DNA, 321 bp, Zea Mays
aagaagtgttacaagtttttttttttttttgcatcactcagtcctaacctcgcttgtttactagcctgactcagatctcaaattgccgaacggggtctaagggaggcgaagccatgatctgaaaatagaggggaataaattaaattaggagaattgttagcagtatttttttgcatcatttatatgaaaattagctaaaaaactaacagcacctacgacatcgcccctgctaagggagccggttggacgacttggacccaccctcgaagccactctacccgtccaatgatgatacgtggaagctggagcggcaactctcac

SEQ ID NO: 71412 - DNA, 1464 bp, Zea Mays
aaagacaaaaggtattaaaaaacacctaccatagggttcgaacccacaaccacaaggttaagagccttgtttttaccaactgagctagaccagctttgtatacaaaactgagctcggcgccaagatctatggcgccgagctcggtgccacgtcgacgccacgacgtccgtttgtgccaacgcagcacgtacctcggcgccatagcctatggcgccgagagggtccaaaaatgacattaaaattttctaaggtccaaacgtgaatttttttccgagggagggttaaaaagcaaaaaattcgggcaccacgcacgcgacgaatacctagccttgcggtcagcaacagctgctggattgcagaattcaacacgcaccagccagcaggatgcatgtaataatgtgccttctttgtctctcgccgcgctacatatgcaagcacccaaatcctccgccactacgccactacggcactacccttagtgctcacactactgtaggaaaggatttccgttccaaaatatcactacaatttactttaaagccgatactgctcaagcgtcactaccaattttaactgtcacgtatatgtagagcgcatttagtaccgactgttgtctccaactgtcactaatgttaagtcatctttaccggtcgaataaaccaaccgatactaatataagtagtactggttcatgcctttcaccgatactgctgacttaacattagtaccggttagtatcgttaatcgatactaatgtacttgctttataaactctcaccctcctcaaaggtgatgccaagaacagagagggactctattaaggcgccataagcttcaagttaaaataattatttgctttatttagtctgctatctctccaaagaatgtctctcgtttagtctaccatctttctaaagaatcctttagtacatgttcttacatgtgaacagtatcaaaggtttattttcatttttcgcccaaagatctttagtatcggtgctttataagaacagtactaaatgttccttttcagtgcgcgctcatatgtctttagtaccggttcttaatttgtaggaaccaatattaaaatgccccctgataactttggctttcttcatgcccttctcattctcttcttcttgtgccctccttggtgagctcgtcaagctctctccttgcaccaccattgccttcgtcgagcccatgcacctgtgccttccccattccaccactgctcctattgaccctgaaaggatcacgatgcccaagagagggggtgaattgggcttttctaaaaatcaacactaattaaaagctaagcaagagcccaacttcaccccaacaactagcactaagataataatactagaaatacaatcatgctaagacaatacttcaaatacttgctaaacaaatacacaatgtaaagtgcttgaattaagtgcggaatgtaaagcaaggttt

SEQ ID NO: 71413 - DNA, 787 bp, Zea Mays
aaaaattgaaattcatatttcatactcgaagaaacgttccgtagattccaaaaactcttgggaacatcctcgagatattttaatctgttacgataacattttgtactcataaacactatgcatcgacatgaatgcaacaatcaaagttcctctaagattctattttactaggcttatgcatagatataaaacaaaataactcttcactatttaggaaaaagaaaagaaaagcaaggaaaagatatggtaacacctgaatttggtgaatattagaaaagaaactttatacccccaaattcagggtgttacacatgcttacaggttgtccaaggcgctatatgggctaaagcaagctccaagggcttggtatgagcgccttcgcgacttcctcatcgaaaagggcttcaagatcgggactgtcgacacaactctattcacaaagaaacataatggtgatattttcatttgtcaagtatatgttgatgatataatctttggctcgacaaatgactatcattgcaaggaatttggtgagttgatgtcgaaggagttcgagatgtcaatgattggtgaattaacgtacttcctcgactttcaagtcaagcaaatgaaagatggtaactttctgtcacaagagaagtataccaaagacttgttgaaaaggttcaacatggagaagtgcaaaccaatcaagacccccatgccaacaaatggacatctcgacttagatgagggaggtaactcggttaatcaaactctctaccgttctatgattggtagtttattg

SEQ ID NO: 71414 - DNA, 3276 bp, Zea Mays
cttgacatttaacacttaaatccttactttttatgcaattgttggttcttgaaatatgcatgaggtactgcacttagggggagtattcaaaactcaaatcactcatgaaaacccttagtgcaaggccaaaatgcaaatttcaccatttgcctattttccctaaaaattatctagcctatggcaaaatattttgaaaattatgagaaaagtatatgagggtgccaatacctgtcccaacaagtgttattttgtgtgtttataagttgggatttggtttggttggaaattagatagaaaaattcaaaaatttcaaaacttccctctgtctgggctcaccgggacagtccggtgtgcaccggacactacactgtgcaatgtccggtgcaccggcagccgcgcgctaaaattcctttctcctgtgcgctgtccggtggttcaccggacagatactgtgcgctgtccagtgtgcaccggacaggcactgtagactgtccggtgcgcccatatcacgtttttaaaaaatcgcctccagcccgaagccgagccagagaccttcttctccatttctctctgacttctctctgtctttctggcgaccaccctctgctctctgctcaccgacgtccaccgtctccggccgtgctccgacgacctccagccgctgcgctcgtcccttcttcctctggtgagctgccctgcacctcttccctctctctctctccatttctctgaacagtgcccaaatccaatctctatcaaatcctgtgaaccctagtgcttgattgagtccttttatgttccttgagtactcctgcaggttctcagctccttagggagggtttcacagcctaaattgactcaatctcccaaaacctaattcaccgcacgccaagtgttcggtgaaatgtccaaaccagccaaaaatgctccaattgaacccaaatttttcaggcaccttcacaacacctccagtaacatattcgcaaaatttcacacccatccaacatttcaggctttaatttcaccaaattccccgtttcgagcgatcgtttccgagccgagtgcccaaatctcattttcttcgcctaaattcaaaccaagcacacacttcactcctattcacccatataaacctattcgtgaagtatcggctcaattccatgtcattttgtgcctcaattcaaattccaaacctcctatggctctatttatcgttcaaacgtcgttttcacgtcgtttgacctctcgttcgccttatctctcgttttctgtgccatctttctctgtgtatgtatttattcacatttcatatacttatgactatgtgactaatacgtgctcacctcttctgtcatttcagtgaccttgactgcccgtgtgccgtctcctgtcctgcctggattgtcacctctcgtgtgagctttacaggtagtcatctcatcctttgatattctatcggatattatcaacctgtgcttagcctctctctctctcatttgcagtcgtcaggtcaggatgccgcgcacgaagaatgtgtcggcgccaaggggaggcgatgatgaggatcctcgtcgccccttcaggcaggtcaagggcaagacagtacacttggagcaacaggaaggccgcaagaagcggcgtatggacagagcagcccgtgcagcggcagcagcagcgtcagccgctgcgcaggccgagcttggagatcagcctcagacaccttcagatcagattgtgtaccatgttcgtcgtctcgcctcccgacctcgctcctcctctaccaccactgcttcagcttccactccacctcccactttgcctgctcctgtcacccctgttgcaccatccaccacctccactacaccagcttccactgctcctcctcccgctcctgtttccgctcctcctattccacctgctcgtttccgggagcgcgatgagactgaggtgggacctctggctgctgatccctggttgtttgaccttcagcgtgctacagcggcacggggtacgtaggttcagatacgtacccgtggagtcttggttaccggctcagagggaccttgctgcagttgaccttttcagcaccaagattcaggaatcttcttcagggcacagatgtctgcacagattgctctgcgagtgcaccggcttttggatcttccagcttttctgctagccgccggtgctgactctgaggtgcacctcacatatctgcctggccttctgactcttttgactaccagcggcaggtatgttgaggattgggtccgagttttctacgtatctgtatggatagacccagatcatcactggatgaggtttcgttttgagcgagaggatgtcactattactgccacccagattcgccagctctttggttttcacgagtcgtcgactcgacttcacagcttatgctacggcacctctgaccctcctcgtcgccctcacggcggtgtggctccgggcacagctcacgtcgcggctttgttccgcccgcccttctcagatgggtcgcgacgctcactggtagattttactacagcagccaagttcctatttcagcttatgatacaaacacttctgccgcggatgggatatagggaggctaccacacatatccagctctggctccttggtgccctggtctctcactctgagtttgacgttgttgatttccttatttgtgagattgaggacaccgtattggatggtatgtgtgctcgtcgtcagctgccatatgcacactacttgtgccacatttttgctcagctgattcggcctccacagttccagggcacacttgaggcctcacgccttgtttttggatcctaccatcctgcgcctgaggctcctgtgccagcttctgctccagttttttacactcaggtcgaggatgctgctcttcatcagttcgaagctcaggatgcagcaattgatgatgatgatgatgatgatgattttgggattccacccccgcctctgcctcctatgcctccacgctcacatgatcatgaggctgggagttctagtgctacccctgctgcccctcctgcgattgaccctgctcttgcttcgattctccagacactcactcagcagcaggctcacttggcagccgagcagacccgccaggcagcagcccatcagcagttatccgagaggatgctctcgatgtttcagaccatacaggacaggcatgattcccttcagcagcagctccttcaggatcgggctaagagcagggccttcatgactcttatgctacagcgttct

SEQ ID NO: 71415 - DNA, 1623 bp, Zea Mays
gctacaccccccattgtacacctggaccctctccttacgcctataaaaggaaggtccagggctctcatacgaggaggttggccgcgcgggaggaacgagccgacgcataagtctctctcccacgcggacgcttgtaaccccctactgcaagcgcacccgacctgggcgcagggcaacacgaaggccgcgggtttcccctttgcctgttttcttccccccttcgtgctccgcctcacgctgacccatctgggctgggacacgcggcgacaatttactcgtcggtccagggacccctcggggtcgaaacgccgacagtagggttccaacagaagagttggagtaaaaattcattaccataggaagtgacaaggaattaacgagatctccaaggatgtgcaaaataaaatgaccgctcaagggtcattaagaaacaagggtggtcaagatcatgtagaatgaaatatcttaaacagaccttgggatataaaggtaagcataaaaaagatgagagtatgagagatttcaaggagatgagcatactaataccaagggacaaaaaaatgtcgaaagatagcgacttaacaatagaagaggaaagggtctcaaaagacaggaagatcatggacatataaactgaaatgtctaggtaggtagtagaaatttagaggcaagtattcgaaacaagagtattcaagggatacaagcatgtcaataccaaagaactagagttcgccatatggtagcaatttaatgatgaaagatgaaagaatcccaaaaagacaagaaggttatggtcagggggcatctacaaatatgtcacaagcacaagagtgagatcagatctaatagattgagagaagtatagaccatactagaataaaatactttttggcaagggggcatataggagcacaacatagaattagtcgaggtgactaatattttgaatcaaaatcaaggatgaggtgaagtaataatcaataagtccttaaaacggccaatgctactctaggctagcggtcctatagtcagcacgactttgataccacttatgtcacacccggtttcagaaggcaaaccgaatgcgaactatgtacgtgccaggatcagaattcacgtacacaacgattacataaatgaacatcatcgcacagtgctcgaataataacataaaagagtattatcttattacatcacagagtcagagacatccacatagtcatcaacttaacgggtaaatcaaagtgctaagcgaaacgcagtaaagatagggccttcacaggcagctgactggggtttgccgccaacccacacctagaactcgtcgtagtcttggaactcctggaagtctccttccacgacttcatcttctcctgagcagtggttgcaatgtggacaacctggtgttttgtggtaaagcaaggatgagtacacatcaacgtactcaacaaatgccccgtttggctgaagtggactagcttttatgtggggttaggctcaagcagttgcttttagttggtcaggtatttattgttagtagaagccagattttatcataaaacccaagttataatcccaaaaagtacctcctcagagaggaaatactagaatacataattaaag

SEQ ID NO: 71416 - DNA, 638 bp, Zea Mays
gggacataatgggtcagaggacacttgccttcaccaaacagatgcttagggtcttcaaacttgtagaactcgaagagcctgatcacttggtcgccaacgcttgatcttcgattcgtcgaagcgcggaataaatcgcgatctaatcgcaacgcgaagcgaagacgaactagtacaagcaaagaaacatatatatgcataggaacattacaccatacaagataaaacattataaaaatgtgcagaataaaatagagctcgcttctaccgccacgagggaaagaaacgtgtcggtcggagatacggtcgacaagttatcgtgtttacgctaaacgaatacgaactaggacatttaattaggtgttatcaaatataaattataaatactatttaattaaagcgagggattctaagcgaggcgaatttacgatgcgcgaaacaatacagcagtgtgcagacgacgcgcagacatgtgcgacatagtaaacgaacgacgcacgagacagtgcgcgcgaacgacgcgcgaaccagcacgccaccgcgtgcgggacagcacgcgtgacagacgaggaaaaccaaatagtgacgtgtttacactaaacaaatattaaataattacaaagcagttaagttaatactgg

SEQ ID NO: 71417 - DNA, 551 bp, Zea Mays
agcgtcccgatcctttgggactcaaatgtgatacaaatactagtcccaggaggctagtaaacacatttcttacttcaaatagttcagagtttaaataaaggttattacaataccggggtacaagctcgagagagccaaattaagaagcgcagtaggaaaatatactagcccaagccacaggtagaactgggtgcagacacagccctctcaatcaagcatagcagaaaagaagtcttcggctgctgaaaaacataaataaatctgggtgaatacactaggtattctgcaagcccaccccgctcccatagagagaaagagacctatgatgtacatgctcaatttggtggagttgtggtcactcatcattttcttagagaaaggcagttacttgaaggtttttcccatagtcttaaaaataaccaaaaactcaaccgccactgagcttcccgctcccatggcctcagtttctttcttaacacctatttattcacacattccccttttcatgaaactcctagaaaaagttctaattgccataccataccagactc

SEQ ID NO: 71418 - DNA, 188 bp, Zea Mays
ctctttttctttctattttctaaatcctatttccctttttgcatctttttcttttgaacaaattatgttgtgggtaaactaggtgctggaaaatagaatccaagtgatgtgcttgtgatcaaacaaggtgtatgcatatgatgaaagaaaatctaagggagttcttggaaataaaggatgaaaaggag

SEQ ID NO: 71419 - DNA, 679 bp, Zea Mays
ctgcctttccttggtgatctgtgagaagaacagtcttgcttgcgcagctgatgatacccttgtgcttagctagccagtccatccctaggattacatcaattccttgggatggcaagatggttaagtctgccaggaacactaccccacttaagagaattctgacttgggagcacctgagtttgcacaggaggtctgatcccggggttcgggtgaccaaagggatagccaggggtgtagaggggatgccatgcttttccacaaacttagtggctataaaagaatgggatgctcccgaatcaaaaagcacagtagcgggagtaaattcaacaaggaactcaccgagcactactcccggggcttgctgagcttcttgagcgtcgacgtggttgacccgggctctgccctgatactgagtcctgctctggtggctgtttgaaggaagtgccttggaggtaggtgccgatggaatcttggggccattcaccgagttggagtaggttggtccgggtgccttcaactgagagcagttgttcttgaagtgactggggtctccgcagtgccaacaggcgtttgctggcggctggttgcttgcaacggaaggtgcctgaagggagctttgactctgttgactgtagcgtgatggagtgggtccagatggtttattgaagcttggtcccct

SEQ ID NO: 71420 - DNA, 1348 bp, Zea Mays
ctgactgttggagcttctgacaggtgggccaccggacagtccgatggtgcaccggacagtcactattcactgtccggtgcgccttctggcgttgctctgacttctgcgcgtgcaggtgcgcagtgttcacttttactgttctgttgcagatggtcgttggtgctgtgtagtcgttactccgctggcacaccgaacattccggtgctacaccggacagtccggtgaattatagcggagcgactcctagaattcccgaaggtggcaagttcggagtcgggttccctggtgcaccggacactgtccggtggcacaccggacagtccggtgcgccagaccaggctgccttagggttgtcttttgctctctttatttgaaccctttcttggtctttttattggtttgttgtaaacctttggcacctgtaaaacttataatctagagcaaactagttagtccaattatttgtgttgggcaattcaaccaccaaaatcaattaggaaaaggtgtaagcctatttccctttcaggattacaaaatcaattcttcacgatattaattctccttacacaataatcattttaaacttgagtctcgcgcgacacgaccacttcatacttatgtacaccctccattgatgaatgaagcgaggcatcacgacattcatctaatacctcgacaacgcactcgtgctaaaaataaaatattcttcacgaacaactaattcaaccaatccattcatcggaccagttaataagaatagcaaatcaacttaccgttccaatagcttacacacatccacgagatcgataatgattctccgattctgctattacgtcaagcacgtggggagcaccacgcgggatttattgttctatccgaattctcgggatcgtttgacgacgcaagggatgtcgacgagttggaggcctctagggtcgagcacgacaacggcttcggagctccgcacaagtgacgcgcatctggagtatagatcgtcgggatcgactcaaatcgcgcaagcatgtccatcactcagggctctcgtcgaactcgagatgcgcaagccgtgacatcggtagcgagtgaggtcgacaacaagggcggggctgcatagatccggggctgctgcacacacgatgcgacgacgaacgacgacaaccggcgaggtcaacgacgcgaaggggattaaagccgagtgagccgagagggcgcgctggcaaacaggaagtcgcgtgcagaacgagaccgagcagagagagcggcaagcaggctgagcgcgcgctggaagctcggaccaagacgcaaggagccgtccatggagctcggggagctgcacgcagaggcgaac

SEQ ID NO: 71421 - DNA, 409 bp, Zea Mays
atgaatctggtgacagcctgtcctgggcgcggtggagattggttcacaacggagttcatcgtcgatgggggtatttccgaggtcttcttcgcaaagcccgataccccgcacgacttcaatcactgggatcacgagcaccctccaccgacgacccacccaatcaacagagagggcagtcaccagagaagctgacggcgatgtgcagcccgtactccggtccagtgagctaacgtttgcgaccgtcaatgactccagctggtgttacaaggcggtcgtgggggtgggttcagagggtaggcacgagagagtattcccccctcttatccagagatcccagggaatcgggcgcaggtaatccgcgcgccacggccggtggttacggagagttccgcttcctaggcaggcgatc

SEQ ID NO: 71422 - DNA, 227 bp, Zea Mays
caattgcgcagccaagggtcgaccacgcctggcacacaacaagtattgaatattgatggagatgaagatctattttcttcttggagcctcgagccctcgaggtagcagtgtaggcgtgtagcacatgtttttggtttctgcacagatttgatgtcctcggaacaacctctgcagttcctttctcccgtgttgagatggccatggcatcttgttattattattattga

SEQ ID NO: 71423 - DNA, 373 bp, Zea Mays
cgagtacccacttttacgattttttgacgccataatccaaaagccatcgaaatcattgacagcagactttagacgagtccaatatatgtatcttcaattgattgttgtcccttgtacgatttagctgggcattcttattaaactcttcagtgatttggctccaaaatgtttcacatttcttggcattcccatgtatctcgggtcattagatgtgttctaccaagcacttgcctgaaaaaaaagcaaaaaaaaaaaagaagtgaattagtggtttgcatcaaactagtagttcatgacatataaatgaaacaaatgttttgcattggtttgcttatcaatataacttcttcttcatgtgaccagtgccttttcc

SEQ ID NO: 71424 - DNA, 171 bp, Zea Mays
cttcatctagccagttctcctccaagtcatgctacaaggcctttttcatgggatccattacttttgaaccttggaagaggttgtggaagtcttgggctctccaaagtgtaaatttttcttgtggctggctatttggaataaatgttggacatctgatagactggaaaggag

SEQ ID NO: 71425 - DNA, 262 bp, Zea Mays
aagaactcctccaaaaggaaggagaagaagtcttcttcacaccaaaaggagaaatcctcttctcacaagacgcgtcggagtggggacaagaaaaagaagatgaggaaagtggtctactacgagaccgattcttcatcgccatccacctctggctccgacgcgacatccgtcacttctaagcgccaagagcgcaagaagtatagtaagatccccctacactaccctcgcatttctaaacatgcacctttactttctgtcccat

SEQ ID NO: 71426 - DNA, 62 bp, Zea Mays
ttgccgccggcgcgggcgacaacggtccacgccccgagccgatcggcggaccagcaggagcc

SEQ ID NO: 71427 - DNA, 433 bp, Zea Mays
gtgtgtacaaagggcagggacgtagtcaacgcgagctgatgactcgcgcttactaggcattcctcgttgaagaccaacaattgcaatgatctatccccatcacgatgaaatttcccaagattacccgggcctgtcggccaaggctatatactcgttggatacatcagtgtagcgcgcgtgcggcccagaacatctaagggcatcacagacctgttattgcctcaaacttccgtggcctaaacggccatagtccctctaagaagctaactacggagggatggctccgcatagctagttagcaggctgaggtctcgttcgttaacggaattaaccagacaaatcgctccaccaactaagaacggccatgcaccaccacccatagaatcaagaaagagctctcagtctgtcaatccttgctatgtctggacctggt

SEQ ID NO: 71428 - DNA, 253 bp, Zea Mays
atcggatgtgttttcagcaggcaggtttggtacttgtttctggtgccgccgggcggtctgctgcctgtacatggtgcctacgcctacgcatgaggatgagttaattgggagaccagtggcttcgccaaagagcacgcctggacgactctgcgtacgtggcgccccggatccgacaccgtggtctatttggaaggaacagaactactccatagttttccgtagtaggcaaagtactataacgcctcgccaaaaa

SEQ ID NO: 71429 - DNA, 401 bp, Zea Mays
gagaaacaaagatgctgggagggagggagaattggcggctgggagagggataagagggagagagatatttgtgctggatagggtaaccctaaaattattgggcttggttgtgctagttgtgtgtttctttttttttcttttttttcttggttctcttttctattagactgaaatgggaatgggccttatgattgtgctagcttacttattacttcaaattagatatatacaaaataatatttgatctattatatatatataattaaggtatcgcctcaccttacgccttttcacttaaaaggtaaaggagggtttgccttaactcgccttaccgccttaataactatgccccgatcttccttgtgtgtttttgtataactcttgtgccagcaacttgtaag

SEQ ID NO: 71430 - DNA, 741 bp, Zea Mays
atatagtgtgaaccttgtgaaaccttgtctcactctctcctttccccctacctagatgatgaatcccaatggagataaagtggatgatgccaacaacaagtatccaacctcaatagtggtgaaaaggaaggatgagtcacatggatatctgctgaatggaatgaagaacaataagaggaccaggagaatgtttgggtacaatattaaaccacctcagccgcaagcaaaatcctcgaaattcacgaatacccaaatgggagaatcaaatcaagatcagttattcaacatgcagacaaccgaccaaccatcatctgctggcaatcaagtaaggccgactcgtagagaggctaaagaaagaggtgcttgtttctactacaaggaagaaggacatttcattcaccaatgccccaataagcttctagagtggctcgagaagaaggtctcaaagcagaactcaacagataataatcaagaagaaattgtcttcacccgctcaaagtacaaagtaattcaaacaagcaatgagggcgacaggttgctggacataagcgtcgagccgagagagtgagcagcctcttgataagttggtagatttgtttgtaaggtcttgtgaataaccgatgaaccaaccttgttcttcttgctagcttcttcttgattctcgaggcgagattcctgttaagggggttagatttgtaacaccctgaatttggggtataaaattcctttcctaatatccac

SEQ ID NO: 71431 - DNA, 659 bp, Zea Mays
atcatctgcaaatatcacttcaatgtatgcatatgaatgcaatgcatatgtcctctgccttcatacctctaagggtatgaagccgcatcgtacccctcctcgggcaacgtacgatgctaagttgtaccggtacggtcggaccataggtcacgacaaaacttcagatgcaaatgagtcatgcaatgtatatggcatgctgcatttatcaatacatttcacttcctttagatacaatacaaacctcaaataatactttatctaccttcagatacaatgcaaacctcaaataagacttcatctgccttcaggggtgtgaattaatctcatgggtcatacttgaaccataatcatcatcaatatatgatagagcatcaatataataccatcaagtaaaacatcatcatagagttcaattatgaaagaatccaataattcttaatattggagtgtaggtgatagaaataacatgtcaaaatggtagcaaccaccgctacattcacttgccttcatcgaagaagaaaaatgtactaggcatgacctggagtgtagccacctgctagcgggcataaaacttagtataaatattttacaaacatttgccaacaatcaacaaaacacttcctaaacttgaaaccaagacccagtggaaagactcccac

SEQ ID NO: 71432 - DNA, 842 bp, Zea Mays
ataataccatcaagtaaaacatcatcatagagttcaattatgaaagaatccaataattcttaatattggagtgtaggtgatagaaataacatgtcaaaatggtagcaaccaccgctacattcacttgccttcatcgaagaagaaaaatgtactaggcatgacctggagtgtagccacctgctagcgggcataaaacttagtataaatattttacaaacatttgccaacaatcaacaaaacacttcctaaacttgaaaccaagacccagtggaaagactcccaccctgaaccacatgccatacagcagcagcgctgtttgttaattttgtatctttaaaattagaacagcagtgatatcaaacaaatactctaggagtatttacacaaaatactctacaacttcggtattcaagggataattaaattctgccatctataagttctaaaacatctgacaagataactgaccgaatctgttttagacagcagcatagtaaacttcaaaattcgatatttcccaaattactaaacccaaaattatgaaattctgctgacagtaagatcttttatccctctacaaaagtcttcatagttggaagagccaattcggccatttactagatgaaacccaccagtgaacagacccgctcatttttgtcaggcaaacaggtacagccacagtaaaaccaacataactggagtttcacaaatcatatgaatgcactctttaacaatctagaaagcttatgaaattatctacaacttcttttatgaacccacagtttaattctgttgagaaaattgcctaactcttaagagaacagattctgtgcagaattatg

SEQ ID NO: 71433 - DNA, 499 bp, Zea Mays
cgcctcgcgccgacccatctgggctgggacacgcggcgacaatttactcgtcggtccagggaccccccgggtcgaaacgccaacaaacactaccggaatcgtgttctttgccgagtgtctaaaacactaggcaaaggtcattttacactcgacaaagtctttaccgagtgtaacactcggcaaacattttatcgggaaaaggttgtttgtcgagtactttttttgaacactcgtcaaatcaagaatcgaaaaaattcaaaaaaacagcaaaacatttttaaaattataggaacaactctccagccactacgtattaccatacatgtgaatggtaagattcaaactcgcaactgagagcacctagagggggggtgaataggtgatcctgtaaaaacttaaacttatagccacaaaaacttgttaagtgttagcacaatgattgccaagtggctagaaaggagtctcaacaaaacacaataccacaagagatcaatcacag

SEQ ID NO: 71434 - DNA, 339 bp, Zea Mays
ctaaactcaccccatatacagtggagctgcctcccccgtatagagtgagctatgggggaaccgttggaggggttttgaccccaaaggtcaccccacgtggggtgggggaaggtatacaggcactcttggaggtggtcttatgcgctgccgacgatcgttgttgtgtgcgcaagatgtcgatgcaggcaccgcccgctagtcgaaacgggacgcggccgccacgccgccaacttcagaatgacgttgctcgtcatgagcgcgccctggttggggcacagcgtcgtctcgaggaggaggccacgggtgacgacgccgacattgacgttaacgtcaacaatg

SEQ ID NO: 71435 - DNA, 163 bp, Zea Mays
ttagccaattagcatactgttatatagttttttttttttgtgtgtgtggggggaagaagaagcagaacaatgcacaacaatcacgcgctagcttcacgcgttttagaaaatatataaaattcggagtttttcgcactaatgtctaaggaaagagacaaacgag

SEQ ID NO: 71436 - DNA, 224 bp, Zea Mays
attttatatttttgaataaatattttgaataagataatggtcaaagttttttgaaaagaatcaataatgccatatttttgtgaacggaggtggtacctgtgctttcatcagtgatatgcttggcggtgtgttttcattttgtatgtggttacattaggccaatgtttccatagcatgtatatgcgcggtcgcaaacgatagtttcctgaatgagtaatgcgaga

SEQ ID NO: 71437 - DNA, 297 bp, Zea Mays
cttttcctaaatagtggggagttattttgttttatatatttataagtctagtaaaataaaaccctaaaggaataatgattgatgcatcatgcggaaatatatatttgtttttgtgtgatgttttgctttggtgtgtatccatttaatatgtagctcatttattgtaaataaatttgttagtaggaaaatagaaaagagaagaaatagaaaatgaagaaaaacaaaaggaaaagaagcctccctcagcccaccccgctggcccagcgccatgcctcctccctgcgcagcccaatcgag

SEQ ID NO: 71438 - DNA, 333 bp, Zea Mays
taaagtaaagcaatagcatgaagttaaccataataatccaaaaggtaatcaaggacaaggtaaatacaaagctagtcaatccttgttgatcatggtatgcgggttgatgaattataaagtaaatgggacataataggtcagaggacacttgccttcaccaaacagatgctcaggatcttcaacctcataaaactcagagagcttgatcacttggtcgccgacgcttgatcgtcgattcctcggagcgcggaaacaaatcgcgatctaatcgcaacgcgaagcgaagacaaacaggaacgaacaaacaaacatatatgcataagaacattacac

SEQ ID NO: 71439 - DNA, 621 bp, Zea Mays
gtagaatcatgagcagaatctgtgtcatatagtgttgtgatattactggtggtggagtggaggtgcttaccaggagggtcgattggaggcaaagtgacactatgcgcgtagccggcagaacagggtaactgagtgggtggggtgtttgccttggctgagggtgttgagtgtgtggagagggggagggtagctaggtgtatttatagctgggtatatgtggtttagtacagtagagttcactgttggtgagaatagggacgaatgaatcgtctgacttagtctgaatagggaatttataggtagaataatgggacaagagtattttgggagttttctagaatatgaactatgcttaagggatgacatggttggatagggaataatttgataagaatttagaaacaagaattattggaatctgagtttggaagcctggttcgaaagaatctcaaagttaagcatgctcaacttggagaaatctgggatgggtgaccagatgggaagttcttactggaaggcaaatcatagtcaccggagttcgtatgactggaatattggtctggcaggtcttagatgagctggacaacatgatggatgagcaattgaatatttgggtgatcg

SEQ ID NO: 71440 - DNA, 747 bp, Zea Mays
ggccactccaagcaaaacacccaaggtaccccatatagcaccacaattcaaaacatgggtccattattggtcttaattaacacaagaacttctaccttggactaattgtctaaggaaactacacgacctgacatcaagcatgaaacaacatgtaatgaagctcaaagcatgtcatagttgcaatcaacactccaatttcacaccatcaaatttggatgcagctatacatcaacatcaatgtcttaagacaacactcttttatgaaggggtaatatgcaccaagcacaacccttaccaacttcaaccattaattttaattaaatggtgaaacatctacacccgacgaatgtataagaagattaaacacctcaccttaaagcactatgaaacaagtagttctattggaacaaaactcctaatcttcctaaaccttatttttgccatcatgaaaagataatcatgtaatctaacattccttgcaccccaccaaaagggagaaaatctatagaactaatggagcaataaagccaaaagaagccaataacatcttgtgcggcatagttcatcgaagaaatgccaaaaactctacatagagcactgatagcccaacaacaacacaatacttgcttaacccatgtcactatacttcattcaacatctcaactaagaaaaatatccaactagtaaggataacctacacataatataagtcttcatctactgtagttcagaaacttacatttcatt

SEQ ID NO: 71441 - DNA, 203 bp, Zea Mays
cacgagtataatatagataatctacactaaaaggatgaaacacttaaaaccaaacattaagcaccatggatatcacaacagggcatcgactacatccattgacataataacactagaatatctattttttattcctagctttttattaactctttaaactgtgtatcttaattacttgatttacctatttatctaaatcgaac

SEQ ID NO: 71442 - DNA, 680 bp, Zea Mays
cttcttcctcccgtcgtcttcttcgtcgcgccaacagtgctatagttcaatagtacaccctcgtcgcgctagctcactagagctagcgccctccactccacctaacccttctaatggtcgtcctctgattgttgtagtccacaatcccctcctctaatatcatcactctatttgtagccttagcctaagatcgattttatagtgttttgatgttcttgttctcctgaaatcatcatgtcaatcgaaaagggaagtgaatatggtaataagtgaaagagaaactcatatttgatggaccaaatatgatttggcaattcctgttctactgtgtgtccggatccaaatttagtccggcacatgttttggccgcgggaggacgaggaaggaaatggtctcagaaaaccggtggctgatgcggaccggagaatctccgcccgcaggcaggcccacagacatttggggccccgccacgccgtccgccagccgccagccgccagccgccagccaatcccttcctgtttctatttattcatccgcccgggcccctccgcacgcctgcacacattccgcgcacaccccggcagccgcaaacgccttcgccgtcgcgtcccgctcctccgcccgcccgacgcgacccctaggacctggagagagaggtcggcatggctgccgcaggggca

SEQ ID NO: 71443 - DNA, 221 bp, Zea Mays
atgcctcccacggggcacgggcgctgtctcggtgcgtccgacacgccgttccttctctcgtgccggctcggaggctcacccctcgactggaacttgcatccgccaccgccttatcagtcaccccgctcgagttggctccctccaatcccaggtctgcctctcatacccccgctatttccagtgtgcgcttccaatccttccaggctgctggtaaatgtggc

SEQ ID NO: 71444 - DNA, 1019 bp, Zea Mays
gtcatttttctgtgatgaaacaatgaaattgcagtagctttactgttgtctgttattggattataatttctgtcaaggcaaaattgtaaaagtcaaacaatagacgtttctagttaactagactgcggtagttgagctatcgagcataatgattgctgagcattgctctgtagtatgtactcacctagtttgaattaatgaattctatagctaattggcagggttatgagttaatgaattctccgtccagaagttgatttagaaacaactttttaagtcgttcgattaatcgcaattaatcataaataatcgtctaagtcggtttggaccaatcatgattaatcgtccaagccgtccaactaatcgtgattaatcgcagttaatcgtctaagtcggtaagccagaacaactaacaagtcgtcctacttgaaaacattgtttagaaataccagcctgggctgtactgacatcttgaatgccctgcaagattgaagtatttcccgcatggttggcctgtgagcctcattgtcctgaatacaccagcatgcaagtgctgctgtagttttagagaaataagtgacatgcttccaacatatttaaagatattaaatattctaattccgaataaaacaaacatataactcagataaatgctatatgtaattgtaacggtaatgaacagtagcatttatagtatatgaaaacatgaaacatagctagtcaggtccatttgcacattaaacatggcttgtagatgaagaaggcagactatacacataaacaagattgtttatattttagattttgctctcaaaatagcgggttgctgcactagacggtcctctaatactaaatggtgatcaaagatccttgactaacgtgacagtcttatcttaccagatcaaggttttagatcaaatataatgatcctagaagccaagcatgaataccaagagcaaagaattgtgcaatggaataaaggaacataagtgaactcaagtaatcagcctccacaatag

SEQ ID NO: 71445 - DNA, 1536 bp, Zea Mays
cttaattatgatgtgcttagactttgcactttatatgcatgatcgtgttgtttttcaattggtatatgtgatgcaatgatagttaagtatgaagcatgtctaagttgcgtgtaaatgttagacttcttgtgagtattcaattggcttaggtgctcctgaggcatgcattgttgtatttagtcagcctttcatttagccttcaattggtattaagtggatttcaatttggtatttaattgatatctctttgtgtgatgaaagtgatagagtatgccttgaccaaggtatgttgtgatcccctctagttctgaggaagctagaatgtgcaaagtgcaagtcattcaaatacttgatgcgcaacttgagggggagcacaaataacttgcgtcttttgagactaattgtatcttgagcgatcttgtgtagtctcaaggtggaaaagagaagatgagcaagaaatggagcaatcaggactggggtacctgtgtaagtcaaggaattggtatcttaagtaatgagtaattgcaaatttttagattgctcatgctctataaaatttggtgattctagatccttaaatatcatgaggttatgataataaaatgatcttgaaattggtatctttcaattggccgtgcttaaattgacatcttttgataaacattagaatagaagtttcttcttgtgcccaatactataacttgttctaagtttggtgtcttagcaacaagaaaaggttaggataaagaatcaggcacaaatgtggagaagctctcgagagattaaatactttcaagatgggaagtgcactacaacatggtaaaggtacaaaaggaagtattaatccttttgcatatatgtatcttacttaaatgttggtagtgcatatgttcaattagtaagggggagttttgatagttgtttttcctccttaactccctgctgtccgttgacatcatcctatgttcttgcttgagtatggtttttggtgtttgatgtcaaagggggagaatttgtgtattaaagcttatctcaacctgagaggaaagcttatcctaaggggtgatgtgtcagtttgagcattgttagtgtgttattgataagtcttatcatatgcttcttgcagtattatatgtgttgcatcatatggactagtatttagtatttccgctgctatgaattaattggcatctagtgtaatagatagtcatgactcatgagattaaaggtgctttaagattgctttatggtgctttaagattaaaggtgctttaagattgctttaaattggtatattagtttaaattggtatcttaatggtgaatagtggtaggttgatattcctgtgatatatccactaaattgaatggtgtttaactctgattatgtgcatttgtgtgttatagcatcatgctttgattcttggcacaatgcatcccaaaaatgctaaggtgtagaaatgtttcgaattgcctaagtatgtgcaaattggcgtctgaggccaaaattatgtttttggagtaagcacatatttag

SEQ ID NO: 71446 - DNA, 337 bp, Zea Mays
gagaaatacatattccagaaaacagatgacctttcgttccttggtagagagtgataagatattgtcactcgatgggaaattcatgagtattttatccatagttctgaccagtatgctaataaaatttagctttgctttgtgcaccctcttggactccctctccgaagctacttcattggacaatgatttcctaggagataataatagcctaattagtgataccttcgcgaacaattcatcagtaaacttcataatgccattgcatgaagtgggattaatatcactaacatcagaatcaaatagctcagatgactctggaataattgaactaactata

SEQ ID NO: 71447 - DNA, 390 bp, Zea Mays
caccaaaattatttaggaactaggtgtaagcctaattccctttcacctagcataccgagggatgtcgccgagcagtcgttggatatccgagctggatcccgacccgtgaagcagcctctgcgccgattcgatgaagaaaatcgcagagccataggcgaggagatccacaaactgatggttgcagggttcatcaaagaggtattccatcctgaatggcttgccaaccctgtgcttgtaagaaagaaaggagggaaatggcggatgtgtgtagactacactagtctaaacaaagcatgtccgaaggttccctaccctctacctcgcatcgatcaaatcgtggattccactgctgggtgcgaaaccctgtcattcctcgacgcctactcagag

SEQ ID NO: 71448 - DNA, 239 bp, Zea Mays
cctaaccccctgattatctcctaagacccccatgaagcattttatcaatcatatgcatacaccatgacttcttgtagcacttcacatagagtaatttattttttggcacctaggaaattaggagacttattgtttaaaagaaaaaagggatcaaggaaatagaaataggagagaaatagaaaaagaaaaagaaaaagaaaaaaataaatcttctcccccctcggctgggctgaatccgg

SEQ ID NO: 71449 - DNA, 582 bp, Zea Mays
catcaatgcatagtttctcttgttcactcaatattaggtgtgtcatcttatgcaacaactatgtctagcaagtttttatatattttctcacttaggagcaaccatgatcaaagcaagaggtcgatgagacttcccttccttcagttgcgcgtccgtatcgtcacgttctttgtctcctggctcctccgggttctcttctctagaactggttctaccaaagggacatcacaggtggatatacaacaatcaaaataacatacatcaatatattactatagctcacatttaatctctatttacttagtgcacgatagtcggtagagccagccatatttgctttcgggaggcagagcactcttacagatgaagctggcttctaggaggcagagcactcatacagatgaagcattgtgatcccgggaggcggagcactccttcagatggatcacaacttatgcactaagcaaatagaaattttacagcataacaaaatacttgcaacaaggacacatgattatgcaagggcttctacactttaacaataatttacttctatcttgctcttgaatgtgtgtggatggg

SEQ ID NO: 71450 - DNA, 4572 bp, Zea Mays
ccacctcaccgacaggtttgtcttccactagttatacatgtcttgttgctaacgataagagtggagatgaaggcgatgaggaggaggaatatgaggatgaggagtctacatcatcacaaggtacattttcttgttttgcttccactgataataatgacagggaacataagaccgacgatgtggaagaagaggagattcaccatttctacacccatctcaacaaataagacaaagcgctcttggttaagctattgagaaggaacaaggaacaaggtgagacgcttctcagactagaggagactctcatcaaaaccaacgacagcctagagaagatgaccaaagaacatgaggagctaaagtgctctcatgatgatttggtccaacggtatgatttagttttaattgagcaaagaaataatgatggtgatttatcttgtgttgctcgacttaaaatggaaaatgccgtgcttgagagacaagtagaattgctaaatttagaaaagcttgctctaggtgaaaagtatgatatgttgtcatattctcataataaattagttgatggccatatcatgctcgatattgctcatgaggtagtaattactagtttaaactcatgtgaacctcattcttgcacatgtgcacttttagataatataccaccatgtgctaacccctgttgctcaaaagaaagccaatgtttgaatgagcatcaagctacaggatcaaaagaaaagttgctcatcaataaagaaaggaataagaaaacaaagcaactaaggagaagacgtcgtgctcgacttcctcaagatatttacaaacatgtggtgaataagcttgaggaagaaggaaccgcagcaagggtcaaactctgcgagaaagaagctcctaaggcaataattgaagcaatcaacatgaacaaagaaaaaggtaaagatttagttagtcatgttgtttgcactaatcatctctctatgttatccaaaagcaaaaggagaagaggaaaaaggaggtgcttcaagtgcaataagtcaagccacctcattgcttcttgtccatacaaagacaaggatgaagggataaggagatgttttggatgcaacgataaggaccatatgatcacttcatgtccgctcatgaagaatcaaagatgtacaccctccaagatgaccctcactaaggaaaaagacaaacaacaagtgccatgtcaggttgagcgatgcttctgctacatgtgtgctgagcaaggtcatctatccaaggtatgtaagaagggtaaggttcctaagcaagtaaatttatctcaatcttattcgcttaggagacccaaaccatacacttgtgctagatcagcaatgagatcacctagaactagcacaattgttatttgggtaccaatggctcttttggatgatcgttatggacccatcccgagatgggtaccaaactgtgccaactagaccatgcaggtgcctcgagatggactggagaccatgggagagcttaagatggttaattcaaactcttgcttaagctattaatctttattgtctatttattaactcaaggttgaattatggtgcaatactaatcccatgttcatctcaagttaaataagttgtagaggtctttaatcattattggtgaatcaagcaaaggaccttgatgagaatctaaaacttgctcttcaaatgacggtacccatgtatcttaagtacattattgataatcagtattgctcttaagttggattgttgtgctacctatccttggagtagttacacttttaagattgccagtgttgaatacctttcaatcaatggttcatgattccaaagatcataatgatgcttgcttaatcatgattgtgtgttctatatgttatatctcttgaatcattcaatgggtagcctgtcatttgatatattcaccatgattaactctttttgtgttcgtggataaacatgtgtctttttgtaagtcatgctatatggtgtttaatgattaacctatgtgtgcaagcatgacatcttgtttagtccatgttcacataattaccctattttgatattgtctgtataccaaatccatgttgtgcctataatgcaccttcttgagctacgaggagcatgagcaaaaggagccctaaattggtgacaacaagtgctctcatggcaattcaggaaaaggcaaaggtatggagaatagaactatgcaatttcattgaaaatcttgaagttttgttgattgtgatcatagctatgttcttgcctttcaattggtagtatcttggcttaggtgccatatgccttaaaatgttgttttctttggtgtacttaaaatgaagtacttcttaatcttggtgtgcttagacattgtgctttatatgcatgatcttgtcatctttcaatttgtgtatgagttgcaatgatcatcatgtgtgtagcgtgcctaggttgcttgtaaaatgttatatatcttgaggcatgcattgtttccactagtcataagttgtattaagtcatctattcaattggtatcttttatgatgcaattgatatattatgcctagaccaaggtatgctgtgaacccctctagttctgaggacgctagaatgtgcaaagtgcaagtcattcaaatacctgatgcacaactttagggggagcacacataacttgtttcttttgagactaattgtttcttgagtgatcttgtatagtctcaaggtgaaaaagggaagatgagcaagaaatggaacaatcaggacttgggtacctccataagtcaagtatttggtatcttaagttgtgagtaattgcatatttatagatcgctcatgctctataatatttggtgatactagatgcttatctttaaatatcatggagctatgacagtaatgatttttcaattggtagccgtgatagtgtgcttcaattgatatcttttggtaatcacgagattagaaacttcatcttgtgccacaatactataacttgttctaagtctggtgtcttagcaacaagacaaggtcaggataaaggatcaggcacaagtgtgaaggagctccctagagattaaactttcaagatggaaagtacaccacaacatggtaaaggtacaaaaggaagtattgaccttttgcatatatgtatcttaattttcctccaatgcttgtggtgcatatgtttaatgcgtaagggggggtaatgttagtgtattttacctgcttaataccctgttgtcccttgacatcatcctatgttcttgctcgaatatggtttttgtgtttgatgtaaaagggggagaattgtgtgtgcattaaagcttaggtttccttgagttcctttgatcttaaggaaagaatgtgttagtttgtgttagttgtattgataattcttatcatatgcttcttgttgtattatatggtgataatgcaaaattagtgcttccgttgatatgaatcaattagtagctactgtgtttatcctgtaatagatattcatgtggttctggtgctttaaaattgttttaaattggtatcttaattgtgaatactggtaggtcgatattcctgtggtatattcactcaactgattggtgtttaactctgattctgtgcatatgtttaattatcgacaatacatcccacaggtgctaaggtgtagtaatgcttcaaattagcctaagtatgtgcacatatttagggggagcattctataaacttagaattcaaaatttatgctttaaatcttattcttgtgtaagctttaattgtgttgccatcaatcaccaaaaagggggagattgaaagctctcttgtgggttttggtgtttggataacaacccaattaaaggactaacaagtgtgctaagtgttgaacaggtgttttatgcaaagctaatatggttcaacacaagtgaacaagtgtgatggtccaaagactgaattatttatagataatggacatcacaagaaatatggacattccttaagtgagactcgatgtgcataactcagagacaaccaatcaagccaaggatggaagcaagaagagcttcgaggtaccgagtgcatgggagaaagtcaaggagaccaggaacccaaggccaggggtgaagaagaagacttgcagaatcaaggttgatcgagttaagaagagttatggtgcatcaaggaacactacataaggacatgacttacaaccaatgaggtaacatctacaattatgaggtgtaagtcataaggctcaagaccaagctcaaaaaagtgaacaaggtcactagaaggagaaccaatgtcaaaatcagaactggaagcagcccaaaagagctaagtgcactttaatctttagtttggggtgttcctatgtttggagatgttggggacttgttctcaaatgctaagagttaagaacaaggcaacataaaaagtgttaaatgttaaaatcctttgtccttcgaagcattatctcccttcgggtataatgaattccggacgaaggttatgaaggacaaaccttcataagcacaataaatgatgaagaaggattcatacacaagatatgaaaaat

SEQ ID NO: 71451 - DNA, 2278 bp, Zea Mays
cgccaacttgtcactcgctctccctcctgatcgctgccgccggtcactgttcgccgcaatgggccgcatgtacggccccgggaagggcatgtcctcgtcggtgctgccctacgctcgcgtcgcccctggctgggtgtagaacgctagatggtatctgtgctcagctattcattgaatagatctctccattgatccatccatttctatgtccatcaaactagccctaacagtccaaggtttgcttaaaactctgtttgtttttttttattttgaggaatttaaatattactaataaaatagactatttttttagaatgtgacattcgaacactttccaaagttatcatataagcttatcttaaatttatgaggtgagatatagaaattgattttatagatttacatgctattttccgatgtacaacttatagtacactcttctacttgcgccgctataacataaatgtagtaggtaaatatttctctcatatgatttaggataatatataaatatattatatatataaatatttaaacttaattagttttgtctaaattataattattaaaattgaattcaattctaactaagcaaacggggtctaaggaaatttttctttaaaaatcttgtcccaaaatgattcaagactggtatttggttgatttaatttatatcgtgtacattctctgtgaggggtacaactaagaatatccaaaatttattgttttcggagtagtggtgtgaccatttctgtatggttgcctgttcaactaattttagataccagaactgtatataattttgtacatagtgagctttaacgtgaagtgaccatttgcattagcgttttacgagctgctagaacctaagaactattgggtgggaaggttctcgtggatgtttgcttgtttttgggcttttggctggctttcatgttgtaggcggtttttaagttgcaacgttcatgttcattgtttagggcagctctacttaattgggatgtttgcttggtgaagtattagcgggcataggaaagctattatctccttgctaccagtccactgatgattcttggtgaaattgcttttgagaatattgtgaccataataatgattgttatggatctggaagcaaaccatccaattaggtattgtttgcttccggagccggttgggatgaagtggctctgttctagatattttggtggagccagatggttcaacatttatggataattttcctattttagatacacgaaaccaatccaaacaacaacaaattagaagtgtagcggctccgtcccacaatactacagaatcaaacactaccttaagagtttgcagtatttcgacaacgatgattatctccttgctaccaggtacccgctacccccaaagatcccaaattgatacacaatccctttagtcgaacatgtgtagggtagggtgcatccagccgtaacagccagacatttcgtgaccagttgcttgcacatatgttagtggttgcgtataagtttagtgcgcagttattagaaagtatattaataatcccatccatgagtgacaatgattgaccaaataaagcatctgcgctttatcatgtggacgcaccgttggctgctgctggtggtgctttgtagcgctgggaatcgttgtccgcatgcgcggcgctggtcaaaataatgcccgcatgattttttttttgatacagttggatgcttgatttgaattgatcgcggacatcgcctgtacttgctgtctggatttgataccactatttatagtcagtattattattcgcgaagggtcttggacatgatccaaaatagttgcggtgtttggactgttttgatcactgcgtcagtggtctcaactttgaaggagcgagaaagagactcgtatcttggtgaacgattcatttcggtcggttggatagttggtttgtatggggtatcatatatctcgctggatgtgaagatcagttttttctaggggagatgctgctcgacatctctgtatgttttggaccactcaactgctgtggctaaccgtattagtcgggcttagtttatcttggatcctggcttgtatggttcatcttattggtagaccatgcttttgtactcgtgtctgcacatgttagcagaacatgtttgtactgccgagtccacagatcgagatgccatctacttctcccctttgcctcagacgtggtatacgacggagaacaaattcaccttagactcttagagcgtactcgcatgttctggtcaaa

SEQ ID NO: 71452 - DNA, 775 bp, Zea Mays
gtaaatcttcaagagatggagaagaacatctccttgatcctctcttcctcttcaattcaacgtgctcctcctcttctcgatccttgctgcgtgggggggggatctagagggaggaggaagccatggagagggtagggggcggctgccaatggggaggagagcaagagagggagggggggcggctgcaactaattggggagaaggagagggggggcggctagggttgggaaggagagggggggctcccatccactggatcgagatcaatggcccaaactcgctctcccctttgagctcccgaccccagcggaaaaatgccaaaagatctactgttttctaaggaatgcctcctaaaactccaaaccccaatgccacagaacatgaaagaaaagagagaaagaagtttaacttcttttcagaaaattggggtatcacactctaccccccttaaaaagaattcgtcctcgaattcgaccactccaacaaaacatccatggtaccccatatagcagcaccatgcaaaacatgggtccattattggtcttaattaacacaagaacttctacatcgactaattgtctaaggaaactacaccacctgacatcaagcatgaaccaacatgtaaggaagctcaaaccaagtcatagatgtaataaacactacgatttcacaacattgaatttggatgcaaccatacatcagcatcaatgtcttaaaacaacactcttttatgaagggataatacgcactaagcacaacctttaccaactttaac

SEQ ID NO: 71453 - DNA, 2416 bp, Zea Mays
attaactagtgtgcatgactagttaaaaacaaacatcctttgacaagaagtttctaattaaatcatggttgtgcgtgggcagcgttattatgagagtgaaggtggacgtgctgctactccccttattcccaacatgaatcaagtacctgcattgagtaatgcaagagtgagatgaaacatctcagcaagtgaattgtttcgacgagatatttaaaccaaaaaaattgaactaatcaacattttaaagggatcacaattgagatcagaaatacttgtagatatagaactcaatagtcccaaaataaccaatgccatctaatttcctcgaacaaccacaataggttgtataacactttcctgcatcaacaatacctgcaaatatcacttcgatgtatgcatagtaatgcaatgtgtaagtcctctgccttcatacctcttagagtataaaaccacaccatctacaaataccacttcaatgaatgcaatgcatatgtcctctgccttcatacctctaagggtatgaagccgcatcgtaccccttctcgggcaacgtacgatgctaagttgtaccggtacggtcggaccataggtcacgacaaaacttcagatgcaagtgaatcatgcaatgtatatggcatgctgcatttatcaatatacttcacttccttcacatacaatacaacctcaaataatacttcatttaccttcagatacaataccaacctcaaataatacttcatttaccttaggggtgtgaattaatcttacgagtcatactcgaatcattatcatcatcaatatatgattgagcatcagcataatgcaagcaagtaaagcatcaccatagagtccaattatgaaagaatccaatacttctgaatattagagtgtaggcaatagaaataacaggtcagaacggaagcaaccgctgctacattcacttgccttcatcgaagaagaagaaatatactatgcatgatctggagtgtagccacctgctagcgggcataaaacttagtacaaatatttcacaaacatttgacaacaatcaacaaatcgctcctacacttgaaaccaagacctggtggaaagactcccaccctgaaccacatgacatacagcagcagcgctgtttgttaattttgtatctttaaaattataacagttgtgatagcaaacaaataatctaggagtatctacacaaaatactctacaacttcgttattcaatggataattaaattctgccatctataagttctaaaacatctgacaagataactgacttaatctgttttagacagcagcatagttaacttcaaaattcgatatctcccaaactactgaatcaaaaattatgaaattctgctggaagtaagaacttttatccctctacaaaagtctccatagttggaagagtcaattcggccatttactagatgaaacccaccagtgaacagacctgctcatttttgtcaggcaaacaggaacagccacagtaaaacaatcataactagagtttcacaaatcatatgaatgcactctttaacaatctggaaagcttatgaaattatctacaacttcttttaccaacccacagtttaattctgttgataaaattgcctaaatcttaagagaacagattctgcacagaattatgagactgaaaaactgctatagtaaaactgcaataactttctggtcggatgtccgattgaggtgttcttcgcggccacggaaagatctacaaattatctacgactcatacatagacttttcttttttttgaggccactaagaccacggaaaactggaatgaacagaaactgtcaaatctgccattccgcagaaaactaaattcgagatcaaaacctaaccccacatctaatccaacctctaatcctttaatctccatgatccacaacctccaaaagcacataattacagggaggaacaaggatttcatccatacctagggttttccccaagtaaatcttcaagagatggagaagaacatctccttgatcctctcttcctcttcaattcaacgtgctcctcctcttctcgatccttgctgcgtgggggggatctagagggaggaggaagccatggagagggtagggggcggctgccaatggggaggagagcaagagagggagggggcggctgcaactaattggggagaaggagagggggggcggctagggttgggaaggagagggggggctcccatccactggatcgagatcaatggcccaaactcgctctcccctttgagctcccgaccccagcggaaaaatgccaaaagatctactgttttctaaggaatgcctcctaaaactccaaaccccaatgccacagaacatgaaagaaaagagagaaagaagtttaacttcttttcagaaaattggggtatc

SEQ ID NO: 71454 - DNA, 2655 bp, Zea Mays
tagtgtgctaacgtgtctagcagagaggagctagagccctatgtacgtgccgacgtggctgtcggagaggtgttggagccctgttcatgtggcgtcgtggccgtcagaggagcgcttgagccctgtagaagcacagttgtcggggctgtcggatccttgctgacgtatccttgcttccgtagggggctgagaaccaccgttgtcatggagcacgcggggtgccatcattacttgttttaccggggcgagccagatgggacgccggtcttgttccccgtagcctaggctagctaggggtagggtaatgatggcctccccttgtggcgtggtcggcccgagcgaggtggtgactcctccgaggtcgaggctgagtccgagccctggagtcgggcgaggcggagagcgtcttccggagtagaggctgagtccgagccctggggtcgggcgaggcggagatcgtcgtctggagcgaggtcgagtccgagccctggggtcgggcgaggcggagatcgtcgtccgaggcgaggtcgagtccgagccctggggtctggcgaggcggagatcgtcgtccgaggcgaggtcgagtccgagccctagggtcgggcgaggcggagatcgtcgtccgaggcgaggtcgagtccgagccctggggtcgggcgaggcggagatcgtcgtccgaggcgaggtcgagtccgagccctggggtcgggcgaggcggagattcctatggcgcccgaggctggacttggttgttgtcagcctcaccctggcgggtggcacagcagtcggagcagcgcaggcggcgctgttttcctgtcaggtcagtcagtggaggggcgaagtgactgcggtcacttcggccttgtcaactggaaagcgcgcgtcaggataaggtgtcaggcgatccttgcattgaatgctcctgcgatccggtcggctggcgaggcgatctggccaaggttgcttctccgtgaagcctgcccgagctgggccttgggcgagtcgaaggtgcgcccgttgcttgaggagaccctcgggcgaggcgtgaatctgccttggtctgccgttcctgcccgaggctaggctcgggcgaggcgagatcgtgtcccttgagtggacggagccttaaccggaattgcgcccatcaggcctttgcagctttgtgctgatgggggttaccagctgagattaggagccttgggggtacccctaattacggtacccgacaggagagaacaaacaaatcacaagcaataaacacaatagacacgagtgatttgttttaccaaggttcggccctcgaaagcctagtccccgttgaggagtccactaaggacgggtctctttcaaccctttccctctctccaccgatcaccaaagaccggcgagctcttcttcttctcaaggatcacttaagaccccgcaaggatcaccacactctttggtgtctcttgctagctttacaaccctccaaaactttggaggaagttcaatgggagtcaaaactccacgcgcaaaagaacataagatgaagcacacactttctctcaatgaatctcacaaggctctagtgctaaactcaagcgagtagctctctcttgcttgctctctcttttgtggcacttgtgttggttgtagtggtctaaatcttgtgcataggatggatcgatgaatagatgtggttgggaggacttgaatatgtcaactatatgacttggaatgttgcttgggctcctcctttgaagtggccggttggggtggtatttatagccaccatccaaaatgtagccgttggagaagtctgctggcgatgggcgcaccggacagcccggtgcgccaccggacagtgtccggtgtgccgccacgtcatcctcccgttagggcttggagctggtcgaccgttggaggctttgtcctcatgtggcaccggacagtccggtgtggcaccggacagtccggtgcccctctgaccaactgctctgacttgtgttgcgctcactatgctgcactgttccctgtcagagtcgaccattgcgcgcagatagccattgctccgctggtgcaccggacagtccggtggcccaccggacagtccggtgaattatagtggagctgcgcctgataaacccgaagctgaagagtttgaggtcgatcctctctggtgcaccgaacactgtccggtggtgcaccgaacactgtccggtggtgcaccggacacggtccggtggcacaccggacagtccggtgcgccagaccagggagcacttcggtttcctttgctcctttcttcttgaaccctttttaacatttgtattggttttgagttgaacctttggcacctgtagaacatatactctagagcaaactagttagtccaattatttgtgttgggcatttcaaccaccaaaatcatttagggaaaggtttaaagcctatttacctttcactttgcggtgagaggggaatgagaaaggcagaacaataacagaacatagaatggtggcagtacatgggaatgggctgtgcggggaggaggaaatgggaaagacagaacatggaatggtggcagaacacggaatgacagactactcttgcagccttaataagtagtagagattagatatacaaattgttcggttgccctagctacagttg

SEQ ID NO: 71455 - DNA, 1623 bp, Zea Mays
ctgagtcgtgtgtccgtgcctaatggtaccgaccacctaattagagcatctccaagagattccaaaaataaatctcctaatacttagaattgggatctccctaaatgtcttaattccaaaaaaaatgaatcgtctccaacaacccccaatataattcaaaaacacaatgaatcgcaggtacacaatgtctacatataagcttcagatgtttgtataatcttccgatgtgttagttgtataagttgctgcttagaattgtaggtacacaatgtctgcatataagccgttgaaagtataatgttgaacgttccatgataaactctttgtgccaacaaacagaccttgaaaatgattgcataaatattattcttacaacaaccagttcttcaaaaaaattgaaatgttgcatagaggcaaagctcttcattgtttcatactacttgaaacatcgcatgcaggcaccacatctcgcgtcagctcaaagcaacacaataaacagaggtactggtacgactgtcatcgtagtgaccgcggagaccaccggagccgctgacccaacaagctgcacgttgaagttgcaggcgccatgagacgcgttctcgtcgacgacgacgacggtgagcccctagaagtttgatttggcggcagcagtgcagctggaggcgtcagcgtatctcaatgcatggatccatggggtttcaggagagggtgaccgccgccagaagcagaacatcaatgagaagagtttggcgcgtgaaatcgagtgtgctggtgacgggcgatggagtgaatgggtgaaaacaacacgtgaacggaaaatagggtctcgattgggagctcaagcgatggcggatgtttgcgccgtggaggggatgatttccgcatgcgggagtttagagatactgtataggttactgttggaatcgttgtttccttcccccccccctaaaataaggattatgacctagattttaaggatctcttggagatgctcttatgacatgctcttaattatgtcatgctagtggagcccaccctcgagacctgccattaaagcagggcacctgcgcttgttcttcagagacgcgggtcaccatgcgaggacgctaatgctattgctaagccacatcgtctccagcactcgcaggaagagagagaaaggatggatcagacgagaatccatcctggtcctgtagtggagtctgaagctccaagaaagagcacacgcagacgcagatgctgccaatgcgtttcagagggtctctgatcagaaaacggcccgtgtgttttcagcgacgcaaaagcaggaggtacctacctgattctggatggacggctaatctcctcgcctgctcaaaaaaaaaaaacagacaagctgaaggagccgtcgaggtacgtcgtaaacttggccgtcgtcgaggtcccgtgtgcacagctgagctgggccagcgagagcccgccctatgcttcaggcgagatgacacccacttcagacggacagacacggcgcggatggaccggtccgtctggcgtcggtgtcatctctcctgagcgtaggacgcacacccacaaataaccacggctgcagggttcggttctgcttgccgcacgcatgctgtcttg

SEQ ID NO: 71456 - DNA, 493 bp, Zea Mays
cgcgaatattatagttaatctatcgacagctggcgcttcttgtaattggttctaaggtcttgttagtagcgtgtaatcctcgaccgtgtaacgttgtctagtattgtgctatttcttatattcatacatgtgcattttgcatttcattaggtgcgctagttgagcgcttgatgcgaaggaccagggctgagtcgaccacaagatgttgttaatcgtgggcttcttcgcaaggcgatgcggacgaacgaacttaaggatggatgacccgaacaagtgccagaccaaaagctgatcgccaagtggacgtcgtctaacaaacactaacctagtgttattccaggcaagccccggtgcatttgccacctccttgttgttttaaaacttttatcacttatatgctgcattaggtgataggagttgagtgatgaaacagttgatgcattaccattccttggaatttgattatcctccttgatacctgttttacaaaaag

SEQ ID NO: 71457 - DNA, 564 bp, Zea Mays
ggcgcctattgggagagagagcaggggagaagagagatccgagtgcggcggcggccttagggagaccaggggcgggcgcgcgctaggttaaggaagggcaggggcggccggatgggccaaatgggcctgtaggattaggttttgtgttttttctctctttttttctttttttctaaatttgaaatacatgtttaaataaccctaaaaatcataataattaacccaaaattatttataaatataatatttatttttgactaataactatattatttttgtgaattttccttcaagaagaaatgttattaaatattcaaaaaccaatcatgcgcaaccaaaattattacaaatgcaaataaatgacacacaattaaatgaaaaacttattaccctaattaccattataaactaaaattattaatatacatatttttcgaaaaccttattttagcaattcattattgttttgtaaaatgagattttatttacaagatcaactccataaattggatttgcaaatcattcaaacaaaacatatgcttcggcacgagtgcaacaaacaca

SEQ ID NO: 71458 - DNA, 317 bp, Zea Mays
aaaaaaaacggtaacataagaacttatagatgaagacatcttgtatcaatatgagaaatcatctattagtattgaagcatcaaacatcatgtagtgtaacatctcaatttttctactgcaacatgagaaattatctattaaaacaagatcaggtaccacaacatcacaaactaaccactatgacataacccccatagtttttctaagccgagcatggagcaccgtacccatagaaataggattggttttcaagagcgtagtttaaaagtaagcatgtgaaatgctattttcagagctgcttgcacccagcatcttct

SEQ ID NO: 71459 - DNA, 364 bp, Zea Mays
ctttgctagccagccctgaatctcgagggcgagattcttttaagggggataggtttgtaacgccccgaattttgcagttgaattttttcttttctttactcgccaaaattcgggcgttacctttcccttttctttttcccctcgctaaaccttgacctttttcaaagtttagcgggattcggtttggatctcccgtgtaggaaaaaaccctaaataccttatgttgtttgatgcaccatgccgaaccttgcatttcttttgattgctttgaaagtgcaaatgcatgcatgtagaaagatcggatttcgaaaatgaggagaagatcttttctttctttttctctctctttctctctcctcttttt

SEQ ID NO: 71460 - DNA, 879 bp, Zea Mays
  misc_feature (1)..(1): n is a, c, g, or t
nccttccccacatggtcgctagctggcggcgttctgctctgtccctgtggttgttgtctgccctcgcatgagacgcctcgcagcgccttcctctccttcaaggctctcccggcgccggcgccgtatcccttgccaggtccgacataggcccctgcccggctggacccgccccgtcgccctccccttcatcgccgccatcgttggttttatcgttgtcgcggtcggatccatgttgttgtggccttcccggctggatccgttgtccctttggccggatcgtcgtcttaatggctggatccgtcactatgtggccttcccgaccggatccgtattctaccgcgggcgcggccaccctgaccgacgtagacgcatgcgctaccgccggtctccttggcggggctcctcgacgatcggacgagaagaagcaagaaggtccttggcctgctggtgttcttttgttgcgtcgccccgattgttgacgcttgaacgtcgacccctaagaagaacgaggctgccactgtgtgtctcccgactttggctacctcgacatccaggggctatcatccacatggagtgcacaccggtccctactccagccgcaacactcgcaccctcacgacgctgcgactgcgtcgggggggaggggggtcaacccgtcgggtcctactttcggcttctgctccagtctcatcgttagtgactgcgggagatgttagagtgtgtgttcctatatgtatccgtagatgggctagcaccgctgttgggctgccgacccattagggttagggttccgtaggtctctctatatatgtaaccttctcctatgcaatacatcaagcacttcacaatcttacaagaagaaccaattgcataactaac

SEQ ID NO: 71461 - DNA, 290 bp, Zea Mays
gaagcttgagagttgagagtctaagttgagttcgcccaagtgtggcctctccttgtaacgttgcatgcctccccttttttaactaagggggcacgtacaagggtactgagccccgacatgtgggcccaggaacataacgaatgtagtacttggagctaccaatgctcgctgctagagcaatcttcttgcgccctgacatccgagatctgcgtagaatcggcgtgcaggggaagcttcttgcacaagcgacgatggacacggtgcgccgcgcagcacgggtgcactgtttg

SEQ ID NO: 71462 - DNA, 2398 bp, Zea Mays
ctgagatttatatgaacttttgatgtattttttcttttttgtttgccttcatctaaatttctatagtacaatagaaaaatgatcattatcatcagaatattatagcggtagcacacaacgaaggtaaacaaaaattacatttttctagcagtgtagtatccggctagagtatacataacttgcagaaaataattatcgaacactgtatattatagcagtataccataccactcactgccagtttcgattagaaaacatttatagaaatcagtagagaaatgatcattagcagcattatattatttttgcatgcatttcggttatatctttagcaacatttcggttagttatactgctacattttatctttgaaagaggattatattgtatacttttccgcaatttgtatttttcttttttgtttgcctttatctgtagtgagacatatagccttctgctacccgttgtttagggttttgcttgtgttttttagtggtcagctatcctttcttaacccaatcatgcatttaaccctatcatatggttctattgttatggtgtgttttggttttttagggtttagggtagaaaagtccagcaacactattgttgtttggcttctttcctcaaccatattgcactacagtccttctgaaactaggatcaacactacaagacaaatggcaccgtctatacttaaccaaaataggacggttgcagttctacatcccgttcctactgagtccctgtaagaacacatttcataatcatttctattaaatcatggacaaccaaatctgaactcacttttaatgtagtttcgtgctatttgatgacgttgaaaacattggtgtcggcgtttcggacccgcggggaccgtcaaccgaccagtaaatttgttgttgcgtgtccctgcccagatgggttgatgcaagatggaacacaagcggggggaatgaggcttatattatcttgcactggggtgctcgtagtaggggttacaagtgtcgcgagagagcgagggcgagagcgagagagggagagagagagagtctccgcatgctgcctgtctcgtctgccccgcgtccctgcgttccccctcagtccacatcctgcgtcgacgtgaatgtatctcagcgcgaacttgaacgtcccccccaggaaggtcctggacatcccattttatagatacaaggagatgttcagctgtacaacgaggtgtagctatgcgctaacgtggctggcggggaagtgccttgagccctatacacgagctaacgtggccgtcggagaagtgccttgagccctgcagaagcacagctgtcggtgcggcatggatgctgctgacgtttccttgcttccgtaggaggttgagagcaatccgacgtcatgggcgcacgcggggaaccatcattacctgttgtcggagtaaccttagatgggactccggtcttgttccttcgtagcctgaggcagctagctaggagtagggtaatgatgtatcccctgtagcgtagtcggtccgaggcccaggtcgggcgaggcggagacttctcccgaggccgaggctgaggtcgaggcctggggtcgggcaaggcggagaccttctcccgaggccgaggctaaggccgaggcctagggttgggcgaggcggagaccttctcccgaggccgaggctgaggccgaggcctgaggtcgggcgaggcggagctccctgctgcgcccgaggccgaactcgtgggagatcgtgactcagttttaccctggtggttggcacagtagccggagcggggcgaacaacgttgttttcctgtcagattggtcagtaaaggggcgaagtgactgcggtcacttcgaccttgccgactgaggcatgcgtgtcaggataaggtattaggtgatgcccgcattaaatgcgcatgcgatatggtcggctggtaaggcgatttggccaaggtcgctgcacgacaaagtctgcatgagctaggcttcgggcgagccgagggtacgtctgctgactgaggggaccctcgggcgaggcgtgaatccgtccgggactactattaccgcccgaggctgggctcggatgaggtcgcgtcccttcgtagatgtggccctgacttgaaccgcgctttatcagccgggtatggtttgttctgaagatgttttccagccggattaaggagcattgggggtacccctaattacggtacccgacagtagcccccgagcctcaaagggagtgtgggcactcgcttggaggttctgccggatttttgcaaggggaccggcccatctcggttatattttattccggtgggtgcggcgagtgcacccgccgggtgtagcccccgaggcctcgaaggagtggtttgactcctcggaggtcttaattctt

SEQ ID NO: 71463 - DNA, 642 bp, Zea Mays
cggatgtccttgacctccctctccgccgacgacctcctcaagcgggtaacaagtacggtagggaaggccggatgccggcgcccttagctagcccgcgatgtgtcccgaccgtggtatgtgtccctggtaagtgtctgatcccccttatgttttgcgccgagttttccacgcccttgattcttactgttgggatttttgttcgtccccaggggttgaggatgtataaacccgacaggccaccgatctcggaggacgcggtggaccgagccgcgcggacttgccgcggagaaggagaaggagaagaaggacgcggaaaaggcctgagctcgcgagaggatgctagctcaggaagccttggagaagtgttgtcggaggtaggcgagggatgggctcccgagggagtcatcgccggagacgcctgacgatgacgatgacgatgatgacgatgacgacgaagacgacgacatggcggcccgtcttggcctcaacccggacccgaggctgggccaggggtcgctgagccagcctccaagtgggctggcaccatcagtgcctggggccaggacaccaaggtcccaatccgaggagcggaggcaggccgagggggtacttgaaagggaattaggcttacacctatttcct

SEQ ID NO: 71464 - DNA, 83 bp, Zea Mays
gaataaaggcttctgggtttctgaacatcgcagcagtccgaacttttgctcgatcacacgaagccattcatctgcttctaacg

SEQ ID NO: 71465 - DNA, 80 bp, Zea Mays
tgcttttggcagcctcgtcgtcgggtgtgggagaccattcgtcgaccagcctcataggagggggctgaaaaaggtctaac

SEQ ID NO: 71466 - DNA, 318 bp, Zea Mays
ctcaccgtgattagcgcgacatagcaccctacccaccgtgcgcggtggagcccaaagctcggcgagaaattccagtcgccctggtgctcgattcttctgaccacgtgcgcgagtatcttccccacgctctatgctttcccctggcctatcccacggggtcgaatcgacgatcaaacggattctcgcccacagccgcactctccccccttttcctcggtcacgagttgggcggacagaggcgctatccagaggcttggggcgcggcttatagcctgaggttgttacggacccctagctggcggacttggtcattgcaac

SEQ ID NO: 71467 - DNA, 640 bp, Zea Mays
atgaaagtgataatatattatattttcatcacacgtagaaggtataatagtgtttacgtagctcacttctaggatttacttttatacattattcatggcacctccgcatcggcactggaggagagatttgattatttggcgtattgaagtcgagagaaagctggaaggtggaagaaaaaaaaaatctacagcatatagagggaggatagagatctggaatttctaggtaacagcgagaagcatctgcaaaatcttagaagctagaaaatctccattaatagaggcgatctttgatctcttcataagttggaaggctacaccttttgagcccccggagatgggaaattttagatctcgccactgctctgcttgctcatgtactcggaggagaaacttgtgattctgtgatatgtgatttggattttggatgcttcgtctagtagtaggtgcagtctgcagaccatggcgcgacaacaaataaattaatggaaaaatgcaagggttccaaatcacataccttcttttgcgctgatgttcgagtttttgtttcactttctgttcatttgttttagatcatacgtggattaaaatcctttgtatccgaaggacttttattcttccgtacagaagtgaaagaaag

SEQ ID NO: 71468 - DNA, 200 bp, Zea Mays
atcagaggcttaatcctacatccttgtgcctcgtgtgttctttgtcgtgctctaaaaaaatatgtgatttacaacttctctacgcctgaacaactgatgggctgatgggagggaaaggagcagactggtggtaacatagtcctcaacatgctatcagcacgctctacctcgacattgctgtgagattatatctatatcac

SEQ ID NO: 71469 - DNA, 706 bp, Zea Mays
cttaccagaattcgtagcaagagctccctgtgtcctgtagaagcaccgcagcgaccgatgaggacgaacccgaggttctgggcacggcgcggctacagctcaacgcagccgcccgccttcccaactttctctcaccctctctgtttctgctatgacgtggttgcttgctcggttctaggggatgagggcatcggctgggcagatggcaatggttctcctccgccactgatcatggtgcgagcggtagcgagtttcaagctccggtttcatgttgctgctgaccctctcggcaaaacttggaggcaccgggattgatagccagggtatcgtgggtgcctgcctttatatcccagatacgggtgagctccaagccgagagagaaggaacggcaatcacgcgcgtttgttgagtttgttgaggtgctcgtggagaggatgagggcgagtccgtgtgccagccatgcagtccgttaggatttgtttggctagccgatcaagattataggcggaatctgttcggagttttacgatccaatcttaactgaatttagatgaaggtctcgtgcgtgatttgttagtagtccgagcggccgactaaggtattatttttaaatattcagcacatgccagctttgcgtcatcacggctcaagttcacaacaagaaaataaacaaatgaaaaaaaagaacaggtggacgtgtgttaac

SEQ ID NO: 71470 - DNA, 247 bp, Zea Mays
aaacatttaataaaaagttttatatattacacatcaaataatatgacctctattattgtatttcgccctggtccatcgaaaagtaagatataggtgtgcaatcgcttggctagttgggatcgtttattctaggacgactcagggcaccagagcaccaccaccacttcagcacctcagggctcaggcccaaagctgcgcctttctcttttccctcctcccgtgctccgtatgtcaacgcgacgcgaac

SEQ ID NO: 71471 - DNA, 314 bp, Zea Mays
gcacaggtaggttgggtcgtgtacttgtgttgttcccgccctgtccctgccctgccccaggccattggccgatgcggcgccattaccaaccaccgcgcagccacctgatgcaccaccaaaaacaccggttccattgaaagcataagcattccgcccttgtcttccaagcgaccaatcagtccgaaccaccagccgcaaaaaaaaaaaaaaaaaagaaaagaagaaaaaaaacccgacgcggccaatggcagcttaaccctgcatgacataattgcatgctttgcttcttcgttgcagaagaaacataccgttta

SEQ ID NO: 71472 - DNA, 190 bp, Zea Mays
ctccaatgccgccattagaatgatggggtcaaagtcccaaagcctgctgattagggcggcttttgtatttgacaacacattagtcattagattaggttcacacactatgatggatcaaggggacacagaacgcctgcctgcattaagtcctggaatctgtttgccgctcgggaggacaagtgctccgtat

SEQ ID NO: 71473 - DNA, 1050 bp, Zea Mays
ctttataatcgaatatgtttggtaccctgatttctttgctacgacaatatataagtgatccatcatacaaacccccctcgaccggcttgaatgcttgatctagcttagctagcatacatgggcatagttttagtttatcccttgccgtggaagcagcagaaacgagccgaggcagatcagaactcatcagaacgctttgcttggatgccctgcaacgtccgtgcgtgcctgtcagtgtccagctcacgcgcactggccgccggtgccctcgccccagctccaccatcggcgccgacgtctagcgggcgaaacgaacggggaagaagcctccagaaaagcttctcctcgttggcacagccacaggcagacaggccaccgcgatcgatcggtgagggaaaaaaaaggcgtggcgcttcacttcacgtgccccgctttttctttccccacgccgggcggcggggcccggcccgggtcgtcatcgacgacggagatggagccacgaccggtggtgcggagcacatgcatggggctcgcagatcaggctcagcagctagctctcccttgtcggccggagtggacggatctttggatgcggtgccgctggctcagctggggcggctgctgctgccggagacgcagacgcccagacagcgccagccagcagcctgcaggtcggtctggacttttgatcggctctgatctgtctgctcagagctttcagctgctcgcattgggtctgcacatgcaccatctcttcgcatgattgcaagtcatcggaatccaacctctcatggaccaagccaagccagagcccagaggaaagcggttgggaccttgttgacccatacaggcccaaagtttctattgggcaaacaagctcagacttcaatcagtccagagaggcggcgcctgcagggaacaaacgggtaaggatgaaaacgatgggtaatggtgttaaaaaatctcttaggtcctgttgtttcgttttattttgaggaattggaatcttactattgaaatagactatttttttacaacataacattccac

SEQ ID NO: 71474 - DNA, 505 bp, Zea Mays
ctcatgtcgccgtcgtcgagggcctgctgccctagtcgcgaatgctcgtgtcggtcacggctcagcccacgctcgccccgacacgaaggaaggcgtgtccacaacgtgtgcgcggtgcagcacaccgccggtgactctgctggtcacgtcgcgtgtaccatcccggtgacgggttcaacgtgtttgctgcgcgccgcccggacacagaaccacctgcctttcgcgcgttcgtggcgtgaaaatgggatcggaagtctcatatggcggcttgaccaggcagcgtcgcctaaaaaaagaaaaaaaaaagaaaaaaaaacttacatgtgctcgccgtcttcccatgcatggcgccatggacccgtcgtcttcccatgcatggcgccatggaccccttccatgcatggtcccatgcacgcacaactgtttcagctattagatgggattatagaagattgagtggagattatcaagctcattctttaggaaacaaacctccacgcatgac

SEQ ID NO: 71475 - DNA, 1305 bp, Zea Mays
  misc_feature (1)..(1): n is a, c, g, or t
nttgtagccaatttggcctctatttaatggatagatagtacttatagcttctatgctgtctagcaaactattgatctagtcaagtgcttggttcaagacttcaattatcattttgattcacataacttgtttaaataagaagtccattttacaatccccaacaatcaagtttgtctaccttaccctttaagaaactcccggatcattttactcatctaaactatttcaattggtacaatctacctcctaatgagattcatatttcttgtttctctgcttatgtttaaagttcaaattttctggagtgacaaatgagaaacgacatctatcatataccgaaaagtacattagaatttttaataatcattcttcataggttaagaccatctaatactaaattaatatttgggataccaaatttcatgaaaagcaactatgaacatttttgtcctctatcaccccatggaatttgaatgtgaaaactcaacttgtatgcagagaaacaaaaggacaaatctcattaggagatatactggatcaattgaaatagcgtcatgagtaaattgagcccaagttttgttatgggggtggagcggacaaagtgttttgtcgtagtacttacaactaagctagggtggggtttgttggtggtgatggtgtgtgggatgcgagggtgaggtattcctctgcaaattcaatgtatcttacgctttttcagcatggctctgctccactccagagcaactccactctaaaactctgggtggagcagatttgctccagatttaaatggttttctcataaccggtggcagtggcgggtaaataactccaagctccacatctaggttgcctttttagagtttttgaagccgcaaaagaggtactccaaaaaactgtactgcaactctgaaaactccatggagtttgcaactctagagttagggtgtttggcagactcttgccagctcctccttggagttctgctctggagccatgctaaacacgcccttaatcttctcaataaaaacaaaatatccctcagtttacatactgtcaaatttgggacattgagaaattcatcctaaaaatgtataaattgtttggcactggcaaactgctggcagtacatccctgagacatattttaaaatattttctactattaaggcagacctggtgcagtggtgagagctgtctcactaagtcattaggtcacaggttcgtagcagccttcccacatttgtgggggaaaggctggcatcggtttattccttctccagaccctactcgtgtgggagccttgg

SEQ ID NO: 71476 - DNA, 424 bp, Zea Mays
ataaattttagctcattcgagctaacgagctggctcgagcttgtgtcgagctggctcgttaacgaaccgagctgagatgctagctcagctcgtgataaaattgaaacgagccgagtcgagccgagccgagctggccacgagtcgagcgagctcacgagccacgagtattttacccagccctacccatgctatcattggagccgcgacttcaaggggacatgccttggggacaaggtttgcacagatgtttgccaacatcaagatccctacaattttattcgcggcaagtgtcgtggcttcccggccgggaaatgcttctgcctctcatgctagctgatccacagtggcagtggcggtggacctaataataatagtgttgcctccttgtaatgttgtttaaccgatcatttgagagagagaaaat

SEQ ID NO: 71477 - DNA, 126 bp, Zea Mays
ctcaaatcaaatcggcaccgggcggcctcctccctccctcccgaccccgaccccgaccccgaccccgactgccaaaccctaatacacggcggtgaccttgcggcctccgttccgctgcgctccgtc

SEQ ID NO: 71478 - DNA, 100 bp, Zea Mays
ctttgctctcgtccacggctccggcctctgtgtgggggcgcagtgtgcaatatgcatttgctggccttggtctgtccccaaaacgatgccgtcgtcttcg

SEQ ID NO: 71479 - DNA, 455 bp, Zea Mays
gtcttctctcactgcacgcgcgcgcgctcgaactcaacgaacgatacacgcagtttgatagtttccactggcgcatttagtgccacccattgaacgacacaagtacgcgcgcgtgcgtcgtctgcaagctttggtctctttcacctccagggaaataaaaaataaacaagggatcgggaaatgtaaaaattgatgtagccagctggtcgctttcaccttcgtagcaatctgtcaaaaacaaaaaaaaaataaaactcacaagaaaatggaaaatatttaattccgcaggtaaaattcacaccgcgacctttatcaaattaaactcacaccatccattagatagagacatagagtgtgtttgccgcttcacaagttttctttatcaacccaacccctctctacatttaaccttgctggtcgatctctttctgactccttcaaccttggtggcctaa

SEQ ID NO: 71480 - DNA, 667 bp, Zea Mays
ggcaccgccgactagcccatgttggaatgaagaatcttcataagcttctaaagggagaacacattttaggactaaccaatgttcattttgagaaagacaggatttgtagcgcatgccaagccgggaagcaagttggcactcatcatccacacaagaacattatgactagtgacaggccactggagctcctacacatggacctattcggcccgatcgcttacataagcatcggcgagagtaagtactgtctagttattgtggatgattattctcgcttcacttgggtattctttttacagaaaaaatctcatacccaagagaccttaaagggattcttgagacgggctcaaaatgagttcggcttaaggatcaagaaaattagaagcgacaacgggacggagttcaagaactcacaaaaagaaagcttccttgaggaggagggcatcaagcatgagttctcttctccctacactccacaacaaaatggtgtagtggagaggaagaatcgaactctattggatatggcaagaaccatgcttgatgagtacaagacaccggatcggttttgggccgaggcggttcacaccgcctgctacgccatcaaccggttatatctacaccgaatcctcaagaagacatcatacgaactcctaaccggtaaaaagcc

SEQ ID NO: 71481 - DNA, 3201 bp, Zea Mays
ccaagagcatggtatgaatgccttagaaatttccttattgctaatggcttcaaagtcgaaaaggccgatcctactttattcactaaaactcttgaaaatgacttgtttgtatgccaaatttatgttgatgatatcatatttgggtctactaacgagtctacatgtgaagaatttagtaggatcatgacacaaaagttcgagatgtctatgatgggggagttgaagtacttcttaggatttcaagtgaagcaactccaagagggcaccttcctaagccaaacgaagtatactcaagatattctaagcaagtttggaatgaaggatgccaaacccatcaagacacccatgagaactaatgggcatctcgacctcgacacgggaggtaagtccgtggatcaaaaggtataccggtcgatgataggttctttactctatttatgtgcatctcgaccggatattatgctttccgtatgcatgtgtgcaagattccaagccgaccctaaggaagctcaccttacggccgtaaaacgaatcttgagatatttggcttatactcctaagtttgggctttggtatcctaggggatccacatttgatttgattggatatttggatgccgattgggtagggtgcaaaatcaataggaagagcacatcggggacttgccagttcttgggaagatccttggtgtcttgggcttcaaagaagcaaaattcggtcgctctttccaccgccgaagccgggtacattgccgcaggccattgttgcgcgcaattgctttggatgaggcaaaccctgcgggactacggttacaaattaaccaaggtccctttgctatgtgataatgagagtgcaatcaaaatggcggataatcccgttgagcatagccgcactaaacacatagccattcggtatcattttcttagggatcaccaacaaaaaggggatatcgagattgcatacattaatactaaaaatcaattagccgatatctttaccaagccacttgatgaacaaacttttaacaaacttaggcatgagctaaatattcttgattctaggaacttcttttgttgatttgcacacatagctcattttacatacctttgatcatatctctttcatatgctatgactaatgtgttttcaagtctatttcaaaccaagtcataggtgtattgaaagggaattggagtcttcggcaaagacaaaggcttccactccgtaactcatccttcgccgtcgctccaagtcactctccattcttgagggagaaagcatgagcacaaggactccatctttggtataatcttcactcatttatttatgaccaaaggggagagagtagttcaaaaaggctctaatgattccgtttttggcgattcatgccaaagggggagaaagtaagagcccaaaagcaaaaggaccgcaccaccaccaatttcaaaaacttcgtgtttccaagaatattatcaattggtttcctattgtgttcaaaaaggggagaaagtagtatttcaaaaatgatatatcaaaaccctcttgaacactaagaggaggatctcatttagggggagttttgtttagtcaaaggaaaagcatttgaaacagggggagaaaatttcaaatcttgaaaatgctttgcaaaatctttttcatttacctttgactatttgcaaaagaacttcgaaaaggatttacaaaatagtttgcaaaaacaaaacatgtggtgcaagcgtggtccaaaatgttaaaaacaaaagatcgatccatgcatttcttataagtattaatattggctcaattccaagcaacctttgcacttacattatgcaaactagttcaattatgcacttctatatttgctttggtttgtgttggcatcaatcaccaaaaaggggcagattgaaagggaattaggcttacacctagttcctaaataattttggtggttgaattgcccaacacaaataattggactaactagtttgctctagtgtataagttatacaggtgccaaaggttcacacttagccaataaaaagaccaagtattgggttcaaccaaagagcaaagggacaaccgaaggcacctctggtctggggcaccggacagtgtccggtgcaccaccggacagtgtccggtgcaccagaggactccaactcaaacttgccaccttcgggaaattccagaggcactccactataattcaccggactgtccggtgtacaccggacagtgtccggtgctccaaggaagagcggcctcaggaactcgtctgcctcgagaaatcagaacggctgctccgctataattcaccggacatgtccggtgtacatcggactgtccggtgcaactccggagcaacggctacttcgcgccaacggctacctgcgtcgcattaaatgcgcgcgttgcgcgcgcagaggtcaggcacgcccatgctggcgcaccggacaatctacagtgcatgtccggtgcgccaccggacatccaggcgggcccagaagacagagctccaacggtcgaccccaacggcttttggtgacgtggctgtcgcaccggacatgtccggtgcgccatcgaacagacagcctcaccaaacggctagtttggtggttggggctataaataccccaaccaccccaccattcattgcatccaagttttccagcttccaaccactatacaagagctagcattcattacaaagcacaccaaaagagatcaaatcctctcccaactccacacaaagccttagtgactagagggagtgatttgtagtgttcatttgagctcttgcgcttggatcgcttctttttctttggcattctttcttgtgatcaaacactcacttgtaattgaggcaagagacatcaatcgtgtggtggtccttgcgggaagttttgattcccaagtgatttgagaaagagaagctcactcggtccgaaggaccgtttgagagagggaagggttgaaagagacccggcctttgtggcctcctcaacggggagtaggtttgcgagaaccgaacctcggtaaaacaaatcctcgtgtcacacttcttattcacttgcgatttgttttgcgccctctctcgcggactctattatatttctaacgctaacccgacttgtagttgtgattatttttgagaatttcagtttcgccctattcaccccccctctaggcgactttcaac

SEQ ID NO: 71482 - DNA, 897 bp, Zea Mays
gaaacttcttaacatcgggtatattctttacttctttcacttaaactcttgatgtagacaaaccttattatctcccagaacagcttgactaaccaccttattgtaaccttatgtcgaactggttgtcatcaggagttgaagcttcacattaaaaccatgtaggaagtatcaccttttcctctcactagtatccacaaaatccaaaccatactgggataggtgtgtaaacctctcaaaatactccattatactctctttttttgcatagcttctgacctaagaactcattgaactttatttatataggggctttcgaaatatcatgtgcccgaaataccccacggaactcaacccgagaacttaacgtccttctggctgcagcgcaaggtattctacctgccaactaaacttggctttgagtcttcaaaaacagggaaaggtagcatagaaaggcaaagacaggtaacatgaacaaggtagacgaaacacgtactaaagctactatatagggggtttaacttaaagttatatgtcatgatgcatgctcgtcctattcgtcctcacaatcttgccatcatatagtggcttgcacgctctatggcggtggcatacctactcactccggagttaactagtcgtaatttcctaaagtttagtcagtgtacctgcagaaaattccattacagcccaaaccccatgatgcaattcacacatttggtcacaatttatactccatatatttctatatggaggccaactcttcattaagcgccgagccacgcataggcgccgctgccacactttaaccacagggcagcccattatggtagcttaccttcttacctgagcgtaggtgggtcgttacaaatacattacacttctcagtattcccatgtt

SEQ ID NO: 71483 - DNA, 1125 bp, Zea Mays
gtcagagttttagtgatcgtaacaccaggggcgttacatccttcccccctaaaaaggaatctcgtcccgagatttaaactccaagccaagtaatggaaaaggaagcgcatcaatggtttatgtccccattactcttaaaagacaagaggcatacctctgttggtttacattaagaacaaaacacaccagacctaggtttacaagacactagaaactcaggaacatgcttttctagattctcctccaattctcatgtggcttgatcttccgtgtgttttggttccaccgtatcttgcaaaactcgataactttcttcgagtggcccgatccttttgatccaaaacctttatggaatgttccgagtaggttaaatccaattgaagattgacatttgaaatctcaagaacatgttcggggactcgaagaaacctcttcaactgatacacgtggaatatgttgggcactgttgaaagattctctggcagctgcaccgtataagccagaggtccaccaaaatctctgttccaaatcttggttcatcttactacttctagggtaattggagttccgaacttcaactcgatcgcaaattccacgaccctttccggaggtaaaccaagcaaattcttggggaacacctctggaaacttcttaacatcgggtatattctttacttctttcacttaaactcttgatgtagacaaaccttattatctcccagaacagcttgactaaccaccttattgtaaccttatgtcgaactggttgtcatcaggagttgaagcttcacattaaaaccatgtaggaagtatcaccttttcctctcactagtatccacaaaatccaaaccatactgggataggtgtgtaaacctctcaaaatactccattatactctctttttttgcatagcttctgacctaaaactcattgaactttatttatataggggctttcgaaatatcatgtgcccgaaataccccacggaactcaacccgagaacttaacgtccttctggctgcagcgcaaggtattctacctgccaactaaacttggctttgagtcttcaaaaacagggaaaggtagcatagaaaggcaaagacaggtaacatgaacaaggtagacg

SEQ ID NO: 71484 - DNA, 2558 bp, Zea Mays
agatttcttctcctttcctttgttggaggagctcttcttcttctccctccttttggtgcgggactcttccgatgaagtgctcccgtagcttgtagtgggcttttcgccggtctccatctccttcttggcgtgatctcccgacatcacttcgagcggttaggctctaatgaagcaccgggctctgataccaattgatagtcgcctagagggggggtgaatagggcgaaactgaaatttacaaatataaacacaactacaagccggggttagcgttagtaataataaacgagtccgcaagagagggcgcaaaacaaatcccaagcgaataagcaagtgagacacggagatttgttttaccgaggttcggttcttgcaaacctactccccgttgaggaggccacaaaggccgggtctctttcaacccttccctctctcaaacggtcccacggaccgagtgagcttcttttctcaaatcaaagccgggaacaaaacttccccgcaaggaccaccacacaattggtgcctcttgccttgattacaatggagttgtgatctcaagaacaagtgagaaagaaaagaagcaatccaagcgcaagagctcaaatgaacacggcaaatcactctcactagtcactaggattttgtgtggaattggagaggatttgatctctttgtatgtgtctagaattgaatgcctagctcttgtaagtggttgagaagtaggaaaacttggatgcgatgaatggaggggtggttggggtatttatagccccaaccaccaaacttgaccgttggctggaggcgtctgcgcgatggcgcaccggacagtccggtgcacaccggacagtccggtgccccctgccacgtcatcactgccgttggattctagccgttggagctcctgacatgtgggcccgcctgggtgtccggtgcacaccggacaggtactgtttgatgtccggtgtgccagcatgggcgattctgacttctgcgcgcgcagacggcgcattgaatgcgcggcagagagccgttggcgcggagacgaccgttgtcccggagttgcaccggacagtccggtgcacaccgaacagtccggtgaattatagcggacgagccgttggcttttcccgaagctggcgagttcctgaggccgacctcctttggcgcaccggacactgtccggtgtacaccggacagtccggtgaattttagccgagtcacccctagaattcccgaaggtgaggagtttgagtctgagtcccctggtgcaccggacaggtactgtgcactgtccggtggcacaccggacagtccggtgcgccagaccaggggtgccttcggttgcccctttgctcctttgttgaatccaaaacttggtctttttattggctgagtgtgaaccttttacacctgtataatctatacacttgggcaaactagttagtccaaagatttgtgttgggcaattcaaccaccaaaattatttaggaactaggtgaaagcctaattccctttcaatctccccctttttggtgattgatgccaacacaaaccaaagcaaatagagaagtgcataattgaactagtttgcataatgtaagtaaaaaggttacttggaattaagccaatataactacttacaagatatgcaaggaatgtttctttcttatataacattttggaccatgtttgcaccacatgttttgtttttgcaaattctttttgtaaatccatttcaaagatcttttgcaaatagtcaaaggtaaatgaataagagtttgcaaagcattttcaagatttgaaattgtctccccctgtttcaaatgcttttcctttgacgaaacaaaaactccccctaaaagagatccacctcttagtgttcaagagggttttgatatatcatttttgaaatactattttctcccccttttgaacacaataggatacgaaatgataaatacttttggaaagcactaagtttttgaatgtggtggtggtggtgcggtccttttgctttgggctcctttctccccctttttggcatgaatcgccaaaaacggaatcattagagccctcgaagtaatttcttcccctttggtcataagaaaatgagttaagattataccaaagacgaaatccggtccttttgcttttgagcttttactctctccccaaaggatgaagtccttttccttgatgctcatttctcccccaaagaagagagagttgctcggagtgatggcgaagtatgagttacggagtggaagcctttttcttcgccgaagactccaattccctttcaatatacctatgacttggtttgaaatagacttgaaaacacattagtcatagcatataaaagagatatgatcaaaggtattcaagtgagctatgtgtgcaagctagcaaaagaaatttctagaatcaagaatattgagctcatgcctaagtctggtaaaagattgttcatcaagtggcttggtaaaaatatcggctaattgatctttagtgttaatgtaagaaatctcgatatctcccttttgttggtgatccctaag

SEQ ID NO: 71485 - DNA, 2027 bp, Zea Mays
ccaatatctcaagattcgttttacggccgtaaggtgtgattccttagggtcggattggaatcttgcacatatgcatacggaaagcataatatccggtcgagatgcacataaataaagcaatgaaccaatcatcgaccgatataccttttgatctacggacttacctcccgtgtcaaggtcgagatgcccattggttcccatgggagtcttgatgggcttggcatccttcattccaaacttggttagaatgtcttgagtgtacttcgtttggctaatgaaggtgccctcttggagttgcttgacttggaatcctagaaaatacttcaactcccccatcatcgacatctcgaatttctgtgtcatgatcctaccaaactcttcacatgtagactcgttagtagacccaaatataatatcatcaacataaatttggcatacgaacaagtcattttcaagagttttagtaaagagtgtaggatcggcttttccaactttgaagccattagcaataaggaaatctcttaggcattcataccatgctcttggggcttgcttgagcccataaagcgccttagagagcctatagacatggttaggatactcactgtcttcaaagccgggaggttgctcaacatagacctcttccttgatcggtccgttgaggaaggcacttttcacatccatttgatagagcttaaagccatggtaagtagcataggccaataatatgcgaattgactcaagcctagctacgggtgcataggtttcaccgaaatccaaaccttcgacttgtgaatatcctttggccacgagtcgagctttgttccttgtcaccacaccatgctcatcttgcttgttgcggaagacccatttggttcctacaacattttggttaggacgtggaactaaatgccatacctcgttcctcgtgaaattgttgagctcctcttgcattgccaccacccaatccgaatcttgaagtgcttcctctatcctgtgtggctcaatagaggaaacaaaggagtaatgttcacaaaaatgagcaacacgagatcgagtggttacccccttatgaatgtcaccgaggatggtgtcgacggggtgatctcgttggattgcttggtggactcttgggtgtggcagtcttggttcttcctcatcctccttttcttgattattttcatctcccccttgatcattgccattgtcttgaggtggctcatcttcttgattttgcccttcatcatcttgagcctcatcctcattttgggttggtggagatgcttgcatggaggaggatggttgatcttgtgcatttggaggctcttcggattccttagggcacacatccccaatggacatgttccttagcgcgatgcatggagtctcttcattacctatctcatcaagatcaacttgctctacttgagagccgttagtttcatcaaacacaacgtcacatgagacttcaactagtccagtggacttgttaaagaccctatatgcccttgtgtttgagtcataaccaagtaaaaagccttctacagttctaggagcaaatttagattttctacctcttttaataagaataaagcatttgctaccaaaaactctaaaatatgaaatgttgggctttttaccggttaggagttcatatgatgtcttcttgaggattcggtgaagatataaccgattgatggcgtagcaggcggtgttgactgcttcggcccaaaaccggtccggtgtcttgtactcatcaagcatggttcttgccatgtccaatagagttcgattcttcctctccactacaccattttgttgaggtgtgtagggagaagagaactcatgcttgatgccctcctcctcaaggaagccttcaatttgagagttcttgaactccgtcccattgtcgcttcttattttcttgattcttaggccgaactcattttgagcccgtctcaagaatccctttaaggtctcttgggtttgagatttttcctgtaaaaagaatacccaagtgaagcgag

SEQ ID NO: 71486 - DNA, 292 bp, Zea Mays
ctgacttctgcgcgcgcagacggcgcattgaatgcgcggcagagagccgttggcgcggagacgaccgttgtcccggagttgcaccggacagtccggtgcacaccggacagtccggtgaattatagcggacgagccgttggcttttcccgaagctggcgagttcctgaggccgacctcctttggcgcaccggacactgtccggtgtacaccggacagtccggtgaattttagccgagtcacccctggaattcccgaaggtgaggagtttgagtctgagtcccctggtgcaccg

SEQ ID NO: 71487 - DNA, 370 bp, Zea Mays
gcccgcgggggcacacttctgcaccgcaccgtagtgttcatacagaaggcccccaatcgcttcaacgggtgacgtgtagtaccagtctaccaccatctcgtatgcctgacagtttcttcagaatgtcgaaaacctacagcggcacagtgtgtactaaatatgctatgcatgtgtgggcatagtacctaggctactatattgtcctcggtgagcagtgcggatcctatgttctcagccaagccaacagtgtggcaatcaagaccgagacaatcggaacgattcgaaccacaaacaactgaacaagccaccccgacatgaagattgctttccttttcttcttcttattttggcaaaataaatgaaggctttc

SEQ ID NO: 71488 - DNA, 266 bp, Zea Mays
tgcttggtcttagaccaattgaggtagctcatacatgttataacattgctgagcgtgttgaaatggttgctaatgattatggaattactgataaaatctttgctattgtgcttgataatgcctcatctaacaaaactgctatggaagttctaaaaccagtgttttctggttacattggccatttgattcctatgcctagtagaaatgaatatgatttgagtgctattttattgcatcagcgttgtggttgccatataattaatttg

SEQ ID NO: 71489 - DNA, 125 bp, Zea Mays
cagctatcctatcctgatggggcgactgcgtgcgacgacgtagggacaacagttccggcgtccgagtacgatccatcgtcagccaacggattgacacagtcgctttcggcactcataccgtagac

SEQ ID NO: 71490 - DNA, 1448 bp, Zea Mays
ggcctttctccgtgcgtgccgtcgaggaggacatgatgacgtctgccacgcttaggttatattagcgatgatgagtccaaatctgagataatggacaactaaggcccgtagcgtgacagcagtcgacatatgctatagagttggtggtggcattgtgtcgcttcggtgggtccaaggctgggaagacactcgcattctctcgcccttctcggactgacgcctggtgcgggtgcctcttagtttggagctgctccggctgggcttttttctccgcttgcgtcctctctccctatatatctagcggtatactacctatgtcgcctccagatgcccaggtcttcgtcgtgtccttctccggcaatgaataggtatgcccgcctcttctcttcccctcctgctttacgaaaccttggaagcgggggaggcgaggaatgggggtctttgatttgttgcctatgatactcgtcctctagatttgagaggaaaacagttctactccaaccctaaaccaaatacaatatcccatcactaattttaatgggcattataagattaatgcataagatacatatttaaccatatatgttactcacacagtcctaaaatataatttattttatactaaacatacattcattcattcagtaacttatgagtgcacattcattatcatttttttgaacatggacgaaaaaagagagctagaatggactatattttggaagtggggcattaaatatatgtttattcattcgtagaaataaatatatttattcattcgtagaaataaataaatgttcaaggtacactagtctttccttacattcagatctatgcaaagagcaagagcggtggctaattcgtcacaagatacactcatagagtggtggtattttcttctatagtataaccataatccaatataactacatatcggtattgtcggcgtttcgaacccaggggaccctcaaccgagccgaccagtgaattttatcgctgcgtgcccctgcccagatgggttggcgcaagatggaacacaagggggaatgcggcttgtattatctcgcactggggatgctcgtagtaggggttacaagcgtcgccagagggggagagagagcatgttcgtttgctcgtccccccccgcaggaaggccctggacctcccttttatagatgcaaggagagggtccaaatgtacaatgtgggggtgtagctatgcgctaacgtgtctggcagaagagtgcatgagccatgtgtacatgccaacgtggctgtcggagaagtgcttgagccctgtgtacgcgataacgtggccgtcggagaagtgcctgagccctgtgtacgcgataacttggtcgtcggagaagtgcctgagccctgtagaagcacagctgtcggtgctgctgggatcctgctgacgtctccttgcttccgtagggggatgag

SEQ ID NO: 71491 - DNA, 450 bp, Zea Mays
caaggcgaagcttcctgttgcgctcgaggttgaactcggttgttgtcagtctcaccccggtgggtggcacagcagtcagagcggggcgagcggtgttgttttcctgtcaagtcggtcagtgaaagggcgaagtgactgcgatcacttcgaccttgccgaccgaggcgcacgtgtcaggataaggtgtcaggtaatccccgcattaaatgtgcatgcgatacagtcggttggtgaggcgatttggccaaggttgcttcacaacgaagcctgccaaagctgggcttcgggcaagtcgagggtgcacccactgcctgaggaggccctcgggtgaggcgtgaattcgtccgggactactgttcccgcccgaggccgggttcgggcgaggcgagattgcgtcccttggtagatgaggccttgacctgaaccgcacccatcagtctttgcggtttg

SEQ ID NO: 71492 - DNA, 631 bp, Zea Mays
ctttttcctaccgttatgctgccgaaattccgatcgttcgttcattcgatcattcgatcgttcatcgttcgttcatagttcctattcatcgttcatcattcgttcatagtccctattcatcgttcttctagataatctttgtcctgccgttatgctgccgaaattccgatcgttcgttcgttcgatcatttgatcgttcatcgttcgttcatagtccctattcatcgttcatcgttcgttcatagtccctattcatcgttcttccagataatctttgtcctgccgttatgctgccgaaattccgatcgttcgttcgtacgatcattcgatcgttcgtccgttcgttcgtccaaataatcttttcctggcgttatgctgccgaaattccgatcgttcgttcgtccgatcattcgatcgttcgtccgttcgttcatagttcctattcatcgttcatcgttcgttcatacgaactattcactatcactattcaccattactattcatcgttactattcacatacactattcatcatcgttactatttatcattactattcatcatagttactattcatcgatgatatctataattacttttccatcgtcactattcatcgttactattcatcga

SEQ ID NO: 71493 - DNA, 675 bp, Zea Mays
gtccggtggtgcaccggacaagccctgtaggctgtccggtgtgccacccgcgcgtgctctgactcttgcgtgcgctggcgcgcattcaatgtgcctgcagtcgaccgttggcgcgaagtagccgttgctccgctggctcaccggacagtccggtgtgcaccggacatgtccggtgaattatagcggagcggaaatccgaagctggcgagttcagagtcgctctcctctggagcaccggacactgtccggtggtgcaccggacagtccggtgaattatagcgaagagtctttgagatttcccgaaggtgaagagtttggcttggagttccctggtgcaccggacactgtccggtggcacaccggacagtccggtgcgccagaccagggcagccttcggttatcccttgctctctttgtcgaacccatttcttagtctttttattggctaagtgtgaacctttggcacatgtataacttatagactagaacaaactagttagtccaattgtttgtgttgggcaattcaaccaccaaaatcatttaggaaataggtgtaagcctaattccctttcaatctccccatttttggtgattgatgccaacacaaaccaaagcaaatatggaagtgcataattgaactagttgcaagattgtaagtgcaaaggttacttagaa

SEQ ID NO: 71494 - DNA, 990 bp, Zea Mays
caaaactctccctaaatgaaatcctcctcttagtgttcaagaaggttttaagatattaattttgaaaatactactttctcctcttttgaataagataccaatctgaaatttaccaattgaaaatccttagttttaaaattaggtggtggtgcggtccttttgctttgggctcatgctctctccccctttggcataaatcgccaaaaacagaaccattagagccctttttaaactactatctcccctttggcaaataaaacatatgagtgaagattataccaaagccggagagatgctcggagcgacgacgaaggatgagttacggagtggaagcctttgtcttcgccgaagactccaattctctttcaatacacctatgacttggtttgaaatagacttgaaaacacattagtcatagcatatataaaagagacatgatcaaaggtatacttatgagctatatgtgcaagacatcacaagaaattcctagaatcaagaatatttagctcatgcctaagtttgttaaaagtttgttcatcaagtggcttggtaaagatatcggctaattgatctttagtattaatatatgcaatctcgatatctcccttttgttggtgatcccttaaaaagtgataccgaatggctatgtgtttagtgcggctatgctcaacgggattatccgccatgcggattgcactctcattatcacatagaagaggaactttggttaatttgtaaccgtagtccctaagggtttgcctcatccaaagtagctgcgcgcaacaatggcctgcggcaatgtactcggcttcggcggtagaaagagctacggaattttgcttctttgaagcccaagacaccaaggatcttcccaagaactggcaagtccccgatgtgctctttctatttgtcggggaccataattaggggtaccctcaagacgcctaattctcagctggtaacccccatcagcataaagctgcaaaggcc

SEQ ID NO: 71495 - DNA, 462 bp, Zea Mays
ctcactcgtcggctttgggacccccctgtctcgaaacgccgacagttggcgcgccaggtaggggcctgctgcgtgctgacgaacagctccccgttaagctccagatgggcagtctccagcaacctctccggcccggggcggtgcttcgtttcgggactcttgagttcatgtccttcgacggcagctacgacatgacacttcttccaccgccgcgcgacaacgacaatggcggccgacaacccgcccgccggcggcggaatcgacgacatcttccccgcgtggtggaagagcaacattcgagctcgctccgttctctcccccgccaacggaggaggaggcgaggccatcaaggccaagcgggaggccgcgcttcgttggccgtcgagcgaatcgacgcccccggcgccccgacggaaggcacgccggacgtcgacctcgcgttcaagacgaaggcaagcgccg

SEQ ID NO: 71496 - DNA, 1251 bp, Zea Mays
cacccgtgacccgttcctcgaacggatcgcgcacgcgcaacggccgcctcgccaaccactcgccccgtcgcattaactccgcggcgggacacgcggcgcctctggcgggagaagcgcgcgacgcttcgccttcgccgtaataatcgcgtcaaaaagaggtacgccacgtcgttcgatttcgtatccttttcctttttcctctttctctatctcttgcaacagggaccgggaaagggggataccccgaaaaggatccttttccgcgaaggaaccgggctccgagccccctgtcggtgttttgggtccgaccgcacacccggggttgcccctcaaggtgtttttaggagtaggacagtgtcgacgactgtagcaaaatggttcgtgccgttcgcacgagggacagtagacaagatttgcaggttcgggccgcttagaagtgcgtaacaccctacgtcctggtgtgtatatgagcgtggttacaagagggtcctctggatagagggcgcagagagtttatgtgggtggctaagtagaacagggccgatcgttctgaaggggtgccccctaggccttatatactcgaccgtggggcagtacatgtggatatgataacaacaagtagctaaaagatagtgaacctcttgagtttatccctacgtaaccctcgccgacttatcctcgcatggctctgttgcatgggggcttcaacgcgggaaagtcgggtctctgttgcgattcattcgttcgacgtttgtgggccgtctgggtttgcactaatcagtctcacgtcttcttttctttgttggctgtccttccctaggcccacgaaagaatgaccttacgaattattgggcccctgggcctttcgtgaggccttttacttctttggtggacccaggggatatctatcccccacaagcccccgatctttgggttgatttagaagtaatcaacttaaagatccaaggcccaaaaaatgacttcctgctgtcttctctagctctgatcactcgttcgaccaaagcttggttttgtgcttgtgccttagaggtcggcatttttggattgtaagactctggacttcattgggtgcaccggaggtgcacccaatgggtgtagcccccgacttttgagtagattttagaagataatctactcgaaggtcttcttcccaaggttatctccattcgcgctcctgcatctcggttgaggatcggtcttttcagtcttgctctacgccttagaagtcgg

SEQ ID NO: 71497 - DNA, 194 bp, Zea Mays
ctgagtagtaatgcgatgggacggctagtgtaatcatatcctttgcgctgttgactagagtcccaatgggtgtagtgttgcatgaaacggcgtccgccgtctgacgtgtcttcagaagggtggaagtgcttattgaatgccttgcgactgttcagtgaccgcggttagaagtgagcggttgcctttcccttcta

SEQ ID NO: 71498 - DNA, 3440 bp, Zea Mays
ctcggcttggaaccttccttctcccaaagctttcaccctttttgtgtccaatccacccgtgactgatagcaatttgggtcttagagtgcgaccttctgctgaggaagtcagtgctttggttgcttcgctcggggcaattcctgatgatgaacggcaggtttatttcgaagtgcctctgaaccccagtgatgctgacataaatgatatgcttgatctgctagctgaggattcatccgatgttgctcctgatggtacattggcagtggtgccccttccagaggttgatgcgaccttggatgtcccaaaacctgtcagtactcgcccgaggcgccctagccgaaccagtcagcccgagccttctgctgatgagcagaaaaagaagagaagacgcctccggcgagtatccagctttgacgaggatgccagtaccttagctcctgctgccgaagaaatgactgcaattggccttgctgacattgatcccaatgggtgtgctccgcctgctgctgaccccaatgaggatgttgtttgtgctgttactgtggaggatgaggaggaagaaaatgaaattccattaactcggaaaaacagtcggcagttcgttgctagcggtagaagtagaggtgggcaaaaaacccgatacccattacccaaacccgaactacccgaacccgcacccgatctactcgaactcgaactacccagacattagttcggatcctaagtatgaaaacccgaaattttttcgggtaaatcgggtaacatgttccggtacccgatttacccgaactacccgaaatcattacaatatatgttatttgtgctattgatgtttatgagatgttcactggctctgcatgcccatgcaactgcacactagagagtactgtactgtaatgcaggaagctgacgactgacgacgaaatgtagcttggcacctagcgtacaaatggagagagtatacatctcaatccatgtgattaccccaagcagtgccaaatggtatacttaggtagtacgtactagcatgcttgtgaatattatatatttattcaccaagtgctagctgtgatgacgttcgttactttgattgagtaataataaactggaggcttgttccatctcacatcacaatagcttgttttaacaatctttttttatcggtagctgatcacggttagacggttagggcggcttatattcgtcattgcatgtgtcgatgtttacgtgtgcctctcctacttgaatattcatttatggatgtaatattatatacaggagccatacagtatagatgggtatttttctatgtagtgtagtgatcgggtaaatcgggattacccgaacccgaacccgattttttagatacccgaattttcgggtacccgtttatttcgggtatacttcgggtagcagtttttaaaacccgaaatttaaaaaacccgaattacccgacccgaatttttcgggtaacccgaatgcccacccctaggtagaagtagtggagttccttctcccgccttgtctgcccttattggtctgcaagaactgtccatggccaattttgatcaagctctagaggatatggtccctgagaacttgttgttggaacctgcagatgctgatgcgacagaaacttgtgcagccgtgccagatgctgggttgaggtcatcctgtgcctcgtcgaccttagagcatgatctcgagggtcgggatgctgacctggatcgttctgatcccatggaagtagttgaaggcccgtcaaccttagaggtggtcacggcagagagcctgggtcccaagaatggcgctgatatatgcccagcccccgaggatgtcgtcgggagtgacttagctcgggcgaagagtgtaggccactgcccagcccccgagggtgttgccggggatgatccggctcaggtgggcagtgccgactgtgacctagcccccgagggtgcccgagcagggtctccttcctgcacttctatggacgttcacgcgggttcacctccacactctggcggcatggtggtggctcaaactccagatcagggggtcgctttagagggcagcatccccactggtctggcgttaggctctgctgaatgtactgagctcgttcctgctggtctgctgcaagctgcttcgggtggtggtcttacacctgattatccactgatctctcctgatttgggaatatcttcgttcttctccaacctccaggtaattgtgttgtattgtagcttaatctctacattgtatgaactgttgccattctactcatctgttcttctcatcaggctttagtgaatgggatggccagccagctgagattgcatggtgcttctgtcccggaagtggcttcgtctcttgcatgctggaatccagtgtcgcttcaacgttgtgtgtctgagttggaggcaacaaatgctggtcggtgttcttttccttcttcttctttgcctttgctcgtggattgttttaccttctgaccttatttcatttgattactccttgataggaatgactcggcagattgcagttcttgaagaaaaacattcccaagatcaagctgaaatggctcaacggtgcgctgacttcgaggagaagtattctcagagtcagatcgagttgagtcaggtatctgcggctttggatgatgccaacgctctgagttcttctcttcatgctcagcttgactctgagaaggtagcttacgaacccgtgctttgccttatcatgctcttggattctgaatgagttgattttttgcttgtaggaagaaaaacgcatccttgctgcttctcgcgacaaccttgacagattgtaccaagattccagcaactcgctgaccatcttggagaggagccaccgctttacgatggaggagctggacaatcagcgtcgtcagctgcaagaatcctcggacgaagtgacccgccttacacagttgctatcagcaaaggataccatcatcaagggactccgagcttctaagaaatccattgctcaagagttagaaactgcccagcaggctgttaaagttgccgaagaaactgctgccactttcaaagctcagcgcgataaggccttggacaaggccattcgggcgggacgaatcttgatgagaagacctggcgtggttgtccctgaagatataagagtcgatgtgaatgctgcccctgactcctcgaatcgcccttcttcgtcagtcgttcctgagaaaaacattggaaaataaagaaacagttcgcgtgctctgagcgcgcagttagcatgatcaagtacttgttagaggttatcggcttatcattcaaatgacatcatcattttcttattgtatccgaatttcgaattcgtggtaacgctacatgatgattatgaagtttgtttgtgggatatggaaatcatcccctgaactgcataagcgcgagtatgct

SEQ ID NO: 71499 - DNA, 144 bp, Zea Mays
aaaccgagtaacatggcgaagcctggccacgctactcctcctggtcctctcctgcggaagcagtaacccactcgaccatctatcccggtggcggggatggaggtcaagtcacaccatcaaccaatcaacctaaggagtacctgc

SEQ ID NO: 71500 - DNA, 799 bp, Zea Mays
ctttgttgtctgggaggcaatacaagaagtcatcttcatctgtaccattaaacactagggcccctttcgggtacttcagttctcgggcatagtgtttagcttcaaaaatttcttcctcagataatctttttcccgaagcatgtcgaatgatataatcaggatattcagaaggtgcttcgggagcaggggattcgacttctttgcccatatttctctcaaaagctatatcaatatttggaggtacttcttcggccccttgctcggctgtggcaagcttcgtctcaacaggcactgtgggttcggcttcggtcccagcctcaattgctgcagttttaccttttatctgcctagtataagcttcagcctgtgcctcggcactttcggcaaccttctttatggaagaggggcatttggagtctgttgtttccaaaatgtctaaaacatttaccatccttttccttctaggggttatcacataacttttttctgcattcagcactgctgcttctgctgaaggacttagaatctcgggcatctttgctgcttctttagtttttgatctttcaaccttacctttatcaaccctcatttcaataagcttagtcgaaggcaccttcggcattgtagccggctcttcagtcttctgcgtgggaggagcaacttcttttgcttcattaaccgaagaggtttccccgccaaacttaggcactatggtcggttcaatatagcgcggtcggtgggtaaggaccttcaattttttcctcttcggcgcaggctcgcttggagcagccgaagcggc

SEQ ID NO: 71501 - DNA, 580 bp, Zea Mays
gtctcagcaactgccttcttgtcttgagacatcttatcttcggaaatgacgaaaacaggtccttcaaaccgaagctaaaaagcttgagagctatcaagcgctagtaagaacaagttaacaaattgagaaaataaggcaaatggcacaagcagtgtatcaaatgcaggcggtgtgagatcctatttatacgcccagcacgctccaagttggagggcccgtatgtcatcgactgttgctattctagcaaagggaaggtgttttttcggaccttcggcttagggccttcgtccatgtcgcaatctgaattcgttatcctaacaaattaatattgcgaggggctactgttgggggccttcgtcttccgaaggtcctcaaaaacatgatttaacaatgtttccggagtgtaatacatgaacaggtaccttcggactcggatcagaaccacagtgtgagaagcacaaataatacgaaggtggatgcagcgccgaagctacgcgcaagggagcttcagcatgacagcaggaaagggaaccgacttaaaggggaaaaggctattagacctcgatagattaccttagag

SEQ ID NO: 71502 - DNA, 584 bp, Zea Mays
ggaatagaaagtaaatgggcatttgagttatacggaatacgagaataatcaaaggagtagttttgattaaccgtctttttcttggacgaggagtcgtcatcgtcccttggtgaagaagatgaggcatcgctgtcgtagtagatgatcttcttgatgcgcctcttcttcttcccgtccttcttcttgtgacttgagcctgagtcagtaggcctatcatctcttggctcgttgaagagggactcctccttatcgttgaccaccgtccccttacccttaggatccatctctttgggcgattagtcctttaaatgaagagtatgactatgataccaattgagagcacctagaggggcgggtgaataggtgatcctgtaaaatcaaacactaaatagccacaaacttgattatataaaagttagtacgagttaatcaagttgctatgaagcgatctcttgcgaacaaaacaatcacagaagagcaacacaagagacacgtgttttttatcctgtggttcggccaagtaacacttgcctacttccacgttgtggcgtcccaattagacaagggttgcactcaaccccttt

SEQ ID NO: 71503 - DNA, 1586 bp, Zea Mays
ctttgatttgaacttctcactcatttagcacataagaacttaattaatatgtgttggacatctaatcaacaaaatacttatagaaatggcccagggcacatttccctttcagtatgtacacgcgatactcctaagtatacctcttctagtgatgaagaatatgatgatgatggcgtagactatagcaatctttttaaggacttagatagatctagggtagataaaattaatgaattaattgatgctcttaatgaaaaggatagattgctagaaaaacaagaggatctactttatgtagaacatgataaagtagtagaagtagaaaaatctcttgctttagaaattaagaagaatgaaatccttgcatttgaattgtcttcttgccattcctctattactagtcttaagagtttcaatgatgacttgaatgctagaatagagaaactatgtattgctagttcatccattcttacgctctattcttgacttgtgtgtgtcttattgctgcgattgagttcttatgtgtgctttctactccctccttacaccggttttgattaatattatttgtgtaaggcgtgagagactccaacttgtggagattcgtcacaaataggatttgatataaggaataaatcggtggtactcaagtttgatctttggataacttaagaggggttgagtgcaaaccttgatcgaaggaggacagcacagcgtggagtaggcagtggccgaaccacgggataaaatcgtcgtgtctattgtacatttacttcattgtgattattgtattctgagagttctcatatctcacttacattattgctcctaagtttgatacacatctcaaaggagcaatcaagtgaagagttctcttcgtctccatctctactcataccaacttggttttagcgttcactaacatttattttaaaaccaaatttgtggtgtttagaattgattttagcagggtcacctattcacccctcctttaggtgctctcagtcgcggagttgtggattactcaaagtgtgcttgtgtaatagctccatgcacctaggggatccttttgttccccaaagggcccaaggagtcgtttcatcttcatttggaaggccccgattgccttttgtccgtaggtgcatcggaatgtccggtgcacaccgaacactaaacaatggccgattaatttccatattcgaccgatctgactggtgagtcagtcgttggagcctttggtcgcctagcacactggactgtcgggtgcacactggactgtccggtggtgacttccgaccgttggcccagctgacgtggtcgccacgtggtcgtcgttgatcgcgcgctgaccattggcactagcaagggcgttcgctgcctggcgcaccagacatgtctggtgcccaccagactatccggtgaattatatccagcgagcctcaccgtcttcccgagagtggcttattcgaccagccgaagaccagccgaggatcagccaatcagcttgggcatcggactgtccggtgcacaccagactgtctaacgaggcccaatctggtccaacttagctagactttctccatttg

SEQ ID NO: 71504 - DNA, 283 bp, Zea Mays
aattccaccaaaatgaagcgatccaacggcccctcatgcaaaagaaaaaaaaaatgtcgtccggggcaggcggaattaggcccgggccgtggcacattttctgccttgggtttgggccacatctggtcctcgtagcgatagagaagtccaacagtcacgccccttcgaccatcagcaagcagttcgatcgcggcaccgcgacaagcaactggatgtcaacgatgagagctcagttcctcccagctgcaaagggattcgctgtattcgtagatgccggctggag

SEQ ID NO: 71505 - DNA, 339 bp, Zea Mays
cccctctctttgaacgtcatgtgcaggctccatggatgatgtactaaatctgtttgttagtcacagtttgtcattaaccatgttttttgtactctgctacgcataatacacatatattgtggttgtagcaatggcctagggtgtgcatgaacacatttgttgttgtattgggctaattgtgtcaatatggccctccaagctagggctgggcagatttacatcaacagtgaagaactgaaccgaaccgacattgaatcactgaaaatctcgattttcttggtgttcggtgatcagttcgattggtgatcctgtgaactttggtatttgggtgtggcttcg

SEQ ID NO: 71506 - DNA, 212 bp, Zea Mays
ggacggtgctgggttttaaatagccgtctatagcttttgttatagcctgctacagctgttttagcagacaaaagctatgcgcgcgctatagactcatttagtccgttgtagcccactatatcccgatatagcccgttattagcacttttgagaagcacgctgctaaacccctcagcccgctatttaaaaccatgggatggtggggtctatgg

SEQ ID NO: 71507 - DNA, 183 bp, Zea Mays
ctttctctcatctcctcctcctccttcttgttcctttcttttgctccctggtgatactcgctgctcatcatctaggtacatagcctcaaaggttgcttcaaggtctttggtttccttctccacattatactgcttgtgctggtcagctaattcccaatccttgatacaagagagcacctcaac

SEQ ID NO: 71508 - DNA, 230 bp, Zea Mays
atcctcttcactaataactacagtcagtgattatctttcattccctccttacacaagctaaaaatcttggcagctatagcaaaccttgacatcttatttgtaaaagaggaacgccttaatcagcatgttttcacagaactagtttgccaaggtcaaagcagatatacttcagtggtacatcatattccatcaagatatgagcgatgatggtgttactgtacttattgcag

SEQ ID NO: 71509 - DNA, 697 bp, Zea Mays
ctaaattactaaatatggaagttaaagctctattttagtttccctatttaacaatttgagaactaaaatggaataaagtggagggactaaagtttaatccctacaaaccaaacaccccctatatatctagcagcttactcgtcctcatatctcattttaaacttcactctataaacaatgtagtctatagtgtaaaacattgttttgcatagccatatgcacgatgtaataaccttctacttggttacactgtactttttacatttagtactttgagtgttacatcttatggttgttattcctttgtcataggaccattaactctagtagccgcatagcgggtaggcccgttttgtttcagtattttgggaaattcgacctcaatcaaatccatgctcaggaacaactgtatccaaggtaccataactgcatgtggatccaaaccaagatttcatagtacctttaggatttgtttgggcactctagtattcaccccaatccacatgtactgaggtggtctcaaattttttggctccgcgaatcatagcatcaaggttaaaaagcttatagaggatccccatcaacctatccaaaactggctaccaacacccaaatcaagaaactacaaaataaaaacttgcaacagaaaagcaattttgcaattctgcatcacaaggctaaacttgacaagggatag

SEQ ID NO: 71510 - DNA, 394 bp, Zea Mays
  misc_feature (393)..(394): n is a, c, g, or t
ggtacatcatgccagccaaatcataggatagaaaactttccttcaccaacattattcctccataattcctgtaatccaaagaagcacttatttcccaacctgtttgtgcaaacgtgtgctttaggttagcgtttcccaggacgctttcagtcatctgttcgtctgctcaacgaatttgcagtcctcggtgacaactgggcaagttaagaacgttaagaatctcagaatgccacaacagaaatttcctgatgaaacggttcgttcaataaagcaatttctcaagtatctttttttaacaaaaatagctgtatatttttcctccctaggagtcccaaaactttctgatacacagtatgagaaataaaattgagctctgaattcaagcattgatcnn

SEQ ID NO: 71511 - DNA, 319 bp, Zea Mays
agagtcaagtcttcccttttcctctcttcttcttttagtcattgtttctagcacttggataaccatgttagtacataaaacaattcaccaagtctggaaacatacttttttccttgatttgcactttttcaatctttggtacattaggacttaaagaatatgtgttggacacttaatcaccaaaacattatagaaatggcccaggggcacatttccctttcaatgagacgcacaacacttgctgagaatgacatttgatgatgccaggtgcctcctaccatcaaggcagttgtagcctcacatgatacgtagaagcatg

SEQ ID NO: 71512 - DNA, 543 bp, Zea Mays
ccatccgcatctcgctcaccccacaaccttttttttcatactcatgtcctcctcctctgtatctctatcgacattgtatgtatgctcctcctctcaatgatgattctaccatcgacactctttctcgaagctcctcctctaccatacattcacttattgatacattcatccatatcagtatggatattcatatggtgctcctcatacgctcccttccctgcttggtgcttctctcccaatatgtttgtgttccttaatatggtgtttatcctctccagccacaagagagagtgcacacggacatgtgatgtggcttggaaccaatttgcttactcctgtgttccatgcatacatagagctttaggtgacgtgagagaaggtctgaacggctggcatactcctgtgttccatccgtatttggatacacgcacgcgtgtgcagctgccagcttgggggattgcatggacgcatcatggtctgaatggctggcatcctggcatccattccattccatatggccgggccgcggcggccgatgatgac

SEQ ID NO: 71513 - DNA, 265 bp, Zea Mays
gtcgcatggtgcaccggacagtccggtgcgccagccacgtcaccaaagtcgttgggttctgaccgttggagctctgacttctgggcccgcctggatgtccggtggcgcaccagacatgtactgtagagtgtccggtgcgccacaacgcgcgtgcctgacttctgcgcgctctggcgcgcattaattgctgttgcaggtgaccgttggcgcgaagtagccgttgccccgcagttacaccggacatgtccggtgaattatagcggag

SEQ ID NO: 71514 - DNA, 477 bp, Zea Mays
caaccaaggatgtaacatcccaaaaatcccaacccaaggtttggaaccctaacctcctaacccccctctcatcttattttctccctaaactccacccttggatcatctcatcatgtgcatacacttgaaatgataggagcacctcacatagactatattcatcactcaagatcatttagaaaattattgattcaaaggaaaaagaaataaaaagaaacaaaagtagaaaatgaaaagaaaagaaatataaaacagaaaaagaaaaagaaaaaaacctcccccctcggctgggccaattctggcccaaacccgcgtcgcgcccgcgcttcttctccccctctccccggcccaggcggcccagcttagcgcgcccgcgcctccactgacagatcggccccaccagtcagtgactcaactccctccctctcgcgccactctctctctctggcagcccgggcccgccagtcagcatcgtcg

SEQ ID NO: 71515 - DNA, 363 bp, Zea Mays
ctcaaatccagtctaaatctcgagggcgagattcctttaagtggggtaggtttgtaacatcccaaaaatcccaacccaaggtttggaaccctaacctcctaaccccccctctcattttattttctccctaaactccacccttagatcatctcatcatgtgcatacacttgaaatgataggagcacatcacatagactatattcatcactcaagatcatttagaaaattattgattcaaaggaaaaagaaataaaaagaaacaaaagtagaaaatgaaaagaaaagaaatagaaaacagaaaaagaaaaagaaaaagaaaaaaacctccccccctcggctgggccaattctggcccaaacctgc

SEQ ID NO: 71516 - DNA, 361 bp, Zea Mays
gcgcgggcacacgaagctgggccgcctgggccgggggagagggggggaagaagcgcgggcgcggcgcgggttgggccagaattggcccagccgaggggggaggggtttcttttctttttctttttctgttttctatttcttttcttttcattttctacttttgtttctttttatttctttttcctttgaatcaataattttctaaatgatcttgagtgatgaatatagtctatgtgaggtgctcctatcatttcaagtgtatgcacatgatgagatgatctaagggtggagtttagggagaaaataaataaataagaggggggttaggaggttagggttccaaaccttgggttgggatttt

SEQ ID NO: 71517 - DNA, 272 bp, Zea Mays
gcgggttgggccagaattggcccagccgaggggggagggttttttttctttttctttttttgttttctatttcttttcttttcattttctacttttgtttctttttatttccttttcctttgaatcaataactttctaaatgatcttgagtgatgaatgtagtctatgtgaggtgctcctatcatttcaagtgtatgcacatgatgagatgatctaatggtggagtttagggagaaaataaaataagaggggggttaggaggttagggttcc

SEQ ID NO: 71518 - DNA, 3097 bp, Zea Mays
aaagcacgaagcaagaaaatcacattgctgatttgcaagagacatttgccaatttcaggcaagctggcctaaagttaaatccagaaaagtgtgtttttggggtgaagaagggcaagtttcttggctgtttagtatcaacgaaaggaatcgaagccaacccgagcaagatcgaggctatcctttggatggagccaccaagcacaaagaagggggcccaacggctggcaggaagactagcatcattgaacagattcatatccagatcagcagaaagaaatctaccattctttgaaatactgaagtcagccgacgtttttcaatggggcccagctcagcaaaaagcattcgaagagttgaagcaatacttgattgatttaacaacactaactccacctttgccaggggctccattgctcttatatgtggcagcttcacactctgcagttagtgtggcgcttgtgcaggagaagctagatggtcaagtcaaaaagcaggctccagtgtacttcgtctccaaagttttaagtttatcaaagaaaaattatacagagttggagaaggtgttgtatgctgtgttaatggcctccaggaagcttcgacattattttcaagcatatcacataattgttccttcgtcacagcctctgaaggacataatgaggaacaaagaagctactggaaggattggaaaatgggctacggagcttaatgaattcactattgactatgtgcatagatcctcaattcagccccaggcattagcagacttcatcgttgattggacgctaggggctcaggaagaagaaactaataaagacgtcgaagcttggacagtgttctgcgatggttcctgggggacctttggtgcaggagcggctgctgtcctagttgcgccttgaaaagtcaaaacatgttatgcagcaaggcttgactttagttgcacaaataatattgctgaatacgaagcacttctgttggggcttcggaagttaagggcaatgggaataacaagggccatcctgaaaactgattctcaagtcatttcaggccacatagaaaaaaagtagcaaggcaagagacccaaagcttgaaaaatatctggatacagttcgaaggttggaggcttctttcgaaggtttttctgtcaagaatattccaagaggagaaaatgagcatgcagatctgctagccaaatcaacagcacagggactccctttaccttcggaagtattttttgaaacaataaaagcaccttcagttgaacttatggagagagcagtgcttgcaatttccctagtacatagtgaagattggaggactaaaattatatcttttatccaaagtaattgcctttcggatgaagaagcttataataagagaatggaagtaaggacaagaccgtatgtgataatagaaggggaattatataaatatggagtctgttccccactccttaagtatttatccagagctgaaggtattgaattaatgaaggagatacatgcaggtctgtgtggatctcatattgggtataggcccttcttgggaaaagtatttagacaaggattttactggccgaagacagcttcggatgcgaaagagctagttcaaaaatgtgaaaattgtcaaaaatgtgtaagagaccagaaacaaccttcgtctctcacccagctaatacagcctacttggccattgcaaagatggggcctggatttattaggcccacttccaccagtgcaaggtaatttgaaatatgttgtggtggctgtagaatatttttacaagtggattgaagcgaagcctttggctacaataacttcggttacagtccagaaattcttctagcagaatattgtttgtcgcttcggcgtgccaaagactataactgtggacaatggaacacagtttgatgccgaaacgttcaaggatttctgtgatcaaattggcacgaagattcattttgcatcagttaggcatccggagtcaaacggactggtcgaaagagcaaatgacattataatgacgggaataatgaagctaatcttcaatcagtccagaggaaagtggccagatgagttgattaaagtggtgtggatccacaatacaaccatatcaagatcaacaggttttataccttttaaactattatttggtgatgaagctataactctagaagaagctaaaacagggtcaataagaacagcagcttcggcagaagacgaagctgattatcacgtaacaaaagatactatatgtggcagaacctcccaagttattgggcccacatgcacctgtccttgtctcaaagacctcagacagctatgcatgtgcaccagataacttaacaggatccgtccgattgcccaaggacatcggataaaccacttacaaccagaaccgcgggattaagtaaacacaaatcacacacaccattattttgcagcggaaatcttattaccaaattttacaagttacaaaaattttacttcttacatgatcagagtgattactacagtgattcaagaaagaaactttgaactgttataatttatttatagttttgaaatatatgctagctcaagtgaccatcctcaataagaagataaagacggggtatacttatataagaaggccgagcccactggcacttaccaccatcaacagcagcacaagactataacctgaaaaacaatagggaataaaccctgagtatggaattactcagcaagacttatccgactaaagaaaagactctcaagggtatgctggaattgggaatcaaggagaggctttagcaagaatcaacttagatacttttgcagaaatagcttactaaagtgaatccttactttcaatgttttaacgccagattaaatattaatagactctgtttgcatctggtctaatttcaccatctcatcaatacaacatcatttttattcttgaggttcacattctgacttaggttgtattgtagggaagtgaccaagtcttcataaccacgaaggtacggcaatctgaatcgattatactcagctgaggatctccgatcacacgacatatgtagcacttaacccttgcatatgtcaacccgcca

SEQ ID NO: 71519 - DNA, 548 bp, Zea Mays
gtattagcttaaactgtaatagaaatccagaccatgtattagcttaaactcttcgcgttgccataatagaaatccagaccatgtattagcttaaactgtaacaaatcattttgaaccggaggctacaatgaggaattttacggggtcctcaaataggatgctgcttgacttcatggatggtggatgtaaacaacaccagatggaacgcaaccgaacaataggttacagtttagggatacaaagactaggtaacatccagaaactgcaagaggttatctcctgatgaacatctagggccaagtgtattaagccaaacactatatttatctgaattcaatgctacatgttgtctgattcagatactctcgtcagggaaaagcaacggcagtcattcattcattcatccagggttgttggatgcacgtgcattcagcaggggctgaagcgccttcaccacgatgctcatgttgggtcgaaagtcagcttcatattgcacacacagtgcagcaacagctgcaaactatttgaacaacaaagggaacaggaaa

SEQ ID NO: 71520 - DNA, 2829 bp, Zea Mays
caaaaaaaaaaaaaaaaaagaagtgcctctcagccggcttgcatctctcaacaaggcagagatcccggtccttatactaggctccattgcctcagtcatcagtggagttatcttcccgatctttgcgatactcctgtcaaatgtgataaaagcgttctatgagcctccacatctcctaaggagggattcacagttctgggcttccatgttcttggtgtttggtgcagtgtacttcttgtcactccctgtcagttcgtaccttttctccatagcagggtgcaggttgattagaaggatccgactgatgacatttgagaaggtggtaaatatggaggtcgagtggtttgatcacccagaaaactcaagtggagcaataggtgcaaggttgtcagctgatgcagcaaaagttagaggccttgtgggggatgcgcttcaattggttgtacaaaactcttcgacactagttgctggtttggttattgcatttgtgtcaaactgggagctatccctcatcatcttagctttaataccactcattggcctaaatggatggatccagatgaagtttattcacggtttcagtgcagacgcaaagatgatgtatgaagaggcaagccaggtggctaatgatgcagtaggcagcataagaacagtggcctcattctcagctgaagagaaggtcatggatttgtacaagaagaaatgtgaaggtcctctaagaacaggaatcaggacagggattataagtggaatcggttttggagtttcctttttcttgctatttggggtatatgcagctagcttttatgctggtgctcggcttgttgaggacaggaagacaacctttcctaaagttttcagggttttcctagctcttgcaatggcggcaattggagtgtcgcaatcaagtacccttacatcagattcttccaaagcaaaatcagctgcatcttctatatttgcaattgtagatcgaaaatcaaggatagacccaagtgaggatgcaggggtaactgttgaggcactacaaggaaacatcgtattccagcatgttagcttcaagtatcctaccaggccagatgttcagatattccgggacctttgcttgacaattcatgctggaaagactgttgcactcgttggagagagtggtagtggcaaatcaacggcaatttcattgctccagaggttctatgacccagatgtaggccatatactactagatggcgtggacatacagaagttccagcttaggtggttaaggcaacaaatgggcctggttagtcaagaaccagctttgtttaatgacacaataagggcaaacattgcctatggaaaagatggacaagcaacagaatctgagatcatatctgctgcagaattggcaaatgctcacaagtttatcagttcggcgctgcagggatatgacacagtggttggagagcgtggagcccagttgtcaggagggcagaagcagcgagtggcgatcgcccgtgcaattgtgaaggaccctaggatcctgcttctggacgaagcgactagtgcgctggatgctgagtccgagcggatcgtccaggacgcactggacagggtgatggtgaaccggacaacagtgatcgtcgctcaccgtctgtcaacaatacaaaatgcagatttgattgcggtcgtgaggaatggggttatcatcgagaagggaaagcacgatgccttgatcaacatcaaggatggcgcctatgcgtccctcgtcgcccttcactcggcagcctcttcatagcaggtgatggtatgggatcctgcatacgtctgctaagacatatatgaacagagcgagctggcacaacctgtgtagcaatccaggtgctagtctctgttcctctatttgatggcatacataattgcttatacctaagcggagaaatgttacaaatagcaaggaccagatgtaaatgcaaggagctggtccttaagataactttttataatctataaatcttaatatgtatatgtagcttcgaacatagaaaccaaatagatgatggttatgctataactcatgatgttcttgctgtcgtttcccccctttatagcttatatgcaagtaatgataaccctgctcaggaaagaaagggcagctcccaaacgtttaatgataaccatatggctggaaaaactgagatgaaatgctgaagaatggcttctgcggaagcataaatttcatggcaaaggctatcaggttgcaacttctaaggtctggccaaaacagtatgtttttaatgtgaaaagggcatactaaacggaaacacaagttctattttgtaaaaaaaaacctcaactgaaggggcgggcatcctgatcaactgactctgaaacgaagtaactagtaatccaagtgatttccatttggctgacggggctcgttcggttgcgcatggattagagaaggattaaatcccttccgatttaattttaactaaaaagagatttaatcctctgttgcaattcctgtaatccccttcaaactgaaccaggcctgacggggaagtgtacaatattttttttttcacgctgacaaccaaactgtacacacgtgtttctgctcttgcaaaagagcgagcacatgagttaatttctggcaagatttactgaaacctatgaggaaaaaaatatatcgtacccctcccaatttgcattttctagaaactagaaaagcggagaactaatttggcaatagcactagcgactttggctatcaacaataatcagtaggagaaaagacgggggaatttgtgaagcagtaaaacggaaaaactagacacgattgcttaagct

SEQ ID NO: 71521 - DNA, 3928 bp, Zea Mays
cggcgagtgggagacggagcacggatgctttatcccaccctgtgacactgccgccatgggctctaggtcaggcgtctccaagcatgaaggcgtttgcaggtgggcaggctgccgcacacaaaatgttcgagacgatcaacagaacgccagaaatcgacgcgtacagcaccacggggaggaagctggaggacgttcgaggggacatcgagttcagggatgtctatttctcctacccgacaaggcccaacgaacagatattcaagggtttctccctcgccatacctagtggcacgacgatcgcgttggtaggccagagcgggagcggtaaatccacggtcatcagcctgatcgaacggttttatgaccctcagcttggcgatgttctgatagatggtgtgaatctcaaggagttccagttgaggtggatcagaagtaaaatcggccttgtcagccaggagccggtcctttttgctgccagcataaaggagaacatagcttatggcaaagacaacgcgacggatcaggaaatcagagctgctgctgagcttgccaatgctgccaaattcatagataaaatgcctcagggttttgatacttccgttggtgagcatgggacacagctttctggtgggcagaagcaaagaattgcgattgcaagggctattctgaaagatccaagaatcctactattggatgaagctacaagtgctctggatgccgagtctgaaaggattgtgcaggaagctctcgacagggtcatgacaaacaggacgacagtcatagtcgcacaccgtctgagcactgttcgaaatgctgataccattgctgttattcatcagggaacactggttgaaaaaggtccacacagtgagcttctaagagatccagaaggagcttatagccaactgataaggctacaggaagcaaaccagcagaacaatgggaaggttgatgccaatgctcgtccaggcaaacaaatatcaataaacaagtcagctagcaggaggtcgtcccgtgataacagtagccaccattcattctcagtcccattcggtatgcctcatgggattgacattcaggatggttcatctaacaaactgtgtgatgagatgccacaggaagtgcctctcagccggcttgcatctctcaacaaggcagagatcccggtccttatactaggctccattgcctcagtcatcagtggagttatcttcccgatctttgcgatactcctgtcaaatgtgataaaagcgttctatgagcctccacatctcctaaggagggattcacagttctgggcttccatgttcttggtgtttggtgcagtgtacttcttgtcactccctgtcagttcgtaccttttctccatagcagggtgcaggttgattagaaggatccgactgatgacatttgagaaggtggtaaatatggaggtcgagtggtttgatcacccagaaaactcaagtggagcaataggtgcaaggttgtcagctgatgcagcaaaagttagaggccttgtgggggatgcgcttcaattggttgtacaaaactcttcgacactagttgctggtttggttattgcatttgtgtcaaactgggagctatccctcatcatcttagctttaataccactcattggcctaaatggatggatccagatgaagtttattcacggtttcagtgcagacgcaaagatgatgtatgaagaggcaagccaggtggctaatgatgcagtaggcagcataagaacagtggcctcattctcagctgaagagaaggtcatggatttgtacaagaagaaatgtgaaggtcctctaagaacaggaatcaggacagggattataagtggaatcggttttggagtttcctttttcttgctatttggggtatatgcagctagcttttatgctggtgctcggcttgttgaggacaggaagacaacctttcctaaagttttcagggttttcctagctcttgcaatggcggcaattggagtgtcgcaatcaagtacccttacatcagattcttccaaagcaaaatcagctgcatcttctatatttgcaattgtagatcgaaaatcaaggatagacccaagtgaggatgcaggggtaactgttgaggcactacaaggaaacatcgtattccagcatgttagcttcaagtatcctaccaggccagatgttcagatattccgggacctttgcttgacaattcatgctggaaagactgttgcactcgttggagagagtggtagtggcaaatcaacggcaatttcattgctccagaggttctatgacccagatgtaggccatatactactagatggcgtggacatacagaagttccagcttaggtggttaaggcaacaaatgggcctggttagtcaagaaccagctttgtttaatgacacaataagggcaaacattgcctatggaaaagatggacaagcaacagaatctgagatcatatctgctgcagaattggcaaatgctcacaagtttatcagttcggcgctgcagggatatgacacagtggttggagagcgtggagcccagttgtcaggagggcagaagcagcgagtggcgatcgcccgtgcaattgtgaaggaccctaggatcctgcttctggacgaagcgactagtgcgctggatgctgagtccgagcggatcgtccaggacgcactggacagggtgatggtgaaccggacaacagtgatcgtcgctcaccgtctgtcaacaatacaaaatgcagatttgattgcggtcgtgaggaatggggttatcatcgagaagggaaagcacgatgccttgatcaacatcaaggatggcgcctatgcgtccctcgtcgcccttcactcggcagcctcttcatagcaggtgatggtatgggatcctgcatacgtctgctaagacatatatgaacagagcgagctggcacaacctgtgtagcaatccaggtgctagtctctgttcctctatttgatggcatacataattgcttatacctaagcggagaaatgttacaaatagcaaggaccagatgtaaatgcaaggagctggtccttaagataactttttataatctataaatcttaatatgtatatgtagcttcgaacatagaaaccaaatagatgatggttatgctataactcatgatgttcttgctgtcgtttcccccctttatagcttatatgcaagtaatgataaccctgctcaggaaagaaagggcagctcccaaacgtttaatgataaccatatggctggaaaaactgagatgaaatgctgaagaatggcttctgcggaagcataaatttcatggcaaaggctatcaggttgcaacttctaaggtctggccaaaacagtatgtttttaatgtgaaaagggcatactaaacggaaacacaagttctattttgtaaaaaaaaacctcaactgaaggggcgggcatcctgatcaactgactctgaaacgaagtaactagtaatccaagtgatttccatttggctgacggggctcgttcggttgcgcatggattagagaaggattaaatcccttccgatttaattttaactaaaaagagatttaatcctctgttgcaattcctgtaatccccttcaaactgaaccaggcctgacggggaagtgtacaatattttttttttcacgctgacaaccaaactgtacacacgtgtttctgctcttgcaaaagagcgagcacatgagttaatttctggcaagatttactgaaacctatgaggaaaaaaatatatcgtacccctcccaatttgcattttctagaaactagaaaagcggagaactaatttggcaatagcactagcgactttggctatcaacaataatcagtaggagaaaagacgggggaatttgtgaagcagtaaaacggaaaaactagacacgattgcttaagct

SEQ ID NO: 71522 - DNA, 5388 bp, Zea Mays
gtactggtagcctctcacatttttatatgcttgctcgcccgccatggataccgaaaccaccgtactgctgtctcctactagattttaatcactaccaggcgccgttctcctctctctctctttccccgtctcaagcttgcattttctctctctctctctttccccggtggtgcggtgcggtgcgggtgctggactgctggcctctgcgtccgcatccggcgggcaagtgcgaaagctgccaactctttccctgctcggttttcccttctccaggccagccacaccacttcttcgccaagctcgcatccatttccaaactcttacctccatcccccacctgccctcctttatctcccaaatcggtcttcttgcgctggtggaattcctcgtcggcggtggcgagtgaggcgctgctggtggtatgcaggagctaggaggtaggcaacaaccatacgaaggcaagggcgagcggagccgaggcacaccgcgcgttctgcgccgaccagcactgcccgatctcgcgcgggggaggggggattcgtgagcgccggcggcagccatgccggagtcctggagacccgccgaggcggatgccctgcagccggcggcaggcacggcgtccgcgtccggcccctcggctcggagcccgggcaatggcgccaaggggcgcggggcgggggagccccccggcgctgcggcgacgcgggtgccgttccacaggctgttcgcgttcgcggactccgccgacgtggcgctcatgctgctgggcgcgctcggggccgtggccaacggcgccgccttgcccttcatgaccgtgctcttcggcaacctcatcgacgcctttggtggcgcgctcagcgtccacgacgtcgtcagccgggtgtccatggtctcgctcgacttcgtctacctcgccatggcctccgccgtcgcttccttcgtccaggtcacctgctggatgatcaccggcgagcgtcaggcggcgcggatacggaacctgtacctcaagacgatcctcaggcaggagatcgccttcttcgacaagtacaccagcaccggcgaggtcgtgggcaggatgtccggcgacacggtgctcatccaggacgccatgggcgagaagggctggctgctcaccctggtcatgatggcgaccatcccgccgctcgtcctggcgggcgcggtcatgtccaacgtcgtcaccaagatggcgtccctgggccaggcggcctacgcggaatcgtcggtggtggtggagcagaccatcggttccatcagaacggtcgcgtctttcaccggcgagaaacgggcggtggacaagtacaacatgtccttgaagaacgcgtacaagtccggcgtccgagagggcctcgccactgggcttggaatgggcacggtcatggtgctcctcttctgcggctactcgctagggatttggtatggcgctaagctcatcctggagaaggggtacacgggagccaaggtcatgaacgtcatctttgcagtcctcactggttctctggctctaggtcaggcgtctccaagcatgaaggcgtttgcaggtgggcaggctgccgcacacaaaatgttcgagacgatcaacagaacgccagaaatcgacgcgtacagcaccacggggaggaagctggaggacgttcgaggggacatcgagttcagggatgtctatttctcctacccgacaaggcccaacgaacagatattcaagggtttctccctcgccatacctagtggcacgacgatcgcgttggtaggccagagcgggagcggtaaatccacggtcatcagcctgatcgaacggttttatgaccctcagcttggcgatgttctgatagatggtgtgaatctcaaggagttccagttgaggtggatcagaagtaaaatcggccttgtcagccaggagccggtcctttttgctgccagcataaaggagaacatagcttatggcaaagacaacgcgacggatcaggaaatcagagctgctgctgagcttgccaatgctgccaaattcatagataaaatgcctcagggttttgatacttccgttggtgagcatgggacacagctttctggtgggcagaagcaaagaattgcgattgcaagggctattctgaaagatccaagaatcctactattggatgaagctacaagtgctctggatgccgagtctgaaaggattgtgcaggaagctctcgacagggtcatgacaaacaggacgacagtcatagtcgcacaccgtctgagcactgttcgaaatgctgataccattgctgttattcatcagggaacactggttgaaaaaggtccacacagtgagcttctaagagatccagaaggagcttatagccaactgataaggctacaggaagcaaaccagcagaacaatgggaaggttgatgccaatgctcgtccaggcaaacaaatatcaataaacaagtcagctagcaggaggtcgtcccgtgataacagtagccaccattcattctcagtcccattcggtatgcctcatgggattgacattcaggatggttcatctaacaaactgtgtgatgagatgccacaggaagtgcctctcagccggcttgcatctctcaacaaggcagagatcccggtccttatactaggctccattgcctcagtcatcagtggagttatcttcccgatctttgcgatactcctgtcaaatgtgataaaagcgttctatgagcctccacatctcctaaggagggattcacagttctgggcttccatgttcttggtgtttggtgcagtgtacttcttgtcactccctgtcagttcgtaccttttctccatagcagggtgcaggttgattagaaggatccgactgatgacatttgagaaggtggtaaatatggaggtcgagtggtttgatcacccagaaaactcaagtggagcaataggtgcaaggttgtcagctgatgcagcaaaagttagaggccttgtgggggatgcgcttcaattggttgtacaaaactcttcgacactagttgctggtttggttattgcatttgtgtcaaactgggagctatccctcatcatcttagctttaataccactcattggcctaaatggatggatccagatgaagtttattcacggtttcagtgcagacgcaaagatgatgtatgaagaggcaagccaggtggctaatgatgcagtaggcagcataagaacagtggcctcattctcagctgaagagaaggtcatggatttgtacaagaagaaatgtgaaggtcctctaagaacaggaatcaggacagggattataagtggaatcggttttggagtttcctttttcttgctatttggggtatatgcagctagcttttatgctggtgctcggcttgttgaggacaggaagacaacctttcctaaagttttcagggttttcctagctcttgcaatggcggcaattggagtgtcgcaatcaagtacccttacatcagattcttccaaagcaaaatcagctgcatcttctatatttgcaattgtagatcgaaaatcaaggatagacccaagtgaggatgcaggggtaactgttgaggcactacaaggaaacatcgtattccagcatgttagcttcaagtatcctaccaggccagatgttcagatattccgggacctttgcttgacaattcatgctggaaagactgttgcactcgttggagagagtggtagtggcaaatcaacggcaatttcattgctccagaggttctatgacccagatgtaggccatatactactagatggcgtggacatacagaagttccagcttaggtggttaaggcaacaaatgggcctggttagtcaagaaccagctttgtttaatgacacaataagggcaaacattgcctatggaaaagatggacaagcaacagaatctgagatcatatctgctgcagaattggcaaatgctcacaagtttatcagttcggcgctgcagggatatgacacagtggttggagagcgtggagcccagttgtcaggagggcagaagcagcgagtggcgatcgcccgtgcaattgtgaaggaccctaggatcctgcttctggacgaagcgactagtgcgctggatgctgagtccgagcggatcgtccaggacgcactggacagggtgatggtgaaccggacaacagtgatcgtcgctcaccgtctgtcaacaatacaaaatgcagatttgattgcggtcgtgaggaatggggttatcatcgagaagggaaagcacgatgccttgatcaacatcaaggatggcgcctatgcgtccctcgtcgcccttcactcggcagcctcttcatagcaggtgatggtatgggatcctgcatacgtctgctaagacatatatgaacagagcgagctggcacaacctgtgtagcaatccaggtgctagtctctgttcctctatttgatggcatacataattgcttatacctaagcggagaaatgttacaaatagcaaggaccagatgtaaatgcaaggagctggtccttaagataactttttataatctataaatcttaatatgtatatgtagcttcgaacatagaaaccaaatagatgatggttatgctataactcatgatgttcttgctgtcgtttcccccctttatagcttatatgcaagtaatgataaccctgctcaggaaagaaagggcagctcccaaacgtttaatgataaccatatggctggaaaaactgagatgaaatgctgaagaatggcttctgcggaagcataaatttcatggcaaaggctatcaggttgcaacttctaaggtctggccaaaacagtatgtttttaatgtgaaaagggcatactaaacggaaacacaagttctattttgtaaaaaaaaacctcaactgaaggggcgggcatcctgatcaactgactctgaaacgaagtaactagtaatccaagtgatttccatttggctgacggggctcgttcggttgcgcatggattagagaaggattaaatcccttccgatttaattttaactaaaaagagatttaatcctctgttgcaattcctgtaatccccttcaaactgaaccaggcctgacggggaagtgtacaatattttttttttcacgctgacaaccaaactgtacacacgtgtttctgctcttgcaaaagagcgagcacatgagttaatttctggcaagatttactgaaacctatgaggaaaaaaatatatcgtacccctcccaatttgcattttctagaaactagaaaagcggagaactaatttggcaatagcactagcgactttggctatcaacaataatcagtaggagaaaagacgggggaatttgtgaagcagtaaaacggaaaaactagacacgattgcttaagct

SEQ ID NO: 71523 - DNA, 3813 bp, Zea Mays
aattctgggtgtctctaatgatgaatctaggataaccagatatcttgtggtatcttgtggtatcttgtgttatttgtgaaaagctacttaatccttctcataattttattgttgttttaatggtgctatgatcaatatattgtcgataaaagatcaatggcaccatctacaatttaccataatatggctacttaatccttctcataatttttattgttgttttaatggtgctttgatcaatatattgtcgataaaagatcaatggcaccatctacactttaccaaaataggacggttgctgccgtatctccctttccaccagaatctccgtaagcaccatcttaaacttgcccattctcaactagcagatttccttatgtgaaaacgaagaaccaacataaacgaatctaatggagcataatgctgatcgcacaccattaatagacatatcaaacacaagcattacaggtgatcaaataggatcaaactcgcttggaccaatagacgatgctaatgaacgtaagaggcaaagggatagagaaagatatgccacgatgtccattgaacaaaagaatgagaaaaataggaagcgccgtgaagcacgtcaacgaaacaaaggactacccctaaagtctgagtcatctagaggtcctattaaaaacactccatcggctggtaattctatcgaacgaaagaggcaaagggatagagaaaggcgtgcaacaatgtcggttgaacaaaggaatgagtacaataacaagcgtcgtcaaatgcgtcaacgaaataagggacaaaatgtgatgcccgatgtttcaggagatggcgacaaaaaagaaaatgtggatccagatgatgatagcgactggctgcatcggaacgagacattccagtcaaacgactatgttgcaacgacagaccttctgccaccagatgaggagactgacgaggacatcgaaatcgatggtactcaggatgaatctactggcactgatgtgcctgacccgtacgacaaggtatacagtaacctccctgaagaaacacatatgctgaagcctgttcctgactgcggttattgcactgcgaagaagtttgagtacgagccacctgggttttgctgtcgtggtgggaaggttgagctagcaccactcgatacccctccccagctcaggaggttgtgggatagtgcagactctgatgctaagcactttcgtgataacattaggttttttaatggcaatttctctttcacttccctatactgttgcctcgatagtatgacaactaatgtgcgagattctggtatatacacgttccgggcacaaggcatgatgtaccacaatatcaagtcattcggtaaggaagtttttcatattgagctgcacaagtacagcacaagatatggccgcatatttacattacaaaggtgcaactttgctaacatcccactccgtccactcgagctctccaccagctttccccttctctccggtccgggaatcggaagctcagggcagaagataattggtgcctttcttgataagttgatatacaaccgtggatccttggacttcgatttagttagtgactccgtaggtatcagataaccaaaaaaagaggaatcacgtgaactactggttatatttcccctggatttcgacaaagctttttaggaaatttcgtactttttttcatggagaaatttcgaagacaccaatgaagttctcgcataaaataataaaaaaaccctaagcatgctcgattttcatttttttgccatgaacaactgctagtcaagcacaaaacaaggatttcctaattctccacactcgacaaccattattttcacagcttcaagaactctcaacttccccccaccccaacccaaaagaagtgaatacaaccataaccttcacagcttcaagaacttttcaacttcaaggaaatttctaaacagtaattcttttttaagctggtgaggtgtcccggccctcctgtttcctgaaaaaaaagcacgactgaactagatgttattaggtccgcacatgaattgcatacgaaatgttttcctgactggggctaaattgctagtttagccatggggcagacgcatcttttgttgctcgcttgtttctgggtcctgtcaacatgctccttgctacttgatgcttcctccgatggactgttaagaatcaacctgaacaagaagagactggacaaggaagctttgactgctgcgaaattggcgaagaaggagagcaaccttcgaaggtctgtgggtgctgaccagtatctcagtgcctcaactgatgacatagtccctttggacaactacctggacacccagtactttggacagatcagcatcggcacgccaccacagaacttcacagtgatattcgacactggaagctccaacttgtgggttccctcatccaagtgctacttttcgatagcatgctacttacaccacagatacaagtcaaccaagtcgaagacttacacaaagaatggagaatcttgtacgataacatatggttctgggcaaatcgctggcttcttcagtgaggacaatgtgttggttggcaaccttgttgtgcaaaatcagaaatttattgagacaactcgagaaaccagccctactttcatcattgggaagtttgatggaattcttggtctcggatttcctgaaatttctgtaggaggagcccctccaatttggcagagcatgaaacagcagaaactggtcgcaaaggatgtcttctctttctggcttaatcgtgaccctgatgcatcttctggaggaggcgagcttgtctttggtggtgttgacccaaaacactacaaaggggaccatacatatgttcccgttacacgcaaaggctactggcagtttgacatgggagatcttattattggtggccactcaactggtttctgtgctggtggctgtgctgctattgtggactcagggacttcattgcttgctggtccaactaccatagtggctcaagtcaatcatgcaattggggctgagggaatcatcagtacagaatgcaaagaagtggtgagcgagtatggagagatgatccttgagttgctcatatcgcagacaagcccacagaaagtgtgcactcagattggtctctgtgtatttgatggtgcccattctgtcagcaatccaattgaatctgttgttgagaaacagaagcgtggttctgatcttttctgtactgcttgtgagatggctgttgtctggatacagaatcagctccgtgaaaacaagacaaaagaactcattttgaattatgctaatcagctctgtgagcgtctccctagccccaatggcgagtcaactgttgattgccatcagatctcaaagatgccaaatcttgcattcaccatagcaaacaagactttcaccttaacaccagagcagtacatagtgaagctggagcaagcaggacaaactatctgcatcagtgggtttatggcatttgacgtaccgcctcctcgtggtcctctctggatacttggtgatgtttttatgggtgcctaccacactgtttttgacttcggtgagaacaggattgggtttgccaaatctgcatgaggactggagttctgcgctttagtagcatgtccagtttgttatccggaaatctagaagattgtggcatgatatgtgtttgcaaatggagctatgctatgtatggagctccaggacctagagttttatgtaaagggagacgatgaggattagggcttttaacctattctcatcacaaaggagaaaaagaaaattaaaaaaatgaa

SEQ ID NO: 71524 - DNA, 2083 bp, Zea Mays
ctctcccgtctcaggtgccgccgccgcccactcgtccccatccccccaaacctccagctccccacctcccccgctcgctccattctaggagctaccataccgacgatggctcccaactctgctcctctcagatctccctccacatctcaccttctcccccttcctctcctggcaacgccttgatcctgcccccaagatctcctagccactgtgtccgcccccacgctcgttgcccagatccggtagcccctccatgctcgtccgcccctttctcgctctctccccggtcggctcgctcccgcttgcaacccccacaccccgttttgctccagagacagttcgcaggtcctcctcacggcgaagcgcaggtgagcgcaggttcggccaacggcccccgacccgatcgcaggtcctcacggcgaagcgcagcctgcagagccgagtcggacatcacgaccacgaccatgaggcgtcgtcgtagagcaatcagagccgtttttgttgcccctcccggttagaggtcccacacttttccttgtccggtgatgagaactaagctacctactattctctccaatatgatgaggataaatgtctccaatttgtacaaactaccaatccggacaagaaatctaatccacggtgctccaatcgactggcctctgataatggagtctagagtgtttgagtttgaggacttaggtataaggatgcattttcagctacatttacgaacatcttgttcttttttgtaatgcatctaccttatttctctttacgaattcccactcaatttattatgcagttaacactaccactttacgatggattcctagcctaatccttaaatttcattctaatcaccatgccttttagatctaggcattagacttgtattgttggatctgtttaattgtttctcatgcaacaaaatgagatgaagatacacacgagtctgagtttacagtgtttgagttcaaggacttcgataaggatgcattttcaactgtatttatgaacgtctctttttttggtaatgcatctaccttatttccctttatgaattgccactaaatttagataagctctctactccatggtggtcaaaacagctggcctctagtaatggagcttagtgtgtttcagtttgaggacttcggtaaggctgcatttttaactatatttacaaacatctggttttatttttgtaatgcatctaccttatttccctttgtaaattcccactcaatttatgatgtgattaacactactattatacgattgattcctagctgaatccttaaatggattactgatttcacagatgatgggtgtgctattgatggaataacccaagattaggcctatgtttttattacattattagtttttgtgcattgtaaattgttgcagctctgagatgatataacattttcgagttcttgagcatgatgtatctgatgatggtatgtttagtgttgtgaagggaagacggtgtttgttttcctttctaatttaaattcatagatacccaggggcagagccaggattgggttagagcccagggctgagttagttaaaacatgctgcaattcattttagtttcaatattgtgcagtttcttaagttgtcttccatgtaattttaggcctaaaaccagggctggagcctggatatcctaggtcgtggctccacctaatggagatacattatgattcaatacatgagcatcttgtctgaaatcgtttagaccaaacaccatagttctatctgggcttagtggccgtggcaaaaccactatttactaccaggtaacttccaacttttttggtctgtgtttttacaagttaaggacaaggttgtagcatctagtttgcaaaataatatctgaacctcattttttgattctatttagggtgtgggatgagcattctaggcggatatcagttctgctagttatcatgcttacacatatatctttcttattcaaattgagtgattgactttgctttttccatataaactagttggtttgttttagttgactaaccagaatatttcccccccttttgtctactattag

SEQ ID NO: 71525 - DNA, 2076 bp, Zea Mays
ctctcccgtctcaggtgccgccgccgcccactcgtccccatccccccaaacctccagctccccacctcccccgctcgctccattctaggagctaccataccgacgatggctcccaactctgctcctctcagatctccctccacatctcaccttctcccccttcctctcctggcaacgccttgatcctgcccccaagatctcctagccactgtgtccgcccccacgctcgttgcccagatccggtagcccctccatgctcgtccgcccctttctcgctctctccccggtcggctcgctcccgcttgcaacccccacaccccgttttgctccagagacagttcgcaggtcctcctcacggcgaagcgcaggtgagcgcaggttcggccaacggcccccgacccgatcgcaggtcctcacggcgaagcgcagagccgagtcggacatcacgaccacgaccatgaggcgtcgtcgtagagcaatcagagccgtttttgttgcccctcccggttagaggtcccacacttttccttgtccggtgatgagaactaagctacctactattctctccaatatgatgaggataaatgtctccaatttgtacaaactaccaatccggacaagaaatctaatccacggtgctccaatcgactggcctctgataatggagtctagagtgtttgagtttgaggacttaggtataaggatgcattttcagctacatttacgaacatcttgttcttttttgtaatgcatctaccttatttctctttacgaattcccactcaatttattatgcagttaacactaccactttacgatggattcctagcctaatccttaaatttcattctaatcaccatgccttttagatctaggcattagacttgtattgttggatctgtttaattgtttctcatgcaacaaaatgagatgaagatacacacgagtctgagtttacagtgtttgagttcaaggacttcgataaggatgcattttcaactgtatttatgaacgtctctttttttggtaatgcatctaccttatttccctttatgaattgccactaaatttagataagctctctactccatggtggtcaaaacagctggcctctagtaatggagcttagtgtgtttcagtttgaggacttcggtaaggctgcatttttaactatatttacaaacatctggttttatttttgtaatgcatctaccttatttccctttgtaaattcccactcaatttatgatgtgattaacactactattatacgattgattcctagctgaatccttaaatggattactgatttcacagatgatgggtgtgctattgatggaataacccaagattaggcctatgtttttattacattattagtttttgtgcattgtaaattgttgcagctctgagatgatataacattttcgagttcttgagcatgatgtatctgatgatggtatgtttagtgttgtgaagggaagacggtgtttgttttcctttctaatttaaattcatagatacccaggggcagagccaggattgggttagagcccagggctgagttagttaaaacatgctgcaattcattttagtttcaatattgtgcagtttcttaagttgtcttccatgtaattttaggcctaaaaccagggctggagcctggatatcctaggtcgtggctccacctaatggagatacattatgattcaatacatgagcatcttgtctgaaatcgtttagaccaaacaccatagttctatctgggcttagtggccgtggcaaaaccactatttactaccaggtaacttccaacttttttggtctgtgtttttacaagttaaggacaaggttgtagcatctagtttgcaaaataatatctgaacctcattttttgattctatttagggtgtgggatgagcattctaggcggatatcagttctgctagttatcatgcttacacatatatctttcttattcaaattgagtgattgactttgctttttccatataaactagttggtttgttttagttgactaaccagaatatttcccccccttttgtctactattag

SEQ ID NO: 71526 - DNA, 1130 bp, Zea Mays
ctctcccgtctcaggtgccgccgccgcccactcgtccccatccccccaaacctccagctccccacctcccccgctcgctccattctaggagctaccataccgacgatggctcccaactctgctcctctcagatctccctccacatctcaccttctcccccttcctctcctggcaacgccttgatcctgcccccaagatctcctagccactgtgtccgcccccacgctcgttgcccagatccggtagcccctccatgctcgtccgcccctttctcgctctctccccggtcggctcgctcccgcttgcaacccccacaccccgttttgctccagagacagttcgcaggtcctcctcacggcgaagcgcaggtgagcgcaggttcggccaacggcccccgacccgatcgcaggtcctcacggcgaagcgcagagccgagtcggacatcacgaccacgaccatgaggcgtcgtcgtagagcaatcagagccgtttttgttgcccctcccggttagaggtcccacacttttccttgtccggtgatgagaactaagctacctactattctctccaatatgatgaggataaatgtctccaatttgtacaaactaccaatccggacaagaaatctaatccacggtgctccaatcgactggcctctgataatggagtctagagtgtttgagtttgaggacttaggcctaaaaccagggctggagcctggatatcctaggtcgtggctccacctaatggagatacattatgattcaatacatgagcatcttgtctgaaatcgtttagaccaaacaccatagttctatctgggcttagtggccgtggcaaaaccactatttactaccaggtaacttccaacttttttggtctgtgtttttacaagttaaggacaaggttgtagcatctagtttgcaaaataatatctgaacctcattttttgattctatttagggtgtgggatgagcattctaggcggatatcagttctgctagttatcatgcttacacatatatctttcttattcaaattgagtgattgactttgctttttccatataaactagttggtttgttttagttgactaaccagaatatttcccccccttttgtctactattag

SEQ ID NO: 71527 - DNA, 2128 bp, Zea Mays
ctctcccgtctcaggtgccgccgccgcccactcgtccccatccccccaaacctccagctccccacctcccccgctcgctccattctaggagctaccataccgacgatggctcccaactctgctcctctcagatctccctccacatctcaccttctcccccttcctctcctggcaacgccttgatcctgcccccaagatctcctagccactgtgtccgcccccacgctcgttgcccagatccggtagcccctccatgctcgtccgcccctttctcgctctctccccggtcggctcgctcccgcttgcaacccccacaccccgttttgctccagagacagttcgcaggtcctcctcacggcgaagcgcaggtgagcgcaggttcggccaacggcccccgacccgatcgcaggtcctcacggcgaagcgcagagccgagtcggacatcacgaccacgaccatgaggcgtcgtcgtagagcaatcagagccgtttttgttgcccctcccggttagaggtcccacacttttccttgtccggtgatgagaactaagctacctactattctctccaatatgatgaggataaatgtctccaatttgtacaaactaccaatccggacaagaaatctaatccacggtgctccaatcgactggcctctgataatggagtctagagtgtttgagtttgaggacttaggtataaggatgcattttcagctacatttacgaacatcttgttcttttttgtaatgcatctaccttatttctctttacgaattcccactcaatttattatgcagttaacactaccactttacgatggattcctagcctaatccttaaatttcattctaatcaccatgccttttagatctaggcattagacttgtattgttggatctgtttaattgtttctcatgcaacaaaatgagatgaagatacacacgagtctgagtttacagtgtttgagttcaaggacttcgataaggatgcattttcaactgtatttatgaacgtctctttttttggtaatgcatctaccttatttccctttatgaattgccactaaatttagataagctctctactccatggtggtcaaaacagctggcctctagtaatggagcttagtgtgtttcagtttgaggacttcggtaaggctgcatttttaactatatttacaaacatctggttttatttttgtaatgcatctaccttatttccctttgtaaattcccactcaatttatgatgtgattaacactactattatacgattgattcctagctgaatccttaaatggattactgatttcacagatgatgggtgtgctattgatggaataacccaagattaggcctatgtttttattacattattagtttttgtgcattgtaaattgttgcagctctgagatgatataacattttcgagttcttgagcatgatgtatctgatgatggtatgtttagtgttgtgaagggaagacggtgtttgttttcctttctaatttaaattcatagatacccaggggcagagccaggattgggttagagcccagggctgagttagttaaaacatgctgcaattcattttagtttcaatattgtgcagtttcttaagttgtcttccatgtaattttaggcctaaaaccagggctggagcctggatatcctaggtcgtggctccacctaatggagatacattatgattcaatacatgagcatcttgtctgaaatcgtttagaccaaacaccatagttctatctgggcttagtggccgtggcaaaaccactatttactaccagcttcgggatggatcatcacatcaaggaactgttacttcaatggaagaaaacagtaatacttttgtgctgcattcggagcaagaaaggaaagacaaagtaaaacctgtgcatattattgatgttcctggtcatgctaggctcaaacccaaacttgatgaagtcctgcctaaaactgctgcggttgtctttgttgttgatgctcaagatttcttgtctagcatttggtgtctatttctatttcatctactttcactttcatgtgcattcgctatttagatgttcaataagcttcacactctaaacccaaacttgatccgattgctg

SEQ ID NO: 71528 - DNA, 886 bp, Zea Mays
atgccggtgctgccgggcaacaagcggcgaccgaggcagcacgtgcagccactgcccggcgcgccgcttgtcccccggatcttgcctccccctcccaccaccaatcacctctcgtcgacctaccctgccgcgcgccgcgctgtgctcatactcatagctcccatcatcccctcgccccttcgccatgatttatactcgcgtgacgcccacacaacgcccatgattagaagtcgcccggccgcccgcgcgctgccgagatccatcagctcttatcctcaacatccttccagcttcctggagcagtgccgcctttcatataaaccttatatgggttcttgggtgcgcaccatcacaacgcccttcaggaaagcctgcaccatcttcggcccacacaaggacggcggcggcaagaagcagacgcagcagcggccaaactcagcggtggtgcagcacgtcgacgccgagagggccaagctccacggggaggtgatggcgtgcgcctacgacgacgtgcaggtcatgtggtccatgctcgaccaggcaaggatccgggatctcagtgccagctcgtgacctagcttcgtgcatctagcttcgcctagagccgcgaaaatggactagtacatagcaaaatatcctctctctctctctctctctctctctctctctcctcctcaccaattaaacgttcccaaacctgcactcgctcgcttttcttgtacacgtagctgcttagatttagcttttctcttttatttggaggttttgcagctcagtcaagtgtttgaatccccacaggcactctcttctcttctctttgagcgaggggcttgattggagagatgtacattattgccacctattggaatcttgatttgttgcaatc

SEQ ID NO: 71529 - DNA, 889 bp, Zea Mays
atgccggtgctgccgggcaacaagcggcgaccgaggcagcacgtgcagccactgcccggcgcgccgcttgtcccccggatcttgcctccccctcccaccaccaatcacctctcgtcgacctaccctgccgcgcgccgcgctgtgctcatactcatagctcccatcatcccctcgccccttcgccatgatttatactcgcgtgacgcccacacaacgcccatgattagaagtcgcccggccgcccgcgcgctgccgagatccatcagctcttatcctcaacatccttccagcttcctggagcagtgccgcctttcatataaaccttatatgggttcttgggtgcgcaccatcacaacgcccttcaggaaagcctgcaccatcttcggcccacacaaggacggcggcggcaagaagcagacgcagcagcggccaaactcagcagcggtggtgcagcacgtcgacgccgagagggccaagctccacggggaggtgatggcgtgcgcctacgacgacgtgcaggtcatgtggtccatgctcgaccaggcaaggatccgggatctcagtgccagctcgtgacctagcttcgtgcatctagcttcgcctagagccgcgaaaatggactagtacatagcaaaatatcctctctctctctctctctctctctctctctctcctcctcaccaattaaacgttcccaaacctgcactcgctcgcttttcttgtacacgtagctgcttagatttagcttttctcttttatttggaggttttgcagctcagtcaagtgtttgaatccccacaggcactctcttctcttctctttgagcgaggggcttgattggagagatgtacattattgccacctattggaatcttgatttgttgcaatc

SEQ ID NO: 71530 - DNA, 1343 bp, Zea Mays
atggaaatggcatctctgattgctggtcgagtggttgcgctgcatcggagtttaccgccacccgttgaagggacggtggcggacattattgtcatttcgtctcgtcctgttcttttaaatactcccaaatatcatctcctcggaaagaggagcgaagagagcgaaatccagagcacacggcgtcgcatttggaacgctcctgctcgtcgcacgtacgaagcccacgcgtccgcgcacgtgccagagccgagcccccgcgccggcgccccgccggagaggatgacgcggcggtgctcgcactgcagcaacaacggccacaactcgcgtacctgccccgtccgctccgccggcggcggcagcggcggcggcggggtgaggctgttcggcgtgcggctcacgacggcgccggcgccggcggtgatgaagaagagcgccagcatgagctgcattgtgtcctcgctcggcggcggtttcggcggctcgtcgccgccggtggaaggagtgggtgctggcagaggaggggaagacagtgggaccggctacgtgtccgatgatcccgcgcacgcatcctgctcgacgaatggccgcgccgagcgcaagaaaggtacaccttggactgaagaagagcatagaatgtttctgatgggtctgcagaagcttggtaagggagactggcgcgggatatccagaaactttgttgtttccaggaccccgactcaagttgcaagccatgctcaaaagtactttgttagacagacaaactcatcgagacggaagaggcggtcaagcttatttgacatggtcccagaaatgccaatggatgagtccccagctgctgtggaacaatttactctccaaaatactcaagatgaagatacaagttcaaatcacgtgccaaccttacatcttggacaacggaaggaaacagagtttgctaagcagctacaaacttttcagccagggcaccatgagaaatctgaatacgcagaaccttcattgctgctaccagatttggagatgaaccccagtgtaccattcaagaccataactgatccaacaggaccagcattctacccatcattggtccctgttccactaactctttggcctccaagtgtttcccacgtggaggaagcagccagaacccatgaaatcctaaaaccaactcctttgaatggtaagggggtggttaaggcagatgatgttgttggtatgtctaagctcagcatcgacgaagctagctctggctccatggaacccactgctctttcccttgagcttattggatccacagatacaaggcaatcagcttttcatgtcaaggcagatatcgtcaagatgag

SEQ ID NO: 71531 - DNA, 2024 bp, Zea Mays
atggaaatggcatctctgattgctggtcgagtggttgcgctgcatcggagtttaccgccacccgttgaagggacggtggcggacattattgtcatttcgtctcgtcctgttcttttaaatactcccaaatatcatctcctcggaaagaggagcgaagagagcgaaatccagagcacacggcgtcgcatttggaacgctcctgctcgtcgcacgtacgaagcccacgcgtccgcgcacgtgccagagccgagcccccgcgccggcgccccgccggagaggatgacgcggcggtgctcgcactgcagcaacaacggccacaactcgcgtacctgccccgtccgctccgccggcggcggcagcggcggcggcggggtgaggctgttcggcgtgcggctcacgacggcgccggcgccggcggtgatgaagaagagcgccagcatgagctgcattgtgtcctcgctcggcggcggtttcggcggctcgtcgccgccggtggaaggagtgggtgctggcagaggaggggaagacagtgggaccggctacgtgtccgatgatcccgcgcacgcatcctgctcgacgaatggccgcgccgagcgcaagaaaggtacaccttggactgaagaagagcatagaatgtttctgatgggtctgcagaagcttggtaagggagactggcgcgggatatccagaaactttgttgtttccaggaccccgactcaagttgcaagccatgctcaaaagtactttgttagacagacaaactcatcgagacggaagaggcggtcaagcttatttgacatggtcccagaaatgccaatggatgagtccccagctgctgtggaacaatttactctccaaaatactcaagatgaagatacaagttcaaatcacgtgccaaccttacatcttggacaacggaaggaaacagagtttgctaagcagctacaaacttttcagccagggcaccatgagaaatctgaatacgcagaaccttcattgctgctaccagatttggagatgaaccccagtgtaccattcaagaccataactgatccaacaggaccagcattctacccatcattggtccctgttccactaactctttggcctccaagtgtttcccacgtggaggaagcagccagaacccatgaaatcctaaaaccaactcctttgaatggtaagggggtggttaaggcagatgatgttgttggtatgtctaagctcagcatcgacgaagctagctctggctccatggaacccactgctctttcccttgagcttattggatccacagatacaaggcaatcagcttttcatgtgagtccaccgatgaatagacctgaactaagcaagagaaacagcagtccaattcatgcagtttgaggaagcatgaaacatgcccgctgggtcaagtcttacaaattatactgatggtctcaatacctcagaacgtgaccatgtactttgtaacgactttttagttatcctgtttccagcttatgttccttgccatcgacaaatgtagagagatacatgtgtcaatggaagtagcatgccattagtttcagcactgaattgttgcctgttgggacgccatatgcacctaccttttctggttcatcctccatgcttcaggaaatcgatgtggaaattctgacatgtaaatgcttgaattagatgcctttgaattcttaatttttgatggaatggttttggtgtagaggggttttctatcaactttcaaggatcaaggtatgatggtgcagcggcaaaaatctggctggacatcaaacaagattagaagggttgcagttgtcaacttggtgatcagttcaagatactctattaactgcaaaatgcagggtgatcaagtcagatgtgttgtgccagtacccacgatttcagaggaagaagccggtgccgggatcgccaatgcaaagcaaaatatgacagcatcgagatcacgattcggcttgatctgcaatctcaggatattcagtcaaggcagatatcgtcaagatgag

SEQ ID NO: 71532 - DNA, 1089 bp, Zea Mays
ccggtcgaacctggcgccgcccacccgccgtctgtctcgctgctccccatcgctcttggcctttcgtcgtgactcgctccctccccgactccctgcatcgctccccatcccatcttgtcctggacacctgggaagcctccttctgttctttttcgtttcattcttggccacagacttcacatgcccacaaccccatggaggagaaaccagactaggaccaatacccatcaattccttcagtgttttacgccggtcaccgtggagctccgtgtggtggggttcggcaaggaggtggtgctaaagcagtggtggcggatgcgctggagacttcgcctggccatgctactccgcctagaagcgcccacatccggtcgtcgccccattcgctggtgccgcgctccgatccaccccgcccctattccgcctaggctgagctccgcctccactgtagctccgcctcaacgtctggcccaaagtggtctttgccacgttcttgaactcccccaacaccacgacggggtgttcactatgcttatggatgcaaatcgtataaatggtataaaatatctctaaaggatatgatgtccaatcttttttcggagggttactgctgagctgctaaaacaagcgctaacagggattatggtactacctctgttcataaaaaggatacaaataccaatactccaaaggtaataacatatagctcactatttttttgtgattcatcaacatgttgaagtaagaacccttggcatcaaagaagaaacacataatgctttcaacgcgcgcgggcgcgcatcagttactagttcataattcacacgcaaaaaaagccacgaacgggaggactgatccttgtgaagcaaaaagggagaaccggctacacgacatttgcaacgcgcgggaaactagttgggatacacttttctatgatacccaaaaaaaatgagagagatttgccttgaattttatagggaataatagtcattgtacgacaactagtagagactattattgcttcgtgctcacgaggtttcttaggaatcatgcaatgttcttgagcctttcatgtttaaaaaaattaga

SEQ ID NO: 71533 - DNA, 830 bp, Zea Mays
ccggtcgaacctggcgccgcccacccgccgtctgtctcgctgctccccatcgctcttggcctttcgtcgtgactcgctccctccccgactccctgcatcgctccccatcccatcttgtcctggacacctgggaagcctccttctgttctttttcgtttcattcttggccacagacttcacatgcccacaaccccatggaggagaaaccagactaggaccaatacccatcaattccttcagtgttttacgccggtcaccgtggagctccgtgtggtggggttcggcaaggaggtggtgctaaagcagtggtggcggatgcgctggagacttcgcctggccatgctactccgcctagaagcgcccacatccggtcgtcgccccattcgctggtgccgcgctccgatccaccccgcccctattccgcctaggctgagctccgcctccactgtagctccgcctcaacgtctggcccaaagtggtctttgccacgttcttgaactcccccaacaccacgacggggtgttcactatgcttatggatgcaaatcgtataaatggtataaaatatctctaaaggatatgatgtccaatcttttttcggagggttactgctgagctgctaaaacaagcgctaacagggattatggtactacctctgttcataaaaaggatacaaataccaatactccaaagctgttctttttcagtcatattgcgagctgagagtattcagggcaatggatttggcgtgtcgttcttccttctctttctccacagcttcgttaacttgttcctttcctcgcaatgactgaaactgaactgattcatgac

SEQ ID NO: 71534 - DNA, 2762 bp, Zea Mays
cagccaactgcgcaacgaaaaataattgccactgtatgcccaactcaactcctagctaggagaggaagaagagtacaaggaagagactgtggcaagcacagcacagtggatacacacctagcttggccggtacagagcaccgtgcttgcttgtccatttccgtcacagctagcgcttgcccaggtcccccaccttatcaacaacaactgtgcccctcctgcccccgctcgccgcgagagctcccgtcccgacgaccttccctcctgtagcactctacagtctacaccaagcagcagcgtctcctgttgcatgttgcactgcacctatctacgacgtccgttcccagtgctttgctcaccgacaccgtatcttatgagcaaggagccctgctgctcccatcaccttcatcaagccaagcgtgtgtcctctgtcctctcccagctgcgagctccgacccccggcaccatgtccgacagcagcgacttcgccgagctgctatgggagaacggccaggcggtggtgcacgcgcggacgaggaaacacccgccccagcaggccgccttcccgcccttcaccttcacctgcagcagcagagctcaacaaaggcagccggtgccgccgctgctcaagacgggaggaggtctctttgccgacttctcctcggccaccgccggcctagacgccccccgtgacaacgccgacctcgacgacaccgtgccgtggatccactaccccatccccatcgtcgacgaagccagtcccgccgcgcctgccctggcagatagcttcatcccagatttcttctcggagctgcatgcggcggcggcgacgacgagcctcggccctctgccaccaccaccaccaccaccaccagcagtccagcacaccggcgacgacaacgacaaccggagcaccccggttcccaatcccaccaccggcagaggaccagagccctcaaaggaaacccaccgcgcaccagtaccaggtccagccggcaggcctgagccacaaccacaagctgagctcgcgcccgccaggaagcctcggcaggagagcggcggcggggaggctttgatgaacttctccatcttctctaggccggcagccatggcgcgtgccagcctgcggcagaggccgccacagacaggcaccgacaaggcgtccaatgccaccacgagcacccgcgtggagtcgacggtgctacagtcggccagtgccagtgggccgagaactgcagctgcccccgccgtgttcgtggaccagaggacggcgtggccgtcgcagcagcccaaggagaaagaagtagagaccaggaaggcgtcagaggctgcgggcgccaccgccacctcatcggtctgctccggcaatggtgctgggacaggaaaggacgacgagtcctggcgccaacagaagaggaagaccctgcaggccgagtgttccgcgagtcaagatgatgatcctgacgatgagtccggtgggatgagaagatcgtgcagcagaggtgcgaagcgcagccgcaccgcggaggtgcacaacctgtccgaaaggaggagaagggacaggatcaatgaaaaaatgcgtgccctgcaagagctcatccccaactgcaacaagattgacaaggcctccatgctggacgaagcgatcgagtacctcaaaaccctccagcttcaagtgcagatgatgtccatgggaagtgggctgtgcattcctcccatgctgctgccaccagccatgcagcacctgcagattcctccggctgctgctcacttccctcatctcggcatgggattgggttacgggatgggtgtcctcgatatgaacagcgcggcggcggcggcggcggcggttccatttccgcacatgcccggtgctcacttcccttgcccgatgatcccaggcgcgccactaccacggggtctcggaatcggaatgcctgccagaaacacgatgccggtgttcggagtccctcctgggcaaccaatccagccaccattcccatctttggcgggccttcctgtcaggccaaacctggcacctcctcacgcctcctcagccgccatggctaacatggtgcaggagcaacagcagcagcagcagcatcagagcctgaataatggagcatcaacagcagcagcaacagcatcagatcctcagactatcgtgcaggctgagagacagcattttagtgtgccctcttcagcacaaaccgagagcgatcagtttttggatggtggtggcaacagggctatttgtacaggaagaaatgaggctgaaacatgaaaaacactcagcaggtctcgactaacaggctgcagatgtgaatatcagcgccaactcatcctggaaaagagcctaacgagtttcaagatccacgaagcagatccgtcagttgaaaagagtccaatcaatcaagacagggccatgacaggacgtctagctttagcgagctaagatgctcctaagttttgtgtcaaatgtagatggtagatggaacctggttacaagaaacatttcttggcagccggtgctttttttctttttttttgggattcactgaagttttcttggatcagtatgtcttatttcctcaggcattcagtgatcatatgcacaaagatatttgtgtccatatactggctctgctttaactatatctctttgcaaataataacgagctagctaacaattgttcaaagctgcatgcttaagcagatatgtaaccacattattctgcagatgtatgcatagggccaaaagag

SEQ ID NO: 71535 - DNA, 2761 bp, Zea Mays
aagagactgtggcaagcacagcacagtggatacacacctagcttggccggtacagagcaccgtgcttgcttgtccatttccgtcacagctagcgcttgcccaggtcccccaccttatcaacaacaactgtgcccctcctgcccccgctcgccgcgagagctcccgtcccgacgaccttccctcctgtagcactctacagtctacaccaagcagcagcgtctcctgttgcatgttgcactgcacctatctacgacgtccgttcccagtgctttgctcaccgacaccgtatcttatgagcaaggagccctgctgctcccatcaccttcatcaagccaagcgtgtgtcctctgtcctctcccagctgcgagctccgacccccggcaccatgtccgacagcagcgacttcgccgagctgctatgggagaacggccaggcggtggtgcacgcgcggacgaggaaacacccgccccagcaggccgccttcccgcccttcaccttcacctgcagcagcagagctcaacaaaggcagccggtgccgccgctgctcaagacgggaggaggtctctttgccgacttctcctcggccaccgccggcctagacgccccccgtgacaacgccgacctcgacgacaccgtgccgtggatccactaccccatccccatcgtcgacgaagccagtcccgccgcgcctgccctggcagatagcttcatcccagatttcttctcggagctgcatgcggcggcggcgacgacgagcctcggccctctgccaccaccaccaccaccaccaccagcagtccagcacaccggcgacgacaacgacaaccggagcaccccggttcccaatcccaccaccggcagaggaccagagccctcaaaggaaacccaccgcgcaccagtaccaggtccagccggcaggcctgagccacaaccacaagctgagctcgcgcccgccaggaagcctcggcaggagagcggcggcggggaggctttgatgaacttctccatcttctctaggccggcagccatggcgcgtgccagcctgcggcagaggccgccacagacaggcaccgacaaggcgtccaatgccaccacgagcacccgcgtggagtcgacggtgctacagtcggccagtgccagtgggccgagaactgcagctgcccccgccgtgttcgtggaccagaggacggcgtggccgtcgcagcagcccaaggaggtgcggtttccatgcgcagcagcagcgccaccgccgacgccgacggctggtaacctgcagcaagaaagacctagcaacaacaacatgactcctccgcagaaagaagtagagaccaggaaggcgtcagaggctgcgggcgccaccgccacctcatcggtctgctccggcaatggtgctgggacaggaaaggacgacgagtcctggcgccaacagaagaggaagaccctgcaggccgagtgttccgcgagtcaagatgatgatcctgacgatgagtccggtgggatgagaagatcgtgcagcagaggtgcgaagcgcagccgcaccgcggaggtgcacaacctgtccgaaaggaggagaagggacaggatcaatgaaaaaatgcgtgccctgcaagagctcatccccaactgcaacaagattgacaaggcctccatgctggacgaagcgatcgagtacctcaaaaccctccagcttcaagtgcagatgatgtccatgggaagtgggctgtgcattcctcccatgctgctgccaccagccatgcagcacctgcagattcctccggctgctgctcacttccctcatctcggcatgggattgggttacgggatgggtgtcctcgatatgaacagcgcggcggcggcggcggcggcggttccatttccgcacatgcccggtgctcacttcccttgcccgatgatcccaggcgcgccactaccacggggtctcggaatcggaatgcctgccagaaacacgatgccggtgttcggagtccctcctgggcaaccaatccagccaccattcccatctttggcgggccttcctgtcaggccaaacctggcacctcctcacgcctcctcagccgccatggctaacatggtgcaggagcaacagcagcagcagcagcatcagagcctgaataatggagcatcaacagcagcagcaacagcatcagatcctcagactatcgtgcagtgtgccctcttcagcacaaaccgagagcgatcagtttttggatggtggtggcaacagggctatttgtacaggaagaaatgaggctgaaacatgaaaaacactcagcaggtctcgactaacaggctgcagatgtgaatatcagcgccaactcatcctggaaaagagcctaacgagtttcaagatccacgaagcagatccgtcagttgaaaagagtccaatcaatcaagacagggccatgacaggacgtctagctttagcgagctaagatgctcctaagttttgtgtcaaatgtagatggtagatggaacctggttacaagaaacatttcttggcagccggtgctttttttctttttttttgggattcactgaagttttcttggatcagtatgtcttatttcctcaggcattcagtgatcatatgcacaaagatatttgtgtccatatactggctctgctttaactatatctctttgcaaataataacgagctagctaacaattgttcaaagctgcatgcttaagcagatatgtaaccacattattctgcagatgtatgcatagggccaaaagag

SEQ ID NO: 71536 - DNA, 1257 bp, Zea Mays
ctttgcccgagaggactagagtttcagcggcggcggctgccgagccccattccccgatctgaagcacctcaaaccaccgctctgcccagatccagatccacccagctactgcggcgagcccatggggatggtggtggcggaggaccccgccgccgccgccctccgacgtggcctccgctgaacccgatgtcacgtctttggacgtccccaccccaccggcctcctcctcgctgtcgccgcggtctgcctccaaggcgcgctcgttggctgcggcagatgggctcgcctctggggtagccgcactcagcttcgaggatcctgttggagcctgcgtcggagaggacgggtatgattacggcagggagacttcgtggaacacgcctgccggtactgtgggatccataatcctgcatgcgtggctaggtgcaacgtgccctcctgccgcaagtggttctataactcgcgggggaacacctctggctccaacattgtcaaccacctgatcatgcaaaaggaggaccaaaaacgctcggcacctgtttgttgttttgtccaaataaatttttggtgctgcatacaatatcagaagcttcgtacatgcaggcaatgaaattttaactcagtacaacagagattgaccaatattgtgatagcgtgaacaaagccactagaaaattgcacagaaacaacttgaactcattgatacgtttgtagagatgattgactacatgatggctccggatgggacggtgatcccacaaactctccaacccaacgatttactcgtaatgctactattcacctgcatttttttggagggagtagggaaggcattgtcgatctcttcttgaagtcagctgagtatttggactgtgcagttcatcatgtactcatacatataccacctcaaatacgccttattaattcttttttattgcattaattcagagcactgaacgtagaagttcagtggtaacactgatgatgactacgtactattttatgaaagccttgccaaaagaagatgtacttctcatagttgagtacaagaataattatctcttgtatcttattgtaaaatctgaaacatttgttctgtagatggttagcttgcattttatgctataattacctcaaatcacgtgttgccttttcaccaatttatcacatatattgatatgttttactttaatttatgacatttattgatgtgttttgcaacaacctcatgtggggccacatttgccattatgaaat

SEQ ID NO: 71537 - DNA, 781 bp, Zea Mays
atccataatcctgcatgcgtggctaggtgcaacgtgccctcctgccgcaagtggttctataactcgcgggggaacacctctggctccaacattgtcaaccacctgatcagaagcttcgtacatgcaggcaatgaaattttaactcagtacaacagagattgaccaatattgtgatagcgtgaacaaagccactagaaaattgcacagaaacaacttgaactcattgatacgtttgtagagatgattgactacatgatggctccggatgggacggtgatcccacaaactctccaacccaacgatttactcgtaatgctactattcacctgcatttttttggagggagtagggaaggcattgtcgatctcttcttgaagtcagctgagtatttggactgtgcagttcatcatgtactcatacatataccacctcaaatacgccttattaattcttttttattgcattaattcagagcactgaacgtagaagttcagtggtaacactgatgatgactacgtactattttatgaaagccttgccaaaagaagatgtacttctcatagttgagtacaagaataattatctcttgtatcttattgtaaaatctgaaacatttgttctgtagatggttagcttgcattttatgctataattacctcaaatcacgtgttgccttttcaccaatttatcacatatattgatatgttttactttaatttatgacatttattgatgtgttttgcaacaacctcatgtggggccacatttgccattatgaaat

SEQ ID NO: 71538 - DNA, 2305 bp, Zea Mays
gtgccggcctgccggccatgctctgactcctccaggcccaacgatagcccaacaacaattaagggccctctgccacaccgcaggctaccccaacatgccaatccttgttgcctccggagacctggcctcagccccttccccggccattcgagcgccgccctgctcgcctgcccttgcccactacgccctcttgatttctccctccattccgatatatttaagcgaaaaaaaatccgataagccaagccaaacccaaacccaaccatggcgtgcatgccggctgtgtctgccccctccgtcctcgcgccggcaccggcgtcgacccgcacccacctctgctactcaacggaaatgcgacgcggcgcgctctccctccgtcccgcccgcgctatccccacgttgaggctcggcggccaccgcgacgcccgtggcgctgtcgtcgtccgcgccactgcggcagagggagccgtggagctgcaggccaaggtgacgagcaagtgcttcttcgacgtggaggtcggcggggagcctgcgggccgcatcgtcatcgggctcttcggagaggtcgtacctaagaccgtcgacaacttccgtgcgctctgcactgggtacggctacaagggctgctccttccaccggatcatcaaggactttatgattcaaggcggggacttccagcaaaacaatggtactggtgggagaagtatttatggtgaatgctttgatgatgaaaattttacactgaagcatgttggccctggtgtgctaagcatggcaaatgctggccccaacacaaatggaagtcaatttttcatttgcactgtgaagacaccgtggttggacaaccgtcacgtcgtgtttggacacgtattagaggggatggacgtggtgaagcagcttgaatcgcaagagaccagcaggtccgatactcccaagcagccttgccgaatcgttaactgtggcgaggtccccctggacagctgagcgagcgaaatgctcttggtgagtttgaacctgaggtaccgcgaagtcttctcttacgttagagcgtcgacgcccatttgtggtagcatcattcggtcagttgagttatgtgtacgtgccgtgacggaagtttaattactcagatgtggacacattaccagttaatagcaacgaattggcaagggacatctcaaaaaaaataaatgttgtcagccttccttcatttcagacaagttagcaccagctgtcggtaggacaaaaacgctggaccatcagatgtttcgctttctttcttttttttctgtagattcaacacatgaatgacaacacctgtaaagcagttgggtcgccttgcacaccccacccgctgcccaaacattaacaacatggtgtggagacgactgctaaataatctgtcctgtggacgtgtacgcatgcatggtgtgtttgcatcggtcttgatcggttgcttggttggtgcctcacctcaggaaccgagacgagatgcggacgcgagcgccaccgcctgcgcccacaccttgagccgcgccttcacgtccttgggatcgtcccctgtgacgggcagcagtgtgagaacagtgccgcagatagcacgaaggcgcggcccgcggggcaagggaagcagcgttggcgcagccttggttgatcgccacgagtccaattccattccacacccacagccgctggtgaatcacattcccatgcacagcgcgtgctttttgctgcatgaccatgacacctggcgcgcgtgctctttaaacttgggtaccgtttggttcagatatttgtaacgtaatgggtaagtgataacgttaaatcatgtttgttttagttccaccgtaatcagataccatactaaaaattgataccggactactcaaacttgttaccgacagtaatcgaatgtaaaccattaccattacctttgcgttacatttcttgaaccaaaccgcaccttggttcgttccagtgcactgcctgccaaggcagggcaaagaaagagagagaggggaggcggccgtcggatgcgattccgcgccgcgcgaggtgctgtgcgtgcaaatgcccccccgtccccgtcggcttgatgccaaatggacgtgcgcgcggcgacgaattgacctggttggtgacgcggggcgagcgaggagcgacctcatcggctcggccggaccgacgcgactcgcgtgcgtacggacaagccgatcggccggagcactcgttgacaaaacagatggttgcgcctactaagcaacagaaaagaaaactgctagctataggcagagtaattaacgtcaat

SEQ ID NO: 71539 - DNA, 1575 bp, Zea Mays
ataaaaagaggttatcaaactagcccttcaaatggggcaaaaaggcaatgttctttgaccaccgagcaaaccccagcctccgttactctccttcctcttggctcgcctcggctcccgtcgtccccttccttgagatctctaggatacgagcgcattcgcatcgcttcgcctccgccgcggcctggggagatggcgggtttgggaaaggcgatgtacgcggtgggattctggatccgggagaccggtcaggccctcgatcgcctcggctgccgcctgcagggcaagtacttcttccacgagcagatttcaaggcatcgcaccatcatgaacatctttgacaaaaccccacatgttcatagggatgcatttgttgctccaagtgcatcccttattggtgatgttcaagtcgggcaaggagcttccatttggtatgggtgcgtcttaagaggggacgcaaacaacatacaaattggatctgggaccaatatacaagacaattctcttgtgcatgtggctaaatctaatctaagtgggaaagtctttccaacaatcattggcaataatgtcacaataggtcacagtgctgtgttacaaggatgcacggttgaggatgaagcttttgttggcatgggggcaaccctattagatggtgtcgttgttggaaagcatgggatggtagctgcaggatcccttgtaagacagaatactaggatcccttgtggagaggttgagcacaatttctcaactgcccttttacttttggttgttaagccgtatccagctctctaaccttttctttttatttcactcgaatggttccacaaaggcaaggttttcttgcgatgatggaacccaaatgacacatagactaaatcgagcacttaattatcgttctttggtgcctagtacatttccatgtggcatacatatttacaatgtccatgggtggaagtggaacgagaatatgttgcagaggccttgtttggtatcttatttctgcatgctttcatgactctgctctgttggatttaggtatggggagggaaccctgccaaatttctgaggaagctcacagatgacgagatcgcatttatcacggaatcagcttccaactattccaatctgtccaaggtgcatgctgccgagaatgccaagcctcttgaaaagattgagtttgagaaggtgttgcgcaagaagtttgctcaccaggatgaggagtatgattcctccatcggcatcactcgagggtccccaccggagctgacatccccaaatccagcccaataaacctctgtttttgtttctgttttctctttgacgccttaattattttgtattggacagcgctggattttgaccgggccatagttccatgacttaggtggtttatgtttacttttcctccccaataatcttgggtcgagcgatgttataaagctggtcatgcacttcttccagattctgtattcggtatgtttaagatgtgctccctggagagttccaccaaataaactgaaatgcattgttttgacaggtaacatggactgaattacatacttccattacctttgatgg

SEQ ID NO: 71540 - DNA, 3383 bp, Zea Mays
caaaccttaaaactgacggaaagagaagacccaccacatcccgttcactctctcctcctcccctccgctccctcccagtcccagatcccgattcgccgccgcctccggcagatccagccagcagctcccgccgcagaaccgccgcgggcgccatggagaagccatgctctctcctggtccacttcgacaagggctcggcatcgatggcgaacgagatcaaggcggatctggagggcagcgatggccccgccaaggctgacgccatgcgccgcgccatctcgctcctcctcaacggagagaccctccctcagctcttcataaccatcgtccgctacgtgctcccctccgaggaccacaccgtgcagaagcttctcctcctctacctcgagatcatagaccgccgggatccggccggccgcgccctgccggagatgatcctcatctgccagaacctccgcaacaacctccagagccccaacgagtacatccgcggcgtcactctgcggttcctctgcaggctctccgagcccgaggtgctcgagccgctcgtgccgtccgtgcttgcgaacctggagcacaggcaccaattcatccggagacacgctgtctccgcggtttccgcgatctaccgcctcccgcatggtgaccagctcatccccgacgcgccggagctcgtcgagcggttcctcgcatctgagcaggacgcgtccgcgcggaggaacgcattccttatgctctgtgcctgcgcacaggaccgcgccgtcgcctacctgctctccaacgccgatcgagtcgctgagtggcccgatctgctgcagatggccgttgtggatcttatccgcaaggtctgccgatcacaaaaccgtgccaacaagggaaggtatatcaccatcattacgtcgctgctctccgcaaccagcactgcggttgtttatgaatgtgctggtgccctggtgtcactctcttcggcacccacggctgtgcgggccgctgccaacacctactgccagttgctctcgtcgcagagtgacaacaatgtgaagctcattcttctggatcgcctcaacgagctgcgaaccctgcaccgggatgtcatggtgggtgtggtgatggacgtgcttcgtgcactggccagccccaatttagatgtcaagagaaaggttctcgatttagttctcgatttgctcaccccgcgtaatgttgaggaggtggtgctttatctcaagaaggaggtggtcaagacgcaggctggagacctcgagaagggtggcgagtaccgccagatgctggtgcaggccatccatgcttgcgctgttgagtacccagaggtggctggatctgtagtgcacctcctcatggactttcttggtgataccaatgttgctgcagctgttgatgttgtgctgtttgtacgtgagatcattgagaccaatccgaagctgcgtgtttccatgatccagaggcttattgatacattctatcagattcgggcatcccgtgtctgctcatgtgctctctggatccttggggagtactccctctctctatcagaggttgaaagcaccattgctaccattaaacaatgtcttggtgatctgccattctacactgtctctgatgaaggggaggtaactgattccaccaattcagcccaggcggtggtgaacactgtcactgtatcttccaggaggcctgttgttcttgcggatggcacttatgccacacagagcgccgctaccgagaccatttcagccccatcagttgctcatgggtcattagcatctaccctgaacctcagatcactcattttgtcaggtgatttcttcctggctgctgttgttgcatgtaccctgaccaagcttgtgttgaggctggaagaagtgcagccatccaaggttgaatcaaacaaagcttgcactggagcattgctgatcatgacatcgattctgcagctgggccagtcttcttaccttccccacccgattgataatgattcatatgacagaattgtgctgtgtttgagattgctttgcaatactggtgatgatgtcaggaagatttggttgcattcatgcagacagagctttgcgaaaatgcttgctgagaagcagttcagggagacagaggagatgaaggcaaaggcacagatctctcatgcccagccagatgatcttattgatttttaccacctgaagagcaggaagggcatgagccagcttgagttggaagatgaggtgcacgatgatttgaaggctgcaactggtgggtttactaaggatgcagatgatgcaaacaagctcaaccgcattcttcagttgactgggttcagcgatcctgtgtatgctgaagcatttgtaacagttcaccattatgacattgtacttgatgttactgtcattaaccgcacaaaggagacacttcagaacttgtgcttggaattggctacaatgggagacctcaaacttgttgatcgccctcagaactacaccttggctcctgagtctagcaaacagatccgtgctaatatcaaggtttcatcaacagagacgggggttatatttggcaacatagtttacgagacttcaaatgtgatggaacgatcagtggttgtcctaaatgatattcacatcgacatcatggattacatctcacctgctacgtgtgcagatgttactttccggaacatgtgggcagaatttgaatgggaaaataaggtggctgtgaatactgtgattcaggatgagaaggaattcttgaatcacattatcaagtcaacgaacatgaaatgtctgacaccaccgtctgcactggatggggaatgtggtttccttgctgctaacctttatgcaaagagtgtgtttggcgaggacgctttggtgaacatcagcattgagaagcaacatgacggcaagctcagtggctacattcgaataaggagcaagacccagggaattgcactcagcttaggggacaagatcactctcaagcagaaaggtggcagttaactgtgacaagatcgatcaaggagagagataagaggacagttatgaggaagtcacgaagttgtcggtcgaagatatatgttgctgtagtaacgaagctgttccaaacttccttgaaatagttgtgaagtttatgttgatttctcgacagttgtctggacttggaaacagaagcttggaggcggtgttgtcacgttatttttgtagagatgaattggagctcattttctgttgcatatagatttgccaattgtgttagggtacttttatggtgtttatttaagaaatgaggtagtccattatctttttactcagtttctttggtttgtggaataaattgacgatgagaccccctagaacttcttccctactactacatta

SEQ ID NO: 71541 - DNA, 2003 bp, Zea Mays
gttcgactcttcctcttctccaactaaacggctaaaaatttcagaactgccgatcctggccgtcgatcatggatccgagcaccatcccggcaccactttccattaataaaatttcgaccgttggagacagccacgctagtagaaatccctccaaacccaacgcctacaattacaaagatacaccgcctcccgcttccttctccgccatacctcgtgtccgacgagccctagggaacgcgagaccggccgtcggcgagagaaggactcgaatggagtgcgcaagggagttgcgggttcgctccacgtttacggcggcggccatggcgtccaagaagcaggtggggcctggaggcgcggttcccgctcaggaacagatgaacggcggcgatgccgccagactggtcaggaagccaatggatacatttccacagccagcggcggcaagaggccgtagggcacttgtcgacgttggcaatcttatgaatggccggccttctcttgtgaaccatcagaagcaagcggttgcggcagcggcaaccagtcataaaccactcaacgtcggcaacaagaagccacttgttcctcaggcagcagcaagaggcctgcgaccccttgccgacgttacgaatcttatgatcaaagaccgtgctgctcctgcaaatcgtcagaagcctgtggatgctgtgtttaacaggaacgggaaggcagtaaagctgaaggaatgcaaggtgaagcctgaagtcattgtgatcattccagattccgagaaggagaagaaaggcaaattccctggaggtcagagagtctgtaggagggtgccaacactttttgacaatttgacaaaatgcagcagggcctctgatgggattaccaccccgaagaagaaggatccatatgacattgatgcacctgattcttgcaatgagctggcagtcgttgaatatgttgaggacatttacagattctacaagagcactgagggcacctgccttcctctcagcagctacatgagctcacaggctgaaatcagtgagagaatgagagctatccttatcgactggattatcgagtacttatccatggagagtgtaccaagaaaggagctacagctcgtcggcataagtgccatgctgatagcaagcaagtacgaagagatatgggctccactggttaaggacttgatgtgcctctgtgacaacgcatttaccagagaccagattctgaccaaggaaaaggccatcctggacatgctccattggaacctgacggttccaacaatgtacatgttcattgttaggtacctgaaagccgcaatgtgtgacacagagcttgagaacatgacattcttctactccgagctggcattggtccagtacgcgatgctggtttaccctccatcggtgaccgcagccgctgccgtctatgctgccaggtctacacttgggatgaatccacagtggactgatattctggaacatcacactggcctagctgagccacagttactggactgcgctaggcggctgatcagcttccatgccctggctccggaaagcaagcaaaaggcggtgtacaggaaatactccaagcccaagctcggctccgtcgcgcttcaatcccctgacaagaagcttttgtcaggttgaggctcgctgctgctcattgtattgtatatcatcgcttcgatggtaccatttgtttgggtcgtgtgctctttgcttttctactgaagcagagcatgtgttggttagtcagtttgcttaaacgactactgaagcagagccttgtatgtgtgttgggagaatgtgatatgtgatgtcaagctcaaacttcttctcatcattggataaactacttgttggcgtggcattgccgctcgtcatgtggcactactgcgccccatcactaccgcgcctcacagcacagtgcaactcgtcaaaaacgccataatgtttttactctgaactccatttctatagatagattatcgatctaactgattt

SEQ ID NO: 71542 - DNA, 1504 bp, Zea Mays
ccgtccttcctggggcccacgttcgtcgacgtggggtagaggtagaggaggggttaagtagtactccaggctccagcaggggaggggagagatgcgtgttcgtcttccttcccacccatccctgtttctagctcctcctccttccccagcgggtggccgcagcaatttgcaagcagaggaagaaagcttccgggcgtctcggcgcgaagaacagcgtcacgttctgacggaggagaacaggagaaggtctcgggtttcggccggctgcctgtatgagcgccaccatggcgtggtatccattaccgcagagcggaggcacaggcacgccgtcgggcggcggcgagctgttggacgaccagagcggcggctgggcgctctggagcttcggctcagctgacgacgaccacggcgctggcgtggtgcgcgcggagacgcacgggagttcagacgagcggacggaggagggccggcccgcgccgccgcagcagcagcagcaggcaacagacgacatcttcatgagccagttctcggacgaggaggtgaggaagatggacgacgccccgttcgaggcgctgggcatgttcccggactccatgcaccagctgctgtcctacgagaacatgctgagcggcggggcgctgctgagctgctgcagctcggaggacctgctcctgaacgccacgctgggcgtggacgccatggacacctgcggcttccctctcttcagccacgacctgcagctgcagagcgcggcgccggatctcacgctcacgcctgaggaccaggatggggcgagctttgctgcgacgaaaaggagcaggtcatccgtcgcggatgaagggggcttcctcttccaagcgctggtgctccgggagctcgaggacgtcgtgttccaggctggccgagagttcgagtgccaagtgcggcgctgcgaacggaacgccgccgccttcctctgcaactgcaactgcaaccggcggtaggatctcaacaccagggccaggccgcccggaacgggagacgaacgccatcgacaggacggtggcggacctcaccatgcgccccgctgtcctcgcgagccgctgccccgccgacggcgactcaggggcggaggcgcactccgcaaccaccgaccggcacgacgacggcgtagaaagggcaccgcgcgactgatccgtcttttttttgccggctactgctacgattcgttcggccatgttgggcgcagagagagagagagatgtacatatatatgatgaagagaaccggctgtcgtttatgcatttctacggaacttcgatatagtgaagtcactgtctgatgcagctgaacactggcaccgtttatacagtggtatttggaactggggtacacgactgttattaattattatgtttcttttcttttttagctttcggttgcatactgacacacgtgtgtttgtttggaaaggcaagaaactagaagtgatgagtgaactggtctttgcgttagtgaactggtc

SEQ ID NO: 71543 - DNA, 1902 bp, Zea Mays
gtcgccacgcggcggccgcaggatatgagcatatacgcctcctccctgaactagagagcagctcactcccgctgcccagtcctcgccaccgcccagtccatcgccaaccaatggcctccgccatggagctctcgctcctcaaccccgccgcgacgcaccgccaccgcggcggcctcgccggcctgcccctcgcgcggcgctccgtggtccgctttcgcgtgtccgcctccgccgcggccgcggcgccgcccaagtcctcaggccccaagaagcggggcaagacggagatccaggagacgctgctcacgccccggttctacaccacggacttcgacgagatggagcgcctcttcaacgccgagatcaacaagcagctcaaccaggcggagttcgacgccctgctacaggagttcaagacggactacaaccagacccacttcgtgcgcaaccccgagttcaaggccgccgccgacaggatggagggcccgctccgccagatcttcgtcgagttcctcgagcgctcctgcaccgccgagttctccggcttcctcctctacaaggagctcggccgcaggctcaagaaaaccaacccggtcgtggcggagatcttctcgctcatgtcaagggacgaggcgcgccatgctgggttcttgaacaaggggctgtctgacttcaacttggcgctggacctggggttcctgaccaaggctaggaagtacaccttcttcaagcccaagttcatcttctacgccacctacctgtccgagaagatcgggtactggaggtacatcaccatcttcaggcacctcaaggcgaacccggagtaccaggtgtaccccatcttcaagtacttcgagaactggtgccaggacgagaacaggcacggcgacttcttctctgccctgctcaaggctcagccgcagttcctcaatgactggaaggccaagctctggtcacggttcttctgcctctcggtgtatgtgaccatgtacctgaatgactgccaacgcactgcattctatgagggaattggtctggacaccaaagaattcgacatgcatgtgatcatcgagaccaaccgcacaacggcgaggatcttccctgctgtcctagacgtcgagaacccagagttcaagaggaagcttgacaggatggttgagatcaaccagaagatcattatcatcgccgcctacctcatgccccccatcgagtctggctcggttgatttcgccgaatttgagccccggctcgtttactgattctgtacaaagatttatccttgagttattcaccctgaaagacaagctgctggtgctttctgccgaaggggccttggatgaatggtgaaaaccgctggatggttagaggatctacatcttcttgtgttcttctgtaaaatactgagacttgggcagcataaaaagcttggcaaatttctgttgtgtggcatctccatgtaagtaacagtggactgcatcagaagcgagccttccagttttgcgacagaagggggcgtccgaagttgttgtactgctaatgaacgtcgaactagcatgataaatgtatcccagcacatttggttgattgtgtaacactagaaagccattgaacagcgtttggctatgatgctgtaccatctgaatttacatagctccttttgttttagcgatgtcattgtcatgcatcatgagtgacgtctacaaacatttgtaagaaaatcgtggtaaaagattgtcagtattagcatagtcctttcatcacaatcatattacgttcggaaactctaccatttgcgttgttaaaccacacacatttttagaaggtaaaacacgtaagtttaatgtaacaaagttgaattcatatacatggttataagacataggagtgcccgtgggcatttgt

SEQ ID NO: 71544 - DNA, 1999 bp, Zea Mays
cttgggttgagtcgagccggggtctggtttccagacctagcccaaactgaaaaaattgttcttgcttcccgatttccagtcctctgtcgtttgttgtcccatactcccatctgttctccgcgaggcgcaacgaaggcacaaaacccttacctccatcaaaccctagcgctcgtgtccccgtttagctcccgtcgccgctaccatgggctcagatgcggatatggaggactacgggttcgagtactcagacgaggagccggaggagcaggatgtcgatatcgagaaccagtattacaactctaaagttaatttcttttgagggcagatcaagatgaggaggttgaagacatgcttatagccttacacacacggccacacttgtcgctggtgatataaaggcaaatcaattaagggcggatgctggcggggtcgcattcgcccgtttgttgttcgttcgagttttctttgtatggtggcacacaactcttaacaaggaggcaccaacattatgtgctaactaagcaaggtttggttgagacagacccagagggtgcacttgctggttttgatcaagtagtcagtatggagcctgaaaaagctgaatggggatttaaagctcttaaacaaactgtcaagctttactataagctgggaaaatacaaagaaatgatggatgcctatagagagatgttaacatacataaaatctgctgtcacccggaactacagtgagaaatgtataaacaacataatggattttgtttctggatcagctagtcagaactttagtcttctgcaagagttctaccagacaacactgaaagcgcttgaagaagcgaaaaatgagagattatggttcaagacaaacttgaagctctgcaaaatttggtttgatatgggcgaatatggtcgcatgagcaagatattgaaggagctgcataaatcttgccaaagggaagatggttctgatgatcaaaagaaaggcacacagcttttggaagtctatgctattgaaatccaaatgtacactgaaacaaagaataataaaaagcttaaggaattgtatcaaagggctctttccatcaaatcggcgataccacatccaagaatcatgggtataattcgtgagtgtggtgggaagatgcatatggctgagaggcagtgggatgaggctgccactgatttctttgaagctttcaagaactatgatgaagcaggcaatccgcggagaattcaatgcctaaaatatcttgtccttgccaatatgttgatggagtctgaagtgaatccttttgatggacaagaggccaagccgtacaagaacgatagtgaaatccttgcaatgacaaacctgattgcagcgtaccagaagaacgacatcatggagtttgaaaagatcctgaagagtaatagaagaacaataatggatgatccttttatccgtaactatattgaggatctgttgaagaacatcagaacccaagtgctgctcaagcttattaaaccgtatacacgaatcaggattccattcatttcgcaggaactcaatttcccggagaaggatgtggagcagctgttggtatcgctcatcctggacaaccgaatccaaggccacatagaccaggtcaacaagttgctagagcgtggagagaggtccaaggggatgaggaagtacaatgccatcgacaagtggaatactcagctcaagtccatttaccaaacattgtccaacagagtttgatgagacgaatcgtggctgctgtatgtttgcacacctagaattgttgatagcctgttttggggatttgagggcaactgcaaagagctgtatggcaacgcttgcagtagaatcttggatctgggtaaaatgagatgtccatgtaagcatttgatattagctttttcagttatattgactatgaggatgtccatgtagcgatttcgttaggactgctttcaacgtctaatctcgagaatgtcactggtgccttttactgttg

SEQ ID NO: 71545 - DNA, 2406 bp, Zea Mays
gcaaaatgcaaggtctagtctagtacacactcgacttgcaatatacaacacgcttgtggcctgaagaacggaagaactcggactcgagcaccccgaagcgagccaccgccgatctgctcctcctgagtcctgaccctcctccgtgcgctgcgcaggcatgaggctcctcctcgtcggcgccctactcctatgtgccaccgcggcggtggagtccaagccgcccctcgacaccctgggcatacccccgcaagatgaggcgtactacagaggcggcgtgattaaatgcagggacggatcaggcaggttctcccgggagcagctcaacgacgacttctgcgactgccccgacggcaccgacgagcccgggacatctgcgtgccctgaggcgaagttctactgcaagaatgcaggccacactccagtcacgatcttctcatcacgagtgaatgacggcatttgtgattgctgtgatgggagtgatgaatatgacagcaatatcacctgtaagaacacttgctgggaggctggcaaagcggcaagggagaaattgaagaagaaagtcgctacatacaaaagtggtgtagttattcggaatcaggaagttgagagggcaaaagaggcttatgctaaagacgaagcagagttagcaaaattgaagggtgaagagaaaatactccaaggacttgttgacaaactcaaagagcaaaagagacttatagagaaggcagaggaagaagaacgtttaagaaaagagaaggaagagaagagaataaaagaagctgaaaagcaagctgctgatgaaaagggaacacctgatgcctctccggatgtagattctaaggaaactcatgaccatgtgcaagaagatgaaaacaaggtagccgaagagcatgatgtacatgcaacggaccatgataatcatgcaacagaccatgataatcatgcagcagaaagcggagcatctgttgagcagggttctgtaaacaaagatgacattagcgttgaagctggaactttagatgaattgctgcacaaggagtctgcagtacctacattagagaaggatcatagctctgacaatcctgagggtttatcaagagaagagttaggtcgcatggtagcttcacgttggactggagaaagtgtaagtgaggttagtaaagatgataagaagggacatgaagatgagcaagaaataccagaacctgcaaaagaagcacttgaagacgaattagaaattccagaacctgctgaagaaaattatgatggttatcattcagaagttgaggatgacaggcataaatatgaagatgaagagtttgatcatgagtcagaagatgaatatgttgatgaccatgatgagcatgttgagtcctataaatctgatgatgaccagaaagatttaactgagccaggacatgcatcgtggttggacaaaattcagcagactgtacagaatgttttccaaaaattcaacttttttaggacccctgtagatttgtcagaggcttctcgtgttcgtaaggagtatgacgatgccaactcaaagctttcaaaaattcagtctaagatatccaatttagctgagaagctaaaacatgattttggcaaagacaaggagttctattccttttatgatcagtgctttgagaccaaggaaggaaagtatacttacaaggtctgtgcatataagaaagcatcacaggctgaagggcacagttccaccaacctggggagatgggacaaatttgaagaatcgtacagagtaatgcacttttcaggtggagacaaatgctggaatggtcctgaccgaagcctaaaggttaggcttagatgtgggctgagcaatgagcttaatgacgttgatgagcctagcagatgcgagtatgttgctgtattgtcgacgcccgcactctgcgtcgaggagaagctgaaggagctgcaaaacaaactggatgccatgtcttcgaagcagcccgggcatgatgaactttaaacggttccggcgtggacaaagaaaatttcaccaggaagcatagattgacagttacactcataaccttaagggtggaagtcaatgggggcatatggacaggaaagggccaagctgaagaaatgggaatcaggctcatcccgagttgtttggtggaggcgactgcaaccgtgcttttctttgtggtttaacattgctctatttaattagggagagacgctaggcttttgcgtctccagcttcattgccagccattacacatttgatggaatatatagtaagaaacagtacactctgaaccatcataatttgaagatgctagttaaccccgggttgttacatgatacaagtactttgttcagctcggtcatttggagcagaaggatttcccatttggaacagtgaatcgcccg

SEQ ID NO: 71546 - DNA, 2403 bp, Zea Mays
gcaaaatgcaaggtctagtctagtacacactcgacttgcaatatacaacacgcttgtggcctgaagaacggaagaactcggactcgagcaccccgaagcgagccaccgccgatctgctcctcctgagtcctgaccctcctccgtgcgctgcgcaggcatgaggctcctcctcgtcggcgccctactcctatgtgccaccgcggcggtggagtccaagccgcccctcgacaccctgggcatacccccgcaagatgaggcgtactacagaggcggcgtgattaaatgcagggacggatcaggcaggttctcccgggagcagctcaacgacgacttctgcgactgccccgacggcaccgacgagcccgggacatctgcgtgccctgaggcgaagttctactgcaagaatgcaggccacactccagtcacgatcttctcatcacgagtgaatgacggcatttgtgattgctgtgatgggagtgatgaatatgacagcaatatcacctgtaagaacacttgctgggaggctggcaaagcggcaagggagaaattgaagaagaaagtcgctacatacaaaagtggtgtagttattcggaatcaggaagttgagagggcaaaagaggcttatgctaaagacgaagcagagttagcaaaattgaagggtgaagagaaaatactccaaggacttgttgacaaactcaaagagcaaaagagacttatagagaaggcagaggaagaagaacgtttaagaaaagagaaggaagagaagagaataaaagaagctgaaaagcaagctgctgatgaaaagggaacacctgatgcctctccggatgtagattctaaggaaactcatgaccatgtgcaagaagatgaaaacaaggtagccgaagagcatgatgtacatgcaacggaccatgataatcatgcaacagaccatgataatcatgcagcagaaagcggagcatctgttgagcagggttctgtaaacaaagatgacattagcgttgaagctggaactttagatgaattgctgcacaaggagtctgcagtacctacattagagaaggatcatagctctgacaatcctgagggtttatcaagagaagagttaggtcgcatggtagcttcacgttggactggagaaagtgtaagtgaggttagtaaagatgataagaagggacatgaagatgagcaagaaataccagaacctgcaaaagaagcacttgaagacgaattagaaattccagaacctgctgaagaaaattatgatggttatcattcagaagttgaggatgacaggcataaatatgaagatgaagagtttgatcatgagtcagaagatgaatatgttgatgaccatgatgagcatgttgagtcctataaatctgatgatgaccagaaagatttaactgagccaggacatgcatcgtggttggacaaaattcagcagactgtacagaatgttttccaaaaattcaacttttttaggacccctgtagatttgtcagaggcttctcgtgttcgtaaggagtatgacgatgccaactcaaagctttcaaaaattcagtctaagatatccaatttagctgagaagctaaaacatgattttggcaaagacaaggagttctattccttttatgatcagtgctttgagaccaaggaaggaaagtatacttacaaggtctgtgcatataagaaagcatcacaggctgaagggcacagttccaccaacctggggagatgggacaaatttgaagaatcgtacagagtaatgcacttttcaggtggagacaaatgctggaatggtcctgaccgaagcctaaaggttaggcttagatgtgggctgagcaatgagcttaatgacgttgatgagcctagcagatgcgagtatgttgctgtattgtcgacgcccgcactctgcgtcgaggagaagctgaaggagctgcaaaacaaactggatgccatgtcttcgaagcagcccgggcatgatgaactttaaacggttccggcgtggacaaagaaaatttcaccaggaagcatagattgacagttacactcataaccttaagggtggaagtcaatgggggcatatggacaggaaagggccaagctgaagaaatgggaatgctcatcccgagttgtttggtggaggcgactgcaaccgtgcttttctttgtggtttaacattgctctatttaattagggagagacgctaggcttttgcgtctccagcttcattgccagccattacacatttgatggaatatatagtaagaaacagtacactctgaaccatcataatttgaagatgctagttaaccccgggttgttacatgatacaagtactttgttcagctcggtcatttggagcagaaggatttcccatttggaacagtgaatcgcccg

SEQ ID NO: 71547 - DNA, 2643 bp, Zea Mays
gcaaaatgcaaggtctagtctagtacacactcgacttgcaatatacaacacgcttgtggcctgaagaacggaagaactcggactcgagcaccccgaagcgagccaccgccgatctgctcctcctgagtcctgaccctcctccgtgcgctgcgcaggcatgaggctcctcctcgtcggcgccctactcctatgtgccaccgcggcggtggagtccaagccgcccctcgacaccctgggcatacccccgcaagatgaggcgtactacagaggcggcgtgattaaatgcagggacggatcaggcaggttctcccgggagcagctcaacgacgacttctgcgactgccccgacggcaccgacgagcccgggacatctgcgtgccctgaggcgaagttctactgcaagaatgcaggccacactccagtcacgatcttctcatcacgagtgaatgacggcatttgtgattgctgtgatgggagtgatgaatatgacagcaatatcacctgtaagaacacttgctgggaggctggcaaagcggcaagggagaaattgaagaagaaagtcgctacatacaaaagtggtgtagttattcggaatcaggaagttgagagggcaaaagaggcttatgctaaagacgaagcagagttagcaaaattgaagggtgaagagaaaatactccaaggacttgttgacaaactcaaagagcaaaagagacttatagagaaggcagaggaagaagaacgtttaagaaaagagaaggaagagaagagaataaaagaagctgaaaagcaagctgctgatgaaaagggaacacctgatgcctctccggatgtagattctaaggaaactcatgaccatgtgcaagaagatgaaaacaaggtagccgaagagcatgatgtacatgcaacggaccatgataatcatgcaacagaccatgataatcatgcagcagaaagcggagcatctgttgagcagggttctgtaaacaaagatgacattagcgttgaagctggaactttagatgaattgctgcacaaggagtctgcagtacctacattagagaaggatcatagctctgacaatcctgagggtttatcaagagaagagttaggtcgcatggtagcttcacgttggactggagaaagtgtaagtgaggttagtaaagatgataagaagggacatgaagatgagcaagaaataccagaacctgcaaaagaagcacttgaagacgaattagaaattccagaacctgctgaagaaaattatgatggttatcattcagaagttgaggatgacaggcataaatatgaagatgaagagtttgatcatgagtcagaagatgaatatgttgatgaccatgatgagcatgttgagtcctataaatctgatgatgaccagaaagatttaactgagccaggacatgcatcgtggttggacaaaattcagcagactgtacagaatgttttccaaaaattcaacttttttaggacccctgtagatttgtcagaggcttctcgtgttcgtaaggagtatgacgatgccaactcaaagctttcaaaaattcagtctaagatatccaatttagctgagaagctaaaacatgattttggcaaagacaaggagttctattccttttatgatcagtgctttgagaccaaggaaggaaagtatacttacaaggtctgtgcatataagaaagcatcacaggctgaagggcacagttccaccaacctggggtaatgtcatttgaggaatatgttcaggggatcaactagcgagggcccattctgtctttagactatatatgtttctattgttttacatgactttgaatatcaggtggtttctgaatatttttatagtggatttaagaaatactgctctttaggagatgggacaaatttgaagaatcgtacagagtaatgcacttttcaggtggagacaaatgctggaatggtcctgaccgaagcctaaaggttaggcttagatgtgggctgagcaatgagcttaatgacgttgatgagcctagcagatgcgagtatgttgctgtattgtcgacgcccgcactctgcgtcgaggagaagctgaaggagctgcaaaacaaactggatgccatgtcttcgaagcagcccgggcatgatgaactttaaacggttccggcgtggacaaagaaaatttcaccaggaagcatagattgacagttacactcataaccttaagggtggaagtcaatgggggcatatggacaggaaagggccaagctgaagaaatgggaatgtagggttcaggtcgcctacctggcaatgttagctggcatagagctgtttttttagctgaatttgattggatgttgcaatttttccaggctcatcccgagttgtttggtggaggcgactgcaaccgtgcttttctttgtggtttaacattgctctatttaattagggagagacgctaggcttttgcgtctccagcttcattgccagccattacacatttgatggaatatatagtaagaaacagtacactctgaaccatcataatttgaagatgctagttaaccccgggttgttacatgatacaagtactttgttcagctcggtcatttggagcagaaggatttcccatttggaacagtgaatcgcccg

SEQ ID NO: 71548 - DNA, 1620 bp, Zea Mays
ctcgacttgcaatatacaacacgcttgtggcctgaagaacggaagaactcggactcgagcaccccgaagcgagccaccgccgatctgctcctcctgagtcctgaccctcctccgtgcgctgcgcaggcatgaggctcctcctcgtcggcgccctactcctatgtgccaccgcggcggtggagtccaagccgcccctcgacaccctgggcatacccccgcaagatgaggcgtactacagaggcggcgtgattaaatgcagggacggatcaggcaggttctcccgggagcagctcaacgacgacttctgcgactgccccgacggcaccgacgagcccgggacatctgcgtgccctgaggcgaagttctactgcaagaatgcaggccacactccagtcacgatcttctcatcacgagtgaatgacggcatttgtgattgctgtgatgggagtgatgaatatgacagcaatatcacctgtaagaacacttgctgggaggctggcaaagcggcaagggagaaattgaagaagaaagtcgctacatacaaaagtggtgtagttattcggaatcaggaagttgagagggcaaaagaggcttatgctaaagacgaagcagagttagcaaaattgaagggtgaagagaaaatactccaaggacttgttgacaaactcaaagagcaaaagagacttatagagaaggcagaggaagaagaacgtttaagaaaagagaaggaagagaagagaataaaagaagctgaaaagcaagctgctgatgaaaagggaacacctgatgcctctccggatgtagattctaaggaaactcatgaccatgtgcaagaagatgaaaacaaggtagccgaagagcatgatgtacatgcaacggaccatgataatcatgcaacagaccatgataatcatgcagcagaaagcggagcatctgttgagcagggttctgtaaacaaagatgacattagcgttgaagctggaactttagatgaattgctgcacaaggagtctgcagtacctacattagagaaggatcatagctctgacaatcctgagggtttatcaagagaagagttaggtcgcatggtagcttcacgttggactggagaaagtgtaagtgaggttagtaaagatgataagaagggacatgaagatgagcaagaaataccagaacctgcaaaagaagcacttgaagacgaattagaaattccagaacctgctgaagaaaattatgatggttatcattcagaagttgaggatgacaggcataaatatgaagatgaagagtttgatcatgagtcagaagatgaatatgttgatgaccatgatgagcatgttgagtcctataaatctgatgatgaccagaaagatttaactgagccaggacatgcatcgtggttggacaaaattcagcagactgtacagaatgttttccaaaaattcaacttttttaggacccctgtagatttgtcagaggcttctcgtgttcgtaaggagtatgacgatgccaactcaaagctttcaaaaattcagtctaagatatccaatttagctgagaagctaaaacatgattttgagtatgtccatggaatcagatttaattttaaacacattattg

SEQ ID NO: 71549 - DNA, 1750 bp, Zea Mays
ctcgacttgcaatatacaacacgcttgtggcctgaagaacggaagaactcggactcgagcaccccgaagcgagccaccgccgatctgctcctcctgagtcctgaccctcctccgtgcgctgcgcaggcatgaggctcctcctcgtcggcgccctactcctatgtgccaccgcggcggtggagtccaagccgcccctcgacaccctgggcatacccccgcaagatgaggcgtactacagaggcggcgtgattaaatgcagggacggatcaggcaggttctcccgggagcagctcaacgacgacttctgcgactgccccgacggcaccgacgagcccgggacatctgcgtgccctgaggcgaagttctactgcaagaatgcaggccacactccagtcacgatcttctcatcacgagtgaatgacggcatttgtgattgctgtgatgggagtgatgaatatgacagcaatatcacctgtaagaacacttgctgggaggctggcaaagcggcaagggagaaattgaagaagaaagtcgctacatacaaaagtggtgtagttattcggaatcaggaagttgagagggcaaaagaggcttatgctaaagacgaagcagagttagcaaaattgaagggtgaagagaaaatactccaaggacttgttgacaaactcaaagagcaaaagagacttatagagaaggcagaggaagaagaacgtttaagaaaagagaaggaagagaagagaataaaagaagctgaaaagcaagctgctgatgaaaagggaacacctgatgcctctccggatgtagattctaaggaaactcatgaccatgtgcaagaagatgaaaacaaggtagccgaagagcatgatgtacatgcaacggaccatgataatcatgcaacagaccatgataatcatgcagcagaaagcggagcatctgttgagcagcagggttctgtaaacaaagatgacattagcgttgaagctggaactttagatgaattgctgcacaaggagtctgcagtacctacattagagaaggatcatagctctgacaatcctgagggtttatcaagagaagagttaggtcgcatggtagcttcacgttggactggagaaagtgtaagtgaggttagtaaagatgataagaagggacatgaagatgagcaagaaataccagaacctgcaaaagaagcacttgaagacgaattagaaattccagaacctgctgaagaaaattatgatggttatcattcagaagttgaggatgacaggcataaatatgaagatgaagagtttgatcatgagtcagaagatgaatatgttgatgaccatgatgagcatgttgagtcctataaatctgatgatgaccagaaagatttaactgagccaggacatgcatcgtggttggacaaaattcagcagactgtacagaatgttttccaaaaattcaacttttttaggacccctgtagatttgtcagaggcttctcgtgttcgtaaggagtatgacgatgccaactcaaagctttcaaaaattcagtctaagatatccaatttagctgagaagctaaaacatgattttggcaaagacaaggagttctattccttttatgatcagtgctttgagaccaaggaaggaaagtatacttacaaggtctgtgcatataagaaagcatcacaggctgaagggcacagttccaccaacctggggtaatgtcatttgaggaatatgttcaggggatcaactagcga

SEQ ID NO: 71550 - DNA, 2833 bp, Zea Mays
ctcgacttgcaatatacaacacgcttgtggcctgaagaacggaagaactcggactcgagcaccccgaagcgagccaccgccgatctgctcctcctgagtcctgaccctcctccgtgcgctgcgcaggcatgaggctcctcctcgtcggcgccctactcctatgtgccaccgcggcggtggagtccaagccgcccctcgacaccctgggcatacccccgcaagatgaggcgtactacagaggcggcgtgattaaatgcagggacggatcaggcaggttctcccgggagcagctcaacgacgacttctgcgactgccccgacggcaccgacgagcccgggacatctgcgtgccctgaggcgaagttctactgcaagaatgcaggccacactccagtcacgatcttctcatcacgagtgaatgacggcatttgtgattgctgtgatgggagtgatgaatatgacagcaatatcacctgtaagaacacttgctgggaggctggcaaagcggcaagggagaaattgaagaagaaagtcgctacatacaaaagtggtgtagttattcggaatcaggaagttgagagggcaaaagaggcttatgctaaagacgaagcagagttagcaaaattgaagggtgaagagaaaatactccaaggacttgttgacaaactcaaagagcaaaagagacttatagagaaggcagaggaagaagaacgtttaagaaaagagaaggaagagaagagaataaaagaagctgaaaagcaagctgctgatgaaaagggaacacctgatgcctctccggatgtagattctaaggaaactcatgaccatgtgcaagaagatgaaaacaaggttggcatttctttctgttttagtgttatgcttattatacatcaaacaactgtatgcattaagtatcaaatcatttacatcagtaatgaggaatctgtatttggttttatctttataattcccttatatcatttgctaaaacaataacaccttatagtgttacatgtgccctggacactggtgtttccattattcctgtttaatattatgtgaaatcacagttcagaaggatgctccattactgtaaaacatagataatataaccattgttgaacatgggcagtaatccgaaatgtagatgtttactggatagttcaactgcaacatatagatctttgctatcacatcgtttcgtttgttggacataggtagccgaagagcatgatgtacatgcaacggaccatgataatcatgcaacagaccatgataatcatgcagcagaaagcggagcatctgttgagcagcagggttctgtaaacaaagatgacattagcgttgaagctggaactttagatgaattgctgcacaaggagtctgcagtacctacattagagaaggatcatagctctgacaatcctgagggtttatcaagagaagagttaggtcgcatggtagcttcacgttggactggagaaagtgtaagtgaggttagtaaagatgataagaagggacatgaagatgagcaagaaataccagaacctgcaaaagaagcacttgaagacgaattagaaattccagaacctgctgaagaaaattatgatggttatcattcagaagttgaggatgacaggcataaatatgaagatgaagagtttgatcatgagtcagaagatgaatatgttgatgaccatgatgagcatgttgagtcctataaatctgatgatgaccagaaagatttaactgagccaggacatgcatcgtggttggacaaaattcagcagactgtacagaatgttttccaaaaattcaacttttttaggacccctgtagatttgtcagaggcttctcgtgttcgtaaggagtatgacgatgccaactcaaagctttcaaaaattcagtctaagatatccaatttagctgagaagctaaaacatgattttggcaaagacaaggagttctattccttttatgatcagtgctttgagaccaaggaaggaaagtatacttacaaggtctgtgcatataagaaagcatcacaggctgaagggcacagttccaccaacctggggagatgggacaaatttgaagaatcgtacagagtaatgcacttttcaggtggagacaaatgctggaatggtcctgaccgaagcctaaaggttaggcttagatgtgggctgagcaatgagcttaatgacgttgatgagcctagcagatgcgagtatgttgctgtattgtcgacgcccgcactctgcgtcgaggagaagctgaaggagctgcaaaacaaactggatgccatgtcttcgaagcagcccgggcatgatgaactttaaacggttccggcgtggacaaagaaaatttcaccaggaagcatagattgacagttacactcataaccttaagggtggaagtcaatgggggcatatggacaggaaagggccaagctgaagaaatgggaatgtagggttcaggtcgcctacctggcaatgttagctggcatagagctgtttttttagctgaatttgattggatgttgcaatttttccaggctcatcccgagttgtttggtggaggcgactgcaaccgtgcttttctttgtggtttaacattgctctatttaattagggagagacgctaggcttttgcgtctccagcttcattgccagccattacacatttgatggaatatatagtaagaaacagtacactctgaaccatcataatttgaagatgctagttaaccccgggttgttacatgatacaagtactttgttcagctcggtcatttggagcagaaggatttcccatttggaacagtgaatcgcccg

SEQ ID NO: 71551 - DNA, 2369 bp, Zea Mays
ctcgacttgcaatatacaacacgcttgtggcctgaagaacggaagaactcggactcgagcaccccgaagcgagccaccgccgatctgctcctcctgagtcctgaccctcctccgtgcgctgcgcaggcatgaggctcctcctcgtcggcgccctactcctatgtgccaccgcggcggtggagtccaagccgcccctcgacaccctgggcatacccccgcaagatgaggcgtactacagaggcggcgtgattaaatgcagggacggatcaggcaggttctcccgggagcagctcaacgacgacttctgcgactgccccgacggcaccgacgagcccgggacatctgcgtgccctgaggcgaagttctactgcaagaatgcaggccacactccagtcacgatcttctcatcacgagtgaatgacggcatttgtgattgctgtgatgggagtgatgaatatgacagcaatatcacctgtaagaacacttgctgggaggctggcaaagcggcaagggagaaattgaagaagaaagtcgctacatacaaaagtggtgtagttattcggaatcaggaagttgagagggcaaaagaggcttatgctaaagacgaagcagagttagcaaaattgaagggtgaagagaaaatactccaaggacttgttgacaaactcaaagagcaaaagagacttatagagaaggcagaggaagaagaacgtttaagaaaagagaaggaagagaagagaataaaagaagctgaaaagcaagctgctgatgaaaagggaacacctgatgcctctccggatgtagattctaaggaaactcatgaccatgtgcaagaagatgaaaacaagcagggttctgtaaacaaagatgacattagcgttgaagctggaactttagatgaattgctgcacaaggagtctgcagtacctacattagagaaggatcatagctctgacaatcctgagggtttatcaagagaagagttaggtcgcatggtagcttcacgttggactggagaaagtgtaagtgaggttagtaaagatgataagaagggacatgaagatgagcaagaaataccagaacctgcaaaagaagcacttgaagacgaattagaaattccagaacctgctgaagaaaattatgatggttatcattcagaagttgaggatgacaggcataaatatgaagatgaagagtttgatcatgagtcagaagatgaatatgttgatgaccatgatgagcatgttgagtcctataaatctgatgatgaccagaaagatttaactgagccaggacatgcatcgtggttggacaaaattcagcagactgtacagaatgttttccaaaaattcaacttttttaggacccctgtagatttgtcagaggcttctcgtgttcgtaaggagtatgacgatgccaactcaaagctttcaaaaattcagtctaagatatccaatttagctgagaagctaaaacatgattttggcaaagacaaggagttctattccttttatgatcagtgctttgagaccaaggaaggaaagtatacttacaaggtctgtgcatataagaaagcatcacaggctgaagggcacagttccaccaacctggggagatgggacaaatttgaagaatcgtacagagtaatgcacttttcaggtggagacaaatgctggaatggtcctgaccgaagcctaaaggttaggcttagatgtgggctgagcaatgagcttaatgacgttgatgagcctagcagatgcgagtatgttgctgtattgtcgacgcccgcactctgcgtcgaggagaagctgaaggagctgcaaaacaaactggatgccatgtcttcgaagcagcccgggcatgatgaactttaaacggttccggcgtggacaaagaaaatttcaccaggaagcatagattgacagttacactcataaccttaagggtggaagtcaatgggggcatatggacaggaaagggccaagctgaagaaatgggaatgtagggttcaggtcgcctacctggcaatgttagctggcatagagctgtttttttagctgaatttgattggatgttgcaatttttccaggctcatcccgagttgtttggtggaggcgactgcaaccgtgcttttctttgtggtttaacattgctctatttaattagggagagacgctaggcttttgcgtctccagcttcattgccagccattacacatttgatggaatatatagtaagaaacagtacactctgaaccatcataatttgaagatgctagttaaccccgggttgttacatgatacaagtactttgttcagctcggtcatttggagcagaaggatttcccatttggaacagtgaatcgcccg

SEQ ID NO: 71552 - DNA, 2370 bp, Zea Mays
ctcgacttgcaatatacaacacgcttgtggcctgaagaacggaagaactcggactcgagcaccccgaagcgagccaccgccgatctgctcctcctgagtcctgaccctcctccgtgcgctgcgcaggcatgaggctcctcctcgtcggcgccctactcctatgtgccaccgcggcggtggagtccaagccgcccctcgacaccctgggcatacccccgcaagatgaggcgtactacagaggcggcgtgattaaatgcagggacggatcaggcaggttctcccgggagcagctcaacgacgacttctgcgactgccccgacggcaccgacgagcccgggacatctgcgtgccctgaggcgaagttctactgcaagaatgcaggccacactccagtcacgatcttctcatcacgagtgaatgacggcatttgtgattgctgtgatgggagtgatgaatatgacagcaatatcacctgtaagaacacttgctgggaggctggcaaagcggcaagggagaaattgaagaagaaagtcgctacatacaaaagtggtgtagttattcggaatcaggaagttgagagggcaaaagaggcttatgctaaagacgaagcagagttagcaaaattgaagggtgaagagaaaatactccaaggacttgttgacaaactcaaagagcaaaagagacttatagagaaggcagaggaagaagaacgtttaagaaaagagaaggaagagaagagaataaaagaagctgaaaagcaagctgctgatgaaaagggaacacctgatgcctctccggatgtagattctaaggaaactcatgaccatgtgcaagaagatgaaaacaagccgaagagcatgatgtacatgcaacggaccatgataatcatgcaacagaccatgataatcatgcagcagaaagcggagcatctgttgagcagggttctgtaaacaaagatgacattagcgttgaagctggaactttagatgaattgctgcacaaggagtctgcagtacctacattagagaaggatcatagctctgacaatcctgagggtttatcaagagaagagttaggtcgcatggtagcttcacgttggactggagaaagtgtaagtgaggttagtaaagatgataagaagggacatgaagatgagcaagaaataccagaacctgcaaaagaagcacttgaagacgaattagaaattccagaacctgctgaagaaaattatgatggttatcattcagaagttgaggatgacaggcataaatatgaagatgaagagtttgatcatgagtcagaagatgaatatgttgatgaccatgatgagcatgttgagtcctataaatctgatgatgaccagaaagatttaactgagccaggacatgcatcgtggttggacaaaattcagcagactgtacagaatgttttccaaaaattcaacttttttaggacccctgtagatttgtcagaggcttctcgtgttcgtaaggagtatgacgatgccaactcaaagctttcaaaaattcagtctaagatatccaatttagctgagaagctaaaacatgattttggcaaagacaaggagttctattccttttatgatcagtgctttgagaccaaggaaggaaagtatacttacaaggtctgtgcatataagaaagcatcacaggctgaagggcacagttccaccaacctggggagatgggacaaatttgaagaatcgtacagagtaatgcacttttcaggtggagacaaatgctggaatggtcctgaccgaagcctaaaggttaggcttagatgtgggctgagcaatgagcttaatgacgttgatgagcctagcagatgcgagtatgttgctgtattgtcgacgcccgcactctgcgtcgaggagaagctgaaggagctgcaaaacaaactggatgccatgtcttcgaagcagcccgggcatgatgaactttaaacggttccggcgtggacaaagaaaatttcaccaggaagcatagattgacagttacactcataaccttaagggtggaagtcaatgggggcatatggacaggaaagggccaagctgaagaaatgggaatgctcatcccgagttgtttggtggaggcgactgcaaccgtgcttttctttgtggtttaacattgctctatttaattagggagagacgctaggcttttgcgtctccagcttcattgccagccattacacatttgatggaatatatagtaagaaacagtacactctgaaccatcataatttgaagatgctagttaaccccgggttgttacatgatacaagtactttgttcagctcggtcatttggagcagaaggatttcccatttggaacagtgaatcgcccg

SEQ ID NO: 71553 - DNA, 1007 bp, Zea Mays
ctagccttttgaatgtcagtatctttccagtgtagactctggcattagttgacacattgctagacagtgtgaagtgggacagcaaagggttggctgttgccattgcacaaaatgtggatactggagccattcttatgcagggttttgctaataaagaagcccttgcaaaaactatatcaaccaggaaagccacattctttagccgttcacggtcttccttgtggacgaaaggggagacatccatgaacttcattaatgtgcatgacattttcctagactgtgaccatgactctataatataccttggaaagccagatggacctacctgccatacaggagcagaaacgtgttattatacttcagtttatgatgctctacaaagttcaaagcccaatgaaggcaggcaggttatgacaaccctatactcacttgaagatacaattagtagacgccacgaggagaaagttactgatggaggtggcaagccatcatggacgaaaaagctactccttgataaccagctactttgctcgaaaatacgtgaagaagctggtgagctaattcaaacgctgcttgagaacgaggaccaatctcgtgcagcttcggagatggctgatctgctgtaccacgctatggtgctgctcagagtcaaggatgtaaagatggaacaagtccttgaggtcctgaggaagagattttcgcagtctggtatcgaggagaaggccagtcgcaataaatcttagcgtgattggttaataatgccttgatggtggatgactctgatttgctatcggtgcggaatgtgcactattgaagaattttgtgtttgatggatcagttgtgtttttgttttctccgacaagacatctatgaaatatgtggcaggtgtcaataaagttatctcatacagcagaccgtttactcattgagctcggctagtctccgtgtgtgttttatgcacaactttttaacatatcttttacaatatggttgcttgactttaatct

SEQ ID NO: 71554 - DNA, 1470 bp, Zea Mays
aattgcgtgcgcggtgcgccctcgcctgtccccgcgtccccgcccctgtctcctgaagtcgtccgcgaccgccgccatgctcccctcgccccgtgccgcatccgtcgtgatagggatccgagaacaccccatggatgtgtccgggattcgaggcctctcccgtcccttcccctcccccacccccatcggcgatgcccggatccgcgaccaccgccgtccaaccccggcctccgtctgtgaccgctccgtggtggcgcaagcgctggaggcatccacagggggctaccgacggctgggacgggttcgtgctcaccaccgacggctgggacgtccatcgggggaccttcccggcatggatggtgtcttcgcaaggaaacgacagctcgctggtgctgctgaacacccgtccgggttcggctgcggacggcgcaggcatggcggagcacctgcagctgcacctggggcagacgatagtggccgccgcccgacgacggagcaggacgactcgtttctgctcctggacaacctgcgagggctcccttacagttccatcccacagcgaagggccacggctggccgcgcttcttcacggcggccgcggcgtggggaggcatcagctggatctggtgatggatgaagagcggaggggcccgacgccgcgtcctctgctcctcgccaccggactgcctcgctttctacggcaacattattgccaagaacatttttgatgatgtactgcattccatagcagcagcattgtccgtagcagatgatggcaattcactgctagcactagctgaagcttccttaacttgagtgggaatatcaatcttaactgaaggtctgattgctcgaattggagctgccagtgattccttttggccttgggtttgcgcatccttcaactaaatcggtatggcaactgttagtgatccacaagaggctagcgttatgtatcataatttactaggacagaaatcacaggagaagttgagctcttccttggttggtattgtacatcctttacctgaaaagggatcacagatggaactgcttccttccttgattgatcttgcctggccgtgtgcgccgtggagggcaggccggagtcttggacgatgctggctgtggcgggcgtcgacatggaaggtgctgtgtctgaccgatctctgatgttcttcttttaatcgattttttgttttattaaatagccaaaaggcagtttaacgtatgcgtcttctttgaaaatgacatataagcgaagtcttttaaaataatggtaaattggcgaaactcacttgccataatggcaaatttccaaatttctcctcacgcaagtcttcggcgccaggtcgcaaccgtcacgtcacctcgccgcctccccccgcccgccctccagaaatagggccagaaaatatctctcttccctggtcgggtgatgagttgtgctgattcggcggcagaaagagc

SEQ ID NO: 71555 - DNA, 1838 bp, Zea Mays
ccgcgcccctgcctcccctccgcatacgccatgcttgtggtttcgtatatatattttatactatttttacttacgtagcaacgcacggacacatatctagtgctttatgaagtgatgtattataagtttattctataaattttggtgaaatcaaatgcattatacaaactaaatagaaaagtgaggagtgaaaagaagaccagacatacccaaaacttgctcaagatgaaaagggaagaaaagacgagcacaggctgtcggatacgcgcatcacgaggcaaaatccaaccgttagcggcgtcctccccgtaccgaggcgaaaccctgctaaaaccccgacttgttgaccctcgccgccggcgctgggaaatcacacagacacactcacacacaacctacccagacggccagaccccgcgccgccccgccgccacccccacccccaccccaaatcagtcaaacgcgccgccgccgccatgggctcctccgtcagccaggccggggcccctcctccccatccccccacatacgcgtcgactccaccctttgcgcccgctgccgctgacgctgctgacgccgccgccgccccgccgccgaaacctcatgaggaggaggcgactgaggagaaggtggactacctcaacctcccgtgccccgtcccatatgaggagatccagcgcgaggccttcatggcgctgaagccggaccttttcgagggtatgcgcttcgatttgaccaagatgatcaccccgtacttcgctttgactcacagcgttgccatgggatccattgagatcccggcacaggggagcgaggtgatcaaggttcccacctccaattatgaacgatgctcatggggagggtctcacatgaagggagggagaacatccgtgtcaagcatgatattacggacaacctttctttaaagataaatgctcagttgacaagtgagccccactactcccaagggatgctgaattttgattataagggcaaagattttagatctcaggttcaattcggaaacaatggtttctatggagcaaactacatccagagtgtcagcaagaacctttccttgggaactgaagccttttggcttgggcagcaaaggaagtctggagtcggtgttgttgctcgctatgacacaaagaaaatggttgcgactgcacaaattgcaaccactggaatggtcgcgcttagttatgtacagaaagtttctgaaaaggtttcccttgcatctgatttcatgtacaatcaaatgacaaaggatgtaacagcaagctttggttatgattatatgctgagacagtgtcgattgagagggaaactggataccaatggcgtaatttcttctcttttggaggagcgattgactccaggtgtcactttccagttgtctgcagagctggaccactggaagaaagattacaaatttgggtttggtatggctctcggagagtaagacgatttgagcaaattctagacacatgtacaattagtggttggcattagtcgacagggattaaaacgattctactttatctttgcatttatttgtctcccagttattcgtttagctgctatggctgtgggccgtggagacatttcgaagttttgattttactgggctcatcacttgagtagtattaaactgaaacgggaatgcgtgaatagattgcgctccaccagattaggatttctgcatgccaaactcttgatttctagtctggaaataagttacgattttattccataagataaagatacattcctctgctaagttaggtgctgtttggtctggcatttttggaattgtaatccattcttgctgcggg

SEQ ID NO: 71556 - DNA, 760 bp, Zea Mays
aatctctatataaccggcaaatcctaacgctcccaacccttccaccacgcagtcactcccgggccgccgccgccgccgcctccgcgaaaaaccctagcaggcttcgccgctatcactccaaggggcgcgaccatggtggccacaaagaagacgaagaaatccacggacaacatcaataacaagctgcagcttgttatgaagagtggcaagtacactctcggctacaagaccgtcctcaggactctcaggaactctaagtcgaagctagtgatcatcgctaacaactgcccgccccttcgtaagtctgaaattgagtactatgctatgctggccaaggtcactgtccaccacttccatggaaacaatgtcgaccttggaactgcctgtggtaaatactttcgggtctgctgcctcagcattattgatcctggtgattctgatatcatcaagactacaccgggtgagcagtaaagaagcccctgcagtagggggatcttactgcatttgttcttctgtcttgttaaacagcatttacctgctagtaaactgagttattcggaacattgtcttgaattgaatttttgctccggtgttttgacacttaaatagagctttagcttataccgttgttcaggtcgcagctgtatgttgtcactatcaaaccgtcaaacgaatgctccaccagtggagttgttcagtaacagctttggcagcatatgcatgaattggatcgactacattttgaaatccaaaggattgc

SEQ ID NO: 71557 - DNA, 664 bp, Zea Mays
ttatttttcctaactgatcttctaggtggtgtcactttacccagctcttctgtgttgtataattcctttggcattcctgcttctttctgaaattttgaagtcgaagctagtgatcatcgctaacaactgcccgccccttcgtaagtctgaaattgagtactatgctatgctggccaaggtcactgtccaccacttccatggaaacaatgtcgaccttggaactgcctgtggtaaatactttcgggtctgctgcctcagcattattgatcctggtgattctgatatcatcaagactacaccgggtgagcagtaaagaagcccctgcagtagggggatcttactgcatttgttcttctgtcttgttaaacagcatttacctgctagtaaactgagttattcggaacattgtcttgaattgaatttttgctccggtgttttgacacttaaatagagctttagcttataccgttgttcaggtcgcagctgtatgttgtcactatcaaaccgtcaaacgaatgctccaccagtggaggtatctcctataataaggattcattgtttgtagtaattgtatgatatctcgggtacgatcctcttgcacgcatgaatcaatccacagatcatggtattatttattcaattcaaagatgctgcaaattgaaag

SEQ ID NO: 71558 - DNA, 4614 bp, Zea Mays
ctttatttatggcctccatcaaatgacagctgatggcttgcaccgagacatcgatcgacgatatatacccaccctccactgaaatatccattcatttccatacactactaccattctcccaggcaaggcgaggcagggagctttccaggctccgtcgtcccgatgactgcgcagctataacctcgggggcgcggcagcatgcgtcttaacgaaggataaagacctgctaagatggccatggccatggccaggttcctctcgtggttgttcacatgcttcgcagctctcgccgtcctggaggccacggtccctgctcgttcatggcgcgctccgagtcccaccccgaggcacgaagcgaggaggttcgagcagaagacggacaggttctgggagtaccaggagcagagcaatacctgggtacaagtacgcgcgccgttcgacctcatgtcctgcatcaacggcacctgcacaaaggtaggatcgatcgggcggctggcgagggagcctggacgacacggccttcctcccgtccagagccaggaggaggaggaggaagacacgcggcgggttcagggagatggtgcagaagaagaccctgtcctgcctgtaaggaggagaatttccttgacaagaatgtcagagtcgtcagtctgggtgacagggcagagcggctccatctacgagaggttctggaacggggtggtgtgggtgattgctcctcatgagctccctgcctcggctgggtatgccaccgcaactttcattgtcaatacaactatccttgctctgtctgaagctggaaccctctaccagttgcagctaaatgagcatgcccagcctatctggacagagatggcattcaactcaagccagcagtcagcgaatcttggattaaaaacacaaagtcaagctatgcgtataagaaatgggattgtatccaatgatggaaggaaacttttcctgtctatcatgaatggatccctgcttgaggtaacagaaattcagcctctaaggtggaattaccatgggcgtcctccaggtgcagacgtgtcgtatatatctgatgctggaaatctgcggccagggaccctgttcacagtaagtgcagttccactggagacctctatgagtttgacaaagaaacaaagccatcatggaaaaagcatatatggagtgaagaactggcgaaaaatatctcattaaaatcatcggctggctttgctttgcatggtttgtcagggtctaactcagtgtctcttttcctgataagcaagattggcaggatggccttttagtggagcggcgcttgcatagaaggaagtggaagtgggacaaacatggagctcctacgggtcagagacttagttcaattgcagaagttcagaaggatgaacttaatgatgcgacttcaatgtttttaacgacaaccacaggaaaagtatatgagtatcagtttccaaaatatacaggtggggcccagagcaataagataagaggacaatggataaatcacatgtcccctgagcatgcaaaggttgcaagaaacgtcccaggtgtacatgttcaagtcggcagaatggtattcccactagatgatggtaggcttggggaactacattttcctgggatggggggtactgattttggtccgagtgcccaaagtaccataagaagaaaactatcaaacaagtacgagtggtccatcctagacgcaccagaaacagaaggttggaatgcagaatattgcaccgaagagcacggtccgacaaattgtattagtggagcaaagaatatagctgcagacacagaatcaaatgacttgagcaataacccaccttccaggaggcgtaaagtagaagagaagcagcactacctaaatgttaacagataccagcagagtgatgaaactgaatcatacaactttctatcaaggaccattgatcttaacttccacatgcgggtgatgcatgcagacagatcgcttttccttatagcagacaatggattgacttttgaatatctaaacagcaatggtgtttggttgtggttaagacatgaacatgttacagccatgaaaggaacactaggaagctacaatggcagtttgtatcttgtcgacgtgcatgggaacttacacattagagaaagaaatggagatgaactgttgtggattaactgcacagcgatgaagaagggaagacaggttgcaagtgggtctccatgggatggcatccctggtttattgcgcagagtgacaacagatgatgcactcttctttgtcaacaagcgaggcaggctgctacagttcacggttgcgctgcggaaattcaagtggaaggactgccacagtcctcctgacaccaagattgctttcatagtggaccaggaggtcttcagaagaaacatcatcttcgtgggacggccatgcggccatcgccgctgtccctggccggctccctgttcatggtgtccgagcacggggggctggtggagtaccacttcagcccacaggacgggtgggagtgggtagagcacgggacgccccaccggggcgtgaccctcgtcggcgcccctggcccgtgcttcgacggctcccagctgttcgtggtcggctccgacgggcacgtgtaccggcggcacatggaggggaggacgtggaggtggacgagccacgggcacccgccgtcggagccggccgccgttgacgaacagagctgcgccacaccggacacgggcgccggcgcgcactacgccgacgggttcagggggagctgcgacgggaaggtggcagccgtgcggccggtgccgttctcggaggacgccgtggtcttcgagctgcgagatggccgggtaagcaccgatagaaagcaacctcacgcaagctgctcctgatccgcctaatgagggcagagggcttacaattgcgccacgttgcatttcatgaatcggcttgtataattcctgttgtctggtttggtttcctggcgtgcagctggcggagctgcggcggccgccctccgcggacgggtgcggcgggtgggagtgggcgcggattatcggcacgccggccagcgcctgtatgaccagctactggacggccgtcgccacgtagccgccgccgggcgcgactcacggagctggcagtccgctggtcgcttggctgattgaggtctccttggaagttggaaatgatccacaacaacagcggtcacgtccatgtttcctcgaaagacggccacgtccacatgggtctaggccgtatgatggccagatttgggcgcccaaagaaaggcagaaaggaactctctcgaaaaaaaaaacggctaaccgttacattacatttgattgtctgtttggtaatgcatttttagaatactatagttttaaagcatatagtactatagtttacaattgtatataacataagtattacaatattattttaccacagtaaaattatagtatttcttaaaattgagatttgtttagttttattgaaaactaaagtatgtatagagagaacaaaagaaatatgtccaaaaataccatacttttaggtagaccatagtatttaaaattgtgttttaactgtaccaactaaacatattttggcttctaataccatagtaatacaatatcatcaaataccgcaatattgcttcaaaaccgcaaaaaaaaactaagcttccaaacagagcctaagtggtgtttggttctccttactaaagttaagtcataagactaattacatagatgaagactaaacgatgatacaaatttattaagcctagttaattcatcattagcaaatgtttaatataatattgcatggacgaaacatggactaattaacgcttaataggtttttcttgtcgtttagtcctgtattgtaattagactatatttaatacttctaactagcatttagacatgtcatacggtagggactaatttaatacttctaactagcttctatatatatttggtcttgttgcttatataagcatcagtgggagtaagtatggtttagttattattgatcaagagaaataaggtttggaagttaatatcacgtcccaaccaaaatattgtaggaaccaagtgggtctttcgcaataagcaagacgaacatgttgtggtgacaaggaacaaaggtcgacttgcggctaaggggtagtcacaagtcgaaggtttggatttcgatgaaacccttgcacccatagctaggttttgagtcaattcgtatattattggtctatgctacttaccatgatttcaagctttattaaatggacgtgaaaaatacattctcagtagaccaatcaaggaagagatatatgttgagcaatctcccgactttgagaatgttgactgggagatggcctaagagaggagtaccaagtctgagcaacactcctgaccgccattgacgaaggacttggccatgacagctgtattgccatcataagacgatatggttgcttcgtagctcataagaaactacttagggtcagagtgaccatcatacatggacaattgaggtggcttgtatgatggtggccatggtactgcctgtaactatgtagctaaaggagaggtgaaagtcgcctagag

SEQ ID NO: 71559 - DNA, 4404 bp, Zea Mays
cgacgatatatacccaccctccactgaaatatccattcatttccatacactactaccattctcccaggcaaggcgaggcagggagctttccaggctccgtcgtcccgatgactgcgcagctataacctcgggggcgcggcagcatgcgtcttaacgaaggataaagacctgctaagatggccatggccatggccaggttcctctcgtggttgttcacatgcttcgcagctctcgccgtcctggaggccacggtccctgctcgttcatggcgcgctccgagtcccaccccgaggcacgaagcgaggaggttcgagcagaagacggacaggttctgggagtaccaggagcagagcaatacctgggtacaagtacgcgcgccgttcgacctcatgtcctgcatcaacggcacctgcacaaaggtaggatcgatcgggcggctggcgagggagcctggacgacacggccttcctcccgtccagagccaggaggaggaggaggaagacacgcggcgggttcagggagatggtgcagaagaagaccctgtcctgcctgtaaggaggagaatttccttgacaagaatgtcagagtcgtcagtctgggtgacagggcagagcggctccatctacgagaggttctggaacggggtggtgtgggtgattgctcctcatgagctccctgcctcggctgggtatgccaccgcaactttcattgtcaatacaactatccttgctctgtctgaagctggaaccctctaccagttgcagctaaatgagcatgcccagcctatctggacagagatggcattcaactcaagccagcagtcagcgaatcttggattaaaaacacaaagtcaagctatgcgtataagaaatgggattgtatccaatgatggaaggaaacttttcctgtctatcatgaatggatccctgcttgaggtaacagaaattcagcctctaaggtggaattaccatgggcgtcctccaggtgcagacgtgtcgtatatatctgatgctggaaatctgcggccagggaccctgttcacatgcagttccactggagacctctatgagtttgacaaagaaacaaagccatcatggaaaaagcatatatggagtgaagaactggcgaaaaatatctcattaaaatcatcggctggctttgctttgcatggtttgtcagggtctaactcagtgtctcttttcctgataagcaaggatggccttttagtggagcggcgcttgcatagaaggaagtggaagtgggacaaacatggagctcctacgggtcagagacttagttcaattgcagaagttcagaaggatgaacttaatgatgcgacttcaatgtttttaacgacaaccacaggaaaagtatatgagtatcagtttccaaaatatacaggtggggcccagagcaataagataagaggacaatggataaatcacatgtcccctgagcatgcaaaggttgcaagaaacgtcccaggtgtacatgttcaagtcggcagaatggtattcccactagatgatggtaggcttggggaactacattttcctgggatggggggtactgattttggtccgagtgcccaaagtaccataagaagaaaactatcaaacaagtacgagtggtccatcctagacgcaccagaaacagaaggttggaatgcagaatattgcaccgaagagcacggtccgacaaattgtattagtggagcaaagaatatagctgcagacacagaatcaaatgacttgagcaataacccaccttccaggaggcgtaaagtagaagagaagcagcactacctaaatgttaacagataccagcagagtgatgaaactgaatcatacaactttctatcaaggaccattgatcttaacttccacatgcgggtgatgcatgcagacagatcgcttttccttatagcagacaatggattgacttttgaatatctaaacagcaatggtgtttggttgtggttaagacatgaacatgttacagccatgaaaggaacactaggaagctacaatggcagtttgtatcttgtcgacgtgcatgggaacttacacattagagaaagaaatggagatgaactgttgtggattaactgcacagcgatgaagaagggaagacaggttgcaagtgggtctccatgggatggcatccctggtttattgcgcagagtgacaacagatgatgcactcttctttgtcaacaagcgaggcaggctgctacagttcacggttgcgctgcggaaattcaagtggaaggactgccacagtcctcctgacaccaagattgctttcatagtggaccaggaggtcttcagaagaaacatcatcttcgtgggacggccatgcggccatcgccgctgtccctggccggctccctgttcatggtgtccgagcacggggggctggtggagtaccacttcagcccacaggacgggtgggagtgggtagagcacgggacgccccaccggggcgtgaccctcgtcggcgcccctggcccgtgcttcgacggctcccagctgttcgtggtcggctccgacgggcacgtgtaccggcggcacatggaggggaggacgtggaggtggacgagccacgggcacccgccgtcggagccggccgccgttgacgaacagagctgcgccacaccggacacgggcgccggcgcgcactacgccgacgggttcagggggagctgcgacgggaaggtggcagccgtgcggccggtgccgttctcggaggacgccgtggtcttcgagctgcgagatggccggctggcggagctgcggcggccgccctccgcggacgggtgcggcgggtgggagtgggcgcggattatcggcacgccggccagcgcctgtatgaccagctactggacggccgtcgccacgtagccgccgccgggcgcgactcacggagctggcagtccgctggtcgcttggctgattgaggtctccttggaagttggaaatgatccacaacaacagcggtcacgtccatgtttcctcgaaagacggccacgtccacatgggtctaggccgtatgatggccagatttgggcgcccaaagaaaggcagaaaggaactctctcgaaaaaaaaaacggctaaccgttacattacatttgattgtctgtttggtaatgcatttttagaatactatagttttaaagcatatagtactatagtttacaattgtatataacataagtattacaatattattttaccacagtaaaattatagtatttcttaaaattgagatttgtttagttttattgaaaactaaagtatgtatagagagaacaaaagaaatatgtccaaaaataccatacttttaggtagaccatagtatttaaaattgtgttttaactgtaccaactaaacatattttggcttctaataccatagtaatacaatatcatcaaataccgcaatattgcttcaaaaccgcaaaaaaaaactaagcttccaaacagagcctaagtggtgtttggttctccttactaaagttaagtcataagactaattacatagatgaagactaaacgatgatacaaatttattaagcctagttaattcatcattagcaaatgtttaatataatattgcatggacgaaacatggactaattaacgcttaataggtttttcttgtcgtttagtcctgtattgtaattagactatatttaatacttctaactagcatttagacatgtcatacggtagggactaatttaatacttctaactagcttctatatatatttggtcttgttgcttatataagcatcagtgggagtaagtatggtttagttattattgatcaagagaaataaggtttggaagttaatatcacgtcccaaccaaaatattgtaggaaccaagtgggtctttcgcaataagcaagacgaacatgttgtggtgacaaggaacaaaggtcgacttgcggctaaggggtagtcacaagtcgaaggtttggatttcgatgaaacccttgcacccatagctaggttttgagtcaattcgtatattattggtctatgctacttaccatgatttcaagctttattaaatggacgtgaaaaatacattctcagtagaccaatcaaggaagagatatatgttgagcaatctcccgactttgagaatgttgactgggagatggcctaagagaggagtaccaagtctgagcaacactcctgaccgccattgacgaaggacttggccatgacagctgtattgccatcataagacgatatggttgcttcgtagctcataagaaactacttagggtcagagtgaccatcatacatggacaattgaggtggcttgtatgatggtggccatggtactgcctgtaactatgtagctaaaggagaggtgaaagtcgcctagag

SEQ ID NO: 71560 - DNA, 3516 bp, Zea Mays
gacgatatatacccaccctccactgaaatatccattcatttccatacactactaccattctcccaggcaaggcgaggcagggagctttccaggctccgtcgtcccgatgactgcgcagctataacctcgggggcgcggcagcatgcgtcttaacgaaggataaagacctgctaagatggccatggccatggccaggttcctctcgtggttgttcacatgcttcgcagctctcgccgtcctggaggccacggtccctgctcgttcatggcgcgctccgagtcccaccccgaggcacgaagcgaggaggttcgagcagaagacggacaggttctgggagtaccaggagcagagcaatacctgggtacaagtacgcgcgccgttcgacctcatgtcctgcatcaacggcacctgcacaaaggtaggatcgatcgggcggctggcgagggagcctggacgacacggccttcctcccgtccagagccaggaggaggaggaggaagacacgcggcgggttcagggagatggtgcagaagaagaccctgtcctgcctgtaaggaggagaatttccttgacaagaatgtcagagtcgtcagtctgggtgacagggcagagcggctccatctacgagaggttctggaacggggtggtgtgggtgattgctcctcatgagctccctgcctcggctgggtatgccaccgcaactttcattgtcaatacaactatccttgctctgtctgaagctggaaccctctaccagttgcagctaaatgagcatgcccagcctatctggacagagatggcattcaactcaagccagcagtcagcgaatcttggattaaaaacacaaagtcaagctatgcgtataagaaatgggattgtatccaatgatggaaggaaacttttcctgtctatcatgaatggatccctgcttgaggtaacagaaattcagcctctaaggtggaattaccatgggcgtcctccaggtgcagacgtgtcgtatatatctgatgctggaaatctgcggccagggaccctgttcacatgcagttccactggagacctctatgagtttgacaaagaaacaaagccatcatggaaaaagcatatatggagtgaagaactggcgaaaaatatctcattaaaatcatcggctggctttgctttgcatggtttgtcagggtctaactcagtgtctcttttcctgataagcaaggttgcgctgcggaaattcaagtggaaggactgccacagtcctcctgacaccaagattgctttcatagtggaccaggaggtcttcagaagaaacatcatcttcgtgggacggccatgcggccatcgccgctgtccctggccggctccctgttcatggtgtccgagcacggggggctggtggagtaccacttcagcccacaggacgggtgggagtgggtagagcacgggacgccccaccggggcgtgaccctcgtcggcgcccctggcccgtgcttcgacggctcccagctgttcgtggtcggctccgacgggcacgtgtaccggcggcacatggaggggaggacgtggaggtggacgagccacgggcacccgccgtcggagccggccgccgttgacgaacagagctgcgccacaccggacacgggcgccggcgcgcactacgccgacgggttcagggggagctgcgacgggaaggtggcagccgtgcggccggtgccgttctcggaggacgccgtggtcttcgagctgcgagatggccgggtaagcaccgatagaaagcaacctcacgcaagctgctcctgatccgcctaatgagggcagagggcttacaattgcgccacgttgcatttcatgaatcggcttgtataattcctgttgtctggtttggtttcctggcgtgcagctggcggagctgcggcggccgccctccgcggacgggtgcggcgggtgggagtgggcgcggattatcggcacgccggccagcgcctgtatgaccagctactggacggccgtcgccacgtagccgccgccgggcgcgactcacggagctggcagtccgctggtcgcttggctgattgaggtctccttggaagttggaaatgatccacaacaacagcggtcacgtccatgtttcctcgaaagacggccacgtccacatgggtctaggccgtatgatggccagatttgggcgcccaaagaaaggcagaaaggaactctctcgaaaaaaaaaacggctaaccgttacattacatttgattgtctgtttggtaatgcatttttagaatactatagttttaaagcatatagtactatagtttacaattgtatataacataagtattacaatattattttaccacagtaaaattatagtatttcttaaaattgagatttgtttagttttattgaaaactaaagtatgtatagagagaacaaaagaaatatgtccaaaaataccatacttttaggtagaccatagtatttaaaattgtgttttaactgtaccaactaaacatattttggcttctaataccatagtaatacaatatcatcaaataccgcaatattgcttcaaaaccgcaaaaaaaaactaagcttccaaacagagcctaagtggtgtttggttctccttactaaagttaagtcataagactaattacatagatgaagactaaacgatgatacaaatttattaagcctagttaattcatcattagcaaatgtttaatataatattgcatggacgaaacatggactaattaacgcttaataggtttttcttgtcgtttagtcctgtattgtaattagactatatttaatacttctaactagcatttagacatgtcatacggtagggactaatttaatacttctaactagcttctatatatatttggtcttgttgcttatataagcatcagtgggagtaagtatggtttagttattattgatcaagagaaataaggtttggaagttaatatcacgtcccaaccaaaatattgtaggaaccaagtgggtctttcgcaataagcaagacgaacatgttgtggtgacaaggaacaaaggtcgacttgcggctaaggggtagtcacaagtcgaaggtttggatttcgatgaaacccttgcacccatagctaggttttgagtcaattcgtatattattggtctatgctacttaccatgatttcaagctttattaaatggacgtgaaaaatacattctcagtagaccaatcaaggaagagatatatgttgagcaatctcccgactttgagaatgttgactgggagatggcctaagagaggagtaccaagtctgagcaacactcctgaccgccattgacgaaggacttggccatgacagctgtattgccatcataagacgatatggttgcttcgtagctcataagaaactacttagggtcagagtgaccatcatacatggacaattgaggtggcttgtatgatggtggccatggtactgcctgtaactatgtagctaaaggagaggtgaaagtcgcctagag

SEQ ID NO: 71561 - DNA, 4756 bp, Zea Mays
gacgatatatacccaccctccactgaaatatccattcatttccatacactactaccattctcccaggcaaggcgaggcagggagctttccaggctccgtcgtcccgatgactgcgcagctataacctcgggggcgcggcagcatgcgtcttaacgaaggataaagacctgctaagatggccatggccatggccaggttcctctcgtggttgttcacatgcttcgcagctctcgccgtcctggaggccacggtccctgctcgttcatggcgcgctccgagtcccaccccgaggcacgaagcgaggaggttcgagcagaagacggacaggttctgggagtaccaggagcagagcaatacctgggtacaagtacgcgcgccgttcgacctcatgtcctgcatcaacggcacctgcacaaaggtaggatcgatcgggcggctggcgagggagcctggacgacacggccttcctcccgtccagagccaggaggaggaggaggaagacacgcggcgggttcagggagatggtgcagaagaagaccctgtcctgcctgtaaggaggagaatttccttgacaagaatgtcagagtcgtcagtctgggtgacagggcagagcggctccatctacgagaggttctggaacggggtggtgtgggtgattgctcctcatgagctccctgcctcggctgggtatgccaccgcaactttcattgtcaatacaactatccttgctctgtctgaagctggaaccctctaccagctaaatgagcatgcccagcctatctggacagagatggcattcaactcaagccagcagtcagcgaatcttggattaaaaacacaaagtcaagctatgcgtataagaaatgggattgtatccaatgatggaaggaaacttttcctgtctatcatgaatggatccctgcttgaggtaacagaaattcagcctctaaggtggaattaccatgggcgtcctccaggtgcagacgtgtcgtatatatctgatgctggaaatctgcggccagggaccctgttcacagtaaggtacgttgaacatgtgttcttgaggactagagggtgtttcagtctacgttaaaaaacacacacagttctagaatgtcccagattgcccagcccctgtcctgatcaaaggctgaaccacttcctacttagcatgttttttctactactcctgaaatgtgggcacaacaatcataaaacaataatacactggtgcattaaacgacacaaatgataaacctgcttagatagttgtggctatactcatttatgttatttatccaacataagtggcatagttatcaatagtctaatttgcacaccctataaggtatatttgttcaagttgttggtccaatgttaagattggatatgcagtgcagttccactggagacctctatgagtttgacaaagaaacaaagccatcatggaaaaagcatatatggagtgaagaactggcgaaaaatatctcattaaaatcatcggctggctttgctttgcatggtttgtcagggtctaactcagtgtctcttttcctgataagcaaggatggccttttagtggagcggcgcttgcatagaaggaagtggaagtgggacaaacatggagctcctacgggtcagagacttagttcaattgcagaagttcagaaggatgaacttaatgatgcgacttcaatgtttttaacgacaaccacaggaaaagtatatgagtatcagtttccaaaatatacaggtggggcccagagcaataagataagaggacaatggataaatcacatgtcccctgagcatgcaaaggttgcaagaaacgtcccaggtgtacatgttcaagtcggcagaatggtattcccactagatgatggtaggcttggggaactacattttcctgggatggggggtactgattttggtccgagtgcccaaagtaccataagaagaaaactatcaaacaagtacgagtggtccatcctagacgcaccagaaacagaaggttggaatgcagaatattgcaccgaagagcacggtccgacaaattgtattagtggagcaaagaatatagctgcagacacagaatcaaatgacttgagcaataacccaccttccaggaggcgtaaagtagaagagaagcagcactacctaaatgttaacagataccagcagagtgatgaaactgaatcatacaactttctatcaaggaccattgatcttaacttccacatgcgggtgatgcatgcagacagatcgcttttccttatagcagacaatggattgacttttgaatatctaaacagcaatggtgtttggttgtggttaagacatgaacatgttacagccatgaaaggaacactaggaagctacaatggcagtttgtatcttgtcgacgtgcatgggaacttacacattagagaaagaaatggagatgaactgttgtggattaactgcacagcgatgaagaagggaagacaggttgcaagtgggtctccatgggatggcatccctggtttattgcgcagagtgacaacagatgatgcactcttctttgtcaacaagcgaggcaggctgctacagttcacggttgcgctgcggaaattcaagtggaaggactgccacagtcctcctgacaccaagattgctttcatagtggaccaggaggtcttcagaagaaacatcatcttcgtgggacggccatgcggccatcgccgctgtccctggccggctccctgttcatggtgtccgagcacggggggctggtggagtaccacttcagcccacaggacgggtgggagtgggtagagcacgggacgccccaccggggcgtgaccctcgtcggcgcccctggcccgtgcttcgacggctcccagctgttcgtggtcggctccgacgggcacgtgtaccggcggcacatggaggggaggacgtggaggtggacgagccacgggcacccgccgtcggagccggccgccgttgacgaacagagctgcgccacaccggacacgggcgccggcgcgcactacgccgacgggttcagggggagctgcgacgggaaggtggcagccgtgcggccggtgccgttctcggaggacgccgtggtcttcgagctgcgagatggccggctggcggagctgcggcggccgccctccgcggacgggtgcggcgggtgggagtgggcgcggattatcggcacgccggccagcgcctgtatgaccagctactggacggccgtcgccacgtagccgccgccgggcgcgactcacggagctggcagtccgctggtcgcttggctgattgaggtctccttggaagttggaaatgatccacaacaacagcggtcacgtccatgtttcctcgaaagacggccacgtccacatgggtctaggccgtatgatggccagatttgggcgcccaaagaaaggcagaaaggaactctctcgaaaaaaaaaacggctaaccgttacattacatttgattgtctgtttggtaatgcatttttagaatactatagttttaaagcatatagtactatagtttacaattgtatataacataagtattacaatattattttaccacagtaaaattatagtatttcttaaaattgagatttgtttagttttattgaaaactaaagtatgtatagagagaacaaaagaaatatgtccaaaaataccatacttttaggtagaccatagtatttaaaattgtgttttaactgtaccaactaaacatattttggcttctaataccatagtaatacaatatcatcaaataccgcaatattgcttcaaaaccgcaaaaaaaaactaagcttccaaacagagcctaagtggtgtttggttctccttactaaagttaagtcataagactaattacatagatgaagactaaacgatgatacaaatttattaagcctagttaattcatcattagcaaatgtttaatataatattgcatggacgaaacatggactaattaacgcttaataggtttttcttgtcgtttagtcctgtattgtaattagactatatttaatacttctaactagcatttagacatgtcatacggtagggactaatttaatacttctaactagcttctatatatatttggtcttgttgcttatataagcatcagtgggagtaagtatggtttagttattattgatcaagagaaataaggtttggaagttaatatcacgtcccaaccaaaatattgtaggaaccaagtgggtctttcgcaataagcaagacgaacatgttgtggtgacaaggaacaaaggtcgacttgcggctaaggggtagtcacaagtcgaaggtttggatttcgatgaaacccttgcacccatagctaggttttgagtcaattcgtatattattggtctatgctacttaccatgatttcaagctttattaaatggacgtgaaaaatacattctcagtagaccaatcaaggaagagatatatgttgagcaatctcccgactttgagaatgttgactgggagatggcctaagagaggagtaccaagtctgagcaacactcctgaccgccattgacgaaggacttggccatgacagctgtattgccatcataagacgatatggttgcttcgtagctcataagaaactacttagggtcagagtgaccatcatacatggacaattgaggtggcttgtatgatggtggccatggtactgcctgtaactatgtagctaaaggagaggtgaaagtcgcctagag

SEQ ID NO: 71562 - DNA, 4982 bp, Zea Mays
gacgatatatacccaccctccactgaaatatccattcatttccatacactactaccattctcccaggcaaggcgaggcagggagctttccaggctccgtcgtcccgatgactgcgcagctataacctcgggggcgcggcagcatgcgtcttaacgaaggataaagacctgctaagatggccatggccatggccaggttcctctcgtggttgttcacatgcttcgcagctctcgccgtcctggaggccacggtccctgctcgttcatggcgcgctccgagtcccaccccgaggcacgaagcgaggaggttcgagcagaagacggacaggttctgggagtaccaggagcagagcaatacctgggtacaagtacgcgcgccgttcgacctcatgtcctgcatcaacggcacctgcacaaaggtaggatcgatcgggcggctggcgagggagcctggacgacacggccttcctcccgtccagagccaggaggaggaggaggaagacacgcggcgggttcagggagatggtgcagaagaagaccctgtcctgcctgtaaggaggagaatttccttgacaagaatgtcagagtcgtcagtctgggtgacagggcagagcggctccatctacgagaggttctggaacggggtggtgtgggtgattgctcctcatgagctccctgcctcggctgggtatgccaccgcaactttcattgtcaatacaactatccttgctctgtctgaagctggaaccctctaccagttgcagctaaatgagcatgcccagcctatctggacagagatggcattcaactcaagccagcagtcagcgaatcttggattaaaaacacaaagtcaagctatgcgtataagaaatgggattgtatccaatgatggaaggaaacttttcctgtctatcatgaatggatccctgcttgaggtaacagaaattcagcctctaaggtggaattaccatgggcgtcctccaggtgcagacgtgtcgtatatatctgatgctggaaatctgcggccagggaccctgttcacagtaagttccactggagacctctatgagtttgacaaagaaacaaagccatcatggaaaaagcatatatggagtgaagaactggcgaaaaatatctcattaaaatcatcggctggctttgctttgcatggtttgtcagggtctaactcagtgtctcttttcctgataagcaaggtatgttagaattttttttttatcataatggatccaagataataaagatgtgttacgtttgagagctcacccacaacataatctgctttaaaatgaaaattttctaagccatgctaactcttatattataaattccaggtggactgtttatgaagctaatgtactaaaaatttaaaaaatatctgcatatgtttagttggatatttaataacagaacatttacagtatggtgccacttcagtatgaacattactctcaacaacgaaattgaacattgatcatgattttaagcttcataaactaattatagataagcaaaaggaagaataaaacaacagaaattcaggaacaatattttcctagctaatccctctttttccactgcaagaacaaattttcccgtcttttgtttgttaaaggtggttatagattggcaggatggccttttagtggagcggcgcttgcatagaaggaagtggaagtgggacaaacatggagctcctacgggtcagagacttagttcaattgcagaagttcagaaggatgaacttaatgatgcgacttcaatgtttttaacgacaaccacaggaaaagtatatgagtatcagtttccaaaatatacaggtggggcccagagcaataagataagaggacaatggataaatcacatgtcccctgagcatgcaaaggttgcaagaaacgtcccaggtgtacatgttcaagtcggcagaatggtattcccactagatgatggtaggcttggggaactacattttcctgggatggggggtactgattttggtccgagtgcccaaagtaccataagaagaaaactatcaaacaagtacgagtggtccatcctagacgcaccagaaacagaaggttggaatgcagaatattgcaccgaagagcacggtccgacaaattgtattagtggagcaaagaatatagctgcagacacagaatcaaatgacttgagcaataacccaccttccaggaggcgtaaagtagaagagaagcagcactacctaaatgttaacagataccagcagagtgatgaaactgaatcatacaactttctatcaaggaccattgatcttaacttccacatgcgggtgatgcatgcagacagatcgcttttccttatagcagacaatggattgacttttgaatatctaaacagcaatggtgtttggttgtggttaagacatgaacatgttacagccatgaaaggaacactaggaagctacaatggcagtttgtatcttgtcgacgtgcatgggaacttacacattagagaaagaaatggagatgaactgttgtggattaactgcacagcgatgaagaagggaagacaggttgcaagtgggtctccatgggatggcatccctggtttattgcgcagagtgacaacagatgatgcactcttctttgtcaacaagcgaggcaggctgctacagttcacggttgcgctgcggaaattcaagtggaaggactgccacagtcctcctgacaccaagattgctttcatagtggaccaggaggtcttcagaagaaacatcatcttcgtgggacggccatgcggccatcgccgctgtccctggccggctccctgttcatggtgtccgagcacggggggctggtggagtaccacttcagcccacaggacgggtgggagtgggtagagcacgggacgccccaccggggcgtgaccctcgtcggcgcccctggcccgtgcttcgacggctcccagctgttcgtggtcggctccgacgggcacgtgtaccggcggcacatggaggggaggacgtggaggtggacgagccacgggcacccgccgtcggagccggccgccgttgacgaacagagctgcgccacaccggacacgggcgccggcgcgcactacgccgacgggttcagggggagctgcgacgggaaggtggcagccgtgcggccggtgccgttctcggaggacgccgtggtcttcgagctgcgagatggccgggtaagcaccgatagaaagcaacctcacgcaagctgctcctgatccgcctaatgagggcagagggcttacaattgcgccacgttgcatttcatgaatcggcttgtataattcctgttgtctggtttggtttcctggcgtgcagctggcggagctgcggcggccgccctccgcggacgggtgcggcgggtgggagtgggcgcggattatcggcacgccggccagcgcctgtatgaccagctactggacggccgtcgccacgtagccgccgccgggcgcgactcacggagctggcagtccgctggtcgcttggctgattgaggtctccttggaagttggaaatgatccacaacaacagcggtcacgtccatgtttcctcgaaagacggccacgtccacatgggtctaggccgtatgatggccagatttgggcgcccaaagaaaggcagaaaggaactctctcgaaaaaaaaaacggctaaccgttacattacatttgattgtctgtttggtaatgcatttttagaatactatagttttaaagcatatagtactatagtttacaattgtatataacataagtattacaatattattttaccacagtaaaattatagtatttcttaaaattgagatttgtttagttttattgaaaactaaagtatgtatagagagaacaaaagaaatatgtccaaaaataccatacttttaggtagaccatagtatttaaaattgtgttttaactgtaccaactaaacatattttggcttctaataccatagtaatacaatatcatcaaataccgcaatattgcttcaaaaccgcaaaaaaaaactaagcttccaaacagagcctaagtggtgtttggttctccttactaaagttaagtcataagactaattacatagatgaagactaaacgatgatacaaatttattaagcctagttaattcatcattagcaaatgtttaatataatattgcatggacgaaacatggactaattaacgcttaataggtttttcttgtcgtttagtcctgtattgtaattagactatatttaatacttctaactagcatttagacatgtcatacggtagggactaatttaatacttctaactagcttctatatatatttggtcttgttgcttatataagcatcagtgggagtaagtatggtttagttattattgatcaagagaaataaggtttggaagttaatatcacgtcccaaccaaaatattgtaggaaccaagtgggtctttcgcaataagcaagacgaacatgttgtggtgacaaggaacaaaggtcgacttgcggctaaggggtagtcacaagtcgaaggtttggatttcgatgaaacccttgcacccatagctaggttttgagtcaattcgtatattattggtctatgctacttaccatgatttcaagctttattaaatggacgtgaaaaatacattctcagtagaccaatcaaggaagagatatatgttgagcaatctcccgactttgagaatgttgactgggagatggcctaagagaggagtaccaagtctgagcaacactcctgaccgccattgacgaaggacttggccatgacagctgtattgccatcataagacgatatggttgcttcgtagctcataagaaactacttagggtcagagtgaccatcatacatggacaattgaggtggcttgtatgatggtggccatggtactgcctgtaactatgtagctaaaggagaggtgaaagtcgcctagag

SEQ ID NO: 71563 - DNA, 3294 bp, Zea Mays
aagagcgtgggtgggcgcgggcgcacgagccacttcacttgtgctctctgttcggaaagaagcccggccgggtcggaaggggagcagttctcgccttctcggggaggtcgccagcgttcgttttcatttgttgacgtgcagggttgggcagaggctttgcagcttttgggtcagacgcagtgttctccaaggctcactaaatggagtctcacaatggcgaggctgatgatttgcctccaccaccccctttggctgctggtgttgaaccacttaaagccgatgaaacaaagatgccattgaaacctaggagtctggtccagaggaatggctttggcagaaaggggcagcagataaagctgataacaaaccacttcaaagtttctctcatgaaggctgaagattttttctatcattactatgtcaatttgaagtatgaagatgatacaccggttgatcggaaagggtcgggaagaaaagtgatcgaaaaactgcagcaaacttatgctgctgaacttgcaaataaagattttgcatatgatggtgagaagagcctgtttacaattggtgcccttcctcaagttaaaatggaattcactgttgtggatgaagacgtttcaactggaaagactcctgcaaatggcagtccaggcaatgatagtcctcctggaagtgacaggaaaagggtccgaaggccttacaatacaaagacatataaggttgaactatcttttgcggcaaaaatccctatgagtgcaatctcacaggctttgaggggtcaggagtcagagcacactcaggaagcaattcgagtgattgacattattctgaggcagcactcagctaagcagggttgcctattagtaaggcaatcgttcttccacaataatccttccaattttgttgacctgggtggtggtgtagtgggatgtagagggttccattctagttttcgtgcaacccagagtggactttcactcaatatcgatgtgtccaccacaatgatagtgaaacctggtcctgtcattgactttctgattgccaatcagaaagttaatgatccaagcatgattgattgggcaaaggccaagcgctcactgaagaacttaaggataaaaacaagtccggcgaaccaagaacagaagattgttggtctcagcgacaggccttgccgtgagcaattattcacactgaaacataaaaatggtgaatctgaagagatcactgtttttgattactttgtaaagaaccgtggcataaagctggaatattctggtgatcttccttgtatcaatgtgggaaaaccaaagcgtccaacttattttccagttgagttatgcagtcttcttcctttgcaacggtacactaaagcattgagcacacttcaaagatcatcactcgttgagaaatctaggcagaaaccacaagaaaggatgtctgttttgtctgatgtgctgcaaagaagcaactatgatgcagaacccatgctgaaggcttgtgggattacaattgctagaaatttcatagaagttgatggtagggtactgcagccccctaagcttaaagctgggaacggagaagacatttttacgcgcaatggcagatggaatttcaataataagaagctcattagagctagcagtgtcgagaaatgggcagtagtaaacttttctgcacgatgcaatgtccgggatcttgtccgtgatctcatcaagtgtggaggcatgaagggcattatggttgatgcaccatttgctgtatttgatgagaatccttcaatgagacggtcacctgctgtaagaagggttgaagacatgtttgaacaagtgaaaactaagcttcctggagcacccaagtttcttttgtgtgttctagcggaaagaaagaattccgatatttatgggccttggaagaagaaatgccttgctgaatttgggatcgttacacagtgtgtggcaccaactagagtcaatgatcagtatcttacaaatgtcttgttaaagattaacgcaaagttgggtggcttgaattcgttgctccaaattgaaacatccccagcaattcctctcgtatccaaggtcccaactataatcttgggtatggacgtatcacacggatctcctggacattctgatataccgtctgttgctgctgttgttagttctcgtgaatggcctcttatctcaaaatacagagcatctgtccgcacccaatcaccaaaaatggaaatgattgactcgttgtttaagccacgggaaactgatgacgatggtctgattcgggagtgtctgattgacttctacaccagttcagggaagagaaagcccgaccaagtcatcatcttcagggacggtgttagtgaaagtcagtttaatcaggtgctgaacattgagttgcaacaaatcattgaggcttgcaaatttcttgatgagaaatggaatcccaagttcacattgatcattgcccagaagaatcaccacactaaatttttcattcctggaaagccagataatgttccagctggcactgttgttgacaacaaagtctgtcatccaaggaacttcgatttctacatgtgttcacatgctggaatgattggaactaccaggccaactcactatcacatcctgcatgacgagataggcttcaatcctgatgacctgcaggagctggtgcactcgctctcttatgtgtaccaaaggagcacaacagccatatcagttgttgctcccatctgctacgcccaccttgcagccgcccaggttgggcagttcataaagttcgacgagatgtcggagacttcatctagccatggggggcatacctcggcgggcagcgtccctgtacaggagctgccccgtctgcatgagaaagtgaggagctccatgttcttctgctgagcagcagggaatgtgtcccttggttttacctttttgggtgtatggtcgggggttctgaacccatgaacttgttgcctcacttggttccagcctcaggaagaactttgtaggatgctgaatggtaggatttttaagcatcgttgcagttgtgctgggtggcacgctgcaaccattttggctagcttgttgcagcacttggtgccttcctgagaggaagtagacttggaacctggtagcacgtccttaaaccatccttttaagcgttgctggttcggcctctgagctgtgtttgtcgtgctttgttggctgtgcttgtgggtgatttttgttttattgcaagggtagcgtgcaatgccttttccgttagactacttgcgctctggttgtgcgtgcaagg

SEQ ID NO: 71564 - DNA, 2699 bp, Zea Mays
gagccacttcacttgtgctctctgttcggaaagaagcccggccgggtcggaaggggagcagttctcgccttctcggggaggtcgccagcgggttgggcagaggctttgcagcttttgggtcagacgcagtgttctccaaggctcactaaatggagtctcacaatggcgaggctgatgatttgcctccaccaccccctttggctgctggtgttgaaccacttaaagccgatgaaacaaagatgccattgaaacctaggagtctggtccagaggaatggctttggcagaaaggggcagcagataaagctgataacaaaccacttcaaagtttctctcatgaaggctgaagattttttctatcattactatgtcaatttgaagtatgaagatgatacaccggttgatcggaaagggtcgggaagaaaagtgatcgaaaaactgcagcaaacttatgctgctgaacttgcaaataaagattttgcatatgatggtgagaagagcctgtttacaattggtgcccttcctcaagttaaaatggaattcactgttgtggatgaagacgtttcaactggaaagactcctgcaaatggcagtccaggcaatgatagtcctcctggaagtgacaggaaaagggtccgaaggccttacaatacaaagacatataaggttgaactatcttttgcggcaaaaatccctatgagtgcaatctcacaggctttgaggggtcaggagtcagagcacactcaggaagcaattcgagtgattgacattattctgaggcagcactcagctaagcagggttgcctattagtaaggcaatcgttcttccacaataatccttccaattttgttgacctgggtggtggtgtagtgggatgtagagggttccattctagttttcgtgcaacccagagtggactttcactcaatatcgatgtgtccaccacaatgatagtgaaacctggtcctgtcattgactttctgattgccaatcagaaagttaatgatccaagcatgattgattgggcaaaggccaagcgctcactgaagaacttaaggataaaaacaagtccggcgaaccaagaacagaagattgttggtctcagcgacaggccttgccgtgagcaattattcacactgaaacataaaaatggtgaatctgaagagatcactgtttttgattactttgtaaagaaccgtggcataaagctggaatattctggtgatcttccttgtatcaatgtgggaaaaccaaagcgtccaacttattttccagttgagttatgcagtcttcttcctttgcaacggtacactaaagcattgagcacacttcaaagatcatcactcgttgagaaatctaggcagaaaccacaagaaaggatgtctgttttgtctgatgtgctgcaaagaagcaactatgatgcagaacccatgctgaaggcttgtgggattacaattgctagaaatttcatagaagttgatggtagggtactgcagccccctaagcttaaagctgggaacggagaagacattctgatataccgtctgttgctgctgttgttagttctcgtgaatggcctcttatctcaaaatacagagcatctgtccgcacccaatcaccaaaaatggaaatgattgactcgttgtttaagccacgggaaactgatgacgatggtctgattcgggagtgtctgattgacttctacaccagttcagggaagagaaagcccgaccaagtcatcatcttcagggacggtgttagtgaaagtcagtttaatcaggtgctgaacattgagttgcaacaaatcattgaggcttgcaaatttcttgatgagaaatggaatcccaagttcacattgatcattgcccagaagaatcaccacactaaatttttcattcctggaaagccagataatgttccagctggcactgttgttgacaacaaagtctgtcatccaaggaacttcgatttctacatgtgttcacatgctggaatgattggaactaccaggccaactcactatcacatcctgcatgacgagataggcttcaatcctgatgacctgcaggagctggtgcactcgctctcttatgtgtaccaaaggagcacaacagccatatcagttgttgctcccatctgctacgcccaccttgcagccgcccaggttgggcagttcataaagttcgacgagatgtcggagacttcatctagccatggggggcatacctcggcgggcagcgtccctgtacaggagctgccccgtctgcatgagaaagtgaggagctccatgttcttctgctgagcagcagggaatgtgtcccttggttttacctttttgggtgtatggtcgggggttctgaacccatgaacttgttgcctcacttggttccagcctcaggaagaactttgtaggatgctgaatggtaggatttttaagcatcgttgcagttgtgctgggtggcacgctgcaaccattttggctagcttgttgcagcacttggtgccttcctgagaggaagtagacttggaacctggtagcacgtccttaaaccatccttttaagcgttgctggttcggcctctgagctgtgtttgtcgtgctttgttggctgtgcttgtgggtgatttttgttttattgcaagggtagcgtgcaatgccttttccgttagactacttgcgctctggttgtgcgtgcaagg

SEQ ID NO: 71565 - DNA, 3297 bp, Zea Mays
ggaaaaaccctcgtcccctccccccctcctctcacccggtccctgctggtcgaaatctagggttttggcggggtttggatcgcctgttctttgaccggaggttgttcgtgccggtgccgcgcggacttaaggagggtttctgcgggttgggcagaggctttgcagcttttgggtcagacgcagtgttctccaaggctcactaaatggagtctcacaatggcgaggctgatgatttgcctccaccaccccctttggctgctggtgttgaaccacttaaagccgatgaaacaaagatgccattgaaacctaggagtctggtccagaggaatggctttggcagaaaggggcagcagataaagctgataacaaaccacttcaaagtttctctcatgaaggctgaagattttttctatcattactatgtcaatttgaagtatgaagatgatacaccggttgatcggaaagggtcgggaagaaaagtgatcgaaaaactgcagcaaacttatgctgctgaacttgcaaataaagattttgcatatgatggtgagaagagcctgtttacaattggtgcccttcctcaagttaaaatggaattcactgttgtggatgaagacgtttcaactggaaagactcctgcaaatggcagtccaggcaatgatagtcctcctggaagtgacaggaaaagggtccgaaggccttacaatacaaagacatataaggttgaactatcttttgcggcaaaaatccctatgagtgcaatctcacaggctttgaggggtcaggagtcagagcacactcaggaagcaattcgagtgattgacattattctgaggcagcactcagctaagcagggttgcctattagtaaggcaatcgttcttccacaataatccttccaattttgttgacctgggtggtggtgtagtgggatgtagagggttccattctagttttcgtgcaacccagagtggactttcactcaatatcgatgtgtccaccacaatgatagtgaaacctggtcctgtcattgactttctgattgccaatcagaaagttaatgatccaagcatgattgattgggcaaaggccaagcgctcactgaagaacttaaggataaaaacaagtccggcgaaccaagaacagaagattgttggtctcagcgacaggccttgccgtgagcaattattcacactgaaacataaaaatggtgaatctgaagagatcactgtttttgattactttgtaaagaaccgtggcataaagctggaatattctggtgatcttccttgtatcaatgtgggaaaaccaaagcgtccaacttattttccagttgagttatgcagtcttcttcctttgcaacggtacactaaagcattgagcacacttcaaagatcatcactcgttgagaaatctaggcagaaaccacaagaaaggatgtctgttttgtctgatgtgctgcaaagaagcaactatgatgcagaacccatgctgaaggcttgtgggattacaattgctagaaatttcatagaagttgatggtagggtactgcagccccctaagcttaaagctgggaacggagaagacatttttacgcgcaatggcagatggaatttcaataataagaagctcattagagctagcagtgtcgagaaatgggcagtagtaaacttttctgcacgatgcaatgtccgggatcttgtccgtgatctcatcaagtgtggaggcatgaagggcattatggttgatgcaccatttgctgtatttgatgagaatccttcaatgagacggtcacctgctgtaagaagggttgaagacatgtttgaacaagtgaaaactaagcttcctggagcacccaagtttcttttgtgtgttctagcggaaagaaagaattccgatatttatgggccttggaagaagaaatgccttgctgaatttgggatcgttacacagtgtgtggcaccaactagagtcaatgatcagtatcttacaaatgtcttgttaaagattaacgcaaagttgggtggcttgaattcgttgctccaaattgaaacatccccagcaattcctctcgtatccaaggtcccaactataatcttgggtatggacgtatcacacggatctcctggacattctgatataccgtctgttgctgctgttgttagttctcgtgaatggcctcttatctcaaaatacagagcatctgtccgcacccaatcaccaaaaatggaaatgattgactcgttgtttaagccacgggaaactgatgacgatggtctgattcgggagtgtctgattgacttctacaccagttcagggaagagaaagcccgaccaagtcatcatcttcagggacggtgttagtgaaagtcagtttaatcaggtgctgaacattgagttgcaacaaatcattgaggcttgcaaatttcttgatgagaaatggaatcccaagttcacattgatcattgcccagaagaatcaccacactaaatttttcattcctggaaagccagataatgttccagctggcactgttgttgacaacaaagtctgtcatccaaggaacttcgatttctacatgtgttcacatgctggaatgattggaactaccaggccaactcactatcacatcctgcatgacgagataggcttcaatcctgatgacctgcaggagctggtgcactcgctctcttatgtgtaccaaaggagcacaacagccatatcagttgttgctcccatctgctacgcccaccttgcagccgcccaggttgggcagttcataaagttcgacgagatgtcggagacttcatctagccatggggggcatacctcggcgggcagcgtccctgtacaggagctgccccgtctgcatgagaaagtgaggagctccatgttcttctgctgagcagcagggaatgtgtcccttggttttacctttttgggtgtatggtcgggggttctgaacccatgaacttgttgcctcacttggttccagcctcaggaagaactttgtaggatgctgaatggtaggatttttaagcatcgttgcagttgtgctgggtggcacgctgcaaccattttggctagcttgttgcagcacttggtgccttcctgagaggaagtagacttggaacctggtagcacgtccttaaaccatccttttaagcgttgctggttcggcctctgagctgtgtttgtcgtgctttgttggctgtgcttgtgggtgatttttgttttattgcaagggtagcgtgcaatgccttttccgttagactacttgcgctctggttgtgcgtgcaagg

SEQ ID NO: 71566 - DNA, 3186 bp, Zea Mays
agtcctgctgcgccctcgtgtggtctgttctacggttgggcagaggctttgcagcttttgggtcagacgcagtgttctccaaggctcactaaatggagtctcacaatggcgaggctgatgatttgcctccaccaccccctttggctgctggtgttgaaccacttaaagccgatgaaacaaagatgccattgaaacctaggagtctggtccagaggaatggctttggcagaaaggggcagcagataaagctgataacaaaccacttcaaagtttctctcatgaaggctgaagattttttctatcattactatgtcaatttgaagtatgaagatgatacaccggttgatcggaaagggtcgggaagaaaagtgatcgaaaaactgcagcaaacttatgctgctgaacttgcaaataaagattttgcatatgatggtgagaagagcctgtttacaattggtgcccttcctcaagttaaaatggaattcactgttgtggatgaagacgtttcaactggaaagactcctgcaaatggcagtccaggcaatgatagtcctcctggaagtgacaggaaaagggtccgaaggccttacaatacaaagacatataaggttgaactatcttttgcggcaaaaatccctatgagtgcaatctcacaggctttgaggggtcaggagtcagagcacactcaggaagcaattcgagtgattgacattattctgaggcagcactcagctaagcagggttgcctattagtaaggcaatcgttcttccacaataatccttccaattttgttgacctgggtggtggtgtagtgggatgtagagggttccattctagttttcgtgcaacccagagtggactttcactcaatatcgatgtgtccaccacaatgatagtgaaacctggtcctgtcattgactttctgattgccaatcagaaagttaatgatccaagcatgattgattgggcaaaggccaagcgctcactgaagaacttaaggataaaaacaagtccggcgaaccaagaacagaagattgttggtctcagcgacaggccttgccgtgagcaattattcacactgaaacataaaaatggtgaatctgaagagatcactgtttttgattactttgtaaagaaccgtggcataaagctggaatattctggtgatcttccttgtatcaatgtgggaaaaccaaagcgtccaacttattttccagttgagttatgcagtcttcttcctttgcaacggtacactaaagcattgagcacacttcaaagatcatcactcgttgagaaatctaggcagaaaccacaagaaaggatgtctgttttgtctgatgtgctgcaaagaagcaactatgatgcagaacccatgctgaaggcttgtgggattacaattgctagaaatttcatagaagttgatggtagggtactgcagccccctaagcttaaagctgggaacggagaagacatttttacgcgcaatggcagatggaatttcaataataagaagctcattagagctagcagtgtcgagaaatgggcagtagtaaacttttctgcacgatgcaatgtccgggatcttgtccgtgatctcatcaagtgtggaggcatgaagggcattatggttgatgcaccatttgctgtatttgatgagaatccttcaatgagacggtcacctgctgtaagaagggttgaagacatgtttgaacaagtgaaaactaagcttcctggagcacccaagtttcttttgtgtgttctagcggaaagaaagaattccgatatttatgggccttggaagaagaaatgccttgctgaatttgggatcgttacacagtgtgtggcaccaactagagtcaatgatcagtatcttacaaatgtcttgttaaagattaacgcaaagttgggtggcttgaattcgttgctccaaattgaaacatccccagcaattcctctcgtatccaaggtcccaactataatcttgggtatggacgtatcacacggatctcctggacattctgatataccgtctgttgctgctgttgttagttctcgtgaatggcctcttatctcaaaatacagagcatctgtccgcacccaatcaccaaaaatggaaatgattgactcgttgtttaagccacgggaaactgatgacgatggtctgattcgggagtgtctgattgacttctacaccagttcagggaagagaaagcccgaccaagtcatcatcttcagggacggtgttagtgaaagtcagtttaatcaggtgctgaacattgagttgcaacaaatcattgaggcttgcaaatttcttgatgagaaatggaatcccaagttcacattgatcattgcccagaagaatcaccacactaaatttttcattcctggaaagccagataatgttccagctggcactgttgttgacaacaaagtctgtcatccaaggaacttcgatttctacatgtgttcacatgctggaatgattggaactaccaggccaactcactatcacatcctgcatgacgagataggcttcaatcctgatgacctgcaggagctggtgcactcgctctcttatgtgtaccaaaggagcacaacagccatatcagttgttgctcccatctgctacgcccaccttgcagccgcccaggttgggcagttcataaagttcgacgagatgtcggagacttcatctagccatggggggcatacctcggcgggcagcgtccctgtacaggagctgccccgtctgcatgagaaagtgaggagctccatgttcttctgctgagcagcagggaatgtgtcccttggttttacctttttgggtgtatggtcgggggttctgaacccatgaacttgttgcctcacttggttccagcctcaggaagaactttgtaggatgctgaatggtaggatttttaagcatcgttgcagttgtgctgggtggcacgctgcaaccattttggctagcttgttgcagcacttggtgccttcctgagaggaagtagacttggaacctggtagcacgtccttaaaccatccttttaagcgttgctggttcggcctctgagctgtgtttgtcgtgctttgttggctgtgcttgtgggtgatttttgttttattgcaagggtagcgtgcaatgccttttccgttagactacttgcgctctggttgtgcgtgcaagg

SEQ ID NO: 71567 - DNA, 3191 bp, Zea Mays
gtccaataaggatttcagtgcggcgttgttaatttgggggttgggcagaggctttgcagcttttgggtcagacgcagtgttctccaaggctcactaaatggagtctcacaatggcgaggctgatgatttgcctccaccaccccctttggctgctggtgttgaaccacttaaagccgatgaaacaaagatgccattgaaacctaggagtctggtccagaggaatggctttggcagaaaggggcagcagataaagctgataacaaaccacttcaaagtttctctcatgaaggctgaagattttttctatcattactatgtcaatttgaagtatgaagatgatacaccggttgatcggaaagggtcgggaagaaaagtgatcgaaaaactgcagcaaacttatgctgctgaacttgcaaataaagattttgcatatgatggtgagaagagcctgtttacaattggtgcccttcctcaagttaaaatggaattcactgttgtggatgaagacgtttcaactggaaagactcctgcaaatggcagtccaggcaatgatagtcctcctggaagtgacaggaaaagggtccgaaggccttacaatacaaagacatataaggttgaactatcttttgcggcaaaaatccctatgagtgcaatctcacaggctttgaggggtcaggagtcagagcacactcaggaagcaattcgagtgattgacattattctgaggcagcactcagctaagcagggttgcctattagtaaggcaatcgttcttccacaataatccttccaattttgttgacctgggtggtggtgtagtgggatgtagagggttccattctagttttcgtgcaacccagagtggactttcactcaatatcgatgtgtccaccacaatgatagtgaaacctggtcctgtcattgactttctgattgccaatcagaaagttaatgatccaagcatgattgattgggcaaaggccaagcgctcactgaagaacttaaggataaaaacaagtccggcgaaccaagaacagaagattgttggtctcagcgacaggccttgccgtgagcaattattcacactgaaacataaaaatggtgaatctgaagagatcactgtttttgattactttgtaaagaaccgtggcataaagctggaatattctggtgatcttccttgtatcaatgtgggaaaaccaaagcgtccaacttattttccagttgagttatgcagtcttcttcctttgcaacggtacactaaagcattgagcacacttcaaagatcatcactcgttgagaaatctaggcagaaaccacaagaaaggatgtctgttttgtctgatgtgctgcaaagaagcaactatgatgcagaacccatgctgaaggcttgtgggattacaattgctagaaatttcatagaagttgatggtagggtactgcagccccctaagcttaaagctgggaacggagaagacatttttacgcgcaatggcagatggaatttcaataataagaagctcattagagctagcagtgtcgagaaatgggcagtagtaaacttttctgcacgatgcaatgtccgggatcttgtccgtgatctcatcaagtgtggaggcatgaagggcattatggttgatgcaccatttgctgtatttgatgagaatccttcaatgagacggtcacctgctgtaagaagggttgaagacatgtttgaacaagtgaaaactaagcttcctggagcacccaagtttcttttgtgtgttctagcggaaagaaagaattccgatatttatgggccttggaagaagaaatgccttgctgaatttgggatcgttacacagtgtgtggcaccaactagagtcaatgatcagtatcttacaaatgtcttgttaaagattaacgcaaagttgggtggcttgaattcgttgctccaaattgaaacatccccagcaattcctctcgtatccaaggtcccaactataatcttgggtatggacgtatcacacggatctcctggacattctgatataccgtctgttgctgctgttgttagttctcgtgaatggcctcttatctcaaaatacagagcatctgtccgcacccaatcaccaaaaatggaaatgattgactcgttgtttaagccacgggaaactgatgacgatggtctgattcgggagtgtctgattgacttctacaccagttcagggaagagaaagcccgaccaagtcatcatcttcagggacggtgttagtgaaagtcagtttaatcaggtgctgaacattgagttgcaacaaatcattgaggcttgcaaatttcttgatgagaaatggaatcccaagttcacattgatcattgcccagaagaatcaccacactaaatttttcattcctggaaagccagataatgttccagctggcactgttgttgacaacaaagtctgtcatccaaggaacttcgatttctacatgtgttcacatgctggaatgattggaactaccaggccaactcactatcacatcctgcatgacgagataggcttcaatcctgatgacctgcaggagctggtgcactcgctctcttatgtgtaccaaaggagcacaacagccatatcagttgttgctcccatctgctacgcccaccttgcagccgcccaggttgggcagttcataaagttcgacgagatgtcggagacttcatctagccatggggggcatacctcggcgggcagcgtccctgtacaggagctgccccgtctgcatgagaaagtgaggagctccatgttcttctgctgagcagcagggaatgtgtcccttggttttacctttttgggtgtatggtcgggggttctgaacccatgaacttgttgcctcacttggttccagcctcaggaagaactttgtaggatgctgaatggtaggatttttaagcatcgttgcagttgtgctgggtggcacgctgcaaccattttggctagcttgttgcagcacttggtgccttcctgagaggaagtagacttggaacctggtagcacgtccttaaaccatccttttaagcgttgctggttcggcctctgagctgtgtttgtcgtgctttgttggctgtgcttgtgggtgatttttgttttattgcaagggtagcgtgcaatgccttttccgttagactacttgcgctctggttgtgcgtgcaagg

SEQ ID NO: 71568 - DNA, 1963 bp, Zea Mays
gtcccccttccagtgctccgggtagctccgcgccgccatcccgtcgtcaccgaccagcccgtcctcgctctgcggaaaaagagaagaacgcacatgcatgctcgttgtattagacgatggcgccgcatgcgcgtgcaacaaccgcaaagatgacacccggcgccgggctgaccgtgctttgcttcgcggcaaagtctgacgcatcaccaggcaaggccacatgcaatgcaatgcatgtttatgcaatacatgctagctagcttttttggcagtgcagatagagatagaccatcgcgtgaagatgatgcggtagttagttaaagcgtgcggcgcgcggcggcgtaccttgagccaccgcctgacagtgctccggtagccggtggcgaagacgatggcgtcgaaagggtggcggctgccgtccccgaactcgacgacgttcccgcggacgctcttgacggcggcggggagcacccggatctcgccgctcctgatcttggcgtaggtgccgacgtccacgacggggtagcccggggtggtgagcttcatggtgaagggcccgatggcggggcggcggaggccgtgccgggacgtgtcgccgaacaccacggcgcacatgagcagcaccagcttgtctatgacccacacgggcaggtacgggtacagcgtcatcgccacgttccagatctccttggtcaccaggtggagctgcatatatgcgtgattattagttactgctgatcggattgcatcgatcgttagcagtagcggctgcgcatcatgattaattgatggaaaacttggcatccattccattcctgatggaatcctatactatataacttcaaactgcattgttccccattaaagatggcaatgtgcctccatcctcaatttctggtggagaatttcttcattatagagctagtttgggaaccctattttccaacgagatttttatttttctaagaaaaattagtttattttttcttgataaaattgaaattccccaaactagccatagaatgggaatggaaaagtttcttctctacgggaacgcggcggaaattttttcccgacaggaaaattcctgttaccatcgccattccccattgtctaatggcagcctagtcaaacgtgtctctatgtagcgttgcacgttggtgacgtatgttgactgctaccgcgtgggggaacagtcacacgttctgtagcgttccaggcaagatatgtcaaggttacctaaaattatgcacgcatgtagttggaagaggaatagtcaatggctcgatgaagcggcaaagagcgatcctaaaatatatactgacttttatctaagtaaaatatgatttgcaaatcaaactagcagtgctgtgtaaactaaaccaatataataatagagatagaatgatcttttttcttaaaaaaatatccagtaaaaataaaaagattattttggaaacatggtattcccctatactatcgtgatcgtgcttggattttattcaccacacgggagtatggacataaagacgacatcgatcgagacgcaaaaatacgatttcataatactcgtatatatacacgacactcacactacgacagcataggattatatatgcaatgcaagcagcggaacataggattcgggtgcatgcatgcaccatctgtcaagcagtgccactgtcatgcatcatgcatgacgccacggtcgcaccaggtcaggtcttgttgtgctgcctggcatctactagctagcagtagacatcccatcgatgaccatctgtcgagccaggcatatggtaacgacgcagcaagagactggccggcgtaccagatcgagcagcagggagtatgttcgttacaggttactgacctcgcctcggacgacgatggaggtgacggcgccggcggcggcgaggtcgtaggcgatctccatgccggagttgcccgaccccacgacgag

SEQ ID NO: 71569 - DNA, 1738 bp, Zea Mays
ccgaaacgaaacagcagttgagcttatttactttttcgaagaaaccacaaccaaacctcggctgctcggtggtcggtgcccaggtgcgccgattatctccatcaaagccgcgcatcccgctgcccccttactcatcctccccgctgctcgaaggagagccaaatccagagcgccgccgcgatggcctcccctgacgcggaacagccggcgccgacggaactcgagcggtggcgtgacctcgacatgctcttgtcccgccctggaaacctcgtggaggccactttcgatcccagccccggcagttcaagatgttgggaagtccaaggctgaagtagcagcgaagagggttatggagcgagttaatggggtgaacatagttcctcatttttgcaggattgaagataaagagatagagttctacagtcagttccacataattgtcctaggtctggattcaattgaagctcgaagctacatcaattctgtggcttgtggtttcttagattatgactcaagtgacaatccactccaagagacggttaaacctatggtagatggtggaactgagggcttcaagggacacgctagagtcattatacctggaacaacaccttgctttgaatgcaacatatggctttttcctccacaggttaagttccctttatgtactctcgccgagacaccaagaactgcagctcactgcattgagtatgctcacttgatcaaatgggatgaggttcatcctggaaaaccttttgatggcgatgatgcagagcatatgcagtggatttattcagaggctttaaagagagcagagcttttcggtatttctggtgttacatattctttgacacagggtgttgtcaaaaatataatcccagccattgcatcaacgaatgcaattatatcggctgcttgtgcattggaagccttaaagcttatttctgggtgcagcaaaagtgtgtcaaactatctcacgtacaacggtctggaaggaacacacattaaagtaactgagtttgtcagagacaaagattgccttgtatgtgggcctggtacccttgttgagctggatacgtcatctactctttcagatttcatcaagatgcttgaagagcaccccaagttgcggatgtcgaaagccagcgtgacgcacgaaggtaacaacctgtacatgcagtcaccggaggtgctggagcagatgacacggccaaacctgagcatccccatgtttgagcttctcaaagaggtcccatacaccactgtccatgccacgggcatggcagagaacaacgggaaaaaagtgtcctcgttgaggaagctccgtgtggccttcaagggcatcgaagacgcctccaagatggatacgaccgtgagctcatgatgccggtcgtcgtcgtcttgttgctaatttcaagtctcccaggaaagatgaggattaacccaatgtttttggacaggttaagtgtagttttcgagcgccatattacaaattgaaatgtgcgcctgatactgttcaaacatgaagaaatttatcgtagatgatactatggttttgtgagaatctacttcttggtgtttcgaatcttgctcgacaagtaaattaaatttattgtgcgtattctgagttttggagcgtgtacgcggtggagaatgtaagatttatactagttcggacagaacgttcttactttcagtcattgtggcttatgctattggtattattgatggttaaaac

SEQ ID NO: 71570 - DNA, 1287 bp, Zea Mays
gaaacgaaacagcagttgagcttatttactttttcgaagaaaccacaaccaaacctcggctgctcggtggtcggtgcccaggtgcgccgattatctccatcaaagccgcgcatcccgctgcccccttactcatcctccccgctgctcgaaggagagccaaatccagagcgccgccgcgatggcctcccctgacgcggaacagccggcgccgacggaactcgagcggtggcgtgacctcgacatgctcttgtcccgccctggaaacctcgtggaggccactttcgatcccagccccggcctgcgagacctactggggagcctcgtggaggttttggttgtgggcgcgggcgggcttggctgcgagctcctcaaggacctggctctctccgggtttaagaaactgcacgtcattgatatggacaccatagacgtctccaacctcaatcgccagtttctcttcagagttcaagatgttgggaagtccaaggctgaagtagcagcgaagagggttatggagcgagttaatggggtgaacatagttcctcatttttgcaggattgaagataaagagatagagttctacagtcagttccacataattgtcctaggtctggattcaattgaagctcgaagctacatcaattctgtggcttgtggtttcttagattatgactcaagtgacaatccactccaagagacggttaaacctatggtagatggtggaactgagggcttcaagggacacgctagagtcattatacctggaacaacaccttgctttgaatgcaacatatggctttttcctccacaggttaagttccctttatgtactctcgccgagacaccaagaactgcagctcactgcattgagtatgctcacttgatcaaatgggatgaggttcatcctggaaaaccttttgatggcgatgatgcagagcatatgcagtggatttattcagaggctttaaagagagcagagcttttcggtatttctggtgttacatattctttgacacagggtgttgtcaaaaatataatcccagccattgcatcaacgaatgcaattatatcggctgcttgtgcattggaagccttaaagcttatttctgggtgcagcaaaagtgtgtcaaactatctcacgtacaacggtctggaaggaacacacattaaagtaactgagtttgtcagagacaaagattgccttgtatgtgggcctggtacccttgttgagctggatacgtcatctactctttcagataataatgcttgcccccttaaatctctctc

SEQ ID NO: 71571 - DNA, 1830 bp, Zea Mays
gaaacgaaacagcagttgagcttatttactttttcgaagaaaccacaaccaaacctcggctgctcggtggtcggtgcccaggagagccaaatccagagcgccgccgcgatggcctcccctgacgcggaacagccggcgccgacggaactcgagcggtggcgtgacctcgacatgctcttgtcccgccctggaaacctcgtggaggccactttcgatcccagccccggcctgcgagacctactggggagcctcgtggaggttttggttgtgggcgcgggcgggcttggctgcgagctcctcaaggacctggctctctccgggtttaagaaactgcacgtcattgatatggacaccatagacgtctccaacctcaatcgccagtttctcttcagagttcaagatgttgggaagtccaaggctgaagtagcagcgaagagggttatggagcgagttaatggggtgaacatagttcctcatttttgcaggattgaagataaagagatagagttctacagtcagttccacataattgtcctaggtctggattcaattgaagctcgaagctacatcaattctgtggcttgtggtttcttagattatgactcaagtgacaatccactccaagagacggttaaacctatggtagatggtggaactgagggcttcaagggacacgctagagtcattatacctggaacaacaccttgctttgaatgcaacatatggctttttcctccacaggttaagttccctttatgtactctcgccgagacaccaagaactgcagctcactgcattgagtatgctcacttgatcaaatgggatgaggttcatcctggaaaaccttttgatggcgatgatgcagagcatatgcagtggatttattcagaggctttaaagagagcagagcttttcggtatttctggtgttacatattctttgacacagggtgttgtcaaaaatataatcccagccattgcatcaacgaatgcaattatatcggctgcttgtgcattggaagccttaaagcttatttctgggtgcagcaaaagtgtgtcaaactatctcacgtacaacggtctggaaggaacacacattaaagtaactgagtttgtcagagacaaagattgccttgtatgtgggcctggtacccttgttgagctggatacgtcatctactctttcagatttcatcaagatgcttgaagagcaccccaagttgcggatgtcgaaagccagcgtgacgcacgaaggtaacaacctgtacatgcagtcaccggaggtgctggagcagatgacacggccaaacctgagcatccccatgtttgagcttctcaaagaggtcccatacaccactgtccatgccacgggcatggcagagaacaacgggaaaaaagtgtcctcgttgaggaagctccgtgtggccttcaagggcatcgaagacgcctccaagatggatacgaccgtgagctcatgatgccggtcgtcgtcgtcttgttgctaatttcaagtctcccaggaaagatgaggattaacccaatgtttttggacaggttaagtgtagttttcgagcgccatattacaaattgaaatgtgcgcctgatactgttcaaacatgaagaaatttatcgtagatgatactatggttttgtgagaatctacttcttggtgtttcgaatcttgctcgacaagtaaattaaatttattgtgcgtattctgagttttggagcgtgtacgcggtggagaatgtaagatttatactagttcggacagaacgttcttactttcagtcattgtggcttatgctattggtattattgatggttaaaac

SEQ ID NO: 71572 - DNA, 1708 bp, Zea Mays
gaaacgaaacagcagttgagcttatttactttttcgaagaaaccacaaccaaacctcggctgctcggtggtcggtgcccaggtgcgccgattatctccatcaaagccgcgcatcccgctgcccccttactcatcctccccgctgctcgaaggagagccaaatccagagcgccgccgcgatggcctcccctgacgcggaacagccggcgccgacggaactcgagcggtggcgtgacctcgacatgctcttgtcccgccctggaaacctcgtggaggccactttcgatcccagccccggcctgcgagacctactggggagcctcgtggaggttttggttgtgggcgcgggcgggcttggctgcgagctcctcaaggacctggctctctccgggtttaagaaactgcacgtcattgatatggacaccatagacgtctccaacctcaatcgccagtttctcttcaggattgaagataaagagatagagttctacagtcagttccacataattgtcctaggtctggattcaattgaagctcgaagctacatcaattctgtggcttgtggtttcttagattatgactcaagtgacaatccactccaagagacggttaaacctatggttaagttccctttatgtactctcgccgagacaccaagaactgcagctcactgcattgagtatgctcacttgatcaaatgggatgaggttcatcctggaaaaccttttgatggcgatgatgcagagcatatgcagtggatttattcagaggctttaaagagagcagagcttttcggtatttctggtgttacatattctttgacacagggtgttgtcaaaaatataatcccagccattgcatcaacgaatgcaattatatcggctgcttgtgcattggaagccttaaagcttatttctgggtgcagcaaaagtgtgtcaaactatctcacgtacaacggtctggaaggaacacacattaaagtaactgagtttgtcagagacaaagattgccttgtatgtgggcctggtacccttgttgagctggatacgtcatctactctttcagatttcatcaagatgcttgaagagcaccccaagttgcggatgtcgaaagccagcgtgacgcacgaaggtaacaacctgtacatgcagtcaccggaggtgctggagcagatgacacggccaaacctgagcatccccatgtttgagcttctcaaagaggtcccatacaccactgtccatgccacgggcatggcagagaacaacgggaaaaaagtgtcctcgttgaggaagctccgtgtggccttcaagggcatcgaagacgcctccaagatggatacgaccgtgagctcatgatgccggtcgtcgtcgtcttgttgctaatttcaagtctcccaggaaagatgaggattaacccaatgtttttggacaggttaagtgtagttttcgagcgccatattacaaattgaaatgtgcgcctgatactgttcaaacatgaagaaatttatcgtagatgatactatggttttgtgagaatctacttcttggtgtttcgaatcttgctcgacaagtaaattaaatttattgtgcgtattctgagttttggagcgtgtacgcggtggagaatgtaagatttatactagttcggacagaacgttcttactttcagtcattgtggcttatgctattggtattattgatggttaaaac

SEQ ID NO: 71573 - DNA, 1486 bp, Zea Mays
ttccgccgcacttgcgagccattttctttgaaggataccacgtcatttggtcttggaatggctctgtactgccattttcctcagtagccggctagccgcttccctccagtcccaagtcccaacccgaactcgcacgccaagaattctagaatctctctttaagagggatacagagtaggaaagagacagagggggcaaagagcgatggacgccgcggtgcggaaggccgcgggcgccggcatcgcgcgcgcgccggcgctggtgctagcgctggtggcggcgggggcgttcctgatctcctacaacttcttcaccatgctgttccacggcggcggcggaataggcgcggcggtgaccgctgggacgagggaccctgtggtggccatgccagcgtggatgcgcgcggcggcggacaccgaggcgcgacggcggccgttccatgtggcgctcacggccacggacgcgccctacagccggtggcagtgccgggtcatgtacttctggtacaagcggatgcaggcgcggccgggcggagaggccatgggcgggttcacgcgcgtgctgcactcggggaagcccgacgggctcatggacgagatccccaccttcgtcgtcgacccgctgcccgctggcaaggaccacggatatgtggtcctaaataggccgtgggcatttgtgcagtggcttcagaaagcaaagattgaagaagagtatatactaatggcagaaccagaccatatatttgtgaaacctctaccaaatttggcccatgacgatgacccagcagcatttcccttcttttacattacaccatcagaacatgaaaaaattatcaggaaatactatgctaaagaaagaggtcctgtcacagatatcgatccgattgggaattctcctgtgatcattaagaagacaattcttgagaagattgcccccacatggatgaatgtgtcaattcaaatgaaagaggatgaagagacagataaagtttttggatgggtgttggaaatgtatgcatacgctgttgctagcgcattgcatggagttcatcatatccttcgtaaagatttcatgatccagccaccttttgatacaaagctccagaatacatttataatccacttcacttatggatgtgactactcactaaagggtgaactgacctatggtaaagttggtgaatggcgatttgacaaaagatcattcccagataggccaccaccaagaaatcttacattgccccctcctggagtaccagaaagtgtggttactctagtgaaaatggtcaatgaagctagtgcaaaccttcctcggtgcaagggtgaaaagaggaggttctactggggtgatctgaagatggccatatgttccgacttccgagttgttggcgaagacagacccatcaatgatttatcgtggagtgcactaaaatttaacacgcctttaagagccttgcagtgtgtgccgcgttggacagaagtatagt

SEQ ID NO: 71574 - DNA, 1423 bp, Zea Mays
tcagtagccggctagccgcttccctccagtcccaagtcccaacccgaactcgcacgccaagaattctagaatctctctttaagagggatacagagtaggaaagagacagagggggcaaagagcgatggacgccgcggtgcggaaggccgcgggcgccggcatcgcgcgcgcgccggcgctggtgctagcgctggtggcggcgggggcgttcctgatctcctacaacttcttcaccatgctgttccacggcggcggcggaataggcgcggcggtgaccgctgggacgagggaccctgtggtggccatgccagcgtggatgcgcgcggcggcggacaccgaggcgcgacggcggccgttccatgtggcgctcacggccacggacgcgccctacagccggtggcagtgccgggtcatgtacttctggtacaagcggatgcaggcgcggccgggcggagaggccatgggcgggttcacgcgcgtgctgcactcggggaagcccgacgggctcatggacgagatccccaccttcgtcgtcgacccgctgcccgctggcaaggaccacggatatgtggtcctaaataggccgtgggcatttgtgcagtggcttcagaaagcaaagattgaagaagagtatatactaatggcagaaccagaccatatatttgtgaaacctctaccaaatttggcccatgacgatgacccagcagcatttcccttcttttacattacaccatcagaacatgaaaaaattatcaggaaatactatgctaaagaaagaggtcctgtcacagatatcgatccgattgggaattctcctgtgatcattaagaagacaattcttgagaagattgcccccacatggatgaatgtgtcaattcaaatgaaagaggatgaagagacagataaagtttttggatgggtgttggaaatccttctttgacctttaggtatgcatacgctgttgctagcgcattgcatggagttcatcatatccttcgtaaagatttcatgatccagccaccttttgatacaaagctccagaatacatttataatccacttcacttatggatgtgactactcactaaagggtgaactgacctatggtaaagttggtgaatggcgatttgacaaaagatcattcccagataggccaccaccaagaaatcttacattgccccctcctggagtaccagaaagtgtggttactctagtgaaaatggtcaatgaagctagtgcaaaccttcctcggtgcaagggtgaaaagaggaggttctactggggtgatctgaagatggccatatgttccgacttccgagttgttggcgaagacagacccatcaatgatttatcgtggagtgcactaaaatttaacacgcctttaagagccttgcagtgtgtgccgcgttggacagaagtatagt

SEQ ID NO: 71575 - DNA, 1287 bp, Zea Mays
agccgcttccctccagtcccaagtcccaacccgaactcgcacgccaagaattctagaatctctctttaagagggatacagagtaggaaagagacagagggggcaaagagcgatggacgccgcggtgcggaaggccgcgggcgccggcatcgcgcgcgcgccggcgctggtgctagcgctggtggcggcgggggcgttcctgatctcctacaacttcttcaccatgctgttccacggcggcggcggaataggcgcggcggtgaccgctgggacgagggaccctgtggtggccatgccagcgtggatgcgcgcggcggcggacaccgaggcgcgacggcggccgttccatgtggcgctcacggccacggacgcgccctacagccggtggcagtgccgggtcatgtacttctggtacaagcggatgcaggcgcggccgggcggagaggccatgggcgggttcacgcgcgtgctgcactcggggaagcccgacgggctcatggacgagatccccaccttcgtcgtcgacccgctgcccgctggcaaggaccacggatatgtggtcctaaataggccgtgggcatttgtgcagtggcttcagaaagcaaagattgaagaagagtatatactaatggcagaaccagaccatatatttgtgaaacctctaccaaatttggcccatgacgatgacccagcagcatttcccttcttttacattacaccatcagaacatgaaaaaattatcaggaaatactatgctaaagaaagaggtcctgtcacagatatcgatccgattgggaattctcctgtgatcattaagaagccaccttttgatacaaagctccagaatacatttataatccacttcacttatggatgtgactactcactaaagggtgaactgacctatggtaaagttggtgaatggcgatttgacaaaagatcattcccagataggccaccaccaagaaatcttacattgccccctcctggagtaccagaaagtgtggttactctagtgaaaatggtcaatgaagctagtgcaaaccttcctcggtgggatgatggaatataaactttggatgatgtcaattatatcttaggttcctttgatctgcccttgtatatggggaatatcaaagtatcaggtgcagtcggttgtttggtttacatccaaaatagctgcttgcacttgcacaccatacctgatagaagaagatacataattttctcattgtactttttaggaaaagaaaagaaatgaaagtaaagttagcatcgatttatcttt
